United States Patent Application Publication US 2005/0208558 A1 - sequence listing, part 10

SEQ ID NO: 9100 - DNA, 3887 bp, DROSOPHILA
gcagtatgtaatcctataaacgattgatatggagttcaatacctttatatgttcgttccttttagaaaactgagtgctgctgcttatccaccgcctgccaaggtgaaggcaggagctgctcccgctgctggagctgacgaagatgcaccccatcgcctggatatccgcgtgggcaaggtcgtcgaggtggcccgtcatccagatgccgatactctatatgtgctgaagatagacttggctgaggcgcaacccagaacgattattagtggcctggtgaagtttgtcaccgaggaggagctgaaccagcgattggtggcggttctttgcaacctgaagccgtccaagatgcgcggcatcttgtccgagggcatggttctgtgcacctccaagtgagtttcaatggaaagcattccccaaacatttaattcaattcttcgatctcctccagcgctgaccacacggtggtggagcctattgtgctgccagccactgctactgctggcagtcgcctctccttcgagggattcagtggcacgcccgatgagcagcttaatcccaagaagaaggtgtgggagaaactctccgccgacttcaagacgaacagcgatggactggccgtgtggaaggacaacttcctgctgacgcccgagggcgaaaagctttccagcaagctggccaactgctccattaaataaaactttcaacgccaacctacctgagccgtgtaatacttacaactaagccgaatgttcacaaaacagaaattgctgctaatttattgattcctcttcgtaaagaaaatgcattttttaataaagcgctcaaaaataagtatttacgatttactgccttttctgcattcataatattatgaaattcaaagaaaacaattaagaaaacaatgaaaaatatccaatttaaaattttcaatcagaaaaattcaaataagacaccttgctgttatgccactgttaagccatatgcgagttaacagttctagtttcgatcagctgtttggggtaaacaaaaaaccggcataggaattttatttctaaaatacataaatatgttaaagataaatccgcgaatgctgatgcaacagtgcctgcgccacgcccacagccaggtgcgcgtccgcttcgccccaagtcccacgggttacctgcatttgggcggtctgcgcacagccctgtacaatttcctgtacgccaggcatttgggcggaaaattcctgttgcggatcgaggacacggatcaaactcgactagtgcccggtgccagtgaacgactggtggaggatctgctctgggcaggcatagaaattgacgagggacccggttttggcggtcaactgggaccctatgtgcagagtcagcgaacggaaatttacaggtgattaatgaatacatcaggcaagaagattcgattacacagacgccttctaattctcagcaaagccattgaagaactgctccataatggcaccgcgtacagatgcttttgcaccgaacgccgtctggatttgttgcgtaaggaggcgctgagaacccggcaagttccacgctatgataacaagtgccgacatctaacgacttcggaagtggattccctactggccaagggtacaccctactgcatacgattcaagctgacggatcacgaggagccactggatgatctcatctacggcaaggtgcatcacaatgtcagcgacaacgaaggcgatccagtggtcatgaagagcgatcaatttcccacctatcactttgccaacgtggtggacgaccatttgatgggcatcacccacgtcctgaggggcgtggagtggcagatatccaccaccaagcatttgctgctctacaagtgggtttcattgatgttttttctctatgattctgtccatttagagatatatatgtctcttctcagagcttttggctggcagccccctaaatttggtcacctgccgcttttggtgaatgcagatggcaccaagctaagcaaacgtcaaggagacattggcattcagcactttcgggaacgcggctactttccgcaggctttagtgaactatgtggtttctgcaggcggaggattcgagcatcgtaccaatgccaagcagcagctgctcagcatgcaggcgctccatgagcagtttcacatagagcgcgtcaactcccatccgagtcgccttaatcccgaactgctcgatgatctaaatcgcctggagattgtgcagcgtttgtctgggaatgagagtcgtacgaaattggtcaatgaagtgcaacagctggtgaaagaagcctatccgcaacagtaagcccaaacattgaatgcaccataaacatatctaactaatctcccgttctattttagctccaacttagatctagccgaggagcacatattggatgtgctgaattggtcatcaaagcgcttaacactgctccaagatttgaccagcagcaaactgagtttcctgtgggtgaaacccagcgattttcaaattaaagacctgaccgcagagcaactagctcacttgctgcagttaatcaacgctatccaggactttcacaaggatgaactcaacgttaagcttaaatcctttgctcaaaaagaaaacatcaaattcccactaatgatgaaaacactaagagcagccctaagtggcctaaaagaaggtcctggcgtagcggaaatgatggagatcctaggcaaatccgtcactctcgaacgactcaaagaagctctgcccaaggaaagtctgcatttagaagaacatcagtgatttggttaagttctgttgtatttgtatgtatatataatagattaatttatatattgataacttttgcaatttgagaataagatcaatgagtagacaccacatgtagagtcaaaattgtgtatggttaatctgcatcagtttcggatactatttcctctccgcgttccgttttggcattctcgttttgctcgtttaagcaccattcctagacgttaatatactaaaatcgcttagctaaagtcgcgattggtaagaacaatgggcgctgcaaggctccagccatagatgaagacacccagccaactggagacgatcttgacccacatggaagcctcgttgccgttgaacagctcgatttccgaatgaggtctgtgggaataaaaaattgctgggattatattttcctagcacgataagtgctgttgctactcacttgtaccagttggtcagggtcatcatgacatagagcgaggcgcagacgaagaccaagtggaacatggaccaggagtaggtgacgccttcggtctcggtgtcggtgctcggctttccgctgccatccgtgcccgcctctgtgtctgatagagcttctgttaaaactacattaatcagagtgcaagaggaacgccagttggccatatttttcacacagtttcgagtaccaaataaccaagtggggattagttgggttagtcggaaaagaaaataaagaataaacaaagcggcaatagcaaacgagtgttaataaccagtattagcttgggtttttcttttttgtacagcgaggaaaatgaaaagtgagggcaaagcgatcgaatgaatgcgtgatgcaaactgtggaaatgtggtaatcgctgggaatgcgaacggagcacggcgaatggaaacagaacacttaccacgcttctcgctattatcgtgcgagatcttggatacctccaccgccgagctaatgcaattgtacaggatgcacagcaaccagacgaccagtccgatgatgttggtcgtatcgaaggtgaccctggtggtgtgggtgggcggtgctgccgtggtggttgcattgccgaatccctccatcatgccaaacatgcctggattgcat

SEQ ID NO: 9101 - DNA, 1701 bp, DROSOPHILA
tttcgatcagctgtttggggtaaacaaaaaaccggcataggaattttatttctaaaatacataaatatgttaaagataaatccgcgaatgctgatgcaacagtgcctgcgccacgcccacagccaggtgcgcgtccgcttcgccccaagtcccacgggttacctgcatttgggcggtctgcgcacagccctgtacaatttcctgtacgccaggcatttgggcggaaaattcctgttgcggatcgaggacacggatcaaactcgactagtgcccggtgccagtgaacgactggtggaggatctgctctgggcaggcatagaaattgacgagggacccggttttggcggtcaactgggaccctatgtgcagagtcagcgaacggaaatttacagcaaagccattgaagaactgctccataatggcaccgcgtacagatgcttttgcaccgaacgccgtctggatttgttgcgtaaggaggcgctgagaacccggcaagttccacgctatgataacaagtgccgacatctaacgacttcggaagtggattccctactggccaagggtacaccctactgcatacgattcaagctgacggatcacgaggagccactggatgatctcatctacggcaaggtgcatcacaatgtcagcgacaacgaaggcgatccagtggtcatgaagagcgatcaatttcccacctatcactttgccaacgtggtggacgaccatttgatgggcatcacccacgtcctgaggggcgtggagtggcagatatccaccaccaagcatttgctgctctacaaagcttttggctggcagccccctaaatttggtcacctgccgcttttggtgaatgcagatggcaccaagctaagcaaacgtcaaggagacattggcattcagcactttcgggaacgcggctactttccgcaggctttagtgaactatgtggtttctgcaggcggaggattcgagcatcgtaccaatgccaagcagcagctgctcagcatgcaggcgctccatgagcagtttcacatagagcgcgtcaactcccatccgagtcgccttaatcccgaactgctcgatgatctaaatcgcctggagattgtgcagcgtttgtctgggaatgagagtcgtacgaaattggtcaatgaagtgcaacagctggtgaaagaagcctatccgcaacactccaacttagatctagccgaggagcacatattggatgtgctgaattggtcatcaaagcgcttaacactgctccaagatttgaccagcagcaaactgagtttcctgtgggtgaaacccagcgattttcaaattaaagacctgaccgcagagcaactagctcacttgctgcagttaatcaacgctatccaggactttcacaaggatgaactcaacgttaagcttaaatcctttgctcaaaaagaaaacatcaaattcccactaatgatgaaaacactaagagcagccctaagtggcctaaaagaaggtcctggcgtagcggaaatgatggagatcctaggcaaatccgtcactctcgaacgactcaaagaagctctgcccaaggaaagtctgcatttagaagaacatcagtgatttggttaagttctgttgtatttgtatgtatatataatagattaatttatatattgataacttttgcaatttgagaataagatcaatgagtagacacca

SEQ ID NO: 9102 - protein, 511 aa, DROSOPHILA
MLKINPRMLMQQCLRHAHSQVRVRFAPSPTGYLHLGGLRTALYNFLYARHLGGKFLLRIEDTDQTRLVPGASERLVEDLLWAGIEIDEGPGFGGQLGPYVQSQRTEIYSKAIEELLHNGTAYRCFCTERRLDLLRKEALRTRQVPRYDNKCRHLTTSEVDSLLAKGTPYCIRFKLTDHEEPLDDLIYGKVHHNVSDNEGDPVVMKSDQFPTYHFANVVDDHLMGITHVLRGVEWQISTTKHLLLYKAFGWQPPKFGHLPLLVNADGTKLSKRQGDIGIQHFRERGYFPQALVNYVVSAGGGFEHRTNAKQQLLSMQALHEQFHIERVNSHPSRLNPELLDDLNRLEIVQRLSGNESRTKLVNEVQQLVKEAYPQHSNLDLAEEHILDVLNWSSKRLTLLQDLTSSKLSFLWVKPSDFQIKDLTAEQLAHLLQLINAIQDFHKDELNVKLKSFAQKENIKFPLMMKTLRAALSGLKEGPGVAEMMEILGKSVTLERLKEALPKESLHLEEHQ

SEQ ID NO: 9103 - DNA, 4656 bp, DROSOPHILA
aaaaagatacaaagtacagtgaaagatcctagatacattatatataatgcgtgtacaaaagttgaagtaataatacttgaaaattgtttgacaatcgatttagatttttaaaacgtggcttaaaaactacaggatgactataattaaatgggtaaaatgaaagaaaaacgaggcaaaagcttttcgaaagctttttaaccgattaatatctatttcatctcatgcaattacataaaaacacaaaacacaaagcctaccaaattagtacaatttcttaaatttatatgaataaacaaagcaataaaattttttttaaagagttatcaatttggtgcctattttttataaaaggtaaacagttcaaaagagcatagagaaagagcacactaatgaattgtaaatgcttaaacttttgttttaagagattgagagaatgagcagagcgatcaaacacaacaaaattcattaatttcttcattaatacaatcaaatcacgaatcgggtatattaaaaaccaaccgataattgactatcgccacctggttttctctccatttgttttcatcggcagcagtcgagcgcaaaggccaaggcaatcgcaatatcgatgtctccgatatgtttaatcggcaatgcaagttgcaagtgtgcggatacagaagatgatgagaagaagaagagtgagggtgagagcaagagagagaaagaaacccgccaacgagaaatcaagaaattcataaaatcattgaaaatgcataccaaacaaatgacatttcccagtgtctttagtctttagttagttgatgagaaatgacaattacaacaaaatcgattgaaaaatgcaataaatttcgagtctttttaagcgaagaacttacaaaaaaccaaaagacaattgtaaataaaaatcaagcttaaaaaaaaaaacgataaaaaaaggggcggtcacctcgacttatgtattgtatataatgtttctaggtcaaatgtcgagcagtcaatggtgcaacaacaacagcaacagacacaacaacaaccgcaacaacaacaacgacaccagaacagcacatttaacaacaacaacaaccatgcaccacagcaacactcttcaccaaacaaccagaccaatagtagccaccatcatcatcatcaacaacaacaacaacaacagccacaacatgccttagccaaaagtctcagcagcaacaacaacaacaacaacagcagcagcaacaacagcaactgcagcagcaacaacaacatgaggaatagtaacagcagcaacaactccagttcggcggccgctgtggcagctgctgctgccgccggctacgtgcaagcactcttgggaggcggcggcggtgctgggggcgtggctggtggcgctggcgccggcagcaatgccttcaactacaacctgccttcgactcgagcggattacacgaatctagcgctttggaatcaactaacccccgcccaacgtctgctcatcagccagcagctaaaaggtgccactccgactggatctggtggtaatataaccagtggcaccgcttctagccatgccgccggcaagcagaactttccagccttgccctccctgccgctggatacggatctgattaccatgctggactataacaatcccaataaggcaaacaaaagtcaaaagagtgctggaggtgttacctttaccaaacccattgtgccaccgctgataccagatggttcgggagctgaaataacgctgaccaaaagcagaagagctggaggaggtggtggtgttgatggcggtggtggtggtggcggcgccggcggaggtggcggaggaggagtagccgccaccggaaatggcactaccataccgctgaattccacacaagcactcgaggattttgaaaagaagttcactgtgatgacggacgaaatgcgggctgttatacaaaaggttttggccaatccggatctctcgacattcatacaaacgaattccaacagcaataatagtgcaaatcaaaatcacctggtgccttcgtatatatcgccacccatgtcgccctccgtgggcggtttaaatatgggcatggccatgagcaatgtggccacactgaccttggcctccaatccgaatgtgacaataacgccacagttgcccggacactttctgcactcgccatcaagttcgtgttccagttcgagtgcctcgaatacggcgccatctccgttgagcagtggcggcggcggcgtcgggggatcaggtggggcgggtggagcagcaggcggggcatccagcggtgcgactgggcggcaaaagagcgtgatttgttcgaccaaaagcaataatctacccttggccatactctcgctagctagcaataattcaggtggggttagttcaaattcaggagtacgacggaataacaataatactaatagtaattatgggcgtcagacacacagccaaagtagtagtaaccacagcaatacacaaacaacaagcactcaacaacaaagcacacccactgacgtaatcgatctgtcctcctcccgaaggtcactagctgcatcggcggcctatttgcagcaacactcgtcggcggtcgcccagcaacaggtagcggcggcagcggtggcccagcaacaacgtttggccgccgtcgccgcccatcatgcccagcagaatggacgcagttcctcgaattcgggtaatgcaggcaactcggcgaatgcatcgggtaacaacaatgggacaagcaacaccggctcctcgggtaatggctcaaacggcaatggcaatgcctcctcgaatagcgcctccatgcatctgcagcgccatgcggcacttgctcatgctgcggcggcggcgaatgcggcagatagtgcgcagcggctgtgcgtcatacccgaaatacccaccaacaacatgaacctgacgccctacaaggtgctcaaggtgtgcgtggacaagcatctggtgccctgcatcaacatgaaggcctacaacgaatccgaacagctgatgacgctcatcgagttccagaagaacttcttcccctcagtgccgctggatcattgcaagcgattgatcgaggccctcggcgtggagctctacaaggcaaatcggtgagttttgataacataagtttgtacttgaaatgcattgcttaatcaatccaattttacaggcgacaagtgcagatcctgatggagtacgatcgcaactacaacgaaaacatgccactggtgcaagtgcgcgacatcatcaagtacatgacacagctgacctttatgacgcgccagtcggagcagccgccagctaagaggacgcgcacgagcctaggaattaagctggggagcacaacatttgccaccaacaacaaccacattagccacaggcacaggcacaccaacaacaccaccgttaagcacagcagccacaacaagcagccacacaactgccacagttctcacacgaacaacaactgcggcgtccgcagcgatagcaccaccaacttcggtggcagccacatcgttgaggagacgggcgctcacaccgccagcgaatgttagtggtgatgaagtgctggccaggcggagggcactagcgccaccgccagctccggcagttccagccacaccacccggagcgggaaccattggatctcctgcactatcagcaacacctgtacacaccaccagcaacacatacgaaatgttgtactcccacaacccacacccacacccgcacccgcaccatccagcagcccagcagcaccaccatcagcagcagcacgagcagcagcgtttgctaaagaagcgccagcatgccgagcagacggcggcaaagaatccgcgcgctgctgcggctgccgctcagaaaatggccgaagtagagcacgcctatctatcgaatttgtatggcaaggcggcggccagcatgctaagtccacccatgggcaatgtcatgcccgagtgggaacagcagaggcagcgaaggacacaggcggcagcaccaacgccgccccaccaaccgcagcagcatccgcatcagcagcagcaaacgcagcagcagcagcagcaaccggcggctgcagcggcagtggcggcgccaccccaacggcatataatgcatcgccggcatagcgtgtgtgccgctggactggccagcctgtcgccagcttcctcgacgcactcctcatcgacggcttcgccaacaacggcggcggcagctgccctggccgccgcatcctactacggcagtgcggcggcagcggcggcggcggcatttacggcaccatatcagcaccatcatcatcatcatgcggcagcggctgctgcggcggcacatcatcatgctgcagcagcagcggcagcggcggcagcagcggcggcccatcatacacatggtcagccatcgcccaccatatatccacccactccgccgccatcggcgccgtgggtgcatccatggtatgctggcgatgcggccttctgagcgagagatcgtagatagaatagatcgtagacagatgaagatgaatggggcgagcaactcaagccccacattgtacattcgagtttctagtttgttaagctatttattaaacgacgaaaggaatataacaatacctatttagatgatgagagctccaaaca

SEQ ID NO: 9104 - DNA, 2459 bp, DROSOPHILA
atggtgcaacaacaacagcaacagacacaacaacaaccgcaacaacaacaacgacaccagaacagcacatttaacaacaacaacaaccatgcaccacagcaacactcttcaccaaacaaccagaccaatagtagccaccatcatcatcatcaacaacaacaacaacaacagccacaacatgccttagccaaaagtctcagcagcaacaacaacaacaacaacagcagcagcaacaacagcaactgcagcagcaacaacaacatgaggaatagtaacagcagcaacaactccagttcggcggccgctgtggcagctgctgctgccgccggctacgtgcaagcactcttgggaggcggcggcggtgctgggggcgtggctggtggcgctggcgccggcagcaatgccttcaactacaacctgccttcgactcgagcggattacacgaatctagcgctttggaatcaactaacccccgcccaacgtctgctcatcagccagcagctaaaaggtgccactccgactggatctggtggtaatataaccagtggcaccgcttctagccatgccgccggcaagcagaactttccagccttgccctccctgccgctggatacggatctgattaccatgctggactataacaatcccaataaggcaaacaaaagtcaaaagagtgctggaggtgttacctttaccaaacccattgtgccaccgctgataccagatggttcgggagctgaaataacgctgaccaaaagcagaagagctggaggaggtggtggtgttgatggcggtggtggtggtggcggcgccggcggaggtggcggaggaggagtagccgccaccggaaatggcactaccataccgctgaattccacacaagcactcgaggattttgaaaagaagttcactgtgatgacggacgaaatgcgggctgttatacaaaaggttttggccaatccggatctctcgacattcatacaaacgaattccaacagcaataatagtgcaaatcaaaatcacctggtgccttcgtatatatcgccacccatgtcgccctccgtgggcggtttaaatatgggcatggccatgagcaatgtggccacactgaccttggcctccaatccgaatgtgacaataacgccacagttgcccggacactttctgcactcgccatcaagttcgtgttccagttcgagtgcctcgaatacggcgccatctccgttgagcagtggcggcggcggcgtcgggggatcaggtggggcgggtggagcagcaggcggggcatccagcggtgcgactgggcggcaaaagagcacacacagccaaagtagtagtaaccacagcaatacacaaacaacaagcactcaacaacaaagcacacccactgacgtaatcgatctgtcctcctcccgaaggtcactagctgcatcggcggcctatttgcagcaacactcgtcggcggtcgcccagcaacaggtagcggcggcagcggtggcccagcaacaacgtttggccgccgtcgccgcccatcatgcccagcagaatggacgcagttcctcgaattcgggtaatgcaggcaactcggcgaatgcatcgggtaacaacaatgggacaagcaacaccggctcctcgggtaatggctcaaacggcaatggcaatgcctcctcgaatagcgcctccatgcatctgcagcgccatgcggcacttgctcatgctgcggcggcggcgaatgcggcagatagtgcgcagcggctgtgcgtcatacccgaaatacccaccaacaacatgaacctgacgccctacaaggtgctcaaggtgtgcgtggacaagcatctggtgccctgcatcaacatgaaggcctacaacgaatccgaacagctgatgacgctcatcgagttccagaagaacttcttcccctcagtgccgctggatcattgcaagcgattgatcgaggccctcggcgtggagctctacaaggcaaatcggcgacaagtgcagatcctgatggagtacgatcgcaactacaacgaaaacatgccactggtgcaagtgcgcgacatcatcaagtacatgacacagctgacctttatgacgcgccagtcggagcagccgccagctaagaggacgcgcacgagcctaggaattaagctggggagcacaacatttgccaccaacaacaaccacattagccacaggcacaggcacaccaacaacaccaccgttaagcacagcagccacaacaagcagccacacaactgccacagttctcacacgaacaacaactgcggcgtccgcagcgatagcaccaccaacttcggtggcagccacatcgttgaggagacgggcgctcacaccgccagcgaatgttagtggtgatgaagtgctggccaggcggagggcactagcgccaccgccagctccggcagttccagccacaccacccggagcgggaacca

SEQ ID NO: 9105 - protein, 790 aa, DROSOPHILA
MVQQQQQQTQQQPQQQQRHQNSTFNNNNNHAPQQHSSPNNQTNSSHHHHHQQQQQQQPQHALAKSLSSNNNNNNSSSNNSNCSSNNNMRNSNSSNNSSSAAAVAAAAAAGYVQALLGGGGGAGGVAGGAGAGSNAFNYNLPSTRADYTNLALWNQLTPAQRLLISQQLKGATPTGSGGNITSGTASSHAAGKQNFPALPSLPLDTDLITMLDYNNPNKANKSQKSAGGVTFTKPIVPPLIPDGSGAEITLTKSRRAGGGGGVDGGGGGGGAGGGGGGGVAATGNGTTIPLNSTQALEDFEKKFTVMTDEMRAVIQKVLANPDLSTFIQTNSNSNNSANQNHLVPSYISPPMSPSVGGLNMGMAMSNVATLTLASNPNVTITPQLPGHFLHSPSSSCSSSSASNTAPSPLSSGGGGVGGSGGAGGAAGGASSGATGRQKSTHSQSSSNHSNTQTTSTQQQSTPTDVIDLSSSRRSLAASAAYLQQHSSAVAQQQVAAAAVAQQQRLAAVAAHHAQQNGRSSSNSGNAGNSANASGNNNGTSNTGSSGNGSNGNGNASSNSASMHLQRHAALAHAAAAANAADSAQRLCVIPEIPTNNMNLTPYKVLKVCVDKHLVPCINMKAYNESEQLMTLIEFQKNFFPSVPLDHCKRLIEALGVELYKANRRQVQILMEYDRNYNENMPLVQVRDIIKYMTQLTFMTRQSEQPPAKRTRTSLGIKLGSTTFATNNNHISHRHRHTNNTTVKHSSHNKQPHNCHSSHTNNNCGVRSDSTTNFGGSHIVEETGAHTASEC

SEQ ID NO: 9106 - DNA, 3269 bp, DROSOPHILA
ggtggtaacctggagaagggttcagagcaacccagtaacgaggaagcgagccaagaaaagaagataccagcgttgcagctcctttggtcccacttccgtagtgcctacactaatcccttggtgatacaatggagcttgtggtatgccatcagtttggctggatttctgcaaatcaccacctatatgcaggtggtatggaagtccttcgagaacgaaccaacagtgagtgagtttcaataatcaatggctttctcatccttgagatttcccctgaagatagcctggaatggagctgtggacgtggccctgacgcttctaagcgctgtgttcgcccttctcgccggttatttccatgctggacgtctgaacaccaggagcagcctgctctcgatggctctgctgtcggtcctggaaggaggttgtgttttgctttcctgctggaccgatgatatatatctgtcctatcttggctatgtgctgtatggaggcctgtttgccttcaccataacagtggccaggtaagcagttcttgatccttttccaacaggtgaaatttaccaaatctcgtaataccttatagctcggagttggccagcagcttggaggaggatagcttcgctctggtgtttggtttcaacacgttcgtgggactcctcctgcagtgcatcctcacatttgtcgtcgtctcggaaaaggccaatctgaatttgaatgtttttcaacagttttccgtctacgcattctattttatagttattggaatagtctattctattgctgttatattgcaatatatatggtcaatttcgaagaaaccaaaagcaattcaggaggcgaattaacaacatactctaatgatgaaaaagtgttcatttatcaaataaaattgttatacatatttaaagtttgtttaataaaataataattggcttgtattctgaaacattattacttttaagaaatatttcccaagctgttgaaacatcgttgatattatattgttttacactttattaaaatgtatatgtttttttatagttatagtttcaaaaaatgaagatatttaatcctacgccgcgaatctaatcagagtgtaccatgtacattatatggccactacaaacttaataatatgtcaaattaaacaagatcatgaacgtcgttattttcaatacaacattcaagaatcagggtgcgattggaatccacagcttggctagcagaactcggtctgatccccgccgttgcggaggaccgctgagacccgccacgtcatcgactcgtagagcatctcaattttgtccaccatgtcctggtcgctgtgccagacgtcgtacaagacggctcgaaactcgctgacatttttgggcgcctgattctgaatcctcggctggatgatggccatcaattgctcgaggagattgaggtcattgcagacactgccctccggtcccatcagcgagtcaaggaagatctcctttggcggcgttgattcgtcgacgaatttaagatcgtccatgttgaagatgttgcgccagtcgcgcacggtccaatcctgatgggcggtggcccaggccaacctcctttttttcgccccctcactgaggccgaaagtgctgggctccttcggctgtggcgatcctctcggttgccgtatgcctttggagcgaatctcgctgatcctgcgctgcaaggtcctgcggctgacctctatgccgtgtcgggccaactcccgctgcacatcgatggaggtgtagtgcggattgtcgctcagcatttgctcgacaatttgccggttctccaggaccttgggtctgccaacatcgcgcttcttttcctcctcctgcgcaaccgccacgggcgccgctgttttcagtttttgcggcaacctcagcgtggcagtcttcccctcgagcagctcacactcacgaatgcagcttatcacgctctccacgtcgcactccaggatctgggctatctcctcacagctgttcgagcccttcagcgccttcacaatacttcgaacttcgggagcgagaaccatttcgaatcacttctgtacacctcgagtttcacaataccaatgatggtaaatcgaatcctcgatgggcgttttatgcacctggcaggtaaaagtttttgcaccgattttgacgatagtctggaccgtagttttatggcgagcaagctgcaattggcgggattacggcgtcattacaggtaaattcagttggcgtccctttttgtctttggcggccattccgttattcgtctgcggcaagactggcaacccttgtgttaagggaggattttcggaatctcatgatcagctgttcggggaaataccattactttaactgcagcgtagtttgttcaaacctattatttcaggattatttcattcaaaactatttaacccgatgatcagttctgtgttttccaagtaaggtttaataatatcgataaatgatgaaaataataagttcttaaagaaattctagtctttttgttaaaaagtcatattttaataaaaagctgcctttcccgtgtatgatttaaataaaatattaccaagagtacgatctgaaatgcaaaaaacctgtgtgggaaccatttaagtttacaaccaattaccaagcgcttgcaattgttttgaacatgctatttaatcgttgatttcctttgatgctttgtagaattacaaaaataaatataaaaacttgtacatatgtaagtgttagttacctctactgtaggaaatgcaatacaccttttatcgaaattttaaaaatatatatatgccagatatttagtttcttgtcttttatgctctgtgtatgttagtttcttgttttacgtacaccgttttctggagggcgagggcagtttgtaaaactatgctcaacttaacatatatacgcaaagggtgcacattcatttggaattgcaaataccataaagatcaaattttgagttcgcttaagctcgctagagtggcgcagccttcgaggcagctgattgaactgatagatattaaagcacataatcgggggggaaggcaaccgaattagccacttacactaggtggcgatgggaccgtagcagagggatcggaatcgtataattaaataaataacgctagagtacgcctaattggtttagatccatgtgctaggttttgatttgtgtgtgtccgtttttgttactccatcgcttttgagtgtatcttgtgtgggagtgtggaacgaaagctggagcttgggtaatcg

SEQ ID NO: 9107 - DNA, 1269 bp, DROSOPHILA
aataacggaatggccgccaaagacaaaaagggacgccaactgaatttacctgtaatgacgccgtaatcccgccaattgcagcttgctcgccataaaactacggtccagactatcgtcaaaatcggtgcaaaaacttttacctgccaggtgcataaaacgcccatcgaggattcgatttaccatcattggtattgtgaaactcgaggtgtacagaagtgattcgaaatggttctcgctcccgaagttcgaagtattgtgaaggcgctgaagggctcgaacagctgtgaggagatagcccagatcctggagtgcgacgtggagagcgtgataagctgcattcgtgagtgtgagctgctcgaggggaagactgccacgctgaggttgccgcaaaaactgaaaacagcggcgcccgtggcggttgcgcaggaggaggaaaagaagcgcgatgttggcagacccaaggtcctggagaaccggcaaattgtcgagcaaatgctgagcgacaatccgcactacacctccatcgatgtgcagcgggagttggcccgacacggcatagaggtcagccgcaggaccttgcagcgcaggatcagcgagattcgctccaaaggcatacggcaaccgagaggatcgccacagccgaaggagcccagcactttcggcctcagtgagggggcgaaaaaaaggaggttggcctgggccaccgcccatcaggattggaccgtgcgcgactggcgcaacatcttcaacatggacgatcttaaattcgtcgacgaatcaacgccgccaaaggagatcttccttgactcgctgatgggaccggagggcagtgtctgcaatgacctcaatctcctcgagcaattgatggccatcatccagccgaggattcagaatcaggcgcccaaaaatgtcagcgagtttcgagccgtcttgtacgacgtctggcacagcgaccaggacatggtggacaaaattgagatgctctacgagtcgatgacgtggcgggtctcagcggtcctccgcaacggcggggatcagaccgagttctgctagccaagctgtggattccaatcgcaccctgattcttgaatgttgtattgaaaataacgacgttcatgatcttgtttaatttgacatattattaagtttgtagtggccatataatgtacatggtacactctgattagattcgcggcgtaggattaaatatcttcattttttgaaactataactataaaaaaacatatacattttaataaagtgtaaaac

SEQ ID NO: 9108 - protein, 275 aa, DROSOPHILA
MVLAPEVRSIVKALKGSNSCEEIAQILECDVESVISCIRECELLEGKTATLRLPQKLKTAAPVAVAQEEEKKRDVGRPKVLENRQIVEQMLSDNPHYTSIDVQRELARHGIEVSRRTLQRRISEIRSKGIRQPRGSPQPKEPSTFGLSEGAKKRRLAWATAHQDWTVRDWRNIFNMDDLKFVDESTPPKEIFLDSLMGPEGSVCNDLNLLEQLMAIIQPRIQNQAPKNVSEFRAVLYDVWHSDQDMVDKIEMLYESMTWRVSAVLRNGGDQTEFC

SEQ ID NO: 9109 - DNA, 3003 bp, DROSOPHILA
cacgacatgctcactcgaataaaatataatgaaaaagtacagtgcaaaatgacgagacctactatttcataatgacagacagctcagtgacaacaattcaaatgtcagggctgcgacagggcagcagtgttccaaaccctttatcgcccgaggactcgatgcccttcacaaagacctcaaactcgtcaaatcggcaaggctagccagaagcctggctttcttggaagcctaggccgcaaaacacgtctgtaatgaccagaacgtagtcctgatgctccagttgctcaaggggaaacgaagggtgcggtgctccactattgacatcattgatgctgccctgatgaacccttcaggcaggtcatacccttataacagcatacaccttaacccatgaaacccactttcggttgaagcacttgatttcaggaaatgagtgggactcaactttgaacggccaatatgacagcctggggagcccagtgtaggtggagcaggaaatcgcaaatggaactcacggcgaaaaaatcgacagtacttctgcaatgggaaaagacctgctttaatgtaaagatgccttcagaaaacaatgttctttacatcaggatcaaggagcattccttggcatctaggaatttattaacccaatcaagagaaaccatctcgattgacaaacattttctgcatgtgtgcgcgcactttcttatttttcctctacaaattcaattcgcattttcacttaaaactttttaacttggttggcctgaaaggagcgtacgcgtctacgccggagagggatataaagtaaacaaatacgccctggagacaaattaagtgatttgcccgctttacacatttttcctgctgattacttttctccaactccccggccgaaattgaattgcccagaaaaagagagcacgaccggttatcaacttttgattggtcatgaaaatggccaggggccatggcgaacagaatggatcagggtggccggccaaaactagggagcacggggccgccgactggcctcggcctcgtcttcaatttccctgcgaacggttcgctccagatcggccaggacctggtgatcaatcatacgcagtggctggcggtacttgagcacagccacctccatttgggtgtggttgagcgaggacacgctgaccagggtgcggactatgtgcttgatggccgctgcctcgtcggcgatggtcagaatctcgtccgcgtgcttctccatgtaatcgcggaccggctggcttgagcggccggtggtgttggccctccactcgtagaagatgcccgagggatccgtttggaacaggtgcggagtgccatcctcgtcgaagcccccaaccagacaggacaatccaaatggacgcctcccattgctctgcgtgtagttctgtttcagctgggctatgtatctgcatgggaagcggaaaggacataaaaggtaaatccaaatttgcctagggggatgcactgagagaacagttcttaactttttcgaaagggcaggaaaaagtatgcatgagtattttgtggtttgcaactcagctcattcactgcatacttttccctgtgtaggcagtgctcttcctcaccgggttatgtactccacggtcgtgggcttctcgaaattcagacgatggctctgggcctccatttgggcgcggcttaccaggatccgtgcgtccgcggtgagacccgaaaaagtcatcaccacgtggtcgtcgagcatgcaaatcttgcgcaccatgcgctcctcctgcaagtcgcccacggagcgcttctccacgccgattacaatggcgttgttggtgcgcagacccatctttggttagtatttggaggattaactaataggcaagtgcgggtggcctccaggtaggacttaccacagtggaaccccttcggacggcctcctgggcgtactccacctgcagcaggtgaccgtcgggtgagtaaatggtcaccgcgcgatcgtatcgctgagccattgaagtggggctacttatttgaaatactatggagtgtactttgtgtataagatcgaaattttagtatctgtgctacttctaaacgcctgctaggtgcgtactggaaatccacttttaatcaattttatgaaaacataattaccccttttgaagacatattgttttaattgcattttttcttcaattcgtttatcataaaatgtactttttactagcttttatttatattttatgttttctattagtgtcctctcaaactgttatgcaattaaatcatttttttaataatgaggtaatccgctacaaaggcaaatctacataatcgaatccataggcgaattaacaattatcgtgttaatcggattatcgttgtcacaacaaattggggcaattacattaaaactgtttcagccgcattttgcgaatatttcaatttgtcggcctaccttatcccccagtacgattttccagcaagaccctacttgaggaggtcctgtgtccttggcatctgctccccgcctgaaatgctgacaacaaaatcgcaaagtgcaacaaaagcgcaaatctctggcgaatgtaatcgtaatcgaaacagcttcattttgctaatgtgcctggccaaccggtgaaggactccgccggagagtcgtccttttgcgactatacggagcgcggagcacggagtcctgcgtcctgatgcggtgcttagtatgccggcagcgcgcaggttggcataaatttatatttaacattttatgacagccgtgcgcccgcggaggaggagtggggacaaaagaggtcctttaggtgtagcgcatactcaccaggattaggcacgttccagccgaatatagccaattcccaaaaacaaacgttgccaaaagtgccgctgccgaataaataaattaggcagaactgcaaacaaacgaccagcaaatagaatcacaaaaatgcaattattttaccaatttacacacgttgtcgcccatgcaaaggttcg

SEQ ID NO: 9110 - DNA, 759 bp, DROSOPHILA
atggctcagcgatacgatcgcgcggtgaccatttactcacccgacggtcacctgctgcaggtggagtacgcccaggaggccgtccgaaggggttccactgtgatgggtctgcgcaccaacaacgccattgtaatcggcgtggagaagcgctccgtgggcgacttgcaggaggagcgcatggtgcgcaagatttgcatgctcgacgaccacgtggtgatgactttttcgggtctcaccgcggacgcacggatcctggtaagccgcgcccaaatggaggcccagagccatcgtctgaatttcgagaagcccacgaccgtggagtacataacccgatacatagcccagctgaaacagaactacacgcagagcaatgggaggcgtccatttggattgtcctgtctggttgggggcttcgacgaggatggcactccgcacctgttccaaacggatccctcgggcatcttctacgagtggagggccaacaccaccggccgctcaagccagccggtccgcgattacatggagaagcacgcggacgagattctgaccatcgccgacgaggcagcggccatcaagcacatagtccgcaccctggtcagcgtgtcctcgctcaaccacacccaaatggaggtggctgtgctcaagtaccgccagccactgcgtatgattgatcaccaggtcctggccgatctggagcgaaccgttcgcagggaaattgaagacgaggccgaggccagtcggcggccccgtgctccctag

SEQ ID NO: 9111 - protein, 252 aa, DROSOPHILA
MAQRYDRAVTIYSPDGHLLQVEYAQEAVRRGSTVMGLRTNNAIVIGVEKRSVGDLQEERMVRKICMLDDHVVMTFSGLTADARILVSRAQMEAQSHRLNFEKPTTVEYITRYIAQLKQNYTQSNGRRPFGLSCLVGGFDEDGTPHLFQTDPSGIFYEWRANTTGRSSQPVRDYMEKHADEILTIADEAAAIKHIVRTLVSVSSLNHTQMEVAVLKYRQPLRMIDHQVLADLERTVRREIEDEAEASRRPRAP

SEQ ID NO: 9112 - DNA, 3826 bp, DROSOPHILA
ttggagtttctgcgcttgcagtgtaaacttcccagaacttgtattgactttggtcgataaaaatcgataggcgatctaatttcgatattacacaatgcgtcttgtttttacgggtaattgtgtttttaaacgcctgctgcacacggaaataggcggaaagtatgccaaacagcagccgcggaacctcaaaggacggagcaagagctcccaggagtggcttacgcgccaactggcggatccgtacgtggagaaggcccgcatgatgaactatcgctgccggagtgccttcaaattactggagatcgacgacaaatacggaatactgcggcccggagacacagttttggaatgcggagctgctcctggcagctggacccaggtggccgtggagcggaccaatgccaacggaaagcaggagcgggcgccacagggagccgtctttagcatcgacctgttgcatttccatgctgtgccgggtgccacaatctttggcggcatggatttcacttcttcgctggcacaaaagcggctgagggaagcgttacaagacagaaaggtcaactgcgtgctgtccgatatggcacccaatgccaccggagtgaggatgctggaccaggagagcatcactaacctctgctacgaggtgctgcgctttgccctggccatgtctgctccgcaggcccatctggtggtcaaggtgtgggataatggcgacgtgcccaagctggagcgagatatgcttaggttttatgagaaagtgaagagagtaaaaccgcgcgctagccgcggagactccgccgagcacttcctggtggccaggaactttaaaggagcaacggatagttaattattaactgcgttttttggactagttgaattaaaagctttgttaattgactgtagcttatattggatagaataactaaagggaagtaacctaggattaatttcatctcaacatttttgttgattttctttttgatgttttaatctttgttgttatatacagttctgtaacaaattatatgaatttagttgagtattaacaacccaatgctctcatcaacatatttatgcattcaaaactcacaccaaattattcatgattaattttaaaaacaaaggcttaaatttggtctccaaattgtactgaatagtttaagtacgcatttcctagtgcttgtaatgagtaaggtgatcaatcatcatgtacagccacttgggctgatcgtgaggagccatgtgcccggcattgcggaccatgatctccacaagatgtccggcgtgcttgacatagccggccacttccttcccaacgcgccacacttcgcggggagccaccttgtacttgtccgagccggggaactttagttggttgagataattgcgcgtcagtggataggcaacaataatgtctagctgcccgctgtagatgcacacagtatagtgggccagcagttcggctatccacggggccaccgagtccatgatatccttcttcaagtgaagttccaccttgttctccttgtccagatcatggaatgtcttattgcccacatgaattgcccgccgagtggcgcccgcctgcagaaattcgcccaagttggcgccatcatcatcatgcgtcttcaagtagttgtagtaccagttgtatccagtaaggttgctgaacagtgagccattggtaaggtccccgttgattagggaatcaaatacgtcgaaggcgcactccatgtcgtgactcttaatgcattcagcaccctttgcctcggcatcgtggaaactctgcagtccgtgctcgtcgatcaggcccagctggtagagatagtcaccgtacttcagctgatgcagcggatccgagagaccatttccgatggccacgcccttgagcggcacatagacgcgggtctctatggcattttgtaccttgtggatgtggtaagccagggcgggaacgtattttccggcataggactcgccggtgacccagaaaccagaggagttgctccactcgaagagttcgtacagctgcatcacagcctcgtgcagattgcggcccacatccttctcgttcgtagcatagccggcatcgttctctgtaaaactaaagccagtgcccacgggattgtcaatgtagatgagattgtgtgtcttgctccaggtatagttgcgtttctgaagcttcccatgaccatccaactctagtggtccattctctgtgaacaaaccgaagagcgaggaggcacctggtccaccctgaagccacaggaccactggcgcatattccggctcctgctcggcggggaagtaccagaagaacatgttggatttgaagccagggtccacggtcaaatagccggagtagctctcaacgccatggaactgggagcctacgacgcgggccagcttttgaacctcttgcttgctcatcgaagcattgttgatcaggggcgtcaggaacaggggctccccgggatcgacaccatcgtcaaagaactggtagcgtggatacggattgatgaagctccgcctgtaggggcgttccccctctactccttttgctccgcttattgcgactatagtcgcgataattaaaaatgcgcaatgagttgcagttttcattgttcaactgcgctgattcgactgaaaagcgatcgaattgtcagtggttgctttgcttattcagcttatgtatatgtattcttatattcttattatcgccccgacctgctcacgaatcggccgataaggggtttaaatcagttctctcacttgccttgcttttattcgcacagccggcgaaaaaatttagctttcccaattgagcagcactgatatttcagtgtatccgcaccggtcaaacggtagggttgtcaagtgaagcgaatttatcagctgtgattttttactaagagcgacttctgagttatggattgcaagtagttcttttgtcggaattattaaaaataatcatcaactaactctatattggtttagtttttcgcaaataaatgaaagcttgaatttgaaaggtttaaccagggatataaaagtctccaaagtacctatatatgttctgttttgttgcttatatcaccatttcttctcacttcaaatggtaagaaattctcgttcccgaggcattcatatttctagaatccaaacaattggcaacatcgaatacaacggcagtccggcaaggccagggcattttgcgtcaaaatttgtagtagcgccgcagctgattttccatcgccaaacaaagtttgagcaaacaatacacaatgtcagtcgctgacaccattgaatacgtgaccctgggcaatcctgtcagcaagatggtagcctcgtccgcatccgccctgctccgcacgcttgtaactaatcgacttttcctagacaatgttccggatttataattcttaactgtcttcctgcagggtctgcgtcccaagaaggtgccggtgcaggagacgagtatggcggtgctccctgccgcccacagctacgcgcattcacacggatcactctatcgactggccggctgccattaccacttcattcggctggccgggatcgtcggcgcgtcggccatctttatgggcgcctactgcaagtacgtcctgaaggacgtcagcgatcccaaggagcaggtggactcgcaggcctttgctgatgtggccaatcgcatccactttctgcactcctttgccatgatggccatgcctctggcccactatcccgtattcgtaagtttaaatggaaaaagtcaaaatttgtatttcgttgaagatgtgcctggttaagtcctacctccgccaggccc

SEQ ID NO: 9113 - DNA, 1742 bp, DROSOPHILA
ctcaattgggaaagctaaattttttcgccggctgtgcgaataaaagcaaggcaagtgagagaactgatttaaaccccttatcggccgattcgtgagcagtcgaatcagcgcagttgaacaatgaaaactgcaactcattgcgcatttttaattatcgcgactatagtcgcaataagcggagcaaaaggagtagagggggaacgcccctacaggcggagcttcatcaatccgtatccacgctaccagttctttgacgatggtgtcgatcccggggagcccctgttcctgacgcccctgatcaacaatgcttcgatgagcaagcaagaggttcaaaagctggcccgcgtcgtaggctcccagttccatggcgttgagagctactccggctatttgaccgtggaccctggcttcaaatccaacatgttcttctggtacttccccgccgagcaggagccggaatatgcgccagtggtcctgtggcttcagggtggaccaggtgcctcctcgctcttcggtttgttcacagagaatggaccactagagttggatggtcatgggaagcttcagaaacgcaactatacctggagcaagacacacaatctcatctacattgacaatcccgtgggcactggctttagttttacagagaacgatgccggctatgctacgaacgagaaggatgtgggccgcaatctgcacgaggctgtgatgcagctgtacgaactcttcgagtggagcaactcctctggtttctgggtcaccggcgagtcctatgccggaaaatacgttcccgccctggcttaccacatccacaaggtacaaaatgccatagagacccgcgtctatgtgccgctcaagggcgtggccatcggaaatggtctctcggatccgctgcatcagctgaagtacggtgactatctctaccagctgggcctgatcgacgagcacggactgcagagtttccacgatgccgaggcaaagggtgctgaatgcattaagagtcacgacatggagtgcgccttcgacgtatttgattccctaatcaacggggaccttaccaatggctcactgttcagcaaccttactggatacaactggtactacaactacttgaagacgcatgatgatgatggcgccaacttgggcgaatttctgcaggcgggcgccactcggcgggcaattcatgtgggcaataagacattccatgatctggacaaggagaacaaggtggaacttcacttgaagaaggatatcatggactcggtggccccgtggatagccgaactgctggcccactatactgtgtgcatctacagcgggcagctagacattattgttgcctatccactgacgcgcaattatctcaaccaactaaagttccccggctcggacaagtacaaggtggctccccgcgaagtgtggcgcgttgggaaggaagtggccggctatgtcaagcacgccggacatcttgtggagatcatggtccgcaatgccgggcacatggctcctcacgatcagcccaagtggctgtacatgatgattgatcaccttactcattacaagcactaggaaatgcgtacttaaactattcagtacaatttggagaccaaatttaagcctttgtttttaaaattaatcatgaataatttggtgtgagttttgaatgcataaatatgttgatgagagcattgggttgttaatactcaactaaattcatataatttgttacagaactgtatata

SEQ ID NO: 9114 - protein, 482 aa, DROSOPHILA
MKTATHCAFLIIATIVAISGAKGVEGERPYRRSFINPYPRYQFFDDGVDPGEPLFLTPLINNASMSKQEVQKLARVVGSQFHGVESYSGYLTVDPGFKSNMFFWYFPAEQEPEYAPVVLWLQGGPGASSLFGLFTENGPLELDGHGKLQKRNYTWSKTHNLIYIDNPVGTGFSFTENDAGYATNEKDVGRNLHEAVMQLYELFEWSNSSGFWVTGESYAGKYVPALAYHIHKVQNAIETRVYVPLKGVAIGNGLSDPLHQLKYGDYLYQLGLIDEHGLQSFHDAEAKGAECIKSHDMECAFDVFDSLINGDLTNGSLFSNLTGYNWYYNYLKTHDDDGANLGEFLQAGATRRAIHVGNKTFHDLDKENKVELHLKKDIMDSVAPWIAELLAHYTVCIYSGQLDIIVAYPLTRNYLNQLKFPGSDKYKVAPREVWRVGKEVAGYVKHAGHLVEIMVRNAGHMAPHDQPKWLYMMIDHLTHYKH

SEQ ID NO: 9115 - DNA, 12902 bp, DROSOPHILA
attacactagtcgatttggtttttgccattcgcttttttgttatatgaatgaggtttgtataaaaatgtatataaaataaattattattccttctccaccttcttttttatttgttttctgcaaaactaatcaagtatttatataataattaacttggttttcttttgtattcgttttgttttgttcaaatttggatgtgaaccatatacataactgcctacatatttttctctggttttgcttttgttcttaatgtgcttttgttatttttacattgctgtcgggtatttcaagtcttccatttgttcagtgaattcgatttagttttggttgtaaaatatataatacttaatatttgtgcgtacgcagttgagtgcaaaagtaactccgtttatttagtatttaagttgtatgataaaaaaaacaggaaagaaacgaattatttatcggtaggaattttgctcattttgaatacttttgatactatttacataatccgactgatacatgttttaccttcattattacatttatttaaagatttttgcactgtttctttaatttgattctcatatttaatgatgaaatcaatcaataattgttaaaaaaaaaagctcgttctagaaagctttggactaaacaattatgttttaaatgctaatcgtattgcacaaatacatacagaattaatgtttaactatcgttttgtctaatcgtcctgcaaattattgtctacaaacataaggatataaactcgatagttttatcggtataacgttgctcatttgcgaatcttctaataaatatttgatttttcatctaaccacgttaagtgataagaggtttactaacagctttcacttctatctcaaatcaacaaactcaaactgcgtatttctttcgaaaagaaattctggtgccctttaggtctcatccactttttgctttcaacacatatttagtgcaaacttaattttcaaaactcgtttagtgctcatatcacgcattggccagcacaaaggtcacggtcaccatcaaaagatgtgccacaattaccgatcccgacatgtgcagcagagtactgccacgtccacactgctgtatttcgatctcctcgggatgatagttgatgcactttttggggcgccttcgggactcttgctcctgtccctggcgtctcgtactgcaggctcctagaattccaaaaaaaaaaggaatttaagaatgatttctttacacaaattccaattattacccaccgattacgcccgcctcctccaagggctcaatgtccagttgcttggagccacatggacacaaggtgtctacaaccaacaggatcaggttgctgtgcgggatcttttgaacgctgaaaggacgctcgcatccagacacatgacagttggttagcttaccctgaaaaagtggagacattaaattttttctttttctttcttcattgatcttcatttaccttaagcggattgttttgaccaccctgattcaggcgctccggttgaagcatatagagatccgtgcggagatcacaacgcctggcgttgtgaggatctggtgaaaatctcggtccaacgtgaggtttatgctgtctaggcggtggtgtcgtatattcctaagaaaattacaaccatttttttgtagatcccataaatttccctcgtaaagtcaatattctactcaccacgtcggctgtggtgaaaaattcatccatttcctgatccacctgcatattgtattcgttttcatttccgaactcgtattcatcagagtaattattgtccacgaaaacaacatcctcgttgtcgtaggtatactcctcctgtggccatgcccgcagggaagcaggcatcagggacaaccaggcggcactcagggccaaaaggtgattaaagaaccaggagcccaggcgattcggtttcaaaatccctcctgcagccgtatatggattatccgcatcggaacagacaccctgataatcgttcaccgtaactctcttgtatatgcgatcctggaccaaagaatccataatggtgccatcgatctgtccaaagaacttgcccgtgtgctccatctcttcggatatgatcacaaatccactgttgtctagaacatagcaatccaaattgtccgaagcgcaggttctcttgcagccggtcattccagtgcactaaaagtattaaagtttcagcaaaatcctttttacttttatacagtaagaggacacttacggctgaggtgatgtttataaaatgcttcgctaaagaatcgtgctgaaactgcagacccacaactccggctgcagctttgtgacctcgatgttccacaaagatggcatgggaggcggtcaccagagtggcgttcgacttaatggcatagcccgagccaaagggtacactgtacacaaagctgtctggttccacagaatgctggtcaattgccctcttataccaggatgtgtccatggctctaacattatcttcgctaaagtgactgttgaaaaattgagtaagaaacgatttagaaattcacaagtattactaaaaataaattttatactaacggctcgggggtatcctcgggtcgctttacatggtcaatccaccggagaagacccgatctcgtagccacgaacgaagtagcgaccacaaacttctggtatccttgcctatgattaaacataaatatatataagtttcattgaaatctttaagttttaagttatttggggccagcgcaagatatttctaagggatgttcattcaagccttctccatgtggctggtcctctaaagcgattgcattttttattctactccaactttaaccaaattactcttcgatttacctctttaggattgccatcaatgtggcgatgggactatagaaattattattataagagtggtgcatatcagtttaaattgcatttgtttaaaaaaacatattcaaattatttgcggtgggggaaaatatttttgcattatggttattcaggtgagacagtgcagagatttagcaaaacagaaaaagtgtttgccattaaagaaatagagtgaggaaaatatatgcggagagaaaatggttttggtgctttagtaaaatgtttaacacaaaagtaagagaacattcttaaactgtgaaaaaaaaattaaatacaaaaaaatgtttttaaactgttcctaaaactaataatgataaataactttcacaagcttatttgaataaacaaaaaatacacactgcaaacaaaaatatgtggttcatcaaaactaaaattaacaaaaacaaaagtaatctatcatattccatttaaacttactgcttatcttccttgccgctggaggatccagtcgtgttcctatcgagtccatcagttaccatggcatcgcgcaccaagctctgaaggagggctcgatcgcaaaagtacggctcagccttgcgagatccctgagagctttgatgctgcgatccaaagtggctcgatccgggcgcattgccgccgttggagccactgtgcatgttgtgatgtggctgcggcgacttgggtcgaacctgattgaggaagaggttttccgtataagtaatgtggaatgcttggatagccaccatgagagaacccattctcccaagtcagattgcttaccgacatccacttccaaccggggcgtccagcgcgagacagaaaatgcaatacctgctcctctggcgatccgaagctgggctcttgatcgcgcgaggagtactcgccggagctctccctttccttctccaagtcactgacgctattgtactcacaatacacccagtcgggatgtacgcgccagttgtctcccttaaagtattcggtaactgaaaagatatataaaagtgtttcagatcgaataagagaagggtatttcaggaagaacttaccattgttacgcgaatggcgaatctcctgctgggagacaaactcatggctaccgtatttctccgggagcacaatagccagtgtaaatggtgtatcctcgatggggccgtagaagtatcgatgcgtcctggtcgaaacccttttcgagtcatcgtaatggttcatcaccgtaaactccgtctccccctctttgggttttatcatgtcaccgcgcatcttattaaaaatacatcaaatttcataaaatcgaaatgcaaaagaaaatataaaatatttgcattgttactcacctcgttcaaaaggttcttattaatttcaatgggctcgttattattgccgaactccgtctccggcagttccaactccgtaatgtcgaccgaggcgtacttgggcttcagctggtcgatgtactggttggcatcgcctaagggacgcaaatccgggtggtagagcacccgtccgttgttatctacgataaacgaatagccattcggtcccagcttgtgttgggggatcaccttgcggatttcctcgatgggcacatcggtgcccaccacgcccagcagattggcaacgcgcaccgaatggttccgtctatcgaagaccggagttgaaactgtcgtcaccaggcgccgctggtactccgaatcgcggccaagtcctcctgacttaccggccacaaacaccggactccagtggaccggatggtccgcctggtacatgatcattggacgagccataacaagggcatagtcaatcaccttacggcgagcctcatcgtaatcgttgatctgaacgaagaatcccttgttcgagcaggccatgtcgtggagattactcctgcttccggaatcgcttccaatcaggtatgtaaatattcggacaggcatgtgtggccaattgtactgcttaataacgtccttgtgcgactctgaggtgctttctgtgattaacatgatggcctgattgcactgactcccagcccctgattggttgtactgaaattgggaactcgttaattttactataaccacgtatataacaagcgtttaccttgtgcagcaaactgaaagcatactccagacccgccgtaaagttggccgtatcctgtagcttgatggcctttaccgcggacttgatctcctggatattgtcgggcgtggcccgaaccatgcggtccttgaaacacggcactggggtttttaccacctccgagaaggtaatgaggttaacgaaatcatcttcaccgagggtgtccaatatgttaaaggcggtggccatccccaggtcaaaggacttctctgtcatgctcgatgaggcatccaaaagaatcatctgattgggagaaggcacaagtagttatttatcaaaattgactttactaaagataaccatattataaaataaaataaaaacacataatggtagtctcccaatttagaatgtgaaaagcacaattaatgaagaactaaaaatattaaatggtaaatttttgttcaatatataaaattttaataataaatataattttttttagttttcgtaacatgagctatagcagcgctagcagaatatatactcacaatgtccttgggcgacgaggcggcctggacgaaccaattgtgcgtgcggaagtcgtggatgagcttgctgcccttggagccctccgggggccaggcggtgcccgggaagcggcgcagaaagcctgtggaggagccaaagtattgccacgacaatgccggatcttgctctaagttgttctggaacagcggatccaaatggccgctccactgcagcgccgacttcacgtccggctcatccaagtcgacgccgtgcgggaccagaatcgagcttagactgagattgaccggcaggcgctcgaagcgccgcatgaaccggatgtccatgtggcgggctccgtccgccagcttgccatcggcattgtattcgttgatccgccgggcatcgtagtgctgctgtccgcccatcggcgattccgcctgcccctggccctccagctccgacagagcagcttgctcggcggagtccatcaggcgctggaaaaaaacaagaagttgtttggtttcagtcactgtcatcaatctgcttaaatatatccctagggaatggggaataggggcgagttgcaaaactttccgcgctttatgcaatttattcttttcgctacgacttaaattgcacaaagcactggagtttgcttggcttcatttcgccttctttttggcaaacttttagttcgagttggttgtgtatgtgaagtttaattcaaagcgctaagttatctgcgcggaaataccattcctgcacagtgttcggtaatcagctgaaaactatgccacattttcatatgcaaacttcttaaaataatggtgtataccagagaactgcagcccgccactcgcactctacgtccacccgataaacactcggtactctaggcaccccgttttttttgacaccctacttgcggcaacacaaaatactcgagtgttttaccgacgttgtgtttttgttacgagtaaaaaaaccacccgaggcctgctgcgcaagagccgtatgggtgagtggacgcacagtcaacgatcggccgcaggtcattttttgtatgcgggctgcagttctctggtcattttttgtacgcctaaaatttgtatgggtggaagcgtgacgggtataagaaatgaagggtaaaagggaatacccaagaaaatttttgtgctcatgtctttgctctttgatggactcaatgggtgcctcccatttcaaacacataaagtaattgcaattaaagacggcatttgttgatttttacgttttttaatgtctcaatctaaataataaaaacatagtgggcttagaaagtatctattaaatataaggacttaatgttgttggatcaggtagtaagtcatcgacgtctacctgttccccatagatagcgccgatttgtaggaaaaacttcaccaaatttttaaatccggctccggttactgcagaaaacggccgacaatcttggacaacccattgggtgcatttttcaatagctactttcttgtcgttttccgaaacaatttttaattccgttggtcgtcttaatgttagacaacatttatggcgggataaattggaggtgtttttgtgtaaaaatttgagcactttctggcattgcctgcagaacagccatccgtccagaacagtttcatcttcctttaaaatgtcacataaaatgctccaaataacactttttcctttatgtttattggcaactgagtatgttccattgttaattttatttttaacgaaatcagccgcttctgccattattgtgaccttttcctttggcttccaaataatactgaatcctaacaagctagtaattgcatcgtaaaaaacaaaaaaggggcaattaacagccgagacactggaccaaagacacaagaactcaacaatcattatgtatggcgccatttgactcgactacctacgagaccactcgagtatttttggaaacacccgagtatttttggaaacacccatgtgtttaacggtatacccacaagtgtttttctcactcatccctttttaggcactgtgtgagcggcacccgcgacgcaaaacaccgtattgattcgggtgcgcacacaacggggtgtcttgtctgcatgttcagatttatactgtgtgtttgtaagtacccgcgatgtgcgtggcgagtagcacccgcacacaaaattgtagggtgtgagtcgagtggtaaaaaagtgccacccttgcagttctctggtgtatacttttgctataaataaataaattttttggaaccatcatatgctaactataaatttcatagtgaatttacgatcgcataccaggcaaccacccagacgaaatccaacaaattactgagatgctgcaaaagatttagccaagttaaggcacaaattatcttcacagatttagcttggtgcccacagtatgcattttcataagacgcaaacaagaactttagctgcagcgaaattagacccagtgggggcagatccctgctccgaaggaggacaaacacctgcagttatagacaccactggggatgggccacgcccctgccaatcccacactaccacacgggaaaataaggatagggaatgagaacttcggtgcacctgaagatgctgcagtggctgccgagctaagctgcatgtgggtgcattgaaatagttcaactacttttgcacaatggggacgcagagcaggaaaataaaataaaaatgcttgagctctggcgttctcggggccatgggaacaaccagtccgagtctgaagaagatttcaatgtaaattggctgccgttgggcaaacgctggtgccacgggaatgtgtcagcggcttagacaaatggcaagggttggtattggggaaagaatgccagatagaacgggggtagtgccggtttgctggtgggatagaaagttgttgcaccgaaaacttctttccaggtggggagcgccaactctcaaagttatttgaacattttccgagagctcgaattagttaaggagtcttaaagtttgcccgaaaaggtgttgagtagcgagctagttaaggcattaaataataaacactgcaaaattgagtcaatagaaaggagcacagtggtggtaagtggcaaggaagtttctatcggatttcgagtctttggttggctgcaaccagctgaaagttggtttcaatggctaaagggcggtaaaaaatagcacaagttccttaaaagtagttattcaatttggccaactccgatgttggctggaactacaggaaaaacagtgtgataagagacatagcaaacttttaaagttgcattctaaatgtattaatactatatgattataaattctgaaaatggttaataataaaaagcccaccccattttcgaaatctaaaacctgtgtacaaagaaatcattgcatcatgaatggcactctctaagatgtcattcatctgaacccctcagttatttgctccgacaaacaatgtcatacccatgtaaataattgccaacatgcgtagtcgctttgtctaatacaactcgggatggaacatggatggaaaagttcagcagacaaaacatgaccgtgtattataaaatatttgttgtacattttttctccaacaatattatgcacttatggaaaggtcgaggcgatgcgacaccaaagaaatgcccaggaagggggctgaaaaaaaaaaaaaaaataggcgtctgtgtggcgaaaagggttgcatacatatatggatggatggaatgggtgagactttggcttggagacccgaccctgagcaatgccctctcgcgcacgattcttagttgacaccagctggcttccctgtcgctcgtctgtgcagctgtcgacatcttaacattcaaaagccaacaatgacaacgccaaagatggctgcgaatgagtatgggtatgggtatgggaatgggtcttggtctgggtctgggtctggaacggggtctagaagaccgagaccgaggagacctgctcaaatgtcagcggtgcagtgtctgggtggtgccggaattagcaaaatgcagccacttgcacgcaatttgttcgccagaagtataaggtctctgggcgttggctggagcaacagcctgaaagtgtgctgtgcaaaaaactgtgcattgactggctgggctggtttgggaaaagacgaatacgcgttgaccatttgccaagtgaaaagccagatccagccgaatgatttttcactccagttttttcttcccttactggataatgcgagatatgtgtttaagccacccttcccttcgcttccctaacccacgaccttattcagcgaatttttctccaatatatttgccatctgaatggacgtgccaaatgttggagcaataagttgtgcagccgaaaaagaaatttatattacgttttaatattagttcacctaaatatttaaagagcgcggtggtgccagtgtcggatgttctttgaatgaaatccctgattagtataagtagaccagtggcaaaaaaaaaaaataaataaactgactgacatcaagtgggtggcacctgttctgctacctgtcctcttcaagtcgactctgttctgcttcggtctgtctgtcctggccaaatctgttgggtatttttagccacaaatgcgactggatgactgggctccgacgacacattcacacattcatttgatgctttctacttaggggattataaacacttttttcccagccaaagtgcaacttagcattgtggatttctctctccacaaagagacacgttctcgaaaagacggacggatatggccagatcgactccgatattgatgctgattaagtagatatatatactttatactttatactataaaaccatattgtgctcttcatataaaaactagtaaagtgtccagcttttaagccactttatgcagagtcaggttagccactattgattgtcaggatccgtaaatctatcccaagtgcaattacaacattgggtaagtgttaagaaattttagtactgccattctgaagattcttttctctctcgtctttttttgttgaaggcaaatgcttttagtgtaaagactttttttgcagcgttgttgcatgtttctatttaaaaatcccaaacagccttccaatatactcaatacacatagacatacccacttgccctccatttagcaatccatctctctcgctctagctgcgcctgccctctcgcttgcacaatgtcaacgtcaaagtgcaagtggcattatggcaaagaagtcaacatcgcacaggatgtgggactggacgggtgtgtttgggtagtgggtggtgtggctaaaaggaaaacgaaccaaacagagacactgtgcaaaaaaaatttcagcgttggtatgttggtatgaaaggcaaaatatgaaaatgtttttgtaaagaaataatatgtggtgaagaataaaagagtcgattaacatttaagtcgaaataattatatgattatactgtattatatatataaataaattaaaatataattgaattagttgaaaaataagacaatttaattatttaatgccgaaccaaatggtcagccaaggacacccaaggacttcatcacatcaatccggaaaatggcccaactgccagcactgttcgatgaatgacgcccagtgcagggggcgtggcacagccttttttccgccattaaatgcaattttaaagtcaattttagcttgcaaacgaatgcaaataaatgctgtcagcgacaggacgcgattagtgggagtacagtgggggtggtggaggaaaaagcgaggtccttaaaggcttcaggttgcagtggcattggcagtggcaacagctcagttaaaacggcattaacaggcgttgatagatatcgaattagcaacggcgattgccatttgtttgtctgtgtacaaattattacgcatacgcctccgaacaaaatggaaaatgagatgcgtgcgtgcatgtgtgcgtacgagtatttgcggcatctgcagttccctttatgtttacaggcaattagcattttaatgccgcaccaaacaaagggcaactgcaggtgcccaaccgagtgatgcgatgcgatgcaatgtgatgcggtgcggtgcaaggccaatggtggcaatggggcatgggaaagacgaagggtgcacatatagggctggcataataacgtcgatggaggttgatgccgaactgaaaagcaggggcaggggcaggggcctgcaggtgctcggctggtcgcgctcgagttgcttttcattatttttcatgttcgacatgagcgcaaattgtcgacggcaggcaaaggggtccagtggggttccaaatactatagcacttagtacgcagatcccagccagaaacgatttaagtaccataggctgtgctcccaacgaggtgcgtctgggaatatcactttgagtgaaatacccaacgccttaacaaaggcacatttaaatttgaaagcaagccatttttaaagttaccaaacaccccccaaccccccccctctgcttttagaacagtttaaaaattataaaagttaaatcaaaaaatactttgttaatcacgtgtggagaattatattatatattggtcatttgtgcgaattatcaatgtgaattatcaatgaactcagaaaagtaaatattttgaatgtttaataaacaaaaaaacagatttaaattgtgcgttttgatttttattgtctattgtaacatgtgcgggatataagaataacgtatgtatgcaagcaaatttgtttaaaaaattagcgcgtgccttcaacactccacctgcattagcacttgtttatcaacaaacagtcacagaaaatacatataatttattgacattttgacatttttgcatatactaatgaataaaactagttttcatataagggttttatccacgttgatgctgccgatttacacagtcgagatggctttgaatattatttacgtcgatcaccagattcccatttttggtataaaatccaccgccacatccttgaggagctgctatgcaacatccaacaataaggcaaccaattagcagaagtaatacgaaggttcgcgaatccatttcaatgtgttccgttcgttgtgattagcaaagagatactgttcacccgtatcagctttgaacccagagtatatacgattttaatccaatcgggagattcccagaatcaaatgcaacgtaatacaaggtatcaattatagcagatctctccgagctcaaaacacgttgcttacggaacggaaatctagtacgaattattcgcattattgagttagttgtattaagaggtctacagaatactgagcttgtcagtccgctttaagccaatagtttataaaccggtaaagtggg

SEQ ID NO: 9116 - DNA, 3576 bp, DROSOPHILA
atggtacttaaatcgtttctggctgggatctgcgtactaagtgctatagtatttggaaccccactggacccctttgcctgccgtcgacaatttgcgctcatgtcgaacatgaaaaataatgaaaagcaactcgagcgcgaccagccgagcacctgcaggcccctgcccctgcccctgcttttcagttcggcatcaacctccatcgaccgcctgatggactccgccgagcaagctgctctgtcggagctggagggccaggggcaggcggaatcgccgatgggcggacagcagcactacgatgcccggcggatcaacgaatacaatgccgatggcaagctggcggacggagcccgccacatggacatccggttcatgcggcgcttcgagcgcctgccggtcaatctcagtctaagctcgattctggtcccgcacggcgtcgacttggatgagccggacgtgaagtcggcgctgcagtggagcggccatttggatccgctgttccagaacaacttagagcaagatccggcattgtcgtggcaatactttggctcctccacaggctttctgcgccgcttcccgggcaccgcctggcccccggagggctccaagggcagcaagctcatccacgacttccgcacgcacaattggttcgtccaggccgcctcgtcgcccaaggacattatgattcttttggatgcctcatcgagcatgacagagaagtcctttgacctggggatggccaccgcctttaacatattggacaccctcggtgaagatgatttcgttaacctcattaccttctcggaggtggtaaaaaccccagtgccgtgtttcaaggaccgcatggttcgggccacgcccgacaatatccaggagatcaagtccgcggtaaaggccatcaagctacaggatacggccaactttacggcgggtctggagtatgctttcagtttgctgcacaagtacaaccaatcaggggctgggagtcagtgcaatcaggccatcatgttaatcacagaaagcacctcagagtcgcacaaggacgttattaagcagtacaattggccacacatgcctgtccgaatatttacatacctgattggaagcgattccggaagcaggagtaatctccacgacatggcctgctcgaacaagggattcttcgttcagatcaacgattacgatgaggctcgccgtaaggtgattgactatgcccttgttatggctcgtccaatgatcatgtaccaggcggaccatccggtccactggagtccggtgtttgtggccgtttcaactccggtcttcgatagacggaaccattcggtgcgcgttgccaatctgctgggcgtggtgggcaccgatgtgcccatcgaggaaatccgcaaggtgatcccccaacacaagctgggaccgaatggctattcgtttatcgtagataacaacggacgggtgctctaccacccggatttgcgtcccttaggcgatgccaaccagtacatcgaccagctgaagcccaagtacgcctcggtcgacattacggagttggaactgccggagacggagttcggcaataataacgagcccattgaaattaataagaaccttttgaacgagatgcgcggtgacatgataaaacccaaagagggggagacggagtttacggtgatgaaccattacgatgactcgaaaagggtttcgaccaggacgcatcgatacttctacggccccatcgaggatacaccatttacactggctattgtgctcccggagaaatacggtagccatgagtttgtctcccagcaggagattcgccattcgcgtaacaatgttaccgaatactttaagggagacaactggcgcgtacatcccgactgggtgtattgtgagtacaatagcgtcagtgacttggagaaggaaagggagagctccggcgagtactcctcgcgcgatcaagagcccagcttcggatcgccagaggagcaggttcgacccaagtcgccgcagccacatcacaacatgcacagtggctccaacggcggcaatgcgcccggatcgagccactttggatcgcagcatcaaagctctcagggatctcgcaaggctgagccgtacttttgcgatcgagccctccttcagagcttggtgcgcgatgccatggtaactgatggactcgataggaacacgactggatcctccagcggcaaggaagataagcagcaaggataccagaagtttgtggtcgctacttcgttcgtggctacgagatcgggtcttctccggtggattgaccatgtaaagcgacccgaggatacccccgagcctcactttagcgaagataatgttagagccatggacacatcctggtataagagggcaattgaccagcattctgtggaaccagacagctttgtgtacagtgtaccctttggctcgggctatgccattaagtcgaacgccactctggtgaccgcctcccatgccatctttgtggaacatcgaggtcacaaagctgcagccggagttgtgggtctgcagtttcagcacgattctttagcgaagcattttataaacatcacctcagcctgcactggaatgaccggctgcaagagaacctgcgcttcggacaatttggattgctatgttctagacaacagtggatttgtgatcatatccgaagagatggagcacacgggcaagttctttggacagatcgatggcaccattatggattctttggtccaggatcgcatatacaagagagttacggtgaacgattatcagggtgtctgttccgatgcggataatccatatacggctgcaggagggattttgaaaccgaatcgcctgggctcctggttctttaatcaccttttggccctgagtgccgcctggttgtccctgatgcctgcttccctgcgggcatggccacaggaggagtatacctacgacaacgaggatgttgttttcgtggacaataattactctgatgaatacgagttcggaaatgaaaacgaatacaatatgcaggtggatcaggaaatggatgaatttttcaccacagccgacgtggaatatacgacaccaccgcctagacagcataaacctcacgttggaccgagattttcaccagatcctcacaacgccaggcgttgtgatctccgcacggatctctatatgcttcaaccggagcgcctgaatcagggtggtcaaaacaatccgcttaagggtaagctaaccaactgtcatgtgtctggatgcgagcgtcctttcagcgttcaaaagatcccgcacagcaacctgatcctgttggttgtagacaccttgtgtccatgtggctccaagcaactggacattgagcccttggaggaggcgggcgtaatcggagcctgcagtacgagacgccagggacaggagcaagagtcccgaaggcgccccaaaaagtgcatcaactatcatcccgaggagatcgaaatacagcagtgtggacgtggcagtactctgctgcacatgtcgggatcggtaattgtggcacatcttttgatggtgaccgtgacctttgtgctggccaatgcgtga

SEQ ID NO: 9117 - protein, 1191 aa, DROSOPHILA
MVLKSFLAGICVLSAIVFGTPLDPFACRRQFALMSNMKNNEKQLERDQPSTCRPLPLPLLFSSASTSIDRLMDSAEQAALSELEGQGQAESPMGGQQHYDARRINEYNADGKLADGARHMDIRFMRRFERLPVNLSLSSILVPHGVDLDEPDVKSALQWSGHLDPLFQNNLEQDPALSWQYFGSSTGFLRRFPGTAWPPEGSKGSKLIHDFRTHNWFVQAASSPKDIMILLDASSSMTEKSFDLGMATAFNILDTLGEDDFVNLITFSEVVKTPVPCFKDRMVRATPDNIQEIKSAVKAIKLQDTANFTAGLEYAFSLLHKYNQSGAGSQCNQAIMLITESTSESHKDVIKQYNWPHMPVRIFTYLIGSDSGSRSNLHDMACSNKGFFVQINDYDEARRKVIDYALVMARPMIMYQADHPVHWSPVFVAVSTPVFDRRNHSVRVANLLGVVGTDVPIEEIRKVIPQHKLGPNGYSFIVDNNGRVLYHPDLRPLGDANQYIDQLKPKYASVDITELELPETEFGNNNEPIEINKNLLNEMRGDMIKPKEGETEFTVMNHYDDSKRVSTRTHRYFYGPIEDTPFTLAIVLPEKYGSHEFVSQQEIRHSRNNVTEYFKGDNWRVHPDWVYCEYNSVSDLEKERESSGEYSSRDQEPSFGSPEEQVRPKSPQPHHNMHSGSNGGNAPGSSHFGSQHQSSQGSRKAEPYFCDRALLQSLVRDAMVTDGLDRNTTGSSSGKEDKQQGYQKFVVATSFVATRSGLLRWIDHVKRPEDTPEPHFSEDNVRAMDTSWYKRAIDQHSVEPDSFVYSVPFGSGYAIKSNATLVTASHAIFVEHRGHKAAAGVVGLQFQHDSLAKHFINITSACTGMTGCKRTCASDNLDCYVLDNSGFVIISEEMEHTGKFFGQIDGTIMDSLVQDRIYKRVTVNDYQGVCSDADNPYTAAGGILKPNRLGSWFFNHLLALSAAWLSLMPASLRAWPQEEYTYDNEDVVFVDNNYSDEYEFGNENEYNMQVDQEMDEFFTTADVEYTTPPPRQHKPHVGPRFSPDPHNARRCDLRTDLYMLQPERLNQGGQNNPLKGKLTNCHVSGCERPFSVQKIPHSNLILLVVDTLCPCGSKQLDIEPLEEAGVIGACSTRRQGQEQESRRRPKKCINYHPEEIEIQQCGRGSTLLHMSGSVIVAHLLMVTVTFVLANA

SEQ ID NO: 9118 - DNA, 4485 bp, DROSOPHILA
catcaaccatttttgtttatataactagggcaagttttttttatttatttttctttgtgtggtgctgacttctctattggcacaatggaatatttaaaaataatgcagggttgatgagcataaacaacttaaaatacagaaactgaaacaaacttaacaccagcttaaacctaaagtaacttaaaattaaacaaaaatgcgttcaacactctagtgtacaaattaaaaacccatttatgcgtgtgaaaattgacttaaaaattgtgctaaactattttcgttaaaaaaagtgaatgtgctttcaatgttacattttgttggcaacatttctatgaattcctcggctaaaaatatatgtgatatatatttcgatgggatctaacactaaccggcttgtctatacaacatttttgaatgaaaaatccacttttttgcaagtgtatgtttttggcggtttcgtgaatttcatttgcttcatagcgaactggacataaaatatcagttgttagactataagattctctatgcactcggatacactaacactcaaggatggatcgatttcgctagtcacaaaattgtagttcaatcttattctagcatagctcttttgtcttcctaacaaatgggtgtcgctatgtacattatcaaaaactcttaaatggcaggtggaaaatagggaatgttaattatgccaatataaataggatactattagtatcgacccatcctaaccagacaccccgttaacctacgtgaatgagtgggtggatacgatgatccagtggagcagctgccacagcggcgacaacaccacgatgatgaaaagtatgcagatgatgcgacaattcttgagcaggccgacaacaaactggatgaactgcatgggcaatgaaatggtaattgtactacactgattgggacccgactgggtatcggtactcgaatcggtgtccctctcccttgtcgcctccctcgccggcccatttccgtttgccagttataacttggctatgtggaactgggcctgctggttggccgccgtcgagtattgagcaaatggcattagttgacagtactcgagaagctgcgtttccagttctcgcaggcactttcccggagtggacgcgatcttcatctgaccagagtccctgctcttcactaggtagcccctctggattagcgcatagatggcaatgttcagattgtccagggccaggcaatatgggtgcacatgagaggcggaggctccgggttgctgtaggagctgctccacatgctgctggacgcgcacgagcagctccttgttactgaactccagctccaaagggatctgcaagaaggaatgaagttcaaataccgatttatccacgaaatgcttagctacacacctttcttaacgtgaccaccagttggtagtagaggcagaggaatggcgccagggcggccagaatgacatgcgagcattcattgtcctgcacattgatccggccactggtctctacctccacaactcgttcgtccagcagcagctgcagatgcgtctcaaactcggccgcctcgcgattcgattcaatgatgaactcgtgctggaatagcgcgtccatggtggtcacgtgcgcatgcagggcacacaaactggcatcgtacgagatgtccgtcgattgcttctgttgattcttttgctccttgagcgctgccagcagcaggtaggcgggtctggccagccagaacatgcagggattaatgtagagctgcagtgccagcatgggcacagccaccgccatggtctgtggacacagggcatgggctttcaggcgcttaacatcgatctgctccgccagttgcttggctgccatgggcgtaaactgcaggcggccagtcgcgaaatgtaaaatattcgagtgtatctccacagcatcaatcacatccgccttaatgctgctcggagtcgtgctaacatgggcgcccagctgctcgaagattcgcttcagatgcagaacacctcgtgctagctcgtccagagtgacactcctttgggcatacaattgactggcgtagtagaggctaagcagattgaacgtggagatcacaatgcgacgctgctgctggtagataatctcattggccagctgtttgactagttccacctcctggcggttcagcttctgcaagtgaccacccacgcctgctcgctgcattcgctgcgcgctgtcgtgtccgaaaaactccttgaccgagatgggctctccgaagtcgaggaacatcttgccaaatcgctcgtcgatgatttttagggccttgaaaaagccctttgtcgactccttgggcttgggcacacccagcagctcatagacgaacagttgctcctccaggacgcgttcgtaggccacactcactggcacaatcatcacatccggcacttcgcccgtgaaatatggcaacagagccatcgagagtagtccaattttgggaaccagagctttgaaattcctggagcgcgtgccctcaatgaagaactccacgccgatgtggtagtttgccaccagcgcgtacatatactcccggaaaatatcccagtatagctcatcgttggagaagctgcggcgcatgaagaacgctcctgttttcctcaacatggtgcccattccgaacatggagtggaaatctataaaaattaagtagacaacaattaatattattgggcaattaagaatattaacgacttttgtttagaaacagcgtacaaaaattagcaaatccgttgacagtcacaatcacaattgctaattcatgctaattacttggcaaacatatttgaaaagtggcgtaaaattagcggaaaatataagctcgcttaatgtatttaacacattttccgccagattgtaatttgtttatggtttttggcgaaacatacccatgccggctgctattcctggtatctcgatgtcgtagtaatagcagatgtaggacatcaggatgaagtccatgtagctgcgatgacttggcagatagagcaccgggcacttgcccatatccttgcgcacattggccatgctagccgaattgacatagaatccatcgcagatccgcttgccgatcgccgtaatggcaatgccgcaccaccggatgatggccatattccgatcgaggccgatttcatcaatgatcgcccgggcctgacgctccatctgcttgagcggcgtgcccgactccttggcatagtgctccagaatggatcgcagcttctcgctcctaaggacgtgctgcttgagcttttgcggattgagatacttttcgaattcgtatgccacctgcggattgaactccctggtcatggaggcctcgttgcccggcgctatgatgttcttgaagttcctcatatattcggccgcactgggcgtcttctgctcctcctgttcgctggattcaccttctacggtgccggatgacgtcgactgcctcacgggatttctatccatcgcgctgcgcttcaactgtggaaatggaaaaaaaaaaacgtgcgtcggtccgatgagaatctctggaggtagctgactgaaagaaaatatttgacgaatcaactgtcaagcaggcggccccacttaacagacatgacacacaaacacactgccataaactcgctgtttgctgagatatcgcaggcactgggagaaaatgtgtgcaacgaaatgtcggagtaaaagatatatatatttttaatttgttaaatgtgccatttaagtgtatattaactttttaaacacttattaaaaattaatttaactttcaaatttgtataatttataaaaagaatttaatttaaattttgaaatatgcagtgcatatcgagttttatgtctgataggttataggttcattgcgccaagtgatcgtttgtgtgaagagtgccttgctatcccaaaggttgattatctgacagattcataagcagttacggcaatcagcggcgagtggcgaatgttgcgtgttaaaggtgaaggcgtataaagccttaagttaagttaagttaaaaataagaaaacaatgaaattttcttcaactccatagtttctaaatgggtgccattttcaaaggtatcatgaacttaaggagcttacaaattgtatggctataaagatttaatagttgttgtggccttttaaattaattcagctgagagtaatttagaattatatagcatttgctctacttgggacttgaaggtggattctagcgatcgctgacctatctcaaagatacactgcgcgaatagagacacgcaaaactcgtgtcacgacacgttcgcagtgctgctgataacgtcactcatcaggtgagccgaaaaaacacctggccgggcgtaaaaaaaaagtatgagaaagcactggctaagtcataaaaccacacaccctctaaattcgagtgccaaagataatgccaaggaaaaataatcggccaaaaccaagaaatacatacata

SEQ ID NO: 9119 - DNA, 2175 bp, DROSOPHILA
atggatagaaatcccgtgaggcagtcgacgtcatccggcaccgtagaaggtgaatccagcgaacaggaggagcagaagacgcccagtgcggccgaatatatgaggaacttcaagaacatcatagcgccgggcaacgaggcctccatgaccagggagttcaatccgcaggtggcatacgaattcgaaaagtatctcaatccgcaaaagctcaagcagcacgtccttaggagcgagaagctgcgatccattctggagcactatgccaaggagtcgggcacgccgctcaagcagatggagcgtcaggcccgggcgatcattgatgaaatcggcctcgatcggaatatggccatcatccggtggtgcggcattgccattacggcgatcggcaagcggatctgcgatggattctatgtcaattcggctagcatggccaatgtgcgcaaggatatgggcaagtgcccggtgctctatctgccaagtcatcgcagctacatggacttcatcctgatgtcctacatctgctattactacgacatcgagataccaggaatagcagccggcatggatttccactccatgttcggaatgggcaccatgttgaggaaaacaggagcgttcttcatgcgccgcagcttctccaacgatgagctatactgggatattttccgggagtatatgtacgcgctggtggcaaactaccacatcggcgtggagttcttcattgagggcacgcgctccaggaatttcaaagctctggttcccaaaattggactactctcgatggctctgttgccatatttcacgggcgaagtgccggatgtgatgattgtgccagtgagtgtggcctacgaacgcgtcctggaggagcaactgttcgtctatgagctgctgggtgtgcccaagcccaaggagtcgacaaagggctttttcaaggccctaaaaatcatcgacgagcgatttggcaagatgttcctcgacttcggagagcccatctcggtcaaggagtttttcggacacgacagcgcgcagcgaatgcagcgagcaggcgtgggtggtcacttgcagaagctgaaccgccaggaggtggaactagtcaaacagctggccaatgagattatctaccagcagcagcgtcgcattgtgatctccacgttcaatctgcttagcctctactacgccagtcaattgtatgcccaaaggagtgtcactctggacgagctagcacgaggtgttctgcatctgaagcgaatcttcgagcagctgggcgcccatgttagcacgactccgagcagcattaaggcggatgtgattgatgctgtggagatacactcgaatattttacatttcgcgactggccgcctgcagtttacgcccatggcagccaagcaactggcggagcagatcgatgttaagcgcctgaaagcccatgccctgtgtccacagaccatggcggtggctgtgcccatgctggcactgcagctctacattaatccctgcatgttctggctggccagacccgcctacctgctgctggcagcgctcaaggagcaaaagaatcaacagaagcaatcgacggacatctcgtacgatgccagtttgtgtgccctgcatgcgcacgtgaccaccatggacgcgctattccagcacgagttcatcattgaatcgaatcgcgaggcggccgagtttgagacgcatctgcagctgctgctggacgaacgagttgtggaggtagagaccagtggccggatcaatgtgcaggacaatgaatgctcgcatgtcattctggccgccctggcgccattcctctgcctctactaccaactggtggtcacgttaagaaagatccctttggagctggagttcagtaacaaggagctgctcgtgcgcgtccagcagcatgtggagcagctcctacagcaacccggagcctccgcctctcatgtgcacccatattgcctggccctggacaatctgaacattgccatctatgcgctaatccagaggggctacctagtgaagagcagggactctggtcagatgaagatcgcgtccactccgggaaagtgcctgcgagaactggaaacgcagcttctcgagtactgtcaactaatgccatttgctcaatactcgacggcggccaaccagcaggcccagttccacatagccaagttataa

SEQ ID NO: 9120 - protein, 724 aa, DROSOPHILA
MDRNPVRQSTSSGTVEGESSEQEEQKTPSAAEYMRNFKNIIAPGNEASMTREFNPQVAYEFEKYLNPQKLKQHVLRSEKLRSILEHYAKESGTPLKQMERQARAIIDEIGLDRNMAIIRWCGIAITAIGKRICDGFYVNSASMANVRKDMGKCPVLYLPSHRSYMDFILMSYICYYYDIEIPGIAAGMDFHSMFGMGTMLRKTGAFFMRRSFSNDELYWDIFREYMYALVANYHIGVEFFIEGTRSRNFKALVPKIGLLSMALLPYFTGEVPDVMIVPVSVAYERVLEEQLFVYELLGVPKPKESTKGFFKALKIIDERFGKMFLDFGEPISVKEFFGHDSAQRMQRAGVGGHLQKLNRQEVELVKQLANEIIYQQQRRIVISTFNLLSLYYASQLYAQRSVTLDELARGVLHLKRIFEQLGAHVSTTPSSIKADVIDAVEIHSNILHFATGRLQFTPMAAKQLAEQIDVKRLKAHALCPQTMAVAVPMLALQLYINPCMFWLARPAYLLLAALKEQKNQQKQSTDISYDASLCALHAHVTTMDALFQHEFIIESNREAAEFETHLQLLLDERVVEVETSGRINVQDNECSHVILAALAPFLCLYYQLVVTLRKIPLELEFSNKELLVRVQQHVEQLLQQPGASASHVHPYCLALDNLNIAIYALIQRGYLVKSRDSGQMKIASTPGKCLRELETQLLEYCQLMPFAQYSTAANQQAQFHIAKL

SEQ ID NO: 9121 - DNA, 4264 bp, DROSOPHILA
tttggtaactttcacttttttgttgttttttttttttgtatagcttttgcacaaatgcagacgcgtaatagtttacaaatttgttaatgtttgacacagtttagtgattatttttttacggtcgaacagaatttttccaaatcatctaattggcatagcataaaaagagccgaaacacttgacttggccagaacgagcgatttgaactgtcgattcggaatgccgcgtcaccttgccgggctcacagagttgttaacgaattttcgccggagcagagtcctttttgcttgtccacgcccacgaatttgctggcgttattgtccattcacatatatttttacccttatgcgattttctgcgcgcgcgtcaagcgtccaacgtttctcgagcgtttataaaaattcaaatacgattctaaaacgctgctcaaagcctctgccgcggtcgctgctccgccatcgctgtcgacgtcgacgtaggcagtagcgcaagagaaatggcgctctcagctcgtgctcagacaatgagtgcgagtgggacaaccatatgcacttcctccccgttttgagctggatttgttcatgcgcactcgcactgctcgcgcgtgtgtgtttgtgtgcgtgtgtgtgtgtgtgagcaagaggcggagctaagagttcagcttggcctgtttgtatctgttgtacttttgcttttggccgcttcaatatggacgctttgtttaagcccgatgtcttctacaataaaacaaaaaaaaagccaaaactggttctcttgttcttattcccagcatgtgcatgttccacagccagaaactgtgtgtgtgtgtgtgtgtgagccattaggaggaaggaaaaacaatctaatcaagcaatttaaacagtcaacagcaataaaaactgcttaaatttgcatggcttagattctcgtggtacgaagtaactttaaagtagtgaagaccaatcgtttaatattttaaaatattcaaccaaatacatacaaaatttctaagtaacataacggaattacaatacttaattaggtaaccaaaaataaattaaaactattaagaacatttagaatttgttgtaacccccctcataattgtcagctcttggtcaagtaggtctcttgaaagtctcccaaccgactggccagcagctgtcccttgtcccgaaacttcttcaggctgagctgcaacacctccatcgattgtatttgtttggtcagctccgcggtccttacgttcaggtcattcagtgtctcattggactgggcttcccagcaatttcggaccgttgccaggtgctgtcgcaactggagctcaaaaccgctaacagtttgctgcacatccgaccgcagacgttgttgcaagagcctggcgtactggctcttgaaacttcgctcttgggcggcagttgtccaagcggcgtactcgtagatgtaaaaggatccgacgagcccaccaaggatcaatacaattggccagttgaacgaacggatggccatggcgctcagtaaaacggtgcccaagctacctttagacttcaccaaagattccagcatctgccaatggtttccgttaactaaaggtggcaggggcgaacatttcttgtgaccattttgtaacttttgaattcgaaatggacttgcgtgcaacggtaggttgccttcaagacgatgccacagggcagtaaaacccaaagaaaatcgaaacctaagatctggctgaaagtcactcatataggattggcaatccaggccgtagattagttgccaatcgcaagagttctcggcgatcggaagcccaatttctttctctatatctaatatttttctttgtaggggtatggagagacattgaaggacacgatcttcaagaagtttatccaaatgggcacataacgagcgttggtactggcctatttgtgctgggaattccgggtgaaatggttgcgagaatgatagcacagacgagggtattaacgtttttatctggtcgttcaaaacgcaccgacctactctttgtgtcatttcagtcagttcttcgaaacaatattgaagcgcttctctatcctcttgcattagtattaaccagtcctctatttcggcattcaagttagctcttctctccttattctcatcgataagacgacttactttctctatgaaagggcatatcagagttgattttaactggtttaaaatcttctgcgcacttagcaagtgtggaccaaatttggtttttaacgctgacaccgcgaggcaattcgaaaaatcattttcgaaacgcagaaactcctgatatcgctgttgggtttgtcccgagggattcgtaatctgaccattccttatatgcaatgcctccagtgctgaaacatgatagatcctttcccacgcttcctgtgcagttgaataaacacctaattcatccacgagcaggttaacgcaacgttccatatgctgatcctttaccttctgctccatttccggctccagactgctggccttatcccatcgattgttgagtataaagagatttggacgcgagagtttggatgccacgtccttgaagaactgcctttccacgcgcgaaacagtggactcggcgttgagaactagaatgaaaacatccgcatccatgcagtagctatctaggcaatcgtccagttgcgctgttacatccactccaggtgtatccatcaaaaccacatcgtaatccaatatcgagcaacggttcttggccatattgacctgcagcagagttgagggttttagggccccaggagaatgtgcactggccagttggcttagggcactcagttccatatgctcatcctcctgctcgacctttacgtgctcggtttcattcgagccattagcttgcacttgacaaaaacagctggtggtatggcccatggcgctgggcaggattttttcatgcagaagtgcattgatcacggcactttttccatttgaggtgcgtccaaaaaatgccaccttcattcgatcacgtgaaagaacctttgcaatggcctccaccctgctggagaaggcgcacaggtgctccagcatttgtcgatcttttaacaggacagtctcctccaaaatggttaggaaattggacaggtaattactcaaatcgtgatatatatcctgcagttctgtctttgcgtccacaaactcacttaatcgcgaagacgacgatgaggatataaacgaggacaccgacgacgtactttctccggagtcagattccgccattatgattagatattacaaaaatgttaacaaatttatttatgaaatataggcaactgtagatgttgttttgctcgctttttgaggggttgtgacacattaaacaataagttgctttgaaaaaaagaagctgctgtaaatgtttcacaatgatatctagatttgtgtttaccaaatgtcatttaataactacataacaaagataataacttagttcaatgggcatgcaaattgtgttaaatcagtacattcgattcctgaataatttcgcacaatttagctgcaattttgaactgacctcaatacctttcaactaaatgcacagcctttaaagcctaacgatttccagctcgcagcccaataaaaatacacacttatctacccaaaaaaaaaaaaattaacacaattaccgcaatcatggaatcacccaaaagagagtcggaaaaagagcaggcaatatgcacattaatgggccactgaactaatagaccgggccaagaccatagggcccaaaaacgcttttggtgaacttcaaaaactaccaaaaatacggcaaatagaaaaaagtcaaattggttggttggtcgatgctcgattcgggctgaaaaattagcagcatcatcaacaagttgaggagggggcatttcgattggatgcttgtataatttttttttcatcgctgctagaaaacagtaggaaaaaaagagcacagaaatattgaacaagcaaaactcgccgggttaatcatttttttttcttctcttcaatgtttttttgagcgttttcttgagtgctttattacaacttaattagtttaaattgttgccggcacaataataaagaagccgatgctgattgagaaaataatgatgggagatttgaggggtttagtgggaagcagggctgtatccggtgaaagacaatcaaaagtcgtttccgaaacattttttggtaacaaagcatatttaaattttaaatttaaattgctttccctagatggaag

SEQ ID NO: 9122 - DNA, 2264 bp, DROSOPHILA
atggcggaatctgactccggagaaagtacgtcgtcggtgtcctcgtttatatcctcatcgtcgtcttcgcgattaagtgagtttgtggacgcaaagacagaactgcaggatatatatcacgatttgagtaattacctgtccaatttcctaaccattttggaggagactgtcctgttaaaagatcgacaaatgctggagcacctgtgcgccttctccagcagggtggaggccattgcaaaggttctttcacgtgatcgaatgaaggtggcattttttggacgcacctcaaatggaaaaagtgccgtgatcaatgcacttctgcatgaaaaaatcctgcccagcgccatgggccataccaccagctgtttttgtcaagtgcaagctaatggctcgaatgaaaccgagcacgtaaaggtcgagcaggaggatgagcatatggaactgagtgccctaagccaactggccagtgcacattctcctggggccctaaaaccctcaactctgctgcaggtcaatatggccaagaaccgttgctcgatattggattacgatgtggttttgatggatacacctggagtggatgtaacagcgcaactggacgattgcctagatagctactgcatggatgcggatgttttcattctagttctcaacgccgagtccactgtttcgcgcgtggaaaggcagttcttcaaggacgtggcatccaaactctcgcgtccaaatctctttatactcaacaatcgatgggataaggccagcagtctggagccggaaatggagcagaaggtaaaggatcagcatatggaacgttgcgttaacctgctcgtggatgaattaggtgtttattcaactgcacaggaagcgtgggaaaggatctatcatgtttcagcactggaggcattgcatataaggaatggtcagattacgaatccctcgggacaaacccaacagcgatatcaggagtttctgcgtttcgaaaatgatttttcgaattgcctcgcggtgtcagcgttaaaaaccaaatttggtccacacttgctaagtgcgcagaagattttaaaccagttaaaatcaactctgatatgccctttcatagagaaagtaagtcgtcttatcgatgagaataaggagagaagagctaacttgaatgccgaaatagaggactggttaatactaatgcaagaggatagagaagcgcttcaatattgtttcgaagaactgactgaaatgacacaaagagtaggtcggtgcgttttgaacgaccagataaaaacgttaataccctcgtctgtgctatcattctcgcaaccatttcacccggaattcccagcacaaataggccagtaccaacgctcgttatgtgcccatttggataaacttcttgaagatcgtgtccttcaatgtctctccatacccctacaaagaaaaatattagatatagagaaagaaattgggcttccgatcgccgagaactcttgcgattggcaactaatctacggcctggattgccaatcctatatgagtgactttcagccagatcttaggtttcgattttctttgggttttactgccctgtggcatcgtcttgaaggcaacctaccgttgcacgcaagtccatttcgaattcaaaagttacaaaatggtcacaagaaatgttcgcccctgccacctttagttaacggaaaccattggcagatgctggaatctttggtgaagtctaaaggtagcttgggcaccgttttactgagcgccatggccatccgttcgttcaactggccaattgtattgatccttggtgggctcgtcggatccttttacatctacgagtacgccgcttggacaactgccgcccaagagcgaagtttcaagagccagtacgccaggctcttgcaacaacgtctgcggtcggatgtgcagcaaactgttagcggttttgagctccagttgcgacagcacctggcaacggtccgaaattgctgggaagcccagtccaatgagacactgaatgacctgaacgtaaggaccgcggagctgaccaaacaaatacaatcgatggaggtgttgcagctcagcctgaagaagtttcgggacaagggacagctgctggccagtcggttgggagactttcaagagacctacttgaccaagagctgacaattatgaggggggttacaacaaattctaaatgttcttaatagttttaatttatttttggttacctaattaagtattgtaattccgttatgttacttagaaatttt

SEQ ID NO: 9123 - protein, 718 aa, DROSOPHILA
MAESDSGESTSSVSSFISSSSSSRLSEFVDAKTELQDIYHDLSNYLSNFLTILEETVLLKDRQMLEHLCAFSSRVEAIAKVLSRDRMKVAFFGRTSNGKSAVINALLHEKILPSAMGHTTSCFCQVQANGSNETEHVKVEQEDEHMELSALSQLASAHSPGALKPSTLLQVNMAKNRCSILDYDVVLMDTPGVDVTAQLDDCLDSYCMDADVFILVLNAESTVSRVERQFFKDVASKLSRPNLFILNNRWDKASSLEPEMEQKVKDQHMERCVNLLVDELGVYSTAQEAWERIYHVSALEALHIRNGQITNPSGQTQQRYQEFLRFENDFSNCLAVSALKTKFGPHLLSAQKILNQLKSTLICPFIEKVSRLIDENKERRANLNAEIEDWLILMQEDREALQYCFEELTEMTQRVGRCVLNDQIKTLIPSSVLSFSQPFHPEFPAQIGQYQRSLCAHLDKLLEDRVLQCLSIPLQRKILDIEKEIGLPIAENSCDWQLIYGLDCQSYMSDFQPDLRFRFSLGFTALWHRLEGNLPLHASPFRIQKLQNGHKKCSPLPPLVNGNHWQMLESLVKSKGSLGTVLLSAMAIRSFNWPIVLILGGLVGSFYIYEYAAWTTAAQERSFKSQYARLLQQRLRSDVQQTVSGFELQLRQHLATVRNCWEAQSNETLNDLNVRTAELTKQIQSMEVLQLSLKKFRDKGQLLASRLGDFQETYLTKS

SEQ ID NO: 9124 - DNA, 4566 bp, DROSOPHILA
atgggaatggaatacgtctttatgtattgtgtttgcacatgacgtatgaatttttcttgttcgtttcgtttggggcttttcttttgtggatttcctcacccactgtcttttaggtgacagcaaccatttaatattaaattgattgcaaatgtggatttccaacagcttttagaaaatattttcgggctttaaagaagaatttaaaacacaataattattgtaatgtaaatattttatttttacatcggtttgtttcattaaaaaatagttataagattatattagatatgaaaattaatatgtaacgctactttttttctaaactgtgacattttaggctattttttcttttaccatttccttatgtcatatgaatttcatttaattatgacatatacatgaatcgctggctttaaattcgaataagtacattaaatttaccaaaaatgacatgcagaattaaaaagtattcattcaaacaaatttgttttccccccataaatggacaacaaaaaggtactgcctctatcatccaagtgtcaaaatatgtcatagcaaccaactatcgtcagtaagaaatgagttctacaacatgcaactttttcatggtgtcgcaactgtgggcgggaagtttgatttttcgcaacaaacagctcgctttgaactctggtttttctctttaataaatgcaactgatctaactattaagtaaaattgtattttttattaaccacaagcaagcgcaaagatgagtttatattctaaaaaaaaggagggtgattaatttctattagtttggattacaaatttggactaggagtcaatttgaaagtcgttatatcaataatacttctggactttgaagcgacagttactgttccataacttcggattatcagctttgccttcaccacatatatagagtattctctggatgtgtcgagatttgtatttttaaacgacgactggatggcaaaagttcagtgcgctcgcagctattatgtggattatctgcctcttgctggtgccccttgtggcggccagttccaatacaagacttctaaatggcatcctaagtcatgtggacaaggaagccaatccctgtgagaactactacaaccacgcctgcggccagtacaacatgcgtcacatcgacgacaccttcttcgacattatacaaatgctggatcaccaggttaaccagaacttggtgaaactaatggacgagctggaaatgagttctcaattgccggactttaatgtatctagtgtagatggcaaggtccttcgttactaccttagttgtcgtggagcgccgcggaatatggatagtttaagccagtatctgaaagtgatttcccccggcgaaggactcacatggcctcaattcattccggacggtagttcttggccccaggagaatttcaaatggctcaaggcactggctcatctgcatcgctacggtctaactaacgtgttttttaaccttgaagtcgtgtcaaacccacgaaatgccagcgagtacatggtagaattaaatacacccacttttggagaagaatctcaactgccgaacagttttattgaaattctatccgttctctatatcataaaggttccttccagtgaaatcattactctggcgcgaaaaatgcgaacgcttgaattgttgcttaaaacgatgatcaatccgatcgacacactgaataatagatacattagtatccgcgattttcagatggaaaccggtcacaactggcagcgtttctttgagattttaataggctccagcgcagccccagaactccaagtgttggtgcgcaattttaggtactttaccgcccttaaggaactaatggacaaacaggatgctcggctggtggccagctacataatgacccgatttgcaatatttctattggatgaaaccatgggtggcagagaatccacggagtgtgtgtcacaggtgcgccgcaacatgaatttggctgcaaacatgctctataaggaacgatttttcgaagactccactttcagtgccaatatcctggaaattaaggacattttcgagaaactacgccatcagtttctgctgcaagtcgatcaaaatcatctagagttgactgctttgcagatgaaatttttcgttcgaaaggcagaggcaattgagatcaacgttgtgaatcttccaaaaaccgatgatcttcgccatttcatcggccagtactaccaagacttgcagtttcccactggcgagctggattaccatcaggagcacctcaaggtgctgcagtttcgcacccaaaagatgttggcccaatccagcaaagggcactcagaggagcagaatattttgacttacaggagccaagcggcgccattgcctccacctcgtactatgtgatgcgccccaatgtgattattgtcccccttgggctactgcaagagccattctttcagctggaaagcgaagatgtcttcaaatacagcctgatgggatatattatggcacatcacttgataagcgcctttgccaccgagggcattacaattggcagcgatggaaacgatcaatcatttagatcgcatcgtttcgaagaagcagtcagttgcttgtcacgcaattcagagaacatcgatgaaagcatgggcgatattgctggtttagaactggcctattttacttatgctaagatggccaagaatcgaaaccgtttggatttcacccatttgccaccggagcagatattcttcctaaatgttggccagttcttctgcggcaatagcgatatgttggttcagtacaaggaagatcaagtgcgtttacagcgagctattgaagggtttgagccatttgacaaggcttttgggtgctaccgcaataagcctaagcacgagaagtgtcgtttatagtgaataccttgtacatatgcttagaaatacatattttttgataacaataatacaagacaatcgtgttaaattataaaagtgttacaatcacatccattctgttcttttaaaattagttttaaactaacaatagtcaataggctaagatagttaaatgatcatcattcgaataaacaacgttcaagattgactcttcaatgtcatgcacctgcaagattaccatttattataaattaaaaaaacacacaaagttatacgtgtgttacttacatgcattacattcgggcctggccatccacttaatatactgagatgtagcggtctttgatttgcgggatctcttatggattttagaacattgttaactttgctgacaaagtaaattcaacttttaacgacttgtggtgtgtgcggcccgatgaaatgtcttaaaatacaaattaaatacaattcaaatataattcagacgtcaaaaggtttaaagttaaaatatattttaccttttagtgttatttatacgtatgagccttgaaaacacagttgaatatcaaacggatttttgttaccaacagattccaacagattctccaactttcgttttttgattgcctattcactcgaagatctatttccagtactatgatcctccatagtagagtcagctcaggatcttgtgataatccgcaagcaattcgacaaagaattcgtcggccagaacaaaatttattaaatcattgtagtcattctcaggatctctcttaactggcaatccgtaataacgtatttcattatctccaaaatacagtcggaattcagattaaatttgccgtttccgtccttttttataaatatacatacaaatatactaagcaatagactgaaatgaattctagaatttgaggaaactaattatgtacctttatgaatacttttccttacttgtactaatcaaactaatttttaacagatttttcatgccgaatgattacaatcttatttggatgatttgatagagcttaggaataatggttttaattttggattaaagagttgcgattaagaaacgaagatattatctagtttttgaagaacacagggtactttaaatttcgcacgcggaacgtcaaaacaagaagaagttttcatcaacactgaatttccgcttggtaatcagctgataagcgtgctcacgatagccgagttcacatccaacagatgtttcccttagcagggtttcagacccaaatgatgatttatcttattttgattaagctccaacacgcattgctttgcataattcaggtattattaggctgcttaatatacaatccacttatattgttgtgtccatgaggaacatcgacacgtgaggataaaaatatttatttatcgatatatttttactcttgagccttttgcacacccctagttgtgttccaccactacttcgcatggcacgcttttttccgtgtgctcggttcgttcggccatacaaaacacaaaattcaagtttaaaaactaaataggcaactaaaagggaagccgcagcgaataaagtgatttgctgaaagagacgtaagaaagttaatcgcatcgaaggcaccagaaatcggggatttctaacacggcgcgcgtgcgacgtacatacatacg

SEQ ID NO: 9125 - DNA, 1584 bp, DROSOPHILA
atgtggattatctgcctcttgctggtgccccttgtggcggccagttccaatacaagacttctaaatggcatcctaagtcatgtggacaaggaagccaatccctgtgagaactactacaaccacgcctgcggccagtacaacatgcgtcacatcgacgacaccttcttcgacattatacaaatgctggatcaccaggttaaccagaacttggtgaaactaatggacgagctggaaatgagttctcaattgccggactttaatgtatctagtgtagatggcaaggtccttcgttactaccttagttgtcgtggagcgccgcggaatatggatagtttaagccagtatctgaaagtgatttcccccggcgaaggactcacatggcctcaattcattccggacggtagttcttggccccaggagaatttcaaatggctcaaggcactggctcatctgcatcgctacggtctaactaacgtgttttttaaccttgaagtcgtgtcaaacccacgaaatgccagcgagtacatgatggaaaccggtcacaactggcagcgtttctttgagattttaataggctccagcgcagccccagaactccaagtgttggtgcgcaattttaggtactttaccgcccttaaggaactaatggacaaacaggatgctcggctggtggccagctacataatgacccgatttgcaatatttctattggatgaaaccatgggtggcagagaatccacggagtgtgtgtcacaggtgcgccgcaacatgaatttggctgcaaacatgctctataaggaacgatttttcgaagactccactttcagtgccaatatcctggaaattaaggacattttcgagaaactacgccatcagtttctgctgcaagtcgatcaaaatcatctagagttgactgctttgcagatgaaatttttcgttcgaaaggcagaggcaattgagatcaacgttgtgaatcttccaaaaaccgatgatcttcgccatttcatcggccagtactaccaagacttgcagtttcccactggcgagctggattaccatcaggagcacctcaaggtgctgcagtttcgcacccaaaagatgttggcccaatccagcaaagggcactcagaggagcagaatattttgacttacaggagccaagcggcgccattgcctccacctcagccattctttcagctggaaagcgaagatgtcttcaaatacagcctgatgggatatattatggcacatcacttgataagcgcctttgccaccgagggcattacaattggcagcgatggaaacgatcaatcatttagatcgcatcgtttcgaagaagcagtcagttgcttgtcacgcaattcagagaacatcgatgaaagcatgggcgatattgctggtttagaactggcctattttacttatgctaagatggccaagaatcgaaaccgtttggatttcacccatttgccaccggagcagatattcttcctaaatgttggccagttcttctgcggcaatagcgatatgttggttcagtacaaggaagatcaaatctatttccagtactatgatcctccatag

SEQ ID NO: 9126 - protein, 527 aa, DROSOPHILA
MWIICLLLVPLVAASSNTRLLNGILSHVDKEANPCENYYNHACGQYNMRHIDDTFFDIIQMLDHQVNQNLVKLMDELEMSSQLPDFNVSSVDGKVLRYYLSCRGAPRNMDSLSQYLKVISPGEGLTWPQFIPDGSSWPQENFKWLKALAHLHRYGLTNVFFNLEVVSNPRNASEYMMETGHNWQRFFEILIGSSAAPELQVLVRNFRYFTALKELMDKQDARLVASYIMTRFAIFLLDETMGGRESTECVSQVRRNMNLAANMLYKERFFEDSTFSANILEIKDIFEKLRHQFLLQVDQNHLELTALQMKFFVRKAEAIEINVVNLPKTDDLRHFIGQYYQDLQFPTGELDYHQEHLKVLQFRTQKMLAQSSKGHSEEQNILTYRSQAAPLPPPQPFFQLESEDVFKYSLMGYIMAHHLISAFATEGITIGSDGNDQSFRSHRFEEAVSCLSRNSENIDESMGDIAGLELAYFTYAKMAKNRNRLDFTHLPPEQIFFLNVGQFFCGNSDMLVQYKEDQIYFQYYDPP

SEQ ID NO: 9127 - DNA, 7726 bp, DROSOPHILA
acgctcccattccatacccaacggcgtgctggccagcgagctggagccgctgaataacaacaagcatggcgcttcgttcaccatgggtggcctgaccatcacgacgacggcgcccagcatccccaacctatccagtattaacgagaagaccaactccggaaattccataaacagcagcaattacagcaataacaatagcctgagcacgctgaccggaggaggaagtgctgccagcggacccggaggaggcatcaccattgtggccggttccgggaaccatggcggcgctggtggaggaggaggaggcggcggtagacacaagtcgaatccccgccgtcttagcatcaagcaggatcagctgcccatcgattccatttgttgatattattaattgagttagtcagttatctgatgttgtattctagttaagcataggctcctcccaatatacataattctaactcaaactaagctaagcgaaattccatggagagctcatctgtcatagccatagagctgctgcagctgtgaacatccctcaaaaaaatccccctatcctgctgaagtggaggcaatctgattgttatccacctatctactatacttactactaaccctgaaacgattgtacatgtttatgtctaggctaagctgatgaatgattcacgttgttagctttagctttgtgttgaatttactatagttaagttacaaattgatattaacgcaaagtaagatgtgagacccagaaaccaaaatgctgcaacttagacaactagataagtcattaaacggctcacttaacatgaaatttatgcgaagacgcagcggaattgaaaattccctttaagtcgattattgtttaatattactcacttcaatgagatataaagaatgtacattttaatccatatactgtttcaaaaacaagagcttcaattatcataaggagtggacaataaaattgtatgcgtatgtgagagtgattgataaatgaattttatttttaagcttcgcccagattgtgcaaatgaaagacggtgaattataccataaaatggaatgaaaagaatctaaccgatgcgttttatttggaatactcccgggtagtgcataatatgaatccaatgaaagacagttttatatatttttgtagtgtttttttctttaattttgacgttctttgtttagctgagggaaagtttatcatttttaaagcatacaaatttctcatatgaaacatacacaaatatatagcgacatacaagtacagggattggtcaaaggtggtcagagatccttggaagcttttgatagcatatcaaggatattcttggtatctaaacactcctcttaccaaattttatgttaatagaatacgcgaagggtttcttttaatgtattttttatgtccgtaggcgtagtagtacaatagtaggtaattagttcaatttcaatttacaacaaataatctttttattaaagttgcgctttttattgaatttcgtagttttcgatttcgacttgcaacaatcgactttcaaatgtgcgcgaaattcattacaacaattaaaatacatatgcctatattaacaatagatccatgttttgttttcgtatcggatttgcttaggttgatatcgtatctgtagctgtggcttagtttaaagtttaactctttatgctgtaggacatttttaagaatattaaatattaatatttcttaatcgcttatctactaaaccgttttaaagacagttaacgggacgctctagcaagagcaattatttttgtttaaaatttttcgattctttccctttttttttttttttttgtttagtattttctttagtttctttgaggtgtgttagcacactcattgttgctttagcctagcgctggtttattaaatgttagctaagtttaaattatgtatttacagatgctgtgtgctagctcgaaagtgataatttgtgttattttttgtgtatgggattttgataaatgccttatgagtttagaacgatttacaactattcaccgctgtggtagatctttcactagaatatagcttacaaatgtaaatgtcttacgcccgtaattcatgaaatgtccagcaatattttcaacctttacaatagttttgtgtgtgtgtgtattttcctatcgtctattttatacatttttctctgcatccatctttgtgttttcatattttacaagctaatattatagagatgtaaacggtttcaccatcaaatattgttggacgacgcgacgatgaataatggataagtgggattggttctgaatgtgagttgtttactgatttacaaattcatgtgaagcatttttaattacattcttttcggatctgtttgttttcgcacatttttctgtcagcttgacctttggggcgcaaatatttcggagtaaaagagctgttttatcacaagttttgtttttcattaattgcaattaagtaaaaggcttcgcatacgctgtccagaagggacaacaccatgcaagacggacttggacgagtccaaataatcaattaattaaaaaataaataacaatcatgctgactaaatgagtaaaccattaatgggaggattggtgcgataaatgaaagagctccaatgggccgaaagcagcgggtgcaacaaatgttgccagcaacatgtggcatctaaaacaagaagtagaatatccaaatcgccgctcagtagtacagataactgttgttcatcatatcgtagcggtaatcaaactgttgctgttgctgctgcacggatcgatgctgctgcccgcgctggaaactagtgaaccaactcttagttgcggcaattcgcaacaggtactttcattccttgcggtgctgctgttgctgctgacctcccggctgctgttgctgcgactgcagatgatgctgctgttgcaggtgtggaggcagcctcgactgctgttgctgctgctgcgacatcccaccgacaacatgttgcgcctgcattccgtggctctgatggctgtgcatgggagcctgagtgggcacgtggccattaagacttcccccactggccgacgaaacagcattggaggcagctgtagccgtgttgttaccctcggacttttcacgtggtagcaagtagacggagccatcggcagcctgttgcaaactgtagtccgccggcgagcagggatttccctcgggatcccgtaggtactgcaggataaagaaattaattagtttatcaattaatcaagtctgtgtaattctgtattcgagtaacacctacctggaagacatgacgatgcagcatggcaaacttgttcgagatgcgcttgcgttcgctctccaaatgatcgcggtcctgattaagttgggtcttgcgcttaaccaccgcgttcacctcatcctctagagtcaggatctggtccaatttgcgtttcctgcaattctgggcagcgaccttgttctttccacgccgacgaatgtcgcgaatcagcgacaactggttctcgctaaggtcgtacttcgacaagcgctcgttgaactcgtccatgggcaggttaatgatgtccggcactgaaatgggtatgttcagggatcgagcgcgcttttcatcgcgtgtcagatgctcttcctccaagttgctgctgtttccgccaacactgctgctgttgccggcactcgctcccttcgatgcggttttagtggcgaccaggggcttcttatcgcgtgcctggggtctgggaagggatccacttccctggggtagcgagtaggtatgatttagttgcaccaaatcctgcgaagtccttggcgatggtcgtactgtatagtcgccggaaaaggcgctgccgctggctcccatgccgtaaggctgatgatgatgatagtccttggatagagcgggtcccatcgctcctggctcactgattccaccgctggccattcccgaggaggcgtacccagcatcgtactcgtacttgatactctgcgattggactgcagtcgcggctgctggtggagctgttggtggcaaagccgatggcgtctgcttatggggatccctcttgccgtacagctgatgcttcttctgcgccaccggcggctgacgtgtggcggtgctaagccgtgaattattgttgtagctgaagtcgtaggggcctccgtacttgccctgatggtaatcctgggcggagtcactgccctcaccccactcgccgtcggagagggacggcactcgctcggagcccatcgaactgacagcactgtcgctggacgcgtccaagcgatccgcaccgccttgtgctcctgcaccgccgcttgccaagagatcggcggtcattcccgtagctccagcgcccacagctgatccgctcattgagccaacgccgccggacgctccgttggcctggttaccgtgcggatttcccgccccaagttgtgccgagctaccggagccgttgctaacatgtccactgctgggcaagcccagaaccgaggagttgttgctagtgctgttgtcaaccatgcgacagaagcctgcaatgaaaaataataggttagttagtagagtacattaatggatcatcagttaaaccttagtataatcacgtactactacttgaaaataatcgacctaagttcataacccaagtatatactttgggtgttatcagctgacaagttttccattgaactttatattgtgtattttacgctatcctcccaattgatcaaaatcgaactagtttcccaactggtgctactgcttttggcctgacccacttcaagtagacggtcttgattagggaggatcgcccttatcacaagacacgtcttgagtcactcgcagcttcgattattaagcacaaatttacgactagcattcagtttcgctgttcgaaatgaggagaaatactaaaaactgtgcagtcattttccatatttcactggacttatcttatcgcgcgataaggaatgagtgtgtgcgtgtgtggggaagagctcgtgtgcgtctctcagttattttttgctgtttccaaatacctggccacctttccacatctttctggccccgcggcctgctgataagaaggagtccgatctgctgccccctgggtatctaatcacagtctaaatggagaacaaacgacacgcccaaggggcatatatatatatttttttttggttttctagtataaccaaaaacacaatctccatgtgcaatctggcattattgcgcgcctgcagttaattagacaaatcaattcgtaagctgattgggacaagctctcgtgtatttataccctctgtgggcaaggtcaaagcttaaaccataaacattgatgacttgacaaaatgcgatacattgtacgagcacgtatatgattacggggcactctctttataacgaaagctacgttttatgaacctttaacaactacgaaatctatatttagacataaacataatatagtgctctttgcttcaagtttcacatatgcaatatcaattaccggagctagtcgaataaataacagtaatgctcgtatttatgggtcctccatatcgatagtgcactgtaactgtgcaggagagttatcagcaacgaactgaacgcaagacataacggaaaccataaagataaccgttaaagccagtgacacgtttcatgatgtgcagaaaaaaaagcttaaaaacaatatgaaaatccaaattgagaccgtctttgtttcgttaggacgtaacccacttacgttataatttgaatgccgatctcaagaacgtgaactccacagcaactcctgtggaattccgcgtcaagatattagcaactactctcatatgcctctactctctactctatgctcttccgagctttttttaacgttattgtttcgaatagcgatgactcagcagtttaaaaatagtaaacagcaaacaggcgggcaaataataaaataagcgaaatgaaaaaaaaaaaacttgctgagcgggcggcgttaggcagcggtggcgggagaggctaggaaagcgctcgagagagggagagcgaagaacgttccgctgatatcagaaacggaatcagaaacagcaaaaagatcgccgtgcggcatgactaatgaaaaaattgttacgcggtcacaagtaaaatatttttgagggcttctcctctttttcttttttggcaacaccgaaaataacacgatgcagagcattttccattttcccgatctcactcactctcacctgttggattgcccgttcaccgtttttgggatgctgctataaaacgctcgaaattcgccgaattagaactcactgagctaaattgtacatatgtatatacataggtacgtcgatcgtatatcagctacactgaatcgaaatgcgtcattattttattaaattggttatgctaattacatttactttacggcacgttgcgcgttttgatctttaatgaataggtatgtgtgtgcatatatatggctaaatggattttcgagtcgcgtcggttctaatatttactttactatcgtattcgattgttcgtgttcgactgatttgcctctgcctcgcgctctgttcttttcgctttgctttccgccctgcttttgagtgcttttttttgtcgtttgttgttgttgtcgtttgaatcgcaagtgagtggcaatcgcgaaacctgagcgcccgctcccttctacgctcgatcactcaggcaaactgtgaactaattgtacaaaattttgtatgctaatcgcgcaagaacgataaactgtaaaaaaagctcatgggccgagtggatttgtgcttgagtcgtttgcatcgcgcgcgcttttcgctctgttctgagtcaaagctcgcgatgagtgggtggggaattcggcaacgatgcgcaatccacttaacggaccaaaagctcgtccatcacttaagggaactttttggcaagcagaaagctcacactgagagaaacttattcttgctagaacaatttcttgatataacttgatataacttttcgtaatttttagttgtatagaaactttgtagttatgaagagaatcaactttactaggaataaatactcaataatactcactctcattcatgtccatcaagtgcagatcctcgtcggtaaaaatggagttaataaagccatccgtctggttaatgtccgatgaggtgttctaagggtatcatcgtttataaaagctgcattgccacatgcggttgatccaacttaccccgtagtacattaaatcgtgctccactttgtaggcggcagcagcagcggcggctccatcggcctcgtgactggagttggtcagatgcatgctggaggtgacagccgatcccagattgtgcccgtagtggggctgcccggtggggcagatgtcgcccaaggcggcattcgggtgatgcaacatggcagcgtgatgcggcggcggcggtggtggtggtggctgcaatgtagcattggcgccactgccatactgaccatgctggccaggagtgccgggtgctccgttcgagggactcgcctgataggagtagccgggatagtgatgcggatacggtgacatatcggataccccgcccaccatgctcggaatgggactgaagtaggtggcaaagtcctgaagacgctccatcgaaacgctgcgattcagacgcggcatgcggccctgcaagtggagaagtgcgggg

SEQ ID NO: 9128 - DNA, 3943 bp, DROSOPHILA
tcgagcgtagaagggagcgggcgctcaggtttcgcgattgccactcacttgcgattcaaacgacaacaacaacaaacgacaaaaaaaagcactcaaaagcagggcggaaagcaaagcgaaaagaacagagcgcgaggcagaggcaaatcagtcgaacacgaacaatcgaatacgatagtaaagtaaatattagaaccgacgcgactcgaaaatccatttagccatatatatgcacacacatacctattcattaaagatcaaaacgcgcaacgtgccgtaaagtaaatgtaattagcataaccaatttaataaaataatgacgcatttcgattcagtgtagctgatatacgatcgacgtacctatgtatatacatatgtacaatttagctcagtgagttctaattcggcgaatttcgagcgttttatagcagcatcccaaaaacggtgaacgggcaatccaacaggcttctgtcgcatggttgacaacagcactagcaacaactcctcggttctgggcttgcccagcagtggacatgttagcaacggctccggtagctcggcacaacttggggcgggaaatccgcacggtaaccaggccaacggagcgtccggcggcgttggctcaatgagcggatcagctgtgggcgctggagctacgggaatgaccgccgatctcttggcaagcggcggtgcaggagcacaaggcggtgcggatcgcttggacgcgtccagcgacagtgctgtcagttcgatgggctccgagcgagtgccgtccctctccgacggcgagtggggtgagggcagtgactccgcccaggattaccatcagggcaagtacggaggcccctacgacttcagctacaacaataattcacggcttagcaccgccacacgtcagccgccggtggcgcagaagaagcatcagctgtacggcaagagggatccccataagcagacgccatcggctttgccaccaacagctccaccagcagccgcgactgcagtccaatcgcagagtatcaagtacgagtacgatgctgggtacgcctcctcgggaatggccagcggtggaatcagtgagccaggagcgatgggacccgctctatccaaggactatcatcatcatcagccttacggcatgggagccagcggcagcgccttttccggcgactatacagtacgaccatcgccaaggacttcgcaggatttggtgcaactaaatcatacctactcgctaccccagggaagtggatcccttcccagaccccaggcacgcgataagaagcccctggtcgccactaaaaccgcatcgaagggagcgagtgccggcaacagcagcagtgttggcggaaacagcagcaacttggaggaagagcatctgacacgcgatgaaaagcgcgctcgatccctgaacatacccatttcagtgccggacatcattaacctgcccatggacgagttcaacgagcgcttgtcgaagtacgaccttagcgagaaccagttgtcgctgattcgcgacattcgtcggcgtggaaagaacaaggtcgctgcccagaattgcaggaaacgcaaattggaccagatcctgactctagaggatgaggtgaacgcggtggttaagcgcaagacccaacttaatcaggaccgcgatcatttggagagcgaacgcaagcgcatctcgaacaagtttgccatgctgcatcgtcatgtcttccagtacctacgggatcccgagggaaatccctgctcgccggcggactacagtttgcaacaggctgccgatggctccgtctacttgctaccacgtgaaaagtccgagggtaacaacacggctacagctgcctccaatgctgtttcgtcggccagtgggggaagtcttaatggccacgtgcccactcaggctcccatgcacagccatcagagccacggaatgcaggcgcaacatgttgtcggtgggatgtcgcagcagcagcaacagcagtcgaggctgcctccacacctgcaacagcagcatcatctgcagtcgcagcaacagcagccgggaggtcagcagcaacagcagcaccgcaaggaatgaaagtacctgttgcgaattgccgcaactaagagttggttcactagtttccagcgcgggcagcagcatcgatccgtgcagcagcaacagcaacagtttgattaccgctacgatatgatgaacaacagttatctgtactactgagcggcgatttggatattctacttcttgttttagatgccacatgttgctggcaacatttgttgcacccgctgctttcggcccattggagctctttcatttatcgcaccaatcctcccattaatggtttactcatttagtcagcatgattgttatttattttttaattaattgattatttggactcgtccaagtccgtcttgcatggtgttgtcccttctggacagcgtatgcgaagccttttacttaattgcaattaatgaaaaacaaaacttgtgataaaacagctcttttactccgaaatatttgcgccccaaaggtcaagctgacagaaaaatgtgcgaaaacaaacagatccgaaaagaatgtaattaaaaatgcttcacatgaatttgtaaatcagtaaacaactcacattcagaaccaatcccacttatccattattcatcgtcgcgtcgtccaacaatatttgatggtgaaaccgtttacatctctataatattagcttgtaaaatatgaaaacacaaagatggatgcagagaaaaatgtataaaatagacgataggaaaatacacacacacacaaaactattgtaaaggttgaaaatattgctggacatttcatgaattacgggcgtaagacatttacatttgtaagctatattctagtgaaagatctaccacagcggtgaatagttgtaaatcgttctaaactcataaggcatttatcaaaatcccatacacaaaaaataacacaaattatcactttcgagctagcacacagcatctgtaaatacataatttaaacttagctaacatttaataaaccagcgctaggctaaagcaacaatgagtgtgctaacacacctcaaagaaactaaagaaaatactaaacaaaaaaaaaaaaaaaaagggaaagaatcgaaaaattttaaacaaaaataattgctcttgctagagcgtcccgttaactgtctttaaaacggtttagtagataagcgattaagaaatattaatatttaatattcttaaaaatgtcctacagcataaagagttaaactttaaactaagccacagctacagatacgatatcaacctaagcaaatccgatacgaaaacaaaacatggatctattgttaatataggcatatgtattttaattgttgtaatgaatttcgcgcacatttgaaagtcgattgttgcaagtcgaaatcgaaaactacgaaattcaataaaaagcgcaactttaataaaaagattatttgttgtaaattgaaattgaactaattacctactattgtactactacgcctacggacataaaaaatacattaaaagaaacccttcgcgtattctattaacataaaatttggtaagaggagtgtttagataccaagaatatccttgatatgctatcaaaagcttccaaggatctctgaccacctttgaccaatccctgtacttgtatgtcgctatatatttgtgtatgtttcatatgagaaatttgtatgctttaaaaatgataaactttccctcagctaaacaaagaacgtcaaaattaaagaaaaaaacactacaaaaatatataaaactgtctttcattggattcatattatgcactacccgggagtattccaaataaaacgcatcggttagattcttttcattccattttatggtataattcaccgtctttcatttgcacaatctgggcgaagcttaaaaataa

SEQ ID NO: 9129 - protein, 533 aa, DROSOPHILA
MVDNSTSNNSSVLGLPSSGHVSNGSGSSAQLGAGNPHGNQANGASGGVGSMSGSAVGAGATGMTADLLASGGAGAQGGADRLDASSDSAVSSMGSERVPSLSDGEWGEGSDSAQDYHQGKYGGPYDFSYNNNSRLSTATRQPPVAQKKHQLYGKRDPHKQTPSALPPTAPPAAATAVQSQSIKYEYDAGYASSGMASGGISEPGAMGPALSKDYHHHQPYGMGASGSAFSGDYTVRPSPRTSQDLVQLNHTYSLPQGSGSLPRPQARDKKPLVATKTASKGASAGNSSSVGGNSSNLEEEHLTRDEKRARSLNIPISVPDIINLPMDEFNERLSKYDLSENQLSLIRDIRRRGKNKVAAQNCRKRKLDQILTLEDEVNAVVKRKTQLNQDRDHLESERKRISNKFAMLHRHVFQYLRDPEGNPCSPADYSLQQAADGSVYLLPREKSEGNNTATAASNAVSSASGGSLNGHVPTQAPMHSHQSHGMQAQHVVGGMSQQQQQQSRLPPHLQQQHHLQSQQQQPGGQQQQQHRKE

SEQ ID NO: 9130 - DNA, 3991 bp, DROSOPHILA
cttcacgctattccggccaacttcagcaaggcctacgaccacgacgggaagaccaaagtcaccatcttcaacaccgaaacggatctgggccttatggtcaccggctacagccagtacggcttccggctcaacaacgacatggtcctcattggccccatctccgtgtttcccaggtaggtggccttcgacggatgcattggctcacccaattatgtaaacaagtgcatgtgatttatgccatggcactctgatgatcatacaatcccaatcccaagcttagttatgcacgcctttgagtttattaaacagaagtcaaggatttattgggaaaagtcaaagagaatgacttcttcatttaaagtttcatacaaaaaaatgttgatgtaaaaactaccaatagttgttaaaggctttttgaatgctaatttaaattttaattatttcaataacttcttaccttatagcctctatttgtttaagttataagctttcgatggcttttaatagtgatattgtttataagtattaatatgtcataagttactatctgaagctaaagtttaattttatgttttactacttacagatcggttctgtcctggaacgtcaacagctttgaggacatcaacgaggacagcctcagtctcttccccaccctggagccaaagatcgacgtgcttatcattggcattggcgaccaagcaccgcccccagctctttccaagaggatcatcgagttcatgaagaagtacaagataaacgtagagatcctgcgcacggagcaggtaggtattaatcactccccgatctatatccatattgaatggcactctttgcaggcatgtgccaccttcaacttcctgaatgccgagaaccgaatggtggcctgcgccctgatacccccgctgcacctgtcctacaacgagaacgacattctgcaagcgaagctgcggaagaaggagctctacgagaccgaataggattagttagacacatctaatgattgtttgaaaggctggtgctctgttagaaattaaactgttttgtaaaattcagatttctttattcgtatagacgtagttgtaaggtgtataaaagctagcaatctcgcagttaaactgcactctcctccttgtcgattaattggcgatttcagtcggctgtggcgcccggatagcgctcaatgagcatagccacgccctgtccaccggccgcgcaggcggcgaccacgcccaacttgccatcctcgcgcaccaggcggttggcggtgtgcatgcagaggcggactcctgtggcggcgaaggggtggccgatggacagagaaccgccccagttgttccacttggacaggtcgggagtgccgaccttctcgttcaggcccaagtaagtcttgcagaaccagtcggagtccagggccttcagattggccacgatctgtccggcgaacgcctcgtggatctcccacgagtcaatgtccttcagcgtgagtccagccttcttgagcagcttgggaattccgtaggcgggtcccagcagcagctggttgacgggatcctgcgacacgaacaggaagtcgcgcagataggccttgggcttgaggcccagctgcttggccttctcctcggtcatgataatgcaagcagaagctccgtccgtgaggaaggaggcgttggctgctgtcacagtgccgtagggcttcacaaaggcgggcctcagctttgccaggctctcgggactagacacgcggatgccgttgtccttgtccacgatctggtccacgccggacaccttgaagggaaccagatcggtgaagtagcccttctcctgggcctccttggccagtgtgtgggatcgcagggcgtactcgtcctgctcgctccgggatacgttgaaggcggatgccaagcgatcggccgagtgtcccatggtctcgccggaggagaactccgcaacggcgggcagctcgggggccaggaagtctggcctgaaggtggacagcagggccagccgctggcccagggtctttgccttgttggctttcaggagcagggagcgcatcttgcgggagtggcgaatgggcacatcggacatgaactccacgccgccggcaacgatgacatcgtaggtgttggtggctatcagacccatgcccgtggtgatggcctgtaatacatgggctatagattcaagctccgaggaactttgggcgaggctcttaccgcattggaactgatgcaggccatggtgacggtgtgggcaggtgtcttgttgctgaatccagctgccaaggctgcctccctggcaatgttggaggtcttcacctcctggatgacgctgccgtacacgatgtagtcgatgagctccttgtccaggcggttcttttgcagcaatgacctgttgaatggggcggggtaagctaatactccaaggatattggggattgtaaacctacaaaagcgagtgcctggccagttcatggggcatcagcttggagtaggtggttccggaggtcagaaagggtgtgcggactccatccacgagcacgatattctggctgttcttctgcttcggttgtggattcgccacagcggccgatagagcgcggcattgaactgaaaaagggttccggattcgggattatccttagcactctcgtttcgcgttatttttaatcatgatgtacccatacattatctttgtcccgcaagacgtcactgcgaattcgagtttggactttggccctttcagattcaatcggctgctgctgccacaaatcgttatgaattatcagagccaaagtccaactggtgcagcccgtgtttggaatggggcatactgcaacacccgcactattaactcacctttcctggcgacattcaacaggttgaaggcgttacccttgcggcagacattttgaaggctcatcttgcgaaagttttctgatttcttttctcgcttttctcgttgttgcgactgcagctgtttggctagtgatgaacatgaacgccggatcgcggcgaactatcggttatcgaaagctgatgcatgaaaagctttcgaactgtaaataccctttctgaggatcttactcgtagatcataaagcatgacagcttgtaaaattcggtagatcttcatttccaactttagatatatttcttggttatatttgaatatacagttctaaattttttagcttctgagaatcgtttactattcctacaccattcaccttcattcaaatgtatgcaacgcaatctgggagtcccataaaggaatagatttctccaatgaccttgatcttgattatcctattaagcgtgctgtttacgatgtccatctgcgctctcattcgtcacctacagtctgtataccctttcccacaatggaagaccattaaccatgtccttgaaccgcaatgcaagtgataactgtagcaggcaactagctgtatgcaaatgggcgaaagaaaggattacttccaaaggccactcttgcagtactgtataatcttacatattagatgtacatccaaatttctaaatttaaactttaaatagattatgaataaaatgcaggtcgttttggaaccattgttagtttctcaatgatttgcatacaaattcgtttcactgattgcttttattgctaacggcacaaattaggttcaaggacgaatttaatggtttcctataatgggatagcaaagggtaggatgcaaatgtaggcggcgtgtgcatttcaaatgagcgatcgtaaaggacttacaaaggaagcaaataatggaaggatgacggcttattggggatcaaggtgaaatttctttagcatgccagtaaaattaatgtctacgtttgtacagatgcaaattgagcattgagattttctaccctttttatttatatattttttatttaagtttaaacaagttttttatttcagttgtagaacataatcgaaagctcacattttgtcgggaaatgtccaaagct

SEQ ID NO: 9131 - DNA, 1628 bp, DROSOPHILA
ctagccaaacagctgcagtcgcaacaacgagaaaagcgagaaaagaaatcagaaaactttcgcaagatgagccttcaaaatgtctgccgcaagggtaacgccttcaacctgttgaatgtcgccaggaaagttcaatgccgcgctctatcggccgctgtggcgaatccacaaccgaagcagaagaacagccagaatatcgtgctcgtggatggagtccgcacaccctttctgacctccggaaccacctactccaagctgatgccccatgaactggccaggcactcgcttttgtcattgctgcaaaagaaccgcctggacaaggagctcatcgactacatcgtgtacggcagcgtcatccaggaggtgaagacctccaacattgccagggaggcagccttggcagctggattcagcaacaagacacctgcccacaccgtcaccatggcctgcatcagttccaatgcggccatcaccacgggcatgggtctgatagccaccaacacctacgatgtcatcgttgccggcggcgtggagttcatgtccgatgtgcccattcgccactcccgcaagatgcgctccctgctcctgaaagccaacaaggcaaagaccctgggccagcggctggccctgctgtccaccttcaggccagacttcctggcccccgagctgcccgccgttgcggagttctcctccggcgagaccatgggacactcggccgatcgcttggcatccgccttcaacgtatcccggagcgagcaggacgagtacgccctgcgatcccacacactggccaaggaggcccaggagaagggctacttcaccgatctggttcccttcaaggtgtccggcgtggaccagatcgtggacaaggacaacggcatccgcgtgtctagtcccgagagcctggcaaagctgaggcccgcctttgtgaagccctacggcactgtgacagcagccaacgcctccttcctcacggacggagcttctgcttgcattatcatgaccgaggagaaggccaagcagctgggcctcaagcccaaggcctatctgcgcgacttcctgttcgtgtcgcaggatcccgtcaaccagctgctgctgggacccgcctacggaattcccaagctgctcaagaaggctggactcacgctgaaggacattgactcgtgggagatccacgaggcgttcgccggacagatcgtggccaatctgaaggccctggactccgactggttctgcaagacttacttgggcctgaacgagaaggtcggcactcccgacctgtccaagtggaacaactggggcggttctctgtccatcggccaccccttcgccgccacaggagtccgcctctgcatgcacaccgccaaccgcctggtgcgcgaggatggcaagttgggcgtggtcgccgcctgcgcggccggtggacagggcgtggctatgctcattgagcgctatccgggcgccacagccgactgaaatcgccaattaatcgacaaggaggagagtgcagtttaactgcgagattgctagcttttatacaccttacaactacgtctatacgaataaagaaatctgaattttacaaaacagtttaatttctaacagagcaccagcctttcaaacaatca

SEQ ID NO: 9132 - protein, 469 aa, DROSOPHILA
MSLQNVCRKGNAFNLLNVARKVQCRALSAAVANPQPKQKNSQNIVLVDGVRTPFLTSGTTYSKLMPHELARHSLLSLLQKNRLDKELIDYIVYGSVIQEVKTSNIAREAALAAGFSNKTPAHTVTMACISSNAAITTGMGLIATNTYDVIVAGGVEFMSDVPIRHSRKMRSLLLKANKAKTLGQRLALLSTFRPDFLAPELPAVAEFSSGETMGHSADRLASAFNVSRSEQDEYALRSHTLAKEAQEKGYFTDLVPFKVSGVDQIVDKDNGIRVSSPESLAKLRPAFVKPYGTVTAANASFLTDGASACIIMTEEKAKQLGLKPKAYLRDFLFVSQDPVNQLLLGPAYGIPKLLKKAGLTLKDIDSWEIHEAFAGQIVANLKALDSDWFCKTYLGLNEKVGTPDLSKWNNWGGSLSIGHPFAATGVRLCMHTANRLVREDGKLGVVAACAAGGQGVAMLIERYPGATAD

SEQ ID NO: 9133 - DNA, 3244 bp, DROSOPHILA
tttatacaagttggcaatcgcatgcgattgcttaaaataataaactcccagtgtatatgtacataagagtatcttcattgggggtcggattactgtccctctcgcgcttactcctcataattgcttggatttgcttatctgcactgccccactaaatctcgaagttcaacaacttggaattgttcgagattgcggttacttaatacgtatgtatatttcaagaatttcgcaacattgttatagattgatagagttatctgatgacccaaactaaactcactgccggacatcccctaaggccccgaaagttgtagattaaaggtcaatcgtaagaacaagattggaataaccaagtggagcgataagacaggtactttgtgctgttttcaccatatgaaaaagtcacgattacacgtatagaatgcctgtatttaaatacgcactacaacaacgtttgcagacaaacacgcgtacagatacttaaaaatgataataagtctatgtatctagtatgtttttcaatttaacaaacatgcatgcagttttggtttcgtcgttacatataaatctcattttaaatgcatatttcttatggaactcgctagcttatacacaagtgtcttttaaatagtctgatattgcatacgtataagagtaaaactttagatgtgttcgactttacttgtgactaagaatgcgctgacgtttaaaaaacatacagagcaaacgaacacaaaggagtataaatactttttcctaagcctaggagagtatgagaatactattgaaatactattatcgcgggacattagaacttaaatctatcgaaaacacaagagatggtatatagggagctatggattattctaggagtgggattcggtttgaaattatttgagcacgggcaggaccaaaaaagtccgcctcacatccgcgaattgtaatacgggtcgtcttcgcatggcggatatccgtagagatacggatggtggcattgcactcacgaccagcgcgacttctgcaggtcgatctgtccctccagggtcttggccaaatagatgacgaacaactgcagcaaggctatgcccagggcaacgccggcaatcacatacagattcctctcgacccatactcgcacgatctcgatgcagccgctggtccagatgcgcttgctggcggcggccactgaacgcacctgcacgccatagccacacatgatgttcactaggccggagctgatatcggtggcattaatacagcagctgtagggcactccacatctctccaccgacggcgatgagcagttgaagtactcgttcttgcctgtatgcatacggacatggaattaattcgtttgtggcttatgaatcaaatactcactccaatcctggtagccggcgttgctcaggccgcagcagttaaactcctgctgggcaaagtcgatgaagttttgcaagtcggagtcgtcacggtacgagtggatgattttgtccgtgaactggtactcgaggaacgagttcatgtactgcgggaaaacgaagcagatgatggccagcgacatctccagtatgaagaagagaagcaggcacatggagtacagctttagcagccaggtgttctcgcgcagcgcacccaaacagccggcgaagctgaccgtgaagacgatgactccggcgatgatcatcaccagggagatgttgaagatcacatcgtagatggtgtccaagcgcagccagccattgccgtccatcagtttgtccatgaaggcgtacacgccgatggccaggagcaggccgccgaagagccagaagaggaagtttagcaggaagatcatgtacttgacgcaagaggaaacgtagctgaagtggtgcggataggtggagatccgcgggtgcatgtagttgcccccctgatggtatctgtgattgctcatggccacgcgaatgtgcaagtcgtgttttcagccgagtatttcgatgagtattacttttcctggtatttttgcccaggtttcctcccccacggttttttctttttgttgacgccctctttgcgtgtggtctcttcagcggcctgcacggctgttttgctatagtttcgcagtgcgtcagtggtggactgtctaactctggtgtttccccgcagcgaatatgatgaattaacgcactagcttaaattttatgactgataagcaaatttatggagccactaaaaataacaaagtgcccggcgttgccagacgtgctgtccaattaggcagcagttggcagcgcggccagtcagctgttcgcgtgaccgtactgcctttgttgcctatcatccagcattcgattggcaacgcgagccagccaggtgtttgattttcatcgcgtgcagctgttttcccaagcagctttttttgtattagtttttaattttccaccgctgcgtaacattgcgacgcacgcttgttttcgcccgcgtttggcgcattcataaacaaaaggccaaaaatagaatcagcaccatttagagcgctattcagcaggtgagtagttttccagcttagagaaaacccaaggacgcaccatttaagtgtgggaaaattaagtgttttttcttttcggttctccgctggtgacattgaagcacaattgcgagcgcattttccctaattgagttgcgactttctctgcactgcgctttctcctcgccaagcgttcaaaagcagaaaagcgcacgaaaatagaacggaaaatgtgggaaatgtggtagacggaagtggcaacgcgaattgcataaatattagttagtacgcgtgggcagtgcgcagtggacaaaacattgacttttcctccttgctctgctcattttccccctgttgctgtgctgattaaataaccaggcagtgccaagtgcagttgtcacctgaaattagccacataatgtttgcactttctgctcgccacgcactgcggcgcactcgaatattcgccattccacgctttttcgcaggtgagttgcactaaaaagtcgcaggtatagtttgtaatacctgtgggcgtgtcagcccatgctcatcgattggccatcggctaattttagacacaatttgagttgatttttttatacatttgcattctatatgaacgcaatttagccgctattttctgactttgctcgcaatgaattcattgtcttcaattgcccgcgacacacttggctggcttttctattgttgcactcggaaaaaccgaaaataaaa

SEQ ID NO: 9134 - DNA, 1187 bp, DROSOPHILA
cacgtctggcaacgccgggcactttgttatttttagtggctccataaatttgcttatcagtcataaaatttaagctagtgcgttaattcatcatattcgctgcggggaaacaccagagttagacagtccaccactgacgcactgcgaaactatagcaaaacagccgtgcaggccgctgaagagaccacacgcaaagagggcgtcaacaaaaagaaaaaaccgtgggggaggaaacctgggcaaaaataccaggaaaagtaatactcatcgaaatactcggctgaaaacacgacttgcacattcgcgtggccatgagcaatcacagataccatcaggggggcaactacatgcacccgcggatctccacctatccgcaccacttcagctacgtttcctcttgcgtcaagtacatgatcttcctgctaaacttcctcttctggctcttcggcggcctgctcctggccatcggcgtgtacgccttcatggacaaactgatggacggcaatggctggctgcgcttggacaccatctacgatgtgatcttcaacatctccctggtgatgatcatcgccggagtcatcgtcttcacggtcagcttcgccggctgtttgggtgcgctgcgcgagaacacctggctgctaaagctgtactccatgtgcctgcttctcttcttcatactggagatgtcgctggccatcatctgcttcgttttcccgcagtacatgaactcgttcctcgagtaccagttcacggacaaaatcatccactcgtaccgtgacgactccgacttgcaaaacttcatcgactttgcccagcaggagtttaactgctgcggcctgagcaacgccggctaccaggattggagcaagaacgagtacttcaactgctcatcgccgtcggtggagagatgtggagtgccctacagctgctgtattaatgccaccgatatcagctccggcctagtgaacatcatgtgtggctatggcgtgcaggtgcgttcagtggccgccgccagcaagcgcatctggaccagcggctgcatcgagatcgtgcgagtatgggtcgagaggaatctgtatgtgattgccggcgttgccctgggcatagccttgctgcagttgttcgtcatctatttggccaagaccctggagggacagatcgacctgcagaagtcgcgctggtcgtga

SEQ ID NO: 9135 - protein, 291 aa, DROSOPHILA
MSNHRYHQGGNYMHPRISTYPHHFSYVSSCVKYMIFLLNFLFWLFGGLLLAIGVYAFMDKLMDGNGWLRLDTIYDVIFNISLVMIIAGVIVFTVSFAGCLGALRENTWLLKLYSMCLLLFFILEMSLAIICFVFPQYMNSFLEYQFTDKIIHSYRDDSDLQNFIDFAQQEFNCCGLSNAGYQDWSKNEYFNCSSPSVERCGVPYSCCINATDISSGLVNIMCGYGVQVRSVAAASKRIWTSGCIEIVRVWVERNLYVIAGVALGIALLQLFVIYLAKTLEGQIDLQKSRWS

SEQ ID NO: 9136 - DNA, 7593 bp, DROSOPHILA
aagtccaacgctttctccaagtcaattagtccatcgtgaagaatactatccgcaaacttggtaatgtccagaatttctggacaaagattcctttggatatcgcacacatcgaccaaagccttgtagacaccattgaacgcacgtattgccgtataaagcgactccaagttgaagctggcacataacttccaatctctggaggctagcgatgcctgaccgctgtactccacgaaggtgcccagactgttgttgaatccccgcatcgccatcggacctccgatcgcctcccgatcaactgggcttccatgggagagcgctatcagcgagggggcgaggatgaataccaaactaatcgctttcatctttcgcttgtagaggtgatcgttgcccagagttccgcgctaaactgaaggtgagctcctgagaatcgggtagcaagcggtagtgcatgtccatatgtatgttcaattgctgatatagcaaaatgatcggatcattgtgcgcaatataaatttttaaatatttgcaagtgaggcaattagccagaattagctttcaaataaatataatataaatatataatatacaaatataacataagccatccatatttattatacattttacactagtcaagtgcattgagtactaatatagtgaatttacataacaaccagtgtcatagcggcataaccagcaccacagaggcccaccgatgcgacctggcagtaacgcagctctttgcagatccggcgccggcgcagtagaggattggctcgctgcctcgccaggcaagtacgtaagcaggctcctccgagctccgcggtctttatcaatgagagtgacgtaggttgtgtgcagaccggacgggattcggtcggcgagtggaggagttgggtggcactttaatgtggtctgcaagccaacggccaacggcacggaatcggggcaatacgttaaaaactgttgcactgcgtcgctgggacgtcagttcattcagaacagtcgaagtgcgcagaccactgggatccaaacaccggcagaaaccaggccaggagtcgaagtcgacctcccacctccagccagatccgaatcctatttgggacaccaccagctagagccaagtcaagtgccgtttgccgtaaacatgccacgcatctcgttgcccggcagcagcctgctggtagtcctggcactgatcctgtgcctcagccttccaatccgggcggtgcccacctccgtgctcgcccaagacacggagctctccaccagcgccaaccacaagctccagcagcagcagcaacagcagcagcagcatcaccagcagcagcagctccagcagcagcagcagcagcaacagccggccacaggtaagtgccaaagttcagtacaggtggagcagcagctccgcccacgcccactcttaaggctaaaggtcactgggaaaatgcgagtttttgaaaaatgcccggcccgagaaggctgtgcctccagcctccagctcgtcgtctgcgtgggttggctggctgctggcttttgagggtcgggcatccgctcgagtggctccatctcggagctcatctcgtttagcatattccatttcccatttaccgctcgtcgttcgctgtttctgccaggaaattgcgtaggtgttttgcgcgaggacgacagctgtcgtccttttgaatgccgcgctccatgagcgatttataaatttccatcctgcggttgtttttcttgcactggcttagtgaatcattactgtgcctgcacagcgagaaaactaccaatgacttttctgagtaagtgggtagctatatgcactcttgaaagaaaactatcaaataaaataagttttaagtctttaaattaaagtttcaacaaaaaaatgattatataaattatattaaattatatacatatatatataataatcaaatttctgccaaaatattcacgaaacatatatacatatatcaagctgcggcttaaagcacaatgttgccttttctttcaacaactctaaagaaacatatggtattctgtatatacagctccacgatttctcccagtgcagttacactgttcatatatgtagctcagcgctcaccaacacaagcacacgggaacctacagcgcagttaaacatcgcgtaggcgttcgccacacaaaatggcggccagcctcctttgtgagtgtgtgtgagtacgtgtgtgcgtgtatgtgagtgggggggcctccatgctgttaaagtgtgcgtacgtgcgcgcgatttcatttctatttttagaaagcgagttaggcgaaagttttcagccccttttgcgccccttccgctcctcctgcactttctgctcgcctggcgccgttcgcctagcatcgccttacgccatcgccatcgccattcaccacatcttgggtggcaagtgccacccattgccgcccccactttcaccgcagcattgagcccttaagtaggcagccaagctcaagctgttaagcctttccgatccattccgagtataaatacgcgtccgtgtgtgcaacacgttcgttagcgctccaaaccgcagcagcaactaaggccaaaagtagcggggctttggtcagatgtcagttgccaaaagccagcggcaaccacatcaaaatgtaaagggcaggtgcccagaaaaggggaaggaagcatgtgattggggtggacaagttcaaatttaaattttaacatttcgctgcatactttcaaatctttcaatgttctaatgtaagtttatagatacaaaatttgcctttgggtaagaaacaaatctctagggattagatgttttcgagagcgataagctctccatcgcacatttttgtagcatacttccaggcagcgccactaacagatttttgccccagcacagttcgctctaaatagatttattatgccccaatgtgggcggaatggcgcccccgcccctttctacgtgtttacagagccacatatggcaacctaatgacaaaggcaaacaggctgtcgccgccaagtgtccagctgtcggtagtgcaaagtgaaaacagggtccaccccacggattaatccacgcagcagcagtcaagtgggcgcattaaatatttatgagagcagtgcctgctgacccctcgccttttccttccttcgcctggcgatgaagtagtcaggagggaagggtgagcactccagttggcacacccaatcccgaaaccacaggctcccagcgcattttcctgcgcttgacaaatttttccatatgctgcggctattaagttatttctgtgcggggccgaaagaaacgcccaaggacttggccgtggcgttaattgtgttcatgttcgtgtccacattcccatgttcatgtcgcgctgtctgtggtggcccgacttttcgaacagctgctggccaagagccacccaccagcccccaatctctgcgcatgtgtgtgtgtgtgtgtgtgtgtggggagcaaacaacttgttgatacttttgcagttcagtgaacagcctggtagagtagagacccaggacgacgtcagccaacgtcagagcctgccagctttctactcatttatttattcaagtaccccacccgaggagcacccatccgggctgatggacatccgtgagcaggacatttgccacacataaatataattgaggcggtggcgtgggcgtcatggaggcgaaacatgagcattgtgggcattaaatgactgccaatacggggaagcgtttagccagcgggtttcaggaattgtcgtctgtcccaaggactctggggaatcgcaaactgggttacgggcgctccataaaagcgtatccacattcagagaatgtggaattttacagctcgactagagttgcaccaggggacatactgtttctcggaaggaacttgtgtttccacgcaacatgttagtcatcactttgaaagtaatcatatcaaaatagctttaaggtatcaaaataattcgtttttagttacgatagtggtgtctaaaactaaatagtcacctgcaaagtaagttaagtacacacttcgaaacattcatttcccattcgatgcgaaccgctagtcattttatgggagcccatttcctgatagccggatattataccacctggccctttcaattggcacaccctaataacacattaatcattggggtcgtataaatcatggctatgcgggtatctactccattccactctatatgcgatatctcagttccaataatcatggagataagctatagatactggtatagatattcgcagaaacctgcgaaatacctcatacaaatccactgcgcaggggagttgaacgagtttggctggtccatctgaactcgggattggatggatggggcagttgaaataaccgcatgcccatgaggaggactcatgtcaggtgctaactgaatcctaattggcggcggccagcgctcaattaaagatatcaaccgatccgagatattaaagccaattcagccgtccaattagcgaaccaactgttgcgcaaagacccttttttttcgattggatgccagtggggcggcaatgcgattaggattaataaggtcagtcctcctcctctgggtattacatcggggattaagtggacataaagccggctgtcagggcgctaaaagcaattagcccagaccgagaaatatgctcgggcgtataaaacaattatggtactcgttctgcggacggcggctaattggttttgcggtcacttctcggctgtggggatgttgggaatttattgaatcagccccgggtaaatggtaaatggaaagtgggaaatggcaagttggaaatggaaaattcgagtagcccggacagcagcagccggcgttacccattccccatctcgttcaccagccaaacgctccgaggaggcgagtgccgtgcccacggcggacaagaagtcgagtccggaaattgtgcccgcttcctttagcaacgctccgtcggcccgaaacagcccagttccggtctccagccagcagcaggagcagcagcaggtgccgtccggagtctacgccctgccctccaacgaggagatcctggccgccgtagcggccgccgcccagaacagccaacagcagttgcaggaggagccctccgccctggaggaggcggtggccagctccacgatgcgcaagcggggcatcaattacgagtacaatccgtactccgtcgcctccagcgactacggcagcgatgtgcccagtggcgtttggtccgacgactacgaggccgccgttcctgtcagctatggcgagcgggatctccaggagatcgatgactacgtgccagagcgaagaggtgcgtccaagagcgtggcacatccattgctaactaacaaaaaacttaaattccagtgagtagctcgagtgcgcgaaacaaggcctacgacaatttgcagaatctcctgaacgccgaggcctatctggagagcattcccctctcggtgccgctgacctatgccaatcggaactacaacgtggatgagcgcaacaagcggggtatctactacaacgtgggcactcccggcggcaatggggcgagcagcctgggcagtggaagtggctacaacgacgagggtatcaacctcaacaaatatcgacgattcaacgacatgcggtgagttagtaaagcaacacggcgtatgagtgatattttacatacataacaactattactaaggggtaaccttttgtattctttgctccaatcccagacttaaacgcgacacccagctcaatcccgccgacatgctggccctggttgccctggtggaggccggagaacgggcgcgcaaggagagcgatgctgagagctccggaccggtgcccatgataccctccgatgacctggactacgcgcccgccggcagctggttcgacgtgcccgtacaggcggactactacggcgccggagtgccgctggacaaccagaaccaggcgatgcccaagtacgagtacgtgccgcgtcagcacaagtacagcggagtcaatagccgtaagtcccgattgggttggcagcaagagtcggaggttcgtgttctataactttcaattatccagcaggattcggctcctcgaagcagcgctacatggtggccaagaagaagcgctcggtgaaccagagccaattcatgaacgaaccggtggcggagcgcggatccggctacaatggcgagaagtacttctaaggatcccacgcggagatagtctacgtagtacttaatgatagccacaggccccacgaagagtatttctcgtttttttgagcattgaacatattgaacataatccaagaaaccaaaatccaaattcaatttctaattcaattatgataaagagctagtgtcaaggtcaactcgtgtgcaatttttgtgtagaatttcactttcaaaaaacccaatggcgagaattaaactattgttgcatgcaatgtggtgcgtcaggagcataatcaatcagtgtctaggattttgtcccacggaatccgcaccgaactaaaccgaatctatatctacgccacctaatccctgtaagaaatcggtgtctatgtacaactactgcaatctgaaatccagcggaaccgcaacttgtatctgtatctacttatcgaactagaggcttcccgactagtacaaaacgagagaagaacgtcaactatgaatatgattatatataaaaatatgaatacatctatacatgcatatatcaatcctaatcgagctcagaagcgacaaaagctccactaaccgctttaatttaatctaaacttatactaactaaagctaaagccaaagccaagtattttgaatgccatcacattccgaactacactttttatgtaaccccgccgacttggggacaaacgatctgacaattgatgagaattttaatcgtatttagcgagtatcgcagctaatatgttggtaaattatatatatatatatataaatatacgtatacaatatgcaaacaatttgtggataaatttgttaagaaatggctcagggcataaatattttaaatattctatgccgacgacgaagaggcgtatttttaatttgaataaaattgtctgactgttttcggtaataatcaaatatacatacatatgtgtactatgaatatggtaaaataaattatattatacagactaaaataaaatagcagtatatatatatgtgtgtgtgtatacaatacagattatatataactatatatatgaacactcaagtaaccttaatattatatactttccctctgaatatttggcctttgatttacgccttaagttctttgcgtgaacttagtttgaagatacatttatttacaatcaactgatttacgattaataaatacgtctttggtttgaaaaccaatcaaaattggatgaactgggagttttttgacctgaaaaccaattggctgtgctcaatggcagaaaattcaatgaaagtgggttgttttttcccacccatatcgaatcttagaaatgtgtcaattcaaagcttacatcaagttacaattaggggaatttgt

SEQ ID NO: 9137 - DNA, 1833 bp, DROSOPHILA
aacagtcgaagtgcgcagaccactgggatccaaacaccggcagaaaccaggccaggagtcgaagtcgacctcccacctccagccagatccgaatcctatttgggacaccaccagctagagccaagtcaagtgccgtttgccgtaaacatgccacgcatctcgttgcccggcagcagcctgctggtagtcctggcactgatcctgtgcctcagccttccaatccgggcggtgcccacctccgtgctcgcccaagacacggagctctccaccagcgccaaccacaagctccagcagcagcagcaacagcagcagcagcatcaccagcagcagcagctccagcagcagcagcagcagcaacagccggccacagccaaacgctccgaggaggcgagtgccgtgcccacggcggacaagaagtcgagtccggaaattgtgcccgcttcctttagcaacgctccgtcggcccgaaacagcccagttccggtctccagccagcagcaggagcagcagcaggtgccgtccggagtctacgccctgccctccaacgaggagatcctggccgccgtagcggccgccgcccagaacagccaacagcagttgcaggaggagccctccgccctggaggaggcggtggccagctccacgatgcgcaagcggggcatcaattacgagtacaatccgtactccgtcgcctccagcgactacggcagcgatgtgcccagtggcgtttggtccgacgactacgaggccgccgttcctgtcagctatggcgagcgggatctccaggagatcgatgactacgtgccagagcgaagagtgagtagctcgagtgcgcgaaacaaggcctacgacaatttgcagaatctcctgaacgccgaggcctatctggagagcattcccctctcggtgccgctgacctatgccaatcggaactacaacgtggatgagcgcaacaagcggggtatctactacaacgtgggcactcccggcggcaatggggcgagcagcctgggcagtggaagtggctacaacgacgagggtatcaacctcaacaaatatcgacgattcaacgacatgcgacttaaacgcgacacccagctcaatcccgccgacatgctggccctggttgccctggtggaggccggagaacgggcgcgcaaggagagcgatgctgagagctccggaccggtgcccatgataccctccgatgacctggactacgcgcccgccggcagctggttcgacgtgcccgtacaggcggactactacggcgccggagtgccgctggacaaccagaaccaggcgatgcccaagtacgagtacgtgccgcgtcagcacaagtacagcggagtcaatagccgattcggctcctcgaagcagcgctacatggtggccaagaagaagcgctcggtgaaccagagccaattcatgaacgaaccggtggcggagcgcggatccggctacaatggcgagaagtacttctaaggatcccacgcggagatagtctacgtagtacttaatgatagccacaggccccacgaagagtatttctcgtttttttgagcattgaacatattgaacataatccaagaaaccaaaatccaaattcaatttctaattcaattatgataaagagctagtgtcaaggtcaactcgtgtgcaatttttgtgtagaatttcactttcaaaaaacccaatggcgagaattaaactattgttgcatgcaatgtggtgcgtcaggagcataatcaatcagtgtctaggattttgtcccacggaatccgcaccgaactaaaccgaatctatatctacgccacctaatccctgtaagaa

SEQ ID NO: 9138 - protein, 279 aa, DROSOPHILA
MRKRGINYEYNPYSVASSDYGSDVPSGVWSDDYEAAVPVSYGERDLQEIDDYVPERRVSSSSARNKAYDNLQNLLNAEAYLESIPLSVPLTYANRNYNVDERNKRGIYYNVGTPGGNGASSLGSGSGYNDEGINLNKYRRFNDMRLKRDTQLNPADMLALVALVEAGERARKESDAESSGPVPMIPSDDLDYAPAGSWFDVPVQADYYGAGVPLDNQNQAMPKYEYVPRQHKYSGVNSRFGSSKQRYMVAKKKRSVNQSQFMNEPVAERGSGYNGEKYF

SEQ ID NO: 9139 - DNA, 2504 bp, DROSOPHILA
cgtgtctgtgtggccgcgtatccttgttttttttcctgtctgtgtgactgtctgcactggtgtgcgtgtgtttgcttgtttgtgtgtgcgtgtgtgtgataacatgcgtagatttatttcaggactataggccaacaaaaaatggctacaaaatgcaaaaaaaaaaaaaaaaaacattttccacagttggcaacagtttccgggcaaataaagcggacacatggcagacaaagccacactctggaatttatttattcagcaacagggtgttccagctaaatggaaatttgaatttggatataaattcagaaatcttttaagtgcaattatattagagaaacaaaatacttttgttagcattcttaatttttgctgaaacgctatcattttgcatttaatattagaaaacaccatttccaagggctgcaaatggttttaaaatatcctcctccttttgaagttatcctgtattttatgtgtttgccacacgcaaggtaaacatttcggttcgctttttttggtcggttgggcgggcggtcatcatttttatgacccatgttgcatacattttaagcagcttaagtttgaattgcaggcgaccgaaagtgggattttggaggctgggcatttgtcatttgctaattgcttggctgacaaaacaaaattgttgcaaagcaattagcaagagcaccgaacgaaaaacaaaaaagaagtggagaatggctcagaaaagcgacgcaaatcgataacgataaacggcatcgatgcgacccagtttccggtgtcgtctcattcgaatatttcatatatttcaatcaactggccaaacatcgcttacctcccccgtcagcccccttctgcaatcacatttccagcgggcgtgaaaattgagtgccaactctgtgggaaatgtgggtggtggaaataggacgggggggtgggggcgtgtcgcgcaatgtgagtacggaaaacagctattcgggtgtcaaatcaaatgtcaatggcaagtgggcgtcaaagtgggcgcgatacggaagaatatggaggcctttgtgggtaatcgaaccattttaatgaaatctttcaaagtgtttgccattgcaatttggcgacaaggcagcagcccaaagcccaacgttcccccaatttccactccgaatatatgcctgtggcacaacaacatcactgcctccccataatcatcgccatcggcagacgaattggggcttcatcctcattgggtccataattaacaccactaggaactgcagcaaactcgggcatcagctcgggcagccatgttaaggataccgcatactacgagaggcgtcgcaagaacaatgctgccgccaagaagtcccgcgatcgccgccgcatcaaggaggatgagatcgccatcagggccgcctatctggaacgccagaacatcgagctcttgtgccggatcgacgccctcgaggtccagctggccgccatcacctccgccaaagttaccaccgcctaaaggtccactcctctcttgatacattgaacgcgaggatccgaatcgtatgtcctgtttttgggtcaactttctttaagtactttaagtccttggagtatacgttatatttagaaaatgtattagctgtagtgcatctcgcaatcaatggatagtatatagttgtataagtcccagctagccattaatgtttaatctataagtgcatttttttcatagccctaaggaatgaatttgaataaattatcgaaaataattatcttgtggtatttctgttctcgttggtcgcctcctggaattcctgttcgcctggtaatttaagccgaaaatctctcaattttgcttacaaaatgagcattttagtggcaaattttgggatgtttggtaccaggccatcatactcagtagcgggtgtctactgaaaaccaactaatcgttggtcgcctcctggaattcctgttcgcctggtaatttaagccgaaaatctctcaattttgcttacaaaatgagcattttagtggcaaattttgggatgtttggtaccaggccatcatactcagtagcgggtgtctactgaaaaccaactaatcgttggtcgcctcctggaattcctgttcgcctggtaatttaagccgaaaatctctcaattttgcttacaaaatgagcattttagtggcaaattttgggatgtttggtaccaggccatcatactcagtagcgggtgtctactgaaaaccaactaatcgttggtcgcctcctggaattcctgttcgcctggtaatttaagccgaaaatctctcaattttgcttacaaaatgagcattttagtggcaaattttgggatgtttggtaccaggccatcatactcagtagcgggtgtctactgaaaaccaactaatcgttggtcgcctcctggaattcctgttcgcctggtaatttaagccgtaaatctctcaattttgcttacaaaatgagcattttagtggcaaattttgggatgttt

SEQ ID NO: 9140 - DNA, 285 bp, DROSOPHILA
atggcaagtgggcgtcaaagtgggcgcgatacggaagaatatggaggcctttcaaactcgggcatcagctcgggcagccatgttaaggataccgcatactacgagaggcgtcgcaagaacaatgctgccgccaagaagtcccgcgatcgccgccgcatcaaggaggatgagatcgccatcagggccgcctatctggaacgccagaacatcgagctcttgtgccggatcgacgccctcgaggtccagctggccgccatcacctccgccaaagttaccaccgcctaa

SEQ ID NO: 9141 - protein, 94 aa, DROSOPHILA
MASGRQSGRDTEEYGGLSNSGISSGSHVKDTAYYERRRKNNAAAKKSRDRRRIKEDEIAIRAAYLERQNIELLCRIDALEVQLAAITSAKVTTA

SEQ ID NO: 9142 - DNA, 9855 bp, DROSOPHILA
cagcaataaacttagatttttactttagtcaaactgcgtttttattaaattaaacaaatctttgtttgtgaaaatgatagagatggactatttactgcctatagtgactatcgaatacagcggctggcgatatttttcagcaatcgtaagcagttgtaaatttaaaagtaaatgggatcaattctttcgcatatttgcattttaaaaatgctctttcaatgtcttaaatttttcaatatgtttcaaattttaaaatttatagttttaaaattgaagtaaattactgcaattttctgtacttccacagttgccatgctgatttctgcaaaagtcgggaggtgccatccgttccctattcaaatttcaaaacttctgccactccctcccagatggcgctttgcagtttctcaaaacaaaatagtttgtctcctaaaataaactaacaaacgttataaataaacataaaacattattgaaagctgaatgagagagaaagttcagatcaatttttgtgaattaaatcataaactaatattatattttgaattaacttaactattgtaacagttattgatagagtcgaaataggtaatacagaaaaaggttctattgatagtagttttaaaagggtatctgttcagtcaaccagctaatattaccgctcataaatctttaaatgtgtacataaatggagatgttcttaattttaataaatctagtcgcgaaactcgaaactttacctaaggatcgagaaaacatttgttcataaattgagcgtaagcataatggaatattatttaaaaagttacttaatatcattctttacttgtgttataaattagttgcttataatttaggttgactccacaattttaaaatttttactcatataagtttttataaaatctattccttgatcttaatttccagtcactggaagtgggttatttttagtgcatctgcactcggccgattgcattcgagaatacgttcgcacgcggcatctggccacactgcctgcaacgctagctcgccttcgcaacgcgaatccgctcatttcaaattttcaaactcccgagagcggttgcggcggtgtcgagacagcggctcctgaatccatccgaatccgaaagcgaatcgcatccagccaagatatcctatcgtgcagctgaaacccgaaacccgaatccgagttcgaaacgaaacgaatcgcagtggtggtttctctctcgctctctagctctccctctctctcgcgtgtgtgtatgtgtgcgagtggcaggaaaagtgcgaagccgaaatctttttagctgaaagaaagcgcaacttcaattagcgaaaagcaagagtagctaacaaaaagaaaagcggatcgaaaagtaaagaaaaacaaaaaaaaaaaacaaaagcaacaaatcgaaatggcaagcgaagtggcccaaatacccgccgaggaaacgcccgcagtggcggcggcggaaaaatcagaggagccggaaaagtcagcggccccgccagcggactcagcggccgctccagctgccgcccccgcagtggagaaggctgaggatgccgatggcgagaagaaggacggcgaggccggaaagcaggacaagcagcaggatggcgaggagcccaaaaaggacgaggcggtggcagcacccgtggcgaccaaatcggaagccccgcccgcccagaaattcaatgtgcacaagaccaacttcgagaaggacatcatctatctgtaccagttctcgcgcaccccactgctgccctccctgtcgccctactgcctgaaggtggagacctggctgcgtcttgtgggcctgaaatacgaggtgagtggtggtcataaatccggggaaaaaaaccatagaaaattcatgaaaacctcattataaatcgagccatcatttggcatccttcaaagtacccaggataattagggaaaacccaaaaacggactaggtagaatcccaggaagagccgaaaactctcagatattccagaaatcccagattttcaaggcatttttgcggtacagattttttcccagctcctgcgggagagagcgagagagctcggggaagagagccagcgccgccatcatggtgtgctgctaagcctgcccgtgtgcatgtgtgtgtgtgacctgccctgccccgtaactgaaaagggatacatttgtgccgccttccctctctctcccagcgcccatgcctgtgtgtgtgaacctgtagcctggtcctttgcgcgtgtgtgtgtgcacagcgtatacataaaatttgtgtgtgcgccgacgccgcccctcaccccttcatctctttgtgctcccctttgcaaaagtcgtgcttcaaattttgcacttgccgactctctccttttgtctcgctccctctctcgccgtctgctctttgtcttttgttgctgcactgttttttttttatttcacttttctttcgacttctttttgcactgcacgaaaagttgtcatctctatgcgctgcatgcatcttttcttagcatcttcgagatccatgcaactgtgctctcactccatccacacaacagcaaattttctctctgtatactttagcaggagcagcagcagcagcttgtaattgcttttaataaaaattgatgcagtttaagctggactcagaaatagctgtctccctcttcgccttccaactccccttctccttttccctttcttttcttatccgttaagtagctgtaatagtgttgggggctgggtggggggagtggcagacaaacaactgtcaacgacttccaatggtgccttccattttggcttgttgttttttccttcactttttaaagcgcgcgatgcggtttgcatatttttcatattttttctgtgcgagaggaaaagcgtgtagtatgtggtagtggccgggggagaaatgggtgcggtcacccgcacaaaaactggcgacgcaattgctgtttaatcttattaattacattggttaatgaaaaacgagccccttgcgcggaatgttaattgatgccgtcgccttccagatgccgataagcaatcgcccccatatgttgcattccacgaagcaattatgattgacagtccgtcagtggccgcttttcggcccgcagctggaaattactttccattttcacgattattcccaattccactgataaggcgcaggctgcccaaaatacggcggcattcgattagtaggaaggagggagtggggggtgggtaaaaaaaagagttcaacaaactggggacctttgacatttctggcatggtttgttgttgctgcagcgcggcattaatcatggaaaaaaagggagggtgactgactgtaaatgcaactgactaagccagttttcccccctgctgcttgcgctcggctgcatttcttgcctgctctcctcctttgtgtacacacattcgtcagtgtaaacaagagcagaagttgtttctttattgatgataaaccgaatgcatatttttttcacaccacattgaaggcggcgcccattaataagcacagcagcaacaacaacaacaactgggcataagtttcgcttttgaggcggtggcccgcattgctagcattcctgagtgtcgcgctcgtagattgtgcaattaatttacattttctctgccatatgcattgcgggcacagagcgattaaaattcaaatggaaatgctggcgcgccattgcatttgtgcaatattgccgggctgcaatttcaaggtattctggcaacgctgctgcctctcctgctgcaactgtacatgtgcgaatgtgtgcgtatcgtatgtccatgtgtgcgtgtgtgtgtatgttgggaggaaatggagtttttttgcttctcgtttttgtattttttacgttttatagctgcctttgttttaattaataaaccgcatatttgcatttaaacaacacacagtggacggcctttgttgttgctcactcgctccagtgcaattctcccgctctcgctctctctctctggaacttctgtgcaagggtgtggatacactcacactcgcacacgcaggctgcataattgcattgctgttgcttcttcttctgctgctgctgactcttacactgcgaaaaaaatgaaagaacaaagattgaggagacgagcgattgccttaagtggcataacgatttaataaaacataagtatttgcattgtgcgtgggcacgagaagaggatggagacggagccggagatggagatggagaagaggaagctggcagacaggctgccttttttgtggatcattggaattgaaaaatggactccaccctttttgcagagcgttgcgttgcgatgctggaaggcgaaaatctctctacaacaacagcgccctctctttcctttcactctctcgccgattctctctcggctctggcggacaaccacaccctgcctctcccttttttggcagagggcgcgaaagcataaaatatgccaacggttggctctttgttatggccctcgtatgtacatatttctaattagaaattattatgtagatttgtgcagccaagctgaaaatgaaaaggttcagaccggacacccgccgcctataactgtcacattgctaacggtaacgcttcgtgcggacgtgtgtacacactggaaggcattggaatatgtcaaaatgttcgaatagcaggcaattggaacgacgttttccctcccgctgtgcggcgtgtgtgtgagtgtgcgttgtataggggtgttggtttttgggtgggtttttcggttttcgagtccgggttttgggtttttgggttcccgggaggtacagctagcttctcgtgtagtggttggttcatcagcatctgcttggcatacataggaaatgcccaaatacacacgcaaacaaacgattgccggctagatgtatgtcatgagcgccatctagcggccggaatccttgcgggggagtgaactacattttgcattagtcatgggcgtacaaataaaaaaattccttcctggttccatatggacatttacaatttatgagtatctttagaatctgggttacagcagaacatttactacgataactatagcaaataataatttcctataatccctctatgcccatgaaaattatgtctacaagatgaaaacaatagaacataaactcaattgctcaaaacttaattaaaacagtaacagtaacataaaatagtgactaaaacttccccaaattgattgtacttgtgtgtatccaaaatgatggccatgctttgaaaatgaactcttgtgaaatacgattgccaatttaatgaccaactaaggcaatatttgttctcactgcatgagtggcatgctgcccgcagataaaagggtggggtaaacaatcacccactcccccacattcctcgcacaattagtcatcccacgcaacaagatataaaatgaacatgtattctctttccggcctttgcagaatgtcgatcataagatgcgtttccgctccaagaagggtcagctgccgttcatcgagctgaatggggaggaaatcgccgattcggccatcatcatcaaggaactgtcgtccaaatacgagaagtacctggactcgggactcaccgccgagcaaaggaatgtctcgtacgccacgattgccatgctggagaaccatctcatctggatcatcttctactggcgcgccaagtatccggacaatgtgctcaagggctacaaggtcaacttgcagcacgccctcggcctgcggctgcccaactcgattctgaacttcttctttaagatcacctttggtcgcaaggtaactggatagtttgtgatatttaacatacataggtcatgatcgtggtccacgatcttcactttccccgaatttgtatggttatgattagaattttcattggaacattgcatacttttggtcattatcgtaattggttctacagaagttgtttactatcattcatacctaatatttccttaatatatcaacatcttttgacacatacttctagttgaacaataaaacaaatttataggttttattgttcgtaaaagtaacatttaattacaaatagctcatactttggtacaattttttatttgtacatttcataaatgcatattaaacaattatattctttcgtgatcttaagagttgaagctttaagtgaatattattaccattttgttgaaagagactgtactctatctttaaccaaaagaaatctattgaactccagtgttaatcgaaatcagacaaactaagtgaaagtggaaaccggaagctagtcaagtagagaaatgtttttagtgtagcggatttagatgtttcagaaactcaacgccagcagctgagcctccagtagttccaaaaaccggagatatccgcactttgtttagattgaaaacgtaatcgaaagccgggtaggttctcgagttggctggcgttgtggattaggcggggatggatgggtagtgtaaataaacaatacttgagaattaaaactaagcaagcggtggcgtattatattgcacctagctgtacataaaaagaaaagaaactccaaacacaccaccaccatccccgcacatagtttatcccgaaaaccccgatggcataaacaataattctctggcgggatgcatttgtttatatcaaatcgatcggttctcacataaccaacccaaatcaaaatcaaaacccaaacgggaaatcgaaaggaaaacaatcattattttacgactaactcttgcatggtttttctcttttttctttttcgttcttttttgcatactactttggttttgaacatctaactgtgtaatgcgtaatgcccccgatcccaaaaaaaaaaaaactctaaaaactcacatcacctccaccaccccgattccgtaacgtatgcttgtgcatccccccgtaacccccatccgtaactgctgtacggcaaaacaactattgaacacaacaagtggttccagggcacgaagaagctgaaggcgcacggcatcggtgtccacagcgccgaggagatcgaggagttcggcaaggacgacctgaaggtgctcagcgagatgctcgactgcaagcctttcttcttcggcgacgagcccaccaccctggatgtggtggccttcgctgtcctctcgcagctccactatctgtccaaggacattgcgtatccgctgcgcgactacatgaccgagaagtgccccaacttgattggccacgtatctcgcatgaaggacaagtgcttccccgactgggacgagatctgcacgaagctggacctcaatgcgcacattcccaagccagagtgagtaatcttggatgaaaactttccaatggatgatcggtgtactaattcatttttcccgcttttccgacaggcccgagaccaaggagggcaaggagggtggcgagcaggagaaatcaaacgaacaggagggcactgagggcgacaagatcgagaaggagttggagaaggacaaggtgagtcttgagtcctgtaaaccagatggtctattcttgggttttctttgtaaattgttaattaattccacacaccaaggacaaggatagaccctctagtcttgaatttaagttacctttagccacatactaagccatgtccttctattttgcagtcaaacgagaaggagtcgaccgaggagaacaaagagaaggaggaaacaaagtaaattcgccgttagttatatgcgtacatatatctagtatatgtgtatgatcgaaggaaacagaaacacccacatacacacacattatatatatatacatatgtagtacgatactatatagtaaggccctatatagctaggcgctacgctctcatatataagcattcagacatcagaaaaccactcgaaaaacaaaaacgaaaaaaaacatcaagaacacccatttacaaacctaggacaactgtaaagcaaaagcaggcaaaaaccatcagcaagagaacgatccactaagtaatgagaaaaaaacaaaaagcatatacaataacgtaacgtaaaactttggacatctttttttatatatttacatgacgacgtttgtattacaagaacaagaaacaaaaagcaaaaaaagtgaagaaaacgtaaaaaaaaaaccgtaaaaaccatttagtataaaattataaaagtttatacgtataaatattaagacgatgaatgaaagcgatgagagcggggggagaaattataaaaaattagttaaagaacgcgaataaaacaaagaacaagtgagcaaaacgtgagtaaaaagagtgaagccagataggacgaaaagttagcgaggtgtagaacagcattcaatacgcattaatcattagttttcattcaaaagcgatctatataatacactcatcgacactcacactcactctcacacacactcaacaaaaaacacaacacaaaacaacacactctacacacatatagcatatgcagcaacaattgcaactcgatggtattgtttactcttccaaaattgattaagcttaaagtaacgaaagtaacgaaaggaaccgctaccagtacgataggaagatacgatagtgatggttagtagggatggcatgcaatggggatgagaatgcaaatgcaaatgcgaatgcgaatggtataggaatgatataacggaatgacggcaattaagtttattttttatatatatatgattgcaaatagtaattttgattctcgtgtgcaaataattaaacaaaatggataaaatttattacttataattatatacataaacattatatacgcccattatgcataaagatgtgtataaaaaaaaacaaagcaaaacaaaacaaaacaaaaacgacaaagcataaaaactgtatgttggttcttttattatattatactttatttctataaatattattgtaattgtactgtgtattatgattttgctaaccaaaatcccttagtatgagatgctcatcgatatttcacccccatacacaaaatcaaatcaattcgaaccaaaaagaatactcggccatccaaacgaacaaaatttaccatttattttgtacgcaattgtaactacttttatatgtatgtacatatgtatgtacattctctattttggtacgtccactgaaacaaaattatagtacgcctcatttgatttttcaactgtcttgtgtttcatacgatttaatttaatgatattgattatgcaaatatatatataaatataaacatcatttctattgtaattaaaatgctgcagacaacaaagacgaacgacaaaaactcatagaaaacacaaaaaaaacatctgaggagaagccggagcggaagaactggaagaattctccgcggggaggtcactacccccctcgcgttctcctactccaacactttctccctttacatccagttggccttccgtttattcacggattcctcggtgtttattgttttcctttttttctcgccaacttctcataaaatcaaagaatcatcatcagccgcagatggagaatggaatgaatgaaatctttaagtaaatagggtaaaactcacgcaactaagaaatgaagaaaagcgaaaacaaaaacatatacagaacccattgaggcgcgacagaagcagtgaaaacaatttgggggaaggtcaaaaacaagatatgaagcaggagaagacgagcgggcgatcgatcgatccacgaagaaatctctataacgatacgatttgtagactacgcaagtatttttatgtattaaaggttatgttgtaagtttttatcacaatatttgtattgtagctcagtgttttatatgattata

SEQ ID NO: 9143 - DNA, 2215 bp, DROSOPHILA
gcatctggccacactgcctgcaacgctagctcgccttcgcaacgcgaatccgctcatttcaaattttcaaactcccgagagcggttgcggcggtgtcgagacagcggctcctgaatccatccgaatccgaaagcgaatcgcatccagccaagatatcctatcgtgcagctgaaacccgaaacccgaatccgagttcgaaacgaaacgaatcgcagtggtggtttctctctcgctctctagctctccctctctctcgcgtgtgtgtatgtgtgcgagtggcaggaaaagtgcgaagccgaaatctttttagctgaaagaaagcgcaacttcaattagcgaaaagcaagagtagctaacaaaaagaaaagcggatcgaaaagtaaagaaaaacaaaaaaaaaaaacaaaagcaacaaatcgaaatggcaagcgaagtggcccaaatacccgccgaggaaacgcccgcagtggcggcggcggaaaaatcagaggagccggaaaagtcagcggccccgccagcggactcagcggccgctccagctgccgcccccgcagtggagaaggctgaggatgccgatggcgagaagaaggacggcgaggccggaaagcaggacaagcagcaggatggcgaggagcccaaaaaggacgaggcggtggcagcacccgtggcgaccaaatcggaagccccgcccgcccagaaattcaatgtgcacaagaccaacttcgagaaggacatcatctatctgtaccagttctcgcgcaccccactgctgccctccctgtcgccctactgcctgaaggtggagacctggctgcgtcttgtgggcctgaaatacgagaatgtcgatcataagatgcgtttccgctccaagaagggtcagctgccgttcatcgagctgaatggggaggaaatcgccgattcggccatcatcatcaaggaactgtcgtccaaatacgagaagtacctggactcgggactcaccgccgagcaaaggaatgtctcgtacgccacgattgccatgctggagaaccatctcatctggatcatcttctactggcgcgccaagtatccggacaatgtgctcaagggctacaaggtcaacttgcagcacgccctcggcctgcggctgcccaactcgattctgaacttcttctttaagatcacctttggtcgcaagggcacgaagaagctgaaggcgcacggcatcggtgtccacagcgccgaggagatcgaggagttcggcaaggacgacctgaaggtgctcagcgagatgctcgactgcaagcctttcttcttcggcgacgagcccaccaccctggatgtggtggccttcgctgtcctctcgcagctccactatctgtccaaggacattgcgtatccgctgcgcgactacatgaccgagaagtgccccaacttgattggccacgtatctcgcatgaaggacaagtgcttccccgactgggacgagatctgcacgaagctggacctcaatgcgcacattcccaagccagagcccgagaccaaggagggcaaggagggtggcgagcaggagaaatcaaacgaacaggagggcactgagggcgacaagatcgagaaggagttggagaaggacaagtcaaacgagaaggagtcgaccgaggagaacaaagagaaggaggaaacaaagtaaattcgccgttagttatatgcgtacatatatctagtatatgtgtatgatcgaaggaaacagaaacacccacatacacacacattatatatatatacatatgtagtacgatactatatagtaaggccctatatagctaggcgctacgctctcatatataagcattcagacatcagaaaaccactcgaaaaacaaaaacgaaaaaaaacatcaagaacacccatttacaaacctaggacaactgtaaagcaaaagcaggcaaaaaccatcagcaagagaacgatccactaagtaatgagaaaaaaacaaaaagcatatacaataacgtaacgtaaaactttggacatctttttttatatatttacatgacgacgtttgtattacaagaacaagaaacaaaaagcaaaaaaagtgaagaaaacgtaaaaaaaaaaccgtaaaaaccatttagtataaaattataaaagtttatacgtataaatattaagacgatgaatgaaagcgatgagagcggggggagaaattataaaaatataaaaaaaaacaaag

SEQ ID NO: 9144 - protein, 415 aa, DROSOPHILA
MASEVAQIPAEETPAVAAAEKSEEPEKSAAPPADSAAAPAAAPAVEKAEDADGEKKDGEAGKQDKQQDGEEPKKDEAVAAPVATKSEAPPAQKFNVHKTNFEKDIIYLYQFSRTPLLPSLSPYCLKVETWLRLVGLKYENVDHKMRFRSKKGQLPFIELNGEEIADSAIIIKELSSKYEKYLDSGLTAEQRNVSYATIAMLENHLIWIIFYWRAKYPDNVLKGYKVNLQHALGLRLPNSILNFFFKITFGRKGTKKLKAHGIGVHSAEEIEEFGKDDLKVLSEMLDCKPFFFGDEPTTLDVVAFAVLSQLHYLSKDIAYPLRDYMTEKCPNLIGHVSRMKDKCFPDWDEICTKLDLNAHIPKPEPETKEGKEGGEQEKSNEQEGTEGDKIEKELEKDKSNEKESTEENKEKEETK

SEQ ID NO: 9145 - DNA, 12876 bp, DROSOPHILA
aagatattttcatcaagaagcaaagtagacacaaatgcaaacgagcaataacaataactaataatgaatttatttgcaataaacattggctaaatgttgttaatactcgaaatatttatacgacagttttaaaattaaagttttctattatttatgaaagcgatatgaaagcgaatagagcggagaacggaaaacatattaaaagtgaaaacaactcactgtttaaagtccatttaaattcaaaatttgcatgaaattaaaacccatcagcagacgagcaattcaccaactgggaattgcagttaaaaattctcgagctgtagatggcaattttttccatgagtgtcacggcaactgtggcaatcagtatatttattattgacattcgaattgaaatgattgacatttcgtcactattttcttatgttaaagccgttcaaataactatttaactttattataagcgcgttcttaacttcttgatagccatgtttactaattttattaatcattaatcatctttaaaattctagcgaactgcaatactaggcagtgtacccttttaccctttataaaatctactctataatttaaatgataatatagagtatactcttttcaccatttgtatcactctcgatttcccttaatttatgtcaatttttctacgttggctgagcggtttgtgtgggtgtatctgattctctagcaaacgcgcatttcaattaggcgattgacaacgcattttgaattgcaactcaggcatgagttaatattttctaggcctaccactgaaactgaggttgatttagctgaggtagtcgtaatgaaggttcaaataagagcgataagaagctgatgcaaagctggaataagggcttactcaaccagttttataagagcgcacaggcattataaatgtttgttcatcacccctttccactgcttaattatctcgacaaaaaaaaatatatatattaaatgccactcttcttttcagaccttggaccatgaactcctccagcggcgatgacgaggcgccgaaggatccgcgcactggcggcgaggattttacgcaacaatttacagagaatgatttcgagggtgagtcgagcttcactttttaaagccccattttttaatgcttaccgaaaagtgatagaaaaaacatgaatatataaaagttcactccacgaatgtaccaaaattaaagttgacttgtaaaaccagccaagtgacaagtcgatagacaaacaagaaatttgcgttgtgttaattgcaggttgacaactttaggcgcgtaaccaaaattaataccgaaatggactataaattcttcatagaaatcaaagatatgaaaaaccagatttaactagaaatttaaactgtatatgggggtcatacaaattaagctgtgcgtttaaataattaatttaagtctcatcttacatatcttccggttgtggtcttctatgtgcttacatcactgaaaataacatctttacgcttaattaattgtacattttaaaggcaaaacaacatctaggaataatttattatatactgtataataaaagtgcatttaccaaccaacttttgtgtccctaattgcaacgcccacaatttcaatgcttatgagacctaatcgcgtgactcggcgaaagtggaaacaaattaaaagatgtgctctgtataattaatttaaatttatgaaaaactactactactactacttggcagatgatatcacaattagtcaactgacagagcgcaagttcaacaaaggctttgaaaatatagactaggtctctccttcaaagcggacatcaaaattcagggaaatagtaattaacataaatttatttgtagtcactcaaaaaacaacgaacaaagccgggaatttgattaagacggcactgcatctaagattaaattggatttgggttcgtagatgattcaacgttgcgtatacgtgattgtctgatggcagacaaaagttatggacgaatcttatcactagagtaaactaaatttaagctgaactctgagctgctgattgttagattgaaaatgatgtcgggcccaaatacgttttaataaaatgccattgagtgtgtttctgaacgttcagaggtttcaaaagcaaactacaaaagttacatctattgtttgtctagatgaaattatattgcagcgtccttcagaaaagaaatacatttagaatttaattgaaaacgagaagaaagaaagaaatttcaggaacacattcaatgtggcaagtaatagcacaaattgaaacgaatataaagcactttaagcgaatagaattatgtaactcaattgcaattagtaaacaacgtcgcactcaatttggaccaacatcaattggaccctccccaaccgaatccagctgaaattttacccgcatttttcctgcaggacatcgggcccacaccgtttatgtgggcgtccatgtgccaggaggacgacgccactcgcagcgccgccgcaagcatcaccacagtggccccggaggtggtggcggtggcggaggtggaggcggctccatcggcggatccggaagtgtgggcggtggtgcgggcaaggacaacgtcagcgagaagcaacaggaagtggagcgaccaggtgcgtcaggtgtctcgcattattgcagcctcgggtttccctgtgcagatataattgcaatgtggtggctgcgcagtgtggaatgccagtaaatgtggccaatcagttctggcgaggtcgagaatcgaggcaaattataggaacctaaagtgcgaggagaatttctgaaataacagtcatcttctgagacatttcgctcgtcagacggctaatcaaaacgatagatgattggctttcagctaaccgccaacaagaagttctgattgtaatggggggttgcgcactaatgggtgacattgaattaggataatcgaataaccttcagtcgactgaaagcagaggaagcttcttgaacttggacttcaaatgcgtttctttttttttttttgcaaacaaaagcaatcacaatgctttcattagtaggatttagtttaaaaagttatatattaatgcgcctatttccacgattattctgcttaatacttgcgttattgctattcatatatccttgcataaacctatcccaacatttgttttattgtaactacatactactataatcgtagtaagcaacattctccatcttcatcaattaattttttagcaaatttaagctctatacgtcatataacccaatttagatcgtaacaaattccttctttagtgttttgtaggcagttaaattcattgcaaaacgtctatacataccgtaaacatccttagtagcactcaaaacaatatcacgcaaacccaacataaacagcaacaaactcaaatgggtctaaacaggacatatggtggacaacggtcagggaccaattcccagcattcccagatcagggccaaattattttcgccaattaactttagtacgcattcgccggaagcccaaggatgcggtgcaatcattgttataaacggggtggcagtggtaggatgatgttgctcccaagtcataaatattgattaagctcataaaggtttgcacaggaagaaaaggctgcacataaattaaatgttgtaaatgtttattttattttgtagtttagttgatcattttatgctttcgatatatttagatatcttgcattattttttatccatgtatagaccttctgtttctcataaagtatccttgaacttatagtgactccgccggcacagcgagttcaattcatacttggcgaggatgtggacgatggcacacacgtatcgcatcccctgttttcggaaatggggatgctggtcaaggagggcgacgagatcgagtggaaggagacagcgcgatggatcaaattcgaggaggatgtggaggagggtggcaatcgatggtcgaagccgcacgtggccacgctctccctgcactccctgttcgagctgcgtcgcctgctggtcaatggcagcgtgatgctggacatggaggcccaaaatctggaggtgatggccgatctcgtgtgcgatcacatggtcagtgcgggaacattgccgcccggtgtaaaggataaggtcaaggacgcgctcctgcgacgacatcggcatcagcacgagtatgccaaaaagacgcgactgccaattattcgatccctggccgatatgcgcaatcactcgtcatcaaaaagtgagtatgggggtgttcacgatcgctaggtaactctaagctcatctcgttcgtttggtgtgaatctatgatccatctgcgagctcaacgccatcaatcagttcagaactcatttaggatcattttgtgaattgtgtctaaaactctcatccgatccgatacgaaacaatactaacaactctcagacctgggcaagagcactccactgcactcactgcatggctcagcagctggcctggatctgaccggaaccagaccggaccagacacccctctatgtgtcgagtaaggatcagcgtggttgttatctcgctgttcccacaggtatagcaaaatcctgtcaccactctaccttatgcaatctctgtacagctgagaagccaagttgaaataatttttagttgccttgcacttaacaaaaagcactcagaatcaatcaaatgtaggtgtgctaagtaaactttaaactacggatacttgaaaacttagaagctcgtagaaccgacaaagggtttacaatttacattttgactttaagtggtaaataatcaggttgaaatagtcaaaagctccaaaaccttattaggaatcttgtaaatttttttgaaaaaaaaaacccacatttgctcactcataaatcactcatatccattagcaattgaattgcggaagacgctaaagaatcatgaaataaactcgcgttattcgtttacccaataagctgacacttcaacgcatctgggggccatcggggtcaccacctggttccatgctggggcatcgccccaacatcaggcacagaatcatgctcagaatcaaggacgaccgcagtcacaagcaataccaagtaatagcccttcaatgatattcactgtactttgccgtacctatcaagagcacgctgtgtttttcgatgattatctcttgccatagactcttgtattttctctactcctattctactcactatatatgcaacttaaaccttcaaaagttcgttagtccttactatgatgaaatatccaatttgttgtgctgtctacccaaacaatttagcaatttatctttatatttaagcaaacagtctaaccaaaatatgaaaaccctctattttactctcaaaatcttcgttatatctctaattcttcattgatttgtttcccattctttgaaatacgttttcatttctcattttaactttcccatttttataataagttaaaataccaatacttttatacactgagtaaaaatgtacttacttgaatgtttataaatattgcgatcaattttactatagaacaagagggaatgctatagtcgaattccccgactaacagatacccgttacgcagctggtggaagtgagaacgcgaaattcatttttctggcataccgatagatattggagaatataatgagaaaaagggcggtttgtgggcgttagagtgggcgaggggacatgggtctacaaacttgagctgggtctaagtctctggaatctatatgcttaatcttaaccttctagcttttatagttcttgacgttcatacggactgacagacaggcggacagggccagatcgactcggctattgatcctgatcaaatatatatatactttatatgctcggaaacgcttctttctaatctagtatgccttttactctacgaataagagaaaattttgaacggagaggcagttgtgttaagtgtcaagtccaaatagaccctacagtcagaaaacttatatagtgcgggaagtgaagttcgatcttaacataaaaaaagatttttctgattttaaacaaaataagattcttggtacgtatgaacacagaatgaactgaccattgttatatctaagctcatataattgccagacaacaaggtgctgtcaccatcaccaacaaaaaaaatggaaccctcgttttccaatactaacaaatcggaacttcagaaccaactacgagtagagagagctctgcaagataaatatttaaaagaattttcttcaatggcggatgagctaaatcacttaattgatggcactactcccagccatattgagacttatgaatatttggacactgtcgacactgaaagcggtcgttctctcgaagaagagaaaaagttaactaactttttctataaattgaagagcgatctacagaaattatttagagaaatcgtagagaacccaaaatatttaaacgaaatcagggattcgactattatcagggacaatatagatttactggatgaagcagacgcttttgaaggttcgatgaatatgctttgacggacaggtgggatttgaaaaatgtaaaaaaatattgttacttcaataaaaaatggttaaataaaaaacaggtacccgttactcagcttgtggggaaagctaaattttcaaaagggaaattttggcaacatttggaaaaacaactatatttacttccagtgaagtttaatagaacttgacaagttcgagttactcagagaataccctcgacataatgataacttgaaaaacaacccgcatttacagttgaagagcactctgcgagcattttgggcgccacaacgccaatttccctaacggccagcgaaccgggaccgcccggatccaatggaaattcaaacctgagtaccgctgccggcgccatggggcgttttctaacggtgcccagtggaaaacccagcaacagaacgctcggtaaagaacatcactacaagaatccattaccaagcaagcccaaagaagaagtgattgtttttgttctagtttgccgtttgatttttcgtgtctgttaattgttaaaataattctggaaagaatacatcgaatatttgtttggtagttcgcagttatgtaaatatgattgattgagcaaaggatatgcgaaagtgacgaaatttgcatggagaattggaaaagcgaatatagttctgttagcgaaataatataagcaaaaggatccacacacatctgcacgcttaccacatcctgacatagtttctcaaataaatatttcccattatactttgcatgcttcatctgtattctgtatctgaatctaaatcaatctgaagtctctttcagcactcttagccgaatctgaatttaatccaatgtctcttttttgcacttcttttttttcgtatgtttttatgttgttccgttgtaacgtgttgatctacatgttgttgttgttataattattattgtaatacctatcaacgcacgtatcccaataaaaactgtatatgcaaatatgtaaaaaacgacaccaacaaaacacctgcaccccgtgtcccgaacgaaaaaaaacgcgactaatgcagagaaaaaatctaattctaaacactcgcgacccgcacaaaacctgtcatcgatcacagaggacatggtcaagagtcccagtaaccagtcgatggccaggccaggaagcggaacggaactcagcgagcagcagcacaagggcaacacccacttcatgaggaagataccgccgggcgcggaggccagcaacattctcgtgggcgaggttgatttcctggagcgcaccctgtcctgtttcatccgtctgagccaggcggtcgtcctgggcgatctcaccgaggtgccagtgcccacaaggtaggttcaaggcaaacagtccatcgctttcagtcgattttaagctagttaacaataatctttaaaattgacgataacaaacttccaatgaactcagcatttcttaaaatttgataataccaataaaaatttattatttgaaaatttgacgaaaacagaagaagtcttttatgatcttgcgattgtcataaacacattttatgacactgtcatataatcaattaataactttttaataatgactataattgcttaaatagcagatattaatgccttcccttctttaacagattcgtcttcatactgcttggtccgcctggcagtcagagcaacttccacgagattggccgcgcgatggccaccctgatgtccgacgagatctttcacgaggtggcgtaccgtgcccgcaagcgggatcatctgctctccggagtggatgagttcctcgatgcggtgaccgtactgccgccaggagaatgggatccaaccatacgaattgagccaccagcggcgattccctcgcaggaagtcaggaagcggccgccagagttgcccaaggaggaggtggacgaggaggaggaggaagcgcgtcttcgcgaggagaacggactgtccaggacgggaaggcttttcggaggcctcatcaacgacatcaagaggaaggcgccgtggtacataagcgattacaaggacgccctatccatgcagtgcgtggcatcgtggatctttctgtacttcgcctgcctgtcgccgatcatcacgttcggaggactcctggcggaggccactggcaagcacatggctgcgatggagtccttggtctctggtttcgtttgtggcatgggctatggcttcttttcgggtcagccgctgacaattctcgggtccaccggtccagtcctggtctttgagtcaattatctacgagttctgtctgaagatgggctgggactatatgactttccggttctggatcggcatgtgggtcgccggcatttgcatcgtcctgaccgcgattgatgccagtgccctcgtctgctacatcacccgcttcaccgaggagaacttcgccaccctgatcgctttcatcttcatctacaaggctattgagaacgtgatggtcattggaaagaacttcccggtcaatcagggcatatacgactgtgtctgtacaccgccaattgggagcaatgccagtgtgatcgattatgccaagtacaattgggattcttgtgaggtaaggaatctttttaggctttaaagactaaataataatgtttggattttctagtcctacaatggcaccttggttggtggagattgcggaacgccgcccaccgaaaacgttttcctcatgtcggtggtcctctgcgccggcaccttcctcatctccaccgtgctgaaggagttcaaaaacgccctattcttcccatcgattgtccgccagtatatcagcgatttctccgttctcatcgcgattttcgccatgagtttcttcgactattcgctgggagttcccacccagaaactggaggtacccaacgagctgaagcccacgctaagcaccagaggctggctcatcccgccgttcgtcgagaagaatccctggtggtcggcgatcattgccgtattccctgcccttctcggaaccatcctgatcttcatggaccagcagatcacggccgttattgtgaaccgaaaggagaacaaactgaagaagggatgtggctaccatctggatctgttcattctctccattctgattgccatctgcagcatgatgggtctgccttggtgagtgttttctctatgttccatattgactattgactaaggtcgaatattcgatataatacttttgcttttgaaatcctcaggttcgtggccgccaccgtgctgagcatcaaccacgtgaactcgctgaaactggagtcggagtgctcggcccctggtgagaagccacagttcctgggagtgcgcgagcagcgggtgacccacatcttgatcttcctgaccatcggcgtctccgtgctgttgaccccgctgctcggtaacattcctatgccggttcttttcggtgtctttctgtatatgggcgtggcctcactcaagggcttacagttcttcgatcgcatactgattatgttcatgccggcgaagtaccagccagactatatgttcctgcgccaggtgagtcgaataaatcaattaaaacaacaggcatttagtttagtatcaacactttgttggctatttattaagggtatcgggtaagaccctgatatcctcattggggccatcgtataacccagattcttatcttctatttaactcctaatttcacccactttctataattatccattaacttattaatgtaggaatgtaggacagcagattcgctgtctttatattcctttaacatataattaatcataaaatcctgtggagagctaccatcaaactccgatggttcttcagttgcatttgttgatttgatggtagatgtactttcagtagtactttcaataacactttcagtagtattatcagtagtacttttattagtacttttagtagcacctttattagtactttcaatagtacattccttgttaagtggtttcaatctcgtcacagacgtatttataaactttaaaatataaaaattcacatgatgttcgacaggctttttggttacaaaagtttttctatccgtagtactttcataagcttctattcgatccaccactttagtgtatgatgggcttaaattccaatccttcgtactcttttccaaagactgcacaccttcgttttgacctgttgatttctgtataggttgatttttcaatctcgcatttaaagtttcaaaaaatgtgttttgctggatttccaattgcttcacttgctgttcaaagcttcccaatttttcattcagaatgtcaccaaatgcgttcagtcggctttccaaattaggggatccattttgattgcacatagaaatctaaaataaataatgacttagaagaactaatataaaatccctctatttactcacttttaaagttgctacatctacagtttgtagaactatcccgagtagaacaataaggatttgttgcatttcgtccacaaattagaagttttacacaacagaacttaaataagactgaggaaaacgattcagttctttttgcattaacatccacggctctgagaacagctttatcgaattaaataagaattacacttccgccggatgtactgattaacgcattttgtgttacgcatagaacaataagtattagacttgtgttgttacagccttatcattatatctttttcatataatgtttctaaatatgcgtaaaaaaattcgtatccctttctatagatagtatagtatataatataatatagtatatctttttgtagctcaaagtaacaaagatgaataattcttttaacataggtttattgtaattaaggagcataacattgataacacttaataactgtacccaatggtttatattacaggttcccattaaacgcgtccacctgttcaccatgatccagctggcctgcctcataattctctggctgatcaagtccttctcacagacatccattctgtttcccctgatgttggtggtgatgattggcatcagaaaggccctggatctggtgttcactcggcgcgagctgaagatcctggacgacataatgccggagatgacgaagcgtgcggcggcggatgatctgcataaactggacgctgaggtgggcttattggcgcgcattttcccctggggaaaaggcagccggagcagggtggtgaccaagccgccgggccttgatgatggaatcgttgggtctggtggtgccgttggcgctggactcatcacttgcaccacctcaaatgcaaatgagaaggagttcgaggcacagagtagtctgctcaaaaagtagaagcacacacctagacaagcacaccaaccaaccattgaacacaaccacaaacacaccaacaccaacacaacgcagcccaaacaaaagagaaatgaaaatcccacggaccagtgctgcccatttcatttgcgtttgcagtgctgcccagtccacggcacaaaaccaacgataaactcaattatttatagatttttttaataatttgcattttgtcggccttgatacattttattgaactagttatctatccatacgtatgcattattccctgttatatacgtttttatcatgtctttaacagtattttgtaaatgtttttcccccctacccattaataataatggcatgcagctactttgcattttgtttttatatgtacgatttgatttaacttctttttgattctatgctaaagaaaatcgcttttaaaccacctgtaaatgccaaacttacaaaatcaaaaaaaaaaaaaaaacaagaaattatgttgttactcgtagtgcaaaatgtgttatctatccgaacctactctataactactcgtatactatatatacctacacaaatatgatatttataaatgtaaatgaaattctagcctaagtcataattagtcaatcgtttacaccgtacaacaagtacctaaatgtattaaatggaacctgttatgttattttatagtcatcgggtcgagagtttcagtaactaaccatcgacatgagcccacgcgtaattgtagcaaaaaattgatgtaaaaatccaaaattcaacacacacaaaaaaaaaaaaactaaacctatgaaaataaaacaaaacaaaatttggcatatatgcaaaattgaacacactccaccgaattggctttgacaccagatcatcattgatttagacctagaaccctcacgcttttattctgagatctctttctacttcgcctttcacttgtgcaactttaggtcagatttcctatactttctctcctattcaccctttgctccac

SEQ ID NO: 9146 - DNA, 3064 bp, DROSOPHILA
accttggaccatgaactcctccagcggcgatgacgaggcgccgaaggatccgcgcactggcggcgaggattttacgcaacaatttacagagaatgatttcgaggtgactccgccggcacagcgagttcaattcatacttggcgaggatgtggacgatggcacacacgtatcgcatcccctgttttcggaaatggggatgctggtcaaggagggcgacgagatcgagtggaaggagacagcgcgatggatcaaattcgaggaggatgtggaggagggtggcaatcgatggtcgaagccgcacgtggccacgctctccctgcactccctgttcgagctgcgtcgcctgctggtcaatggcagcgtgatgctggacatggaggcccaaaatctggaggtgatggccgatctcgtgtgcgatcacatggtcagtgcgggaacattgccgcccggtgtaaaggataaggtcaaggacgcgctcctgcgacgacatcggcatcagcacgagtatgccaaaaagacgcgactgccaattattcgatccctggccgatatgcgcaatcactcgtcatcaaaaaagaaaaaatctaattctaaacactcgcgacccgcacaaaacctgtcatcgatcacagaggacatggtcaagagtcccagtaaccagtcgatggccaggccaggaagcggaacggaactcagcgagcagcagcacaagggcaacacccacttcatgaggaagataccgccgggcgcggaggccagcaacattctcgtgggcgaggttgatttcctggagcgcaccctgtcctgtttcatccgtctgagccaggcggtcgtcctgggcgatctcaccgaggtgccagtgcccacaagattcgtcttcatactgcttggtccgcctggcagtcagagcaacttccacgagattggccgcgcgatggccaccctgatgtccgacgagatctttcacgaggtggcgtaccgtgcccgcaagcgggatcatctgctctccggagtggatgagttcctcgatgcggtgaccgtactgccgccaggagaatgggatccaaccatacgaattgagccaccagcggcgattccctcgcaggaagtcaggaagcggccgccagagttgcccaaggaggaggtggacgaggaggaggaggaagcgcgtcttcgcgaggagaacggactgtccaggacgggaaggcttttcggaggcctcatcaacgacatcaagaggaaggcgccgtggtacataagcgattacaaggacgccctatccatgcagtgcgtggcatcgtggatctttctgtacttcgcctgcctgtcgccgatcatcacgttcggaggactcctggcggaggccactggcaagcacatggctgcgatggagtccttggtctctggtttcgtttgtggcatgggctatggcttcttttcgggtcagccgctgacaattctcgggtccaccggtccagtcctggtctttgagtcaattatctacgagttctgtctgaagatgggctgggactatatgactttccggttctggatcggcatgtgggtcgccggcatttgcatcgtcctgaccgcgattgatgccagtgccctcgtctgctacatcacccgcttcaccgaggagaacttcgccaccctgatcgctttcatcttcatctacaaggctattgagaacgtgatggtcattggaaagaacttcccggtcaatcagggcatatacgactgtgtctgtacaccgccaattgggagcaatgccagtgtgatcgattatgccaagtacaattgggattcttgtgagtcctacaatggcaccttggttggtggagattgcggaacgccgcccaccgaaaacgttttcctcatgtcggtggtcctctgcgccggcaccttcctcatctccaccgtgctgaaggagttcaaaaacgccctattcttcccatcgattgtccgccagtatatcagcgatttctccgttctcatcgcgattttcgccatgagtttcttcgactattcgctgggagttcccacccagaaactggaggtacccaacgagctgaagcccacgctaagcaccagaggctggctcatcccgccgttcgtcgagaagaatccctggtggtcggcgatcattgccgtattccctgcccttctcggaaccatcctgatcttcatggaccagcagatcacggccgttattgtgaaccgaaaggagaacaaactgaagaagggatgtggctaccatctggatctgttcattctctccattctgattgccatctgcagcatgatgggtctgccttggttcgtggccgccaccgtgctgagcatcaaccacgtgaactcgctgaaactggagtcggagtgctcggcccctggtgagaagccacagttcctgggagtgcgcgagcagcgggtgacccacatcttgatcttcctgaccatcggcgtctccgtgctgttgaccccgctgctcggtaacattcctatgccggttcttttcggtgtctttctgtatatgggcgtggcctcactcaagggcttacagttcttcgatcgcatactgattatgttcatgccggcgaagtaccagccagactatatgttcctgcgccaggttcccattaaacgcgtccacctgttcaccatgatccagctggcctgcctcataattctctggctgatcaagtccttctcacagacatccattctgtttcccctgatgttggtggtgatgattggcatcagaaaggccctggatctggtgttcactcggcgcgagctgaagatcctggacgacataatgccggagatgacgaagcgtgcggcggcggatgatctgcataaactggacgctgaggtgggcttattggcgcgcattttcccctggggaaaaggcagccggagcagggtggtgaccaagccgccgggccttgatgatggaatcgttgggtctggtggtgccgttggcgctggactcatcacttgcaccacctcaaatgcaaatgagaaggagttcgaggcacagagtagtctgctcaaaaagtag

SEQ ID NO: 9147 - protein, 1017 aa, DROSOPHILA
MNSSSGDDEAPKDPRTGGEDFTQQFTENDFEVTPPAQRVQFILGEDVDDGTHVSHPLFSEMGMLVKEGDEIEWKETARWIKFEEDVEEGGNRWSKPHVATLSLHSLFELRRLLVNGSVMLDMEAQNLEVMADLVCDHMVSAGTLPPGVKDKVKDALLRRHRHQHEYAKKTRLPIIRSLADMRNHSSSKKKKSNSKHSRPAQNLSSITEDMVKSPSNQSMARPGSGTELSEQQHKGNTHFMRKIPPGAEASNILVGEVDFLERTLSCFIRLSQAVVLGDLTEVPVPTRFVFILLGPPGSQSNFHEIGRAMATLMSDEIFHEVAYRARKRDHLLSGVDEFLDAVTVLPPGEWDPTIRIEPPAAIPSQEVRKRPPELPKEEVDEEEEEARLREENGLSRTGRLFGGLINDIKRKAPWYISDYKDALSMQCVASWIFLYFACLSPIITFGGLLAEATGKHMAAMESLVSGFVCGMGYGFFSGQPLTILGSTGPVLVFESIIYEFCLKMGWDYMTFRFWIGMWVAGICIVLTAIDASALVCYITRFTEENFATLIAFIFIYKAIENVMVIGKNFPVNQGIYDCVCTPPIGSNASVIDYAKYNWDSCESYNGTLVGGDCGTPPTENVFLMSVVLCAGTFLISTVLKEFKNALFFPSIVRQYISDFSVLIAIFAMSFFDYSLGVPTQKLEVPNELKPTLSTRGWLIPPFVEKNPWWSAIIAVFPALLGTILIFMDQQITAVIVNRKENKLKKGCGYHLDLFILSILIAICSMMGLPWFVAATVLSINHVNSLKLESECSAPGEKPQFLGVREQRVTHILIFLTIGVSVLLTPLLGNIPMPVLFGVFLYMGVASLKGLQFFDRILIMFMPAKYQPDYMFLRQVPIKRVHLFTMIQLACLIILWLIKSFSQTSILFPLMLVVMIGIRKALDLVFTRRELKILDDIMPEMTKRAAADDLHKLDAEVGLLARIFPWGKGSRSRVVTKPPGLDDGIVGSGGAVGAGLITCTTSNANEKEFEAQSSLLKK

SEQ ID NO: 9148 - DNA, 12876 bp, DROSOPHILA; identical to SEQ ID NO: 9145

SEQ ID NO: 9149 - DNA, 3271 bp, DROSOPHILA
accttggaccatgaactcctccagcggcgatgacgaggcgccgaaggatccgcgcactggcggcgaggattttacgcaacaatttacagagaatgatttcgagggacatcgggcccacaccgtttatgtgggcgtccatgtgccaggaggacgacgccactcgcagcgccgccgcaagcatcaccacagtggccccggaggtggtggcggtggcggaggtggaggcggctccatcggcggatccggaagtgtgggcggtggtgcgggcaaggacaacgtcagcgagaagcaacaggaagtggagcgaccagtgactccgccggcacagcgagttcaattcatacttggcgaggatgtggacgatggcacacacgtatcgcatcccctgttttcggaaatggggatgctggtcaaggagggcgacgagatcgagtggaaggagacagcgcgatggatcaaattcgaggaggatgtggaggagggtggcaatcgatggtcgaagccgcacgtggccacgctctccctgcactccctgttcgagctgcgtcgcctgctggtcaatggcagcgtgatgctggacatggaggcccaaaatctggaggtgatggccgatctcgtgtgcgatcacatggtcagtgcgggaacattgccgcccggtgtaaaggataaggtcaaggacgcgctcctgcgacgacatcggcatcagcacgagtatgccaaaaagacgcgactgccaattattcgatccctggccgatatgcgcaatcactcgtcatcaaaaaagaaaaaatctaattctaaacactcgcgacccgcacaaaacctgtcatcgatcacagaggacatggtcaagagtcccagtaaccagtcgatggccaggccaggaagcggaacggaactcagcgagcagcagcacaagggcaacacccacttcatgaggaagataccgccgggcgcggaggccagcaacattctcgtgggcgaggttgatttcctggagcgcaccctgtcctgtttcatccgtctgagccaggcggtcgtcctgggcgatctcaccgaggtgccagtgcccacaagattcgtcttcatactgcttggtccgcctggcagtcagagcaacttccacgagattggccgcgcgatggccaccctgatgtccgacgagatctttcacgaggtggcgtaccgtgcccgcaagcgggatcatctgctctccggagtggatgagttcctcgatgcggtgaccgtactgccgccaggagaatgggatccaaccatacgaattgagccaccagcggcgattccctcgcaggaagtcaggaagcggccgccagagttgcccaaggaggaggtggacgaggaggaggaggaagcgcgtcttcgcgaggagaacggactgtccaggacgggaaggcttttcggaggcctcatcaacgacatcaagaggaaggcgccgtggtacataagcgattacaaggacgccctatccatgcagtgcgtggcatcgtggatctttctgtacttcgcctgcctgtcgccgatcatcacgttcggaggactcctggcggaggccactggcaagcacatggctgcgatggagtccttggtctctggtttcgtttgtggcatgggctatggcttcttttcgggtcagccgctgacaattctcgggtccaccggtccagtcctggtctttgagtcaattatctacgagttctgtctgaagatgggctgggactatatgactttccggttctggatcggcatgtgggtcgccggcatttgcatcgtcctgaccgcgattgatgccagtgccctcgtctgctacatcacccgcttcaccgaggagaacttcgccaccctgatcgctttcatcttcatctacaaggctattgagaacgtgatggtcattggaaagaacttcccggtcaatcagggcatatacgactgtgtctgtacaccgccaattgggagcaatgccagtgtgatcgattatgccaagtacaattgggattcttgtgagtcctacaatggcaccttggttggtggagattgcggaacgccgcccaccgaaaacgttttcctcatgtcggtggtcctctgcgccggcaccttcctcatctccaccgtgctgaaggagttcaaaaacgccctattcttcccatcgattgtccgccagtatatcagcgatttctccgttctcatcgcgattttcgccatgagtttcttcgactattcgctgggagttcccacccagaaactggaggtacccaacgagctgaagcccacgctaagcaccagaggctggctcatcccgccgttcgtcgagaagaatccctggtggtcggcgatcattgccgtattccctgcccttctcggaaccatcctgatcttcatggaccagcagatcacggccgttattgtgaaccgaaaggagaacaaactgaagaagggatgtggctaccatctggatctgttcattctctccattctgattgccatctgcagcatgatgggtctgccttggttcgtggccgccaccgtgctgagcatcaaccacgtgaactcgctgaaactggagtcggagtgctcggcccctggtgagaagccacagttcctgggagtgcgcgagcagcgggtgacccacatcttgatcttcctgaccatcggcgtctccgtgctgttgaccccgctgctcggtaacattcctatgccggttcttttcggtgtctttctgtatatgggcgtggcctcactcaagggcttacagttcttcgatcgcatactgattatgttcatgccggcgaagtaccagccagactatatgttcctgcgccaggttcccattaaacgcgtccacctgttcaccatgatccagctggcctgcctcataattctctggctgatcaagtccttctcacagacatccattctgtttcccctgatgttggtggtgatgattggcatcagaaaggccctggatctggtgttcactcggcgcgagctgaagatcctggacgacataatgccggagatgacgaagcgtgcggcggcggatgatctgcataaactggacgctgaggtgggcttattggcgcgcattttcccctggggaaaaggcagccggagcagggtggtgaccaagccgccgggccttgatgatggaatcgttgggtctggtggtgccgttggcgctggactcatcacttgcaccacctcaaatgcaaatgagaaggagttcgaggcacagagtagtctgctcaaaaagtag

SEQ ID NO: 9150 - protein, 1086 aa, DROSOPHILA
MNSSSGDDEAPKDPRTGGEDFTQQFTENDFEGHRAHTVYVGVHVPGGRRHSQRRRKHHHSGPGGGGGGGGGGGSIGGSGSVGGGAGKDNVSEKQQEVERPVTPPAQRVQFILGEDVDDGTHVSHPLFSEMGMLVKEGDEIEWKETARWIKFEEDVEEGGNRWSKPHVATLSLHSLFELRRLLVNGSVMLDMEAQNLEVMADLVCDHMVSAGTLPPGVKDKVKDALLRRHRHQHEYAKKTRLPIIRSLADMRNHSSSKKKKSNSKHSRPAQNLSSITEDMVKSPSNQSMARPGSGTELSEQQHKGNTHFMRKIPPGAEASNILVGEVDFLERTLSCFIRLSQAVVLGDLTEVPVPTRFVFILLGPPGSQSNFHEIGRAMATLMSDEIFHEVAYRARKRDHLLSGVDEFLDAVTVLPPGEWDPTIRIEPPAAIPSQEVRKRPPELPKEEVDEEEEEARLREENGLSRTGRLFGGLINDIKRKAPWYISDYKDALSMQCVASWIFLYFACLSPIITFGGLLAEATGKHMAAMESLVSGFVCGMGYGFFSGQPLTILGSTGPVLVFESIIYEFCLKMGWDYMTFRFWIGMWVAGICIVLTAIDASALVCYITRFTEENFATLIAFIFIYKAIENVMVIGKNFPVNQGIYDCVCTPPIGSNASVIDYAKYNWDSCESYNGTLVGGDCGTPPTENVFLMSVVLCAGTFLISTVLKEFKNALFFPSIVRQYISDFSVLIAIFAMSFFDYSLGVPTQKLEVPNELKPTLSTRGWLIPPFVEKNPWWSAIIAVFPALLGTILIFMDQQITAVIVNRKENKLKKGCGYHLDLFILSILIAICSMMGLPWFVAATVLSINHVNSLKLESECSAPGEKPQFLGVREQRVTHILIFLTIGVSVLLTPLLGNIPMPVLFGVFLYMGVASLKGLQFFDRILIMFMPAKYQPDYMFLRQVPIKRVHLFTMIQLACLIILWLIKSFSQTSILFPLMLVVMIGIRKALDLVFTRRELKILDDIMPEMTKRAAADDLHKLDAEVGLLARIFPWGKGSRSRVVTKPPGLDDGIVGSGGAVGAGLITCTTSNANEKEFEAQSSLLKK

SEQ ID NO: 9151 - DNA, 3498 bp, DROSOPHILA
gtttcagcgagcacattttatatatgcaatttctcggaaaacgaattcaaatacacttaacatattacaaaaatgttcaaaataaatactcttgcggttcctctcattcgttttatcaacccaagggaatgttgtgcgccatatttgtcttgcttttgccaatatttgttctcgtaattttctatggcatccatcgccagctgccaagttttctacgtttttgtgccctttggccaatggactgctgctcactcaaatgatgcgtaaaaatcacattagcggcagccgtgcgacaatttggccagaaccaaggtctcaatgccccaaagtgtgctatatgttttgcaggagcgtgttaccttggccatttaagccttgacttgccggctaagccaagtttttgaatttataatgccagcatgcaggctgaaacattaatgggggactcacgagaagtttttcattgtttttacaaagcttttttactcagcttggtgttgttcgcaacttttatattaggcttgtttatttaacacttcaaacttaacttagatacagcttgatcagtacaaaaatggcttgctacattttcgttaaattttattatatgtggtagttacaaaatacatttaatacaagttttagggaatgcaatttttaattttccgagctgtctggcagacaagatttttcggttcctatttttttgattttccagactgaactacactcggttttgtgttcttccttctatttcctgcatggatgttttcataaattttactccctttttttttgctatttttactgcctgcgactggcatgaaaagcattttacacatggcagcattttttaattttgccagccggcttttagaaatgggacagcacaaatacacacacgtgagtgtgtatagtacacatgcacttactaattagaaataaaaacgcgaactgcacttgcattttgctcattacgttctctcagccatttcgctctttatttcttgttctcttgtatgtgtgccgcccttttcgagcttgcattttgcgctaaaacatagggtggctggtcgtttgtttggaaataatagacaccctgtctttgggccaagaactccgccgacacgttggccaaatccccgcccatggtctgcataactccggtgtcctttgggcagcgatggaatcgggtcaactgctgccattcagcagctggacagccctgggataagaagcccgttgcctgatcccttgccagactctcggcaaacagcataaatgccctccaatggctgcattcatgccaaaagcaacctggttgctggctgccccagttggcatagaaatccacatgacccacgggtcgatcaaatccatagctgcccacactggtgtgcagcacctccacatagtcggcatcctcggcggtcagccgctcctttggtttggcataccgaaagaagggtagagccggatccaaagctcggatcatccgaaggcgaccggtctgcaaatgtttgcctgccagtcccgccacatgtgcgcccatgctgaatccgacgagctgaagatcctcgaaacgcattcccgcctcctgatgcaggaagtccacgaacttggccaaaacctgacccaccggcttgaccctatagctggccgttatgtagtccgctatggctccacgtccccagtccacagtgaagatgttgtagttgccatttctcagatcaaagtaagctggcaatagctcgttgtacatgttagcattttcattacccaaccagccgtgaatgaggattctgaaaagtatgatatattattttgaactttgaatgaaatatcttaatcatataattcttgagtgcaaccccaatacgtttgtatacaataaaacaagtttccattggccgtagggcctttaaaaccgaaattggctatcgaaatggctctcaaaactcacagataatggtcgggtagctttcatccggctgcactcacctggtgggattgaagggactgaagcgagaccggcgcaacgaggcggcatcgtagagattcaccggttcgctggtgaactgctggttctgttcctggtcccccttgttcatcacgtttaggccaaaggcggcggtcagcgtgttgcccacaacctgctggaatagccggcgatgtggcgattccttctcggatttcaatggtcctgtctggcggttggcattgtcctgcgggaccagggtatgcaggtggaagtaggtgtggtgctcggcactgtacagcaatttgtagtccggctgcaggcggagtaattgctgttcaaccgaactgggcccgtgggccaagtaatgcctctccaattgctcctgccgcccatgctgctcatccaatattggcagctggccgggactcattaggccagacgacagcagtggcatttgtgtgtcaaagtagtttgcctgcaaccgcttaccgccccgatttctcatccgcatcatcattgttcccattctgagggcactttccacttcatttgtcacttttacttgcactgcgggtctcgggctcggattcgtcttcgccggagtcatcgccatcgccatagtcatcaccttctcctcctgctgcaattgattgttgtctgcagcgacattatagtcctcaaaaccaggcctgtaatcagacgctttcagctttgctgcagcgagccacaaacaaactggtgtcaacgaaatgaaaatgcattagtctcgaaactgtgcaactagaccaatccgcaaatgagtaaggcacacaaagaaaaaccagaaatcattgatttttaaaaaggtgttttttttatgatttttcacattttcatagcactgtttaattaagtcttaaaaaagattttattatgcataaactttctcaaaagtgacacaacacttagtttttgatcaattgacaacaacattttctgatattttctgtccgtgtacattactgttgctcccgcagttcatgatgctgatgatagtcacctgcctgcaaaacgactgccaaatgtccaacatttcccatattttcaaaatctgatctttcctcgacgaactggaattccgaactgaattgtactgaacgaaagccaggcatttaccacaatattttgaccattttcatttttcggcttattaatatgcagaacttcacactttttctcactctcatcttcgatgatttctcttaacgagaagtaattgttaatgcctgagttgacgggaattactggaagagtgccctcccattagctgttaatctgttgggtcaacaaaagttctggtagtaagtggtcatgggaaggggaagcgcaagagaggaatctgtgccactgaccaagtttttgtaccatttagcactcgatgacgggagttcaatcttttttgggataggtcaatatactggcctaaaatatttctgaatgtatagttaaataacacaaatactcgttcattacggacg

SEQ ID NO: 9152 - DNA, 1299 bp, DROSOPHILA
atgatgatgcggatgagaaatcggggcggtaagcggttgcaggcaaactactttgacacacaaatgccactgctgtcgtctggcctaatgagtcccggccagctgccaatattggatgagcagcatgggcggcaggagcaattggagaggcattacttggcccacgggcccagttcggttgaacagcaattactccgcctgcagccggactacaaattgctgtacagtgccgagcaccacacctacttccacctgcataccctggtcccgcaggacaatgccaaccgccagacaggaccattgaaatccgagaaggaatcgccacatcgccggctattccagcaggttgtgggcaacacgctgaccgccgcctttggcctaaacgtgatgaacaagggggaccaggaacagaaccagcagttcaccagcgaaccggtgaatctctacgatgccgcctcgttgcgccggtctcgcttcagtcccttcaatcccaccagaatcctcattcacggctggttgggtaatgaaaatgctaacatgtacaacgagctattgccagcttactttgatctgagaaatggcaactacaacatcttcactgtggactggggacgtggagccatagcggactacataacggccagctatagggtcaagccggtgggtcaggttttggccaagttcgtggacttcctgcatcaggaggcgggaatgcgtttcgaggatcttcagctcgtcggattcagcatgggcgcacatgtggcgggactggcaggcaaacatttgcagaccggtcgccttcggatgatccgagctttggatccggctctacccttctttcggtatgccaaaccaaaggagcggctgaccgccgaggatgccgactatgtggaggtgctgcacaccagtgtgggcagctatggatttgatcgacccgtgggtcatgtggatttctatgccaactggggcagccagcaaccaggttgcttttggcatgaatgcagccattggagggcatttatgctgtttgccgagagtctggcaagggatcaggcaacgggcttcttatcccagggctgtccagctgctgaatggcagcagttgacccgattccatcgctgcccaaaggacaccggagttatgcagaccatgggcggggatttggccaacgtgtcggcggagttcttggcccaaagacagggtgtctattatttccaaacaaacgaccagccaccctatgttttagcgcaaaatgcaagctcgaaaagggcggcacacatacaagagaacaagaaataa

SEQ ID NO: 9153 - protein, 432 aa, DROSOPHILA
MMMRMRNRGGKRLQANYFDTQMPLLSSGLMSPGQLPILDEQHGRQEQLERHYLAHGPSSVEQQLLRLQPDYKLLYSAEHHTYFHLHTLVPQDNANRQTGPLKSEKESPHRRLFQQVVGNTLTAAFGLNVMNKGDQEQNQQFTSEPVNLYDAASLRRSRFSPFNPTRILIHGWLGNENANMYNELLPAYFDLRNGNYNIFTVDWGRGAIADYITASYRVKPVGQVLAKFVDFLHQEAGMRFEDLQLVGFSMGAHVAGLAGKHLQTGRLRMIRALDPALPFFRYAKPKERLTAEDADYVEVLHTSVGSYGFDRPVGHVDFYANWGSQQPGCFWHECSHWRAFMLFAESLARDQATGFLSQGCPAAEWQQLTRFHRCPKDTGVMQTMGGDLANVSAEFLAQRQGVYYFQTNDQPPYVLAQNASSKRAAHIQENKK

SEQ ID NO: 9154 - DNA, 3115 bp, DROSOPHILA
gctataatagctacggcagaagtagcagtagtagtattggtagtagtagtgccagctgccaccgcactcacgacgtccgaaaaccaggacgaagacgagcaggacgaagacgacaaagacgacgaggatgtggatatggacgtggacgaggacgagtaccgaccgcacggcagcaacgataggctcatcttttaaccggccgcgtggccatctgaactgctggaaaacgcgaacgcaactgaaaaggtaaacgcactcgcagcccaaggaggcccatcaaatcacagcaatctgttcgtgccacagacaacacattgctcctcgtgccagctcgaatcgttcactcggtagctgaatcccaacgagcgctgaattcgctccatcgagagaatcgagtgtcgagaatcgagtgagttattctccggccaacggggggtatacgcaatactcaagcccacatggcgtatacgaatcgctaagggaagtttgagcgcttttgagtgcctttgagaggttgccaactttttccgccagatggccaagtggcgccacttttgggctgactcaagtcttaagtggtgaaaagctttcagctattgctgaatggagttgcacagcaagaaaaaaaagtgctacacgttcttttacaaataaaaacattgttcaagataaaattagataattcatagaatgattcaatgttctccctcgtattaaacgaattaataatttcaatgatatataaatcacttacttaagttataactttctggtattattgtattattacgcataaatttacatcagcgacctaaagtatagataattaggtcatgtttcagtccgcaaaataatgttttccaggaataaaccattgtgcttctgaccactaattaaaaatccacttaaaatggatttctaaactcaacccctacggtaataaaatggcacttcaattgaatattgggcaacttttaggtgctcgatagcgtttcgaaaatcattcccctacaatagattgcagatcaaaggcataatcaaattggccgccgccagaacttacctcgaattttccgccaataattgagcccgcctggccaatatacagagtggacgccgaatcgaagaccaattcaatgggctccctggtgaccagagtggtattgcgcagctcgcaatcgtagtagaaggacactttgtcgctgagcacctggagggcaatcgagttccacttgtccggcacatgagccacgccgaagctggccaacttgcggccgatgttctggtccgcctgcgtgtagaccagcgatacgttgtagctgttcttcacgacgggcgataggtgaacgcccagctggacgaccgtgtccagcggattcaccacgctgaacaggtagccgcccttcagcgagctctgccggaaagtgatgagaatggcgaactcgtagagcttctccggtaggagcattcgatacggcgacttcacgtccgccgtctgcaggaaacggaaggcggggaagccgtcctccgcctcaccgaactcgatgcccgcgaattggttgttgttcatgatgtcggtcagtgtgtattcggccagggcatctgaaaaggtagccaagtatgtgttattgcctttattacgaaatttttggttttattttggttttagcgttaggtataaaacaactaacttcagaaactatttaattggcatgttcgcaaacttctaatggcttggaattttctacaactttttttttttttaataatgtactttaaaggcaatcgccagtatttttacaaatatttcttaattgctttacatatttcttaagacggaaatattacagtttgaggttcactggagtgcaatgtgtgtgcccaaaagtatgctacagttttgaaccattccgcaatcgcaatgcaatatgaaatttgcagcacctaagctcttttcttcatttctatttaatacttatatattactaatagattttcttaagtgctaaaatttaaagttaaaaaataaaacaataaagagtcgtactaacctttaatggactgtccaaccagctcaaaagatcctagcactggaaccaggagcgtgcaaatcattgccaatgcaaacattacgccttgtagcacacgcatcttgaacagagtggggagtctgtaaaaaaaaagcaataaaaacataagctgccatccgtttgaatctgtaaaattatgagattaaagcggcacttccgtttcgctgggtaatcaatgcacaaatgtggccagtttgggattgcattcgcaattccgcatatatgcatacaattcccctccacttttgcggacacttgtgcgtggaaataaaccaaccgcagacactttatgcgccgcccgcaattatgggcaccagtattggcaacacgagtcgcacacttgactcaatgccgaaattatatgcacacgggcatccctccacacggtttttggccaacttggctggctggccatattttgtaattacctccccggcaaaaccgcaatgctcttgtcccattcccattctcatgcccatacccatgccctttccgattccgatttccatgccatcgcacacacccaaaaagatagttcatctggaagccacacaactttgcggtcggtcttcattcattcgccaaacgaaaatcgtaggcttcggtggaaaaaactatgattcattcattggggatcgaagttgtcagattgccgggaaagattaacaaaataatggtaattatgaagggcagatcgctgcacacaaatcaaatgagaatgtttgctaaacttcacgatcttttgatcatcgaaaaacaaggtggtcacactcatatcgttatataaaaatattttgagcaaattcgtttaaataaaatatattcaagctgttcaaatgggcagtaataaatatttttttcatactttatgcttaatgctcgtttgtgcccaattaaaatacattgtcaaacaataagcgttcaatagcccattaaaaatagtttcctgtgtgtctgtttacctacaaagtttggggacacacctagagctcaaatgagccaaagattaaaattactttgtttat

SEQ ID NO: 9155 - DNA, 666 bp, DROSOPHILA
atgatttgcacgctcctggttccagtgctaggatcttttgagctggttggacagtccattaaagatgccctggccgaatacacactgaccgacatcatgaacaacaaccaattcgcgggcatcgagttcggtgaggcggaggacggcttccccgccttccgtttcctgcagacggcggacgtgaagtcgccgtatcgaatgctcctaccggagaagctctacgagttcgccattctcatcactttccggcagagctcgctgaagggcggctacctgttcagcgtggtgaatccgctggacacggtcgtccagctgggcgttcacctatcgcccgtcgtgaagaacagctacaacgtatcgctggtctacacgcaggcggaccagaacatcggccgcaagttggccagcttcggcgtggctcatgtgccggacaagtggaactcgattgccctccaggtgctcagcgacaaagtgtccttctactacgattgcgagctgcgcaataccactctggtcaccagggagcccattgaattggtcttcgattcggcgtccactctgtatattggccaggcgggctcaattattggcggaaaattcgaggtaagttctggcggcggccaatttgattatgcctttgatctgcaatctattgtaggggaatga

SEQ ID NO: 9156 - protein, 221 aa, DROSOPHILA
MICTLLVPVLGSFELVGQSIKDALAEYTLTDIMNNNQFAGIEFGEAEDGFPAFRFLQTADVKSPYRMLLPEKLYEFAILITFRQSSLKGGYLFSVVNPLDTVVQLGVHLSPVVKNSYNVSLVYTQADQNIGRKLASFGVAHVPDKWNSIALQVLSDKVSFYYDCELRNTTLVTREPIELVFDSASTLYIGQAGSIIGGKFEVSSGGGQFDYAFDLQSIVGE

SEQ ID NO: 9157 - DNA, 6960 bp, DROSOPHILA
cctttaaataaatttccgctgtattcttttccagcgctttgcgtctatttgttttcgatttcgctgctggtcgaaagtttcgcatgtttacgcacaaactgggattgattaatgctggggcatacacaagttactaatcctacgcagggccatatttaatttatttggccgaaaagaggccaacatagctgggagccgaatgctttacgaataccacactttcttggccctcgctgaatatgatgggaatttatgggtcagcgggcaggcaaagatggaattttggaacattttgtggtaatttttattacttcaatagcccaggatatgatgctgacattgcagtgcgcccccacccccccccccccacccgcaccccatcggacaaaactaacttggccgtaaaagtttgggttctgcggttgtcgattccgaatcactgctggccagttggcaagtccgggtttttgggtgcggttgtggaacaccatcccgccctcgaggaaataaacaatgcaaaaatataattctgagcaatcaatgcggttcgtaaaagcaattgttcggtcggagtcagtcatttaaagtcccgaatggccattcagcagtagtttctaggaaattggtgatatagccgtttagaacttgtgcatcggcattcaaggcgagttcacagataatagggcactttccgactcgttttcccgtaattacagttcgtcttttgtttttatactaacttttattgcgaaacacttttacaaattcagtttgctaagtcaagcacacacattattgtttagatctatcacgtggttttaattattctccaatgtctcgccacctttcggtattacctgaaaaccggtcgggcgaatcaacttgcttgatagatatacgtacgtattaatagatgaataagtcgtaaattaacatttcgcctaatgatcacaatcgcttcgcaaatttgggccaaataaaaaggagctacaaacaacttgcttcgaatgggttttatgtaaaactaggtcgttggaaatcaagatatatgtgtaaagtgtacattcttatgtatttctagtagtttctgatttgtgccttacttaaagaagataccgtactacagccacgcgttaagtatagcaaactctcctcatcctgctacgtttatgttaaatggtaacagttaattcattgcatagtcggaacaatatgggacacacgagcaacaccgccaccgcccctactccaacacatcacttcggcttaggttcacgcttaagagttgtctcagcatctcccttcttggaccgtctgactggtcagagcagtttcttggccgttatcgtcgtggacagggtcgacgcagtggccgttgctttttttgacgtcggtggttgcgatggtgtttgtatcgtggggggcagaccaatgtctgtggagggcaggatcttttccatttgacgctcggccgcctctcggagcgctgattccgtcgttgatccggtggcaataccgctactgccactgctggggcctccacctgacagtccggctggaccggaccctgtagaagcctttgtcggggatttggggtctgactttgggtccttcgctaaatcgtccaggtcctttgcgttgtccttcaatgttttggccgtatccttgaatgcgggctaaataaactgatctgttagaacgctgaccactgtatgtcaaaaccaaagacttacctctgcttttagctccttcgctttatcgggcacagtttcctccttatcacgcatctcgttggcaatatcctgaatctccttggcggaatcgtgaatatcattaacaagcttggacaagtccttatccgctttgtccacctcagacttcagtttctcagcctctttcatgctcttagcaatggccttctcaatcttctgctctgcctgcagtacttgctccttgtcaagcagactgatgagttcctcaatggccttgtcgctcagcttgatgttatcacgaccaatggattccaacacctgtaaggaacaccaaaccaattgagtgtatgttcagcctaaggaacatgattttattaccttacgaatatcgttgacggtcaccacgccatccttgtcggcatcaaatttctccagtacagcttcgatgtgcttaagtcgtgcctcatcgctagtttccttcaacaccttgatgttattcattaaatcgtcgatgtgcacgatctcctcgtgtcgtcgccgggacgccaacttggaaagtagctcggtaaactcctccagctgcttcttgtcgatattcgtggcctcgcggtcgatgctctgcaccgccttggtgatctcgttcaccgaaatcacaccgtctttgtccgcgtcgagtttgaccagcagatccccgacaaccttgaatcgctcttcatcggatgcctccttcattcgccggatggtggcgaccagctcgtcaatgtgcaccatttgctgtggttccacagtgggactggacgccgcgtaatcagaggattccgcctgcttgatttgatgctgcctggcctctaggtcgttaagcacattatcgagttgggaaatcatcttgttgacccgattgtagagcaacttggccgcccggctttcgcgcacaggctccttgactacctgtcgcacctcgcgtagctcctccacatcctccttatagtcggccaattcctccttgagttccttgattgtttccttttccaccacgagctgtttatcagatgagagtgtctttagggcctcagacagcagctgtacatcggtagaggaaatgcccttgtccgtctcggacaccgaggactgttccttgtgatccagaagatcctgggaacccgacaacttctcagcaaatacataaggagcgggaatctcctccttgatggccgatcgttttgcgatggtctcttcccgctcttcctcgcgctcttcgcgaatcttgcgctcctcctccttgatgatttcgatcttcgtcttgttgtccaccttgccctcactctccccgatagcgtgccgtgtgtgggcacccactgcatccggtagcacacgaatcgtctccttgagcttatcggtggtgatgctgtcgtcggaaataagcatggttcttgacaggagcagcagcgtaggcggtacctgttcgttcagggagagatctatccactccttaagctgaaaacgaagacgctcctccgttaggccatatgcccgcattccacgtgccttgcacgcctgttgcagctctagaaggtccagggagtcgactccttcgcgggcaataacgcggtcatcggtggccaaagatctcagcttcagacgcagctggaaccgcagcagcgtggtggtgccaattgtgttcagttcaaggacgcgacaaagagccgccaattgctcccgggacagtgaatctaaggtgatctcatcgtcgaatcgcttggcgaatttgatgatttcatcgttgctcactggttcagtgggattccggattttagtgaaaaaggcctcgaactgcttggcctcttcgctgctgtgttccttgtgctggacgggcatctgatctagggtctgctgcaagaacttggccacctccaggcgaacgctaagtgactgccggagcttctcctgtcgatcggtcgaagtctggaacgtggagggcagcatgccggggaagaattttatgaacaacggcagcagcagctccatgaagggcacgatgatgaacaccgaaaaggggatcagacggaacaagtcagaggtggtccgctgaagctgcttgttctcgcgccgcgtgagcgtcttgccgttgagcactcgccaaaggagcttagagcaaattgccacatcgatgaagagcagcctaaagccgtggtaatagtgcaccagctcatcccaaatccgtgtgcggagtggtttctttggcttggccaccgacttgtctgcggtcttggccaaagacgtcgttgaggcagtcgccgacgtggagcccgcggtcgcactagcgttttgacccttctccgaggaggccgtggcggtagcggcactgctggcacgaactgccgcggcctgtccattggccacctccttcatgatctcctccaccttctccttctgctggtttttcagcttcttgactgttgcgtcgatctttgagctggacgtctccagcaaagtccggctcgtatgcagatgcctaaatccatagccggagtagtcgtatccatagttggcatgtggctgaaaccttcggtaagtgccaagcgatctgcttagctccagcaccgaggtcgaagcagatcttcgcggtagttcatcttctttggcgggttcatctgtgacgttcaccgaactgcatgcgcaacagttcgatttaagaactgcaaaaaaaatattgaaaaatatgttaagtaagaaaaataatacgaagttagtaagataagtatagctatatttaaaaactggaaagttcaagtgatttctgtatatccgattaaattacaacaaagaaataaaacaatgtaatattctcacaaaggaatctttcaggtcaataacctgattccatacgatttcccgaacagcctttcatgttttaataaaaataagagcagatgaagggccaaaggaaaataaggaaacaaagaacgaaagaaataacacctaatgagttattaatcatagctacaaaaaatgggaaaagtttgtggttgataagcgcactgccgcttgactatagattttgttgggattttcagtgagctcgatagttgataatagaaaggcaaagattgccgacgacagaccagataaattagcacctggagtggagcttacataaatcccagagcgagaaaacgaaaattcgcacaaccggtgagaattctcaacctctataaatacatgcttagcaaacattcagacggccgcgtcgactgcatttgtttacagcgcacttttccttttgtcttctcttttttgattttccgattcttggcaaacgctcaaggtaaatgattttgcaattgagtcgaaggaggggaaacaagaagaggaactgctgtggagaaggtgcgggtaattccgacctatttcaagtctctatgattgtttcaattgtgggtaaacaatactatctgctctggactatgactgtactttcccgcaggtgcctctttgtctggtcttgctggtacctggctggtctttgggcctcttccctggcaggtgatttcctacgaaatctgaatctgtcgcattataagtcaccagtagatacaaaaattgtccaaggtctataagaataatcccatcttttataacctaaaagaaccattcggcgtgtggtgcaagatgttgaagataaagaaattatattatcgaaattaagccatatgtataggctgaaagataagattgccagttgtcgcgatccaaagtcaacaaatcgttgaaaacaatacgaataattaaattagcagctaagttttcgaagcactgatacgtcagtagagctccgaaaccggtaagaactctaggaatgaatgataaatttggtgtttactcgaaaacaaataaattcgaagccccccactacataacttccagcgcacgtcgcagtttccagccagtcagctgttctttccagcgaaagtgcagtcataacaaaatgcccgctaacacacacgcgaatggaaagttttcacgcgatttcgccttcgcttcccagttttggccaacttacagcgcttgtagacattctgggccaagtgactcgtccgcagattgcgtcccttgtgacgcagcagggcgttcatggcggtggcgggtggtggtgcaggggggcgtggctaggctcggcctccaaaccgaatccaaagtattttcaaatggaattttgaatttccgacaaactgtctgtggattgtgtatctttgggttctctgtcgctcgacttctgattgcttttgccttatttcgcctttgtttttctctgatttcgcttgtaaccgtcctcgctgtgcttctctgttccactttcgttggcgcaagtaacgggttccttcccacgattctcgcctaatggaaagtaaatagaaggtgggaattctggtttagcctactgccgatttggttaaaagtcaatacattgattagatcccaaattggttttcggctgcaaaaacacacacaggcatacacacacacacacacgcacgcacgcactgagctacgtcatcgacgcaatatcgcgcgatcttgatttgtttttgtttttgcctcgcacactccttcacaccaaattacacaacacagcaacaaatttcgaagtatcgcatttcgtgcgagtgacaaccggttaaatcacgcctataatttagccgccgattacatcgagccctcagtgcagcttatatgtaatccatttgtcattcctaccgtgctagtaaataataaaatctaaactaaaccgtctgttttttcacttttctcacgtttgacatcagagagaccgttctgcgagtgctaaaaaataccaaatgttaattgccatagttagggggactcctgcgcttacagacacatgtaatgtaactaacgatgtaaaatagttgtgtaaaatgtagagccatgtatttgaagaaatgcatgaaatgaagaattaaatcgaagcatcttcaatagcaacatatattgcaactttaaccttttttttatctagcttagcattttatagcttgttcttaacaaaaatagaccactttcgattaacacacagctccaattaaatcctatgacatacgattaaccattgttccaaaaacaatgcgtacttttccggcagttatacgacttaacttcttaattacccaaaaaccctgagaactcgtgcagtctacttgattccgcactccagagcagacaactcgaa

SEQ ID NO: 9158 - DNA, 3479 bp, DROSOPHILA
atacacaatccacagacagtttgtcggaaattcaaaattccatttgaaaatactttggattcggtttggaggccgagcctagccacgcccccctgcaccaccacccgccaccgccatgaacgccctgctgcgtcacaagggacgcaatctgcggacgagtcacttggcccagaatgtctacaagcgctttcttaaatcgaactgttgcgcatgcagttcggtgaacgtcacagatgaacccgccaaagaagatgaactaccgcgaagatctgcttcgacctcggtgctggagctaagcagatcgcttggcacttaccgaaggtttcagccacatgccaactatggatacgactactccggctatggatttaggcatctgcatacgagccggactttgctggagacgtccagctcaaagatcgacgcaacagtcaagaagctgaaaaaccagcagaaggagaaggtggaggagatcatgaaggaggtggccaatggacaggccgcggcagttcgtgccagcagtgccgctaccgccacggcctcctcggagaagggtcaaaacgctagtgcgaccgcgggctccacgtcggcgactgcctcaacgacgtctttggccaagaccgcagacaagtcggtggccaagccaaagaaaccactccgcacacggatttgggatgagctggtgcactattaccacggctttaggctgctcttcatcgatgtggcaatttgctctaagctcctttggcgagtgctcaacggcaagacgctcacgcggcgcgagaacaagcagcttcagcggaccacctctgacttgttccgtctgatccccttttcggtgttcatcatcgtgcccttcatggagctgctgctgccgttgttcataaaattcttccccggcatgctgccctccacgttccagacttcgaccgatcgacaggagaagctccggcagtcacttagcgttcgcctggaggtggccaagttcttgcagcagaccctagatcagatgcccgtccagcacaaggaacacagcagcgaagaggccaagcagttcgaggcctttttcactaaaatccggaatcccactgaaccagtgagcaacgatgaaatcatcaaattcgccaagcgattcgacgatgagatcaccttagattcactgtcccgggagcaattggcggctctttgtcgcgtccttgaactgaacacaattggcaccaccacgctgctgcggttccagctgcgtctgaagctgagatctttggccaccgatgaccgcgttattgcccgcgaaggagtcgactccctggaccttctagagctgcaacaggcgtgcaaggcacgtggaatgcgggcatatggcctaacggaggagcgtcttcgttttcagcttaaggagtggatagatctctccctgaacgaacaggtaccgcctacgctgctgctcctgtcaagaaccatgcttatttccgacgacagcatcaccaccgataagctcaaggagacgattcgtgtgctaccggatgcagtgggtgcccacacacggcacgctatcggggagagtgagggcaaggtggacaacaagacgaagatcgaaatcatcaaggaggaggagcgcaagattcgcgaagagcgcgaggaagagcgggaagagaccatcgcaaaacgatcggccatcaaggaggagattcccgctccttatgtatttgctgagaagttgtcgggttcccaggatcttctggatcacaaggaacagtcctcggtgtccgagacggacaagggcatttcctctaccgatgtacagctgctgtctgaggccctaaagacactctcatctgataaacagctcgtggtggaaaaggaaacaatcaaggaactcaaggaggaattggccgactataaggaggatgtggaggagctacgcgaggtgcgacaggtagtcaaggagcctgtgcgcgaaagccgggcggccaagttgctctacaatcgggtcaacaagatgatttcccaactcgataatgtgcttaacgacctagaggccaggcagcatcaaatcaagcaggcggaatcctctgattacgcggcgtccagtcccactgtggaaccacagcaaatggtgcacattgacgagctggtcgccaccatccggcgaatgaaggaggcatccgatgaagagcgattcaaggttgtcggggatctgctggtcaaactcgacgcggacaaagacggtgtgatttcggtgaacgagatcaccaaggcggtgcagagcatcgaccgcgaggccacgaatatcgacaagaagcagctggaggagtttaccgagctactttccaagttggcgtcccggcgacgacacgaggagatcgtgcacatcgacgatttaatgaataacatcaaggtgttgaaggaaactagcgatgaggcacgacttaagcacatcgaagctgtactggagaaatttgatgccgacaaggatggcgtggtgaccgtcaacgatattcgtaaggtgttggaatccattggtcgtgataacatcaagctgagcgacaaggccattgaggaactcatcagtctgcttgacaaggagcaagtactgcaggcagagcagaagattgagaaggccattgctaagagcatgaaagaggctgagaaactgaagtctgaggtggacaaagcggataaggacttgtccaagcttgttaatgatattcacgattccgccaaggagattcaggatattgccaacgagatgcgtgataaggaggaaactgtgcccgataaagcgaaggagctaaaagcagagcccgcattcaaggatacggccaaaacattgaaggacaacgcaaaggacctggacgatttagcgaaggacccaaagtcagaccccaaatccccgacaaaggcttctacagggtccggtccagccggactgtcaggtggaggccccagcagtggcagtagcggtattgccaccggatcaacgacggaatcagcgctccgagaggcggccgagcgtcaaatggaaaagatcctgccctccacagacattggtctgccccccacgatacaaacaccatcgcaaccaccgacgtcaaaaaaagcaacggccactgcgtcgaccctgtccacgacgataacggccaagaaactgctctgaccagtcagacggtccaagaagggagatgctgagacaactcttaagcgtgaacctaagccgaagtgatgtgttggagtaggggcggtggcggtgttgctcgtgtgtcccatattgttccgactatgcaatgaattaactgttaccatttaacataaacgtagcaggatgaggagagtttgctatacttaacgcgtggctgtagtacggtatcttctttaagtaaggcacaaatcagaaactactagaaatacataagaatgtacactttacacatatatcttgatttccaacgacctagttttacataaaacccattcgaagc

SEQ ID NO: 9159 - protein, 1013 aa, DROSOPHILA
MNALLRHKGRNLRTSHLAQNVYKRFLKSNCCACSSVNVTDEPAKEDELPRRSASTSVLELSRSLGTYRRFQPHANYGYDYSGYGFRHLHTSRTLLETSSSKIDATVKKLKNQQKEKVEEIMKEVANGQAAAVRASSAATATASSEKGQNASATAGSTSATASTTSLAKTADKSVAKPKKPLRTRIWDELVHYYHGFRLLFIDVAICSKLLWRVLNGKTLTRRENKQLQRTTSDLFRLIPFSVFIIVPFMELLLPLFIKFFPGMLPSTFQTSTDRQEKLRQSLSVRLEVAKFLQQTLDQMPVQHKEHSSEEAKQFEAFFTKIRNPTEPVSNDEIIKFAKRFDDEITLDSLSREQLAALCRVLELNTIGTTTLLRFQLRLKLRSLATDDRVIAREGVDSLDLLELQQACKARGMRAYGLTEERLRFQLKEWIDLSLNEQVPPTLLLLSRTMLISDDSITTDKLKETIRVLPDAVGAHTRHAIGESEGKVDNKTKIEIIKEEERKIREEREEEREETIAKRSAIKEEIPAPYVFAEKLSGSQDLLDHKEQSSVSETDKGISSTDVQLLSEALKTLSSDKQLVVEKETIKELKEELADYKEDVEELREVRQVVKEPVRESRAAKLLYNRVNKMISQLDNVLNDLEARQHQIKQAESSDYAASSPTVEPQQMVHIDELVATIRRMKEASDEERFKVVGDLLVKLDADKDGVISVNEITKAVQSIDREATNIDKKQLEEFTELLSKLASRRRHEEIVHIDDLMNNIKVLKETSDEARLKHIEAVLEKFDADKDGVVTVNDIRKVLESIGRDNIKLSDKAIEELISLLDKEQVLQAEQKIEKAIAKSMKEAEKLKSEVDKADKDLSKLVNDIHDSAKEIQDIANEMRDKEETVPDKAKELKAEPAFKDTAKTLKDNAKDLDDLAKDPKSDPKSPTKASTGSGPAGLSGGGPSSGSSGIATGSTTESALREAAERQMEKILPSTDIGLPPTIQTPSQPPTSKKATATASTLSTTITAKKLL

SEQ ID NO: 9160 - DNA, 5355 bp, DROSOPHILA
ttgctttcttgctgcttatcatcacttttgtgtctcccctcctctttcattttcacaatgatctccaaaatcccgatcactactaatcccaaacgtattgccttacagtccgtggccaaatcggagggctgggatgctttcaagtactgtgtgcgcaacgagatgaaaacaatgatgaagtcggcaaactaaatttgacaatgaaacaaaagtccgcaaacaacgaggaaaccattgaagccaaagtgaaacaaagttctagttacaaagttttcttctaaagaaccaaaatctcgtgtatagctatagcctttatatttgttatttatgaatttgttatcgaactaagcacccatctcttgtagccaaaatattgagaacatttttaaaatcggctcttgattgccattgtttttataaatgtatagtgcaaataaaattgttttgtaaaatttgttttaaatttttatttagttttcatttcgtttaagattatgatttcttagaaaatgcagctcgttaccaagcatcaagttattcatcaactgaaacattccattattgaactgtagaactaagtgcttttataatagatataaaaactaaaaacttcgcttgtcaaggatctccacgaatgggaggagtgttgggataggtaggtgtgtcttaactaatgcataaatatacaataagtctaggtactatatataaaactcgaactatttgtctagatcaacttgcacttgggcattgaacaaaatcaaaaattatcacagttaaattccgtgcattcgacagaagacacactacattattcttacttggtatacaaaatagtttcatttgtttacttaccgttgaatatttttgctaagaactgaattgggaatcattttggaatagttgcatatacacaaattgcacgattaaattaaaataattatcttaataaatgattacaactaaagcttgtctaatctgatctggttgggtctatgccctaatcctgcgttgaaggtggcagcgtccagattacgtacttttccttgtcctgcgcttccttgtgcccaccgttgtaattgcgattgtttcccggcttcgagtagcgccgaaacttaaagttagcaaacacatcccgcttgccatcgggctccagtgattgtccatctagctctagattacgctgcagaccaacgccaggaatcggcagctcatcgttgggcttacgaaagttgtagagcccttttctttgcttcagctgctgagcttggctgcttgccggcgaaggtgtctttttaggactaccaatcttgggcaggggcttgggatccagcatcagcatgggaaacagcgcatcgtccgcatcaaagtaccacggacgtgtaaaaagatagccggcactgtagtaaggcttgaatatcggctcatttgagcaaatactgaacgcgtggtaggcgtgtgaaatgagctgcgggaagcgatccacccagtagttggtgaattcgtgcggaatgcagcccagcatcttctgggcggctggcgttagctcgtgataatgatgctttttgttgcgcagagcacggagcaaatctcgtacactggcgcccatatatccgcggtacttcctcaaatcatccgtgatcatggggtccagatggacattccaatcgtctaaaacgactatccgcccgttcttctccagcgacttgagcggttcagcatggaattgcaacttctccacacgatcgctgacatcctggaggaacgagagcattttaggctcatcccaaaagagcggatgatttccgatacaacgagctggaggtcgcgattgcggatccttgtgtatcatatccgatattaattgctcagcaaggatctttaaaataaaatgaagtaattagaacaactagctataactttttggtgaagataacctacaattcggctgtcctcactgtcgtcctctgggcgcagcttggccagattgtattcgtgggagagtatgttggcctgtcgcttcagattgtcaccaaaggcgtggtgaccgccacttaaaacataataataaacgcagcccaaggaaaatatatccacagcagttgtctgtaaataattgaaagacatcgattttagaaagttcttgtgatggtgaagaagtagtgtagggtaataataaaaatcatgtcgtaccgttcgctgtgatctcatcatttctggggctatccatccatcggtgcctgttacacccgatcggcgtgagaaactagtcttgccaaaattcagcttcttgcacagcccaaaatcggagatcatgacacgtactttgcccttggcgtctggcagagaaataagaacattttgcggcttaatgtcgcgatgcacaatgtcgagagagtgaagatgactaagtccagatgcagcctggctcaacacttgccaaacatcgatgtgattttgaagttccagcgagcgatctccttcggtgtagtcctgcagagtggccgcgcacagctcgacggctatgtagcggaactggcgatcctgttcggtgcagaagtagcgcaccacattttcgtgcgcgtccgattctcgcaatagggccacctcgcgatcagcaaaggtgaagcattcgggcagcagccgttttacggctacgaaacgttcctcgaatgtgcccttaaagacaaaagtaccctcgcagccctttcccagcacttcatttgtgctgaagctgatcttgcccacacgcacttgtccattacccaagtccactaggtcttcagcgttcgcattgctaccattgctgccagtgcttccattggatccattttgggctatggcaaaggtttttgaaccattctcgctctgcttttgcagctccctcattgtgctgcaggtgtaccagaacaaggcaatcatacccagaacgataacaattagaatctgatgcacctttccgctaggatgctccataaaccactcgttgataaaggcctgcaccttattgctgttctgcagtattattgtcttcgtccgattaatggtgttcccattcgtccgctgatcaatgccaatttcgaccagctcgggatccgtttgcacgccaatgtcggcggcgttcttttcattattggccaacaggccgtagccatcgttatagttgtgaatggtggccagactttgaaccaccttgctgctggctgtcgtcggtgacagctgcaggttaccattaccctcattgggcatgttgtagtgtcccaacataattcctgcatgctcttgcagcacatcgttaatgtaaatggtgcgcggatctgtctcttggttgctgttctggtctcctgtaggtccatccaggagttttataggtggtgctgtggaaatacgaggcgtgttcttgtccaccagcgaaggcagggcatacaagcccttttgatgttcgcccacataaagggattggctgttgaaaatattacaattaatatggaattcaggacgaatatcgtatgtcccttacaatagcttcacggtgttcacatttcctgttttcgactcctcgaggatggcctggtaagcctcatcagagaccgtggtgaatggcacactgagtagcccgtctggtcccaaaaggaatgcagccaccactgggctgctcagatcgcgctgccacagaaatttaccgtgttttcgatccagagtcacaatttgtccattggtggtggtggtcagatgtatatactctgcgtgcgggagatcataagcaaatgtgtacactcttatattatgagatgcacttaccatattccttggccagctcaggaggagcactcacagcattgtagtcgtaaaatgtgatattccatggcttagcatccttgttcttagccaggctgtcgtacatcatgaccgtgtactgagtccggcctagatagatggcccgcgaagtggcccagccgatctgctcgccctccttaccatccactgtggcatcgccaaagcccataaccttttcgcgtctgcccgtcttaggatccaccatataccaggtgtcgctctttttccctgagtacaggattccatcggaggaacgacagggagcattggccaccagttggggaatggtgtacggtaacttcttaagactgcccatctgacccagctggtaaatgctgccatctcgaggatcgggcagaaagtgcggaacctgaacattctcctgatgttctgctactataggaggatctaaaagaaatacaattatagcttaaaagtaaaatcataaaagaaaaacaaagtaataaacatgattgcaaattcgaaatcgtgataaagtccgattcctttgcatccatgtaaaagcacaatatatgcaaaatcacacaaaatgtattccgagtggtgttaaactttcaaatcgcatactgcatcgaattcattacaagttgttttgttacgacaagataacctaatatatatatactccgcgccaaaaacacatttgactagccggcaataacaatatttttagttttattttgcttctttttatttccttttattacccagtattaactagtaatgaacatttcatgtctatttttgacgaattttaaaaaatcccactgttatcaattaaaaattttagtttaagcagaaatttctgaattccagattattattcaatactcagctttagttagcaagtatacttattattattatcttttcaatttagagtgatgaaccccttttgcagtaaattattttaagtgtgcacagtaaacaaattccaataaaaagttcctgatatcggtgcaactaacgtggagtaaagtaagggaaatataataaattataaccagaacctgttctcgataacgcttatctcctgatgtatgtacatacttataccgatgggaacgaaaatgtaatctatacattaaccccatcccaagcggagagcacattttctggtgcacattaaagaacgtgaacactttccaccaaaaggcccgaataaattaagcggctttttggcgcggcagacaaagccaaagcaaacagcagttgggtaaatacgaaatagacctgggggacccatggctggctgatcaaatccaaagtgtttacgccagtcgtgttggcaatttctttctgttatcgccaacaattcgcgcgaggcaacagcgttaaattctgactttgtcgaatgcaaatggagaccatcatcgcatgcacgatattgacgaaatggtttaaacaaaactcaagtattgccaggaaagatggtcgtcaaccaatatcgagtaatgaaaccaaacaattcgatgtactgtccattcttatcaataa

SEQ ID NO: 9161 - DNA, 3117 bp, DROSOPHILA
atggatgcaaaggaatcggactttatcacgatttcgaatttgcaatcatatcctcctatagtagcagaacatcaggagaatgttcaggttccgcactttctgcccgatcctcgagatggcagcatttaccagctgggtcagatgggcagtcttaagaagttaccgtacaccattccccaactggtggccaatgctccctgtcgttcctccgatggaatcctgtactcagggaaaaagagcgacacctggtatatggtggatcctaagacgggcagacgcgaaaaggttatgggctttggcgatgccacagtggatggtaaggagggcgagcagatcggctgggccacttcgcgggccatctatctaggccggactcagtacacggtcatgatgtacgacagcctggctaagaacaaggatgctaagccatggaatatcacattttacgactacaatgctgtgagtgctcctcctgagctggccaaggaatatgagtatatacatctgaccaccaccaccaatggacaaattgtgactctggatcgaaaacacggtaaatttctgtggcagcgcgatctgagcagcccagtggtggctgcattccttttgggaccagacgggctactcagtgtgccattcaccacggtctctgatgaggcttaccaggccatcctcgaggagtcgaaaacaggaaatgtgaacaccgtgaagctattccaatccctttatgtgggcgaacatcaaaagggcttgtatgccctgccttcgctggtggacaagaacacgcctcgtatttccacagcaccacctataaaactcctggatggacctacaggagaccagaacagcaaccaagagacagatccgcgcaccatttacattaacgatgtgctgcaagagcatgcaggaattatgttgggacactacaacatgcccaatgagggtaatggtaacctgcagctgtcaccgacgacagccagcagcaaggtggttcaaagtctggccaccattcacaactataacgatggctacggcctgttggccaataatgaaaagaacgccgccgacattggcgtgcaaacggatcccgagctggtcgaaattggcattgatcagcggacgaatgggaacaccattaatcggacgaagacaataatactgcagaacagcaataaggtgcaggcctttatcaacgagtggtttatggagcatcctagcggaaaggtgcatcagattctaattgttatcgttctgggtatgattgccttgttctggtacacctgcagcacaatgagggagctgcaaaagcagagcgagaatggttcaaaaacctttgccatagcccaaaatggatccaatggaagcactggcagcaatggtagcaatgcgaacgctgaagacctagtggacttgggtaatggacaagtgcgtgtgggcaagatcagcttcagcacaaatgaagtgctgggaaagggctgcgagggtacttttgtctttaagggcacattcgaggaacgtttcgtagccgtaaaacggctgctgcccgaatgcttcacctttgctgatcgcgaggtggccctattgcgagaatcggacgcgcacgaaaatgtggtgcgctacttctgcaccgaacaggatcgccagttccgctacatagccgtcgagctgtgcgcggccactctgcaggactacaccgaaggagatcgctcgctggaacttcaaaatcacatcgatgtttggcaagtgttgagccaggctgcatctggacttagtcatcttcactctctcgacattgtgcatcgcgacattaagccgcaaaatgttcttatttctctgccagacgccaagggcaaagtacgtgtcatgatctccgattttgggctgtgcaagaagctgaattttggcaagactagtttctcacgccgatcgggtgtaacaggcaccgatggatggatagccccagaaatgatgagatcacagcgaacggtacgacatgatttttattattaccctacactacttcttcaccatcacaagaactttctaaaatcgatgtctttcaattatttacagacaactgctgtggatatattttccttgggctgcgtttattattatgttttaagtggcggtcaccacgcctttggtgacaatctgaagcgacaggccaacatactctcccacgaatacaatctggccaagctgcgcccagaggacgacagtgaggacagccgaattatccttgctgagcaattaatatcggatatgatacacaaggatccgcaatcgcgacctccagctcgttgtatcggaaatcatccgctcttttgggatgagcctaaaatgctctcgttcctccaggatgtcagcgatcgtgtggagaagttgcaattccatgctgaaccgctcaagtcgctggagaagaacgggcggatagtcgttttagacgattggaatgtccatctggaccccatgatcacggatgatttgaggaagtaccgcggatatatgggcgccagtgtacgagatttgctccgtgctctgcgcaacaaaaagcatcattatcacgagctaacgccagccgcccagaagatgctgggctgcattccgcacgaattcaccaactactgggtggatcgcttcccgcagctcatttcacacgcctaccacgcgttcagtatttgctcaaatgagccgatattcaagccttactacagtgccggctatctttttacacgtccgtggtactttgatgcggacgatgcgctgtttcccatgctgatgctggatcccaagcccctgcccaagattggtagtcctaaaaagacaccttcgccggcaagcagccaagctcagcagctgaagcaaagaaaagggctctacaactttcgtaagcccaacgatgagctgccgattcctggcgttggtctgcagcgtaatctagagctagatggacaatcactggagcccgatggcaagcgggatgtgtttgctaactttaagtttcggcgctactcgaagccgggaaacaatcgcaattacaacggtgggcacaaggaagcgcaggacaaggaaaagtacgtaatctggacgctgccaccttcaacgcaggattag

SEQ ID NO: 9162 - protein, 1038 aa, DROSOPHILA
MDAKESDFITISNLQSYPPIVAEHQENVQVPHFLPDPRDGSIYQLGQMGSLKKLPYTIPQLVANAPCRSSDGILYSGKKSDTWYMVDPKTGRREKVMGFGDATVDGKEGEQIGWATSRAIYLGRTQYTVMMYDSLAKNKDAKPWNITFYDYNAVSAPPELAKEYEYIHLTTTTNGQIVTLDRKHGKFLWQRDLSSPVVAAFLLGPDGLLSVPFTTVSDEAYQAILEESKTGNVNTVKLFQSLYVGEHQKGLYALPSLVDKNTPRISTAPPIKLLDGPTGDQNSNQETDPRTIYINDVLQEHAGIMLGHYNMPNEGNGNLQLSPTTASSKVVQSLATIHNYNDGYGLLANNEKNAADIGVQTDPELVEIGIDQRTNGNTINRTKTIILQNSNKVQAFINEWFMEHPSGKVHQILIVIVLGMIALFWYTCSTMRELQKQSENGSKTFAIAQNGSNGSTGSNGSNANAEDLVDLGNGQVRVGKISFSTNEVLGKGCEGTFVFKGTFEERFVAVKRLLPECFTFADREVALLRESDAHENVVRYFCTEQDRQFRYIAVELCAATLQDYTEGDRSLELQNHIDVWQVLSQAASGLSHLHSLDIVHRDIKPQNVLISLPDAKGKVRVMISDFGLCKKLNFGKTSFSRRSGVTGTDGWIAPEMMRSQRTVRHDFYYYPTLLLHHHKNFLKSMSFNYLQTTAVDIFSLGCVYYYVLSGGHHAFGDNLKRQANILSHEYNLAKLRPEDDSEDSRIILAEQLISDMIHKDPQSRPPARCIGNHPLFWDEPKMLSFLQDVSDRVEKLQFHAEPLKSLEKNGRIVVLDDWNVHLDPMITDDLRKYRGYMGASVRDLLRALRNKKHHYHELTPAAQKMLGCIPHEFTNYWVDRFPQLISHAYHAFSICSNEPIFKPYYSAGYLFTRPWYFDADDALFPMLMLDPKPLPKIGSPKKTPSPASSQAQQLKQRKGLYNFRKPNDELPIPGVGLQRNLELDGQSLEPDGKRDVFANFKFRRYSKPGNNRNYNGGHKEAQDKEKYVIWTLPPSTQD

SEQ ID NO: 9163 - DNA, 2802 bp, DROSOPHILA
gcctccaactggggcgttatgggcacgcggctgacctccggagcgctcgatgcgtcgcgggtcaagcggaaccgttgcgccaaaaggcaaccaaggatggctgcaaaacaattaaaagcacgcagcgcaccttccagcgtctaattacaaattggagtcattgaatttattaaaatcggccgcgtaaattgtgcagcaatgcacttgagacacgcaaactgatattgtgggccatcgccggttggcgcttcttggctctcattactcggtcataactcactgcgcctgtccggttggttcaagtatccctagccacttgaaaacccataaagccaagtcggcttcctcttgcagaaacataattgctcgacttctgttcagcaaactccttttttatgaagatctaaagcggtttgtatacatactccgttggaagtaagtacttctagttactagaatatagttagcaccaagcgttaacctttcgcggcccttcatgcctacttaaatatgcaatacaagttacagctgtacatatgtatgtatattaaccttaaactagatccataattctggatggatggtcagtgcaattttttgaaaaagccaaaatgaagacacatcccattcattgcctaaatatggaaatgaattgtaaataatttatgtatgtttcgataacattactcctgatacattttagtaaaaggtccttagtaaagacatttagttaaaattggttggcttgatgaaaatcgatataaatatttagctcagaaattgcgtgcataaaaaagtattcaaaggatataagttatttaccagttacctcataagtgaggaataattgtttaagctgcctgaaaaacctaacacaaattttttaaataaagaaaaataaaagccttttagaaataacatgccaaaagtatgcaatgcatatccaggaaatctagtgatccaccatccaccagtcaatctaatgacactatgggaaacatttcttcgtagatttgcggttttaatagataaaaatataccaatacattaacatatttcacttaaggatacagaatgaaactctttgatagtgaccatgaagggattaagaatgcggcaatagttcctcgtttacgtagcaacaggagccggagcagctccctccggttcggcagccttttctccgttgccgttctgcgccttggctgccggcagatccttgactccggtggaaccgaatcctgcctcgccgcgctcggtgtcctccagtttgtccaccatcaccagttgcggatagaagatacgctcgcaaatgaactgggcgatgcggtcgccatgcttcacctcgaaatcaacatctgagtgattgaacaggacgacgccgagattgccgcgataatcctcgtccaccacaccggcgcccacatcaatgaagttcttcaccgccagcccggatcgtggggctacgcgtccgtaggagccctccggaacctgcacttgcagatcggtcttgacaatggcctttccgcgtgccggcaccacaacgtcgtaggcgctgcgcaggtcaactcccgccgctttggcggatcccctcaccggctccaaagcattctcggtgagtttggcgaatcgcaggacgcacgtgtcgatcttcatcttcttggcagctggaatgtcggcgaaatcggttgatggcatttggagcaaattgagttattacaggaatgcttcgaaagtacagagacttttttcagcttacttgcagaattctggtctgaaaataacgcggtttaacacagcgtcggaaaattggcggacttccagtgttgcaagataccaaaagtacaaatcgccgaaaatctaccaaaaaatcttaagtcagctttgcatttctaaaaaacatatatacaactatgccttgagtttaattaaacaaataataaataaaacaataatttaggcattaataaataaatcaaattgattttattaagtaaaacgaccaatcacaaccaaccctgataagcaaccctatcgatatatcgatactattgtagttgattaacacacctctatttagcacgttgttttgaaaaattcacttgatgcgttaatgttaatgtgttgataactgcaactttaaatcatggcgaacacttatttcgatgagtatgaaaacttggaggtaaataagattatagatcttcttgtgaaactgtactcatagtgaccaaactacagatccacgagctcatgctgaaggatcgtcctcggcaagaagcctactacaatgcgatattggggaataaggatctgttcaaggacaagatcgtaatggatgttggtgccggcacagggattctgtccgccttttgtgcgaaagcaggagcccgtttggtctacgccgtagaagcatccaatgtggccaccaaagttgcgctggatttgattgaggataacggcctgacgaacgtggtgaaggtgatccagtcgcgtgttgaggaattcgtactgcctgccgaggcggaaaaggtggacatcattgtgtccgagtggatgggcttctacctgctgcacgagggcatgttggactcggttctcctggcccgggacaagttcctcaaggagggtggactcctgttccccagcgagtgcacaattttcgtggcaccctgctcggtaccatcgctcttcgatgattggcacaacgtggacggcatcaaaatggacacgtttgccagaaaactcagaacccaaaagtcatcccgaccggagattacacagctgaatccgcaagatctt

SEQ ID NO: 9164 - DNA, 802 bp, DROSOPHILA
acgctgtgttaaaccgcgttattttcagaccagaattctgcaagtaagctgaaaaaagtctctgtactttcgaagcattcctgtaataactcaatttgctccaaatgccatcaaccgatttcgccgacattccagctgccaagaagatgaagatcgacacgtgcgtcctgcgattcgccaaactcaccgagaatgctttggagccggtgaggggatccgccaaagcggcgggagttgacctgcgcagcgcctacgacgttgtggtgccggcacgcggaaaggccattgtcaagaccgatctgcaagtgcaggttccggagggctcctacggacgcgtagccccacgatccgggctggcggtgaagaacttcattgatgtgggcgccggtgtggtggacgaggattatcgcggcaatctcggcgtcgtcctgttcaatcactcagatgttgatttcgaggtgaagcatggcgaccgcatcgcccagttcatttgcgagcgtatcttctatccgcaactggtgatggtggacaaactggaggacaccgagcgcggcgaggcaggattcggttccaccggagtcaaggatctgccggcagccaaggcgcagaacggcaacggagaaaaggctgccgaaccggagggagctgctccggctcctgttgctacgtaaacgaggaactattgccgcattcttaatcccttcatggtcactatcaaagagtttcattctgtatccttaagtgaaatatgttaatgtattggtatatttttatctattaaaaccgcaaatctacgaagaaa

SEQ ID NO: 9165 - protein, 188 aa, DROSOPHILA
MPSTDFADIPAAKKMKIDTCVLRFAKLTENALEPVRGSAKAAGVDLRSAYDVVVPARGKAIVKTDLQVQVPEGSYGRVAPRSGLAVKNFIDVGAGVVDEDYRGNLGVVLFNHSDVDFEVKHGDRIAQFICERIFYPQLVMVDKLEDTERGEAGFGSTGVKDLPAAKAQNGNGEKAAEPEGAAPAPVAT

SEQ ID NO: 9166 - DNA, 6387 bp, DROSOPHILA
ccccgctcccgaaatcgcaaaccaaaacaatccgtatacatatgtatttgtatacatataccctaatgggatactgaaggtggtagcggttcgtatgccatgaataaattatcgcccaaggaaccaaattcgccaagtgaccgcaaaccaattacgacacatgaccataccgatttgagaactaaataaagttggcagcagtggaaatagggatacaaaagtgccaggtgcgatcgaattagttctaatcggatcaaagtaacttacaagaacacgtatcctatggatttatgattatagtcgggctttaaaagtcaaaacctctagcgtagaaaaccgaaaaaatacccttaaggactatttcttagggtttaatacggttttataaaggtcctcatagtcccaaggaatatcttccaacgtaggccgaattaaaaggtgactcaatcttcagtgtaaccactccaagaaactgttttcatgtgcgaatttcataaatctataaccatttgagttttgattcgaaaaccatcttcttggttcccaatcctttccttttcgaaccaaatgttctccatttaacaaacattgtaaggactatcataaatcatgacaggacataggttcgcctccatctacaatatttgctgtcactgatgaccctgatgatgaatttgtatttgggttaaataaatttggtcaagttcttagccggcctccgtgatcgatatattgattttaattagcccagctcccccgaagctaggcatccgaaaatggagactcacgaaacggccaagtttgattcgatttgatgttaagtgccagtcatttaattcaactgtgattcctcgaagtccacatttgtgggcggaactcataagttattgaagacacctccttgagtcgcgtgttgatgatggtggcttgcactcaccttcgcttttccgtctagttgcaaccggagaatgtgtgaagagctgcctccatctgcctaagcatgaaccgctatatcacgctgacccaactgggagatggaacctacggcacggtggtcctcggccagcgcaaggacaccggcgagaaggtggccatcaagcgcatgaaacgcaagtactactcctgggaagaggccatgaatctgcgcgaggttaaggtatgtccggactgagctcctcgaatccgagcatcttgcttaacgatcctcctcctttccatctctttagtccttgaaaaagttgtcccatccgaatatagtcaagctgaaggaggtgatacgggagaacgataccctgtactttgtgtttgagtacatgaaggaaaacctctatcagatgataaaagaccgagatacccatttacccgaaccggaactcaagagtattctcttccaggtgagctgcacgaaacatatcctcatataccattatattaacatctatattttgtccaggtcctaactggtctggccttcatgcatcgtcatggatttttccaccgcgacctgaaaccggagaacttgctctgctccgggccggatctcatcaagatagctgattttggcctggccagggagatccgatcgaggcctccgtttacggactacgtatcgacgcgttggtaccgcgcaccggaggtactcctgcactccaccaactacggcagtaccatcgacctgtgggccatgggctgcatcatggccgagctctacacctttcgtccgctcttcccggggagtagcgaggtggatcagctcttcaagatctgctctgtgctgggcactccagataaggtaatagctcctccgtttactgatcattaattttaagtcttaaatcttatccatctcgttctcaggacgattggccggatggttatcgcctggcgagcatgatccactttcgctacccggactgcatcaaagtgccactgagcagcgtcgtcagtcgctgcagccaaaatggtttggatctgctggaggatatgctggcctacgatcctgacaagcgtccgacggcgcagcagagtctgaagtatccatactttcacgcactcaagcggatatcgcccacggcggccaccaaggcgaatgtacggctgaactccaagtatgcggcatccaatgggcatccggtacagagtgtctccaacaacgtgcttccggtgcaggagaagctgcaggcggtcacagagttgctgcaccaaaccaacaacaacatgaatagccactcaaatctgggcaagaataataacctggcgccaaagaatggcggagtgcccagaaagtaccaaccgaagttgagcttcctgaccaccagtgagatgggcgcgggttcacatgcggactcctccagtctggtcggtggagccacagtggacggagtcccggtgccacagcatcagaacggcggagagtccatcaacgacatctacctgaaccgcaacatttcgcagctcttcggattgccagcgggtccacagcaccagcaacagcagcaggtgcaccatccaaatgtctccttcagcaccacctcgtcccggaatgccggcgccatctacgtgaatggcagtcacctcagctacgacacggccaacatgaatgccaagaacaatgccaagtttgtggtgggcgcttccaatggtggctactacgtgcccgtggccagaccatctctcctgggccccgatgccaaggtctacaacgtattctccaaggtcagtgccagccaggctccgccgagtctcatcgtgcgtcagccgcaactgcaaccggaggtggctccggcgcccatgagactctcgggaagatcgcgagcggcggcggcggtccaggatccaaagatgggtgctctcaagtctgacgatctggaccttatactggggtaagcttggacaacagactagttggtatattctcaacttattttttgaagatttagaacgttatttatttcaaaacgaaagaattttttataagatgtctgtcttcatgttgtaaaaatatgtttaaatgtttcactttttggtttataaatttttcgattgactttcttgctgtttttttactaattcaataagaaggacatttttacaacaattaatggattcattagtagatgttagatatctgtgagtcgtaggcactcctggcaccccacagattgttttgtttctggcactgcaccacagttgatcctgcgccacctcaccgtgtgtctctctctctccgtatctcccccgtgcagttccaagctgaaaacctccgccaagcgacagcgcaatgccaaggccaacattctgctggaggatctcttcggacagctgtccatggactcggacagcgacggcaagtatccgcacacagtgccgcccacgcagcaggcgaaaagtgggaagacgtcgaccggtgggcatggcgccggcgcacgggagcgggatctcttcggggagagttatctgcccaggccgggattgcggaaaaaggccacacagagcagtctggaggtgaacaacggcagccacgcggactcgctgtaagtgggtgggcatgtccttggacatactcgctggcctgcatgccctgtaatcattgacccgtgcttcactgcatcctcatgatcatgatccctgcatccctgaatctctctctctctctctttctctacattgtactctgtctctctccctctctctctctctctcttgctgtctctgtcatcgttttgtgtgtgttttcgtttgcttgtcattgaacattgaacactttgtgtgggtgacccaagtgataactcctcctcgtcctccccctcaattgatgaagaatgtcgcttttggcccataaggtaaaacccaacattcgccattgagctgtaaatacgtaatattagaagtagagactctagttcaccatatcatatcatatatccatatcatccacgtacgtaggggaattgaagctacgattttcccctcttgttctcgagcacttttaatttgcctgtcttttaaaataactaatgtatatactagaaacaacatggttttcataattgcaacaagcacatttctaactagctgagaaactggtttcttaaaacagttctagtttaaattgaatttagttttctttgacccttagccaaatacatgtgaaactaagaaaaaatattaataatatatactcaattttcagagctccaaacgcacaaaaggaaaagcccgctgtggcgtccagtttcccgtgggatgagtccaacaggacggaggacgagaagctaacggcttggatggtggccgagaatggtaacttaattttggataatcaccagcaagcgtagaagtcgaagccactaaatgtagttacttagcgatcacatcaattggagctatcaactagtgtagtgctagcttgaaaagcacatctagaatattgaggatatgtaatctccaatatcacaatatatccttttcccaggatcgctgctggagaacaaattctgagaagatcgacttgcaaagtgccgttgtacctgaaacagaatggaactactttaagtgcctgttgatctgcgtaatcccgaactgaatcgaaatccatatcaccatcattgaatcggcataaagagctagtctagtttcgatataatgttattgctgtgatacaactaagctaaactattgtgtacatttagcctacgatcttgagtctcgagtgtaagttatactttaagctacgctatacgataatataatccgagtgagttttgaatcgattgcaacagttggtggcaagtgcagggatttggtttcatttcccccacgggcgaggtatatatggtatatgggttgcataaggcatgggtttcggagcggggtattcgatttctcagctaccataagttggttactgcgacaatgggccaagattcgtcttataaaagcggtcttagccaagcacttactcatcagtcgtctgcactccatcgcttcagttacaactccaacttgttcgccatgaatgtcctggtaagtctccggactactatctattattgtatatagtacatatctgattatctttggttcagcattccagcattgtcatctgcctaatcctaagcgccctcgtcgctgttcaggctggaatcattgccagccatccggatgagctgatcgctagtcctgcccaatatgagttccactactccgttcacgacagtcacagcggcgatgttaaggatcagttcgagcatcgacgtggcgagtacgtaactggtcgctactccctcgtggatcccgatggtcaccgtcgcattgtggactacaccgccgatccactgctgggcttcaatgctcaggttcgtcgggaaccgatttctcgctactgaaatggtttgccactggatgtgataaaggacttgcctaaatgaccggattaagatttggctaccttagtaataggaaccaatggaagattatagacttgtatttttagaataaatctaaaggctgttcaattcaatattcaagtgggctacgaatctattggaaagttgattcaaaccaaattattagcaattttttaagtgcatgatgtttacatcaaaaattgcaaaaaatggtagtttgatttgaaaatcaattccgagttcagctatacctcgctgaattccatattcagacgattattttaaatgctacgacaaaaaaacggattatttgatgacagaaattcggaaaaacgtcttttgccaaaaacttgatatttacaataggaattttggtcataacttcgctaaaaattgtcatatagatgaaagaacaactgttttgagcagctatttaccacggctaacgaacccaatcactttttgaaggatttaggaaaattaattttttggtcaattttcgcattttttgtaaggggtaacatcatcaaaaattgcaaaaaatgtcgaaaaaattaaattcccatgtttgaacacagtttgattggaaattcgattacgagctcagcgaggtataacattccgtattcagacgaatattttttaagttatggcaaaaaaactgattatttgatgaccgatattcggaaaaatgtcttttgccaaaaacttgatatttacaatcggaattttggtcataacttcgctaaaaattgtcatatagatgaaagaacaactgttttgagcagctatttaccacggctaacgaacccaatcactttttgaaggatttaggaaaattaattttttggtcaattttcgcattttttgtaaggggtaacatcatcaaaatttgcaaaaattggagaaaaaattaaattcccatgtttgaacacagtttgattggaaatttaattacgagctcagcgaggtataacat

SEQ ID NO: 9167 - DNA, 2469 bp, DROSOPHILA
atgaaccgctatatcacgctgacccaactgggagatggaacctacggcacggtggtcctcggccagcgcaaggacaccggcgagaaggtggccatcaagcgcatgaaacgcaagtactactcctgggaagaggccatgaatctgcgcgaggttaagtccttgaaaaagttgtcccatccgaatatagtcaagctgaaggaggtgatacgggagaacgataccctgtactttgtgtttgagtacatgaaggaaaacctctatcagatgataaaagaccgagatacccatttacccgaaccggaactcaagagtattctcttccaggtcctaactggtctggccttcatgcatcgtcatggatttttccaccgcgacctgaaaccggagaacttgctctgctccgggccggatctcatcaagatagctgattttggcctggccagggagatccgatcgaggcctccgtttacggactacgtatcgacgcgttggtaccgcgcaccggaggtactcctgcactccaccaactacggcagtaccatcgacctgtgggccatgggctgcatcatggccgagctctacacctttcgtccgctcttcccggggagtagcgaggtggatcagctcttcaagatctgctctgtgctgggcactccagataaggacgattggccggatggttatcgcctggcgagcatgatccactttcgctacccggactgcatcaaagtgccactgagcagcgtcgtcagtcgctgcagccaaaatggtttggatctgctggaggatatgctggcctacgatcctgacaagcgtccgacggcgcagcagagtctgaagtatccatactttcacgcactcaagcggatatcgcccacggcggccaccaaggcgaatgtacggctgaactccaagtatgcggcatccaatgggcatccggtacagagtgtctccaacaacgtgcttccggtgcaggagaagctgcaggcggtcacagagttgctgcaccaaaccaacaacaacatgaatagccactcaaatctgggcaagaataataacctggcgccaaagaatggcggagtgcccagaaagtaccaaccgaagttgagcttcctgaccaccagtgagatgggcgcgggttcacatgcggactcctccagtctggtcggtggagccacagtggacggagtcccggtgccacagcatcagaacggcggagagtccatcaacgacatctacctgaaccgcaacatttcgcagctcttcggattgccagcgggtccacagcaccagcaacagcagcaggtgcaccatccaaatgtctccttcagcaccacctcgtcccggaatgccggcgccatctacgtgaatggcagtcacctcagctacgacacggccaacatgaatgccaagaacaatgccaagtttgtggtgggcgcttccaatggtggctactacgtgcccgtggccagaccatctctcctgggccccgatgccaaggtctacaacgtattctccaaggtcagtgccagccaggctccgccgagtctcatcgtgcgtcagccgcaactgcaaccggaggtggctccggcgcccatgagactctcgggaagatcgcgagcggcggcggcggtccaggatccaaagatgggtgctctcaagtctgacgatctggaccttatactgggttccaagctgaaaacctccgccaagcgacagcgcaatgccaaggccaacattctgctggaggatctcttcggacagctgtccatggactcggacagcgacggcaagtatccgcacacagtgccgcccacgcagcaggcgaaaagtgggaagacgtcgaccggtgggcatggcgccggcgcacgggagcgggatctcttcggggagagttatctgcccaggccgggattgcggaaaaaggccacacagagcagtctggaggtgaacaacggcagccacgcggactcgctttggtggcaagtgcagggatttggtttcatttcccccacgggcgaggtatatatggtatatgggttgcataaggcatgggtttcggagcggggtattcgatttctcagctaccataagttggttactgcgacaatgggccaagattcgtcttataaaagcggtcttagccaagcacttactcatcagtcgtctgcactccatcgcttcagttacaactccaacttgttcgccatgaatgtcctggctggaatcattgccagccatccggatgagctgatcgctagtcctgcccaatatgagttccactactccgttcacgacagtcacagcggcgatgttaaggatcagttcgagcatcgacgtggcgagtacgtaactggtcgctactccctcgtggatcccgatggtcaccgtcgcattgtggactacaccgccgatccactgctgggcttcaatgctcaggttcgtcgggaaccgatttctcgctactga

SEQ ID NO: 9168 - protein, 822 aa, DROSOPHILA
MNRYITLTQLGDGTYGTVVLGQRKDTGEKVAIKRMKRKYYSWEEAMNLREVKSLKKLSHPNIVKLKEVIRENDTLYFVFEYMKENLYQMIKDRDTHLPEPELKSILFQVLTGLAFMHRHGFFHRDLKPENLLCSGPDLIKIADFGLAREIRSRPPFTDYVSTRWYRAPEVLLHSTNYGSTIDLWAMGCIMAELYTFRPLFPGSSEVDQLFKICSVLGTPDKDDWPDGYRLASMIHFRYPDCIKVPLSSVVSRCSQNGLDLLEDMLAYDPDKRPTAQQSLKYPYFHALKRISPTAATKANVRLNSKYAASNGHPVQSVSNNVLPVQEKLQAVTELLHQTNNNMNSHSNLGKNNNLAPKNGGVPRKYQPKLSFLTTSEMGAGSHADSSSLVGGATVDGVPVPQHQNGGESINDIYLNRNISQLFGLPAGPQHQQQQQVHHPNVSFSTTSSRNAGAIYVNGSHLSYDTANMNAKNNAKFVVGASNGGYYVPVARPSLLGPDAKVYNVFSKVSASQAPPSLIVRQPQLQPEVAPAPMRLSGRSRAAAAVQDPKMGALKSDDLDLILGSKLKTSAKRQRNAKANILLEDLFGQLSMDSDSDGKYPHTVPPTQQAKSGKTSTGGHGAGARERDLFGESYLPRPGLRKKATQSSLEVNNGSHADSLWWQVQGFGFISPTGEVYMVYGLHKAWVSERGIRFLSYHKLVTATMGQDSSYKSGLSQALTHQSSALHRFSYNSNLFAMNVLAGIIASHPDELIASPAQYEFHYSVHDSHSGDVKDQFEHRRGEYVTGRYSLVDPDGHRRIVDYTADPLLGFNAQVRREPISRY

SEQ ID NO: 9169 - DNA, 21001 bp, DROSOPHILA
gtttcgagtccctgttaaccaagttgaaggaggaggtgctcagcctctgctcgcctgcgctcttcgagatcagtcaaacccgcgcggtcgattgggacaccacggaggacatcgactggcccaccatgccggacatcgattggcctgcgggcacctcggattcggactcttttgccatagttggtaagttggttctgttgaagctgaccattaagaccattatttataacttcacagcttgtaatctgaatcaacagtccgaaatttcactccgatttcactcaataaattcactccattttccagaagagagcggcagggacagcgacgccggctgtagcggcgccattggcagcggcaaaaagcccagtgagagagccgtcatttgagaggtcgccggcggagcgcctgcgcctgcgccgcaccagagcagatgaagcccagccaggcgaaagtggagcacccaatgaggagaaagagagtgggccgggaggtcgagcccctgcggatgctgcgaatgcaataaactaaggctaaagtgcataattagacgagtggttgagatttagattttagtatgtttacgatttgtacgaatgcggttcttagcgattcataatgctgctttattgtacgcgattgactccacgggagacaatttggcaaaacacacacacacagagcgacacttacggacacataccgctttttgatgatcaattaaacatttttatgcaacgttgtacattgaagactcgatgagatcgaggcaatcgccttagcccggtgtgtatttatatgtttgtaatcgtaatattcattttcctttcgtatattcgtctgtatatgctcaaaaatggaccaacaactaaatacataatacttggactatatgtatatatctatatatgtatatatatatgtatgtatgtatatatcaactttgccatccgcctctggactcaacggctggacaaactcaagctacacgaaccaaggaactttctcgaatgagtaaccaggatgaggatgcaggaatctacgttaacaacaaacacgcggctacgcagctggcgaattgacactaattgggcttgacctttggccttccgggctgattcccgcagaaaggcaaactgggatttgcagatcagagtatccaactgtctcctactatcggaagataatcctttctattcatattcaagcgacttatgtttcttgcgcttcgaatgcatttaacttttgcaattcatccatcctaattctcgatattctggttaaattctatgttgtattcactataaaattttctaatctcaatttgttggttcaaaatcaagcactggatatttaaagctgatcgaaacggactagcctctagtaggaaaggtttttgagctactatttgagttccttgaaccttagattcctttcaaaagcgacacacccagtttgcctttcctctcggggaactcaaagacccagcggaaccaggagagtaatatgaacattcaacaactattttcggatgtcttagagtatgcagcacgacctctcaatccgcttctccaccttgggctcgctgtgcagtgccatctccacgtgctttcgtgccagccaggactgcttctgcaaccgattgaccacgatcctgtaggcgccaatgatgtcggagcgcggcccgctctgcctggcgttgatcagcatctcggaggtgaggcccagctcggccaggatctggcgtgcctcgaactccagggcacctagctggctcagatcctcggtgttcgtgggcagcatgacgcagctgcccgtctccgcgtcgtagttcttgaacagggggcaatcctcggccacctccacattccacggattgatcttggccgaaccgattgactgtccaccgttggccagctgcttctccggttccgtttccatgggcgtgaccttcttcttcaggctgccgcagaacatgtaccttctggttggacgcttcgcctgctcggtggactgtggctccttcagctgacttgacaccgggaccaacagttcgtgtcccatctcgatcggttgcaggaagttctgcacaaacatctcgtcctgctgcctggtgttcatgctaatggccggcttcttgaccacctccgcgtatcgatcccgtagtgaggcggacttccgcagccgatgcgacttgctgcgcacccagaagatggacctcttgaccggcttggtgtgctggttgatctcccactgcatcagatcggcactgagcttgggacaggtcacgaactggctgttcagcatgtcgtcgatggttggccgctgggcgggtatatgaatcaagatgcgttctaacgaagatattaggttaaagcagtttttttattatttaatatttatccactcacgtataagtcttatgcagggcaagctgagctggccgggcagcagatagtcacccttcaggatggctgctttcaggccgggaatcgttggtgcccggaagggcatgtttccgaccaccatgaagtagagcaggatgcccagggcccaaacatccacgggcgcccctatgtagtggtcatcggagaagagctcgggcgccgcatacggaggggatccgcagaacgtgtcgagcttttgattggcacctgtcaaagggaatgggaaagttgattaaattgccgacgcactggcttggctgttcacccgtaccattgatgagttgggtactgaaaccgaagtcggccagcttgaggcgatcctcggagaggagcaggacattttccgcctttatgtcccgatgcacgtagcccagactgtgctgcaagtgcgattaagttcaattaattttgcagatgaaataattgaatattgaaaacacgcatgcaaattaatattaaatgggccataaatctctgtgtgaaagatttaaaatgcacgattccccgttggcaatattgatttttggttgagatacaattaaattatatttcccacaattcactgcggatttctatagatgggagtcagcttaccatatgtttgactgccaggaggagttgtttcagcaacggggccgcatgaatctcccgcagcggaccgccttgggtgatgtggttgtatagctcgccaccgcgaatccactcagtgaccaggtaaacgcggcccagagtttcgaccacctcgaaaagcctgcaaggcataggaaagatgtagggccaactctagcagatatgtgtacttcgcttgcctcacctcagtatattcggatgatgcacacactcgagagtggctatctcgctggacagcattcgcagtgccttggcatccagtccggcccgatccaggtccaccaccttaatggccactttgtctgtaaatcgtgatgatttcggttaattcctaatctgattagtagcctttcgtcctgttccttaccacgcgtcagttggtggacagcgagcttcactttcgagaaattgccgcgtccgatgtcgccacagaatctgtagaggccaatgcgacggccgatggttacctgtttcggaaaagttaatatggtttcagtgccttcgttttttgtccttgcaaaccacgagagaaattaaaacaaattctagttgcgctttcatcaaacttgtggcaaaagtcgcggcatttccggcatttccacttgcgccagggacaaggcccgtcttaaggttaagtaatccgaggcagcgattatttgatactccaaagtacacatgttccagcaattaacattgaccgctcccgtaatttatgcattcgcgcgcccccgaagccttccattcaagaattcttggtattgcaattagccaaggtcaagtgcggcacttttttttgttaatgtaatttgaactgcgcgctgcacttgacgttgacgttgctgcttttggcttgttgctcgccgttcctttcaccgcttggctttcgctctgttttttgctcgttaatccacctttgagccatcgagaggggcggacgggcgctaattaaggaacgcaacgcggcgtatacgtcatgcggatagctggcgttcggtcacacgcgcattctgcatcgcaggctccaaatagacggcgaacgagctcacacaaagacagcaaatccgcaaggacactggccaaaaatttaggtgattttatgaatgctgcatgagcatatttctaaaaaacaagaagccttaactttcttattagagaactcatttcacaatgagtttattaaatacctaagctatgtactttttcttcaagtgtactaccacatcgccactgctgcacaagcaaattagccttgaacccatgcataattgcagcgctgcagcagagggtttgtgtattagctaacacacccacacacgcgcaagggcggggctcacaccgacgagtacacggaacatggcccaaaaacaacaagcgacaataacctggctttcgctgtgacgtcagagcagagcattggctttttccgcgctactaaacaggttgcattcaaaacccacttgtttatgaaacacaattcatcatgcacaaggacacgcgaatctggcacaataagttcatgacacaaagcgaagataaattctgccataacaatttgcagctctcgcggatgcggcaccacacaggatgcgaaggatatttgctttttacggcacgacggtttgggatgggaaaattatctaagcggccatttcatgttgggtgtgaaaaatcttcatttattggcagtaattttgattgggctataacataaaaatgcagtgcagttttaaaagaatttgtatatctatttgatttaaagtatagcagacaattttgcgctgtgaggccaacttaatagtgcgaagcatattacgtatacgacatgttgaccccgcttgactttgattcataccataaagttgcatttctgtttagactgtttccctaagattttgcacctccgctgccaattaacttgaaatttatttaaaaagttggtctgccgccagcgagtggcatgactaatggcggggtaattgacatcaaccgagacattgcggcaacgcggcgaatggcgaacaaactacaaactcacaggtgagtggctgccctggtgggctgccaccaggcgcccagctggagacggaccccttgatttgggtatcgccgccacaggcatttcaatttgcactcacctcgtggccgcagcgcggatcgcattgcagcgccttggtgagccgctggtagggcggagtgggcggtggcggctgacaaattgtcaggggcgtcgtcgtcgttgtcagcgggggcgggtgcgggggcgtggccgccgacgtcaccttcacagtggctgagctgcgcagtgccttggtatccacggctgccgttttgctgctttcgcttccttgggaatccgggggttcctgactgggctggcaacttgttggtcctcggcttcgtctcctttcttggcgtcctggcgcagtcgagtggcgtggctgcctcggttgctccgcaactcgcgtgtaattacagaacggcaggtcttagggcagtcttacattattaaatgctgtgtctgcaagcacttttccatcaagggggccactgaaagttggtaagtgaaggagaagagttaagccaagttgatttctttagctctgtaagcgtcttattctatttgttggcaccgtgagttgattgtttttggttcccatagttcactttgttcttaactacatgtacttgtaaagattggccgtaatgtgttgagattttaagaggatttagctggagttgcaaaaaagtaggcaacatttaagccaattcagttcgtaataacaatccatccccatacatagctttaactaacataaattatagcaatattttcctggtaatttgaaaggcatgtacggtatttataggtggccttaatgagtttcgctcagaggaaacgccagtgggtcattaatttcccatttctaccatcaccagaaagattgtccatgaacacagattcggcggcccagttacaaccaacttcgatgatggatattccgtgaaccataaattagaataattaaatgcaacttgtttcggttcgctttgcgcttatgaaaccctcgtaaaaaaatgttgctggccaaatataattaacgtttgttggagggccacgaaaatgggaaacttttggacgaaatgtaatcgatactggctggactccatcgaaatatggtggctgctgtaactcaactggtggcggtgcggcgaaggaaacagatttccaatgagcgagtaagcaatttctcaataattcaataaggaactgggtgcgcatccttttgcagcgggagcagcgaggcaaaagttaactggaagtaattacgtaaatggattttctttcctttttcattttctgctcaaatttcctgcacgtcgtctcgaataaagtacggcaatggcaaacactgtgcagggatcgagggatcgggtcataatgtttatatagcaatcggcagggccaatcccactcccaccgccatcacctccaaccatgacaggaagttggccaggaaggaagcgagcgaaggcgcagcatttaagcccgaatgcgaaactcgaccggcaggcgacaaggcgttacaaggataacgatttatatacagaagcgtatgccggtgggcccgcataccacgcacatataacttgtatatacttctcaaccgtaagcacttgaaattattattataaaagccgcaggactgtcccaactttcttgccaagttggtgacgggcgatgccatcttctgattgactgacggccacctaggatgtgcgtgaaattgcagccaaggaccaaataatattgtaatattagacttacgtgagactaatgcaaaaattgtggaatttattcatttcacttcggatgagtgaagttcatgcaatgctacgaaaaaatgcatttttgcactttaagcacgccatggttgatatcctgcttgcataagcaataatccatgacatgaacatatatttcccctttttaagcaatcaaatctatccgtttgaatgaagctaaaaccactgtaaccatggccacgtctctggtgtctgtgtgcgtgtgcgattgtgtgggtgtcacaattaaattcacatctacactcgcttgcacgcatacaagcgcagagttttcggtttcattttcgtgccagctgtcgcagccgcaatttcatttctgcgctcacaagtatgcaacgaaatttttacacttttcccacttatcaaacggcagcaggctcctcttctgcaatggtgtgtgtgtgtgtgtgtgggggagttggaccaccttgaatgtgcttccccccgtcacgcatacattcacatgctaatgacaaacccctctctcccactcgcaaacgagtatctgtgctggaattacagttttaattacaaaactaagcgtgaatgcatttgatatcaaagcaaaacagaagcgactcgcagctcaaaaactttgagtagtcacaaaaatgagtgatgggaatgtaagtggatggagattcgcgtaggaaaggatagtttatttcagccagatggaactttcagctggcgaaaagtgaaagcattcgcgcaactgggtcaaaagtgtttgcattaatgagaataagcacttcgagaagcgaaacttgtggcgcacaagaagctgagctcatatgggatatagaaatcacacaagttcttatgaaaattcaagtaactgcttcttggtataaaatgaaaacattgaaattgcagtgccaatttacaggtaagcggacaaagcaatcaaatttacttacaagtgatagaaaaatataagtacatttccaagaactcttgggaaatcgaattgtatggattgatcagaggaaaatttacaattgttttggcctgcacactttaagcttcaaaccaacttattttaagaatgaaaaattacccaactatgagctgaaatatttcctgatttaaactatttacattagcaataaatccctgcattgtaatccttttatcctcgaacattcacctctgcaaatggcaacatccttttaattcctgaagctcataaattcttgtaatattcacaggaataccgattgacccacttagatcctcctgcccatccaataaatctcgcagacaaacggctcggagttcctttgcaatttaagacttgtcagctcgctgcaatttcccgtgaagtccctccccttggcagcctcccacacagaaattttcctctgaaaataatttacactcatttttgggtcaagttcaattgcaggcattaattataaggacttggcacttggacttgttcgccttcgagttcaagtgaatgcaactcgcatccaggggatgagatcaaagtgagtgcaaggatgtcttcatcatcctctgcagatgtcaaaagatgcatacacttggtgcatggtaatggattaccaactaagtagtactatttatttaaatatattatatagacattatatgcgatgcagaactaggcgccagaaaagtgcgtgaatgtcgtgtgattaaaaataacaaacagcgcataattctatttgtttatagagtgcattttgcagattggtgggaaggggggctatgggggggcggggttgaaagacccctgggggccgatgaatataaatagaaaatgctccaaaatgcgatgtgcagatgtgcagagtacagaggctgtcggccgtcgactgtgggtggcaaaaaaaaagtggcgcaaggacacttgttgtggtcaccagtgtgtcatccacagccgcccaagaaatcgatcgtggaacaccagagactgccacaatccatggcgcagtatggtaatggtagatgcaataaaaatgaataattagagcaaatgaaaggagtgtatggaatttatcacaatctgcacatgtaattaattagtttttacgctccgtaaagcagagccagggaattcattacgacattcacctcaccatttcccatttgcaatttgcaatttgaatttcataaagcaggagcaaaaacaaacggcgaccgaaattcagtcatgtccttcaacttgaacgatgtcgttatacccggcccactttcgcccactttccccatttgagctacttacaagtccagcaacaaataacgacgacaatgagaacaagacccgaaggcactaaagtggatgaatgagagtgcacagggagaaaaaaagggggtgcacttctacgtttgaaaccaatcatgctaccagtgctaacaaatctacacaaattccaaaagggaagcaataacaataaactgaataagttgtggaagttgctctggttgcccaactttcgtcgagtgtaataaaaatgttgaataagcaaataatgcgaatcaaagaagcaaaagtagcggacaaaagaatgcatattcaagccaagttaaacacaaaattccaacttattttattataatttcgtctcgatatttttttgtgaaaatgcaaacatggggaggtcaagcagataaagagaaatacaaagcattttcccgatgtttccccaccactttccacgctaacgtcgattttaattttcccatttaggcagaacttcggtgcctaatgatcgtgaatttttccaccgagaggaagccatccatcagcaggtgaaaccgaccgaccgtccgtcattataggtaattccgcgatgccggagcagcaaagagccaacaataatgcaaatacttggactttgggccgtgaaaccagaggggtggaaaacccaggggggtggcacctgtgccacacacacacttttcgaacagcaactaccgataagactggaaaatttccgacactgtgctgttatatgtttttctcatcggacagctccaagccaagcccaagtcaactggagtcgagaataaacgacgacgacaacagcaaaattttcccagcgccaaagcgaaaaaaaaactgatgagctaaagaaaagagttggaacaagaaatgaaaatttgcatacaaaaacccaaaagtcgcgcggaagttgtacgcgaatttcgcatgggcgcacctggacgcagggggcgtggcagcggcagaccgccgttttggccaaaaagctgatatagaaaaacgtgaaaacccataaggtgtaatgagtgtggaatgtcgtaaattttcgaattgctttccttggttttattttgtaccttttttttttggccgctgtcttctgccatgtgcatacgagttgggaccactgggaatgggtttggagattgggagtgggagtgggagcaccttgtgggaacttccgctgagaagttgaattatgagccacgcaccgctaagcgccgtcaagtgctatccaaaaaaaaaaaaaacaaaaaaatgttggttgccccagacagtgagcgaaataaagtgtgctgttaactgaatgtcaaatctattgaggcgattaaaaggcgcacacccacgccgaaatgcccgagtgagcccaaaacacacacagatacagatacgaatatagatacagatacatatgtatagatacagatacagtcgccggggagcggcagcttaagcgccattgaaagcaatcaaaaattgtgcagagccgcaaggcgaacaagaactatgtggtgtgccgactaccagataccctggactgggagatattattgtgatgtgtagtgcaatacagatacttctttcataaactaaaacctatgttcttcgacaagttttatttcaagcttaagattcgaccaaaatacagatacagatttcaggtttccacgcttttctggcgtgccactgccattgattgggtccattgatcactttgttggcccccgaatggatttgcctcctctgccttcccgaaccccgggaatcacacgtcgtcgcagcttcagtttcagtgccatggaatgcaaattaatattaattaaacgcagctgagtcgaaactgtttcaaccaaacgcgcggggtatgcgaatatctatacatctgggtgggtaactgggtatttgggtatttggctatttgggtgttggggtatttgcctgggcactgcctggattatgtgcctgatgtgggtccgatgtctgggtgcaaatgcgtgaaaactcagctaaaacgccgaagattaatgaccgaccatgggtgagcttacccgttaacaaattccctgtaatgctcataaaatgaaatttacgctcgggcgtttaatcaaacattacaaactgctgggcgggttttgcacgaaattaatcaagtggaagcataaacaggattgagctaacgggcaaagtattatagcaatactttgtttatctgcaaaagattaatttcactcagttacacacatatcatttcacccgaagaagccttgttgcaatgatagccaatattctgcaaataaactgaattgttatttcattgacaatttccagagtgtccaaatgagcgactaatctgccctctgggaccaaagaggttcattcacaaaacgccattccattcgctttattatgaccagataagctgtacgtaaatgcgagctatctctgaaataagtggccaaaataggagaataacacattttgggtattataggcgagtgtcaatggcaacagatgagctaaatctggtgcgagtgattagcgtttcatggttgataagagcggaaaatatatttagaattccctggaaaaatagatcacaaatgtcaccatatttgctggtaaaagtgagttttttttgctgctcattatataaatgcatgctatttatgttttatcagaagaactctcgaactaaaccatattggcatattttattctacaaaaatcatatttaatattttttatgtcctttttgccagcgacagctgtaattaaaatttatttggcatttattccttgcattgttttttttttcaacttgtttcgaaacacaatattcatattttaaatggtcaaaggggggaacacaacaattgaaaattcatgaaaagcggtggtgtggttttcatttaaaacgagtcagcggtttttcattcgtttaataaacggggaaactctgaaactctgaaaggcaaataatttcgttttgttcgcagctgcagccactgcaggcgggcatttaattcaatttacacttaatttgtttaaaccttattgaaaattatttattcaaatgacacagcgcctttgtgcgttggggcccatgaaatatttatagcgcggcagggtgtcacagcatgcccatgttttatttatttataacatttaagtgcgacgagcagacgcacgcactgtttgcactgtttgccccccctcctcccccctcctcccaccacaaccatgtaaatatattattataatacctacttaacgagcagagcgattcctatttgcacaacaataaagtcaatttagtcgactccatcaacctctacctctgtgtgctgctgagatcctatgtgaaaagccccgctacccaaacttgtgtatgtgtacatagacactgcctttgattcatactctgccaaaaggggtcccacaccctggtcactaagatggaaacctcacatttcggagcttctcgtttcccattccccctgtcgcaccagaaattcaatcaatctccttgtttttctgtccctatatttggctacctatttatagatgcatgatcctgtcaatttgtctacgtgtccttgcgagtgtcctgccctagaacaacctctgaccgattaggtggccgagcgtaaatggcagctccaaaaaaaaaaaaacgaaacgaaattaggcagcagcttactaaacaaattgagaaatagatttccatgggaactgtaagaatgctctacattgaggtaggtatctgtggcacacagcattttctagagtatttcccacttcgactggctttttccgcttttccgtcctccgttctccgcctccgcctcgctgatttctcttttttgcgaattcacttgctgcgtgcgaatgagagctcaattcgcctgataagacgatccgagcgacagcgacaaggggtctggcgttatgttaacgctcggacgggccccgaggtcatcctcatctccttggggctcaacgtcgaacccttaacccatgtcagccgaagcgggcgaaaagttcttatgtatgtcgaactgccgacggctcggaatgctgagaatgttacgcatacgccacgtgggacaataatgtcgcaatgccaaaaaaaatgaaaaaaaaaacagttcgcactttctcagcgctgctggcggttctaatggctttacttgcctgttagcgaggatgtgcgagcattgtcaactggtttcgccttgggactgattattgccgtttgacacattcggctgactggaggaggagcacatccacagcgactacgtcagcgatgtgcacatctagctcgactggcacattgagcatacgccccgtggacgcccccacgggctgacttattgagcaaacacagtggcagccatgtgtctgtggcataggcaaacgaatggctgagtggaaaacgtgaaaagtgaaaacaaacaaacaaacaaacgagcagaagcacaagcacaatcacaagtacgagtacaagtcaaagacactctactgtctactgtcatcgaccagcagtctggtctacagaatttgcaggccgagattaggatgtttcaacttcgacattgtcagctcgctcgctcgattcgattccatcgatctgcttaattcaattaatgaatcgctttcatcgaggaaatgcccaaagacttgcaatggctaattgggtgaatcgtcgtgggccataaaacaaatacatgaaagcaaactttgccggttagacaattgatccaatgattagcgcattctgctaagtgacggaacaacgtagtaattaattatgtaattattcgatggagcagtatatgaacaccaagtacatagaaccttctcaaattcgcagacgaatcgaagttcccggaatccattggctgcctcatcggatttaataagcaagcgtataaagttctcaaaactcaaatggagcgaagacaacttgaagacctgctagtttcgcaatcattttctcatctttcgctgctttccccaaccccttttccggatcaaagccccgctttccacggaggcccagctgttgcatggccggtggttatagattgcctcacagcacattacgtttgattatgagtctgtgtgcgcgtgtcggcaactacgcctcgcaaatgccactgccctctgactagcattttcgcccatttccccgctcatttcccggccatttcccccacaagtactgcaagtacaggaaggaagcttcaagacgcgattaaatcggcaaataaaacagcaagcggacggtgtgtgggagtgagatggagccggggagataggtgaccgagtgggaaaagcgggggaaaaatgcggaaaactcggagatggaaagcagcagtgcaactgagtaaacagaaaagcgctgagcaaaatgaatttttgaacaagttaagcttctacgtacagcggagcctcgaccgtcttaaaatgttgaattttttggcaaggagctccgcttttccgacggggttgactttctgattgaatagataagtgaaggacggaaaagcactgaaaattgatgggcttctctattgaataacacaatgcgaacttgtttgtgtgtgtgtccgaagcgagggagaacaaatgaatagacatgaatataatggattcgaatcgaacgaaatggaaaaatgcaactaagctgataacaaatttgtttacccgccgagttcaaggctgccaacaagtcggtggctttgaagcaggtaggaaggacgaaggacttgcgaccctgaatgagagcttatatagaaatttttaatcaatctaaggaaattctacaactgactgcaaattgcatttgtaaacatacaacaaaagatgtcgaactggagaaacaaagtgttaaattcgtttcatttaaccctttcgataccatttaatgttgtatagattgattcagtgatagatagtatttcacaaacagattgtatttcccaccaagcatttatttactggctggcaattcaattcattggcccacagcttttccactgattaagttatcgtctagacttgggaacacgtaacacaaaaccgttgacaaattgaaaatcgagcggaaggcaacaaaacaacaaacaagaaaagagttcgttatgcgggtttcaccttttgccaacttctgtgtgttgttggccgggtcgaaagtgatgtgaaccagcctaattgcgttgattctctagttttttgtcaatttttgagttgtgcggagtggtagatggagtagatgaagtcccatggtaattattgagtgccatggcaacgacgattcggtgcaggggaatcgcattaatttcccaacccaacgtggccaattaccggtcaaatgctattagccacagacccgcaacaggccaattacgagggcagctcgaatgggcgaacctaatcaaggcccgaaaagagctgccaaaatgtttagcttgaactgaagcaaagttacgtgaacatcgctgccccttttgattttgcccaaaatcagttttaaaggccaacgagcaatttaagcttcgctcggctcactccagctctccggctcaggaggggattttcttggccatctcggccatcttggccatgtcattctcattccactgctgacagcttggacaactctctttagctgtggctactgttctgttttcgggttgctgttgctctgccggttttatggcaagtcaaaaacctattaatgcccagctcagcagcacgttcaacttgccacaattttattccctctttcttaatactcttaaaaaaaaaagtagcttggcttggcgattaaagattcggctgcagattaatatcgaaggtttatttttgtcgcacatgcatattcatattcagattcatattcaagtgtgccaacctctggatgaccttggcccgccgaagtgactggccatgtcagcttggctgtaagcatgtgtaaagccaattggccatggaggaaagtcggaaaatgtgctcaagtgctagataacaccttttgcaaggtgtcattcatagcactcagaaatcattagagtattgaaatcaaactgaatcgaaagtgcttatcatcattttaaactttgtagaactcaattttccagatagactcaacttaatcattttcgtaacaagtgtatagtatgttcgcattgcccgaatttaattcgcgtctttcctgttcttttatttgttttctactagtatttccgccacttggctttgctgtggcttttgcattagcttctgccttcgagtatctcataggtacgtatttatacatacatatgtatatagtacgtttgtgccccaattgccccgccctacaaacaatcctcctctatcagtgaaacgaaagagaaccgtgtattgagccgcctttggcgcattgtttgacatgactttaatatttcagaaaacgataaaaagcgacgagtatatttggtggcaaaatacattttggcactattgtgtgtggcacttttaatcgatacgaaatatcagcggcaaaacaactgcattcagaccaccgattattgcttggcaggttgaattttgattctcgaatggttacaaattgtatcttgtatctggtatctagtatctgtgcctttgagccagcgcaatcaatttcaattagggtaagtgggccaaggggttaggaaggggggggcacataattaagctgcgtgtcattatgcattgctggccaggatcgcttggattaattcaatcaggagtccagagctccggcttggaatgaatgctaaccaccaccccgaaccatgaccatgttcccggccagcagcgaaataatcaccggaaatctccgaacggaaacgctcgtaataatggcacccgaaatggacgacagcaccgcatttaggcaaacaaagtgaagtgctgccgccttggcattggccatgtcccttcgcctttgggccaaagtgttgttgtgcatgccagcggtacattaattcgcactcataaataacaccaacgaaagcgaaaggaagccggtcgcctggctttcccaaagtggaaatcaatgcagtccaaaaatggagcagttggataagatggggaaacaagtggtcagattgtctgatttgcgtttttttttcagagctggtctaattgctcacgccaggcgaccagatgacaaatggcagcactcggaaaagcacgccaacataataggcattataaacgcaggtttaggagcacgcaggtaaggatgatttgccctctaaataggaaaataaatcaagggattagtattagtgtttcagattccaactggccattctcttctatacctaaaacacttactaacaatgtgcttgaatattttcatatttaatctcagtttctaatgttttcccaatagcattgcccataaattaccaccagtgtcgccatatttctgttagtgcctccgggcggccgaaaagtgagctgccaaaaagcgtaatctctgcctgcactcgcacttgacttgatttgactcccccgccccataatggccacagctcacgcgaggttggatggctgtgggtgtgggtgggattcgagtgggattggggcagtgacaggcggtaagcgatgagtggttaggttgacagccggtttgctagcttcttatctggcgacccgcggctgctagatttgtgaactgtgctctcggctcgggaatcaggcatcatcctctcctgacatcgctgccatggaatggatattaaatatgcaataaatttcccgtgctgagtcacagcatagattcagttgtcagggaatgcattgagaatgactcaaccttttggaggcgcagggaaagtgatattgacagcgctgaaattggcaaaaaatattgctcaatagctccgattaaagggggcacatatctctcgaaaatattccacaaactatttggtcggaatttcaagatgcttgcgcttacgtcagcatatgaagggaaaatacgcatcgcatttatctcactgctatctgattttaccacttcggttgcggtaatactagggccccaacaaagcaataactctaaccaaataaaataaaacttagccccaccagttggcacccaatatgcatcaccatcgccatcgcacgatgatttaggcacttcatcctccgacgtcgtgccacacgccacatggcaggccaggacaataaatttaaatggccatttccagcgtggcaaaacggataataacccatttgaggtacggacacactttttccattaaggccaaaatacaaagcgatgctcgctcaccggcaaaatatcgcccaagaaggcgtcgcaagggaaaggcgtaaaagggggcggaattatagggggcggctcttgtggcactcacatattaagcatacgcacgattggcccataaaaatcatttcactattcatggcgattgttaactgtttctaattgaaatcgtgtcgacgctctatcaagcgaagtttcctcctaggagtccttcttgtgttcctttcctaatgcgttttctcctatattacgtatacgcccagtggcgcttgaaacgaaaacgaaaactatttgaggaattacaaagtttagataactatttctaagtcctttttaattgaaacattacttggtatggcttacaaagcctgcatgagagctttctctttttgcaactaatgtgcatgttacgtatacgcctcgtgtgcatatatgtacttattttccaagctgcagcttgttctgccactcataaaagggttaatttccattttaaatgttttcaattgccaccgtgtcgaggcgttatcaattttttatcaaacgcgttgcgataatttcgtcacttgctgccaactcatttgcaactcaatttcaatttcccccgccgtcaattatgacattatcacgagcagacatctaagtttcaacttttgagtaccccacctcccccaccaagcccaaccattgtgccaattacaaagtggttttatctacatatatgtgcgcatatatgctactgatgtgttattgggagcgttccttgcaatttgcatgcccctgctcacatggccgtaattgaattagttttaatgcgatattctggcgataaggcgacacccagatagcgcttttattcatttatgagtggtcatttatcaactgcaactcgcacgattcacttgcacttacccaaacaaaaggccacacaaggcacgcgaaaatccgaaagatttagcgctgggaaaacaagaagaccagagagtcacattagcgaaaaacggcgtggaagagcagaaactacgagggaaacacaagttcatctctgttcaccagattactgaagagaaccactgccttgtatacatttcaagattctcagtttcattgaatatttaacaaagattattcttttctttttcagtgtatttgtttggcggctgcttagtgtctttcagcacacattcactttgctgaaattaatttgcactgcactctgcggttgccgctctttccccgatggattgcaatccgatggatttctgtgacatgcggtgataaaacgctaatcagccgccgcgctgctcccgttacctgggcgatccacctgtgcggcgggcggagcaggtgcagcagatgcgagctgcgagtggcgaatgtgcagatgcagatgccagatgcggaattccctcgctgttgcctcggcaatcagaagtcgggagcagcggactcgaatcgcaacgttctcgacgcgtcacatgaacttttcagactgagcggcaactcggaagcgagcggccagccgagccgaaaaaaacaaacgagagcggagcggccaaagaaaggcgacgccgacgccaacgccgccggtcgccggtggcagaggcagaagcagcagcagcagcagcagagatagtaccagtagccaaagtgggcgcatgtaataagggggagtggacccgaacaacgtgggcgtgctcccatgaacatccactcggaatcggaattggactcggaatccgagtgagtgagtgaaaacgaaagcggagcaaggcggtcgccactggccaaatcgggatgaggttgaaagtcgaaggtttgaaaaccactttcgatttccgctaagtgaatattatagaactaagttctgggtatgataaccatatatttcaaaatcattcgataatgctgggttatattcttccaaatataaatattatttgaataagcaagatgatgcactttcccagaacataagctttcttagacagcagtaaaaagcggtcggaaccaaataaatcgggatgtggccataaatcaatggataccataccctccatgcgaaacaatatgcctaaaaattaaaggcaatcaaatgtaattgccacaagttaattgaaattcaacggaaaagaaaccaacactttcggcataagagttaaaggtacattcaaaataaaaatatttataaacacagtctgctgcgatatatgggtctttcactcaaaaaatatttaaacttaaatagcaatgagcacaagcactctgcacatgagttcgcatacacagaaagcaggtggaatccacgatgtggtggccaaatttaactaaacaatgaaaaaccttgaggggtagcattgaaataaaatttgtattaaatggataacgaaatcaatcattggatgaaagcacacattttccgaatatgcattagatatgcttatccaacttagtataaaaactggtaacagaatg

SEQ ID NO: 9170 - DNA, 2737 bp, DROSOPHILA
acgcgtcgagaacgttgcgattcgagtccgctgctcccgacttctgattgccgaggcaacagcgagggaattccgcatctggcatctgcatctgcacattcgccactcgcagctcgcatctgctgcacctgctccgcccgccgcacaggtggatcgcccagtggcccccttgatggaaaagtgcttgcagacacagcatttaataatgtaagactgccctaagacctgccgttctgtaattacacgcgagttgcggagcaaccgaggcagccacgccactcgactgcgccaggacgccaagaaaggagacgaagccgaggaccaacaagttgccagcccagtcaggaacccccggattcccaaggaagcgaaagcagcaaaacggcagccgtggataccaaggcactgcgcagctcagccactgtgaaggtgacgtcggcggccacgcccccgcacccgcccccgctgacaacgacgacgacgcccctgacaatttgtcagccgccaccgcccactccgccctaccagcggctcaccaaggcgctgcaatgcgatccgcgctgcggccacgaggtgagtgcaaattgaaatgcctgtggcggcgatacccaaatcaaggggtccgtctccagctgggcgcctggtggcaggtaaccatcggccgtcgcattggcctctacagattctgtggcgacatcggacgcggcaatttctcgaaagtgaagctcgctgtccaccaactgacgcgtgacaaagtggccattaaggtggtggacctggatcgggccggactggatgccaaggcactgcgaatgctgtccagcgagatagccactctcgagtgtgtgcatcatccgaatatactgaggcttttcgaggtggtcgaaactctgggccgcgtttacctggtcactgagtggattcgcggtggcgagctatacaaccacatcacccaaggcggtccgctgcgggagattcatgcggccccgttgctgaaacaactcctcctggcagtcaaacatatgcacagtctgggctacgtgcatcgggacataaaggcggaaaatgtcctgctcctctccgaggatcgcctcaagctggccgacttcggtttcagtacccaactcatcaatggtacgggtgccaatcaaaagctcgacacgttctgcggatcccctccgtatgcggcgcccgagctcttctccgatgaccactacataggggcgcccgtggatgtttgggccctgggcatcctgctctacttcatggtggtcggaaacatgcccttccgggcaccaacgattcccggcctgaaagcagccatcctgaagggtgactatctgctgcccggccagctcagcttgccctgcataagacttatacaacgcatcttgattcatatacccgcccagcggccaaccatcgacgacatgctgaacagccagttcgtgacctgtcccaagctcagtgccgatctgatgcagtgggagatcaaccagcacaccaagccggtcaagaggtccatcttctgggtgcgcagcaagtcgcatcggctgcggaagtccgcctcactacgggatcgatacgcggaggtggtcaagaagccggccattagcatgaacaccaggcagcaggacgagatgtttgtgcagaacttcctgcaaccgatcgagatgggacacgaactgttggtcccggtgtcaagtcagctgaaggagccacagtccaccgagcaggcgaagcgtccaaccagaaggtacatgttctgcggcagcctgaagaagaaggtcacgcccatggaaacggaaccggagaagcagctggccaacggtggacagtcaatcggttcggccaagatcaatccgtggaatgtggaggtggccgaggattgccccctgttcaagaactacgacgcggagacgggcagctgcgtcatgctgcccacgaacaccgaggatctgagccagctaggtgccctggagttcgaggcacgccagatcctggccgagctgggcctcacctccgagatgctgatcaacgccaggcagagcgggccgcgctccgacatcattggcgcctacaggatcgtggtcaatcggttgcagaagcagtcctggctggcacgaaagcacgtggagatggcactgcacagcgagcccaaggtggagaagcggattgagaggtcgtgctgcatactctaagacatccgaaaatagttgttgaatgttcatattactctcctggttccgctgggtctttgagttccccgagaggaaaggcaaactgggtgtgtcgcttttgaaaggaatctaaggttcaaggaactcaaatagtagctcaaaaacctttcctactagaggctagtccgtttcgatcagctttaaatatccagtgcttgattttgaaccaacaaattgagattagaaaattttatagtgaatacaacatagaatttaaccagaatatcgagaattaggatggatgaattgcaaaagttaaatgcattcgaagcgcaagaaacataagtcgcttgaatatgaatagaaaggattatcttccgatagtaggagacagttggatactctgatctgcaaatcccagtttgcctttctgcgggaatcagcccggaaggccaaaggtcaagcccaattagtgtcaattcgccagctgcgtagccgcgtgtttgttgttaacgtagattcctgcatcctcatcctggttactcattcgagaaagt

SEQ ID NO: 9171 - protein, 550 aa, DROSOPHILA
MRSALRPRGECKLKCLWRRYPNQGVRLQLGAWWQVTIGRRIGLYRFCGDIGRGNFSKVKLAVHQLTRDKVAIKVVDLDRAGLDAKALRMLSSEIATLECVHHPNILRLFEVVETLGRVYLVTEWIRGGELYNHITQGGPLREIHAAPLLKQLLLAVKHMHSLGYVHRDIKAENVLLLSEDRLKLADFGFSTQLINGTGANQKLDTFCGSPPYAAPELFSDDHYIGAPVDVWALGILLYFMVVGNMPFRAPTIPGLKAAILKGDYLLPGQLSLPCIRLIQRILIHIPAQRPTIDDMLNSQFVTCPKLSADLMQWEINQHTKPVKRSIFWVRSKSHRLRKSASLRDRYAEVVKKPAISMNTRQQDEMFVQNFLQPIEMGHELLVPVSSQLKEPQSTEQAKRPTRRYMFCGSLKKKVTPMETEPEKQLANGGQSIGSAKINPWNVEVAEDCPLFKNYDAETGSCVMLPTNTEDLSQLGALEFEARQILAELGLTSEMLINARQSGPRSDIIGAYRIVVNRLQKQSWLARKHVEMALHSEPKVEKRIERSCCIL

SEQ ID NO: 9172 - DNA, 4372 bp, DROSOPHILA
agtttacgatgtatggcatacatatgtatatgttttgaactactcaagaaaacagatatttcacccacttaatacgagtaaactgacgtttgtgagtgtggaatcgcggcaggaattggaaaatcaatgaatgaaagccacataaattgaaaatatccaatcctgtcgtctgtgtgtgagtgcaagtgtgtggcacacacacacacgcacacaaacgcaatcgtcgaggggaggacataatgtgtagacggaggcagtttggcggtcctaaaagatggttggttacacaacaattcttacactattgacagggattagttggttgctgtaatttctgactgcgtatggcaagtagatatagatttctgatcccagatctcagatcgcacgctctctcacacgaattcgattcacacccaggcaaaatcaggtattcactgtacgttccacgctcggttcttgacacaacacacgcttcgatgcacaaccactttcaatcggtgcgaaataggaatcaggtaatatttacaattgacagcttaacaaattttcaaacgacgagtgaagcatttcttctcgctttccgttttgattttcttttcctttgtatgtatcgcctgacgtatgcgcagtgtggccgaacagggctagtgagaaataccagccggcgggtagatatactaaaagtgtattatttttagttaaaacagtgcattgtcacataaattttaatagcctctttattaaactatatgagcgttgattgccactatgaatatctaagcaatatattacattacaatatggcaattatattggcatttggtactgtcgaataaaataccaaaccttgcagtgctgcccatcagctataccaaaaaaaaacttggcagcattgcgcatcgtgttcatttgaaatttcgaaacacaaaacattataaataaattcaaacgaaattagctcgccatggaaatgcgtacgataaaaacagctagactttattaatcaataacatttattatttacagctgaaggagtttcgattgctcttgcagaccgcgcttgaatgacaaaatgcattagttggtttcgaaatattaatgattggctaacaattatgatacattattatttatacacaattaaaaaaggcatcgctgatttgcactacacaaatattattgtattttctcgtaatattagtaaaatcacagtgaaatattactgcacgccgtagagttgaaaatgtagttctgggcctccagaatgtgcatttcagttaaacatatagcaactaacaggataatgtaaccgctgtaccggatcgcgcgcaggaagtcccacagcttgtcgcagaagatgctcagcaggacgcagtgcagcagggcgtgcacgttgacgatgcgccacatccaggcgacgcagaagaaccaggtcgacttgaacacgtaatcctggcaatgcgactggttgccgctcacgtcctcgcgctccagcatgttctggtagacggcaatgtagcgattccacgccgtcgagctcagcagcagctggcccgtgaagctgatcacgttcttggccaccttgcgcgtggtggccttcatcttcggtatcatcatggtgggctccggcagcttggagtcgctcatgggtatgatcgagtagcccctccgcggtggattgttcttcaggtaaaagaatatgcccagcagcagcgcaatgcagccgagtccgtcgcacaggccgtccacatagtagccggaggtgccgatctccgagcgctcgccgcgtatgtgcttgcgcacgcgcgccacatgcccgtccaggtcgtccaggaaggtgcggatctggaagagcagcacgcccagccgccgatagcccaggctgtccgaggccaccagtttgcccgccagacaggccacgcccacatggaaaaacgatatcatgttgggcgtgatgaaggtggagcgcgagaagccgatcacgttgtcgaacatggtggccagcggggcgaacaggtagtggttggtgtggtccaacagaatggccttcacggtcacatggcaaagcggatttatatcacaggatatccaggtgtggtcctcgtaggacggctgccggtcgccggcggtgggtagtttcgtactggtgctgctgctactgctgctgctgctgctgctgctaccaccgatgctgccggacccggactccgaggtggacggacccacgacggaggcgggcagcgagacattcgtgtgatagttcctctcgatggcatagttgtggatgcgcaggtagagctccacgtccatgaaaacgtagaagatgatcagcaggaacagcagggtgagcaggatcttgctgatctgcgaactgggtccgatcatggtgacactttgaggtagcgcttaacactaagttcttatcgggctgatttcagggcgcagctgtggggcggaaagaagtgaagctgatcaatatggtttatcgaagcgaagtagttgtcaagataagccgcgcacggcataaaaagtttggcaagcaacatgcagggttttgaaatccccttctgaaattctgaaatcgtatatgcgatcataataatgctcagctatcaaagagtgaaagctaacaactaaccactggcaatgcgttcttatcgaaggaatttttgacactttggggagcgaccgcagtgacgaaagaggcggggagaatagagcaatatggtcagttactggtactggatgactaaatcagcccacttgggcacccacacatacacacacacaccccacctcagcccgcccagccgaagcagcgcactatctgttccactatctgcaggtatttgcggaagcttttggcgaggcactgggaattataggcgctattagtaaccttttaactgccaatgccgattaacggggcttctaattggctgcaggagtgtgcgtgcacgcagcaatccatcacacacacagcacacacacacacactcattgggcgtgcgtgtgttggtggaggggtgctccctgataagtgggcatatggtaatggaaccatttatgggctggaattggcgatcgaagtgatataggtgatatgggtgatagctgcggccattgcgttgggggaattggcactcaccgccttgctgaatcattgaaaacgaatatagactgtatcaaaacattgcagtatttattactgcgatggggtaatgcgagcaacttgttggagttgcagcctgcagacactgtggcacttagacgtagtcaacaatagcacatagatagatagttattgctaaaacacacggataaatgtaaaagtttatgttaattgttcgtaaatttcgtaaattaatggccgaccagtgtggccagcgtcgcgcaaaatatcgtgcaccagcgaggaatccagcgctatcgataacattcggcccgcgcgctttgggcacctccggtcactctaaccggttaaacttttcaacttcagtctattttgatagttttaaattgttgtaatagccattaattacttttctaacacaagaccatgattgcgcgcaccctgcgaacggtgggccggcaaggtcgcaaccttctgctaccgcgcatcaccgcctgtcgcccacttcacgctattccggccaacttcagcaaggcctacgaccacgacgggaagaccaaagtcaccatcttcaacaccgaaacggatctgggccttatggtcaccggctacagccagtacggcttccggctcaacaacgacatggtcctcattggccccatctccgtgtttcccaggtaggtggccttcgacggatgcattggctcacccaattatgtaaacaagtgcatgtgatttatgccatggcactctgatgatcatacaatcccaatcccaagcttagttatgcacgcctttgagtttattaaacagaagtcaaggatttattgggaaaagtcaaagagaatgacttcttcatttaaagtttcatacaaaaaaatgttgatgtaaaaactaccaatagttgttaaaggctttttgaatgctaatttaaattttaattatttcaataacttcttaccttatagcctctatttgtttaagttataagctttcgatggcttttaatagtgatattgtttataagtattaatatgtcataagttactatctgaagctaaagtttaattttatgttttactacttacagatcggttctgtcctggaacgtcaacagctttgaggacatcaacgaggacagcctcagtctcttccccaccctggagccaaagatcgacgtgcttatcattggcattggcgaccaagcaccgcccccagctctttccaagaggatca

SEQ ID NO: 9173 - DNA, 1669 bp, DROSOPHILA
cattaatttacgaaatttacgaacaattaacataaacttttacatttatccgtgtgttttagcaataactatctatctatgtgctattgttgactacgtctaagtgccacagtgtctgcaggctgcaactccaacaagttgctcgcattaccccatcgcagtaataaatactgcaatgttttgatacagtctatattcgttttcaatgattcagcaaggcgctgcgccctgaaatcagcccgataagaacttagtgttaagcgctacctcaaagtgtcaccatgatcggacccagttcgcagatcagcaagatcctgctcaccctgctgttcctgctgatcatcttctacgttttcatggacgtggagctctacctgcgcatccacaactatgccatcgagaggaactatcacacgaatgtctcgctgcccgcctccgtcgtgggtccgtccacctcggagtccgggtccggcagcatcggtggtagcagcagcagcagcagcagcagtagcagcagcaccagtacgaaactacccaccgccggcgaccggcagccgtcctacgaggaccacacctggatatcctgtgatataaatccgctttgccatgtgaccgtgaaggccattctgttggaccacaccaaccactacctgttcgccccgctggccaccatgttcgacaacgtgatcggcttctcgcgctccaccttcatcacgcccaacatgatatcgtttttccatgtgggcgtggcctgtctggcgggcaaactggtggcctcggacagcctgggctatcggcggctgggcgtgctgctcttccagatccgcaccttcctggacgacctggacgggcatgtggcgcgcgtgcgcaagcacatacgcggcgagcgctcggagatcggcacctccggctactatgtggacggcctgtgcgacggactcggctgcattgcgctgctgctgggcatattcttttacctgaagaacaatccaccgcggaggggctactcgatcatacccatgagcgactccaagctgccggagcccaccatgatgataccgaagatgaaggccaccacgcgcaaggtggccaagaacgtgatcagcttcacgggccagctgctgctgagctcgacggcgtggaatcgctacattgccgtctaccagaacatgctggagcgcgaggacgtgagcggcaaccagtcgcattgccaggattacgtgttcaagtcgacctggttcttctgcgtcgcctggatgtggcgcatcgtcaacgtgcacgccctgctgcactgcgtcctgctgagcatcttctgcgacaagctgtgggacttcctgcgcgcgatccggtacagcggttacattatcctgttagttgctatatgtttaactgaaatgcacattctggaggcccagaactacattttcaactctacggcgtgcagtaatatttcactgtgattttactaatattacgagaaaatacaataatatttgtgtagtgcaaatcagcgatgccttttttaattgtgtataaataataatgtatcataattgttagccaatcattaatatttcgaaaccaactaatgcattttgtcattcaagcgcggtctgcaagagcaatcgaaactccttcagctgtaaataataaatgttattgattaata

SEQ ID NO: 9174 - protein, 392 aa, DROSOPHILA
MIGPSSQISKILLTLLFLLIIFYVFMDVELYLRIHNYAIERNYHTNVSLPASVVGPSTSESGSGSIGGSSSSSSSSSSSTSTKLPTAGDRQPSYEDHTWISCDINPLCHVTVKAILLDHTNHYLFAPLATMFDNVIGFSRSTFITPNMISFFHVGVACLAGKLVASDSLGYRRLGVLLFQIRTFLDDLDGHVARVRKHIRGERSEIGTSGYYVDGLCDGLGCIALLLGIFFYLKNNPPRRGYSIIPMSDSKLPEPTMMIPKMKATTRKVAKNVISFTGQLLLSSTAWNRYIAVYQNMLEREDVSGNQSHCQDYVFKSTWFFCVAWMWRIVNVHALLHCVLLSIFCDKLWDFLRAIRYSGYIILLVAICLTEMHILEAQNYIFNSTACSNISL

SEQ ID NO: 9175 - DNA, 17789 bp, DROSOPHILA
ttaaatacaattcaaatataattcagacgtcaaaaggtttaaagttaaaatatattttaccttttagtgttatttatacgtatgagccttgaaaacacagttgaatatcaaacggatttttgttaccaacagattccaacagattctccaactttcgttttttgattgcctattcactcgaagatctatttccagtactatgatcctccatagtagagtcagctcaggatcttgtgataatccgcaagcaattcgacaaagaattcgtcggccagaacaaaatttattaaatcattgtagtcattctcaggatctctcttaactggcaatccgtaataacgtatttcattatctccaaaatacagtcggaattcagattaaatttgccgtttccgtccttttttataaatatacatacaaatatactaagcaatagactgaaatgaattctagaatttgaggaaactaattatgtacctttatgaatacttttccttacttgtactaatcaaactaatttttaacagatttttcatgccgaatgattacaatcttatttggatgatttgatagagcttaggaataatggttttaattttggattaaagagttgcgattaagaaacgaagatattatctagtttttgaagaacacagggtactttaaatttcgcacgcggaacgtcaaaacaagaagaagttttcatcaacactgaatttccgcttggtaatcagctgataagcgtgctcacgatagccgagttcacatccaacagatgtttcccttagcagggtttcagacccaaatgatgatttatcttattttgattaagctccaacacgcattgctttgcataattcaggtattattaggctgcttaatatacaatccacttatattgttgtgtccatgaggaacatcgacacgtgaggataaaaatatttatttatcgatatatttttactcttgagccttttgcacacccctagttgtgttccaccactacttcgcatggcacgcttttttccgtgtgctcggttcgttcggccatacaaaacacaaaattcaagtttaaaaactaaataggcaactaaaagggaagccgcagcgaataaagtgatttgctgaaagagacgtaagaaagttaatcgcatcgaaggcaccagaaatcggggatttctaacacggcgcgcgtgcgacgtacatacatacgcaagcgcacacacacacgaacaattacttgccattgacgcaaaagcgaaaaagcagtggaataaaggggaattgacaaataacaacgttttgcaagcactggactctggtcgctggtgttctttcattttgtaattgccacgcatggacgacgaagtaattgaaattagcgacagcgaacgcgaagaaacctcatcgaactccgaaatggatgtggaaataacgacagaacagccaaccatcgatgtcaaagcagagcaaattgtgcccaaggacgcggcaacgtaagtaaaaataaaaacgggaaaatctccacagtcgctttaaaaccagagataacagcctgtctgtgaatgtggttccaagttacttaaaaactgtagctatgtttatgcacagtattgtgtacataaggaaaaggcggaaaaatctggcattattatttatgtagctgtaaagttcctgaacataaaccaagcattttgatataaaaattcaatttaaatttgcgatattcgtttcgaaaatagtaatttaatgatagtaagaagtgctaaaactgcaaaagaaattgaaatgttttaagtacattttcaaacaataagaacggctagttgaaaacatataaactgcagtcaatgccaaactgtgcgataacagttatgtacatacatacataggtgttaaagtttttgtttgcatttcggttttatgtaatctattgcccgggtctctacctctcactccctccccctgtagcattgccccggtcttgtcgcacccatttggcatggtcatgggcagcagccaaacgtagcaaataagtatagataaaaaaagcaaaaacaagatataaaacgtcagcgacgccaacgcacacgccctgcagtttacagtgggcattccgtagaaaagatctgtgtttattatatacgtcatacgtttccctgtaaagcattgtattatataattacattttcatacaaacatggttgagtgctaagtgcaattttcattgtcaaagctttcgccgttaaaaacatttagaaatgagatattaaacatgtttgatttaggaaggttctactgtaatgccattgttgttgctaggtgcgctttgtttagttcttgtttgaaactggttttactttccgtttgcccaccaatgtttctcaatgtctatctgtgtgtgtgtgtgggcacgttacattttgagattcgagcctctttggtctcacaagctggcattaaagtaacagttttagagtgactagagattaaagtcaaggacagagtattgcccatgataacgtaatttaaatttaatttcatcattgctctagaaaatccctaatttttcattttcatttatgtagaattattaaccgcttaaatggagcacattattgcaaatgtgccaacataaacagttataaatttgtctttggcacgcttcatttacgtttatttttgttttccgtatttccacacaaaagcgtcgaggaaaaacaataggaaaaataaatttaaacagctatttgcatttgaacggacgcgattttatttatttccgtgtttacgagtaatcgaagctgacacttaattgaaaaatgggaatttatttaatttttggaaattcgagttcagtttcgttgttttggcattgatatactttttgccattgttgtggcgcttattacgttctctgctctacgctagaatttgcgtcacctgttgtgattaatcgcatgaaatacagaaagaaatccaatgaggatagataagatttgtatgggaaatcgtcaggtgatggcttaaatgggatacaatctattgaccaccagttttgcgtgtaaaactaaatgcgatcaactggaggagtttcaaagtcaagtaaagtcatcgccaaaaaaccgaaacacaagacaatgccaaaagttcggggcaacctacacacaaagctaccgcaaaagttggccaaaataaaacttaatgtgaatgaacccaagcgcaaaatcatacgctccgctcatatatcttaggccttcatcgtttttctaaattccattagtaatattatttcgccgttttggggttcaaggactgactgggcacaagaagttaaacaaaaaaagccggaacaatttctctgactcatagtcatggaaaaaagatgtttattattgtttttttgttgtttgcacttacttgggaactcgataatgacgatgggggaaagagagaagatgatgagggaacccgtttgcacatctacatctatgagtcaacctgttgataaattagaaattccgaaaaattgcagcattcagcctattgattttattcgccttggtaaaaagaaaaagaactgctttcgcttatatatagataccgatgtgacattttggccgtttttgagttcaaggtcaaatgccaaggcatcgttcctgcctactcgattattgtattcaattattgaagctaatattttctagttacagtttaaaaatcgctgagcatttaattagcttaggtaataacagtttgagcttaagttttgtgattagattaaagccttatcacatctgttaggcattacagcacttttgttttagttttgcttggaataagaagaaaaaagaaaaagagctcgttgttgtgattgcctttcaggatttacttataaaaaaacataacataaaacataaaaaaacatgaaaaacatatacttcctttgcatatatttcctttgccatttggaaaactgttgctcgttatctggaactacagtttggatagcactttgttctatttattggccatcaacaaagttgctaacgctttcggtgcagatgtatttcaacgtagcttcgacccaaattcgctttggtacaactttttctctatttcgtctaaacttttggccaactatgtatataacttcgagcaattagcttcaaactatgtagccctcgaaaagttattgctcgactccagtcaaagtgggtcaattaaattattgattcgccgacgaggctagaaacagaacacaaaaccgatggtttgaatggtttccaatattaaatatcttgattgtttcgagaagctatgagcggatgttgtgggcttttgcaaagtggctgtcatttaaagataatagtaggtgaatagcttgaaattacgtaattcccatcttgtgggaatgttttttgtccagagacgtttgaatgatgcgccaaggtcagctgaaaacaaattatagcgaattggaaacgattcaatttagcgcaaaatggaatatatcaatttatagttatagttagccttatcatatcgcttgcaattacatggttaaatagaaaaccagatccttcgttgctcatgtcaaaaagcttaaacagctctgctacccattaatcgccggtcttgtcttcctttatctgtctggatcgaaactggtatccggtttagccagtctgccgcctatgacgactgtagctggttttagatgacagatacacggaaaaaaatgatatagttatagttacaaaattcgaatataaaatattgcgagtcttcaacattaatagtgtatacatacatacattaatagatgtcttttagttgcaattattgatactcatttcttttagacaatttaacacaaattatttttgcagtgtagacacaaagagagtaagagagagtgcatgatgttgagtggggaaaaggcatttccatttttagtcttacattgtaggtgttggcagcttgtaaattagcacttaacttcatggcaccattacagtttgaaactattgtagtttcgtgttttagagtcacttcttacggttttatgggaactgggtagacatatattattatatttatttgttatcttttgcacttgttatcttagctcgggaatttgtggcaatttctctggaaattatcaagcttttttttttctttatttttactgaattattttcttttgttttgcttttgtattcacggcaatggttggtggttttaattgcttggggtctgcactttcacttggttttggttgccgagtttgtaatgcaattccacttgttgccgcggaatgtaacctaaattgcttttggaattgccccaatttgactgtgaactggatctagttgggcatgactttgtggtttcttcttgcatattcttctcatattcagcgaatcattatcacaagaggttcgtccacaaaaccgcaactttcttcctgttcccctgtggatgtccagttttgttgtcttgccatttttggtttcattaaaaaacattaattaaaatcagacagccagcagacgatatctcttgtacatgcctcggttgagatccacgacacgccttcatttcacgggctatatggtagatatacatatatggtctgtatagatctgtatatctacaaaagtgtgctttcttaaacaacgggaagtaaaaatgtttaacagaaacaaagcgaatgaaattgaggaagacaagaggagagagtgcaacaacttttcaacttttcaaaaaatcggattttaaaatgcaaatatgtgtatatgtatatactatacacaaatcgaatgcattttgctcattttgaattatgtttagtatttataagatttatttttactactacaaaaatattttactcaaattagacattttttatatgtacattcaaataaggatattactatgttctttattttgattaatccaatttaaaaaatttctaattaagagtcttagattcacgcaagcacaatttcccttttattatcagtctgttgtgatctttttgatgtggcgctcattttcgccaactgcaattcacgctctcctcctcttcgctctgcttgcggcgcttgctctctcgtttctctccacgtcagctgctttgctgcgctgcagtctctgcagcggcagagggctgcatcgaaggggatcgtcactctgcccactcactcagtcgcgagttgcagcagtgcgtcgatcgacgtcgttttccgtgctagtcgcgaaaattgtgaaaaaattgtgtcgcgaaaagggaaatttactgaatcaataggaaaacaaaggctccaagaattttcgctttgagttgtttgtctcctttgctgtgtcaaataatgaaaataatacgataatattgtgatgatcaaaacgtgtcttaaatcgaaatcaaataattattccaaaataagtgaacatagacgacacatacatcaagcgatccagtccgtatctatgtgctcgcaaatagcccacttcgaccagacggaatagccaactaaatctttgtaaatccacaacgagccaacaatcgagctgaataaaatgttgtagtaagtattttagggatgtctgccttctttcgttaatcacctaaactaatgctaattaattcaaaaccgaaagtacagaaaaaaccaaaaataaaccaacgttgacccatccaaaaacacagctagcaacaaaaaaatagtgaatgttgtataaaaaccaaagcatttggtgtaccaaagtaaatatgtatatttatttaagtttttattacaaattacaaatgaaaagcatactattcacttcaatttatatggtaagaaatacaaaatccaattgatttagttgcgtgttagtattataattttgccaagactatatgcacattttgcttttaaatcgggtgcgtgtatatataaataaatatttctgtgtgtttgggtgtcgtctgctgtttgttgcatattcatttgttgcggtttctcacctcacctctgtgccccgcaaacgccacgtgcagaggcgttgaaattccaaatcaattgatatagtcacattaaaatgggttgaataatatggctgatcagttagcaatcaagaaatgttgctattttatgtgaaactgataaaattgtaaaaattgcccatgaaaataaagctttatcaataactgactgacgactgatattcatttaataacgataaaaaatgagaacgagaacagatgcattattccaccaatttatcaatgttatttagctgtctacaaagtatctaaaaatacacattcagataagagcttttataacaaaaccaattgataggaaaatcacttgaaatgaaataaataggaaacacacaattattattattaataaaacagctacccaagtttatttatacgcagacagttaataatattaattttactgctaaagtgaaagtcattatttaagggttgagcaacacttgaattttgttctatgatacatttttcaactttgatttttcgccagccttttgcccttcacacacttttttcgtaaaacccgcagcaaagagcattgaccagtgtgatcaaggcaaaaacagaatatatcagcaataaactgtgagaaaattctacaagctaaaatattattaaatcaaagaagaatttcaaattactacaaatgttttaaactatggctacaaaagcaatattaaatgcattcaatcaacttaaaataaaaaaaaaatagtttaaaaatcaaaaagacgtgcgcatgtttttctctcgctgtgccgaaacaaaaaaaaaggcgttcggaaaatcttttcgacatttctcaatctctttaaaatgtcagagcccaactgggctgccaaatgcactggctgtcgaccattttagactctggttttcagtcctttctcctaggagagcatttgcctctttggggtctcttggcacatgtgttggccccaactttttgggcagcaaagctttggcatatggcacattgaggtcgccggcgcaaattcttatccaaaaaaaaaaaaaaataaaaaaaaaacaaatgaaaacacaaaaaactgctgcatgtggaaaatatgtacaatgcattgctaccgcactataattttggtttttgtgttgtctcttagctttcagctattttttttttgtttttttcgggctgggtgtgtcgtttattgccccgacataaatgtttttatgccccgccattgttgttggcgtatctgctgctcatgttgctgttgcagttgcaattgcagttgctgtgggcgagcagattgcgttttaaattgcagtggcattaaattttgcatgcattttattgcagttgcagccaaacaaatgactcacatgggtaacccgatccattttgagtacgaaaactctgtcccaaaatgtatttgcagtcgagaattataggccattgtggcgtgtgtggagtggtcctgtctgtgaatatgccaccgcctcctcgtggaatacttaaaattatatgtttggagacgcaattttgctgctcttggtcatatttttatgggccactttgtgtcaagggaaaatgcatttaccggcttatgatttacggtttgttttctttggagaaaagtggaaatttatcgtgtgcatgttgggaaaaatttgtgtaatttcattttcttttatcttcgaaaccaaaaatgtttcaacatgctatctttccttaaactatcctgcgatatgaatgtatatccaaatgtaattacataacaggcgatgaaaattgtagttggtggtatttatatttaatcgaaatattgttacattttatatgtacatatatagcctcgcaattcccattgcaactaatctttcgtatctaattgtcacactctatgctaaacaatctgccaatcaatcgaacttttagcacgttttcaaatagatatgtcgtattaagttaaaagcaaatattccacaccgtcataaatccgatgtcatacgtgtacgtgtatatttttattacgtattgtgtgtgccataaatagcaagcaactctggcaaatggggagaacccagccatttactatttactactatttccccgacttctacccagctaacaacacatggaattaatgggtcggacaacgacccaaaactgtggaacataaattcaattgaggcaagtgtcaatagaacacgagctcatccatttgtaagtgttctataaccatgatgatgctgcttctgatgatgatgattttgatgctgatgatgatgggggcgatggtgagacaaacaatcaattatgtattctatttgtttgcataagttctgaacccacttttgtgctgacaatggtttgcaagctcatgtctgctccactggcgagaaagtaatcttcactcttgaataaaatttaaaattaaccaattaagtaaaaaaaaaatgtatttaaaaagatacatacaaatgtttgattcttttccaaaacattttcttaaatctcaaattgttcacacctttttcttttgagtgtatagaaaaactggtgtatttcgaactggttgtttgtttagttagagcccccctggaaacggctcaactttcagcaatttggcttaaactttcaaaccgacgactcttggctaggttcattaactttgtaatacgtactctctcgaacatttccctaaagtttcgccccattcttaagctggcttttcttttatttattggaaacttcttctccttattcacttaagccatggctgctttggctctgcgcccaacagtgtttttgctttactcgctccctttattttcggccgccattatgtctgcacagcatttccggttcacgcagttgggggcaaacacaaaaaaaaagaagggaaaaaaatccacacattcacagaacccgcattgacctactgtgcgtggtccacgtgagtcacaataatacagtacaaaatggctaacataaaccacaactcttgctattaaaaatgattattatttaaaaatacctaaatgttaaaatactactgaaaaatgtataccatcccatagcaaaaatgaactgttatcaaagcagtcaaatttgtcttacgcacgctacactgtaccaaagcgagtatcatcttggtgttggtttgtatctgtgtgtacgttcggttcttgtggcaagcaatttcaacttgtggcaggtcatgtccgctgcccgctgctccgcccacttttccacgcctccctaagcgtgttgtgatgggtaaacgggtaaactatttgatattcactttcgcaaagggtttgttgacttgcgcagcgttaactgaagtggaattcgaagggtgttgccacaaaatattgacttttgttgcatgcgtaaattgcaatgtctgcattatttataaattccattaaattccattgcaatttaagttgaataagtactgtttgatatcattattatatattatttaaggtagagagtatttgatgtttacttatcaagcatttagtttaaaataaaaatagcattaaaaatgttgtattcacatttcttgtatatttatagtttagaattaaattttgaattttattttaatagaatattgtagagtagagtatttgcattttcgtgttgtgttccctaaactttccctattcttattgaccaacaaatggctgtgagatggctagtagcattgtctggcgtattgttggagccacctgcattggagaggttccaccagccaccacccagcacctcctcacccctccccacaactcatgtttctctcacatgcgcgctgcacagtgcagcgaatgctttctttgctctcttagaaatggctctcttactgcagcagcaggcacagtgcatgcaacaaagttgttttcactgcagaaattacatctgctgtttacatctatctttaattgtgtttagtaatcagagatgcaaacataaaacattttttttttttttagccatagttaggtcttaaaaaattatatttgtttttatttttttcccatgacgttgctgttactgcaacatgatggtagtagtttcgtcttcgttacttttggcgctcggcttgaagtttctcgacgtgtcgttgcattaaaatcatcgcccgcagcagcggcaacatgcagcaagcagcagcagtagcagcaacatcagcagcaccgcagcagcagcatcaacatcagtcgcttccgttggctgccagagaccaccagcaataacgaggtgttcgctaaaaaaaatagtcttttgatagccacttatttttgtagttttgcgttataatggtgcattacgatcgtaacaataatatagccagccgaatgggatctgtttaaaattcctcggctttctcatatgccgataaagtaataacactaaaagtctgactcctcaaatgctcaataaattgtatatgagttcggaggaatttacatttctgccgcggtaagtagaaatgctggatagaatgagagtttgccattcgttggttgtgccattcgtttgtcaaaggcaatttgatatgacaggatgctaatggaatgctaatggcggtgcactgggaagtttgatgatatatatgcggcggaaaagttttttttctttcggaaattgcaaaagtggagattctgaagtctttaagtaggttttcagtgaatgcaagttttatttcaactgcggtgaattgcatggcaaagttttagcaccgatatatcattaatttatgagcagtttattcgcagctttaatgttcttatttgttattaaattaatttattaaattcaaattttaaaaaccttacaaatggtatactaatcttaccatttagtcaagctttatccaaacgactcattgaattaagcatattactttaaataagtccaatgttcagaaatattttttaaaaattcagttaactttgtcttggagaagaaagctttcagtctcccggtgaaaattgaagtgcacaaatgtttgtaaaagtaatcaagcagagtgtgaaacttttcgagccaaaaactactcgaacctcaagtggtcccactgtagcaattgcgaatctggagctatctatcgcatcagttaactcatagatttgacaccctgacaatctactttgcatgattcttgcagcacatgtcacacggcgtccaagtttccctcgatggctgtgcgaaaagttttgtcatcacagacacccccctatttctcagccccttctccacccgacgagtcatccatattcatgagggaatgattattccgaccaactcacactatatgccatcggcatacctcgaatgccctgctactaccattgacttcgcttatcgcgcattgaactctgctgtgacctgcaggcatttgcacatgcggaccaacacgtacgcacagtgcgggtcacaatgctagcaacaaaggggctattaatgaattgttgtgtaggtgataaaagaaattaatgggtaataactgctttgtactgaagcaagagttcagcaaagatgttatgagcaacataaaaaaggaacatgaatgaaatcattttaaagatactattattatattagaatttattaaagattatagtatgcctaactttaattaaattgcttggaaatgctttgctggaatcaatgataataaatattggaaagctttgatccgaggaactaacaatttgagagcaaatgtaatctatacatgcctcctatatttgcattgcatgctttgcattcattcttctgcttgcagttgttggctcttttttacttcgctttccgtttaccattttttgttacctgtttttctcctctttgcctctttgtgctttatttatctagcccgggcttttatgtttttgggcgtgccagtccaacgatttctgcacctttcgccgctgcttaatttaaatcagctctccagctttcatcccatttttttttttttttgtttgttcgcaacgaatgcatgttgtaagtatccctatttttttccattgaagttgaattgcaaatgcaaaccgcgttgcctacttttatgggtggcaattgggctgaaggacctcgcttttgggcggcagaattgaaggctctaacaaacggctttctaaaatgttgcccaatcaagcgcaagcgaatttttgacttttatgggtttctctaattgttatgcaaaatgctgctgctgctgctgttgactgcagtcttagatatccaaaaccccccattttggccccatttgcggctcgggccgcgaccgctttgacaagttatggcagcaattaaaagttttgtgctggagcacttgaaaaaaaaagtcacccaaaaaccacccaccttgcctacgcgcccccctttctttatttgtctgccggcggagcaagatgaaaaaaaaagtgtgagcaatgcaaatgatttccattttcagtagtaattaacatcttttgtttgcacgccgtatcttattcgcatgcatttctcatccgtttcacgagttccaatcaaaagtatggcattaaaagtagatggaatgttggttagaggggcttctaaaataatcctactgtgaattagattcatattaaattgaatattgaaacatgttctaaattcatagatgtaagcatgcaaaaaaatggttgcgaagttttgaagttttgcttcctaaatggaaaacaaacagttttaataaaacttcctaatcgagcagaaattggaaaagcattgaagaaggtgcagtgctgaaacccctcagaatttctaatatatcaatgtatttctaatatgcacaccaatgaagatatataaataagcagcaaggaaaccaaaaccatgaacaaataaataacaaacaggcggagtgaaaagcgagaataacaacatagagccatagagcacttatgccccgcaatactggcatggtgacaatggtctcggtacagtaaacaccctggctggcacaactccaagtgggttttgtgtttcgagagttgggtggaatggtgggtggagaggtggagaggtgtagaggtggagggcggcaaaatagggaatttctttggctttcgggattctttggcgtaccgcattagtgtcgccctattggcggccattgtgatgccataatttcttggcccatttgagcttggcgcaggttgttgcacttccttcaaatggaaaatcggacagtgtgctaaaatggaatggaagccgtcagttaatgggagtggaaattcatcggccaaggcagacggatgtccctgccgagcactattattaattgcaactcaagcttaggttttttaaaaatgactattgtttttatgcaaaccaatcccttataaatcccaaataaacgttgagtttttaaataattgtaaaggattttatatatacatatatcaacaaggatttaatgttgcaaagtattgtgatgtacagcatttaatccgtttgcgcattttaataatccgtattaaagcatcgcaaccgttaactgtcattaattccattaatttatcattatctgatgtcgttttaaatgaaaatgcactttatgcatcacatttcgagtcactgtgcactttgaaaagtccacgtctagtccacagccagcggattatttcctgttgcttttcgttgtgcccgttttgtgcatttccacttgagaaggcgactttgccccgcggcagttacttcgcctcgctcgaagacgacgacgacgacatgaaattaaaaattcaaattatgtagactatttaaacgaccgaccgattcttttgtgcaattagcctaagcccccaaggattgaccaagaaaattgtttttcaccaccacatctctctctcgctctctctacttgcagcattgccgaggagaagaagaaactgggcaacgaccaatacaaggcgcagaactatcagaatgcactcaagctctacacggatgccatatcgctgtgtccggactcggcggcatactatggcaatcgggccgcctgctacatgatgctgctcaactataatagcgccctgaccgacgcccgacacgccatacgcatcgatccgggcttcgagaaggcctacgtccgtgtggccaagtgctgtctggccctgggcgacattattggcaccgaacaggccgtcaaaatggtcaacgagctgaattcgcttagcacggctgttgctgccgaacagacggcggcgcaaaagttgcgccaattggaggccaccattcaggcgaactacgatacgaaatcctatcgcaatgtggtcttctatttggatagtgccttgaaattggcgcccgcctgtttgaagtaagttcgcaatggaatatgatttagaaactcaatttaatcgaaactgattctttcagatatcgtctactcaaggctgagtgccttgcatttttggggcgatgtgatgaggccttggacattgcggtcagtgtaatgaaactggataccacatcggcggatgcgatatacgtgagaggtctgtgcctgtactacacggacaacctggacaagggaattcttcatttcgagcgcgccctgaccctcgacccggaccactacaagtccaagcagatgcgcagcaaatgcaagcagctcaaggagatgaaggagaacggcaatatgctattcaagtcgggtcggtatcgcgaggcacacgttatctacacggacgccctgaagatcgatgaacacaacaaggatatcaattcgaaattgctttacaatcgggctttggtcaacacgcgtattggcaatttgcgagaggccgtggccgattgcaatcgagtgctggagctgaatagtcagtatctgaaggctctgttgctgcgagcgcgctgctacaatgatctggagaagttcgaggagtcggtggcggactatgagacggcgctgcagctggagaagacgccggagattaagcgaatgctgcgcgaggccaagtttgcgttgaagaagtcgaagcgaaaggactactacaagatcctgggcattggacgcaatgcgtccgacgacgagatcaagaaggcgtatcgcaaaaaggcgctggtacatcatccggatcgacacgcaaacagcagtgccgaggagcgcaaggaggaggagctcaagttcaaggaggtgggcgaggcgtacgccatactgtcggatgctcacaagaagtcgcgctacgacagcggccaggatatcgaggagcaggagcaaggtgagaatgagattatttattgaataataatacgaatgtgggaaaatgctaatccttaaccttttcttttccacagccgacttcgatccgaatcaaatgttccgcacattcttccaattcaacggcggtggccggaataattcatcgttcaactttgagttctaggatcccaacgagtgttgttcaccaccacagagaagaagaccatctcaatcccatactttctgcctcatccgaaaccaacatacagcagcgcacaaattttgaactcttttacatatttcttttccaaaaagcaagaaaataccacattttgattatgttaacgaatgaatatatgccaagttatttgaaaaaatattctaaatcaaaataatgcaactaaatttccagtgtaagttcacatttttaaatgttctttcttggatttttttttcggcaacattaataaatcatgggagatttgtgttaaataaacagaaatatacatataaaaatataaagttgctatatcccgttgttgttggttccgccggccttgtgaactcttcgttcagcatgtatattggaataattgattaattaatgattaatgaaagtgtagccttattgtataaccaattatatttttacctcttaagtcagacacttaagttacgtttctaagttacaaaaaacaataacgcaggcaatttagttttcattttgcggagttaaacgatgaagattatatttgaagaaaataaatcaagtaaaattagaaacaaagaaaatgtgtgatggtcttaatatttggggattaaggaattggtgattaaaaagaagttgttgtttagtgaataaaagcggaaaaggtattatattaaacttttccagttcttttattttgatgttaaaaattagaaatgaaatttgaattttatgtgcggcgttgccagatcagcttctgacttgttgcctgcttttgggcttcatgtaaaatgtatgtgaaagctatgtagatacttttcgattaatgtagagtggtaactatcgataagtatggcgcgtttttcaaaatatttgcatttttattacatatattatttgaaattcaccatgtggcacttattaaatgtggcccacataaacaggaaacttctttgccatttaccaaagcttgctggaataataaaacctgaatttataatcccaataatcagtgacgcagaaaaacacatagtttacaatgcttgtcagacaaataggtacacacatttatttgttttttagctgctgcttacacattcaggaaaaactaattttggtttgcatttcatacgcactcacacaaacacacgatttgcatattgatgccaaacaaattctcgctaattttacacacaattaatttattcacatatagttttccattttttttacacatgacttttcatttcggtttggacttatgctgtttttgtttttttgtttttttttttttgattttgtt

SEQ ID NO: 9176 - DNA, 2210 bp, DROSOPHILA
cactacttcgcatggcacgcttttttccgtgtgctcggttcgttcggccatacaaaacacaaaattcaagtttaaaaactaaataggcaactaaaagggaagccgcagcgaataaagtgatttgctgaaagagacgtaagaaagttaatcgcatcgaaggcaccagaaatcggggatttctaacacggcgcgcgtgcgacgtacatacatacgcaagcgcacacacacacgaacaattacttgccattgacgcaaaagcgaaaaagcagtggaataaaggggaattgacaaataacaacgttttgcaagcactggactctggtcgctggtgttctttcattttgtaattgccacgcatggacgacgaagtaattgaaattagcgacagcgaacgcgaagaaacctcatcgaactccgaaatggatgtggaaataacgacagaacagccaaccatcgatgtcaaagcagagcaaattgtgcccaaggacgcggcaaccattgccgaggagaagaagaaactgggcaacgaccaatacaaggcgcagaactatcagaatgcactcaagctctacacggatgccatatcgctgtgtccggactcggcggcatactatggcaatcgggccgcctgctacatgatgctgctcaactataatagcgccctgaccgacgcccgacacgccatacgcatcgatccgggcttcgagaaggcctacgtccgtgtggccaagtgctgtctggccctgggcgacattattggcaccgaacaggccgtcaaaatggtcaacgagctgaattcgcttagcacggctgttgctgccgaacagacggcggcgcaaaagttgcgccaattggaggccaccattcaggcgaactacgatacgaaatcctatcgcaatgtggtcttctatttggatagtgccttgaaattggcgcccgcctgtttgaaatatcgtctactcaaggctgagtgccttgcatttttggggcgatgtgatgaggccttggacattgcggtcagtgtaatgaaactggataccacatcggcggatgcgatatacgtgagaggtctgtgcctgtactacacggacaacctggacaagggaattcttcatttcgagcgcgccctgaccctcgacccggaccactacaagtccaagcagatgcgcagcaaatgcaagcagctcaaggagatgaaggagaacggcaatatgctattcaagtcgggtcggtatcgcgaggcacacgttatctacacggacgccctgaagatcgatgaacacaacaaggatatcaattcgaaattgctttacaatcgggctttggtcaacacgcgtattggcaatttgcgagaggccgtggccgattgcaatcgagtgctggagctgaatagtcagtatctgaaggctctgttgctgcgagcgcgctgctacaatgatctggagaagttcgaggagtcggtggcggactatgagacggcgctgcagctggagaagacgccggagattaagcgaatgctgcgcgaggccaagtttgcgttgaagaagtcgaagcgaaaggactactacaagatcctgggcattggacgcaatgcgtccgacgacgagatcaagaaggcgtatcgcaaaaaggcgctggtacatcatccggatcgacacgcaaacagcagtgccgaggagcgcaaggaggaggagctcaagttcaaggaggtgggcgaggcgtacgccatactgtcggatgctcacaagaagtcgcgctacgacagcggccaggatatcgaggagcaggagcaagccgacttcgatccgaatcaaatgttccgcacattcttccaattcaacggcggtggccggaataattcatcgttcaactttgagttctaggatcccaacgagtgttgttcaccaccacagagaagaagaccatctcaatcccatactttctgcctcatccgaaaccaacatacagcagcgcacaaattttgaactcttttacatatttcttttccaaaaagcaagaaaataccacattttgattatgttaacgaatgaatatatgccaagttatttgaaaaaatattctaaatcaaaataatgcaactaaatttccagtgtaagttcacatttttaaatgttctttcttggatttttttttcggcaacattaataaatcatgggagatttgtgttaaataaacagaaatatacatat

SEQ ID NO: 9177 - protein, 508 aa, DROSOPHILA
MDDEVIEISDSEREETSSNSEMDVEITTEQPTIDVKAEQIVPKDAATIAEEKKKLGNDQYKAQNYQNALKLYTDAISLCPDSAAYYGNRAACYMMLLNYNSALTDARHAIRIDPGFEKAYVRVAKCCLALGDIIGTEQAVKMVNELNSLSTAVAAEQTAAQKLRQLEATIQANYDTKSYRNVVFYLDSALKLAPACLKYRLLKAECLAFLGRCDEALDIAVSVMKLDTTSADAIYVRGLCLYYTDNLDKGILHFERALTLDPDHYKSKQMRSKCKQLKEMKENGNMLFKSGRYREAHVIYTDALKIDEHNKDINSKLLYNRALVNTRIGNLREAVADCNRVLELNSQYLKALLLRARCYNDLEKFEESVADYETALQLEKTPEIKRMLREAKFALKKSKRKDYYKILGIGRNASDDEIKKAYRKKALVHHPDRHANSSAEERKEEELKFKEVGEAYAILSDAHKKSRYDSGQDIEEQEQADFDPNQMFRTFFQFNGGGRNNSSFNFEF

SEQ ID NO: 9178 - DNA, 4325 bp, DROSOPHILA
taaaatggccagtgtttttttatattttatgttgcattcttgaagagcgggaaatttaaattgagaatttgtcctaaaatccaggttgcagaagctcgtatgtataataatatatttatttatttatataaataaaatcgctctttccatgtcttttagtttctatttataaacaatttgacaatggcccatagggttatcttagattttctaaacgtcatccaattgagaaacgttatgttgataacaagaaatccacgaaataaaaatgttattgtacgaaaaagaaataattgtttgttgagctttgtgggtttttgcaaaacaaaaacaacaagaaatatttacgattttcttatctacggtaaaaaaaacttgaactaaaaaactaggagataatgccgctcatcagatgtttacgcactttgtgccatttttggctagggtggaccaacacacaaatcagcgtttgagttaatagtaagaaacaaattccgtccaaatatacaacctaggatacgaaatctaaaacatgataagtgcatcttgtaagaaagacgcagtttgagaaactttcgacaaatacggaatatggtccaccctaaggcgctcaagcaatttgagagtggctcagttctcagttcagtgactccaatgcagcaacaacggcggttggagcaccagcgggcagagcgcgaaagagaggcagtggtggggctccaaaggcgtaggcaggatggaccatccaaaggggttccagatcgcctcttctgtataagttatccataaatagcttatacactgcatcctttatgagtataatgtggtaaatgtataaagaatcccggtatattaattggcaactcatctttaatttcggatcactgataaccaaccatattcccctgctatccccgcctttggtgacctggctgccatgtttcgagctgcagaactgtttcttccagccaccaacttctcagtgcaatcgagtcgttcgagcagagaagttgggaaatcccgtagaaaagtaaaactctaggaaaagagagatcgggaaggagagatagagcgatcatgtctgtgaatgcggatctgcagagagagcgggcggcggccaccttggacagcgaggactttgcccgctggtgggcgggtggctctgggcagctggaggagcgccgcgccctggaaaggcgtttctatgaggatcccgacttcgcggagccagtgcatccgagctgtctgtcatacaaggagcgctacgaacagaccgtggcccgatccacacgcttcctggccaaactgcgccaatggcagcgggagaagcagccacaacttcagcttagtgtgaatatgctgagggactttcggctgctactctccggatccctgggcacgggcctcttccagcagagcttcccccttcgggtgcatttctccatgttcatgaccaccttgctgagccagggaaccgaggagcagcaggcccagtggctcaatcgatcctggcacatggacggcgtcctgggcacctatgcgcaaacggagctgggtcacggcacctttgtccggggcctggaaacccgagccgactacgatcccatcacgcaggaattcatcctgaacaccccaacgcaaagttcatacaagtggtggcccggcggacttggtaataccgccaatgtggccattgtgctggcccagctatatgtgaagggcaagcattatggcttgcaatcatttgtggtgaggatcagggacgagaggacacacgaaccgttgactggagtcgatgtgggcgatataggacctcgcctgggtggcaatggcgttaacaacggctttctgggactccgcgacgtgcggataccgcgcaatcaaatgctgatgaagaacgcccaagtcctgaccgacggcaccttcgtccagggtagacctccgctgctgctctacggcacaatggtctatgtgcgggtaattaccgtgaaggatgtgctctttggactgctccaggctgccaccattgccaccaggtgattatatagtttctggggattatgtttatcatagctgttattaagcccataaaacacattcagctcacccagggttctttagataataattatcattatctttaggtattccgtggtgcgtcgccagagccggattaacagcgatcagccggaggtctctgttttggatcacatcacacagcaggcaaagattctaccgcaaattgctcgaggagtgtcctatcgcctggtatccgattggctgtggcgcttctacgaggacgtactccgccaactggaggatgaaagcacgaaaggacgcaactccctgccggagctgcacgccctgagctgctgcctcaaggcggtggccaccgacgaggccagcgagggagttgatctgctgcgcaagagttgcggtggccacggattcctttcctcggcgaatttcgatagcatctatggtctgaccgccgccacatacacctacgagggagagtacacagtactcctgctccagacagctcgtttcctcgtccggcagtatgcggatagcttaaaacgcaaggtgctgccctccagtgtctcctatttgagggatacagcccgtttgatttggggcaagaatctggttgcgaattgtgtgcgagcgctggagatttcagccatggagcaggtgcgtgatgcttggcagacccagaagatgcaccaatccggcaaggtgagtcccgagatggccagcaatctggctggaaggcagctcacctcggctgccatagcccatgctcacgcattcttcacacgcaatgcactggagcaagtggaagcacttcgaaagaagggcgatcttagcccgaatgtctcactcatcttgggccaactggttgagcttttcgtcatcgatacattcctgcgacagtcgggatgcgtgctgcgttggaacaacggcatcactggcacccaactgcgcttcgtggagcgtcgctttgaggagctgctggccaagctgcgacccaatgcggtggctctggtggatggattcgattttcacgatcgtgtcctgggctccacgctggggtgtcacgatggccgggtgtacgagcgtctcatggaggaggcacgccgaaatccgatcaaccaggagccggtcaactcgtccttccacaaccacttgttgcccatgatgcggggaaagctgtgatgtggggctggtcttttgttttctacatacgtatatgttattcactaatttttgtattgaagttgaatcataacatttttttttaataaaggaaataggatttcgcaattgtttgttattttgcacttaccattttcaaactaacttacttgctcgcccttgttaaagttgtctttttccgatttattcgtatcgttttacacattacacatattgaattaagctattaaattagtttactcggataaataaaggctggggtacacacaaaaaaaaaagggatttgatctgaatcgagtctagaacatcttcttcctgaccgccgtataccgctccatgtagacatcgtagccatcgagatcggtgaactgtttcgagttgaacagattgccgtcgacggccaggttgcagattttcgagtccttgaggatcttgggtgtaaaggccgctgcctgaaggcagttctcctcgagccgcagtgtcttcagcttgggacaatcggctacttcctccgccagcgaggatatttggttctggttaaggttcagttcggtcacaaacagtccgcccacatcggcgggcacatcgggtgatcttgttcctggacaggtccaggacatccaagctgcttcagaccgcacagcatggaggggaactccttcagctgattgttgctcagattcacggtcttcaggtgcgtgcaattggccagggttttgggcagccttgtcagcatattgtccatcagcaacagcacctccagcttggccagttcgcccaccacctcgttgagttccaccagtcgatttccgcttagattgaggtgcttgagtagcgtcagcttgcccagttcgtcgggcacacgttcgaagcgattctcggagagatccagggttttcaggacattcgggtaggcccttagctgcagtgggaattcttgcagccgctgcaaggatatcttcaggattcccgtcttctgggccgtctccagttgttgttttatctgtttattgcccattgtagcaggggtctctccagggaattcaaggtttttcgcctaattaagaggtgggcgggtcgactgatgacaaatccagatctcacac

SEQ ID NO: 9179 - DNA, 2217 bp, DROSOPHILA
agcagagaagttgggaaatcccgtagaaaagtaaaactctaggaaaagagagatcgggaaggagagatagagcgatcatgtctgtgaatgcggatctgcagagagagcgggcggcggccaccttggacagcgaggactttgcccgctggtgggcgggtggctctgggcagctggaggagcgccgcgccctggaaaggcgtttctatgaggatcccgacttcgcggagccagtgcatccgagctgtctgtcatacaaggagcgctacgaacagaccgtggcccgatccacacgcttcctggccaaactgcgccaatggcagcgggagaagcagccacaacttcagcttagtgtgaatatgctgagggactttcggctgctactctccggatccctgggcacgggcctcttccagcagagcttcccccttcgggtgcatttctccatgttcatgaccaccttgctgagccagggaaccgaggagcagcaggcccagtggctcaatcgatcctggcacatggacggcgtcctgggcacctatgcgcaaacggagctgggtcacggcacctttgtccggggcctggaaacccgagccgactacgatcccatcacgcaggaattcatcctgaacaccccaacgcaaagttcatacaagtggtggcccggcggacttggtaataccgccaatgtggccattgtgctggcccagctatatgtgaagggcaagcattatggcttgcaatcatttgtggtgaggatcagggacgagaggacacacgaaccgttgactggagtcgatgtgggcgatataggacctcgcctgggtggcaatggcgttaacaacggctttctgggactccgcgacgtgcggataccgcgcaatcaaatgctgatgaagaacgcccaagtcctgaccgacggcaccttcgtccagggtagacctccgctgctgctctacggcacaatggtctatgtgcgggtaattaccgtgaaggatgtgctctttggactgctccaggctgccaccattgccaccaggtattccgtggtgcgtcgccagagccggattaacagcgatcagccggaggtctctgttttggatcacatcacacagcaggcaaagattctaccgcaaattgctcgaggagtgtcctatcgcctggtatccgattggctgtggcgcttctacgaggacgtactccgccaactggaggatgaaagcacgaaaggacgcaactccctgccggagctgcacgccctgagctgctgcctcaaggcggtggccaccgacgaggccagcgagggagttgatctgctgcgcaagagttgcggtggccacggattcctttcctcggcgaatttcgatagcatctatggtctgaccgccgccacatacacctacgagggagagtacacagtactcctgctccagacagctcgtttcctcgtccggcagtatgcggatagcttaaaacgcaaggtgctgccctccagtgtctcctatttgagggatacagcccgtttgatttggggcaagaatctggttgcgaattgtgtgcgagcgctggagatttcagccatggagcaggtgcgtgatgcttggcagacccagaagatgcaccaatccggcaaggtgagtcccgagatggccagcaatctggctggaaggcagctcacctcggctgccatagcccatgctcacgcattcttcacacgcaatgcactggagcaagtggaagcacttcgaaagaagggcgatcttagcccgaatgtctcactcatcttgggccaactggttgagcttttcgtcatcgatacattcctgcgacagtcgggatgcgtgctgcgttggaacaacggcatcactggcacccaactgcgcttcgtggagcgtcgctttgaggagctgctggccaagctgcgacccaatgcggtggctctggtggatggattcgattttcacgatcgtgtcctgggctccacgctggggtgtcacgatggccgggtgtacgagcgtctcatggaggaggcacgccgaaatccgatcaaccaggagccggtcaactcgtccttccacaaccacttgttgcccatgatgcggggaaagctgtgatgtggggctggtcttttgttttctacatacgtatatgttattcactaatttttgtattgaagttgaatcataacatttttttttaataaaggaaataggatttcgc

SEQ ID NO: 9180 - protein, 677 aa, DROSOPHILA
MSVNADLQRERAAATLDSEDFARWWAGGSGQLEERRALERRFYEDPDFAEPVHPSCLSYKERYEQTVARSTRFLAKLRQWQREKQPQLQLSVNMLRDFRLLLSGSLGTGLFQQSFPLRVHFSMFMTTLLSQGTEEQQAQWLNRSWHMDGVLGTYAQTELGHGTFVRGLETRADYDPITQEFILNTPTQSSYKWWPGGLGNTANVAIVLAQLYVKGKHYGLQSFVVRIRDERTHEPLTGVDVGDIGPRLGGNGVNNGFLGLRDVRIPRNQMLMKNAQVLTDGTFVQGRPPLLLYGTMVYVRVITVKDVLFGLLQAATIATRYSVVRRQSRINSDQPEVSVLDHITQQAKILPQIARGVSYRLVSDWLWRFYEDVLRQLEDESTKGRNSLPELHALSCCLKAVATDEASEGVDLLRKSCGGHGFLSSANFDSIYGLTAATYTYEGEYTVLLLQTARFLVRQYADSLKRKVLPSSVSYLRDTARLIWGKNLVANCVRALEISAMEQVRDAWQTQKMHQSGKVSPEMASNLAGRQLTSAAIAHAHAFFTRNALEQVEALRKKGDLSPNVSLILGQLVELFVIDTFLRQSGCVLRWNNGITGTQLRFVERRFEELLAKLRPNAVALVDGFDFHDRVLGSTLGCHDGRVYERLMEEARRNPINQEPVNSSFHNHLLPMMRGKL

SEQ ID NO: 9181 - DNA, 2421 bp, DROSOPHILA
aggacaacatataagcaatatatatacatacatatataactttgataccgatgtgttactgttgaggcgaactcaagtaatagatgcatataaatatatatacatatatatatttgtatttcaaagatgtgctaccttaagcgcaatcttgacccgaaaagctaacattagaaccctaagcgctgagttgaaagatgaaccaatttaaagatacactgatgcacactgtgttgttgtgttggtcgttttaagaaaagaaattagtagcgtatatgaagagtatttaatctcaaaaaaattaaatgttttacgttgccagtgtttgtgcaatacaaaattatataacaaaaaaatcgagtcgagaagttttcgaattgccgtttctaaacttggttgcccttcgcttcttatgcagtataaatatattattgaaagtcaaatattatataaagtattcatagataaagtatttgattagaccgtagtacatacatgcacactcattcacacaaaaaaacagacatccgttggtaatgtgtaaacttaaatttgcgtaaagatttgctgtttgacccacacgaaactcaaaccaaactcatcttaaatgttgcagcgtattaatataattaattatatatatatatatactatatacatatataccacaataaatgtttcacataaaataatttgttctgtagtttcaacaaaatcaatttccgtgcatttttcacaccctacacacaacattattattttgtatctatgaatcttgcgcgtagttagtatggtaaaattgaacttttttcgatttttttcaaacaaatacacaaacttagaattctatatacatttggcactcattaaccactggaatcttctacaaagaagtcctctaatagtccgttagaggaacttaaagcatagaacataatatatacacccatccccaacttttgaattccgtttataggtttatggcaaaagtggtaagtctttgctagtagtattcacttaccccccaatgatgcatgacggctttctttgagaacacacaaggatcatcatctaaaaacggtaccagattctctgcaaaaggacattggtgttcacataagcaatcctgttctggattttcacaaacgcgttacttacttcttaacaatagagtgcgtgttggcggtgttgcttttaactgcgaatcggattgttaagaatgagttaccatataaagagaatctgatctgatttagcctcacctttggcacaactaataaaggagcacggtgtagaagagcaatggtcgtaagacgaagcgccattttaatcaaatcggctaatccaatacactaaatttttattttttttttttaaattttgtaatgtgtttgccgaacttgtgtttctgatacaaacgagactacgacactgaagtctattgacataaatttcgaatgtgtccaaaaatcaagttgataaaaatggatcgtaggatcgtctaaaaatcgaattacatgcctcgttggactctaaataaaattccccatcggatggcattcaaggctagaaatgttaaatttttgccatttttcgctaaaaatcataatgttaccccttacgaaaattgcaaaattcgaaaaaaatttatatgttcaaatctgcagtaaagtggcagaatttattagttgggatcattagctgcataaataggtaatttttatggcatcgtgtcgatattcaagaaagttatgatgaaatcccctccgtaaaatatgcatttttgccaaatctcaatattctgcttaaaaataatcagttttttattcacaaaatttaaaaaaataatctaaacatagaatgccatacctcgccggactcggtaataaaattccccatcggatggcattcaaagctagaaatcttaaatttttgccatttttagcataaaatcatgatgttaccccttaccaaaattgcaaaattcgacaaaaaatgtatatgttcaaatctgcagtaaaatggcagaatttattaattgggatcattagctgcataaatacgtaatttttatggcattgtgtcgatattcaagaaagttatgatgaaatcccctccgtaaaatatgcatttttgccaaatctcaatattctgcttaaaaataatcagttttttattcacaaaatttaaaaaaataatctaaacatagaatgccatacctcgtcggactcgtaataaaattccccatcggatggcattcaaagctagaaatcttaaatttttgccatttttagcataaaatcatgatgttaccccttaccaaaattgcaaaattcgacaaaaaatgtatatgttcaaatctgcagtaaaatggcagaatttattaattgggatcattagctgcataaatacgtaatttttatg

SEQ ID NO: 9182 - DNA, 291 bp, DROSOPHILA
gtctcgtttgtatcagaaacacaagttcggcaaacacattacaaaatttaaaaaaaaaaaataaaaatttagtgtattggattagccgatttgattaaaatggcgcttcgtcttacgaccattgctcttctacaccgtgctcctttattagttgtgccaaagttaaaagcaacaccgccaacacgcactctattgttaagaaagaatctggtaccgtttttagatgatgatccttgtgtgttctcaaagaaagccgtcatgcatcattggggggtaagtgaatactactag

SEQ ID NO: 9183 - protein, 63 aa, DROSOPHILA
MALRLTTIALLHRAPLLVVPKLKATPPTRTLLLRKNLVPFLDDDPCVFSKKAVMHHWGVSEYY

SEQ ID NO: 9184 - DNA, 2901 bp, DROSOPHILA
atcgtctcagccgaatcacttaagtccttatcttccacgcttggtttcttagtttcgctcttctcccgcgagtgatgctctgaactcaactcaagtgtttccattatcttgtcctttttagagttatgtttggactccagtgaatgctccaatgagctgacctccagagtatctccctcgtctgaatgttctaccgagctgatcttcacattgtccccctcaacgggctctcttgctgtaccattgaatccaagttgtggcgcacttattctagatggtccatagttgttgaaaataaagctcatgtagtacgtctggcccaggacaatccacggcagagttgtccacaggcaggaggtcagcatggttacgttcttcagcatcaccggaaccgaagtgacggttcctatatggtaactgggttccctatatgccctcgctctgttgactcgtgactaatcttgttaaaagtgatgaagatacttatttttaatgtgatgactgatttgcctgattgccattagattcgacttggatactttgccggtggcacctttaattgatgtcacagttaaaaaaaaaatagtatgtaatttaagtagaagcattttaaattctatgatttataataataaatgaaatacctacaagaaaactccgattttttataaaaaattgacatattcaatcataatctgaacggatcctgtgatcctgtgttgtatacagatcctcagattttgaattcggttgaccagaactgtctttaatataataataataataataataataataataataataataataataataataataataataataatataatataataacccattcgacttggccttacaagctttctattaatgcaatcgatatgaaagtacgtttgcatttgattcaatatggttctatttaatcccttaacttaatccctccacttgctactcattaaaaaaagcagtcttggtattaaaattttattggcattttaatgataaaatcaattgaagtgtctgcgttcttccaaagtccctcgagcgaacctgtctgccaaaagtaagggcaaggacaaagttagggcagatcgttttttctcacgaccaagacacttacggtcagatctcccggttgtgttacatctcctcgtagtcatcttccttggctccagtttcgggtccatctggcacgttgcctgcccgttgagcaggcgcttcgctggccacttccttggcatcctggttctcctgactgctctcacgggctccattgtcccgctgattggagccggcattgctgccggaatgtccgtggctctcgctgctctcgtaaatggaccgcacgtaccgcccgccaaagctgtcgtcgatgctgatctcgtagctactgtgatggctgtgatcggtgcgcttcccctcctgtccggcctcctcttccttatcttgtcgatccttggcatccttgctgtcgctgtcatcgttgtcatcgtcatgaccattcgctggcgtggcatcattgcctccgctcgagtctttggagtcgctcttgccatcgctaccaccgccgctttccttcttaccaatggcatcgccatcggtagccaaactattatcagcagatgtagcgtggtcgtcattggggttatccgtcgcagcactaccgtcaccttcttgtgaatgaggcgaatccccggttccaccgccgggaccagcggcaccaccaccagcaccaccaccgccaccatcgacgccggtgcctccttcgccatccggattattgttgttgaaggcaaagttcatgtagtacttctggcccagagcgccatgctccggcagttggccgagggccagcaggaccaggtagccagtgagtagccgcatccgcatccgccacatcgctgcaacgctgagctgcccgggctgtccgaccgtcccttatatatagagatgaccgccgttgcccggaatcgaatcgatttgactgtggccgtggctgctcttgcccattaaaaaggggcagtccgataaaggcgtgtccaaagcagtgccgcaacaaggggggcatatgctggggaactgaaaaaacagtggcagttgttagtccatgttgctgcagtgcagcagctgaagcaacagcagcagctgctgcggaaacaggttggccccctgttgaagagagctacgtggaattcaatcagggccaatctataatagaaatctcatgtggcgcgagcttcgttttgcccaaaggggagtttgcagcagcaccaccagcagcagcagcagcagcagcagcagggggcgtggcagtggatatcagctcggcgaaggaaaaggagaatgaggagagtgggaggaaaatgaggtgcccactctcagcccactttcgatcgatcgtgcgttgcaaatatgaaaatgctactgcagcgagtgcggcagccaagtcaggcagctttggctaaaatcgtttttcattaacaattttaaaagccgcgcattaatcacaagttcacagacacacacacactcataaagaatacagaatgcaatacaggatgccctgtgcccacgacttatcgtggatagcacagtggatcaaaataacaaaaataacaaagttattttgataaatatgcatacataagtataagtacatgactaatcgtatgatagccaatatctgatattcagatgatgtactgattaatttattttagtattttaaacaatgtaaagattttagaagtatatttaaaaagggaattaaatgatacagtctatttttccaaccactaaccactgtgcaagtggccatggccaccataaatctaccgactcttccgtagacaccccactaattcttctctttggctctcttctcgttgca

SEQ ID NO: 9185 - DNA, 835 bp, DROSOPHILA
atgcggatgcggctactcactggctacctggtcctgctggccctcggccaactgccggagcatggcgctctgggccagaagtactacatgaactttgccttcaacaacaataatccggatggcgaaggaggcaccggcgtcgatggtggcggtggtggtgctggtggtggtgccgctggtcccggcggtggaaccggggattcgcctcattcacaagaaggtgacggtagtgctgcgacggataaccccaatgacgaccacgctacatctgctgataatagtttggctaccgatggcgatgccattggtaagaaggaaagcggcggtggtagcgatggcaagagcgactccaaagactcgagcggaggcaatgatgccacgccagcgaatggtcatgacgatgacaacgatgacagcgacagcaaggatgccaaggatcgacaagataaggaagaggaggccggacaggaggggaagcgcaccgatcacagccatcacagtagctacgagatcagcatcgacgacagctttggcgggcggtacgtgcggtccatttacgagagcagcgagagccacggacattccggcagcaatgccggctccaatcagcgggacaatggagcccgtgagagcagtcaggagaaccaggatgccaaggaagtggccagcgaagcgcctgctcaacgggcaggcaacgtgccagatggacccgaaactggagccaaggaagatgactacgaggagatgtaacacaaccgggagatctgaccacaggttcgctcgagggactttggaagaacgcagacacttcaattgattttatcattaaaatgcc

SEQ ID NO: 9186 - protein, 249 aa, DROSOPHILA
MRMRLLTGYLVLLALGQLPEHGALGQKYYMNFAFNNNNPDGEGGTGVDGGGGGAGGGAAGPGGGTGDSPHSQEGDGSAATDNPNDDHATSADNSLATDGDAIGKKESGGGSDGKSDSKDSSGGNDATPANGHDDDNDDSDSKDAKDRQDKEEEAGQEGKRTDHSHHSSYEISIDDSFGGRYVRSIYESSESHGHSGSNAGSNQRDNGARESSQENQDAKEVASEAPAQRAGNVPDGPETGAKEDDYEEM

SEQ ID NO: 9187 - DNA, 13549 bp, DROSOPHILA
cattaaacgtgggagtagaaaagttccgaatgacaagacttttgctgcatttgatagtttactttttattgtttcatattattcaattatattatgctattatgtatctctgttatgcactctctctgctcttcttttctcttctcttcgtgtttttacgcttaggactagagggttctgcacttcagttttgatttcactaaatttatattactttaatcgtactatataatgtcaccgtgcgattggctaacgcgccattcgctttgtgttctgcgtttgtggtttattgttttaaattaataccttaactgtcattacaattacgtttaattacattacaaatgttgtagttggaaatgcattggttaaatgcaaaaagaaattattacgtaactaactatcggtaactataattagaatttagttaagtgttcgttatcgaatgacaataaattacgaatttaccatccacggctgtgtatgtacttatgtgtgttgattatgctataatttcattatcgttactcatctgatgcatataaaagaactgcgcgatccgaaaatgcaattcggaattcgataacgtgtattgtggtgaatcgcgagctacgctgtagaaaatctctggcctaagataggagtacagtagaaatcggtcgtaaaacacatatgtatatcctatataaagttcagatatatatatcgtatatagactgggcagaaagggctgcatgcgatagttaaaaacgttttcgtatagtaaccacgcggggctttcttataatgtacacacacctagaagtcttttgacaaaaatacacatttatacacgcatatacagggtcctgtgaagagttgctcgcttttcgaattgctcgattctcgattctcgggtgcattgccatacaaatctaagtaggatactaatttggccagtattgcgtaggcggaggcgactgggtgttccgctgctgtttgtttttttttttttttctttgtttattttcttatttttttgttgtgaatgatgagcttaggtaattacaaaattagatattagttcggttacggctatcggtaagttacaaattacagtttacaaactacaaatacgtttcctgcttgtacaaaaattgctgcttgctcgtgccgtgtcctaaacataaagtacaactcaaatatatatccatgatatatatctatttgtgtttatcatatacgtttagcaatatattagacatattacctacgagtagtgtgtatgcgtactggtaatataagtatgtatttatatgcaacatccatctgccgtctgagtatttctctttttggtttttgtttggaattcgctgattatatgcatggccatgattcacgttgacattcaatgtgtgcacgcatgtgtctgtgtgtgggtgtgtgctgtgatttgttttgttttatgcatgagaatgtgttcggtgtgatgccgctcctcttcttccttccgtttccgcttacagcagtaaattttctaaatgcgctgcatactcatcggccgtcttgaactccctactttcactttcgccgtgactgtgaaatcaaacaaagtgaaaagacacaaaatttagtaatataaaaaaaagtcgtaaatctatctgctgctgaatttaaacttgctacgctttataattctttggcacaaaacttgtgagcaaattaaaggctcaaaacaaagtcgtattttatcactgtgcacaagtgcttgtggccacggaggtaatgagcaaagttggcaagtaataaaacgttaatgccaaatcaataggacacgtgtatgtacagacctgctgccatcaccgatttcccgcttcttgcgtttgcgatcctgcgagagtgcctccacgcacaggatgatcagcttgctgtcgcaggactggcgcttctgttcgagcagcttgtggccatcgagattgctggcaaagctgcccttcaagtggtcacccgagtgccaggcatcgcagtaggtgtccatggaacgctcgccattgggcagcgagccgtgccagaccatcttcatgggcctacaagggttattaaaaatatgaattttattttaaacgatttgggagcaatttagaatcctaccatgtagaatccgtcatcacattcttgccactgaagctgtagattcgcggcgcctgcgagaagaagccaccttggccattgaagatgcccttccacgagttgaagagcacatcgccacgagtgttcaccacgggcagatcccggtcagccggacgcacaatggtgtccagattctgtaccctgcagacgagagttaagcattccgtttatgcacaagttattgccagcatacgagcggcaattatacgcgaacaaacaaactgccatcaaaagatgtctgaagggcaggtgctgtgttcgctctagctctttgttcgtttatttatttatgctttttttccttacacccccaaacaccgaagctcggaaaactcctactgcaaagcctgccggtagcactgggtaaataaattgcacgaaattgttttcacaagcttttgttttcatacttttgggcgcgcgcttttttgccgcgttcgcctcgcttcaaatatcaagattatgcggcaactaatgagttcccaaagtgtcggcttaggcggggaaacgttgcgtatgagcaatgccccgtgcattgaaacggaaaattccacgaacttgatttgtgaaaaaatccaaatagcctgcgccgaaaaaaactaaacacgaaaaccggcaaagtacgcgtgaaaaatctaaagagagataagacacacccgccaccaaaaaagacaaccaagtactcacctggatgagaggaatgccttgaaggtgcccaggagtcctgcccgtcgtccctgtcgatagcaggcgaaatccgccccgcgaatcccctgcaaatcgccagtggagggctcattcagtgcggccacgcgtagctattccggatccaagaaaatatggcatgaaattaatgcggaatttatgtcaagcattttaagatctaattaatacagaatttaatagccagaaattgtttgcttaacaaagggagcgcaggcccaacccccggggactctgcagaataaatggtaccataggtacgagtaatggatagtaaaatatttcaaataattgcaggggctctaaggaaacaaaaacaaaaaatgacaaaacctccttccgggcaatgaacgaaacaaaaaaaaacacagaagaagaaaaacagcactcataaaaatgttacaataaaacgtgggcagaggagctcaaaggtcggatctagcttaattgaagaacagggaagagaactcaccattcgcggataccactggaaatgcgattttaatttgtttattattttcgattccatttaatttgtttgaagacgcagccataaaatggggtacaaaaatgttcataatttaataaatctaaatggaaaattccgagcattcgaacgaacaccgagacacaaaaaagaagctctcaacattcttgatttttggtttcgttgagaactaaactttatggattacccaaaagcaaaggacaaaattcaatcagaaagcgtctagttaaaaaagcaaatcacatagaaacacacaagtatatggaatcaaacatataacttatttgtctagataaaaagtaaagagtttccattggcttagtgaatatataaaatcattggatacagacaaaagcagaaaatcaaactacaccaattgttccgtgtacaacagaacttcaaatgcaattttcgctaattagaaatatttccattgaccagcaagccaaatcaaattatttattcaacgagtgtgcgtgtgcaaaaattcgtttggctatttgaaaatatgcccgttcggtttttgttattttttagtcgacactacgatatgcgaatattatggatttaattaccgtttcgtattcgggcgcggttgtaaactgcatttaatgacaattaattataaataagtttagtatgttaaatcgatagcatttgcttcagttcgtctcactggagtattcaatgtgaaattaggaacaagtagtgtgcggtgcatttgtgttgtaatttagtagctttcttggatgaatgctcgagttggcgaatcattgatagtaaaatatgtacttcatacaatacaatttagataaatggagaatcttaaaaaatccgttacaatctgtatataactatcaatagatcgccaactcaattagagtagaatacgtttttgttagatactctcggcgggaaatgacattcgaatgggaaaatcagtgtcagcgagcttttcgattcataaataattcacattgagcacatcaaagtcgagtacaattaatgcaggcaaagggaatcccagctaggacttctgatttcccttcgaaaacctcgaaattttttttgcccgccatcaatgtcattatcccaccgatggatgcgaatgcgattcgaatgtggcaagcaagtacgagtagatgtggcagcaagataatgacaatattccggcattttccactcaccgttggcgtattgagaaggggtggtggactgttgagcagattcttcgactgcaggtcgaatcgcatcgatggtgccaccgttgtgggcggagcgggcgtggcaatcggcaccagagttcccagctgaagaaagtggaatggatacaaagggagaattaaatgtggaatcgcaatcgtaattaaaagacgcagagacaaacaagcgtttggcgaatttgtaattaataaaacaagagctctgcgcaaatatgctcgtcagaacctttcaagtagttaatatttcagtgctggaacagaaggcaaacagccggtgttcggctccatgccattatgcgatgaaatcagcgttgtattgaaacttttgctcaaatatttgcattacgtgttgggtaaatatatatgtagcaactgtcgcccagatagatagatccccagttctcagcccttatagcccatctttttacccatcccaaaactgttcgcgggcccagtgtattagggtcaaattttcgactgccataatgcgcgacgtcgtctgacaaaagttttaattactattttgaactttaagtagtcgactcgtgtactgaaatctaattaggctggtgcttcggctaccatctcggtatctcggcagacagctgtgtacttcttggcccagacgaatgcgaaatgcaaatgggagtcccgacgacactggcaaagaactagaatactttaaaaaaatatgtcccggaaataaaaataatatattaactcaaaaaatgcaattatattgtgttcaatttagcacttagcaaatggtcatgaatgttgtatttgaaaaaataatattataattattttgtgatacccaacaaatgaacccaataagatacaaattgctttcattaaacgtattagaaactagccaactatttatttccgtgtagccaaactcctggcttgctgatattccggcaacaaagggtcctttgctctcgcccgattttgccatattactcggcgcaccctgacagttcatggtcctgtgtcgggttttgttgtcaaaagtatttaaatggtgccgtcaaaggcaagagatttcgttttcattccgggctgccttatgcacatgccagttgccaggactcgggactcagtatccaggaacctggagccaagaggcacaaccctgctgtgctgacttttgtgccctgcaacaacggaagcggaaatcgaatctcgagcattttttttttttcgtcttttttcgatgttgttgtgcaccagcaacagctccccaattctgagaattttgtacactttggcacaatcgaggcactagtttcccttggcccgcttttcattttccattctctgataatttcaataacgcaacaagcagtcgaaattgtggccactttaatgtttaaaaaaagctattgagaaatcgaccaattttgtgtgcaatttctgctgacccaagcaaattgtgtgggcgaaagtagggtaataaaaggctcccataaggcgcaagttcaccttgaacgctggtcgagattaattggaaaatttcgacattttaggagaattgtccaaaagacgacaataaaaaccttcgatttccgtttaatattatttttaatctgccaaaggaatttatggccacaaggagccatatgccatgtgaagcgatgcatgttttatgttccatcaatcaatgttttgagcctccgacggtctgactgactcgactgactcaaattgcctgccacatgccacatgtctcaggacactcgcacccctgtatccttatgtcccttaaccggctcaagtgaaaagccaagcgcaagtcaatataattgaataacgcagatatacatatgtatgtatagtatgtacacacattcacgtttcgggtggcaatcagtctgtacttctgcaacatttaatgtgcaaataaaaaacgagtcgatacaagggcaatgccaaacaaaccttactttatggcaggcaagaaaataaataaataaataagtaagacgagcttctgccacgcctgtctcatctattttagcatgcatttgtatctcccagtttgtttttgctcttcttttccaaagaggagcttatagccataatggcacaacaacgaaggactggaacgggatctataaaataataaccgcttgccggcgggctcagcggctgtcatatttggcattttaaaagtccctctgtttgcttaggagccagaaatcaaattgcagcccccaaaccaaaaaggatttggcccaaactcaccgcaatgtactgccatcccttgtttacgcgaaccagcagcgcctcctcctcggtgatgtaggccaatgtgcccggtggattcagggccgatttctgcggaatacgaacacatacataggtacatacatatcagcgaaagggttttttaaaaatacatggcagttgccaaatttaaccaatcgacacccacttttgtcatttcatcgatgttctggaaggtgactgcgccgggcacaatcttcatgttcatgttcgatgaggatgccgagaagtatggttcctcgccatcgacaagccccagggtctcctcatgcttgtgggaatgtcctggctggcgcggtggctctaaaaatgtataattcatgcattatgacacataatttcatatcctgccttaacttatttggaatttaacaagtgctaaatcacaatagtgttaaaatattggtttcgaacatatatttgttttttaagagtttcctttgcacacaaatacctctacagctctatagtatttgttatttgaataaataaatcaatattcgtgcacttaacaatgtaattataattaaaaagcctagtttaataacaatgaaaatcgatatcctgttgctctacaatttcaatatgagtgatattgtgcttaaatattacatctgcacattcacctattttctaaccgaatgaccggatttagacttctgaccaaaatattactggtaactaaaatatttaatatctgtatgtgggcaatgagtcgttggttttttccatttttgacgcaggaggcaaattcatgacggtgtgaaaattcacgcataaagaaaatgtttacacgttgtactccatcaatgggcaaatgagttaatgatgatgtgcaaatataaggaactcactacctattaatggagctggctcatgaaaatgctaatagagaaggtaatttagtaactgaacgttataagctggatcaaaaggtaagtcatgcaacatacaaaaggactagagctactctaatgtggtgaatggagtttcgattgtagattgtagttagttagttcgattaccggctgtgccatcgggccgatcgcgaagatcttgcagttctcgcagtgctttgagttcgtccaaggatgagcgcgctccttgatgacgaggacgatgcaaatgacatggattgatagcggttggataagtaaggtttttggctcttgggcaaggatattgctaactatttacagatattgaccactagctaactaagctcacaagtgacatatatacaatttatgttagtaatatagttttcattggctttctcacctggtcgtccgtagtaggatgcatcgccgaagaaggagcttcgcgaatccactccgggttctcctttggggccagaaatggaaagacccggcagacctggcggtcccggaggtcctggtggtcctggcattggtatgtactgcacgccgccgctgtcaccatcgcctccaccagtagagggtaatcctggaggtcctggcaagccatcgcgaccatcctgacctcggtctcccttatcaccctttaactgcaagagagtttcagtaggtgagtatatggagcacccgtggtgatccatcagcattctgtcgccccacggggcgtatacttgacatcgacttttggcacttaccccttcgcgtccgccggaatcaccctttggtcctttgggacccatttcaccctttggtcctgtcatgccaggacgaccctgtgaatcaattaaattggggtcataaaaatcagccaaatcaaacaaaaaatggctgctgtaaacttctaaggattgtttaaaatgcactcaattatttgaatgttggactaaatatctccaaaatgatatgagcacgtataaaagtttccagatggccagcgaaaatcacactcgtctattcagaagtaggaaagttggagagcaaattataagatcattgccagcaaaagccaacagccacatggaatgcctcgtgagaagtatataacctacttggctcaaaaacagttcctaacactgggaatcggaccaacggggcaacttgaactatggccaaaaaaacgagctaactttggccgttttcagaaagtgcaacaattctcgtagttgcaacgcttttgtctctttgctcgttccagcaattgagccaaagttccgtgccccacaccaaatttggctgcagaaatggcagctcatgtaaatacgttgcttgattttgatttttcggcgcggtaaacgatgccagttggcacagagaatgccatggtgtccttttgcattggcataccgtacacacgcgcctgcctctcaattcagtgactcggatccaaaaaaaaaaataaaaacggaaactttcctccttgctgtcattgcttagctgttgttattgcgaaataatggcggaatttctgggtaaactgcaattggaagcgtgcgatgcaccaactgccgcgtcctgaataaccgtgatgaaaatgcacttaaaatacttttcgtttgactttactccaccgctttttgtccttttttttgcagttcctcttgttacgcgactcaaccgctttcagtgccctgattgtctagattgcgagagcggccaggaaaattctgtttgtctgtgaacattcttagcatcgaggaatatatagcctaagtcatgggcgtaagtttagggaaacctaggttgcaatgtaaatatttagtatttaaaaacaatatataattcataaatgaaaaaaaaaaaattaaaaacatattttcccttataaaaactcactgcctgcacccatgaagtaatttgtggctacgctactggccagaatgggtgaaagcatgtgaaagttggtcaatctcatgaatatgcatgcgaaagttgtgagtggacgggactctctcagtcgctttcctctcccttcacttaccgagtgtccaatatcgcccatgggtccgggttttccgggcggtccaattggtccagtggcacccgttccgccgcgccgaccccgcatgcccttctcgcctttctcgcccttctcgcccttggtcccattggcactggcgaggccatcaagtccgccgggctgtccgacctgtccgggcaatcccggcagtccgggtgttcccggttcgccaggctcaccctttgcgccgctgggcccgtgtgcacctttgtgaccctgttttttggtggaaagatttcggtgagaaaggaacgcaagttgtgtgaaatgatttacggtcttaaatatgtaggcatacatgtgcccagggggggaataaaggaacacaggcaaatacatacgtgtatatatataggagtgtatgcgtgtgggagcctagaagcggcaacagcagttctctcgcctaatttggccgtaaaactcaatttcaaacgttttgtcgacttcagaaaaaaaaaaattcaattcaaactcattttgaaatcaaatcaattccgaaatcccacactcacacacgcaggccacacacgaacagagaaatttatgcaatgcctggtgacaagcccgaaaacacaaaaccatattcctttttcggggcagggaggtccttttgtggaaatttgcttccttccatcgactcaattcatccccagcgtcgtcttccacatcatcagcgccttaaatggttcgccataaattcgcacgcctgcagttggttttgggggaaaattggtggagctggctgatccggctgctactttcctcggtttttaccagtttgctgcgatggcgaaccttgctccacatcgccaacttaataccaactaatgaataattaataaggcaacgaatacacacacacatacacacacgactgctctgctcggcggctgtcttttaagatccctgttttttaggcttaatgaaacgtacctaattgtgcgtgtattcatacgtttaaaatgctaatttccatattagttttctcccccgaaaattgtaatgcaataacgccgtctccctgacaaattgggcgtgaatttatcataaaatcccaatcgatttttgtacttttttgtattttcatcaagtgtgtgtgtgctgtttgcataatttctttttatttcacgcacgattaattccgggtgtggccaccgaagggaataacttcttaaaaacgaccttgttacgccagattcctttgccacaagccgcataaatattacttatgtatatgtacacgtgtatatatatcaaaggtcgtgggtccaatttggatgctgtttttggaagagtaatctcgacacccggaaggtaaccgaactaaaacctaaagccgggaaaaaaccgacaaacaaacagactaacaacaagcacattatgcgagtcctggtcagagatttaagttttgaggttgcaggacataaaagaaataccctgccaaagggagccgcagagtccgagggtgcaaagccatcccaactaagctgctaaatggcatacagggtaatggctgggaagtaagcgtcgcctaagcaggatgagcttcccaaatggccaaaacttattatgaaagtaatgccaaaacgagaagtgaaaagaaactgaaaggaaccaaaatagttcctgatgggtatgtgcgttgcccccctttaagcttgtgatcatatcatatccactgggcgggccgtaatcattatcgcactgttacgtttatgaaagtgtcaagctacttgtggcccccatcgtcggacagaaaaatcagaagacacatccacatcgtcccaactgacgcattttttggccaactgctgactgatatttatgtcccaaattgtgtatttcctgcacaaatgactgcgactgccataaatatgaaattcgggataaaggagggatagaatggtaggagctcaactgaaagacttattactatctatcaaattgggtacaatttagcttgaactcaagtagtaatttgttagatggggcgtttatcctttcacggggttaatcgcttggcatttatgggagcacaaattgcgtaaagtatctcatctgaacataccgaagtcataacaactgaactattttttaatttaaaagacaatttttaggtcttaaaaacgattttatagagctttataatttatcaacacctaaaatacattatggtcttatgtcggaaatgcaaacatcttaccttctgcccccaaattcccgaccaaatacgattatttcccggcccaatagaaaattatcgtcgtagtcctgttttgctcatttggcaacccgaaaagcaacacagtccctgacgcgattgcccttttaagaagcctcaaaatcaattgagtagtcaatagagcagaagttattattattatatatttgaaacaacaatcgtgtaggcgggtgccccttcagaaacactttataatgcaaacacacacgcacacacatctacgggacccgggaaattgggggaggtcaggagaatttggagaaaacccgggccatttattagatgcccccatgccccctctgacttaccggatcgccacgctctcctttctggccggcatcacctttctcgccgggcacacctttggctcctggctgcgtcgtgccccggaatgcgcccatcgagttgaccattagggattcctgtgtgcgggtatgtgtgtaggcatagtaatttgttaaatatttgcttgttgtacaatttattttcgatacatgtattttcgggaccccccatttttctgatcgtttttcttcacagcgggcgtcccctttttgacgaaggacaccaccaggacaccacatgcagcaaaacacacggcggtgtatcaacggtagaaatttgattaatgatcctgttttttttttttttttgtgcgtgggaggaccttctgttggggtcgtaccgcttcttagatttcggggcggggctaatgatgccaagtggttctagtccattaaaggcggtggccatcgcttaacccccgacaaaccttttttttcgatttttagttgtgttttattaacgagtaagtggtggtgatggtaggtagaacataagatgaaattgttaaaatgtttataccttgaaggtcctggttggattccaatttatctgttatttatgtgttgattgttacaagaatacatagttttttggatacgaatatacgtttaacaataatatagagcaatgggcgtgaaattaaagcgtattagtagatgatttcactggaataaaatcaggaaacgtttcaaaattgcaacttttacggcgaagctcatatttacatgggcatgggtaattgaatttctgaataaaacatttgaagaaatgaatgtcgtgtcggcaatcaaaagccgttctaataaacataaaagcatttccctcctaagaactctaaatgtggctttagaaaaagtttgattttaataactttcaactaatttggtaccctatatagcggtagaaaatgtcatatatattattaaattccttctttaacttctttagaaatatacctttacccctttcttttcgatttctatcttattatcatatgcttgaattcaaacccattttttcaactgccggtggcttcctagtcgtgtatcctggcaccgcccaatccgcaggataacgccgagggtacgagac

SEQ ID NO: 9188 - DNA, 2281 bp, DROSOPHILA
catacccgcacacaggaatccctaatggtcaactcgatgggcgcattccggggcacgacgcagccaggagccaaaggtgtgcccggcgagaaaggtgatgccggccagaaaggagagcgtggcgatccgggtcacaaaggtgcacacgggcccagcggcgcaaagggtgagcctggcgaaccgggaacacccggactgccgggattgcccggacaggtcggacagcccggcggacttgatggcctcgccagtgccaatgggaccaagggcgagaagggcgagaaaggcgagaagggcatgcggggtcggcgcggcggaacgggtgccactggaccaattggaccgcccggaaaacccggacccatgggcgatattggacactcgggtcgtcctggcatgacaggaccaaagggtgaaatgggtcccaaaggaccaaagggtgattccggcggacgcgaagggttaaagggtgataagggagaccgaggtcaggatggtcgcgatggcttgccaggacctccaggattaccctctactggtggaggcgatggtgacagcggcggcgtgcagtacataccaatgccaggaccaccaggacctccgggaccgccaggtctgccgggtctttccatttctggccccaaaggagaacccggagtggattcgcgaagctccttcttcggcgatgcatcctactacggacgaccaggagcgcgctcatccttggacgaactcaaagcactgcgagaactgcaagatcttcgcgatcggcccgatggcacagccgagccaccgcgccagccaggacattcccacaagcatgaggagaccctggggcttgtcgatggcgaggaaccatacttctcggcatcctcatcgaacatgaacatgaagattgtgcccggcgcagtcaccttccagaacatcgatgaaatgacaaaaaaatcggccctgaatccaccgggcacattggcctacatcaccgaggaggaggcgctgctggttcgcgtaaacaagggatggcagtacattgcgctgggaactctggtgccgattgccacgcccgctccgcccacaacggtggcaccatcgatgcgattcgacctgcagtcgaagaatctgctcaacagtccaccaccccttctcaatacgccaacgctacgcgtggccgcactgaatgagccctccactggcgatttgcaggggattcgcggggcggatttcgcctgctatcgacagggacgacgggcaggactcctgggcaccttcaaggcattcctctcatccagggtacagaatctggacaccattgtgcgtccggctgaccgggatctgcccgtggtgaacactcgtggcgatgtgctcttcaactcgtggaagggcatcttcaatggccaaggtggcttcttctcgcaggcgccgcgaatctacagcttcagtggcaagaatgtgatgacggattctacatggcccatgaagatggtctggcacggctcgctgcccaatggcgagcgttccatggacacctactgcgatgcctggcactcgggtgaccacttgaagggcagctttgccagcaatctcgatggccacaagctgctcgaacagaagcgccagtcctgcgacagcaagctgatcatcctgtgcgtggaggcactctcgcaggatcgcaaacgcaagaagcgggaaatcggtgatggcagcagtcacggcgaaagtgaaagtagggagttcaagacggccgatgagtatgcagcgcatttagaaaatttactgctgtaagcggaaacggaaggaagaagaggagcggcatcacaccgaacacattctcatgcataaaacaaaacaaatcacagcacacacccacacacagacacatgcgtgcacacattgaatgtcaacgtgaatcatggccatgcatataatcagcgaattccaaacaaaaaccaaaaagagaaatactcagacggcagatggatgttgcatataaatacatacttatattaccagtacgcatacacactactcgtaggtaatatgtctaatatattgctaaacgtatatgataaacacaaatagatatatatcatggatatatatttgagttgtactttatgtttaggacacggcacgagcaagcagcaatttttgtacaagcaggaaacgtatttgtagtttgtaaactgtaatttgtaacttaccgatagccgtaaccgaactaatatctaattttgtaattacctaagctcatcattcacaacaaaaaaataagaaaataaac

SEQ ID NO: 9189 - protein, 581 aa, DROSOPHILA
MGAFRGTTQPGAKGVPGEKGDAGQKGERGDPGHKGAHGPSGAKGEPGEPGTPGLPGLPGQVGQPGGLDGLASANGTKGEKGEKGEKGMRGRRGGTGATGPIGPPGKPGPMGDIGHSGRPGMTGPKGEMGPKGPKGDSGGREGLKGDKGDRGQDGRDGLPGPPGLPSTGGGDGDSGGVQYIPMPGPPGPPGPPGLPGLSISGPKGEPGVDSRSSFFGDASYYGRPGARSSLDELKALRELQDLRDRPDGTAEPPRQPGHSHKHEETLGLVDGEEPYFSASSSNMNMKIVPGAVTFQNIDEMTKKSALNPPGTLAYITEEEALLVRVNKGWQYIALGTLVPIATPAPPTTVAPSMRFDLQSKNLLNSPPPLLNTPTLRVAALNEPSTGDLQGIRGADFACYRQGRRAGLLGTFKAFLSSRVQNLDTIVRPADRDLPVVNTRGDVLFNSWKGIFNGQGGFFSQAPRIYSFSGKNVMTDSTWPMKMVWHGSLPNGERSMDTYCDAWHSGDHLKGSFASNLDGHKLLEQKRQSCDSKLIILCVEALSQDRKRKKREIGDGSSHGESESREFKTADEYAAHLENLLL

SEQ ID NO: 9190 - DNA, 3819 bp, DROSOPHILA
atctacttcgtgttctctcttttactcatcgctttttgactggctttgcttgttctttttggtcggtggtgcagcagctcccatctcgaaattgaaatccactccagcagccacatgtacacaagtaagaacacaacgggttccaagaacttgctacacacacacaaataccaacgcaaatgcagctccaatatggcagagtccgagttgaaagttggtgcagagtgcgcggtatgagggaaacggtgccccaacggggggttaaatgcatcggcagactcgtgagcgtcggcgttgccagatgacattaaaactaaatcataaatcttgggtgtgccaaacaggcttaaccccagaaggtatgcaacactgtgtggtaggtttaaaaattccaaaataatttgaaattgccataaataaaattaaagtaaaataggtttcggaaagccaaaaaagagggaaattgatttaaaatgaagtcaagttagttcttggtttgtttctttttatctttaaaaatcgtgcatggccgtaatgaaactaatctagggttaatgacggataaggctgccagatgttcgatgaaaacgcagttggttcactttaggcgtaaaatgcaacgggatacgaggcatgttttaagcatattcaaaattaaggttaataattaaggcggtcttttttgttttaattcagttttgagcagcatcactgagtcactctcgccccctctgcttcactccgggattgggaaatgttacccttttggtccatgccagttcagtccagtccaaattcagccattccaagtcgcgagagccgggagaggattgaaaaacgaaacaaaaataaatgtaaagtaagcactccattgttaaacaagatccaccccaaaaagattgcgctctcccgctctctgaatctctccgcttcggcgacggcgtttagcgcagccaagcgacttgtcccagcggaaagccaaacagtttgaattttctatccgaagagtgcgcttagtgccgctgctgcgacggcgtttagacttccacctgggtaaccgtcgcccccgccgcccccttgaaacacaagtggttttgtttttgttgtcgcgttggtgttgagagcgcgaaacgaactcgaaccgaacagaaacgaagctctctgggggatccaagccgaagatccagtgcccagccaaatcccacgtatcgctgctctcgccgatggttactactatctttttttttcgtgtgcattctttgaacagaaactgaagagtaatggtggccaacgagtgaggaacccgaaagtcccgtagcaaagtcaccaggcagccgatacgatccgcaacagtcagcgttagtgtcaaggagtagaaatatcctccgtaacaaagaatcctcgcaaatcgcataatatagagtagcagaccgacaaaatgtttgatgtctttgggtccgtcaagggcctgctgaagatcgaccaggtgtgcatcgacaacaatgtctttcgcatgcactacaaggccacggtgatcatactgatcgccttctccctcctggtgacctcgcgccaatacatcggtgaccccatcgattgtattgtggacgagatcccactgggcgtgatggacacctactgctggatctactctacgtttaccgtgccagagaggctaacgggcatcaccggacgcgatgtggtgcagcccggcgtgggctcccatgtggagggcgaggacgaggtgaagtaccacaagtactaccagtgggtgtgcttcgtcctcttcttccaggccatcctgttctacgtaccgcgctatctgtggaagtcctgggaaggcggacgcctcaagatgctggtcatggatctcaacagccctattgtgaacgatgagtgcaagaacgatcgcaaaaagatcctggtcgactacttcattggcaacctgaaccgccacaatttctacgccttccgattcttcgtgtgcgaagccctgaactttgtgaatgtgattggacagatctactttgtggacttcttcctcgacggcgagttcagcacctacggcagtgatgtcttgaagttcactgagctggagccggatgagcgcattgatcccatggcgcgggtctttccgaaggtcaccaaatgcacgttccacaaatacggtccatccggcagtgtgcagacccacgacggtctgtgcgtgctgcccctgaacattgtcaacgaaaagatctacgtgttcctgtggttctggttcatcatcctgagcatcatgtcgggaatatcgcttatctacagaatcgctgttgtggcgggtcccaagctccgccatctcctactccgagcccgttcccgtttggctgaaagcgaggaggtcgaactggtggccaacaagtgcaacatcggcgattggttcctgctctatcagctgggcaagaacatcgatccgctcatctacaaggaggtgatctcggacttgtcccgcgaaatgagcggcgatgagcatagcgcccacaagcggcccttcgacgcctaattagtgggcgtggccgtgtgccagagtgccagtaagtctcgtatataccatcccacactatcccaaacacttccccatcatcatccagacactagttttagttagcttctagcccaagccacaattccactcgatgtaaacctcgattagatcttaagattatacatacgatataccatttttgttttggtagttaacttacttttttttcgacgctactttattagagaagacctaactaatgacaataaaaattatgtttttccaacacaacaaagaaacacttttcaccgagtaagagagaaaagagttcttctggtcttacgctcatttaagcggcttcggtgcaagcaagatagcagctgcgcatgcgcaacagtcagccatagctcgatccccctcacgcacacagtcaactagggaggaaagagaacgagagaggacgagagtagtagggggcaaaccagtttgaccaccagttagttaaagattgctgccagcagggcaaaagattctttctgtcttcttatggcttggcatttctctactcgatgccctctaaattccaaaagaaagggtagttttacctccataaccactttgcgtagaccagtttttatgaagtgatttttgtcttttggaacacactgattttgtttctttgcaacactgtgaaaacacaattcatttcgatcaaatctaaatcttaagagtataagttagtcataataataggaagtcgcagtaaatatcatatcagcaccctgatagtatgtatacctgacatgatctataaaaatatctgttttttttttaacttttgaaatgtatgtaccgcgttcatacagggtatcgcacagtttaagcaccatcacaagtgatggtcgaaccgtcgagccaacaagctcattatttattagtcgtttccatggcttcagattttctttgattgcctgggccccaagattttgactctctggcgacccgagttgccatctccacaccgagacaaactaaaactaatgatttcttgggcttctttcactttagatatattactgatccggcaggttcccaatgattccttttaagtttttcatatatattaatagttttggtgttttatcctataattttttggcagtgtggaaattttttggggacagagaactcgggtggcggagataagagaagagctctcgacattcgtgtctctgctcgtcggactcgactcgtaatcagcgcgaagttgagttttactcgggacgacttgggct

SEQ ID NO: 9191 - DNA, 1819 bp, DROSOPHILA
ccgaagagtgcgcttagtgccgctgctgcgacggcgtttagacttccacctgggtaaccgtcgcccccgccgcccccttgaaacacaagtggttttgtttttgttgtcgcgttggtgttgagagcgcgaaacgaactcgaaccgaacagaaacgaagctctctgggggatccaagccgaagatccagtgcccagccaaatcccacgtatcgctgctctcgccgatggttactactatctttttttttcgtgtgcattctttgaacagaaactgaagagtaatggtggccaacgagtgaggaacccgaaagtcccgtagcaaagtcaccaggcagccgatacgatccgcaacagtcagcgttagtgtcaaggagtagaaatatcctccgtaacaaagaatcctcgcaaatcgcataatatagagtagcagaccgacaaaatgtttgatgtctttgggtccgtcaagggcctgctgaagatcgaccaggtgtgcatcgacaacaatgtctttcgcatgcactacaaggccacggtgatcatactgatcgccttctccctcctggtgacctcgcgccaatacatcggtgaccccatcgattgtattgtggacgagatcccactgggcgtgatggacacctactgctggatctactctacgtttaccgtgccagagaggctaacgggcatcaccggacgcgatgtggtgcagcccggcgtgggctcccatgtggagggcgaggacgaggtgaagtaccacaagtactaccagtgggtgtgcttcgtcctcttcttccaggccatcctgttctacgtaccgcgctatctgtggaagtcctgggaaggcggacgcctcaagatgctggtcatggatctcaacagccctattgtgaacgatgagtgcaagaacgatcgcaaaaagatcctggtcgactacttcattggcaacctgaaccgccacaatttctacgccttccgattcttcgtgtgcgaagccctgaactttgtgaatgtgattggacagatctactttgtggacttcttcctcgacggcgagttcagcacctacggcagtgatgtcttgaagttcactgagctggagccggatgagcgcattgatcccatggcgcgggtctttccgaaggtcaccaaatgcacgttccacaaatacggtccatccggcagtgtgcagacccacgacggtctgtgcgtgctgcccctgaacattgtcaacgaaaagatctacgtgttcctgtggttctggttcatcatcctgagcatcatgtcgggaatatcgcttatctacagaatcgctgttgtggcgggtcccaagctccgccatctcctactccgagcccgttcccgtttggctgaaagcgaggaggtcgaactggtggccaacaagtgcaacatcggcgattggttcctgctctatcagctgggcaagaacatcgatccgctcatctacaaggaggtgatctcggacttgtcccgcgaaatgagcggcgatgagcatagcgcccacaagcggcccttcgacgcctaattagtgggcgtggccgtgtgccagagtgccagtaagtctcgtatataccatcccacactatcccaaacacttccccatcatcatccagacactagttttagttagcttctagcccaagccacaattccactcgatgtaaacctcgattagatcttaagattatacatacgatataccatttttgttttggtagttaacttacttttttttcgacgctactttattagagaagacctaactaatgacaataaaaattatgtttttccaacacaacaaa

SEQ ID NO: 9192 - protein, 367 aa, DROSOPHILA
MFDVFGSVKGLLKIDQVCIDNNVFRMHYKATVIILIAFSLLVTSRQYIGDPIDCIVDEIPLGVMDTYCWIYSTFTVPERLTGITGRDVVQPGVGSHVEGEDEVKYHKYYQWVCFVLFFQAILFYVPRYLWKSWEGGRLKMLVMDLNSPIVNDECKNDRKKILVDYFIGNLNRHNFYAFRFFVCEALNFVNVIGQIYFVDFFLDGEFSTYGSDVLKFTELEPDERIDPMARVFPKVTKCTFHKYGPSGSVQTHDGLCVLPLNIVNEKIYVFLWFWFIILSIMSGISLIYRIAVVAGPKLRHLLLRARSRLAESEEVELVANKCNIGDWFLLYQLGKNIDPLIYKEVISDLSREMSGDEHSAHKRPFDA

SEQ ID NO: 9193 - DNA, 2687 bp, DROSOPHILA
ctggctggtcgcagggatggcgtcgctccttgggggcatgcacctctcgaatgtgggtatacagaccgcccatgaaactgtaggccttctcgcactgatcgcattggaagggccttttgctgccctcgtgcaccttacggatgtgcgctgctagggtgatctggtgggcaaagctgcgccggcacacagaacacttcagggtgttccttgatcccctgaaggactttcggggggatttatcactttttatagccggctcatcgatgggatctgggtcgggagcgggttctggtggttccagaccatgcagagactcttggtcctcctccctgccatcgtagactacttcgaaagtgggttcccgtgggtctttcttcagcatttccagcagctgcttcctgcactcgtcggctttcctgcggaacttttcgaaattctgcacggcgctgcggcattccaggcacagttcgttgggcagccactgctggtcggcgtcctggttctccacatcctgcgatagatttatgttgagcagctgctgcagctcctggctgattggaatctcatctgattggagctctgtcttcaagggttccttctccaattggagcaggcatgtgcaacagagttctcgtacggattcccgggtaagatttaaaggcattttgtggttctttgaaaaaattcaattcaaaacgctttttgttaggcgttccaacagcttgttgtggctttgtgaaagaagaagaacatcaactacagtgctctcttcaaaaagcaaacaataactgtttgacaactctgatttaatataagtagacgaatttgtgaaaacggtgtcctaaagaaatttgagttattaaagccaaattaaaagcggaatttatatatatactaagtgatacagaaatcagcactatgcaaattccactgtatttcatttgtatttcagacaagacgtcgtctggtcacactgagccagaggtggacctgaatcaagcctcccaagaaaacatattttattctatttgcagttcgtcctctggaatctggcgcaatggtgttctacttcaagagcaatgtggtccagccgccggcgatgctatacatgggtcgcgacaagcacgaaaacgaggagctcatcagatggggctggccggaggacgtgtggttccatgtccacgacctgtcctcggcccacgtgtatttgcggctacggaagggccagacaatcgacgacatacccaccgatgtgctggtggacgccgctcagttgtgcaaggcgaacagcattcagggcaacaaggtgaacaacctggaggtggtgtacaccatgtgggagaatctgaagaagaccccggacatggagcccggccaggtggcctaccacaacgagaaggcggtgcgtcgcattcgcctggagaagcgcatcaatgagattgtcaatcgcctgaacaggaccaaaacggaggaggagcatcccgattttcggggattgcgcgaggcgcgggatgccgctgagcggcaagatcagaagaagatccagcgcgagcgtcgcgagcaggagaaggaggctgccaagcagcgtgagctggaggcggagctgcgcagctatgcgtccctccagaaatcggagaacatgcgcaccaactacgatgccggcaacgagtcggatgacttcatgtagtccccgggtgggcaggaccaagtcctggtgcaccctcgcatttacccaaaacatcctttgccatcctcgacctttcttactctatcaatcgcacatcattttgtaaatgccatctttttggttcattagaacgtttgcggcaggcattgccaaagaattgcagtgtgagaaaaaaaaaatatagattgtaaatataataataataataacaagaaagaatgctatagtcgagttataccattttctcagctaatgtgaatgcgaaatttaatcattttcctgggatatcgaaaaatattggggaaaaaatgacggttttagtgcgttagactgggcgtggatgaaattttttttttaaatcgatagaaatttaagcgactaataaaattgtgaaaaaccatccaaacacttattaaaaatgtggtcgtggcagttttgggcggttttacggcgtgggcatggctagatagaatcggctattgaacctgatcaagaatagatatactttatatagtcggaaacgattccttctgcctgttacatactttccgacgaatctagtatacccttttactttacgagtaacgggtattttgtgagcaactgcactgcttgccagtgtatagttagtttactttgtcacaggtggcgtgttaagctcaattcaaaatttgagttatcgatatgaaactgtaataaacatatattcgttttatttacatgtctgtaaacttatcagcagaggctggttaacattaggagaagcgaacagtctggcaactccataagtaaatttcaaaaatgcccgcatacaaatttaaaaactcattccgaatcggttgatttccatttgattgtgccgaagacaattcgcgctatcatctgtcacatttcccacaatttgatcggctctgacagcatctgcagcttaagccttttttttgttttgggttttcagttaatattttttttttttttgcccatctttatgattgcttat

SEQ ID NO: 9194 - DNA, 687 bp, DROSOPHILA
cctcccaagaaaacatattttattctatttgcagttcgtcctctggaatctggcgcaatggtgttctacttcaagagcaatgtggtccagccgccggcgatgctatacatgggtcgcgacaagcacgaaaacgaggagctcatcagatggggctggccggaggacgtgtggttccatgtccacgacctgtcctcggcccacgtgtatttgcggctacggaagggccagacaatcgacgacatacccaccgatgtgctggtggacgccgctcagttgtgcaaggcgaacagcattcagggcaacaaggtgaacaacctggaggtggtgtacaccatgtgggagaatctgaagaagaccccggacatggagcccggccaggtggcctaccacaacgagaaggcggtgcgtcgcattcgcctggagaagcgcatcaatgagattgtcaatcgcctgaacaggaccaaaacggaggaggagcatcccgattttcggggattgcgcgaggcgcgggatgccgctgagcggcaagatcagaagaagatccagcgcgagcgtcgcgagcaggagaaggaggctgccaagcagcgtgagctggaggcggagctgcgcagctatgcgtccctccagaaatcggagaacatgcgcaccaactacgatgccggcaacgagtcggatgacttcatgtag

SEQ ID NO: 9195 - protein, 209 aa, DROSOPHILA
MVFYFKSNVVQPPAMLYMGRDKHENEELIRWGWPEDVWFHVHDLSSAHVYLRLRKGQTIDDIPTDVLVDAAQLCKANSIQGNKVNNLEVVYTMWENLKKTPDMEPGQVAYHNEKAVRRIRLEKRINEIVNRLNRTKTEEEHPDFRGLREARDAAERQDQKKIQRERREQEKEAAKQRELEAELRSYASLQKSENMRTNYDAGNESDDFM

SEQ ID NO: 9196 - DNA, 36635 bp, DROSOPHILA
ggatggtctccggccggtctctttattttttcagatcggtttctcgggtgggcgagcggtgttcttttcatgctcttcccccttttgagtatttttttttttaatttagattttttttttttttttggctgctgtgggggctggttgtgcctcgtgtttcgcctattcatgcgaaaaattcagcagcgtttgaatgaacgcgaatgcgggaatatgagcgaccgcgagcagcagcaatttcgccatttcaaggcctacgtgacttgtctcacacagggtaaatgggaacgatttgaactgggtaatgccattacggttccgacacggggaaactgggtgttctagggtccggctctcctcgccgtaatccgagcgcggttagctttactttgttctattatccatttacaggggagccactgcaatgggaacttttataaaaaatacaaattatccggcacgtgccgccacgcgaacggcaataaccttttatttataactattaaaaatttagtattaaatttaatttgaatgtaactataatactgtgtaacaagtacaaattttgtatacaaaaaaaccgatattaactgtaattaagccccttaaagttggtatcgacaaaaactataactcgcctaactctgatttatggaggtttggctgtagctttgagatcgtcgcctctctctctccgttcggctatctctcagtttctatctgtccatctgactagagtctagtcggaaccacatgatccatacgttctcagcacgtgcttgtgccggcacttctagaaaaggtctttgactgtcatcagctgatatcagcatgttgtagatagctttttttggccaggtgctacatgctctcccagagcaattagctctatctactcacctgttcgcggagcacaatcgatatgatgagcgtacttaatcagcataaagatatttcccccgaccatacaataaatcttgagatttgctgctgaattaggttttagaatattttagtttatttacagtacgtttagcttagtgctctcttgtgttctcttatcagtcttaaaccataaatacgaaaatactaaatgctataaatgtagttttaaatgtataactcttatgcttaaagatcaggaactttagctttgttgtgtggatcggtggtacatctggtttcgacgataaatcgtaggatctcctcttacaggatggctctttttcggagcaaaaccatggcgattagctgcagacacaggctgtaaagggcacaagatattatagggaggtttggagctatggattcttagggaggatatgtaaaacaactgcattacagaaaaccatgccaaaaaaatgagtgaattgaaataatttgttcaatttaagtcgggcaacgtgcaaaatgctaaaaataattcagttccatgcagaaaacaacccagtaatattggacatcaaccttaggactactactccttaccattatcgactaaaacacactcgcatttgatattaatgtatttttatactttattttttagtttagtttttttcgcgtttctctcatgctcttttcgttgatcgtttactactgacttatctggaaattgtttgtttaatgcattaagttataacaaagtttgttagtctaagcctaagcgtactagaagtagtttataaataaatatttttaaataaataaataaatccatcatacagctacaactataatttcacgcatttatctcgttgatcgaataaattaacattaatgttagtttcgtaagtattgtaaatgaaaatacaatcttatgatttgtgagttttgcttccaacttttcttgtatttattttataatagttttcgatgtatcgtttgcttcatactttcgcattgcgatttttaacttgagtgggaaaaattgcattcaaaggtgatttacaaggctaaggctacgcgaggttcgacagtacagacaaaaaatggatcttacttgactaagccgcgtatctatttacaattgtatttcctcgacatattcgaattatatcaacgctttgctcgtttttacagtattgggaaagcgttttgcaagttttcaagttttgtttctggtagacttatcggagtggtcgtgtttttgagtattttcatcgtcaaccgatcgtgaaagttccgccacagagactcaagtatttcaatagactcttttgggtcattcgtgttgcgtaaggttagggcttcgaatttacatctatctgattggatgggtgcgtgcgtttataatacatttcgatgataattatactccaaatggttggcttgagaggttcttataaaatactcgagactccgtcgtaatacattgatattcatcgtctttagtggggatcttggttgcactgtgcatcatcgccggggggacaacagtccgctgcatcaaaaatactttagtgagccacaggcgtatgtagagtatgatattcaaatatttacacactggcagatgatatacatgtatatggtgttgttctggtgctgaatgtacagtgtaatagagtgggtatctgtatctgttggtgtctgatcgtgtgtggatgttttgtggaaacttgcaattacaatatcttttgcataaccaagacgcactttttacatcatttaaggtccttttctcacttttcttttttctcaacagttgcactgattttagctgaatttaccaaatttcacattttgaacgttttgatttgtttgcaagcccaatgtttattttaaaattttgaaaaataagaacttaggaaaataaaatacaacaaccaaattaaaataaaccaaaaagaacaaaatgtgggaaataaattcggaaaatgctctataaattttaaaagttattaaatattccaatcaatgttaatgccaaaagtaagtatttaaagaatttagaaaaatgtataagtgtttaaattccgatccataaaatatattaaaaatgttatatcaatactcaaagaaataaattgtataaattttgaaaattttaatcaaatttagaaaatctctacgtaaatatcgtttgtttgtgagaaacagatgaagggttagcttagaatttgctcatgggaaactcacaaatcgtagtagagcgaatcgtcgccgcctgctccgctgcgtccttgggcctcggaacttgagtcctcgtagctcgcatcttctagggatccaccgtcgccctcggtctcctcctcgccctgctcccccggatcggactgctcctgatcctggtcgttatcctgatcctgctcctcgccgctgctcatgcgcacgttgcgctccaccctatcgctggtttcgctaagggaaaatgcgggcagcggcgagctgctctcccagtggctacttgggggcgtgcccaggctggtggccatggtggtggtggtacttgcatccaatttccgatgcttcctcttgccaccggaaatggatttggcctgatgttgcagcggctgttgttgcaactgatgctgttgctgctgctgctgctttttgcccccattttggcgctgtttaccagccttgttcggcttcttcttgcctccgtgctggatgtttcccttgggtcgctgttgcaccgccttggctgcctctgtaggattcttcctggccccattcttcttgccacaattgggcggcgctcgcttctcggcggccgccttctcccgcagctccttgcacctcttcgccttgggaccaagttttcgcaatgctcccgctccggcgccaccgcgcttctggcaattgtgagtgtcctcctgctcgtgcggcttgcacttgggcttcttcttcttgttggccttgctaccacttggtctactactattactgctactgttactgctactactattgctactactattactgttactgctaccgctaaggctactgctaatatggccgctctcgctttgactactgttactaatactactcaggctgctgatcgcagacacaggaacgtaactgctactgctattgctactacttttgctactgctactactgctgctgctgatgctgctgctgctgccactagtgttgctgctgcaatgtggcggcgccttgaatctggccacatcgatcagctcgatcagcggcttgcccgtatcacagagttgccgcacgccgtgcttgacgcgattggccccaaaattcttggcgatcagctgctcgacccgctcctgcggcaccgtctccgtgatggcgttcgtgtaggtgctcagcttgcccagcgatcggctggccgggatctgggtacgccggggctggccactgccattcagggccaggtagaagacccgccgcgcctgagagtggtacgtggaggagtaagtgttgtagttctgaagacccatgttctcgttgaagacgcagtcgtcggtgaagtctttctgcaacaaccaagggctatgattaaatgacttggctaagcaaaaggcagcggtaatagaaagatcacgatatcttatagtttaacttaagtgcttcaattttaaattagtggctcagagatgaaataaataataaaatgactacaatgggaaagtaaaatcagtactataaggtaccagtagccatgtatgtaatgtatgtagtagttgtatgtaatgtatgcaaaccaaaatcatgctagaacctttgaggccacttcaaagggttctctggccaactaacttcttcagaaccctaacccaataataaaacttctttgaatttgctgtccaggggcggcgtctgtttcttttgtctatcagcaccgaaatcagatggataaatgcgctcattatcacaggatgtgctcctatcggtgttgaccatcgataggaggcccccgacctcgagcagagtactaaccataaacatttcttctttatgaacacctcatgacaggcgaacaaaaggaccaaacagccagttgaaagctgagaataagaatttgtgggctgcgttgagatgaaaaatgtaaatcaagatcggtgaaaggattttcattagcccttcctcagtggcctttgggcctttgggctgcgccgactggcagacatcctcagatcaaattcaattaacaaacactgaattaattcgcttgtcaggcaattaaaattgtttcgtaaataaatcgccagccaggcaattccctgcctgattgtttacgcggtaaaatgtcgccgcttaaatttagaaattaatcaggcgaaaggcaaaccgcagtgagccatcaaatgggtgagggccaggccaggccagaccaggccaggagtacagtatgttgacgccattcggggtcgagtcaagacgcgaatagttttttgacatatgtgacaacaatgtggatccccaccgtgaaaactcttttatgatgtgtatttccaggcatttccctttatttttagcccttgatggctggcaagtgaaaattggcagacaccgaagggaaatgaagttgtacttggataaggaaaaccatcgggcagggaaggagggaactattcgagatacccggagccattagctctgcgtggcctctctatcggagcttatcgtgtggcgccaggcgagcctagaaagggtcaacctgttggccagattacactgggacacctacaaacggaaccacttagggcacacaatcggaatcccatacgaaacctgcgtgacgcgttccgcccgccacttatcgcccctaaacaggacaataacgatgataatgatgcaacatattcattttcgggtcggcattaattgaccaaaccaaacccaagtttgtgaactctgcgggcggtcccattcctcgccggagtacaaattatgcaaattaataagcaaaaccgtaatgtgaacatttatggctacgacattttaattggacgagaagctgactcacaaggtttgctttccgtctggggtttggttttgaatttatgaacttatgaattggcaagcgatttgggcattttcccctgctcaattagccgaagcccgaaatcacctgcctcgtttgtcacaagacacaaagcatttacaaaacattttgttgaaatgtcggaaaatcagtcagtcacatgcctaatattcagtgactaagaatagcagcgacgaaaagcactaaaaaccccactaaatcagggcccataaatgcagccatttttgagatcttagaactctggctgtgagcaccggacgccttggtcgccaaaataaacaagacggcccaatataaccgcccacttgaccaacttacagctatgctggctatgctctaaggcatgcggcgccttcaaagggccgcctacaaagtggccgctggtgaagcgcatcaatcagcaagtatccgtgtatcggcgagatacagatacaaaagcgcgtacaagaagacacgcctcggctgacagaattggcacactagcggctattttggacgcggaaaggtcaaagtgcctgcgacggcggaaagaaatgaaatgaaataaataaaattaaaaaaaaaaatctaaaatctaatgtcctccgacggaccaatgaaacggtcacatggcgccagcccgaaaaaaggcatccgatgatcgtgggtttcgaagcgcagcgggataaaagtgtagcctgaattatttcaagggtgaggatcaggacatccctaccgacatcagttgccacttgacatcctcaccgcgcataaggacacattccagagcaaaatggaaagggacttggcaaaaggactcgctctgtggctgctgatcgtgttgcattgtttttgttcacatttaattttttatttattgcccgaccccttcggttgctctttcatttatttgagggtcccttcggggttttcggtttacctcaatcttttaacaggcctttgtttgtttttgtttttgtcagaggggtgccaagaatggtctagataggatttctttatgtttatctaagtaataccaaatgtagttatccgagaacggcaaattgctatacgaaatcaattttgcggttcacagattactgaaaatgggaatgtgactgtaatataaataggtttgctatacggatgagcattttatatcgttcctttctaaaaatactatataatatgtttattttgactagaaaccgatttaagatcttagagatggctatttgaattctaaactaaattctaaatcacaatcttcatgaaatgaatctaaaagttgtatattatttattagtttggtttagtttactatatacatatataatatttcaagcttacttaccgagccgtagggaacaccgcacgcgtccatgcagagatacaggcaagtggccacactctgcaacttgatgcgtcccacatccaccgtggatcgctggagaattgctgcaagtgaaacggagaaagcacattaattaattatcaatcaaaggtggcagatggggagacctgattgcgggctgacccaaaatctggtcgcagatgtcaggatgtcaaagcggcgagaaccaaaaaggttcgttcaaaaggtggttaattacacatccgacacttggtaagccgtctccgaccagaagagtaagttaatccccccttaagccaaaagttaaaaaaaaaaaaaaataataaggaatataatgtaaggaaacccagctggaaagcccctaaatcatagattccattgccaggcaaatttgtcaactgtacctaatcgaagatgcctcgagtgcgatgattatggcggatattatttatggctagtaccgcggcgggttaattgaaattgccgccttgcacttgagaaacgaacataaaagacgcactgcagccacaccaaattcaagttcagcatcgtttaaggtcaaaccacttgtgtggtccaccgtcgagattccggagtccggaggagaataccgcctgcctctttgtcagttggcagttggctggccaaagtgtgtcagcactttaaggcaacgaggcactcgttcaatgaactttatgcactttgtgcataataaacatcaatttataaatacgcagcttgttacgggtgcaatgggaaattgaaatcttagccagctgccgcggcagccaaatggttgctcctaataaaaattattattagagattatgccagagtgcgctgggtaaagaaaatcgaagggagtcactgagtggccacttcaaaagaggatatattgactatcaaacgatatgatattgatgtgtgcacccttaaatgagctgaaataaaataagatgcttgacataaaaattggcatttgggaatgccggtatgctggtgatttaatgtcccgccgaatacttgatgaattatatcatctccccctgaaactatgaaactatgccagggcaggcataaacagacgcccaaaaaaatgcataaaattttgccgtcaataggtgggcaatttatggcccacatgcttatcccgtatatgcaacttttattgcaactgcaacttcgattgcaacttcgactataaacagcccagctatttaaaaggcatgcgttttcatttacagggcatcaatcgcccatccccctttaaatacggaaattgtaaagtttcagcgaaaaggaaaaacgcataaatagtgtaacccaaacgtaaaaacaaaaagcacgggagtgtataatgccattgcttacccgataccaacttattcccgattccgctcccgtttatctgatggatttacaatttccctcccacagcaacttcccaccagcactcggaaaaaacgtataccataaaaattaacatgggtaacttttacttttcattacctatgtaattaggaaactgtgattatcacattgaagatatctcggaaatcgtacgattgacataatttataaagaaaagtaagtcgaaaattttgaaactgtatctttcatattatagataaatggagctagtatatattgttctcagtgcatttgtaattgttccatttttctagaggactatgggttttcgcctttcaactcttttgagagtcctaaaatatattgtatgaactaaacaaatgacatgctaagcgcgtcagttcatttgttaaattcaaagagctcgcagtgggcgggtctttgggcgggagagagtgagagggtaagaaagagtgagtggggggaggttggggagccagtgacaacctttcacttcgatgccatgtggtgttgcatttcacttgcgtcgtgtttgtcgtgtgtgacttttttctccgaggctcatttaaaaaacgatttgttttgctcgagttaacaaaagtaatttttcttctttttatcttttcgtatatgtgcgtatgtgtggttgagcatgtgtgcatttggacagcgacatctcttagcgtattaaattgtttaaaagaataatttatttattttttttgttcttgtgggaaagttttcttcgccgtcgtctgtctatctctttcgctcaatgcgctaattttagctccgagaatggctacaagcgctgagagcaaaagagggatggacgctctctcaccttgtcactgaactctggccacacacaagacatgtggcgccgtggcttagttggttaaagcgcctgtctagtaaacaggagatcgtgagttcgaatctcgccggggcctatgcttctgaaagcatttacttttttctatattatatttttgctttgctaaatgaatttcttttggttcagaaaaggtgccatagttaatgtgtgaaaatctttgtatttattacaaatttatattgttcaatttagatgtgtttacgcctaaaatataatccgatagtaggaatcattatttgttggccgtttcccatcaaatccatcctttctctagcaatattcatgaaaaatctattcaatttgctcagctcattattatgtgtgttattgcaggcggaacaataacaatacgaaacggcttgaggtgtgaattaagtgcatatggataatcaaatgatcttttattgatcaatcagcgggcgtgtggaagttcaatcaggcgttgagtgcagttcattgaaccaaaaatgggaaacccaaagttcgaactccaaaagttaatgtatccaaattcctggcacgcttctgagctgctttaaattacccacatattaagcacgtagtcgaatgttgaatgtggggattgtggggagaggtccccaaaaaccacaataataaaatcgactccaatggctgtcacgcccggccgataattaaaatgtcaaaaaatatgcctgtcaaatcggagtttttgaaggtgctcgattgagttatgttgggattggatgttctccttgccatcgatggatcgatggatcgctgggattttttggtaaccgttaaagggcaggcgctcagtttatgcaaatgaggccttaattttccaccagacgacagcaatggtaatgtcaaaatttatgtgcaggccctcaataaaacttgaaattgacaaaaggaatggtatatagtcggatatttaaataaatccatgcatatatgtatggattggcattttattaaatctttaattatgcttacaaaaaagtgtgacattttggcgtgacattttatgaaaatttatgatcacttttgtggttatttaacataatgtggtatgccagccatgaatggtcgtaaaaaatatctctgggaatatctaaccgaggcattattcgctttgtttggacctcacccccgatttgaagtccactactgtgccacgccgtcttttgtagtttttttttttttttttttttttgtttgttttttgggggcttatttaatttatgatcgtgggcagcgtattttgacaatttgatttgaatcggaggcgagcatatcaatcaatggaggccttactgcattcagatgtccccggctccagatgacaatgaagagttaacagtcgctgtctattaaagcccaattagtggcacttaatagacttgtcgtttggccgggcaataaatctttctcataaggctgctgtgccgccttccgcctgcactttctgcctagataaacggcgataaatcaaaccgtgggcggtacgataagccgatctatttagcatttgcaggtgattgcttttttcgatgggaaaagctaggcagcaggcagtccagctacttatgtatacccgagagctgggccgtttctcaccctaaatcctaaatcagtggtatttcatgctcgactggagaaattgcaatccatatctattccggtattcgcatctcaagttagcacccatccgcacagacaatcgcttgagtggcaaattcaattcacagttggctaaacctcgcaccctctcgaactctttgtgtcgctttcttgggcaatcgaaatgcattttttgcgcttcgggagggaaaggatatcctgcaaccgtaaaccttattggccaatatccgataaaaccaaatgcgcaaaagaataaattacaatcgcgttgacaggaggggaggaggagaaatgctcactccaggggttgtttacccaaaaaacgcccactaaaatccattttgctgcacatggcaaatctaaatgggaatcgttgcaatatctgcggcggaatggcaaatcataatggaaaatatgcaatatctccaggaagagatctattcaaactgatgggatttgtcacgaccactttggtttggaatttctcttctgggcatcgtcattgcacacgtgtggggattctggctttctccctgggacaaattagatttatcaacgctaccgtttttggtctataaggggcttcatatcaataagctacccatctgggcccaattcattaatgaaaaatgaatggggctattgagaatgccttcatttgattaaaatagactaataatgtgtaaagtatgggcagttccacatcgaaatgcattgtctaatcgagtggcctggcccaccaaaggagagccctaaaactaaagccgattaggtaaaagtttcccagtgaaagtttacgacatttgaataacaccgaaatgtgcgttcttacaaattaatacaagctgggaaaaacaaacgaaaaattatgttaaaattgtaagcggaaaaaaagttgtaaaatctaaaaacaaacatatgtaaaatatgtcggaaaaaataacttgagcaagatgttaaaaaccgtaaaatgtttttcatgggccgaaaaaacaagctggaccacgcccccaccccgccccaaagtgcgtgaccagtgacaggccaatttcggaggcgcacgctgagatccccgttctccggtccgagttcccattccaggttgtgtttttccgcattttctgatgtggatgttgtggccgcggctttttcttgtccactaaacaaccagttggagtggaaatgaaatatgtagatgagtctttaattaatttgagacacgacaagacaagtggcgtcgtctgtggctgcgtctgcgacagcgctgtctgccccaaccgccgcctccggtcgctccacctgctgctcagctctccaccgatccccgccagaatctcgcctttcggaccaggaatctagtctagatgcgagttggaggaggtacctgctctttggcaggtgttgagtcatttggttgactggccattagagtccccattgatcattgatcgagtggcacgaggcggtcgagactatggcattgatgatgatcatcaatgatgatcactggatgattttgactggtgtattaactaatctttccagcaattatcgtttcactatcagatcgagttgtaaagtttccgttttcaaaccactagtttcgtatattatagtatataatcaaaagagtgttattagagcatcttctggcctccgtttcatggtcacacactgggatccagcagggaaccgtacgtgaaactatctgcctgctctgccttagatctctgacctctgtgccaaatatttgcatttgccattaagtcggtcataaattttagacccgagcagcagtcgtctactaaagcccgtttcgctccaatgcgattctgtgtcagttggcgaaaagagagtgggagtcggcggttgtcaacattgtcgccgtggccgagagataagcgttatgacattatcaggccggaggtccagacttaaaacccagccgagcgggcgtgtccaaaccgcccaccatatgattcgccctcacccgttggcaaatgacaagagagtcgcattgtacgagaaactgggcatccatacgtacttttctatcgctggaggcgtaagtggtgcgagtttacgacccttttgcacacagaatcaatcattcgaattcccagaatgatcctaagccattttgactatctgctagcggtgccacaacggcctatcacgaatcaattagccgagacgagatggggagaaacatacattttgtaagatacgcttggctgtgctgatttatgcaatccaacaaatggaaactctaattattcgacagacatgcggagcgaggaaaatcaaacttaaactgttataagtcgcatatatattatttagctggcgttgcctgtcaaagccgtggttgtcaaattgttaaccgttgttagttgttgcttgtcggacgttgaggccaagttgcccggcctgtcagccggtgttccactcttccagtgtctggttagacggcattttttgcaggcaacagccacaaaaacagaagtccataaaacatttttagcatgtgcagactggcggcttttaaaattattcactccgcgaccgaggcgacagatgcgggctgatgatctggtcgtgtcaatggtttgaggtattcccattttatggttccatggatgatggtgcatcgagcactgagagtttgaaggagtacattatttgggcgcaagaataatatgatgattgatagatatgatgattgagcgattgagaaaaccaattattatacatatgtaaaaatatcgaaataatattttaataatagtattttgctcttttctagtcaaaggaccacataaaacagtgtatttttcccttaaattattcccctatcttgaaaaatcaatcaacaatgtatctactatctactattaagttcccgagcaaagaagtctctaacccagccgtgaccagataaattaagacgcagtcaaagttcaaagagttttcccccatcgacgacatttgacatggcaaacgattagttagttcccgctcgctgacacacatattatcattgtgcagttccccaaaatatacatacatatatacatttgtagtcagccaattcggaaatctcaaaactggagcgtagcaaatgcggcaaagttccgcagccaaactgtcgcctgtcaacttgggaggattggaaatcgggagtggaaatgggactgaaaatgggcctgggagctggtttttgtgtatttttagctgtcaccagccctcggagacatttgacatgagaaataacatttcaattagttgatccaatgctcgatttaaggcaaattgccactaaggagaggagttccaaaaaaaaaaaaaaacagtcccaaaagggagcgaatgggaatgcggatggttaacagcgcagcgaatagctaatgcctcctcaaatgttgaatcccagatacatttgcatctgatccagatagcacgtgctaatgtgtgggtatttgtgcgatatcgcacagtgcaaagtcgtatctatcagacacgccatacaacacacatccgatgtaaatgcatttgcagctgtgtttgtgcgggggggcgtaaatagtacagagcgtgcttagttgcgttcgcaattaattcacagtaaacagcaaatgttgcaaataaattagcagcgacaaaaagtgtctgcaagtgaaaacaacgacaaaatcgagtctgagccgcataaaatgcaatcgaagccgcatgcgacacaggcactttgcttatcgcctgctaacatcgaatggatttcgattcgattcgatttttcaatacccattagttggaaagagtgtggcaaaccttttaacaggccaaatcaaataggatttttaaaattttttatattaaaaccattattaaagaaattgaaattcgttactcattaaaaacttgaatgatattccaaacgagaaataatttgaatatttatttatctaaatcaaaagtgtaagatatttttatatttttccatttcaaaaatgttgtattgctaattagagagtatggccatttcggtgagtcaccacggccggactaggaaccccattggaaaacgtcataattatcggggatggctgagtgggccgccagtgaacaagtgagcagatacagatacaaatgcagggcgcacagaaacagatacagatacacttaatactacgtttgtttgcctggcacaatgcaaaatatattgacttaggtcagtggctcattgaacgcaaatgcaaattgtttttgctgccgctgccgctcggtaattcgcacttcacaccctgatgtgcatgtgtctaaatgcttaagtgtgtaaacgtgtacgtgtatctgtgtatctgcaagatacaagactgcaagtagctggcaaaatgtgataaacaaacctgacgccagacgccttgtgagcagttaaatttaaaggcaaacaacagaaaatattacctcatcgggatggcataagttatagaccagaccaatatatcagccgatcaaggttggaattcacatgaactccttccaaatattgagttacggcccaacataacgtagcagaacataacataacatagcccgtatgccactatcaagttacttggaaaatcgaaacgaaactggaaaactcaaaattattgaccagtccgcagttaagttttattggtcgcgtcaatcttcatgagaaatgcttgaagaatattcttggaatttaagttctctgccaagtgatgtccatttaaatgctcattaattagataatcataaagatattattcactaaggaatcttgctcaatggcagtggaaaacaagcaataaaaattccaaaatataatagagccataagaaatctgtcagtgcctgacaacaagaccataaaagcgtacacagccaataaagaagtatataaatattttctagcctcgagaagactctccccagagagagtgaaagtgacgcttcagttcgaaaacagaaatcagcataaaaactgttaactaaattgttattcaacaaaaacgcacagccattataaacaacagactacaagcacaaatttagatatgaaacttagaaagatatcttaagatagcatgtttcgctttattgtcgccgccgtgcatcattcaatacgatccaatccaatccgatccgattcgattcggaaagctgggaaattttagctttcagcgctgccatctgcctatgcccgaaaatttttacgatgtgctagactattaaagatatttagatacttcttctgggggctctatttttggctctgcctttgactcaatttgctccaaagtgtgtttgcattaattcgacctcaaaatgcgccatgaaattggattacacttgggtgtagtgtgtgcctaaacggttggctgcttggatgaataaatattgagggctgtgccatgccatgccatgccatgctccacattatcggatagatcgccaatggatccagttaacgcgtccattatgcgccaaattgcattgtcatcggaccacctgcattgtgaatttccagagcacgcgactgccatcgacatccatcggttgacaggtagtcttttgtggaaaacattaaacacttaaacacatttgtcatacaccctcggtacgaaacacttgtggattcagatagccacgacttcggttggaactccagtcaggtgaacaactggcttttaacaacttcaccccctcgatcatcgatcggttatcgactgacaatgtaattgtgatttatgcaaattgccacgctcgacaccttttggcgaatttatgcattggcattaaatctgaacacctcccaattctccggcctcgatggactttcttctttctccgcgaagatttgcttattatgcttggtcgtctggcaactgtttattgacttggtctgcgaaacaaaataattggctgcagccaatgctgggagccaaggaacccacacgaactctcccagcttgttttgatttctattaatattttcgttggaaaatgattgttgcaccccataaaaaattgcactgagcagcacggacaggcattaatcagttagaataaccaggagaaacaagaaaagaaagaaaaaattatcaaaaactaaattcaagaaattctgtttgcatactgcctgtgttgttgctgccaaatatgtgcagatgggtatatttgtgtgtggggaggccggaacatgcgtcaataaccccattccgattctcaatcgatcgatccgattcagctaatcctttggccgcagccattatcgcgaatgatgaagatgcttttcctgtatttttatgagctctccggctaagtgggcaataaaagcggttaggggaactaaaagtggtatctggtatctggtacacggtgtctgatagtgggccagaaacactctttgcttatcttttggccaggcaaccactttcctggccaagtgtggcaagtccaattggcaattggcaataggtgttagtgctagtttatgcgtgctctgatttcatgatgtgtgaatcggctcgttaaacgtttggccagatgcagtgagaaatttgccagttaccagtttgctgtgaatatgccgcatgcaatgcagaaggtttactaatgagtgccaactaaatgtgtttactaataaattaagtatatttaacgggaacctaaatctagagacttagttacaatctttaattggtcatatatgagatgatttcttaagccatattctatatataaatatcataactcttcgtatttctacataactcaaagtcatgatccattgcattcctttcgctcggtcaaatttctcagaatcttttacatctgctccactgatgcaacattgttgcctaatggagagcacctgaaattctcagtttgaattcatgtctgtgccatatttttgctggatttttgtaggccatgttccagtcaattgttttttgttcactcgagttcttcgatgtttgtttgctctgtatatacatgccagccagaaacaaatagcattgcataaatcaaagatttaactcgctgaagtgcgtgaataatgagcgagaatcagggtgcgaaaaaaaggagtagattaggagtggaacaccacttaataatccgccaagtgcttgtgtgtggctactgtgcgacattctgtctgatttcccactcgagtgcatttttatggtcgctcattaattttatggcttttcatttgtcggatgtggaggcggaactgcgcgataaggaggatcccacacatgggagcgggacagtgtgcacttgttggaaaaaacccgctggccgtagatggatggacgcacttgctccaatgaccgcattggcccctatatcaggcaccgatcgcataactcgtcggggcgggatttcggattgcacgcaggattgtcaatgcggtttgattgcgaaaccgtttgccaaaacacgtcccacaatcagctaattggacggacttactcgactccccagtgtcgctttcattagcatgcaaatgcagatcgcggcgatatctgaatccgaatctgctccgcttctgttccttaatggtcgctacgtgtttcggtgcctgctcttttgtaattaatgtgatccgccgactgaccttaactgtgtgttgtcagcctgattaaagagtgttgaaaaacaagttgttactgcccccaccaagcgtatgaaacggaaaacgcggacccacggcctggacttgtggacacactcgaggatcctgaaaacgaaactggccgtcggggcattctgtcattttaatggtgactttgggattggccttttggctttcgattttgagtctaattaaggcgaacatgtgccaagatcaatgtcggcggcgccacggtggcgtgcgtatctgaaagatacttacgcgtttactacatagcggataaaaccaatatgccagctaccgaaaattaatttatgccattctcagacgacttgtttgccataattgcacttcgccagctgacaaattgcagtcgcgtaatggcattttcgactggcattgttagtgcgatttttaatccgatccgcgaattatgcgcattttgcatgccatttatgagaggcatgcgaagtctgtatggcattgaactctcaagggatgtcttcatcgggctcctcgccgattgctgtcaagtttaaagccaccgaatgaagtttgcttgccggaggatatatgcaacatacaatgtcgttcagaatgacacacccactacacccattaggcacaccaaaaaaaaaatagttacaaacataattaatcaatgctttcgaaaaggtgcctaataatttttaataaactttaaaaagctagacaaaataaaacaaaaatccctacattaaattaaaatgattgcctaaatagttagaatttttcccggtgcacgttctcccatgcaaatataacgtacttttagtgtgggccccaggctcaaactgaagtcgtgaggaagtcatagaccgagttgatgagttggtactgccttccaaaagtaatgtcaccgatttgcatgcaaattgcacgcggaagttgcgctaacaaggccgttaaggccattaaacttggcccagactgagtcagtcagaatcccttccagccagatggagtcaaagggccagggagtcaaagtgcaaatatgtggccacccgacgcctccacattactcaagctcacgcctctgaatacaattcaatccaaaggtctgcccggggtcgcatgcagctaatgaagttgaagcacatcccctgggttttcagatccgaagtcttgctaaatttagcccgagtggctgggtcctccggccaggcgtgccacctacgataaatcaaagttaatcagatctagtttcgattgggtttttacggctcgctgcgctccactgccattcggctccattcgatgccatttaaattagctgccgggtaatttatcgcattgttggctctttgcaggtttcgtttagcgccaggatgccgctaggtccgattggccggcccagacacaaaggcccttgggcccccgtcttcagcccgtgctctccattcttcagtcctcagtctacattcttcgactcctggctcttgggttcaagactggtccgagtcgtttgcgcccgactgaaactgaatgggctaccaatgctagtcgataattacccatattttgttgcctgttttgacgttgctttttatttttattcaattttatgcagtccgactggtaagtatatgtaaagcttggctgactgaagcagaggattgcgtatcagcatataaatttccacttttatgaggagttaaatatttacaagcctcataatcaggccaagagctacaaactagtagatgtctgagtcctgttttcaagaaatacgactgacaaaacggaccaattagaacaattaattctcaataagtggagctcatttgatccttcgaaagaccggaattgtaaaacttataaaggtacaataaatttaaataaaattcaatggattagttgctttgatttctgtttaaagctaaaatcgtactataaacttcctcattgtccagaccatttattggtttaatcctcctctttaacactaaattggccattaaagcaatttgttctccatctaataagcctatttatagtattcttgttattattgacctctatcattgatagtttacacaagtaggcctaggaaaataatccacaagggcatgaaaacttcggcgccccaataaaagtgagccgacgaagttttaatattattttcctacactccatttagcatgtcgagcattgtattggcgtgaggattggccatcgttgtgtttttagtagctgttaaatggcacggacgcagtcggtggtctctccaatttttttccttggcagcgcgatctagtgctcggcttgtttttaacacccatccagagtcggggttccaagttctggatcggatctctgggtaggaaacccaaatgggtttcaatttacacacttgtcgccaggctcttcgcttcgctttgctttgctttgctgtgcccacattggagcagattggagtacctgggcatgggagggagtcttgtcatcgcctggaataaggcgcttatttatttgcaatggcttataagaatcttaaggcatcggaacggatcgcctggtatcgcgttgcagagacgtatcgcaattataaatcagtttaaggcttcccggagccctggacccccgtgacattaagcaatgaaaccttttgagctctgtttggctttgtctttgtcaagtgggctgtctgtccagtgcgtcaatcctgtccagaccaccttccactggagcatccacgcaccgtgtggcacctttgtttgcatcattctgacgatgtagcgatcgccgctgattgccaaacacgaacaaatgaatgattgccccagagcccagttcatacggatccatcacggatttctctcacggctggctctacgtcgtctatgtttgctaataactcaacagctaatcagcgaggagctcctcgcagcatgtagcccgcaattaagcgagcagaaatgtatctttatatctttagatcttcgaatctttggtatcttagcatctgcatcaacaaacaggcctcagcagcacatgccgtgctgcattagacaaatcaattatgctgactttatttgggaggggcatctatatgtttgactatctaatggaattgcagataagctgatcagaagtactatgtgtgtgtgtgtgtgtgtgtgggaaagcattaccccgaggaattcagaattccaaattcagaatgcagaaagaggcttagggttccgacttcttgaaactaagactcttcgcctgacctgctaaaataaattcgcggcaaataccatcaaaagttgtcagctgactgaaaatttgatcgctatcgcaaaagttttggggcaatagccgataaggcagtcatattttatttataacgtgtatggctaaaggagccgccctcttaacgcaccgactattaacacaagtttccgctttgggctctctattaatcaacataattgatgacaattggcctggtgctttctggtgcgttgtgtcgtaacaaaacgcttatcggccatagctgaatctaacactattagtcaatggatcgccccagctgcctatcatcaatttatctgcaaaatacccccagcacttcatattcgtactcgtagatagaactgcattcttgtctaactgatttatgaatttgaccgccgaaccatttgcgatgcaagttgaaaaacctcagttaatgaccctgcctacactctatttatgcattttccactgtctttccattgattttccccaacgtagatcaatggcctttcagtaagttagtaggcaagcgatcggcacagaaattgaaatcaattcaaggcacacgctcctaacacacaaaagccagttgaactttggcggttgaatggcttgattgctcagccgattgacggggtgactgagtgacctagtgcagttcgcggaaccgagaaactcccaagatcaatatccattcaattgaaatcgatcaggaaaaacgcaagtgggtaatgcaaggagaaaaagctggaacaacgcataaagtagtgaatcattcgatggaaaaaataacataagttttgagtaagaatgaaatagtaactagtaacaaactatatatttttatactatatctttattacaactatcagttacttaatccccatgaaggtaacaaatttacgctaatgttcgcataacagatctgtaaaatttccatgaataatttttccatcatttacatgccatttccattcttacagcaacaactttcaatgatccaaatacttagcacaattttcttggaaaaaatcgcgcgcacttttaaagccactagcttagtggctactcgcatttcgctttgtttttttcagctatttagtcaagcgattagtgtcaatttgtgcagagcataactttaagtacacatatggttatggccactgtgggttgctttctcgcgccggattgtgtgtcggcgtgtttattcaattagcatacattttttacttttttcgccatttggcaacccgatgaggggttacaaacaaaaaaaaaaaaatgaagtagcttgccggagtaggaggatctgccggcggagaagacagcgatgacatggacataattgcaggctatttatcatggccagttgaactggagacaactcactgagcaaactacgcaatcgcagagctggaattaacacacctaggccacgtagcagatgccattggatcgggaacacctgccccgctgggccaagttcaagtcgcatcctcaagtgcatcctcacacccatacccatacccctacgcatccccatttaaatgcagacaaagtaattgccgagcactggctgattaaaatggatttataaattatgcagcggcgcgattaaaatcgcctcaacggtcgcgtcggcggcgcttccaaaagatatttcctccaacagtgcctttgggcccatatatatatatacatacatatgtatgtatatgcatatactcttgttccttacgtgcccgcagtttggctaatagaaagatttatcaccccgtcggcgacttgcaggccaggctcgatttccagctcagcgataaaaaccgccttcaattcgcgaccgcgttacgatttcaattttcatttcacttgcaaggcggcgcgtcaattcctctgccctagggcattatttatgtaccgcactgtactgcggcttgtggactctatcttcgcttttccttttaatttatggcatttaaattgcaatttcttgtcgccgattggcgagaaagagtgctcaaatgaatggcactcgcggctgccttcgattttcacaccttgagaaaaatgtaacgcttttttgggttctttctattagcatctttaaactggcctggaatcgatttggtttggatgatgctgggccagcccacatgtgatcgccatcgatttccctgatttgtggtcaacgcgaaatcacttttcatgggaaacaaattttgttgaatggccggagtaacgggtatgctgagattccccgctgatttcatagattatgtggagcacatggctctaccaggtgcgaaaacttaaacgttcctcgtgtttattttgtgaggaattccaacaattggcattgaattggatatggattagccttagtgatttatgaaggaatacatatatgtatgtatatatattttttgtaggttttttgatatttcagaatataaaggaattgactttaattaaaagctaccggtggggtatgctatcaatttatattccccacaaaccctcctagacatgttgttaattacatgttactaatgttacattttacaaacacacttgctgtgtgatgtgcattaaaaagccattaaaatgacgtaaaatgcccaagcgaatagcaaataaatgcgcatacgtcaggcggcagacaaggtaaactgtttgacaatcacgccctgaactctggactcttaaatgaaagaaagtaaatcccagtgaattaatgcatttaactttggctatcaattaagcgagagcgaccgcccagctattgatcacgggccaatccgagggcatttatcttcattagaccgccgagatgcaaatcaatctgccaaatgccggcaaagatttgagcttggaggctggaccggcggtatacgaacgtatgtaaatatcgacggatcgctgatgtaatgccgcagataggcagacccagtgagttttccttttggccaactgtgtggcaatggtgtggaaagcctgcctgccggcggcctgataggcaaatcaacaggttgaacggggcgccactcactggacaaactggtagtggggcatctcacctcgctcaatctcaatctcaatcaaagcaaaattgtatctaaaatgaattgagagcgggcggcggggaggaaatccgattcggagtcgaatcgaattgaattggatctaatcaaggttccgttaggccaaaatcccccagatcagtatctaatcggtagccgaccagagaattttcatgcaattaaaaggcagccccatgacggatgctccacctttcggcacctggatcccctcccgagaaccagggcaaacaaaatgcagttgtctattatcggatcaactggctcaatcgacacccacggcgctcgaactcaaatagagctaatacactaatactttaattgatcatgccgtaagtacatcgaattcggtgttgcaacatagcagctgcccacccacggctacaacagcagctatctgcagatacctttctgtaaagatgaaagtgtttagaactgattatggaggaattttttttgaatgcgggctggcgctgtgactcgtgctagtgtcaagcagcgacgtttcccggtggttctccttcccaatgattaagtgcagcggattccccccggatttggagagcagcagtgcagccacttaacagtaagtaatccgccgtttggatattacattctcagacagcactcgtatttaatattcttgaaatgggaacatttccataaatcttgtcaacccaatgattatttggaaatctgaaaccctatggcgttaccttaatatggaatgcaatttatgatgatggtgaaatattgaaacgttgaaatactttgctgaattggttttcctcagtgtagataactaattcaccgctgtaacacatttatggccaaattgaccgatcaccaaagtcgtcgcattcccaggcggccaaacataacatacattaccatccgtatccaatcggctggaagtgggtgcgctgctaatttggcactcggcaacaattcgagttcgcgagtccagcggcgacatttcccatagatcaccgctgtctgtggacctcaccccgagagatctcttggtctggaggtctcgagctcgcgtgggagtggaagtggaagtgaggtggcggtagtcgggcggactgtcacggactgtcggagacgttgcaaaggtaattagcatggcaccccacaatacgaaccccggtgacatttgtcaacaatctgtcaaaataaaatgcaacaaaggccgcggcgacggtcataaatttaatgcagtgcctattggccgggtttgagcaatttttatggccgatatgcgatatcaccactcggttagtggaatggtcaattagacgggcacgattccagtgggcgagatgggagccaaacaaagcaaaggccagtagctacgcgtattacttacattgttgaatgctaatggaactggcctttgccagcctccgaaattatcattcataaatgcacgaactgcggcttataaatgggtcaatcaagtgaagtaatcgagacgcgaggaagaaagccagaacaagaccagaaaatataaaactgaaagaaaaaaaaaggcaaacagaaaactgttgaacaagttaacaagttgttgggcccccaggcagtggagcactttcaattgtcgggggcccagcaaattggacgtttaaaatttattgtcgctgcctctgtgagcccagactgcccacgtgggtggtcattttcattttccctttttggaaagcccatcgatgtcaggggactcgagttactgggtcactggagcccgcctcattatgcaactgcaattgcattggccattaaatccggtcataaaatcaagcatccatcctgcacttcaattagccggcaaaagaagaagccactcatccgtgatctcctccgcagatcttctgtttgctcgctgtaaataaagcggcataccatggagagatatcggtcctccggcggctgtttggcaaattagcaagctcgttaagaagccaccgaggctgctggccagtcgattcttctattggccaaaaaaatgccattgaaaacaaacagattgcagctcttaaaacttctcaatgcaatttagtggcgctcataaaattgacctgctacggaagcgatttcttgctgtctggggaaagtgtttgatcttccacgaaagtggactcataaagccgctcgatccaatgatgatcagcggggcaatcaaattggttaattaatgactcggctatgaatgggccccaatgtgagagcgaaaacgaatgaaatgcaaaagaatttttacctatgcggaagcactttccgcaggaattctgcgcagaatgtaatgtcgttctgggagagcaggagaatttcgagttggggccagttcaggcagctcaatcagctgcccattcaaccagacaaacttcctcattgccctggataatccagcgtgcagtcatagatactaattgaaactcattgttcacttttgacgcccatcaattggacggcgaagtgactgagatgacgcggctgccctcgtcgaccagcccaaacaattgacacttttccaattgcacctttgcacacatggccggaatgaggggtgtgggtgaaaatgggaaaatcatggggcggggtggggcgtttggggcggcagatgccaggggaacccgcacaccttgcactcatgccgccggcgtcaattagtttaaataatgcgtgtatacacagcgaacgggttcgagtcattggcccacacttacaaaaaaacggaggtctattcaatgacattcaatgctaaaacaaaagaagaataaggatgcaagattacaatatctgaattataggaaactttataagatatgttcgataactatcaaattagactatttctctggctgcctagtaaaccattgttgtgtttgaagtaatatgaacccattccccaattttttcgagtgcatgctcagaccttctctcagacatactccaccccttctagccaccagccccatccccgtgcccctgaaacccccagcatggtcattagatttttgtatacactgcacaacatcagaacgcactgggactcggtgtgtgtgtcatcacctcaattgggttcacttcctacttgcaagatgcagacacgagcactgatcacagaatgtatctgcaagatgcgcggccagcattagtccccattcgcttttcacttttccagcggaagtcattttcaagttgaattttttcgttgctttttcttttgagacaccaacgggtctgaagccgcgttttatctacgcaaattgcacacgcacttaacccgcttccagtagctaaaatagctaatatggagcgggatccaaggcacgcgggtctccagaccgaccgccttccacattttttacggccgtccatagtcgcgcatattaaatagaaatggggagaaaaaaggggggactactgcacgctttttgcatgcaaaaatgtgtacagcacaccgaaaattgcttcgccgggtatattagtgcctcaatttgtcgattggctctgtaaacttgagctattaagtgcgaacatatttgaggaggaggtgtatccaattcaatccaatccaacccaatccgatccccaggagagacggctttcgtttaaaccggattcataacgagcaaacgcctcctgcaaattgaaattttgttattttgagcgcgtgtgcggttgttgtgggtctggtgatggcagtgaaacgatcattaatatgtcatttacaagtcggcaaattgtcgctagcaaattgttttcagtaataattttgttgggcaaggaagttaagaccgatcaataagtgactcactacttcgaagatttaccacttgattacacgaaatcaaactataatttcccaagcccatccgtcaatttcgctttcaatcactatcactcatcggccataaagaaaggcagaactttcgctttttccaacccaaatgtttgacttgagtaaacaacaatttctaaaatcttttggaaatctttcgctgtgtgtgaatgtgagatatttggaaggtgtaactgcagtttactcaaataattctcggaactccgtgatgcccaacactttcttatcaacttctatcggtgcgctcacatttattttactcgactttagatttacgataccactggcaattggcaattagagtgcaattaatttataatccccgggggcactactagagacctacttagccgcagagtaggtgacacacttaggtcgaaacatttatggagcaattgtacagataacgtacttaagctttcagatatgatatttacgattgttgaacttcgtagtggggggaatatcttttcttggcgcccggagaattcgcccgagatacatatatattgcgattgacgccgactttaggtgttgagcaatgagtcaaattatctgcgctatcggtgagcaatttcggttcaaattaatcacttgatttgcacgaaatccggttggataaaaaggcctcgagttgcaggggaaaatcgtgtaaaaagtgcatttgcatcgccaacgcaaagtgcattaataaattgatccagtttcggctttggatttttcctgttttattgcaacttgtaggtggccgtgttttgactgtttaccacttgttcatgggcctctgtgaagttgaccgctttttggatacccatccgatttcgtgccaacccaaatttttccaactccgcgaaatgcatgtctgagcccacagatttacgactcaaatgaccatgaacgtgtcggtatggaaatgtctatatagacgagtaagtatccggttaaattatcgctctgctatgcgaacgagcgaattgcaaggaaactccactaaaaatgcagagaactataggactgtatgcaaaattgtagaaagtcttgcaaatataatgtatagaaaagaatatgcatttgaatatgtggtctagaaaactaattcattaaatatacctaaaaacaaagttttaaatatacatcagactagtattcctcaagagcctattaatggttcaagaaacatataaatacgtttccaatctactggatgactattaaaattgattaaaaaaatgtaactacaatggacccatggctaaatgttaaatgagagttatattatcatattactcatacgccccattttcccttgcagccttcgatgttaattcattgccaaaaatatggttttctgtgccaccgggcaccgctggcatatctgctggttggacctgaatgtgaatcgacctgggtgaaaatgaattgaccgtaaaaatgattgtaaaacaacgccaataaccacggcagcaacagctgccgagaactgcgtgcaaaatgtcattaatcattgtaatttatatagcgggccagcttcataaaccatcgacgacttcgggggccgttttacaaaatgttttcggtcttacgaatttacgcataatttaacaatattgtcaatgcaggcggggaagaggtaatgtcgttgcttttgaccaacttatctggcctagaccttttttatgtaaccgccacgtggagggagaaggagaccaaagaccaaaacgaaacagttcattgccacctggctaaaaatatgtagaagtcagcatagccgaaaagtcgagcggctgccggaaaaacatttgcagaggaagagctcctccattcaaaagtttagcccacgccgctttcgctggcaaatccatttgacatattgcgtcgtccgctcgcccatttgccgtccctcttcggctaaccagaaaactctgcgacataatcttatctaaaacaaaacactttcgcggtattttcaagtctccatgctgcccggcgcataaatcagcaccactaccggcatcaccagcaccaccaacaccaccggtgccactgctgccactgctgactgatgatgagccacatcgctgacaatagcttgtcaagtgttgtctcctcatctgcccgccacccactcacttacaagcagatatatccaccgaaaatcggatctccaaatatttctcatgaagcgacagatggaaaagtccacgggaaatatatgtattagttttgtgtgcagctgataggtataagttcggacttttaattatgatttaaagtgtaatattgcttatttaaaaacattcgatatttgcttaagtgcctttataaattaataagatttctcaatgggtctttaaaattgtatataaaatctgatcgaaaccatatctttcaattaatttactttatcttgactgctaattttgtgttaggccaaataatttccccatttcagttcttcttagagtatttaatattcggttcgcctttcctaaaatatgcacttccattccgtttcctctcctactttgtccaatctgaaaattccaacaataaatttttggccgccgtctagccaagtgagctgaagtaagatcgctcactagattgctttggatccgtgacgtagccaggggcgaaatgtttgtgtaaaattaatttatcgtattatgtgccgaaagtgatataatagtccggccatttggtatacttaggaattaactgtgttgaaatttccttttttcttttcatgcccgattgccgtgccgaatctatttatcatgatctcgggggattaaaattgatgcaattatctaaatttacataaaaaattctaggctggtcatacaaaaaactcttagaagttggaaaccgatctttaattgagaaattcgttatggatgggtaagcaattttaacgagttcactttcccacaaaaagagcacgacaaagacaacgtttgttgacttttttacgcactaaacatgggacaaagactttgtatgtcaagtctagaacgccccacagagctaaaggcgagcacgaaaaaaattcaaataaacataaataataatatagaagattttttatttataaacataattaacacgctggagtcaagaggcaagtgacagtgaaagtaactgcagttggatcgatgcaatgttggccaaactgtcggagcaacttcatcaacttcaccggttaaaagagcgaccaaccgaaagacgtgccgtaaattaagttatcaaaagagatgatgtcggaagcttttagcatccagcgactccagttttgtcttctgggatctcgggacgacttgggcttcactcaacttcacacctcggtccacgcactaaatcagtcgcataattgccgcctggccgccgggccaagtactctccatatatcatctcgaaaatatggtatgcacgccccccgtgcaaaggtttttttttcaccttactccggacttggacttggactcggactcgggttggggttcagttcaggctcggacaccgttatccgctgctgcaatttgtgaacagcaaccgcaactggcgttgagcttcacccgacttttggaggtcaactggttgatgagcctcgcgaggtgccgctgaagatgccatgccagctgacagagtggaaaatgcacaatatttggcacttttcattttgtttggacagctttaattcgcagcagttgccactgcctgacggcttaacgttttccagcaattaatactaattttcgaatattatattaaaagcttctatgaaattattcttcttgcaacttaattcccctatacttttcagtctacataagattttatcattaagcgtaatttgaaagatacatattgctttatgttcatggtgtcaccatcatgcaatctcaagtgcgaaaaaagtttattctgggcgataaagatttactactccagccgaagttcaggccaatatccggagacgtgattttcggagcactttgtacaatttacagcccataaaagactcactcagtcactaataaacacaaattgcttggttagttgccactgatttggcttgtgaaagtcccacgttcgagggtgagagcacccacaacgactataggagaaacttcgcagcattttccttatgctgcttgaccataaaaatcattcccaactcccacaatctctgaaaagctcccaagcacgaccatttcaatcttatcgcactccactcgcattatcgccgcctgatcgagttcaaaatcaaattaacacctgaggcaggtaccgccagatatgtaaagtacaacagcggtggtgaattaaaaaaaatttgtaccccggcgaaacaaaatacccgctatctatgtggcatcttggaagctcacgatgatgttccacaatggcgatgatacgttcgccccgataagcggaaaaccggaatcgggttgtacaacaagtttttcggttagtttatcagtgccgcaaattgctggccaactgtagggaagtcaatgaaaatgaagttgtaaattaattcgactgacggaccaaaagttatgcaaatgctgcgtaccggaggggctgatctcatgatcatcttcatcagactgaaactgactcacttcccacagggagcccgactaatcagggcgagcggttaattaaggcaagatttatgcccttagcccactaaagaatttatatgccaaataatacagagccgggggccacaggcattgccaaatcaagtgtctaacttaatgacgctcaacataaacagacgagaggcgcggaaaatacgatttctttggcggatctcagtgcgtgtgttacgcagcttttatgagaactttcaacttgtgggcgctcgacatatgtgggtggggcacatcgactacgatcggatgtgtttacacatacatccacatcggctgaggagtgcgggcttgtattatttctgatattctaaatatttcatatggccattggcattagtttatttggttgttcatgcagtccaagtggaatgggtggttcgaagttcgaaacaaaaaaaccaaacaaagaacccccaaagaaattgaacataaaacatattcaaaccgaaatacaagatgagtaatggggagggctggcgtccactttgaagttcatcaaataatagaactttaacaacaaaatctggagaagataaaaactattctattggttagcacctcccattttacgagaccaaattttgttagctacctagagttcatatgagtactgttttgaagtgtaaagtatattgttcttcataatcgtatgttttattaaaagcagatgtacttaattaaagaattcgtcccctaacgagttcataatccaagtaattattgaagttcttcataaattggcttttctacttactgaattcactattctcgtcctgggttccgttgacaacgccatcccgcaatatctgaaggatgcgatttttgatgtacagctggatcttgcgcgaggtccaggccaaatgggactgtggcaccgtggatcgttcgttacggtccagattgctgatgggcgtgttactgctactgctatttatgttaagactacttctagggttgctcagtcttttcgatttcgaaccaatgaaattattgtcagcgggcgacattggttgctgctgctgatgctgttgctgttgctgttgttggtgatgatggtgatgcttcttctgctgctgctgattctggtgacgaatgctgcgttcggtacgcgacaggaccgccagatgctcgttcggcatcgctgagatgacgaatcccagcggctcctccagctgatcggaatcctccgcctgcgatgggtattgggattggatttgggtttgagtttgggtttgtggtgtgcttgttatggcagttggatgcgtgcttaagctctgattaaattcagcattaatactttgatttgtgggttgatttacactacgttcactcactgcgctcggcactaaactactacgactatgatcactttgtagataactattactaaacagattactattgttcgtgctgttgtattttgatgtggaggatgtggatgtgtttgtggatccggatgagtctgtcaagttgttgtccatggccatgaggggcatcgcagatacaaggccccgccaggcgatgatgaacgagaggagggcgcccagcagcgccagggccctccagtctaagcgcaggtttcttcgcatcaaagatcaccactttggttcacaggggtttctcgagccgttgttttccgcccggttcggaatctgagtccgaatgtttataatttttgtataaatcgctgtgtagtctcgcagttgtttatagattgtttgccagtttattgggcgtgcgccacgccctcgggtgtcgttggaacatatgtacgccccgttttcagatatctctttttactttcgtttcgattacgtttttttttttcttttcactgactttgcttcgctttgcaagtatttctctctctctgagcccgtttatattttcgttaaaatcgtttcgcctctttcctgggaggaaattaggttatcatatcgtagacttgttcaacacttttcaattgctgctgttgctgttgcggatcttcatcttcgtcttccccgctgataatgcatcttatcaacgccaatgactttcttgtcatgtcagaaattcccgcggtttggttagggagcgaggaatgaagcaatttcagcttgtttatgcggccaaatttcggttggctaacatagttgacgagctgcaatgaaaagagttttcgaggaacattatgaatatgattgacagaatataagtcattaactaatagattatcttcaccgtaaaatatctcaacacgtgacactcactagcttagccttaaatttatggccttcggaaattggctttgaaaattccacagcaagcatttgcaacacaaattcggattaagccaaattgtacataaattcttcagctaagcgcttttagcgcaatttttgacattttaattagcgttcgcctatataaaaggaacaacgacaaagtggcacagtttaattttagccaacggtctatcaacgggccaaagatacaattgtatcaatatgggcgacaagtgatcggcaagaggttacataaaaactgcccaaagggagcagttacgcaaaggaaaaactcggtgaaaacatcgaaaatgactttcccaaacgaagagagagagtgagagggaaagccccttcaagagtggcggacaggcaaattgtttaaaaataaaatggccaacaaaaacaattcgctcagaaaactgtgtcgaatttgaaaataatcacgcactaacttcgccggcaaatagtatctgtgtatctgtgcatctacgtatctatgagatactcgcagggcgacggggcggctgagtgacgttgc

SEQ ID NO: 9197 - DNA, 2741 bp, DROSOPHILA
aaacgaaagtaaaaagagatatctgaaaacggggcgtacatatgttccaacgacacccgagggcgtggcgcacgcccaataaactggcaaacaatctataaacaactgcgagactacacagcgatttatacaaaaattataaacattcggactcagattccgaaccgggcggaaaacaacggctcgagaaacccctgtgaaccaaagtggtgatctttgatgcgaagaaacctgcgcttagactggagggccctggcgctgctgggcgccctcctctcgttcatcatcgcctggcggggccttgtatctgcgatgcccctcatggccatggacaacaacttgacagactcatccggatccacaaacacatccacatcctccacatcaaaatacaacagcacgaacaatagtaatctgtttagtaatagttatctacaaagtgatcatagtcgtagtagtttagtgccgagcgcagtgagtgaacgtagtgtaaatcaacccacaaatcaaagtattaatgctgaatttaatcagagcttaagcacgcatccaactgccataacaagcacaccacaaacccaaactcaaacccaaatccaatcccaatacccatcgcaggcggaggattccgatcagctggaggagccgctgggattcgtcatctcagcgatgccgaacgagcatctggcggtcctgtcgcgtaccgaacgcagcattcgtcaccagaatcagcagcagcagaagaagcatcaccatcatcaccaacaacagcaacagcaacagcatcagcagcagcaaccaatgtcgcccgctgacaataatttcattggttcgaaatcgaaaagactgagcaaccctagaagtagtcttaacataaatagcagtagcagtaacacgcccatcagcaatctggaccgtaacgaacgatccacggtgccacagtcccatttggcctggacctcgcgcaagatccagctgtacatcaaaaatcgcatccttcagatattgcgggatggcgttgtcaacggaacccaggacgagaatagtgaattcacaattctccagcgatccacggtggatgtgggacgcatcaagttgcagagtgtggccacttgcctgtatctctgcatggacgcgtgcggtgttccctacggctcgaaagacttcaccgacgactgcgtcttcaacgagaacatgggtcttcagaactacaacacttactcctccacgtaccactctcaggcgcggcgggtcttctacctggccctgaatggcagtggccagccccggcgtacccagatcccggccagccgatcgctgggcaagctgagcacctacacgaacgccatcacggagacggtgccgcaggagcgggtcgagcagctgatcgccaagaattttggggccaatcgcgtcaagcacggcgtgcggcaactctgtgatacgggcaagccgctgatcgagctgatcgatgtggccagattcaaggcgccgccacattgcagcagcaacactagtggcagcagcagcagcatcagcagcagcagtagtagcagtagcaaaagtagtagcaatagcagtagcagttacgttcctgtgtctgcgatcagcagcctgagtagtattagtaacagtagtcaaagcgagagcggccatattagcagtagccttagcggtagcagtaacagtaatagtagtagcaatagtagtagcagtaacagtagcagtaatagtagtagaccaagtggtagcaaggccaacaagaagaagaagcccaagtgcaagccgcacgagcaggaggacactcacaattgccagaagcgcggtggcgccggagcgggagcattgcgaaaacttggtcccaaggcgaagaggtgcaaggagctgcgggagaaggcggccgccgagaagcgagcgccgcccaattgtggcaagaagaatggggccaggaagaatcctacagaggcagccaaggcggtgcaacagcgacccaagggaaacatccagcacggaggcaagaagaagccgaacaaggctggtaaacagcgccaaaatgggggcaaaaagcagcagcagcagcaacagcatcagttgcaacaacagccgctgcaacatcaggccaaatccatttccggtggcaagaggaagcatcggaaattggatgcaagtaccaccaccaccatggccaccagcctgggcacgcccccaagtagccactgggagagcagctcgccgctgcccgcattttcccttagcgaaaccagcgatagggtggagcgcaacgtgcgcatgagcagcggcgaggagcaggatcaggataacgaccaggatcaggagcagtccgatccgggggagcagggcgaggaggagaccgagggcgacggtggatccctagaagatgcgagctacgaggactcaagttccgaggcccaaggacgcagcggagcaggcggcgacgattcgctctactacgatttcctgtgtctgcagctaatcgccatggttttgctccgaaaaagagccatcctgtaagaggagatcctacgatttatcgtcgaaaccagatgtaccaccgatccacacaacaaagctaaagttcctgatctttaagcataagagttatacatttaaaactacatttatagcatttagtattttcgtatttatggtttaagactgataagagaacacaagagagcactaagctaaacgtactgtaaataaactaaaatattctaaaa

SEQ ID NO: 9198 - protein, 770 aa, DROSOPHILA
MRRNLRLDWRALALLGALLSFIIAWRGLVSAMPLMAMDNNLTDSSGSTNTSTSSTSKYNSTNNSNLFSNSYLQSDHSRSSLVPSAVSERSVNQPTNQSINAEFNQSLSTHPTAITSTPQTQTQTQIQSQYPSQAEDSDQLEEPLGFVISAMPNEHLAVLSRTERSIRHQNQQQQKKHHHHHQQQQQQQHQQQQPMSPADNNFIGSKSKRLSNPRSSLNINSSSSNTPISNLDRNERSTVPQSHLAWTSRKIQLYIKNRILQILRDGVVNGTQDENSEFTILQRSTVDVGRIKLQSVATCLYLCMDACGVPYGSKDFTDDCVFNENMGLQNYNTYSSTYHSQARRVFYLALNGSGQPRRTQIPASRSLGKLSTYTNAITETVPQERVEQLIAKNFGANRVKHGVRQLCDTGKPLIELIDVARFKAPPHCSSNTSGSSSSISSSSSSSSKSSSNSSSSYVPVSAISSLSSISNSSQSESGHISSSLSGSSNSNSSSNSSSSNSSSNSSRPSGSKANKKKKPKCKPHEQEDTHNCQKRGGAGAGALRKLGPKAKRCKELREKAAAEKRAPPNCGKKNGARKNPTEAAKAVQQRPKGNIQHGGKKKPNKAGKQRQNGGKKQQQQQQHQLQQQPLQHQAKSISGGKRKHRKLDASTTTTMATSLGTPPSSHWESSSPLPAFSLSETSDRVERNVRMSSGEEQDQDNDQDQEQSDPGEQGEEETEGDGGSLEDASYEDSSSEAQGRSGAGGDDSLYYDFLCLQLIAMVLLRKRAIL

SEQ ID NO: 9199 - DNA, 2567 bp, DROSOPHILA
ctactgctgcttcttcgttgtaaaagacattgacattttttttttgctgaccgtttgctcagttgcttttctctgtactttgttgtcgttgtttaatggtttttatacatattttttttttttagccagctattgttgttggtagcatcgcattacgtcactttcactgtagtttgcggcttaaggcagcctttcggctttacgttgttgttgttgttgttgttgtgttgttgttggcactgtttgcacttgtttttggtacaaacaagcaaattgcaataaaaatgctcgaaatttatggtccactggcatacatacattttgtttggtatgatttatccgagacttttgttcgccttgctttccggcggcacaatttatgcccgtttacatggtaaacttttgctgtttttcccagtagttacccgttcatgctttttggttcaagttcatcagttggccaccgaattcgcaactgggatcaggttttatggttatcgtcttgatagatgcgacgttaagttcgccaagttagactcgtatatcagcaactagttggtaaacactcatcacaaagttgatttgaaaatatttaacgctgtaagtttgttcattgcgcatacgccgtgttaacatgtgggtgtacctaccacattacgcattcgcaccgtttgctcatagagctggggctttgatagataagaatcgggctgaaacaatgtcattagtccagttaacgtggcctgactaaacaagctaatttcccagttaccaaatgtcggcaattttcggtcagttattttgaatgaatccaatcatccgagcattaaacaatgtggcctctgcaaagtttagctttattttcatgtttaggagctcttcaagtgcacagtgtgagttatttaaataaaccataattttaatacataaagtactacttcttaagcagatcagactgcggcttgagcacttttatgtcaaatcttttgtaccagatgatatgttcgcggagtatgacattgtcgactatgagaaaatcaatgtgaatctcacagttcaagtgccctttcctggcaagcttctcatccacattttcgtaaggaagctgtcagatcaagttggtggttcgaactacttcgatctgattcgcatgacgaacaaggatctctgcaagctcctcgattcacttcgcaatattacagtggaggaaattccgggcgaaagccttttgccctcgacttttgttgtctcatgtcctttggttccaggcttctattttgttgagaatggcgttattgattccaaactggttcctttccgcattcccgatggcagatacatggtactttttgagctgatacaagtctacgaggaagttatgaagctgatttcatgcagaatcaagttttccattaagacaccacctggatacacggaaccatcgctgtttaaaaatagcgaggaaaataaagcgactgagaagccagtagagaaaaccgaagaagcaagtacagaggttactcagtcgaaagaggatagttcggaagtatcaaacgattacgaataatgtaatttttgtaacttaaattttttcaaatatattatacatggagcctctcccttttttgctaaattttttcacccaaaaaaacaatttttacacattttctgcaaaatagtaccatctatcaccgagtttcgggtgcgtaataaaatttattatctcccactaaaaattcgccgggattgagacatatcgcacatgttacagccacgcccataaatgttaattaaaaaacccaggggcatgggaaatatatcaaacatgaatttaaaccgcgcgagacaagccgacgacaaagactaactcaaagatatccattcaatccaatcttttaatttgttgtcatggtaaactttgtttgtgatatccattcgacacgtatttgtttttgtggagtacaaactgtggaatgtttttttgagctgcgttgacattgtggcggcattctcgaaagttcgttatttacatatttagagcagggcgaatgtttccggttttcagctgcaagatcgtcgtcagcatcatcaatacttgcacgatgactgggcaaaaaaaacacttggcctccgtaccaatcatatgttggtttttataccatcgcccagcccaaaatggttccgtcgtttagcttaacttttattgatttagtattccactctacaggcctgacagctgttcaaagtgtcaaatatttatggatcctctgctcaagtgataatttatattttaattggcttgaccactgatcattcgatcattggatcttgaacttcagattaacttaccatttgaattgggtgatcgaggggctctagatacactgaattagcaattaaactgcctggcattacaatttccgccttcttccgggttttgtttaaatattactccgctgaccgcatttgaggtgaccttcatttgtcgatgtcttcatttacccagtctgattattatttaatcaacgatcaacttcttcagtggcttagcgaagcaaacaaaagat

SEQ ID NO: 9200 - DNA, 567 bp, DROSOPHILA
atgttcgcggagtatgacattgtcgactatgagaaaatcaatgtgaatctcacagttcaagtgccctttcctggcaagcttctcatccacattttcgtaaggaagctgtcagatcaagttggtggttcgaactacttcgatctgattcgcatgacgaacaaggatctctgcaagctcctcgattcacttcgcaatattacagtggaggaaattccgggcgaaagccttttgccctcgacttttgttgtctcatgtcctttggttccaggcttctattttgttgagaatggcgttattgattccaaactggttcctttccgcattcccgatggcagatacatggtactttttgagctgatacaagtctacgaggaagttatgaagctgatttcatgcagaatcaagttttccattaagacaccacctggatacacggaaccatcgctgtttaaaaatagcgaggaaaataaagcgactgagaagccagtagagaaaaccgaagaagcaagtacagaggttactcagtcgaaagaggatagttcggaagtatcaaacgattacgaataa

SEQ ID NO: 9201 - protein, 188 aa, DROSOPHILA
MFAEYDIVDYEKINVNLTVQVPFPGKLLIHIFVRKLSDQVGGSNYFDLIRMTNKDLCKLLDSLRNITVEEIPGESLLPSTFVVSCPLVPGFYFVENGVIDSKLVPFRIPDGRYMVLFELIQVYEEVMKLISCRIKFSIKTPPGYTEPSLFKNSEENKATEKPVEKTEEASTEVTQSKEDSSEVSNDYE

SEQ ID NO: 9202 - DNA, 3755 bp, DROSOPHILA
gtacaattaattacaaaaatgtcttgtaatcgctaaaattttaatactcatgtactgtccgcaggataggcgctgggcccctgctaattccatatcggatctctcctctccagctctgacctattcctcgtccgcatcggcgtctactctataaattacgtgtagggttcgctttcgcaatggttgcacttgatttcctcgtcaaaagtttagttatagcgtagggagttgtgagtattataaacgctttctaactacagcgtgtggagttacattagatatatgtatatgttatgtatatacgtggagtgggtgcttcacttgttaataggggttacatcaattgtattttttccgtttttccattttgttttttgttctttttttgtttgttttcgttttgctttgtttcttggtttagtttggttttaatacatatatattaggtaagtgtaaatattcatatgttgcccaggactgagctgggcgtagctctagttgcgatcgcacgatctagacttaatgccaaggggccagtgtgaaagttggccttgtgtgggtaaatacatttcgaaatacgtgtgtgtacgcaatgtgttctttaggcgagaagctgacagcaaagcccctgctcactaaattcaacagtaaagacaaacatctaattccaaaaaaacgctagtgagtgctaagaaattgttgtcctaatgcctagaaaatcctttcggttgagagctcgttttctgcctctccctccctttgtttctgccctgtgttctttctataaatttcaactgtgttgcaagacttttgcctacatctaagtgtatatgcgaaggagctgcctcccgtccgtctgctgcctgaatgtccgcctagctgctcgatacaatttctcgtaaatatctatataggtttatatatgggtgtgtattgtatgtgtgtgggttccaagtcaactcctagcgatgtccttggatcagctgccgccgccgaagccttagtagtagaatatctggccggccttctgccgcttgcgctcctccagcttgcgattgatctcctgctgccgctcggccttgctgagggctcttgccacgtacaagaacttgttgtcgcccagctgcttgccgtgcaggccaattacggcggccagcgccgactgtgggttctcgtaggcgacgaaaccgaaacgccgggagcgcccctcctcgtccagcatgagctgcaaggatcggagaaagcaaatcgatgatataaacaaattagcacagatgggccaggtggagtcctcatcttccccgccgtcacaaactcctcgtggctacatgggcatgcgcagcaatggcgcaagagaggacttaagagagtgcaaaactgtgccacatggttgtcgtccaaccacccggccccacgaacatccccgtagggaagatgaggtgaccaaacaacgtaccttgtgactggtgatgcggccgtagggctcgaacatctcgcgcaaatgctgctcggtgaactcctcgctgaggttcttcacatacagattcttgaagtgcgtggccttctcctgctcccggtcccgccgtggtatgaacttgaccacatgcaccttctgattattgcacagcatcccattcaccttctcgatggccgctcgggcggcctcctccgaatcgaaatgcacaaacccatagccgcgtgaattgccatcctcgtctttggccacattgcagtttaggatgtttccgaacaccgagaacgtgtcgtacaccgccttgttgtcgatggaccgctccaggttcttgatatagatcttgccactgtccggagagctgttgcctccgctgcccccagtggagccgctagccagagctcccccgccgactcccacgcccacattggccgagtgcgaggacgtggacgtgtgcccgctgcccagggagttgtggccatgccgtccgagaacagcggcggccgccaggtggttactggctgcgtgcccaccgccgacgtggctcaggtgaccagctgcagcggcgtggtggtgcagctgctgctggtggtgcgccgctgccagcgtgtggtggttcagggccggctgctgctggtggtagttcgccggattgccgcggaacgtcatggagttgacgaacataatggctgctggctgtttgtggagcgtggtggcggctagtggagtgctgtaggtgctgtaggtggattctgcgtcctggtggccgtggctctggatctggataccgctgtagatgggcccgagaatcttgacggcgttcttgtcctggtcctagtatttcacttcacttcccgatttacctgggatgtcgggaatctgcgttatggccaatctagtcgtaatccagcggaatgcccacttaccaggatttgcacacggaatatgaccaaggattcgcggagttgaaaaaatcgtttttctctcgcacagactcttttcaacgctcttcgctctctctttctttacctctctggctcttcctttcgctcttttgtactttactttttctgggggctttcacttttgggctgattctttggggctctgctgggctttcgcgtaacactttccggtattgttttcgagtggcacctaaactagactcttcagcaattgcagcagtgtaaaacctggtttttgcagcttcggcgatggccctttattatttaattgtattttatgcaaaaactgtcgctactagtgattagtgatgttaaaaaacatcgatgcatctgccatcgatacgtgaggccttcatgttcttggccataccatcgatgactttctcgctcccgattgcttagcaagtccaccctccacagttagcggataatggccatcaaagcaacgcttaccaacactgcaccccttgttttggaaatgcaaccacaaaagcattggacacttgcttacttcaaataaaacacatttaaacaattagatgacgtgatggaccagaatggcgcatcgggaagtcatccgaacaggctatcccaaggaagaggagcccatgcgcgcgaacgtggcgccacagtttccgcggcggcaaatcggagtaacattatcgacgaaatggccaaaatatgcgaagccgatcgccagactttcgccatcgctcgacggactcggggtcacgagcggcttgcggtggacaacagcgacttcgtcgccgtggaggatcttattttgtcctacgcagagcccacgcccgaggaccaggtcgagatgatcatgagcgacttttgctcgtctccaacatacgcagaggatgaggatgagcccagccatgagtcggagccgtggtttcgatttcgcaacaaaaggatcagaacctacagccggaagagggatcccaaaagccacaaggccgttcaaaacgagaagcgtagaggttcctcaggcctctccgtgcagagggatctcaatacttcgttcacatctatggcttgtgatttcgatgcttcatcacagaagatacacgaggtccttttgaacctcagtcaatacttttccgcgaccgcgacagcttccggtccgactcctgtcccatcgcaaatagatctgccaaccgaagcaaggcaggattctggtgacgagtgtttcaacgctgaattggagaacttgagggatgacctgttgcagagcggatttacatttgaggcctctttctatgaaaatgagcatgagcaggaaggtagggagtgggatcgatatggcaaga

SEQ ID NO: 9203 - DNA, 1461 bp, DROSOPHILA
ttttttaacatcactaatcactagtagcgacagtttttgcataaaatacaattaaataataaagggccatcgccgaagctgcaaaaaccaggttttacactgctgcaattgctgaagagtctagtttaggtgccactcgaaaacaataccggaaagtgttacgcgaaagcccagcagagccccaaagaatcagcccaaaagtgaaagcccccagaaaaagtaaagtacaaaagagcgaaaggaagagccagagaggtaaagaaagagagagcgaagagcgttgaaaagagtctgtgcgagagaaaaacgattttttcaactccgcgaatccttggtcatattccgtgtgcaaatcctggtaaatcgggaagtgaagtgaaatactaggaccaggacaagaacgccgtcaagattctcgggcccatctacagcggtatccagatccagagccacggccaccaggacgcagaatccacctacagcacctacagcactccactagccgccaccacgctccacaaacagccagcagccattatgttcgtcaactccatgacgttccgcggcaatccggcgaactaccaccagcagcagccggccctgaaccaccacacgctggcagcggcgcaccaccagcagcagctgcaccaccacgccgctgcagctggtcacctgagccacgtcggcggtgggcacgcagccagtaaccacctggcggccgccgctgttctcggacggcatggccacaactccctgggcagcgggcacacgtccacgtcctcgcactcggccaatgtgggcgtgggagtcggcgggggagctctggctagcggctccactgggggcagcggaggcaacagctctccggacagtggcaagatctatatcaagaacctggagcggtccatcgacaacaaggcggtgtacgacacgttctcggtgttcggaaacatcctaaactgcaatgtggccaaagacgaggatggcaattcacgcggctatgggtttgtgcatttcgattcggaggaggccgcccgagcggccatcgagaaggtgaatgggatgctgtgcaataatcagaaggtgcatgtggtcaagttcataccacggcgggaccgggagcaggagaaggccacgcacttcaagaatctgtatgtgaagaacctcagcgaggagttcaccgagcagcatttgcgcgagatgttcgagccctacggccgcatcaccagtcacaagctcatgctggacgaggaggggcgctcccggcgtttcggtttcgtcgcctacgagaacccacagtcggcgctggccgccgtaattggcctgcacggcaagcagctgggcgacaacaagttcttgtacgtggcaagagccctcagcaaggccgagcggcagcaggagatcaatcgcaagctggaggagcgcaagcggcagaaggccggccagatattctactactaa

SEQ ID NO: 9204 - protein, 307 aa, DROSOPHILA
MFVNSMTFRGNPANYHQQQPALNHHTLAAAHHQQQLHHHAAAAGHLSHVGGGHAASNHLAAAAVLGRHGHNSLGSGHTSTSSHSANVGVGVGGGALASGSTGGSGGNSSPDSGKIYIKNLERSIDNKAVYDTFSVFGNILNCNVAKDEDGNSRGYGFVHFDSEEAARAAIEKVNGMLCNNQKVHVVKFIPRRDREQEKATHFKNLYVKNLSEEFTEQHLREMFEPYGRITSHKLMLDEEGRSRRFGFVAYENPQSALAAVIGLHGKQLGDNKFLYVARALSKAERQQEINRKLEERKRQKAGQIFYY

SEQ ID NO: 9205 - DNA, 3466 bp, DROSOPHILA
tacaaatatttatgcaaattaaataatgtgtagcttttcacttttaagaacgcagtaagattaacaagtttgcttgtgtttgctatacgattttattggctttatttctctggctaatatattcatttcaataagtgtttgatattcgggttcttaacatatagaatttctattttaaaaacgtttgcttatataggtatgtgtataaatgtccgtgtggctttgctgcgtttttttttattgacgtagaaataaaaaatgtttgtttaaaactaagaaaaagtttccatcacgtcaactgcgcattaagttggctgttttatttggttttagttcattttgaagataaatgcatcatattctgtaaatgctattacgttccgtaaacagttttaaatttggctttgagttataggaaaggaaagctgagtttcaagttcgtaggcaagtgcccatctacaacagtttactgtatttttttgttttgataaccttgcaaattgtcataaactatattggatggatttgagataagcaagcagctaatgcggtaaactattttcgaaattacgatgatttggttaagtggggttaccccatcatttctgttcagacaaaaaatgaatttgaacttctaacttattgagcaattgctacttttgactgacacttgcaagattatttcagtttcggactaccaaactattgagaagttttccttgctttatagacgctgtgcgagtgttagatctctagtaacttaagactttctagggcttggattatgtatgttgtggcgttgatatctatatatataatatattgtatttccgttcactaaagctgcaattgcagagacacgcgatcatgtcaagttgaaaggaacaaatttggccaaaggaaacttaatgtgttgatctgcgtatgtaatttacgttttttatatcacacttatggtcgaaacgaaactggaaccaggaacacctcacattctcacatcctacatggatagttcctggcgcggtttgttgatgtgcagccgctggggatcctgcggcgcaacacaaatgtcggtcaggatgacgacctcgtagggactgcagtcgggcatgcgaaggaatccgcacaaccagccgtagaatcccttctcgatatccgtgatgtcgttcacccaactgctgtactgcagactcagctgccgcaatcccgagtagatgcccagtccgaaggtgcacagcacgatggccagcggatagatcacgaacagcagcggcgtcaccaggatcttgtgcaggtacgtcctctcctcgcagtaatagttgaacatattgtaccaggtgagcgttccaatgtagaaggagtataccgccgaaacgacggtcacaaacggcaggcaaaagagcgagatgagcaggatgtggaggccggtgccacagctgcaggtgcagcacaaattgccacccttctgtgtgtcgctggccatcgcatgggcgttcagctgctccagctcctcgcgactgatgtttatctgtaggtccacggactggcccttcttgcgaccccgcttaatggtgcccgtcatggtcaggtagttgccgccgccctccttgcgcgcctgatagccccgctctagactctggtcgtagttgttcagcacactcgtttcgccggactccagatcttcgtagttggctatctccggtgaggagcgctgattgcgcccctggccgggcagatcgcttgtacggatgttgacccgcttcttggaggacgaccggttgctcaggcagtcctgcgacttgctcaacttggcgtccaggctgctctccgaatagcaacagctgctgggcgtcaccgtactgctctcgtgccgctgcgacgtcgacttggtgccctgcgatatggactcgaagttctgcagctcgttgagattactgttcgatctggctgacttctggctgtgctgcgtggagctggccgagtgggtgctagccagggtgtcgtgggcactgggcacacccagctctcccggcagctgcggcagcggctgcttgttcttgatgatcagcttggacttgcggagctcctcttcaagtcccggattggagggcgacaacttgggtcgattttgctgcaggagaagcaatcaaaagtttatctataatccttataaccacaaaaacatatttatcaattaattagttttatgcatcgtaaaaacactagtagaagttagaactgaagaatcgcaacttatatatcttaaggattagaacatgaatagatggggcttttttgatataattgtattattttcacctgcacactgacgatgtgatccacatagttctgcttcttggcctccgatttggtttgttgacgtttccggggcggaatgaaaacagggcgttccttactgcccgtactggtgtctccgcccaggccgctcgagccctttcccaccatttttcgaattttccacttggtcctggcgcaaaaaactacatcaccatctttgggagcagacaaattttttcgttccccgtgacgttacttaacgcccagtaatgcaaaaagtgcacttccggcctttgtcgcttcgcggctgtgttgttattgatttttcctgggcggctggcacgtccttgtgctgaatttgcgttcattggcgtttttagggggctgctgttgttgcattttgggttgggcggcaatgtttacaaaaacttggcgcctgcgcgtgcggcatgtttaactttttaaaattctgttatttcaatagcaaaattttaaagtttaagttatgtagtgtttataaatacacaatttgccacttaacaatatttttagtttgttttgcgagtagcttttgtttttagctgttgtaacggttaaaggaataacagtctactttcaacgggaacagctgacttaggcaaagcaaagttggctgcgattgtatatgcacaagtcagtgtgaccaaaaagtacaagctgatcctgcattggggatccatgttaagttatttagatatttagtttgtgaaatgcacaacagcatttttaatagaaagttaacaaattttgaaaacagttttaattttatccgatttgtaaaacatatatttaattatttatttcaaatgtagtttcaaaagacaagaaaaaaaacaaatacacgtaagtagccgcataaaccaaataaatagttcctgagtcccggtgagcttttagggttttttatcgatcgctgtctggtcacactgcgctaaccggccttttcccgcctgctcttcttccttatcatcattcattttccagtcgttctccattcgccaattggaccttgtcgctaaactttccaataaaccatactgcaaagatgtctgctaccgagggcaaggtgagtgcagcaactggaattttaattagcagaaacacacccaggctgtcaatcaacaatcaa

SEQ ID NO: 9206 - DNA, 1278 bp, DROSOPHILA
atggtgggaaagggctcgagcggcctgggcggagacaccagtacgggcagtaaggaacgccctgttttcattccgccccggaaacgtcaacaaaccaaatcggaggccaagaagcagaactatgtggatcacatcgtcagtgtgcagcaaaatcgacccaagttgtcgccctccaatccgggacttgaagaggagctccgcaagtccaagctgatcatcaagaacaagcagccgctgccgcagctgccgggagagctgggtgtgcccagtgcccacgacaccctggctagcacccactcggccagctccacgcagcacagccagaagtcagccagatcgaacagtaatctcaacgagctgcagaacttcgagtccatatcgcagggcaccaagtcgacgtcgcagcggcacgagagcagtacggtgacgcccagcagctgttgctattcggagagcagcctggacgccaagttgagcaagtcgcaggactgcctgagcaaccggtcgtcctccaagaagcgggtcaacatccgtacaagcgatctgcccggccaggggcgcaatcagcgctcctcaccggagatagccaactacgaagatctggagtccggcgaaacgagtgtgctgaacaactacgaccagagtctagagcggggctatcaggcgcgcaaggagggcggcggcaactacctgaccatgacgggcaccattaagcggggtcgcaagaagggccagtccgtggacctacagataaacatcagtcgcgaggagctggagcagctgaacgcccatgcgatggccagcgacacacagaagggtggcaatttgtgctgcacctgcagctgtggcaccggcctccacatcctgctcatctcgctcttttgcctgccgtttgtgaccgtcgtttcggcggtatactccttctacattggaacgctcacctggtacaatatgttcaactattactgcgaggagaggacgtacctgcacaagatcctggtgacgccgctgctgttcgtgatctatccgctggccatcgtgctgtgcaccttcggactgggcatctactcgggattgcggcagctgagtctgcagtacagcagttgggtgaacgacatcacggatatcgagaagggattctacggctggttgtgcggattccttcgcatgcccgactgcagtccctacgaggtcgtcatcctgaccgacatttgtgttgcgccgcaggatccccagcggctgcacatcaacaaaccgcgccaggaactatccatgtag

SEQ ID NO: 9207 - protein, 425 aa, DROSOPHILA
MVGKGSSGLGGDTSTGSKERPVFIPPRKRQQTKSEAKKQNYVDHIVSVQQNRPKLSPSNPGLEEELRKSKLIIKNKQPLPQLPGELGVPSAHDTLASTHSASSTQHSQKSARSNSNLNELQNFESISQGTKSTSQRHESSTVTPSSCCYSESSLDAKLSKSQDCLSNRSSSKKRVNIRTSDLPGQGRNQRSSPEIANYEDLESGETSVLNNYDQSLERGYQARKEGGGNYLTMTGTIKRGRKKGQSVDLQINISREELEQLNAHAMASDTQKGGNLCCTCSCGTGLHILLISLFCLPFVTVVSAVYSFYIGTLTWYNMFNYYCEERTYLHKILVTPLLFVIYPLAIVLCTFGLGIYSGLRQLSLQYSSWVNDITDIEKGFYGWLCGFLRMPDCSPYEVVILTDICVAPQDPQRLHINKPRQELSM

SEQ ID NO: 9208 - DNA, 4390 bp, DROSOPHILA
cttgcaaatgtccttgttttaatatatagtaaattctattgcatttcatataattatttactatttacctatatcactattcaattagacccaaggaaatacttctttcaaagtcacgattgtatttaaaatatacataatcatttttatcaagttccatttcgtcttaaattacaatattattaaataattgccaactgatactgatgaactatactatgtagctaccaatcaaagtacctttcacatcactatctatcaatcaaatagttatagttagcattgcccatgcgataatggcaaaccgaaatagcgcaaagaaaagccacttcctatttctcttgaacttgatgcgctcgaatgaagctaccatgtctacaccatgcccactttcgcagataaatcgagcaatgcacccgactaactccatgacacaattgatgcatcccagcgcagtatttcctcgattaggtattttcgcttttacccgctttttgcaatgcgcaataagtatctcttggtgtgtgcgaaaatcggtggagcaaccagttttcgagctgcattttgacgttggcttttcttttacgtaactcgctggccgggcacgagccaaaaaccaaaataaatatcaataataaacacggcgccgcgccaacccagttagtggttttcacttcacttcacctcacatcacatcactttacttcttcttctttgcgggacctaccaattcggtccggcttgctccactaagccggtagccagcacgttccattatcgcacacatcccatccggaatactaatggacggacatggtgtacctttgaggaaatgtatatgtagttggttcatgacgatccatagttcgttggccaagtgaacccgtcgtatcggaaatcaccgctttgtgcacagccaagttaaaacggtcgagttcaatggaaattgcctgatttcgaattccacacagtttagttaggtgctggagtgccgattctgccgcctaaagtgccaaatattcaaagtgaactatcagaagcaaccatgatgagtggccagccacttggctcgagggtttggctgttgtccggagtgctattagtgacatttgctgggacagatgcctacggatttggacgttgcccgaattatccatcgatgccaaagtttaacatgagtcgggtaagttagttgctggttttctcatacatactctacaaactctaactaaaattgctacatatttcgatcgctattttattaacagcctgtttgggtgttgtaaatattcatacagacatttgtttgcagtctatatatacatatttgcaattggctttattaaaccacctttcaaacctgttactaaagatctgtgtctattgacccactgagtaacaccagttataagattacaaagaatttatgagtatgaaaataactatgagtatgaatatatgagaactgtttgtccttacaacaacgagatgcattgtataactggccactcatcgcctgtctatttgccatcgtcttaaacgtgtcacatcttcgattaattggcacaaggcgtctggcgcagacgaagacccctctttacatcttggggattgtgcagatgatgaacttgaaccattttaaggccaccaaatccgatccgccgtgtaaaatgcaaaccagttttacagaaggaggcgagcggcacaaaagctttatggcctgctgatggtaaacaagccacttattttataaagaagtaaatcaaccagtaccaatgctgagacatgggcacgccaaggacaacaaagtgcactacagtggaacattcctggtgcgaacatttcgctattacagccaatatttcaatcaagtaattatggaatcatcttgccaaaccaccgatatgacatcacaaatgtgaaactaatgtttttcgaaagagaaaattagaaaattggtttcaggtggctgtaaaaagattgtttcaaagtatttctgagaatccataaatggactttgtttagtactcataaatgcacgtagttgttttaagctataaaagccgacgactgttcgcttagatacactgtcgagatcatggatagaaaattggaacaatcacttaagcagctcaaattaaattgattgagccttgatttgcataaaagataatgcaccataattgcccggttgaggtggaggcattgtcactcacattatgtgggtctagcgacctcctctccacttccacttccacttccaaatggcacatcatccaattgagttgttgacaggcgtaaattaagccatttgccaccggccccgccccctaaacgcacttttgacccggggcaaagacctcgactggccagcagtggctctttaatgcgatgcggcgcccaccgccgactttgaactgcaagatgagcagcggccaaaagagcggctcttctcaatgaccagcagccacaaccgagtctataaccagtttcaaaaatgtttacgttttacgcattgtttgcgctaagtggcattttgattagtaacccagttaagtgtttcttggccgagagaaacgctgcgtgacaaaggttttggctttcagactgatggttatcaggtgattctacttccaataaaacccttcagatttaatgaagtaattggaatatgtagaagaatttccattcactgaaacaacttacttaagaacttaagaacatgttgaaaaggaagtaaaaatatctattttatgtaatgtcattatcttgtaggtccttggacactggtacgaggtagagcgctctttttaccttccggaaatcgcctccggatgcaccacctttcagtttgagccgtacaacaagggcgaacaatcgaagttttccaatttcaagctggctgtggccattaaaaacattaatcgcatgtatgattaaataatctaataatatatattgtgtgttagaagtgtttgtcctttttagaactggtaatccgaatgtgaacattggctatgcaacaccagaaaacagccgatcctccatcatggattttaaggtatctacaataaataatattaacaacacacaatatacacaattcctttttcctagtttaccacccgatttccggacgtgattgcccgactactgccaggttccggaaagtaccaggtgctatacacagactacgagaacttcgccatcttgtggtcctgcggcagcattggctcactgggtcactccgatcagatctggattcttggacgtgatcgggacttcgaggtggatatccgatccaaagtgtacgacgtgttgaagcggctctctctggatccggaaaggctcatcatcagcaaaaacaaacaatgccccgaggcgctgtaggaagctcctccagcgtctcatcccccatctatatgtttaagttcattcggttaaggaacaaattacatttgatgcctaatcaattaggctgctgtgatatcgaggagtgtgaatcggcggagagaggcgaagcaacgcaaatacagaaacaaaaaacaagagtaactcgatcgaggttttcaatatatgaactcatgcccgcattgccaattaacgcgggtgtcctaattaatttgcaataaatagaatttcccagtcatcggaacttagtcgtgatttaccaacggattgaaaaggttctggccggataagatgtcccgactgtggattttgttttgtctgattttccttgtggcccaggcacatatgtccgatgcgagaggaggtggaggcggaggaggacacggaggaggcggtcatgctggaggtttcggaggtggcggccgcggaggcggattcggaggaggaagaggtggttttggaagaggcggctttggaggacgtggtccaggattcggtcgtggcggtttcggtggaccaggccgcggaggctttagaggaggcggctttcgaggctatggaggatatggcggatatggcggatatgcccgatatggcggctacgctggatacgcgggagttcttccggttcctcttcccgtaccctatcccgcaacctataatcgctgctactacgataattactattataattactactactgctgatatgatacggttatagatggtttatttatacaaattacaatcaacacgttgctttagttacaaagattatgtaaagttacccagaaattcgggctgtagacagttctctaaatattccatatctcatttaacttattgttttgatggtctccggtgtctggttcctgtttgtccacccagtgatcagcgatcagtgatcagcgatctttgtggagtgcgactgcgatggcagtgcttaagcctagtcaaaaatattcccattaaaatgcaa

SEQ ID NO: 9209 - DNA, 684 bp, DROSOPHILA
ccgcctaaagtgccaaatattcaaagtgaactatcagaagcaaccatgatgagtggccagccacttggctcgagggtttggctgttgtccggagtgctattagtgacatttgctgggacagatgcctacggatttggacgttgcccgaattatccatcgatgccaaagtttaacatgagtcgggtccttggacactggtacgaggtagagcgctctttttaccttccggaaatcgcctccggatgcaccacctttcagtttgagccgtacaacaagggcgaacaatcgaagttttccaatttcaagctggctgtggccattaaaaacattaatcgcataactggtaatccgaatgtgaacattggctatgcaacaccagaaaacagccgatcctccatcatggattttaagtttaccacccgatttccggacgtgattgcccgactactgccaggttccggaaagtaccaggtgctatacacagactacgagaacttcgccatcttgtggtcctgcggcagcattggctcactgggtcactccgatcagatctggattcttggacgtgatcgggacttcgaggtggatatccgatccaaagtgtacgacgtgttgaagcggctctctctggatccggaaaggctcatcatcagcaaaaacaaacaatgccccgaggcgctgtag

SEQ ID NO: 9210 - protein, 212 aa, DROSOPHILA
MMSGQPLGSRVWLLSGVLLVTFAGTDAYGFGRCPNYPSMPKFNMSRVLGHWYEVERSFYLPEIASGCTTFQFEPYNKGEQSKFSNFKLAVAIKNINRITGNPNVNIGYATPENSRSSIMDFKFTTRFPDVIARLLPGSGKYQVLYTDYENFAILWSCGSIGSLGHSDQIWILGRDRDFEVDIRSKVYDVLKRLSLDPERLIISKNKQCPEAL

SEQ ID NO: 9211 - DNA, 3404 bp, DROSOPHILA
cttgcactgatcaccagaccccgccgacccgtctatttatatgcctgttcagttgagagtgagttgctcggccggcagaccgctcgtctttcatagaaactaaaacaacgcgaagcatcagccaaagattcagtgattcacatgtcggcgggcggggtggtatatcaatctgtttggactattaaaagtgattttagtccaacacgcaatgtgataacaaaagccaggttccctttttcgtagccaagtagattaccttattgtggtgccattgttgaacttgcgacgccttatgtttgggcaatttgttgacttgcggtttctccggcttcacttctttttgctaatcggtgtttccttggttctgggttctatttgacttggccattagctgcgagcggaatctctgctaaatattaattagcaacttgacattggccttaacgttcagatcagccattagcttttcgttcacacctccataataggctagagtagctgaattatccgaatatagttatatttttaagtgtgtatgctggcagacggcgaataacccattgcgcaaaattgataagattttgagatttaaatttaagcaggcggtttgaaaatgccgacctgccaacttttcgaaattagctgcattgagtaaattaaaagtcgaatgtagagttatttgtaaatttctaaatatttcacatccaagctaaaatctgtaaaatcgaagtaattttattcttataattaaatgtgtttacattttaattaagatttgctttccataattatcaatcaagatttacaaaatggagtagaaaagaggaaaatacataaatctcctctttgattttcccacttttgaaaatttaaataaatagcgccaattttccagtgctgccactcttatcaaaaagtttgcaagagaacaaaaaatcgattggcctcgccaacaacattactcactgcactaatcgattataattatatattaaagcacaaaaaataccaacagatatcgaaattcgatagcatcgatacgctgtaacaaacaaataaaaaaaaagaaacaaattagtcaaattacaaaatttatcagttatccaattgcacacaaaaaccaactcaaaattagcccaatttccatcgcaggcccacacgaagagaacaaacggatacaatgacgggttcgttcagtgtgaagctcaagtccaaaaaaggtcaattcattgtcaacgacctgaacgagcatacgacgctgggggagctgaaaacgaaaatagtccaggccaccgacatcgaagcgacgcaattgcacgtcctagtaggctatccgcccaagccattggatctctcgcagcagcaggagcagcgcgccctcaaggcggtcggaatcaacagcggagagacgctgattgtggaggagaaggctgcccctgctcctgctgcccctgtgcctggcggcaccaccgtggaggatgacgaggcgctggcgcgtcgtctgcaggccgaggaggaggcacagctgctgcaggaaaccgctggcggtccagtcgcccaggcagcagactaccagctgccagtggcgccgacggaaagcggaccgaatggcgactttaatggcatactgctgaagaaggtggtgccggcggacaattcgtgcctcttcaccagcatacgattcgtgctcaacgggaaggtggacaacgagggcagcgaaatgatgcgtcacatcattgcgcaggaggtggccgccgatccgcagagctacaacgacgccgtgctgggcaaatcgaatgccgagtactgcgcctggatacagaaggcggattcgtggggcggcgccatcgaagtgtccatactgtccaactactatggcattgagatcgatgtggtggacatacaaaacgccattatcaatcgctttggcgaggacaagaactttggactgcgtgtcttcctgctcttcgatggcatccactacgatccgctgtacatggagacatcgccgagtgctgcgccggccaccatcttcccggtggaagagctgggcgtctatcagcaggccgagcagttggccaacgaggcgcagtcctcccgccaatacaccaatgtggataaattcacgctgcgctgcatgcagtgcgatgtcaggctggtcggccaggtgcaggcccaggagcatgccaagcaaaccggacacaagaactttggagagatttaatacgtcctgatcttcggcaccgtctacattgtggcattcatgctgttcgcctactacctgctcaccacctagccacaatcgccgtgcgaggagtcatctcattagcagtactacctccacatcaccgcctacctaagttattaattattgaattgagcccagccgcctgtattcatgttagtccccttttaatccctttcggaatgcaataaaatataccttcatctacactaggcaagtcttggagttggtacctatatagctataaggtcaagttccagaaagctgtcctgaattcacaaggcaaccaactacgtacgtacttttttactgagcgtcgaacaaaaccgaggctctcaactgttcaattacattaaatttaaaatagttatcttaggtccagtgctaggaagcccatggtggggtcatggcagcgggattctggaggtaggacatcaccaccgcactgacgctcaacataaaggaggagagcacctgtttggcatcgtcgctggcccgagaactggcgaaactaatgcaggagcagtacagcgcaaaccaggcgcaccacttgagctgtgtaggtgggttacatactgataaatgccaagtcacttggttgtaatctttggggtgttattaccttcatcatcagtccacacatggagaaaatcatgcccagaatgttcatgtaatccggcatcatgtcctcgttggcgccgccgctctggccctggttcttgggcgccttgtagcggttgatcttctccttgcggcgcggatccacggtcatgttcatttttaatttatttaattttcaccaatttaatcgaaaaaccaggtcagattgcaatggatgtttgcgtggaatgtgaatgccgtgcaggttgcttacgttcttatttgactggcatttcggacacaaggtggcaacgccccttcatcagctgtttctttatttacaccgccgccacacgcacgtttaaaatagtttttttttaattacataaaaatcacagaaaattgcaacagataacatggctctgcggttgattagccgttcaatgagctgccacatacgtggcttgcaattaaatgccaccggaagacggttaaatagttacaacatcagccggctggttattctgcctgcaacttggtcttgctcacaaaatcgcct

SEQ ID NO: 9212 - DNA, 1404 bp, DROSOPHILA
aaaaaataccaacagatatcgaaattcgatagcatcgatacgctgtaacaaacaaataaaaaaaaagaaacaaattagtcaaattacaaaatttatcagttatccaattgcacacaaaaaccaactcaaaattagcccaatttccatcgcaggcccacacgaagagaacaaacggatacaatgacgggttcgttcagtgtgaagctcaagtccaaaaaaggtcaattcattgtcaacgacctgaacgagcatacgacgctgggggagctgaaaacgaaaatagtccaggccaccgacatcgaagcgacgcaattgcacgtcctagtaggctatccgcccaagccattggatctctcgcagcagcaggagcagcgcgccctcaaggcggtcggaatcaacagcggagagacgctgattgtggaggagaaggctgcccctgctcctgctgcccctgtgcctggcggcaccaccgtggaggatgacgaggcgctggcgcgtcgtctgcaggccgaggaggaggcacagctgctgcaggaaaccgctggcggtccagtcgcccaggcagcagactaccagctgccagtggcgccgacggaaagcggaccgaatggcgactttaatggcatactgctgaagaaggtggtgccggcggacaattcgtgcctcttcaccagcatacgattcgtgctcaacgggaaggtggacaacgagggcagcgaaatgatgcgtcacatcattgcgcaggaggtggccgccgatccgcagagctacaacgacgccgtgctgggcaaatcgaatgccgagtactgcgcctggatacagaaggcggattcgtggggcggcgccatcgaagtgtccatactgtccaactactatggcattgagatcgatgtggtggacatacaaaacgccattatcaatcgctttggcgaggacaagaactttggactgcgtgtcttcctgctcttcgatggcatccactacgatccgctgtacatggagacatcgccgagtgctgcgccggccaccatcttcccggtggaagagctgggcgtctatcagcaggccgagcagttggccaacgaggcgcagtcctcccgccaatacaccaatgtggataaattcacgctgcgctgcatgcagtgcgatgtcaggctggtcggccaggtgcaggcccaggagcatgccaagcaaaccggacacaagaactttggagagatttaatacgtcctgatcttcggcaccgtctacattgtggcattcatgctgttcgcctactacctgctcaccacctagccacaatcgccgtgcgaggagtcatctcattagcagtactacctccacatcaccgcctacctaagttattaattattgaattgagcccagccgcctgtattcatgtta

SEQ ID NO: 9213 - protein, 347 aa, DROSOPHILA
MTGSFSVKLKSKKGQFIVNDLNEHTTLGELKTKIVQATDIEATQLHVLVGYPPKPLDLSQQQEQRALKAVGINSGETLIVEEKAAPAPAAPVPGGTTVEDDEALARRLQAEEEAQLLQETAGGPVAQAADYQLPVAPTESGPNGDFNGILLKKVVPADNSCLFTSIRFVLNGKVDNEGSEMMRHIIAQEVAADPQSYNDAVLGKSNAEYCAWIQKADSWGGAIEVSILSNYYGIEIDVVDIQNAIINRFGEDKNFGLRVFLLFDGIHYDPLYMETSPSAAPATIFPVEELGVYQQAEQLANEAQSSRQYTNVDKFTLRCMQCDVRLVGQVQAQEHAKQTGHKNFGEI

SEQ ID NO: 9214 - DNA, 4263 bp, DROSOPHILA
ttgcatgctgtgggggattccgaatcagggtatttcgctggccaaccgatgacagattttactcttcatttcggttttaatatagcattcagctgacattcaatcgccccccgcccccctttaacctttcctttcgttgggacaatgtcaagttcgttgccaatgtcgttcgattcagagagcaaaacgtgagagagatacagataatgggtattttgcggggggcttaggtggtgtgactataggggggtcagcgagggtgtcgccggatcgattagacagctaattgcgttcaaaacgccgctcacagcgtgcctgcggtggcgtatacgtaatcaccgaattcgcctaatcgcgtatacgccgcgtattcgtattaaatgcaaacaataatttttttttttttttaatttgcaaattatgggtggcagaaaacagggcaacggcatagcatccatttcagtcgaccagcgaacgccgaacgcaacggacgtgttttattcaacgtcctcagtccgtcccaccgaaacggagagcggtaacaagcgaaaaatattaaggaatggatttttgcgaatttggtaaacgtagctcgagtacggataacacaaaactctcggccgttcgaaactgataagtgcaacttgtgaaattgatactggagcgtgagcccttgattgaaatgcgcggaagtttccacttgtcgaacagtcggagctatcagagccacaggcccagccaaacccacaggtgccacactagtcgacgacgtcgccactgtagctaattgtgagccattaattgattggcagcgaacagggcaccatcggctccaccgaccagacacgccccctttttgtttttcaaaaggcatcacaaacacctctactggtctacccccgccccccccccctcgaccaccgggaaagccaatagattagaaggccaataaaatatataaagaaaaagagcaacaaacgcttgcacactctcacgcaaaatgaagggccagcaggaggagcagctggtgccgccgccggcctacaagcccacagttgtcgccaaggacacgacaaaggactcccacgcgaaggagaagcccctcggcgagggtcgactggctgtgctgcgacaggaactgatggtcttcctgggcaacagcggcgttctcggctccggaatggtggtcagcatgccggcagttactctcaatcagctgcacgacgaaacacagccattttggctcaacaaggacgagtcgagttggtttggtaagcatagcatacaagcaaacatcctagcaaacaaattggttggccaatccatttaaaatcaatataacttaactaaaagatatagcaatgtattcatcgctctctgagattaagaaatgattgagatcaattgttgatcaaaatgttattcatatagtaataaaaaaaaacccactaaccttttatattatccttgtgtctagcctccatccagaacatggcgtgtcctttgggtggacttctggtcagctacttcctggacaggattggccgcaaacacaccatcctgctgaccaatttgataggactgattggctggatcctgctggtaaccagtttcatgcactccgatcgcgacatgatctactatcaaatgctgttgggtcgttgttttggcggtatcatgatcggcatgttcgtatcgccagtgggtgtctactccgccgagattagtttacccaagatacgcggtcgcctgatcctgggcacctcgctgggcttggccagcggcattctgttgatgtactgcctcggctacttcattcgtcacaacatccagctgatcttcggcatcagttgctgctaccaactggcggccacactgctcgtctttcccatgccggaatcgcccagctggctgctcacccgaggaaaggaggagcgggccaggaaatccctcagatacttccgcggactgccgaaaaaaggtgagtccttaagaggcatcagggaatacttaacctttggatccctatgggaaatctgattacatacacttaatcattgactagcacaatactaaataatcaaacaatctggtcagcaatttaagactattagtgaattaattaagtgagtgagggtggctaaaaagtccgatcctatggagctaatgtaaacattgacctttatggcatgccaggtaaaaaatgagttggtagtatttcatgcgaaataatttaatgagacctttaggttcagtcaacaaaatggcaaagcaatgaaagtaattatattaaatagttaaattggcttcatcgtaattatctcagtggcattgaacgccttaatttcgactgctgatttattagttttagatttaattaagattctaatctaagcaattttgatttccttttttctcatacttatgttcgatttaaatcacttttcagaggtggactacgtaccggaattcgaggcggaactggcgcacatgaaggagttggcagatgcgagcaacaccaccgccgccggcgaatccctcagccagatgatccatcgtccggaggtctacaagcccgtcctgatgatgaccacgttctttggattccaacaggcgtgcggtgtggtggtgatcattgtctatgccgtccaaattgcccaacaggcgggagttaccatcgatcccgtgctggtggccgtaatgctcggcgtggcaaggataatcacaacgctattcatgagcggcatctttgagaagtggggccgcaagccgtctggaatcttctcggccaccggaatgggcgcctgcatgctgctcctggctggtggtaactggtttccggacacactgggcaccttgcactggctaccggtggcctgcattgtcgcccacatagtattctccacgatgggcatgctgacgctgccctttttcatgatctccgaggttttcccgcagcgggcgagaggcagtgcctccgggatagccatcttctttggcatgattctggccttcataatgctgaagatatacccgaatatggaggccgctttgggcacagccaatctatttgccttctatgcgggaatatccttccttgcggccgccttcatcggcgtctttgtcccggagacgaggggcaggactctcgaggaactggaggagcgctggcagactggcaagttctcacgccgcctcacaattgtcaatctgaaggatgtggagctgcacgaagtgttcctaaagaaataggaacatcatgatgattagataagatgaaagatgaaagaagtggacaaaattagataagatgaaagatacaagaagtggacaaattctggggaccatagtaaactaacgagttccattgacattttcatatgaagtgtttgaaataatagaaatgtgcttgtggaacacgcatttccatatagaaatcgggtcgggtttttcaatctgtgatgtgttaagtacttagccttggcagccatggaatgcggcaatttgataatcaataaaaaccatttaccaagtaaacaaaagtcaattgaagtgcatgtcgcgttgaaaatggtgcagtgcatattggtgaggtgacaaagaagcttctgacatctttatatacatatatccttttttttttgttttttttatatttcttacatttacgccttgtattattattaataaaaaaaaaaagaaaaacaacttgctaaatgcagcatacatgccaacacatatgaaatactttttaatcaattccggattgcagcagtactcgtatattgtttttcattcgggaaagcctcgaatgatcggaaattgttgtcactacaattgagatgtttgattaccgagaaatatatcagcaaaattgatttgcaatttaagcgtctgaaatagataacgcatttcaaatgttatgactgcaagcgaatcgcgcatgcaaatctaaaacgtctggtttgaatgaaaactgtttgtaataattctataaataattacttcaaaaggaacccaaaacatagctcaagtaatgagatcaaggtgaaaattgtataaataaccttgaagaagatataattccaaggtgacttggttgccccttatccaaccaccgactgctgattctcctgagcatttgacacgtgcccactttcgagtcgagcccatcactttccaggtgcgaatcatgcaattgccaatgcaatccagagcccaagcctcaagagattcagccttcggcttgtccatgcgggaatc

SEQ ID NO: 9215 - DNA, 1589 bp, DROSOPHILA
atgaagggccagcaggaggagcagctggtgccgccgccggcctacaagcccacagttgtcgccaaggacacgacaaaggactcccacgcgaaggagaagcccctcggcgagggtcgactggctgtgctgcgacaggaactgatggtcttcctgggcaacagcggcgttctcggctccggaatggtggtcagcatgccggcagttactctcaatcagctgcacgacgaaacacagccattttggctcaacaaggacgagtcgagttggtttgcctccatccagaacatggcgtgtcctttgggtggacttctggtcagctacttcctggacaggattggccgcaaacacaccatcctgctgaccaatttgataggactgattggctggatcctgctggtaaccagtttcatgcactccgatcgcgacatgatctactatcaaatgctgttgggtcgttgttttggcggtatcatgatcggcatgttcgtatcgccagtgggtgtctactccgccgagattagtttacccaagatacgcggtcgcctgatcctgggcacctcgctgggcttggccagcggcattctgttgatgtactgcctcggctacttcattcgtcacaacatccagctgatcttcggcatcagttgctgctaccaactggcggccacactgctcgtctttcccatgccggaatcgcccagctggctgctcacccgaggaaaggaggagcgggccaggaaatccctcagatacttccgcggactgccgaaaaaagaggtggactacgtaccggaattcgaggcggaactggcgcacatgaaggagttggcagatgcgagcaacaccaccgccgccggcgaatccctcagccagatgatccatcgtccggaggtctacaagcccgtcctgatgatgaccacgttctttggattccaacaggcgtgcggtgtggtggtgatcattgtctatgccgtccaaattgcccaacaggcgggagttaccatcgatcccgtgctggtggccgtaatgctcggcgtggcaaggataatcacaacgctattcatgagcggcatctttgagaagtggggccgcaagccgtctggaatcttctcggccaccggaatgggcgcctgcatgctgctcctggctggtggtaactggtttccggacacactgggcaccttgcactggctaccggtggcctgcattgtcgcccacatagtattctccacgatgggcatgctgacgctgccctttttcatgatctccgaggttttcccgcagcgggcgagaggcagtgcctccgggatagccatcttctttggcatgattctggccttcataatgctgaagatatacccgaatatggaggccgctttgggcacagccaatctatttgccttctatgcgggaatatccttccttgcggccgccttcatcggcgtctttgtcccggagacgaggggcaggactctcgaggaactggaggagcgctggcagactggcaagttctcacgccgcctcacaattgtcaatctgaaggatgtggagctgcacgaagtgttcctaaagaaataggaacatcatga

SEQ ID NO: 9216 - protein, 525 aa, DROSOPHILA
MKGQQEEQLVPPPAYKPTVVAKDTTKDSHAKEKPLGEGRLAVLRQELMVFLGNSGVLGSGMVVSMPAVTLNQLHDETQPFWLNKDESSWFASIQNMACPLGGLLVSYFLDRIGRKHTILLTNLIGLIGWILLVTSFMHSDRDMIYYQMLLGRCFGGIMIGMFVSPVGVYSAEISLPKIRGRLILGTSLGLASGILLMYCLGYFIRHNIQLIFGISCCYQLAATLLVFPMPESPSWLLTRGKEERARKSLRYFRGLPKKEVDYVPEFEAELAHMKELADASNTTAAGESLSQMIHRPEVYKPVLMMTTFFGFQQACGVVVIIVYAVQIAQQAGVTIDPVLVAVMLGVARIITTLFMSGIFEKWGRKPSGIFSATGMGACMLLLAGGNWFPDTLGTLHWLPVACIVAHIVFSTMGMLTLPFFMISEVFPQRARGSASGIAIFFGMILAFIMLKIYPNMEAALGTANLFAFYAGISFLAAAFIGVFVPETRGRTLEELEERWQTGKFSRRLTIVNLKDVELHEVFLKK

SEQ ID NO: 9217 - DNA, 3866 bp, DROSOPHILA
gacgtacaccatcgacaataactccattccatggattctgtggctaccgccattaacggaagtggataggaaatcgccgggtgggaggttcacatttgatgggccaaaggtggtggcgtttcactttgttaagaaccggcacggagacacgttggacaagtggataagtctgctcgatgagttggcacaggagtacgccggtcgtatattgttcggattgcgtgacatctccaacatcggggagttcaatccgaacctaaatcccgacgactttggcagctaccggaagggattgccaccgcgaatctatggcaaggactgtgagggccgagtgtacgatatgcacaagctggtcaacgccaaatacctgagggagttttgcgaccagttgctggcggatcaactcttccgtgccgtagtcctgggcgccactgcctcactggactccaagccaatgaattactttgagttgcgggaagagagcagcagcgatatgctggtgatgctatatgatcctgcctgctactactggcccattcagaagaggatgctgcgcaagctgatccgcctgctggccagcgaggatctgcccattgtgatcgtagacaaggcgaataactacctgggcgtgggcttcacccgttggctgcagatggtcaactgtcacggctccaccatcttcacatcgccacgtcgcgatggctgggatattaagttgtcggtgcgaatggagagcacacgtggctacctgcgatacatcgcccgaaacaggcagccggagctaattgacttcgatgccgatggggagcccagagcactggagcaggccgtggagtatatacagtatttgttttagatcttggcgcactcgactcgaagtgagtggcaagtcgcataaatattataactataatctataactcactttaaggatgagttggcttttcaagccagccatctcggataagtatccgttaaattaccatttaaaaattaaatgttagaattgagcattgttaccaataccactcctatttactaaatatatttatctgcatgtccacatgtaggtacataagtcagcagccaacctaaatataggcgaaaaatttgaaggcgataacaaaccaagctcggaattgctccaaggctccaaaaataagaactattcggtttatagataagagtgtgtattcagaacttgactttgttgttcgcgtccctcggctggacgtggatcatgaccttgatagcgccaccggtgccgcggcgggaggtctcaaacgcctcagccgtctccgtgatgtcgtagtggtgcgtcactagacgcttcacattcaccttgcccgaagccaccagagccaaagcggcggaataactagagatgcgtagttatcagtaattgatttgacccgccgaatctaccgataacttactcattgcagtagcggaagacaccacgaatgtcgatctcacgtgccaaagcgttgatcaggggcagcttgacctcgggtgcacccatgcccacaaccactactactccgccggagcgagtggcctgaagggaaactggttagtgactgataatccacacatacgcagatccacttacgaagatggccaggcgggcactgctctcggctccacagcagtcgatggacttgtccggcacctcgctcatcgtctggtgaaccaccttgacggtctcctcggcggactgatcccgctgcagaagcagcgtgtgtgtggcgcccagctccttggcaacatccaaacgctgctgcaccagatcggtgataaggatctcggatgcacccatagcttgggcagcctaggtgggagaatgagttcaatctcataagttggtgacatattaatcgactttcttaccagcagggtgaccaaaccaattggaccagcgcccagaatgagcacctttgagcccagaccgactcctgcgcgacggcaggcgtgaactcccacggacaggggctccagcagagctccttcctccatgctgacgtgatccggcagcttgaagcaaaagtcggcggcgtgtttgtagtacctggtcaggtttccatcgtacggaggtgtggcacaaaagaccatgtcggcgcacaggttgtatcgaccctgcttgcagtgatcgcagtagcggcagggcactcccggctcaatggccacgcggtcgcccaccttgagggtggtcactttcttgcccagcttggccaccacgccggctgcctcgtggccaatgatcatcggcttggtcagcacaaagtccccgatgcgtccgtgggcaaggtagtgcacgtcggatccgcagatgcccacgctgtccatggccaggagaacctctgagcaggagaaagcaatatgaaagctattagatgaatgtatctattaatccaattctaggcaataatacaaggatcggaattatctgaattcatgataatttattaatctgtgctttcaaaagttattattattatcaattattatagaattttacagctcactacatcaatcactacattttattactttaataactatgattaaataatattttttgaaattagtttttaaatttttctttagttcaaacttaacaaaatgcgcgtaaatggtgaatttttcttagtgtactaatcccttaccatcgtcggcgatttccggaattgggcgttgctcctgcaggaagtgaattagcagttgcttgttttatttccgtcttcaacttaccaatcgcaggtcctcgatgccgtggagaacagctgttaaattgtctgttgccatgattacgcttggtttttaatattttcactttgcgtcacacaaccgttcgctttgaacgccgatttagcactgaattcagtattcgatctgaccgatatgctgtgctggcaattgagtttatacatatatgtatttatttatgtatataatgtatttttctaaattgcctatttatgtgtgtgtttgcttagaccggaatacagttattatcagttatattggctgtgaagtgcaaaagttaagcaaagttatcaactaactttgtttctcactttagatatttgccggaatagcggtacttatatctctgccttctgtttaaattacagtcattgtctagtaagacgagcccctctagttcattttattcgctctcgcctgtaatttgttgctgctcgttctctcacttgctgcggccaaccccgccgaaaacagctgttttgtatttaccccaagtgtttacatattccgtgtgggcgtttcgccggcaaaaacaaaacggaaaaaaagctccgtcgttctgttcgagcctttcttcttagatacactgaaaatattttataaacataataaatgaacttattatgattataataatataaaatttgattatggttatgtcattcgattatgggtaagaaaaataaaaatagataaaaactaaattaaaaatatatttatttaaaatagtattttaattcaaattcgacaagtgtacacaaacgtaattaaatacgctacgttatcacttgatttataggcttgcgctgctggaagttaattgaaaaagaaatatgtacaaatatttatgcaaattaaataatgtgtagcttttcacttttaagaacgcagtaagattaacaagtttgcttgtgtttgctatacgattttattggctttatttctctggctaatatattcatttcaataagtgtttgatattcgggttcttaacatatagaatttctattttaaaaacgtttgcttatataggtatgtgtataaatgtccgtgtggctttgctgcgtttttttttattgacgtagaaataaaaaatgttt

SEQ ID NO: 9218 - DNA, 1338 bp, DROSOPHILA
cggcgttcaaagcgaacggttgtgtgacgcaaagtgaaaatattaaaaaccaagcgtaatcatggcaacagacaatttaacagctgttctccacggcatcgaggacctgcgattggagcaacgcccaattccggaaatcgccgacgatgaggttctcctggccatggacagcgtgggcatctgcggatccgacgtgcactaccttgcccacggacgcatcggggactttgtgctgaccaagccgatgatcattggccacgaggcagccggcgtggtggccaagctgggcaagaaagtgaccaccctcaaggtgggcgaccgcgtggccattgagccgggagtgccctgccgctactgcgatcactgcaagcagggtcgatacaacctgtgcgccgacatggtcttttgtgccacacctccgtacgatggaaacctgaccaggtactacaaacacgccgccgacttttgcttcaagctgccggatcacgtcagcatggaggaaggagctctgctggagcccctgtccgtgggagttcacgcctgccgtcgcgcaggagtcggtctgggctcaaaggtgctcattctgggcgctggtccaattggtttggtcaccctgctggctgcccaagctatgggtgcatccgagatccttatcaccgatctggtgcagcagcgtttggatgttgccaaggagctgggcgccacacacacgctgcttctgcagcgggatcagtccgccgaggagaccgtcaaggtggttcaccagacgatgagcgaggtgccggacaagtccatcgactgctgtggagccgagagcagtgcccgcctggccatcttcgccactcgctccggcggagtagtagtggttgtgggcatgggtgcacccgaggtcaagctgcccctgatcaacgctttggcacgtgagatcgacattcgtggtgtcttccgctactgcaatgattattccgccgctttggctctggtggcttcgggcaaggtgaatgtgaagcgtctagtgacgcaccactacgacatcacggagacggctgaggcgtttgagacctcccgccgcggcaccggtggcgctatcaaggtcatgatccacgtccagccgagggacgcgaacaacaaagtcaagttctgaatacacactcttatctataaaccgaatagttcttatttttggagccttggagcaattccgagcttggtttgttatcgccttcaaatttttcgcctatatttaggttggctgctgacttatgtacctacatgtggacatgcagataaatatatttagtaaataggagtggtattggtaacaatgctcaattctaa

SEQ ID NO: 9219 - protein, 360 aa, DROSOPHILA
MATDNLTAVLHGIEDLRLEQRPIPEIADDEVLLAMDSVGICGSDVHYLAHGRIGDFVLTKPMIIGHEAAGVVAKLGKKVTTLKVGDRVAIEPGVPCRYCDHCKQGRYNLCADMVFCATPPYDGNLTRYYKHAADFCFKLPDHVSMEEGALLEPLSVGVHACRRAGVGLGSKVLILGAGPIGLVTLLAAQAMGASEILITDLVQQRLDVAKELGATHTLLLQRDQSAEETVKVVHQTMSEVPDKSIDCCGAESSARLAIFATRSGGVVVVVGMGAPEVKLPLINALAREIDIRGVFRYCNDYSAALALVASGKVNVKRLVTHHYDITETAEAFETSRRGTGGAIKVMIHVQPRDANNKVKF

SEQ ID NO: 9220 - DNA, 4168 bp, DROSOPHILA
tcatgctgttcgcctactacctgctcaccacctagccacaatcgccgtgcgaggagtcatctcattagcagtactacctccacatcaccgcctacctaagttattaattattgaattgagcccagccgcctgtattcatgttagtccccttttaatccctttcggaatgcaataaaatataccttcatctacactaggcaagtcttggagttggtacctatatagctataaggtcaagttccagaaagctgtcctgaattcacaaggcaaccaactacgtacgtacttttttactgagcgtcgaacaaaaccgaggctctcaactgttcaattacattaaatttaaaatagttatcttaggtccagtgctaggaagcccatggtggggtcatggcagcgggattctggaggtaggacatcaccaccgcactgacgctcaacataaaggaggagagcacctgtttggcatcgtcgctggcccgagaactggcgaaactaatgcaggagcagtacagcgcaaaccaggcgcaccacttgagctgtgtaggtgggttacatactgataaatgccaagtcacttggttgtaatctttggggtgttattaccttcatcatcagtccacacatggagaaaatcatgcccagaatgttcatgtaatccggcatcatgtcctcgttggcgccgccgctctggccctggttcttgggcgccttgtagcggttgatcttctccttgcggcgcggatccacggtcatgttcatttttaatttatttaattttcaccaatttaatcgaaaaaccaggtcagattgcaatggatgtttgcgtggaatgtgaatgccgtgcaggttgcttacgttcttatttgactggcatttcggacacaaggtggcaacgccccttcatcagctgtttctttatttacaccgccgccacacgcacgtttaaaatagtttttttttaattacataaaaatcacagaaaattgcaacagataacatggctctgcggttgattagccgttcaatgagctgccacatacgtggcttgcaattaaatgccaccggaagacggttaaatagttacaacatcagccggctggttattctgcctgcaacttggtcttgctcacaaaatcgcctgctgcacgtgaggattacggatcaacaagccggtttggagaccaaacgagaggccaacaggaaccagaatccttttcgcgaagaagtttttgaagaacttatcacagcagcacccaaggagcaccagaagtttaagccagaaaagaaacccaaagagaagtccaccaaaaaggtgcaggattttggtgatccggacacctttggcgatgccaaggtggctgcaacagaagacccgggtgatgtcgaggaagaggagttccttagcaattccactaggcgctcaaagaaactaaaagccgtggaatacgcccgccaaattaaggaccatcttaaggcgaatcgcctaaatgaggccatcgccgtgctggagcaacggatgctaaaggaggatcgcgccaagccggacaagtacatatacaatctgctgatcagtggctgtgccaaggcgggctacacccgcaaggccttcttcctgtacaccaagatgcggcaacgtggtcttcaagtcaccggaggaacctacacttcgctattcaacgcctgcgccaatgctccctccgtgagcgatggcctggccaaggcccaaatcctgcgggagaacatgctcgagaagggctacgaaccaaatgtgaaaaactacaatgccatgatcaaggcgtatggaaggtgtggcgatgtggacaccgcctacatgctggccgacgaaatgatggagcgccagctggaactgaatgcagatacattcaactttctgctgcaggcgtgtgccagcaactcggagcacggtttccggcatgctctgctgacttggcacaacatgttgcagcgaggtattagcccggactactacagcttcaatgcaatgctgagatgtgcaagggattgtggcttcggtgacttggattccatgcgagaggttatcgataaaattgcgccctcagctgctagaaagaaaccagttctccagttggagaaaggtcagcaagatgatttacccagtgtggaagccaacacaactacgttgcctgcccaaattgaggtggccaccacagcgagcgagctggaactgcccaatcttttgctgcctcagccgcatctgggcagtctggtggccctggaggaggtgacacgtccacacgaacgtttcttgctactcggcggtctcactggctttctggagcacatgaagcagcacaacattacaccggacatcgagacatttaccgcaatgctggaggtgataccgcccacaaatgctgccgagaagcagctgctcacgtttgtgcgcaagattggcctcaaggcggacatcgacttcttcaacatactgattaaaaagcgttccatgcgctttgattacgagagtgccaaggaagtgctcctcatgattcgcacggcgggtttgcggccggacattgtcacctacggtgtgctcgctttgggttgtcgcacgcaggaagaggctagggaactgctggaacagatgcatgtggcgggcattaagatgaacatgcccatactgggggccatgctgcggcagggatgtgctaacaaatcctttagctacgtcaacgagatcattcagttgagtctggaggagggccttaagccaaatgaagccttcctgcggcacctgcacaactttcacagaggttgtgcgcgagccattgatgccagagtgagtttatagctaactttctgctagttaaatcattaattgttgtgtatatgcagcatccatcaaccaagacggcagcctttaagaagggccactctaagttctgtgataaataccgcctgtactacgaggagcagggactgtccggtctcaagctggaggacgccattgccaaggtgaaggagcgcccgtatgaccagttcaagctgccgcctgtcaacggaatggaaccactcaagcacgagcagctcaagcacaaaacgaaacagcgaaagtacatcaagaagatcaagatacacgagctgaaggatgaccctcccaaagagtctttgaagaggatagaataagctaaaaagtttaactcccaataaagtttattattattcgttaaccaatcatggttcttttgcgtccgcgtgctcgcacctcctcgaacttggtgagcactgcctgttcgtccttaccgcacgctgtgcgataggcggccaggacgtgctcgaagatatacggctgttcgctgtgcgtactgagtagcgcccgctccaggacgtacagatccacacccttgtcctcggtggcctgattgtagtggctcaagccgaagtcaatcagaatgacatcgtagtcgccacccttcggattgatgaggatgttagatgtggtgagatcgccatgtataatgtgattggagtgcattttcccaatgatttcaccgatccgcgtgcagaactccagcagacatttcttggcttcatcctccgtctgagtggacactgtttcctggatgaactgcttggcagtcttggctgcatcgaaatattccatatacagcttgtgggtgttgaggtccgagtggaggatctttggtgccaggattccagcggctagacatcttcccgatgccttggcctccgctttcatgcgctgccgcgtgatctgggtgttcagttccgggtggcggtacttctttacgaaccgctccttgatcaggcaggcttctcctttgaaatcgcccaaatataggcgtccttcagcgccttgtttcaggatttctagggacatttttaatacgcttgaaaacaaaccggtgcacttgtcttaaacaaggtggcaacaccacacagcgtcgtttgtaagaggggttgggaaaatgtaccttttattttttttaagtttagaaaataattatcgactgctactgaattttcccaccaaccataaatgtgaaaccactataaatatattaaatggagaaccccctaaaaacttaccatctacgcccatgatttcattactcattcaccacgaagcgcgtgcaaaacagctgcttgctgttttcgtatttac

SEQ ID NO: 9221 - DNA, 2112 bp, DROSOPHILA
atggctctgcggttgattagccgttcaatgagctgccacatacgtggcttgcaattaaatgccaccggaagacggttaaatagttacaacatcagccggctggttattctgcctgcaacttggtcttgctcacaaaatcgcctgctgcacgtgaggattacggatcaacaagccggtttggagaccaaacgagaggccaacaggaaccagaatccttttcgcgaagaagtttttgaagaacttatcacagcagcacccaaggagcaccagaagtttaagccagaaaagaaacccaaagagaagtccaccaaaaaggtgcaggattttggtgatccggacacctttggcgatgccaaggtggctgcaacagaagacccgggtgatgtcgaggaagaggagttccttagcaattccactaggcgctcaaagaaactaaaagccgtggaatacgcccgccaaattaaggaccatcttaaggcgaatcgcctaaatgaggccatcgccgtgctggagcaacggatgctaaaggaggatcgcgccaagccggacaagtacatatacaatctgctgatcagtggctgtgccaaggcgggctacacccgcaaggccttcttcctgtacaccaagatgcggcaacgtggtcttcaagtcaccggaggaacctacacttcgctattcaacgcctgcgccaatgctccctccgtgagcgatggcctggccaaggcccaaatcctgcgggagaacatgctcgagaagggctacgaaccaaatgtgaaaaactacaatgccatgatcaaggcgtatggaaggtgtggcgatgtggacaccgcctacatgctggccgacgaaatgatggagcgccagctggaactgaatgcagatacattcaactttctgctgcaggcgtgtgccagcaactcggagcacggtttccggcatgctctgctgacttggcacaacatgttgcagcgaggtattagcccggactactacagcttcaatgcaatgctgagatgtgcaagggattgtggcttcggtgacttggattccatgcgagaggttatcgataaaattgcgccctcagctgctagaaagaaaccagttctccagttggagaaaggtcagcaagatgatttacccagtgtggaagccaacacaactacgttgcctgcccaaattgaggtggccaccacagcgagcgagctggaactgcccaatcttttgctgcctcagccgcatctgggcagtctggtggccctggaggaggtgacacgtccacacgaacgtttcttgctactcggcggtctcactggctttctggagcacatgaagcagcacaacattacaccggacatcgagacatttaccgcaatgctggaggtgataccgcccacaaatgctgccgagaagcagctgctcacgtttgtgcgcaagattggcctcaaggcggacatcgacttcttcaacatactgattaaaaagcgttccatgcgctttgattacgagagtgccaaggaagtgctcctcatgattcgcacggcgggtttgcggccggacattgtcacctacggtgtgctcgctttgggttgtcgcacgcaggaagaggctagggaactgctggaacagatgcatgtggcgggcattaagatgaacatgcccatactgggggccatgctgcggcagggatgtgctaacaaatcctttagctacgtcaacgagatcattcagttgagtctggaggagggccttaagccaaatgaagccttcctgcggcacctgcacaactttcacagaggttgtgcgcgagccattgatgccagacatccatcaaccaagacggcagcctttaagaagggccactctaagttctgtgataaataccgcctgtactacgaggagcagggactgtccggtctcaagctggaggacgccattgccaaggtgaaggagcgcccgtatgaccagttcaagctgccgcctgtcaacggaatggaaccactcaagcacgagcagctcaagcacaaaacgaaacagcgaaagtacatcaagaagatcaagatacacgagctgaaggatgaccctcccaaagagtctttgaagaggatagaataa

SEQ ID NO: 9222 - protein, 703 aa, DROSOPHILA
MALRLISRSMSCHIRGLQLNATGRRLNSYNISRLVILPATWSCSQNRLLHVRITDQQAGLETKREANRNQNPFREEVFEELITAAPKEHQKFKPEKKPKEKSTKKVQDFGDPDTFGDAKVAATEDPGDVEEEEFLSNSTRRSKKLKAVEYARQIKDHLKANRLNEAIAVLEQRMLKEDRAKPDKYIYNLLISGCAKAGYTRKAFFLYTKMRQRGLQVTGGTYTSLFNACANAPSVSDGLAKAQILRENMLEKGYEPNVKNYNAMIKAYGRCGDVDTAYMLADEMMERQLELNADTFNFLLQACASNSEHGFRHALLTWHNMLQRGISPDYYSFNAMLRCARDCGFGDLDSMREVIDKIAPSAARKKPVLQLEKGQQDDLPSVEANTTTLPAQIEVATTASELELPNLLLPQPHLGSLVALEEVTRPHERFLLLGGLTGFLEHMKQHNITPDIETFTAMLEVIPPTNAAEKQLLTFVRKIGLKADIDFFNILIKKRSMRFDYESAKEVLLMIRTAGLRPDIVTYGVLALGCRTQEEARELLEQMHVAGIKMNMPILGAMLRQGCANKSFSYVNEIIQLSLEEGLKPNEAFLRHLHNFHRGCARAIDARHPSTKTAAFKKGHSKFCDKYRLYYEEQGLSGLKLEDAIAKVKERPYDQFKLPPVNGMEPLKHEQLKHKTKQRKYIKKIKIHELKDDPPKESLKRIE

SEQ ID NO: 9223 - DNA, 8586 bp, DROSOPHILA
actgaagtaagatttagccgagacatgaaccgcaaattaggcatacaattttcatagatattctatatatggattaatatatttgtcatatttcctatagcctaggctagttgtaagttataacttatacagagctgatgaatttgttcgaatctagttcagcggttatttctagtaaaagtttcaaattctgcttatttcatttaggtcttgacacacatttgtagtattctagataaaaaaaaaaaacaaattatttaaattgattccacttagttcgtcgagttttcacttattgtgtgtgtctgtgtgggcttggttcgcacaaaactgcataaatccattcatattcataattgttgtagacaagtttaaaatactagacagtactttcggttgcaaattgctcggtctccgcgatttcatatttaaaattcctgttcggtgttcagagttgtcatgttttgtttttttttttacgctatgcttgttaaaccttcagttacagttttctacaatttgttaatttattatgaattaactagttgaaacaattggtagcaaacatttgttcttagttctagatctagagaagtaattgcctttgcttttgttactcgtttgtatttcctctggtaaatttttaactgagaaccctataagctagctaataattcaatttgataatttagacatttatttacttgttcttttttgtatccttaagattttgatgttgttctggtctacgtgtttttttgttttttgtttttgacaatttgttaagtatgctacgtgtgtccatatctcttccactaccaaaatcctacttctcttgccttttgttttctaaatggagctggagctgtacaacatattttatattttttgtcgtcattgttgttgttgtacataaagtcaagttggtttacaatttgatttgttatattgctgtttgctgtcgctagcttgcgtttatatatataaatattattttgcgtttttttttttgttctttttttgttttttatatatttctggatcacatattcaagtagtttcaaaatcacataaaaatcactcttacagtagcgtatacaaaatacatgtgtcatctataaatatatatgtatgtaacgtacatatacttttcgatctggtttctgtttgattcttcacagttgagatggcgtgaaatggatttcttgacatgttgtaaaattgctttgcattggtttgttttggaatggggttgaaaaaacgcgtagttcgatagacatcccatgtacatctcgtggagattcataaagtaaattagcaaatctttcaaactgtgtctccggtgatgagagtcagtgatattctgagagaggtatgcattcagttttcagtttagtttggtaatacacacaatagatttgcgactcaacagctccattataaaaccaattttctcattgtttgttctcgtgatttttagtttttttgtgtacacttgtatcataaactattaaagcatttataagttaacacacaattgtttattgttatatttattaattatttgtatttcttgctgatttggcttctacaaaacatagtacaaacacacacagagataagagcctttgcgctgcctttcctagttagctttgtaataatataattcagtttttcatttgtatatatatattcatagtgttgcttttgtttcaaataaatgcctatgttgatttcatattcatattcaattcattcccagaacagtttcattttgattacatctttatcaattcaactcaactagctaacaacacgtttcagtttcattcaacattgtccaattgattacgtttgataattttaattcgcagaaaaatacaatggtttttgaagacggttttacattaactctggttaacattttcattaaactctgttcatttcgctgtatcgagttacttttattgtttatgctttcaacatcacactcatcgaatctgcgttcaaatttcccataaatatatatctgttcatattcgttcttgtacaatcagccaaatgctggatttaatatgacttaaatactacgttttgacattgacgattcattttatgcttttactaatttggaagcgtccagttgagactatgaaagtaaaatgaaaattgaagtcatctgcaaagtaagtacttaaagcactattcaaatcacaaagtaacctaatagattatatacgtaagttgataattttgtgactggttaattggcattggcttacacgagctgcaccaaggcctaaacaaaaatcaaagtgttttaatacattcaacttggttttcaataagacaaaatgaaatgaactttcgataaggaaaagcgttgtcgcctttagttacttctcgtttcaacgtctataattacttttgtgcatttgaaaaaggaaaataaaagctgagtactgactaatattgattacccgtcagttacattgattttatgaccattgtcttggcttttagttgtagtttgcattcacaagtttgaaacacatacataaaaaatacagtttgaaaatcggcttatataaaatcactggtggtatttgtttgtttgtggttgttttctgctcttctatgcgacaatatattgttaaatttgttggtttctataaatttgttaatagtcaattgctaaaagtgtctagaaaaattaatatattatatatttatatatctttcattcaattacatcttgtaattgtttagttctcataatttcttatgtaatactagtgaaaagtacaatatgactgaaagtgtagcatatttaaatacaaatatagagatacatatgtggttaaaaaaaaaataaatgagacattgcaaattcgtgcagtagattagaaaatatgtatgcctaaacattgaatattaaacaaaattaaaagagttggttacataaatcatagtacaaaatcaatttaaaatgttttttcctgtattcgattcgatatgagaaaaaataaacaaaaataaaattacatacttattcgtttagagcagctagctaattcaattaatagtttgtgcctagtaattactaatattcatgacgataatttgcatattttgagtagattgaaaacataaattatatattccctgccacatgcacaattagtaggcatgtgtcaaatcctaactgttcaaaagtttcaacgttttgcttaagactaaagtttgctttgtgagtaccacattgtcatgctgttcgcggtcttgatccccatgatccattcatatcccatcggaatcccctttcccatccctatccgattttcagccaaagggccacttgtggtcctgttgctgataaaacatgttctaggtgtgggtggttattaccggcacctgacagtagggacactcggtgaccgattcagcgcatgtattgcaaatagacaggtggttgcacggctccagagtaaccgtgcgattgttctcctcgcacttcatgcacttcttggcattttctaaatataatactttgtcgacctcctccaagtcggtgcgcagcttggactaaaatggtagcaggttaaaacccatggaattgggaaattaattaagcgactaacctgcaattgcttcaatttctgtatggacaagtcccgaagctctgctggcaaatttagctgtatctgtgctaggtcatagcgctccttccactcctgcgcctcctgcttggccttgtcccgatggagctccgcgatctttagcttgcatgccatgtcctcgaaacgtccgttcaacttgtgaatttgagcattcttcgtgagcagctcattggtgatgcgacccaagtcgctgttgttttgcgactgcagagattgaaggctaaacgcattcttggccgtattgagagtgttctcgaacagactatttcccaccgagctgctgttgatgtcgtcgcgtatggtattcaattcggatatccttaccgaaggactaatcgacaagccatcgccaaagccaggcgatatgatgcgcgacggaaagaagagactgctatcgttctgggtggccgaaagggaattgctgagtttgtttgagccgccatagttgaaggcgtccacgttgaagagattggcatggttggtgggactgtaggtgagcgagctgctgggaatgttgacggcaaagctacctgagttaaaatctgtgcaaatggaatggagtattagcattagcaattagttggcactcataggacgttgatgactacttaccgttaattgagttacttagagtcgtattaggaatgttaattggcgccgaggaacgtgttaataagctagtattggccagactcgccgacaatgagttctcgcgcggatcgtccattgagcaagctgcttgcaaagagtgaagacaaaaaattattgaatttcagttaggctaggggtcacgacatttgctatctaagcgctgacattctttgtccacaaccaaaacgaagaactgatttctagtgtataacttagacgtacgcatgtcaggactctgggatactcacaacgactgtccaggggtcgtgagaaacttaaaaatttgctgaaatttgttgtgttttccaaagcgtctaccaacattttattggtgctattaccatcaatgttcaacaactaagagaacaaaacgaaaagaaaaaaatcgaggagagcaggacacatgattaaatggcttatcgaaagtgttaagcagttagttgatgatggttagctggattagagcggcaaacgatgtgtggtagtacgtttaggtttaggcgatgcaaatcgatggcgttatttggatgagtgttattgcttcggtaatacgtacattatcgaccctttgaaacgcatcctgagcttttaaatcaggataggcattggaaataagctcgtttaggtataccgtgtgatcccgcgtcttctcgtcaattgaacatgctttatttggattgggagtagttacatggacaagcaacaccgagcggcaaagcaaacattgattgatgtacgtgttttcaaaggatttgagtgatagttggaaacagatttgcggtttgatggatgaggcgagtaaaagacaaacattaagttagaactgtaatatcataacttggccctaaacacatccctacaacaactggttgtggagcacaacgctgagtcctatatattagctcatcgaatcctctatacttacgttccacatgggcaaaggcgcagaagacgctgcgcggacagtatccggcctgctggacatcgttgcacttggtcgacttgtagatctccgggtggaactgctgctcggtgcgtgtgtggcagtactggcagttatcgccggcctcgcagttgcccggttctccccattcctcgccgtgcttgacattggggcaaggagtggacctaaaacaatggtatatcgcggtttaaaactgactttaggatgaattcaggggaaatcttacctgtacttgtattttctgggcgagcgacgtttgtccttgctattgtggtactgtggacaagcgtatccttggcggcacaggcgcggtgggcgcttgcagggctctgtcttgtaattggccagcacgtagttggtgtcctgccacttgggatcctcgttcatcaaattgcgctccttgtccagggcattcaaagcattagtgctgtccagtgtgctctctgcgttctgcagggtctccagctctttgatgtcataaaccggtgggcgctggtcctgcatgccgtgggcgaaggcgcagtgtagtccattcttgacgcagtatcctcggctgtcggtgtcgtggacgcacatgcatgtcttgtagtagcgcagatggtatcgcctttcggtgtcgccagcagtgcggtgtaagtaggggcatctaaatggggagaaagggagttttagtgacgtcaaagcaggcgacgaggctaagtgaatggactgtatgatacccattaattaaaaagaaccgtaacaaaaaacaacaaagttgtacatttacagcaaaatcatcattttaatacatgtttgagggtatttctttaataagtaaaagaaatttctctttcaaaactaaaaccgctttctttccaccttcgtaccctgtaaggagactacaacgataaatggatagaatggaggtcggggtcagaggttggacctcgagtctgggtcataaaaacagacattgttgttgtctctcgcaaagcgtaattgcgttttacttttagcccgttcttacacttcacagagcttttctccaaagctcgccagccacaataactgtacatttcgaagctgccgggggaaaatcaaaataaacgaagaagaaaacacgcaaaagcgaaacgcaataaaaacaatgacgcacacacttgtagcgatgccctacgtctgtgcgtgtgtttgtttgtgcgtacctgtgtgtatgcgagcgtctgtgcatgtatacatgcgacaagagagcaacaaccaccacaaaacggatgctgataagaatttgctagcccactagagctggaatcactttcacttttgcacggtggtgacctcgcctgcacacacatacacatgcacagagatacagcaagcagcacgcccacatacgcacttacaatttcacttttggctttccagacaacgccaggcccctgccaccgcccccaccacacccccctgcacacaaacacactatggtttttgtttgtaaacacgaagacaagagatacacacacatcgcgaaggaaggagagcgcaaagaggaaacaaaaaaaatacaacgtcgttcgctattgctgtctcatccatcctccgccactgcaatcgtcccgtccagcgttttcacgggccatcagaaactatgaatttcacaacatttctactcactcgtcgccctcgggacaaatcccagtggtctcgtcgtatttggtgcaatagttatccgcactgtagttgaaggtgccatcgcgttttcgcactggacgacgccgacgctggttttgaaaatgccaattgaaacagacgaaggggcgatgctggttgcacttgtgctgtaaaaacgactggcactgctccacgcggaactccttcaggtagctgaaacggttggcggaaaggttgcacgtcaaattaaccatcgtttgcattagttagcatctatttacgtgtagtgatttggtttttcctgctgcgaggaaagcagcagcttgttcgtttcatttgccaacatcgttgttagtgatgtgcaaaaaacatcggtgcgtcgggcatccatggccttaagtcgattgatatcgataatttttgtcggcatcgtccatatcgattggttagcaaatacacacaccccagttgatgggtggttagccgggacgcaaacgaaacaaatttggcgccaaaattaatgcgaaattgttatgcatgtgttttatttataacaacgcctatatattataacacacatttcaaagggaaaacatttcgaagaaggaaagcaaaagcgtttctagtccaagggtatgggaatgaaggcgttgattctgtccgtctgtcgctgcgctatgcattcgctaatccagacgatattgcgtacctccaactgtttaagtttaatgaacgagtagaagatcccgaaatggtactgctgcaggaaggtctgcacattcttcttggcctccatcatgagaaagcggtcctccagcgtaatcatgccgtccgagtcgcgctccaaattgtcaaacattttgccatagccatcgaacacattgcaaacatcccttattttatccgtatcatttaaagtggacatggaggccaaggctattttgggcaggtagccacaggtggggaacatctttagacgctccttcggtctgagtgttggaaggtgggcattatgagtataatatgaagaatttcatagcaacacagatatcttacatgatatcactgccaatagcgttcacagctattgtaatggtccgacgatccgcctcgaaggacaatagattggtcatcacgttggcggtattgccgcccagttggctgcaataggcgtagaatttctccaaataagcacgatacagatgggcacgcacaatctccacgtcgaggtaacgcaacgactccatgggcaaatcgcgtggcacaaaccgagcgatgggcgtgtcaattagaacggcgtcgaagagctccgcagaattcgaggccacttcgatggcgcccagttgatcgaattcgcccagcggatgacacattcttagcagacgcttcatggatcggtgattgtttaggccagcgaccagaagcgccacattatcgatcatgaacggatatcgtatgaactccataaaggtggtcagcggctccgtcgaatgactgcgtatgtagtagtattgctgcagcagacgatccctaaggcatctttcgatcacctcaacggacggcgctgattgttcgccaccaaagatgagaccgtaatccgtgccctggatgctgatcattacgtcctcgagggattcacac

SEQ ID NO: 9224 - DNA, 4482 bp, DROSOPHILA
tcccatacccttggactagaaacgcttttgctttccttcttcgaaatgttttccctttgaaatgtgtgttataatatataggcgttgttataaataaaacacatgcataacaatttcgcattaattttggcgccaaatttgtttcgtttgcgtcccggctaaccacccatcaactggggtgtgtgtatttgctaaccaatcgatatggacgatgccgacaaaaattatcgatatcaatcgacttaaggccatggatgcccgacgcaccgatgttttttgcacatcactaacaacgatgttggcaaatgaaacgaacaagctgctgctttcctcgcagcaggaaaaaccaaatcactacacctacctgaaggagttccgcgtggagcagtgccagtcgtttttacagcacaagtgcaaccagcatcgccccttcgtctgtttcaattggcattttcaaaaccagcgtcggcgtcgtccagtgcgaaaacgcgatggcaccttcaactacagtgcggataactattgcaccaaatacgacgagaccactgggatttgtcccgagggcgacgaatgcccctacttacaccgcactgctggcgacaccgaaaggcgataccatctgcgctactacaagacatgcatgtgcgtccacgacaccgacagccgaggatactgcgtcaagaatggactacactgcgccttcgcccacggcatgcaggaccagcgcccaccggtttatgacatcaaagagctggagaccctgcagaacgcagagagcacactggacagcactaatgctttgaatgccctggacaaggagcgcaatttgatgaacgaggatcccaagtggcaggacaccaactacgtgctggccaattacaagacagagccctgcaagcgcccaccgcgcctgtgccgccaaggatacgcttgtccacagtaccacaatagcaaggacaaacgtcgctcgcccagaaaatacaagtacaggtccactccttgccccaatgtcaagcacggcgaggaatggggagaaccgggcaactgcgaggccggcgataactgccagtactgccacacacgcaccgagcagcagttccacccggagatctacaagtcgaccaagtgcaacgatgtccagcaggccggatactgtccgcgcagcgtcttctgcgcctttgcccatgtggaaccttgctcaatggacgatccgcgcgagaactcattgtcggcgagtctggccaatactagcttattaacacgttcctcggcgccaattaacattcctaatacgactctaagtaactcaattaacgattttaactcaggtagctttgccgtcaacattcccagcagctcgctcacctacagtcccaccaaccatgccaatctcttcaacgtggacgccttcaactatggcggctcaaacaaactcagcaattccctttcggccacccagaacgatagcagtctcttctttccgtcgcgcatcatatcgcctggctttggcgatggcttgtcgattagtccttcggtaaggatatccgaattgaataccatacgcgacgacatcaacagcagctcggtgggaaatagtctgttcgagaacactctcaatacggccaagaatgcgtttagccttcaatctctgcagtcgcaaaacaacagcgacttgggtcgcatcaccaatgagctgctcacgaagaatgctcaaattcacaagttgaacggacgtttcgaggacatggcatgcaagctaaagatcgcggagctccatcgggacaaggccaagcaggaggcgcaggagtggaaggagcgctatgacctagcacagatacagctaaatttgccagcagagcttcgggacttgtccatacagaaattgaagcaattgcagtccaagctgcgcaccgacttggaggaggtcgacaaagtattatatttagaaaatgccaagaagtgcatgaagtgcgaggagaacaatcgcacggttactctggagccgtgcaaccacctgtctatttgcaatacatgcgctgaatcggtcaccgagtgtccctactgtcaggtgccggtaataaccacccacacctagaacatgttttatcagcaacaggaccacaagtggccctttggctgaaaatcggatagggatgggaaaggggattccgatgggatatgaatggatcatggggatcaagaccgcgaacagcatgacaatgtggtactcacaaagcaaactttagtcttaagcaaaacgttgaaacttttgaacagttaggatttgacacatgcctactaattgtgcatgtggcagggaatatataatttatgttttcaatctactcaaaatatgcaaattatcgtcatgaatattagtaattactaggcacaaactattaattgaattagctagctgctctaaacgaataagtatgtaattttatttttgtttattttttctcatatcgaatcgaatacaggaaaaaacattttaaattgattttgtactatgatttatgtaaccaactcttttaattttgtttaatattcaatgtttaggcatacatattttctaatctactgcacgaatttgcaatgtctcatttattttttttttaaccacatatgtatctctatatttgtatttaaatatgctacactttcagtcatattgtacttttcactagtattacataagaaattatgagaactaaacaattacaagatgtaattgaatgaaagatatataaatatataatatattaatttttctagacacttttagcaattgactattaacaaatttatagaaaccaacaaatttaacaatatattgtcgcatagaagagcagaaaacaaccacaaacaaacaaataccaccagtgattttatataagccgattttcaaactgtattttttatgtatgtgtttcaaacttgtgaatgcaaactacaactaaaagccaagacaatggtcataaaatcaatgtaactgacgggtaatcaatattagtcagtactcagcttttattttcctttttcaaatgcacaaaagtaattatagacgttgaaacgagaagtaactaaaggcgacaacgcttttccttatcgaaagttcatttcattttgtcttattgaaaaccaagttgaatgtattaaaacactttgatttttgtttaggccttggtgcagctcgtgtaagccaatgccaattaaccagtcacaaaattatcaacttacgtatataatctattaggttactttgtgatttgaatagtgctttaagtacttactttgcagatgacttcaattttcattttactttcatagtctcaactggacgcttccaaattagtaaaagcataaaatgaatcgtcaatgtcaaaacgtagtatttaagtcatattaaatccagcatttggctgattgtacaagaacgaatatgaacagatatatatttatgggaaatttgaacgcagattcgatgagtgtgatgttgaaagcataaacaataaaagtaactcgatacagcgaaatgaacagagtttaatgaaaatgttaaccagagttaatgtaaaaccgtcttcaaaaaccattgtatttttctgcgaattaaaattatcaaacgtaatcaattggacaatgttgaatgaaactgaaacgtgttgttagctagttgagttgaattgataaagatgtaatcaaaatgaaactgttctgggaatgaattgaatatgaatatgaaatcaacataggcatttatttgaaacaaaagcaacactatgaatatatatatacaaatgaaaaactgaattatattattacaaagctaactaggaaaggcagcgcaaaggctcttatctctgtgtgtgtttgtactatgttttgtagaagccaaatcagcaagaaatacaaataattaataaatataacaataaacaattgtgtgttaacttataaatgctttaatagtttatgatacaagtgtacacaaaaaaactaaaaatcacgagaacaaacaatgagaaaattggttttataatggagctgttgagtcgcaaatctattgtgtgtattaccaaactaaactgaaaactgaatgcatacctctctcagaatatcactgactctcatcaccggagacacagtttgaaagatttgctaatttactttatgaatctccacgagatgtacatgggatgtctatcgaactacgcgttttttcaaccccattccaaaacaaaccaatgcaaagcaattttacaacatgtcaagaaatccatttcacgccatctcaactgtgaagaatcaaacagaaaccagatcgaaaagtatatgtacgttacatacatatatatttatagatgacacatgtattttgtatacgctactgtaagagtgatttttatgtgattttgaaactacttgaatatgtgatccagaaatatataaaaaacaaaaaaagaacaaaaaaaaaaa

SEQ ID NO: 9225 - protein, 614 aa, DROSOPHILA
MDARRTDVFCTSLTTMLANETNKLLLSSQQEKPNHYTYLKEFRVEQCQSFLQHKCNQHRPFVCFNWHFQNQRRRRPVRKRDGTFNYSADNYCTKYDETTGICPEGDECPYLHRTAGDTERRYHLRYYKTCMCVHDTDSRGYCVKNGLHCAFAHGMQDQRPPVYDIKELETLQNAESTLDSTNALNALDKERNLMNEDPKWQDTNYVLANYKTEPCKRPPRLCRQGYACPQYHNSKDKRRSPRKYKYRSTPCPNVKHGEEWGEPGNCEAGDNCQYCHTRTEQQFHPEIYKSTKCNDVQQAGYCPRSVFCAFAHVEPCSMDDPRENSLSASLANTSLLTRSSAPINIPNTTLSNSINDFNSGSFAVNIPSSSLTYSPTNHANLFNVDAFNYGGSNKLSNSLSATQNDSSLFFPSRIISPGFGDGLSISPSVRISELNTIRDDINSSSVGNSLFENTLNTAKNAFSLQSLQSQNNSDLGRITNELLTKNAQIHKLNGRFEDMACKLKIAELHRDKAKQEAQEWKERYDLAQIQLNLPAELRDLSIQKLKQLQSKLRTDLEEVDKVLYLENAKKCMKCEENNRTVTLEPCNHLSICNTCAESVTECPYCQVPVITTHT

SEQ ID NO: 9226 - DNA, 3343 bp, DROSOPHILA
aggataattgtacttgtgctccgtcttggagtgcttgtgcttcttctctccactgctgctgctgctgctgtcgctgctatcgctgtccgtcctaaccacttcgtactgaagtagcagtaccagaaggactccaatcgccgcacagctcttcatttctccgtttaaacgcacgacgttcgtttgatctaagctcacgggtatgactaaatcttgctcacacaataccttgtcccgttcccgttccgacaattcaaatagccagcgcgtgcgttgattttgataagtcgacaaaaacatacagatgcgacaaggttgcggcagggcccactcaactaattccctgtaagagtttaggattgaaaaacaatttcattcggaaatgaacaatacttcgcccatagattataaatagagaatacaatgggttaataatttatgtgatgtaatgtctcatacttattaattagttattgtgtgtcggaacaaccgcatttcctccagattttgttatatattgcaaagagaggctgtgtgcttatcaatttgacgcaaattaagcgaaacaattcttttgaataatcttaatagaagactgcgacgcttttattatttagacaactaaacttttaaatagagcggcaattaaaattagatactaaaaggtaataaatgggttttacatatacaaattggattagcaagataaactttcttttgtgtaaactgttttatcaacttcttaagttaataaaccggatgctgctgataaataaaatcaaaacagactgtgcgttgattataaatactttttaaagataacgttttgggaaataccctatgtactacttttccattgtcgccattgtatgaaatatattaggtaatcgtttggtactgcctgaaattgacgagggttgtccaaagagtagtttgtgatttcttatacctttttattcgaaaaatacgtatagcttaatgaactataaaattgatagcattattagttatctccgtttttgctggcagctgccgaagccttcagacgattctccttgaccagcttgcgccattccagccatttggccagttcgggttgctcgctgccgccgccttgctgttccagctgcatgtagtaggcttcgcgcagaattttgaaggcctggatgctgtagtatggctgctgtgtgatcgggtcaaagtaacgggctggcagcctggtgattggacagatgccattgctggctttgggaggcgccttgtggcggaagaggctttgaaacaccttgtcattgaaatcgttctcgattgtaacgaatgtgcgttcgcacttcccagcaagatcctttgaatcgaccgcagggtttgctccgcgagtgggctttcgcatcgctggcatggttagtgagtggtagcgtatcgtgggtccggagaacgtgcgcttggtgggacgtgatttcttcttctccagctccattttctggaatttctctgtgaatgcaacagcaaattgtaaaatagctgcttccttggttgctttagatacccacccaaagatttagtgttttcttcctcggttattttggcctcctccagcagctcctcctgcgtgggcatgtagtcctccacgcgcaccttcttctttttgcgcttgcgggcatcgtccaactctttgaggcgtattttggtagcctgtgtcttgatggccgtggaagtgcgtatggatttgcggccggaatcgaggaccgtgaagcgtggacgtggccgccgtttcgttaccccaccaccaggtcgtttcttgtgcagggccggcgttgcctttgtttcctttttgactgcaggcttggtttcctgcggaaatcatatgtaccatttaaacacattcagtaatcacaggattttatcgcattttaagaatggttcgcaccttataagcctttgtgttaacgacaccgcgtttccgctttttctcgggcgcctcttcctgatccgaaacgggctcgtcgttctcatcgatactgaagtcggagtcaaccacatcttcctcttcgtctttttgcctgcagagtgaattttatatggcttgagcatttaaatttattcaaatgattagtgctcactcgtattccttatcctcttcgtcctcctgaaatccaccataggacgttttgtaaaagtcgtcctcctcttcctcattgagcaaatgagctattttgttgccggcattgttgcgccgtgatcgcgaggcagccatttttgttatttatatatagaaactatgatttaaagcagctattaaataataatattttacaatttgtaaatgtaaacaagcagagcagtgtgaccaatgtagcaaacatagtatatatcgcagaggctttacaactttggtatgcgtttcagccctggtaaagaaaatggtttctcctgcattggcagttattcaaacacatttaaaacatagctaaatttatttatttatctattacatgtatcacaacaaaaagcaggcagctgctttaaaatcacattaaaaagcggtcggtaattcaactaccgaaagtagaccacattactttacacttgcgctggccacactcttggcttgttgctttttattctgccggctgcctgcattttctgatttaatttaataccatcgataaaaagactgctcgcaacatgtcggaacaatgggaggtggtctccaagtcgcgcaagcaaaagaatctggacaagaaggtgtctgcacacaacgagcagaagcgcatcgcggcccagttgcccaaactggaggagctgtgtaagaatcttttaaaaggtgcaccttgcaatgcgattacatgtttgcccctgccattttattcacttcgcagtgccaactcagcggtatcgcaatttgttcggcagcagcaacaacaacaacagcaagtcccattcccctgcgaaatctagttcaagtgcctcatcttcctcaaaagccaataagtcgccagttaaaaagcacaccgcaaagaatgcctctacccaaaaaaggaccacgtcggcagccgcatcgaagccaaagactctggagctggccttgagaaacatcacccgggatgattttgctgcccaactggagcaggtgaagctcagttgtcctggctccgagctgcgctggttaagccatgtatgtttctaaaggaaatgtgcctaaatatttgctcacctatcgttgtcccccagattgcgctatacttcaatgaagccttgtcctatgactgcgatcccatcttctccggccgctcggctcagtatcccagcaatttggccagcgcctcgctcaagtactcaattgtgg

SEQ ID NO: 9227 - DNA, 1148 bp, DROSOPHILA
cacactgctctgcttgtttacatttacaaattgtaaaatattattatttaatagctgctttaaatcatagtttctatatataaataacaaaaatggctgcctcgcgatcacggcgcaacaatgccggcaacaaaatagctcatttgctcaatgaggaagaggaggacgacttttacaaaacgtcctatggtggatttcaggaggacgaagaggataaggaatacgagcaaaaagacgaagaggaagatgtggttgactccgacttcagtatcgatgagaacgacgagcccgtttcggatcaggaagaggcgcccgagaaaaagcggaaacgcggtgtcgttaacacaaaggcttataaggaaaccaagcctgcagtcaaaaaggaaacaaaggcaacgccggccctgcacaagaaacgacctggtggtggggtaacgaaacggcggccacgtccacgcttcacggtcctcgattccggccgcaaatccatacgcacttccacggccatcaagacacaggctaccaaaatacgcctcaaagagttggacgatgcccgcaagcgcaaaaagaagaaggtgcgcgtggaggactacatgcccacgcaggaggagctgctggaggaggccaaaataaccgaggaagaaaacactaaatctttggagaaattccagaaaatggagctggagaagaagaaatcacgtcccaccaagcgcacgttctccggacccacgatacgctaccactcactaaccatgccagcgatgcgaaagcccactcgcggagcaaaccctgcggtcgattcaaaggatcttgctgggaagtgcgaacgcacattcgttacaatcgagaacgatttcaatgacaaggtgtttcaaagcctcttccgccacaaggcgcctcccaaagccagcaatggcatctgtccaatcaccaggctgccagcccgttactttgacccgatcacacagcagccatactacagcatccaggccttcaaaattctgcgcgaagcctactacatgcagctggaacagcaaggcggcggcagcgagcaacccgaactggccaaatggctggaatggcgcaagctggtcaaggagaatcgtctgaaggcttcggcagctgccagcaaaaacggagataactaa

SEQ ID NO: 9228 - protein, 351 aa, DROSOPHILA
MAASRSRRNNAGNKIAHLLNEEEEDDFYKTSYGGFQEDEEDKEYEQKDEEEDVVDSDFSIDENDEPVSDQEEAPEKKRKRGVVNTKAYKETKPAVKKETKATPALHKKRPGGGVTKRRPRPRFTVLDSGRKSIRTSTAIKTQATKIRLKELDDARKRKKKKVRVEDYMPTQEELLEEAKITEEENTKSLEKFQKMELEKKKSRPTKRTFSGPTIRYHSLTMPAMRKPTRGANPAVDSKDLAGKCERTFVTIENDFNDKVFQSLFRHKAPPKASNGICPITRLPARYFDPITQQPYYSIQAFKILREAYYMQLEQQGGGSEQPELAKWLEWRKLVKENRLKASAAASKNGDN

SEQ ID NO: 9229 - DNA, 4970 bp, DROSOPHILA
gccctgactttcatttcgattgaatgcatataatacctaattaaatgtatgtattaaagtatttcaaattaacgcacttcttatcgcgacccacagttattgcagtctgcttgtggatcgttgtcttctcgtggtacaagaagcttggaggctcagcggacatatagatcactcagacgacaacattacccatacgaaaatgatcccgagacaccaagttaaattagaatgaagtgtaccattaggaagtgctgttgctgggagctaagatggggagccttgattatcgcccttatagatatgattgtgacggcggcagttgttttggaaactaagtgtatgtgttttaatatgatctcaatcgatttgaatataaagtgtcgcacagatctagcctattatgaggactggtggattgatcatgatatgggaacgtttgaggtcagctacacttccacctactacgtttggatcatcacacttgtcatccactttgcccacctagtgttttgtgtctcagttattggctctgtttgggtggtaagtattcatttctagttagaagcaatctattaattaagactctcgtcttttccagaaatccaaaaaactggtcattggctatctaataacaggcgcaattcgcattgtttatgatcttatgtttttcatttatgtttgcgtcgcaattggccctgtgattttgaccttattccttatcatcggcggatttggtaaagcttgcaaaatatttgatatattttcacactatccagaattaagaatagtttgcttattttaagtaccttattattaataataattcaaaacccacaggtgtagccatttacttttggatcgttgcctactcatggttcaagatgatcgaaagtcctgatcgcgtgaattaacacctattcacccaatcattgggtgcagcaatgtaatatatataaataaattcgaagtggacacttcaaatcgattacacaattttatttcaaattggtttgtccgcagcagtcgtaggtatttccataggtgttggctttcgtcggcgaccccgtcgtttcactcttaaaatgacctcgtcctttatctgttcgtactggtagtctgtgtggcccagggagcagcgtttggtcacagttgagctctcgtcctgcagactgcaggcacccaaagtttcgtcgatggtaacatcatgggctggcacctgcggcgaactatccatgttgacctttctcttcttcactggggtcttctccgtggccgtcttcttaggcgtcgccatcggcgacacagtcttcgatttcgtttgggatcttagtggatcagcctgttttggagtctgggtgagtattgtgatgaggctttttggcgtctgcggcgctctattcgacgttgaggtcaccacagtttcgtccggcgactgctggtgcaattgctctagtgccatctcaatggcatcttctgcgatccgcagtttcggatatgtggattctgcggtgctcgctgcatcctgctccttcttcagcatgtcaatggcagtttccaggataacctcgtcatgttcatcgctgtgatccagttttgttgaatcgggcttggcgtataatatagtagcagactttattggagtttcgtccgaggtggtaaaaatagttggatctttcatctctgcgcaaatcttttggtcctgtgtggctaggttctcttgatttaaagcggaatctgtgacagctgctggcgcttcaccatggttgtcgacctttacagcaaaatggtcgatattcgccatcttgggcaaccgaatatcctcaataatccttactcccaagtcggactcgaccacggagttaacttgatccatcggttctcggatctctgcttcatcattctcatcatgctgagaacacacatcagcttgagacgtcgtattctttgataatactatgttgtcgttgctttcttctttgctaggagtttcaacagcagtttcaactgcaaaaggctcttttttgtctaactttgcctgtgtctcttcagattcttttccatccttgaatttgtccaggggttgctcatcagctgggcaatcttcagctaaaatgtttttacatttttcaagtactacaactttgggaataggctccttatttaaaagttggtggccagagtcttctgtacgatcctgtaagattacaggatctaacttgatctcatttttagaaaaatccgccgattctgggttaattaagcttaaccccggaataatctcatgttttggaatacaaggttcagcaattaaaccatttgtcggttgagtaatatccttcgtctctacttttgattcctttgaggaatttgcattggtttctaaagcagcatcccttcggttggaaacgactttttcagccggttgagattcagttacgagtttgacggtcacggggactgggctcttgctgcgttggtcatttgtttcatcgtcagtaagtgtgatgatggcatttgctttttctcttggcaattgtatcttgctacaaaaatcagatggtgctatcaacaaatgtaacttatgtccctctgctttactgacctgggcgatgcggattggcttcgccgtttggcgtgccgggaactgctttcttgattcctgtgatgatctcgccgggaattatgttttggactccggctgcgatgtggatctggacgacgagcctgtgcagtagatttccgatcggtggtctttgagtgttccggcctgggagacttgcttctttggaccgatttcttggcgtcttctcttgtcctagatttccaagcatcatcctttgaggatgacttcttgtcatcatctttattggtcgccatcttattatcctccttggattttacgcctctttcaacatcttttgatacgactttcgttgtgtcatcttttttggtcatcatcttcctagcatcatccttagcggcgtcctttgcagccgttttgaacggatttctattcgtttccggatatttcctgacatcgattggtgtagattgaaattctttcggacgcttactttcgggttcccttgcacctggtacgtcaaacgcccgtgctcgttttcgtcggaagcatacatcgtcctttctgttgaacaatgtgttgtttgttaagaagcagggagtcaatatgctaacttactcgtttcgcagctcggcaatcagtgtctcttttctctttacctccgccttagctgtgtccagtagattctgtagattaacctccatggtttttatcttcttgccaagtgccttattctcaacctttagcgcttcaatttcggccagtgccttttcgtatttggcttcccatgcctgtagctccttggtattctgtgagatggtaaatgggtaactctgctgaaaggacgtattcctgcacaacttacacgatcttcggccttctgaaagtcgtccaaatcatcgtagatgtccagttcaagggatctgtccatttggtcaggcttctttgaacctgcaggctctatatcgtacaaatcgtgatagatatccaaatccatggatttatccttaacgttggacttcatcccgcccgcgtcctggtcttccaaatccatcaagtcctccagagcttcgggcagcaccagttctccgccagatttcgtggcatatgcaggcgtttccataccaatcgcttacgtttcttcttggctgccctttaaacaaggatacataaaatgaattgttagagttactgttttttaatggagctactttattgattacctgttcagtcataaattgatcaaaattcgaaacacaaaagaatttcaatgttcttgatttttgtttcagggaataaaagttccactaaagctcaatggtcactgtcctgagcatttcctccaaactggcgtgcaatttgtttccctgccgtgtatttgtataaatgtaattattattattattctatttaatattgttagaaaatcccgtgttgccgccaatcgataacagaagatgcagttgattatcggaagcaacagctgaccggctgaaaatgtggcaaccctgatagtggatatcgatatccagcagcaacatttggcgccaaaacgaatattttaaaaattttattatgcacttacgtgttttcccaagaatataattttaaaatcaatctagttcccatttcgtattactgtacacttaaattcgttaaaaaaaaacatcacaatacaaacaataatactcgagaaacactacacaatggcagacattccggaaaaaagttcttactacaagaaggaaagaagaaagttcgctctgatcacttacctactaaccgcgatattcctgatccttgcgctgttgcaatgggccactttccgctttgtgtacgtatgtattttcacattacttcatcctcactgcactttttcttaattttcagaaattttctaagggaattttttacttcgtaccattggttgagctgccttttttttggaataggcctgatactcctcgtacttttcatatttttcgaggtactgcgctttaataaaatggtaaactggttgtttgcctttctaattgtaagtctacaatgtgaaacataacctgggtggcagtatgaacttattctttccagtttgaatgcattgtactggggattgcaccgctggttgcccgccactacaagtatcagtttctcttcagcttccttatatggaccgtagcattggcgctttttattgtctgtggttcctttcttccggtaagaagagtccacatgaaagccatttgattcaaatctgaagcttcacatttttattgttatccccttaagctggatcttactttggatgttgtggtgctatttgtgcttgcagtggtttccattatcggcgccatatacttcgtgatgctctacatcgtggctaatgtcg

SEQ ID NO: 9230 - DNA, 2519 bp, DROSOPHILA
catttatacaaatacacggcagggaaacaaattgcacgccagtttggaggaaatgctcaggacagtgaccattgagctttagtggaacttttattccctgaaacaaaaatcaagaacattgaaattcttttgtgtttcgaattttgatcaatttatgactgaacagccaagaagaaacgtaagcgattggtatggaaacgcctgcatatgccacgaaatctggcggagaactggtgctgcccgaagctctggaggacttgatggatttggaagaccaggacgcgggcgggatgaagtccaacgttaaggataaatccatggatttggatatctatcacgatttgtacgatatagagcctgcaggttcaaagaagcctgaccaaatggacagatcccttgaactggacatctacgatgatttggacgactttcagaaggccgaagatcgtaataccaaggagctacaggcatgggaagccaaatacgaaaaggcactggccgaaattgaagcgctaaaggttgagaataaggcacttggcaagaagataaaaaccatggaggttaatctacagaatctactggacacagctaaggcggaggtaaagagaaaagagacactgattgccgagctgcgaaacgaaaaggacgatgtatgcttccgacgaaaacgagcacgggcgtttgacgtaccaggtgcaagggaacccgaaagtaagcgtccgaaagaatttcaatctacaccaatcgatgtcaggaaatatccggaaacgaatagaaatccgttcaaaacggctgcaaaggacgccgctaaggatgatgctaggaagatgatgaccaaaaaagatgacacaacgaaagtcgtatcaaaagatgttgaaagaggcgtaaaatccaaggaggataataagatggcgaccaataaagatgatgacaagaagtcatcctcaaaggatgatgcttggaaatctaggacaagagaagacgccaagaaatcggtccaaagaagcaagtctcccaggccggaacactcaaagaccaccgatcggaaatctactgcacaggctcgtcgtccagatccacatcgcagccggagtccaaaacataattcccggcgagatcatcacaggaatcaagaaagcagttcccggcacgccaaacggcgaagccaatccgcatcgcccagcaagatacaattgccaagagaaaaagcaaatgccatcatcacacttactgacgatgaaacaaatgaccaacgcagcaagagcccagtccccgtgaccgtcaaactcgtaactgaatctcaaccggctgaaaaagtcgtttccaaccgaagggatgctgctttagaaaccaatgcaaattcctcaaaggaatcaaaagtagagacgaaggatattactcaaccgacaaatgctgaagattgcccagctgatgagcaacccctggacaaattcaaggatggaaaagaatctgaagagacacaggcaaagttagacaaaaaagagccttttgcagttgaaactgctgttgaaactcctagcaaagaagaaagcaacgacaacatagtattatcaaagaatacgacgtctcaagctgatgtgtgttctcagcatgatgagaatgatgaagcagagatccgagaaccgatggatcaagttaactccgtggtcgagtccgacttgggagtaaggattattgaggatattcggttgcccaagatggcgaatatcgaccattttgctgtaaaggtcgacaaccatggtgaagcgccagcagctgtcacagattccgctttaaatcaagagaacctagccacacaggaccaaaagatttgcgcagagatgaaagatccaactatttttaccacctcggacgaaactccaataaagtctgctactatattatacgccaagcccgattcaacaaaactggatcacagcgatgaacatgacgaggttatcctggaaactgccattgacatgctgaagaaggagcaggatgcagcgagcaccgcagaatccacatatccgaaactgcggatcgcagaagatgccattgagatggcactagagcaattgcaccagcagtcgccggacgaaactgtggtgacctcaacgtcgaatagagcgccgcagacgccaaaaagcctcatcacaatactcacccagactccaaaacaggctgatccactaagatcccaaacgaaatcgaagactgtgtcgccgatggcgacgcctaagaagacggccacggagaagaccccagtgaagaagagaaaggtcaacatggatagttcgccgcaggtgccagcccatgatgttaccatcgacgaaactttgggtgcctgcagtctgcaggacgagagctcaactgtgaccaaacgctgctccctgggccacacagactaccagtacgaacagataaaggacgaggtcattttaagagtgaaacgacggggtcgccgacgaaagccaacacctatggaaatacctacgactgctgcggacaaaccaatttga

SEQ ID NO: 9231 - protein, 775 aa, DROSOPHILA
METPAYATKSGGELVLPEALEDLMDLEDQDAGGMKSNVKDKSMDLDIYHDLYDIEPAGSKKPDQMDRSLELDIYDDLDDFQKAEDRNTKELQAWEAKYEKALAEIEALKVENKALGKKIKTMEVNLQNLLDTAKAEVKRKETLIAELRNEKDDVCFRRKRARAFDVPGAREPESKRPKEFQSTPIDVRKYPETNRNPFKTAAKDAAKDDARKMMTKKDDTTKVVSKDVERGVKSKEDNKMATNKDDDKKSSSKDDAWKSRTREDAKKSVQRSKSPRPEHSKTTDRKSTAQARRPDPHRSRSPKHNSRRDHHRNQESSSRHAKRRSQSASPSKIQLPREKANAIITLTDDETNDQRSKSPVPVTVKLVTESQPAEKVVSNRRDAALETNANSSKESKVETKDITQPTNAEDCPADEQPLDKFKDGKESEETQAKLDKKEPFAVETAVETPSKEESNDNIVLSKNTTSQADVCSQHDENDEAEIREPMDQVNSVVESDLGVRIIEDIRLPKMANIDHFAVKVDNHGEAPAAVTDSALNQENLATQDQKICAEMKDPTIFTTSDETPIKSATILYAKPDSTKLDHSDEHDEVILETAIDMLKKEQDAASTAESTYPKLRIAEDAIEMALEQLHQQSPDETVVTSTSNRAPQTPKSLITILTQTPKQADPLRSQTKSKTVSPMATPKKTATEKTPVKKRKVNMDSSPQVPAHDVTIDETLGACSLQDESSTVTKRCSLGHTDYQYEQIKDEVILRVKRRGRRRKPTPMEIPTTAADKPI

SEQ ID NO: 9232 - DNA, 2699 bp, DROSOPHILA
caatcatggttcttttgcgtccgcgtgctcgcacctcctcgaacttggtgagcactgcctgttcgtccttaccgcacgctgtgcgataggcggccaggacgtgctcgaagatatacggctgttcgctgtgcgtactgagtagcgcccgctccaggacgtacagatccacacccttgtcctcggtggcctgattgtagtggctcaagccgaagtcaatcagaatgacatcgtagtcgccacccttcggattgatgaggatgttagatgtggtgagatcgccatgtataatgtgattggagtgcattttcccaatgatttcaccgatccgcgtgcagaactccagcagacatttcttggcttcatcctccgtctgagtggacactgtttcctggatgaactgcttggcagtcttggctgcatcgaaatattccatatacagcttgtgggtgttgaggtccgagtggaggatctttggtgccaggattccagcggctagacatcttcccgatgccttggcctccgctttcatgcgctgccgcgtgatctgggtgttcagttccgggtggcggtacttctttacgaaccgctccttgatcaggcaggcttctcctttgaaatcgcccaaatataggcgtccttcagcgccttgtttcaggatttctagggacatttttaatacgcttgaaaacaaaccggtgcacttgtcttaaacaaggtggcaacaccacacagcgtcgtttgtaagaggggttgggaaaatgtaccttttattttttttaagtttagaaaataattatcgactgctactgaattttcccaccaaccataaatgtgaaaccactataaatatattaaatggagaaccccctaaaaacttaccatctacgcccatgatttcattactcattcaccacgaagcgcgtgcaaaacagctgcttgctgttttcgtatttactcctatagcgccaatcgaatctccgagtgaatcatcatcaggaaaacccatcacaacatcgtcagaagtcggaaaccttagtttaagatcgcaccaaatcccaaaatgttcaacaatattttcggaaagaaacccaccgtgaaggagcagcagcgggagaatgaccgatcgctgcgcaaggccaccagggacatcgaacgggagcgcaggaaaatggaggaggaggagcgcaagctggagctggagatccgacggaatgccgccgctgggaacaacgatgcctgccgcattctggccaagcagctggtggagatcaggaagcagaaatcacgcacatacgcagcagcgggcaagattcagtccattggctaccagaacaagaacatgggcgccaatatcgccctaagcgaagccatgggcaccacggccaagacgatgggtgaaatgaataaggtgatgcgaccggaggccatcggggaaacagtgcgccagttccaggcggccaacatgaagatggaaatgaccgacgagatgatcaacgacacgctggacgacatgctgaatgagtccggcgacgaggaggagtccaatgccgtagtcaacaaggtgctcgacgagatcggcatcgagatctccggcaagatgtccagcatcccggccacgggatcctcagactttgagacgagtggcaagcgcaccgagaaggacattgccgatcaactggccaagctgcgctcctcttagtccttacctgtttttcattctattttgtaactactgtgaacatcgctgttatccatagcccgtaagaaattatatttatgtacaccgcttacaaacgagctgtcattccaccgccagccacaatggactctccggtaatgtagcccgcatcctcggagaccaaaaaggagaccacgccagccatctcctcactggtgcccagacgacccatgggtattttgctcaaagccgcttcattcgccgactcattctcgtacagtgctttcgagaactttgtcctgatgactcctggagccaggcagttgacgcgaatgccctcgggcgccagatccttggcggctgccttggtcaagccaatcagcgcggtcttgctgacggaataggctcccagtagctatgcgattaagataacggagataagcattgaacaactgaaccgcagataaggcgactaacctcaaaggcatcatagccagcaatggaggagacgaaaacgatgctggagttcttttgctggcgcaggagaggcagtgcctccttggccagcagataggaactcttcacgttcacatcgaagatcttgtcccacaccttctcatcgcactcgaggacaccgccgaccgcaggattggtggctgcattgctgaccagaatgttgagcttgccaaacttgctaatggtctcctcaaagagctgtttgcgatcctcgggttcgctgacatggcacttcagaccgtggacattcaagttcagtttgcgcagctccgccagagcagagtccacattcttttgcttgcgactgctgatgaccactgcggcgccatcttcggccagccttttggcaatcgcgaaaccaatgctgggagggattaatcagaatttagtgggtgcgatcctctccagtttctattgagctgcttacccatcggtggaggcggtgaccacggctacttttcctgccaaacgcttcatcgtgccggctgtcgaactttgactactg

SEQ ID NO: 9233 - DNA, 699 bp, DROSOPHILA
acccatcacaacatcgtcagaagtcggaaaccttagtttaagatcgcaccaaatcccaaaatgttcaacaatattttcggaaagaaacccaccgtgaaggagcagcagcgggagaatgaccgatcgctgcgcaaggccaccagggacatcgaacgggagcgcaggaaaatggaggaggaggagcgcaagctggagctggagatccgacggaatgccgccgctgggaacaacgatgcctgccgcattctggccaagcagctggtggagatcaggaagcagaaatcacgcacatacgcagcagcgggcaagattcagtccattggctaccagaacaagaacatgggcgccaatatcgccctaagcgaagccatgggcaccacggccaagacgatgggtgaaatgaataaggtgatgcgaccggaggccatcggggaaacagtgcgccagttccaggcggccaacatgaagatggaaatgaccgacgagatgatcaacgacacgctggacgacatgctgaatgagtccggcgacgaggaggagtccaatgccgtagtcaacaaggtgctcgacgagatcggcatcgagatctccggcaagatgtccagcatcccggccacgggatcctcagactttgagacgagtggcaagcgcaccgagaaggacattgccgatcaactggccaagctgcgctcctcttag

SEQ ID NO: 9234 - protein, 212 aa, DROSOPHILA
MFNNIFGKKPTVKEQQRENDRSLRKATRDIERERRKMEEEERKLELEIRRNAAAGNNDACRILAKQLVEIRKQKSRTYAAAGKIQSIGYQNKNMGANIALSEAMGTTAKTMGEMNKVMRPEAIGETVRQFQAANMKMEMTDEMINDTLDDMLNESGDEEESNAVVNKVLDEIGIEISGKMSSIPATGSSDFETSGKRTEKDIADQLAKLRSS

SEQ ID NO: 9235 - DNA, 4411 bp, DROSOPHILA
tccgttcttgtgctgggccgctcgtggtcgtggtgggacttactgcgttttttgtgcttgctcttatggtggcgtcgcttgcccgacggactgggtgtacgtgaacgggagcccatggtgctggattgtgtgattgtataagatttcgagctagtcgaagggcttaacttggctgccacaacaaatcaatgagagcgaatttaatttctcgagcaattttcacagatgccttaaaacagtgtgcacaacgttggcatactggcctgacataattctggtattttttttgatacggtattttctgtgctttttttattttaatttctgtgttgcccaacattagaccggcaattgttttcagttcacattggtttgttttgatctaaaatcatttggtggaacttgtcgatcatgacttggttatccttaaagccgacgcactgcttggcctcctccttgggcagccacttgaggtcggtgtgctcctcggagagaatgggctcctggcagggattccgcagctccgctagccagtaaataacaatcttcggcttgtcttgcacctgataattcagggtcagcggagtgtccttgtatatgatcagatccttctcgtcgtacctatgagagcatttttgaaattaagcatgttttaaaagatatatcgttgtgcactttcccggcttcctctttcgtttctcgcagggcagtggtaaaatcatcctcgcctgggtccacatgtcccttgggagaactccagtggaaggagccgtaggaagccttcagcaataggtattgtatttccccacaaaggcggcgaaaaataacaaaaccagctgccttttccatgttgttgctatcaattaaccgaaacaggtgtttgaacagtgctcgaaagtctccaataacagtggtgcttttctagctgtttccctcttttgcttattagtagttcacttcgtgtgagaggaaattagtcagtgttgaaaagcgaatgcagatttaacgtatgcttgcggacttgcacgttgttttgtaaattcattacataaattgagaagaagtgcatccgatatgtacgccctgcttcgccgctttgccggcgtcaccaacttgggatgtcccatcagaacctacgcctcccttacgcccagagatgtattgcggagcagcgatgagaccggcacactgctgacccgcttcgccaagcacattgcactggagcgctacagggattcggatcacgtgttgcccaagacgacggtccggtactctgacttctttcccatcacggacgaccggtactttcagcggacggtagagaaaacggatgcagcccaattgcccgccctgatcatccaggcatccagctatcgctccaatgccgctgtacccatgtatgtgactgcgcttaacacgttggataaccatgcggctaaacagctggacaagatggataccgccacagtgctcgagacgctctactcctttctattcctcataccaagttggataaagcgattggatttttaccaagcagccatgcaacgactggtcagggaggattttcgcggcaacaaggagcgattcgttcaggtgtgcttctatatgggattgcaaaagaagcaggccaaatcttctgaggaattccagcaactcctggaagagcatctacaaacgcatttgcctgaactaaatgaaatggaccttgccgtggtcagcaatgcggcgtacaaaacctcaactttggtaaccggtgaggcgaaaacggcatacgaagcaagactcgttaatgccatattaaatctggagataaacaccggaagcgatgccttgctggtctcctttgtcaaggcattgcgtctgcagcaagtcaaagatgaacgagtgtgccagcacctgcaagatatctgtctggatcctgtaaagataacccatattgaaccccgaggacttgcccatatctttgcattctttgccgagcagctttgggatcagaatgaatgcctaactgtcgtcgtaaaacgactcatgactcttctcaagcctggagacctgcgctccaaagacttggccacattcctgtgggccagcgctcaactcaattgtgcattgactcctgaggaaatcagacaattggaactgaccgccctgcgcaagctggatcatggggagtacgaatatttccctgacaaccttgttgacacctgcctctctctgtgcactttgggtcactactctaaggatctgattaatgcagctgaagaactaaaagctgcccaaaaacgccagcgagcccaacccaaggtggatagtcgtttaattgtgctgcgatctgctgtggccattgagcagccttcaattgctaaagttaaaacagaacgagcttttaaagagtttgatggagcaccagcttatttgctaaaagatcgcccagacttgacgaaatacgcccaggagctgagtggcgacgcggatgtggagggcgtggatgtggtgtgtcccattgtcggaataaatttgccaagcttacgagtgcagacaatgggtgcccaggagagtgtgtactttgttgaactgctaaccgcagaacagactctgaaattcagcaagaaaccgacttcattaatacgtcttaagaaaagacttttggaatcccttggccgaaaagttgtagtagtaagcattatagagagttgaaactatataaacacagtttaacacatcgttttgtttcagctaaactcaacagaaatggccaccaatgcaaaggaactccgccagctcctagaaccggcagcaaatgcaggagaagaatccaaggttgcccaaggcgtgggcaactgaattgtgtgatataatatggggccatatcggccttctaggctagttacaaatcgtagctttatttaacagtgttttatgtacttgtacatattatttaaatattaatagcactaaacataatggtcaacaattaatgtataatacaaggaatgggctacaggtgtgtctcccccagctgtcctatcggatcgacttgatcttggccttcagcaccacgtaggacacaaatcggaaaaccaggatcatgactcccagcgcgatcacatcgttccagaactgatcacccctcatggtgatttcctctaagaatttctttggatacctataaacacaaagcagagttagcgcttgagaaaaagaaaagttagcagaatctaattacctgtaatggcagtacggcgcctcctcgcaggccaaggtacctcgatccaagccataaatggctgatatgaagccctcaagtccatatcttaagtatgatatgtgactgccccaccttaagtagcttggcagatcacgcagggtcactccaaagccggcgaacatcatcatgggaatcgttagcactggggccaagaacgttccattcaccacatcgaaccaggcaccaatcatcaaaccaaaactatgtcccacaaagacggtcagtaaactaatggagaagaacataaagaatctgatccactccatcggctgataactccaaaggtaaacgatgacagtgaagaagaaacaacttatgatctgtaaccaaaagggtcagttaaaaattgaaaatgggatattaaagatcgctacgcacagatatgggcaggtccacgagtgtcatggcagtgtagtaggctttgagtgagtaccagcgattgaagtgctccttgatcaatatggagatgtccatggggactggtcaaatgatattcaaataagttaatatgtctacgcaatcgactcaagtgagcttacaagtcagaacagtcaacatcatcgtggtcatggaatggtgcatcagtatggcaaacagaagattgtagttgtcgagcactcgtgatccttcacgtcccgtgtgatcgtacatagctccgaacagagcggccactgctatgttgactccgatcctcaagtgcgtcatggtcgtgtctcgtttggctttgatgaaacctcgtcgcaaaagcacagagcactggtttgagtagctggtgtcctccagggatcggcttttggttttctttggtatgggatactttctcatcaagacctcagcgcgcaacaccgcactgggattatggaaccaagtcaggcagcttccgttctcagtggcgagcttaagggtgtcgaccttgtcgtatccatactctccgcaagcgagctcgataactggagcaataaggattgtattagtgtaaattcactcagagatctgtgctggactcactgtaatccgctggattgtggtacatcggacagggcagatccaccgactgcaggaacggcaccaatttctgggtgctgccctggtagacgcagttgccagcggacaggacgtagacctgatcgaagatctgga

SEQ ID NO: 9236 - DNA, 2372 bp, DROSOPHILA
atttaacgtatgcttgcggacttgcacgttgttttgtaaattcattacataaattgagaagaagtgcatccgatatgtacgccctgcttcgccgctttgccggcgtcaccaacttgggatgtcccatcagaacctacgcctcccttacgcccagagatgtattgcggagcagcgatgagaccggcacactgctgacccgcttcgccaagcacattgcactggagcgctacagggattcggatcacgtgttgcccaagacgacggtccggtactctgacttctttcccatcacggacgaccggtactttcagcggacggtagagaaaacggatgcagcccaattgcccgccctgatcatccaggcatccagctatcgctccaatgccgctgtacccatgtatgtgactgcgcttaacacgttggataaccatgcggctaaacagctggacaagatggataccgccacagtgctcgagacgctctactcctttctattcctcataccaagttggataaagcgattggatttttaccaagcagccatgcaacgactggtcagggaggattttcgcggcaacaaggagcgattcgttcaggtgtgcttctatatgggattgcaaaagaagcaggccaaatcttctgaggaattccagcaactcctggaagagcatctacaaacgcatttgcctgaactaaatgaaatggaccttgccgtggtcagcaatgcggcgtacaaaacctcaactttggtaaccggtgaggcgaaaacggcatacgaagcaagactcgttaatgccatattaaatctggagataaacaccggaagcgatgccttgctggtctcctttgtcaaggcattgcgtctgcagcaagtcaaagatgaacgagtgtgccagcacctgcaagatatctgtctggatcctgtaaagataacccatattgaaccccgaggacttgcccatatctttgcattctttgccgagcagctttgggatcagaatgaatgcctaactgtcgtcgtaaaacgactcatgactcttctcaagcctggagacctgcgctccaaagacttggccacattcctgtgggccagcgctcaactcaattgtgcattgactcctgaggaaatcagacaattggaactgaccgccctgcgcaagctggatcatggggagtacgaatatttccctgacaaccttgttgacacctgcctctctctgtgcactttgggtcactactctaaggatctgattaatgcagctgaagaactaaaagctgcccaaaaacgccagcgagcccaacccaaggtggatagtcgtttaattgtgctgcgatctgctgtggccattgagcagccttcaattgctaaagttaaaacagaacgagcttttaaagagtttgatggagcaccagcttatttgctaaaagatcgcccagacttgacgaaatacgcccaggagctgagtggcgacgcggatgtggagggcgtggatgtggtgtgtcccattgtcggaataaatttgccaagcttacgagtgcagacaatgggtgcccaggagagtgtgtactttgttgaactgctaaccgcagaacagactctgaaattcagcaagaaaccgacttcattaatacgtcttaagaaaagacttttggaatcccttggccgaaaagttgtagtagtaagcattatagagagttgactaaactcaacagaaatggccaccaatgcaaaggaactccgccagctcctagaaccggcagcaaatgcaggagaagaatccaaggttgcccaaggcgtgggcaactgaattgtgtgatataatatggggccatatcggccttctaggctagttacaaatcgtagctttatttaacagtgttttatgtacttgtacatattatttaaatattaatagcactaaacataatggtcaacaattaatgtataatacaaggaatgggctacaggtgtgtctcccccagctgtcctatcggatcgacttgatcttggccttcagcaccacgtaggacacaaatcggaaaaccaggatcatgactcccagcgcgatcacatcgttccagaactgatcacccctcatggtgatttcctctaagaatttctttggatacctataaacacaaagcagagttagcgcttgagaaaaagaaaagttagcagaatctaattacctgtaatggcagtacggcgcctcctcgcaggccaaggtacctcgatccaagccataaatggctgatatgaagccctcaagtccatatcttaagtatgatatgtgactgccccaccttaagtagcttggcagatcacgcagggtcactccaaagccggcgaacatcatcatgggaatcgttag

SEQ ID NO: 9237 - protein, 541 aa, DROSOPHILA
MYALLRRFAGVTNLGCPIRTYASLTPRDVLRSSDETGTLLTRFAKHIALERYRDSDHVLPKTTVRYSDFFPITDDRYFQRTVEKTDAAQLPALIIQASSYRSNAAVPMYVTALNTLDNHAAKQLDKMDTATVLETLYSFLFLIPSWIKRLDFYQAAMQRLVREDFRGNKERFVQVCFYMGLQKKQAKSSEEFQQLLEEHLQTHLPELNEMDLAVVSNAAYKTSTLVTGEAKTAYEARLVNAILNLEINTGSDALLVSFVKALRLQQVKDERVCQHLQDICLDPVKITHIEPRGLAHIFAFFAEQLWDQNECLTVVVKRLMTLLKPGDLRSKDLATFLWASAQLNCALTPEEIRQLELTALRKLDHGEYEYFPDNLVDTCLSLCTLGHYSKDLINAAEELKAAQKRQRAQPKVDSRLIVLRSAVAIEQPSIAKVKTERAFKEFDGAPAYLLKDRPDLTKYAQELSGDADVEGVDVVCPIVGINLPSLRVQTMGAQESVYFVELLTAEQTLKFSKKPTSLIRLKKRLLESLGRKVVVVSIIES

SEQ ID NO: 9238 - DNA, 18445 bp, DROSOPHILA
tagagatgcaatgaaattgaaattattatttggacaggtcttctcacacctttgtttcacattctattattgctaagtgttagcagaattgtatcccatgtccttacataaggattctcaaaccaataacaaaattggtttgcgatttgaaaacaatttgatgctattgaataataacttcatgaaacgaataacacaaacatttgtttttaattttagatattttttattaaaatggtttttgtctcattttattataactaaacgcttaagaactaaagatttttgcaaattaccttaagtacatttagtgtgaagagagtgcaagtcactaaaaatcataatcttccaaatcgttttttgtgggcaagatgggaatggattttacaatataaactggcatttgaagtacacatacgtattagatatcaactgaacactgttacatatatcgtgaagtatataagctatggaccgattcgagttatttatgtatttagatgcacgttaggcgagtattgcttgtgattgaggtttatctaaggatcgttcctttaagttttagaattagattcgatttggggctgattcatatatccgtatgatgtgcatgcatgtgtgtacaatttttataattgtttcgctatagtacattcaaaccgagttcatggcgattatgttagttaggctgttcataaatttatcaaaacttaacatcacattgcttctcgattacattagtttgccatatttataagtaagccttgaaagttcaaagtttggatatctgtatatatataatatactcgtacgttgttatgctgaaactgatcaaagtctagattcaaataacgatatgaatgtgcgattctgcggcagttgtttaagtatcttcattgttcaattgtcgtaactaactatgggttgtggcttttgttatcgtattttatgtgaatcgatttaagtgggtgaattgcaccgtatgggaggagctgtgtcatgcgataataccctaatgtctaagtctaagtcaatggatgcattgtaaatgcttcggtaaatgcataatcctttaggaagagttttctgttcattgctgaagaaagtatgtctatgatgatgtcgctgataataatgattataatgagttcttctcgtcctgggctttttattccgcattgttattatcctcttcgctttcgattaactaaaattgattggacgacgatgacggcattttgagggcgatactctcttcgtgatatcagacattgggcttacggaaaatctcattcggatgctgattgctgctgaagttctgccgtgtcgagcattgctggaaacgaataataataaaaaacaaaaatggacataagacacacacaattagtaaatatgatttcgaaggtacatatacacacaggccaaagtgattgcattttaattacatttccattgcatctcccacccggctgagcaattaccttgcatttgggtcacaccacaggtggggtgcttggataatgacaacttaactaccttacaccgcttttattattattttccctttttgatttgacgctgcggtgtcagcctggacagccgcccaactcgaaggctattaaaataattgccattcaaatcgtttattatggcgtatgtctgcactcgggcccaccggaaccaccaaacacgaccattccaccaacctcattttaccacaaatccacccccaagggcgttggtcctcattatcacttaccgcttgcttcttttcccaggacttcattgctgttttgtatttctcgaactcgtggcaccagtccgagtagattttctgatagtcattactcttgttcggcggagtgcatctgttccaaaaatagaaaaacaatgtttggaagatattattatctaaatataattgagtagtatatgggttcacactatgctaatcgatagggcaaaatgtgttcaacttgtatttctttgagtaatatagtgcggtgtttgttagttaggctttcaatatcgacagagtgtattggcttacctgtgggcatccaccgtaatgttgtagctgcacaaaagcgagccgcccaaatggcaatcgtaccgaccaccatcggcttcgttcacggaaaccacaaccaggccacgttcggtggtctcaatgtatttggtcggcgagtaacgaatctcgtagctacgaaagaaatccatgcgattggttgtcggtgtatgaaagcaaatcatatattccactcaccgtcccttgtccttggagtgatgataccaggtcacttgctcattcttcagcacttcgggtattttgacgaaacagcccagatgtacactctggccataggtcaccacaatcttctttttcagcacactcgaatcgcaaatgtcactcgtttcattggccacatcctgcagatgtaaaagtgaaattaatcaatccgtttcagctttgattttgagtcaattgaaaaaataattagatgggtttgtggtatctttacgtattaagttgataaagaagccactcgtttcatgaatttagtatcatatatgccactggctttaaatcacccacctgcagtaaatccagctcgtacggtcggcacgtattggcctccttatcccagccgcagtagggatcacggacgcagcggaagcagttgtcgtaacggcgattgcacatggccaggtcgatttgcttgatgcgatgatcggtgccaatgtagaggctcttacgtgtctggctgatttccatcacttggatggcctcgtttggagccacctcgaagatatccagcagcttggacagcgactctccgttacggtagtactgcacgattttgtaaatgcgacccagattggtgcccacatagtacacaatgtattcctgattgaggatgtcaatgcgaattctgaaataaggatgttttaatcggcatatgagtaaccttgaattaaacctatacttcaacagcgtattacgtgattgattcattttaagagcattcttttaatgagcttacatcagtttgatttatattggctaatatttcttacattttactcgattacatttctgaataacgtacggattaaactagtaaaacaaagagtcaagcattgcacctgcaaatagaaaatatatatttgttttcaactcacttgtcaacgacgagcttggtgaagaccaaatcccttttataatagactggattgttgtgctcgtgatttacggctttgtccataagtggatgggatctgatgaaattcagtacggtatcgggcaggtttgatgtatcgttgacacatgtacccggccgtggttccggcacccgggagttaagcaccggcagccatgcggaattcgatgaagattgctccttgaatttgcctgcgcgcgcgggataaaaagtaaaagagcacaaaaacaattgctcatatgagatggcagggaatggaaaaaagtttatcaagctcggagtgctgagctgcaattgaagacttaaatctacgaccaaaggtgtcagctggttttcctctaagctgtcagccggtgaaaaataaaaagagccaccaagtgtgtgaatgtgtgtggccataatccattcaaatggattttctaatgcgatttatgttgcgcacggcaacgaatcgaacggaacccaactgaactgaactgaactggactgaaattacaaaacactcaacacacacagtggggtgctagcggtgctatcgaatggataaaacaaatgtatagattgcaaataaaatttgccaataagttgcatgcgctatttccattttcgtttccgtttccaatttcaagtcagtgccacccaatccacttgggggacaatggacaagcacagaaaattgcatgtcaacgggatgtgcggatcgctccgaaagtcggtgggcttaccattgaaggcagcctgaatctcgttaatgtggaaactgcatacggcagatccaatcaggccattagtgctcgtcgtgaatgtggcgaagaatcgactcttatcggagggcagctggtagaccgattggatctcgttgaaatagaacggaaattcgccggagatgctgcagttgagtctggccttcaggtaggtggcccagttgtgggccagcagattctttccacccacatccttcttgcacacccgtgcgatgcgcgaatagacagccttgccgcagttgatgtattccacggcggtttcacggaaaaagaaatacacgtactccccaatatcaaaggagccgacaaagtttggttctgtgaattggaaaaaagaaaaattaaacgttagtaagctaagaccatttacttgcatctctataaaagtattagagtaaattgcactcagaaggatatatgcttatttcatacttactgtccaaccacttggagtcgtatttcagagtcctcttgaatttatattccaaacgtttagccgaagtattatacagatcagtgcggaaaataaccgtatccgccttggtgaactccgcattggtgccggagtactgtggagtagcaatttacagcctcagttaaggtccgagaaagttttggtttatgcgagcaatttgcttaccaaaccgggcagaccacccggattgccattctccacataaatcgcagttgagttgtcgaggggatcgtaggggcacttggcaatgcccagacccacgccaatcacatattccgagcgcggcaggtgggttagattcgccttaaggatggagagatgggtgaataagtgaaatgctgagcacaaaagattacccttcgagtgttttgactttagtttaggtgctttatctatgaacagatgtcaaaggctgaatgagcaactgttgattggcatctaaagtcaactgtcggtggcaatcttttcatgggcgacatgaatgaaagatggcaatggcaaatatagcatatatgccatacggcgtatggcttcccaatctggccaacttacatagataacataatccttgggattgtgggcgttggtgccgcatacatagagcctatccccctggtccattgactggatgacacgcacatggttcttgcagtcgaagatctgcaataaacacacacatatcgattatagagacaaagatactggaaaaagaacaaaagaacgctggccgggttgacaatgttgtgggtcgttcttttcaatttatggtacggcgaacggcatcatctgttttgctccccaaacacagcgaaatcgaaatagtttcgagtgtgttccgtaatgcagcagcgaatttgtggcagaaatgtggacaaattgcaatagcacgcgtcgctgccgaagctaaatcaattggcaacaatgcaacgaaacgctgcagaaattactgccagcgcaccagtggcacacaggcagctttatgatgacttaagcaggatgcccatgtggcccccatatcgtgtgtgtgtgtgcaacatgcaacatgctgctactgctgctgcttctgctgttcctgccacgaataacttgaaattgatttcgaatgaaaggatttgctgtcacattataaacgagttgcaacagtagcgtctgccacattgccagtcgatgggattttcttggttttaaactgcaatcgagttactgaaatacctccacagggatgtgatttatttgagagtatatacatatgtagaatacataaagtagttgcagatgcacaaaggaatttaacaggagaaggtaaaacaattgtggttaggatattcagaaaagttgttatgaaatcagtataaaaaaggggattttatgaatggaactgaatattggtcaaaataatatgaaagtttttgtttgcaaaattagtgaacaatttctcttggaagtttcaaataaaaatattattatcaattagtttcatatcttttatgactgcttttcttatacgttttgtactcacctgacttttgcctttggagacgcagctaaccacatcatcccgtgttggctccaagttgatcacatcccgctgaaatgaaaagtaagcccggcataaattagctaaatatataccaaatcaaatcgcgtacacctgccaaccattaaccattaggttaaaagctcacgtgccgcggcttctatcaattcaaaaattcaatttactcaaaaaagccgaaatacaaaaattgtatattgcaaatgctgaacggggaggatgaggctgcttctgcctcatgcggcataaactacaactagcgttcgtccgtggcaccttcagaatgctttcaactaaatttatttataaatcacgtaatgttaccccagcacacacgaaatattttcacgcaccaacctccattgctccattgccgtcgcagccacccacctagccaccttcatcaacgtgctccaatcccaaccacccaaccacctattcccgcccacttgggaggcaggcagtcgcagcagcagagcgttcatataaaaccgaaatcatgtattatttagttgaatttgcatttggcgcataaagcagcgggagcagtgctacgaggagcccaggcacaggaggcggaacaggtgcaggagttgggagcaaacgaggcaaacgggtacactgagacaaaatcgagaacaaatacgtcaggctacattttcatacatttcactatatgtacatatcagagattaccaattgaagtattagagtataatctctctatgattagttgagtatattttatgttagatcttactagctcatttttttcctcagtgtaactccatgtgtataggccagaaccaaatgatgcccacggcgaatgtattcgcacttaaccgcataaaatatattgacgtatcctggctggcgagcatgctacaaggaaatataacctcttagacttttacgattcggcccggagatgcgtttgcagggctcaaaatggaatggaatggtttggtttggtttggtatggtatggtgtggaatagaggacggcaactgtgagaagcacaccaagtcaggtgtgtggcgctcataaaacaaacttttgcaagtcataaattcataaacagcccaagaccgagcccaagcttgagacccaagacacggggtagcacttcctgtaatcgaattgcctcgcaaatgttgtggcaagttcgcgtatgtggcatgtctctcaaaaaatttatatctgggcaacgcataaacctgagcctgcagaaccgaaccagttcggggaatacgacaggaacataatgtccggacaagagagtgcatattaaatatgctttttggtccttctttacttttttttttttttttggtgtgctgaaagttggcgggttcgaaacctttgggttaactaaaataaacattttttttttttagccgctgcgccgtgggaatcgaagatttgtggctgtcgacgtcgttgttgccatttgaagtgcgcctaaaaggctgctaagccggtgtattgtgctgacaacgtttagatggcgctttattgccacaaaaggctgcaagaagcttagcggccatttggaaactatggcaaacatatacacaacaacaaccctgcccagtggcaacgtggcgtataatgaatttttaacaatatgccacagagcaccaacagcaacggccgcaagcaaagttgtttagcccgaaagcttttcacgatttttttcacccccccactgtcatctagatttgtggcccgactctcgacaacctgccacatcccacatcctcctccatccccattggcgacctttcgcgacgaaaggacttagcctaaaagcgtgctctaggattatcatatttaaggcatttagcacaaacagagccgaagtcatggcagccatacttacattacaattggatgaggagatattctgcaggttcacacggaatacgcgatccctggaatagagaaatatacaattcattgtagttctgctgctgtaggggattattgaataacagctaagagatgggtaagagataggttggtagatagaaagataggtaatagtttgccattaatgtctttacttatgaacttaattaaattagataaagtggcaatcaaatgttatatttgttaatcaaaaataaacctaaatattactattttgttctaacttttgaagttctatagcatatgtacttacatggctcccacatagagcgtatctcgatcttcgttcatatggaatgtacgatagtacagcttgccgcagttgaactcccgcacatgatctgtaagagaaaatattttcgttaagtaaactcaatatttgcacaagaaattttccctaagtgaaccgagttgcagacgccggacacagtgtctagatagtgtcaacaaagtttccattcccgcacagaatggcggacagttttgaccacagacaaacaggagcacgaagcccagtcggccacccaaaagatacggatacagatatcccatttcaatcaaacggcgtttgtgtgcaaaaaataaaaacgaagtaagagagatcttgaaaatggtcctgtttatttacattgaagttttccgcgtggcaaagcagaaaataagtagggtttaggacacaaaatgcctttccaaagccccccagacaaacaagagccattaattataagtattgtattatgttaatttcagtgacgtcgctttgtctgcaaaattgtttgcccagcgggatgatgtgtacatgtgtggttactatgtggttatattgctaaatgctgcgcacacaattctttaattaaactaatttgtatttgccgcctgtcactcatcactgcttcaatatcatcagcaattaatattgccgccaaggagcgctgctgatgggaattatggaattgcagtggtacgggaagctgtgtgccacccaaaagtgtcaaatgtcgttcaagtaatatggattaccgaggcattatccccctcaacagaagccggacaatgggcgaaagtatgacagaggtcagcaatggagcaaacaaagggcagggcatacaaaaactcagactccaatccaagctcaaccaacccaaacaaaacccaaactggcatccgatttatgcttatgctcaacaatgggatatgtaaatacggaaaggaaaccaaagaccccaccggcagaaatgtagctatttttgatttccgatttcgagagaatatttttttttttggggaagagggctggaaagggggggaaaacaacgagcaacctattggccaactacaatagaagtgcgcacacacacacactcgcgcgtatccttgtttgcatgcacatttcgtatagaatgtccttgccaaacaggaagtcgacttgtgtacgcttgaaatgcttttgtacatatttttattgtgaatgcctgtcgaactttcctgcttttacttcgagttttccctttgccctttttttttggcacaaccttttcaaagtttttttttcgctcgttcgcatcttcaagcgagaaaaacttactctttaaggttcaataagaacgaacccaatgaactaataaataatttgcatttacccaacttaattgaccacattcgagtccatattcgctgtggcatttgagccagaaaactataaatgtttcatggagtctgcggaaatggttaaatctctacggcgcacaacgatttgcgaaattgtttatggcggccaattgtcatcggcagccagtaaaaacatattgccacgatttcacgactggattaagccaataaaaatatggcaaatattaacataaaattgatggcaccaaaggacgtgaaccctagcaaaaacgaggtcatccaatcggtttttgcactttgtgagactgggaaaagaaagaaagcctttcaagtttttgctaaaattaaaatctagttctttcgtcttgaaaaggaaacttaatttttaaaaatttaaaaaatttctttgtgcgactttataaagatatatcgacatatctgtaaatcttcttcactcggaattccccatcttattgactaaagtttacccagaggcaactgtaaaaatccttttcaaatttgacatttaagatgtgaactttatttgcttttaatccaagtccaatcaaaatcaaattgcatttacgagctgcctttgagtaacgtaaaagaaaaaaaaacaacaaacgccaaattttatattcccttttttttttggctttggcttggcaattttcttttgcgattttcactgggcggagtagaagagtgcttatgggtatgcgcatttatgactccgccatatatgtcaataatttttatgctcttcataaatatgcgtttgccttttacgagcaaccccacgtggcaaaatggagcaaaaagagccaagattaggcagtcaaatcaatttgtggtagggagaaaacgacattttcgaaaacgttattatcaaatcaaatgcgagtgctggccacgaggggaggttgaagggattgcaatgagcatattgtacatttaatgtcgtgccacccactcaagccgcccatttgaccgtgccccgggccccagatgaaggtaccacacatatgtacatacatatatgtacgtatatatacgcaaatatacacgaccatgtcagttgcaggtgcacggtctccggctgacatttacctttgaaatgttaaggtatattccaaatttgtcgcaaaagatgacacacagagtggaacgtgtactcaaggctttcatgtcgaatcaataccctgcagctgcttttaccttcatccagttggctatgcaaatggcctttaaactgggaagaacccaaaatttcctttgataattctctggtcttttgcagctaaacattccgtagaaagtctagacaataaagggattgcaaggatgtgaaaaagtggaaggagggagggcagactaatcggaagaaatggaagtaaaaaatagagaaaatgactgctggtccaagaaaatttaagttcttagaataaaaggaacatatagaaaacttagttaaaagaataccatcttgaaacttaaaaaataaatatatattttttatctactgaatgaaataaaagcaatcactttgtttatttccctgctttgcattgcccgcccagaatttccctggcgaaaattcccagttatttcagtgctctgctaattatgagaaattcacgtcggctctaaacactcgaaagccgtctagacgtctgcacctgtgctgcaaactgaatgtgaaaagggcgggcgggcggtagtgggtgtggctgagaaagccaaagtagaagaatagagggggattggcagtgtggggagtaagccaaaatgcttagccaaagcggttaccatttcatttgcacaagacaacacacaatggccccaaacccagaggtggctgtctccttttgattgtctgtgtgtataattaaaacgcatatgcatggtaaatacacttattgtcagcactgtaagccgtctgaaatgcccccggggcatcgggatgcagctttaattccacattgcagccatgaatgaaatgcagggatgctttagactgtagaggaagttttttgggggggtgaagagttgtgcaaaacattttcaactcaatttagttcattttatggcagcagcaatgcgctgcgcaagttcattttgttgcaaaatagcgaaatgcaaaaaaaaaaaaaaaaaacgaagagcgcactcataaaaaagcatcaaaagagcagtcaaaacagcactagacatcccagtatcccagcatcccagcatccgagtatcctagttatatggcctggacatcgcccaaaagctgccaacaaaaacgcaacaaaatgcggatgcggtaactgtttccatttttggttaaaaacgaggtggtagcagaggtaggtatttccacagtgcaacttcatttgatggctcatgtgtgagtgcgccacataaacgcttcaaatagttttaaaacccacactttttatacccttgtacaggatatatacatatacaactgaagtttaatgagcgaaaaaatgtgggcaggtaaaagaaaacaaatgaatattagagtggatagttgaaaaaattatcgtaatcaaacaccaagccgtatttattgaaaatatcagccatttcaattttttaaccaaatataaaaaagtttgaatttcataaaagaaatttgaatgatgtgattatatatcctgtattatttaagtgtacaattacgtatgagtatttacagctctattaccctcagccctttttacccagatggtattcatttatttttatttttttttgctagttttggccacctttatgggaaaattgcccagcaactaaaacattctgcggctcgcttaattttccatgaattcacagagtccagctgcacgtcttgttgccacttaagtgcgcacaaagccgcaagttccttgccatatgcaacatattttggccagacaaaagggaaggcaaattttggtctttagcatgcttagcctgagtcaattaggctagcacaaatacgaactagctcacacatgtacatacatacatagatatgcaacggcgagcagtcaggcaatgaatgaaaatttaattaaatttcaccttaaaatgatgggcaaattgaaattaacgttaagcgagttgtttgcatcaatttaaggtgattgaattatggcaaacgacaaaatctgtggcctaactgcatttgcagttgattgattgcatttggcccgttgcctgtgctaattgcttttgcaacattttgcgacacttagctatcggttttccgtttttccttttcccgcttttcccctgtttttacttctctatctctctgttctcggcgtttttccatcaccctgcgagcgataagcggacttcctcagctgtaatcagcaacgcctacattaagtgggttctatcaatcggatgttacataactatgcacatatttgccaaagcactgcgacaaaaaatggcaatttctagttggatttttcattgatttggggtgcgtggaaaagttacttattcagcttaacttaaaaacccctgaaaacaccccctagttactcaaaaaatagcactacttgcacttctcgcacctaacattaaatattaataattagagtcgaaagtttttatttcagtcactatttcgagaatgcccctttctccaagtggacttggcaaacttgtccaaggcgaaacgtgattttccttccgttcgttcgctggccaactaaaacttggccaaaagggtccgctttaaacacacttttaatgatgttgccgccgccgcttgtagcttcgcagggaagcaatattaagccccacttgcaactggaggtgtcgggaacggcactgcactgcacagcactgcactgtattgcattgaaattcaatttcgcggcaaagtttccattgtgagcagctccacgttgctccgtgctgacatgctttgggtggttccccagtgcttgactagaatcccggctcaaagccaggtaaatccccacccaacaacccaacaacccaacagccagccatccgcccggctcaacaggaaaggggtggtctccattcgacccgctatgtgaacagcttttgacattgccgtcatgatgaagtggaacgcacagctgaagccccaccccagctactggctctaaaaatacaaaaaaaaaaataaacccagaagaaggaaatataaaagccgggggcaagaactcggctatccctttatcgcttttgtcgttttaatgggtcagcagtgtgtgcctatacagtttgacaaagaccacgagcgagtgcgaagctcttaaagctgttgcatttggccagaaatcagacaacgcggaagccattaatcccaagcttcatccaccatttgtggcaataaaaactatataccaagagagttgaaaataaataagaaatgactgctataattctaaactgtctcacttggccatgttgcgttgctcagttttatttgctgcactttttgctagatgaagtttagagcaaatgagttcattactcctctggctttgcaaatttgatatgtatgtgttttaagcttatagaaaaccatttaacgtattggtatgcttaagagtttccagtatctacaagcttgtaagcactatattagttagttagttggatgtaaatgcattaaataccattaagtgctatggattgtgtgaatctattagttagtttctatttttccttcctttttttatgactacagaaacaattcaacctttggctacctgccggtcaaaaaatgagtcaataatcaggggtttggccttaataatgaagtcgcagcaccttgtgcgtgtatctttgtatcttttgtgagagaaaacaaaggggaagagctatccggcagataaaaatagaattttagggtacagagtggtggaaacatctgtcaaaccgctgagtcaaccaattgaagtggccgaggtggcgacagaggacgttgcggccgcattggtactcacaaatgccatagagaggcataaattttgtactaccctaaaataaagtgcaattaatttcatttaaatcaatgaaaatagtgctttttcatttacagacgggtaaaagaagaagaagataaaaaaaaacatgcaataaatattccgcatcaacgggggaatttatagttgacattttagagttttgttgttattcagttcggtggcttttgtggtttagttggttttaccttaatttatggcccgccgatcggtttatatagtgcatctggtgcaaatgtccaaccttcgaactttgtagctccttctgcatgcatttcggacttatcccatatagattttgctatataactcccggaaaagtatgcgcaagcagcttgaacgattccctaatcgtctcacgttttcctttagggcaagtgcttagctattgagtttacagcgcaacatgcggcaaggaccaaaaagttgttgtcggcacgtgaagttttatgctgcacttatggcttatagttaaagatatagtggagacaagggggacggcatgccaggcattccggaacgtggactattagaaaatgtttactggtcttgacccggattgctgttgttgttgttgttgtttggccagcctggctaaatgagatttaaattttttatacaacattttctgcgttcttgatacttgatggctttttgctgttctctagccacattcaatgtatgctggggaacttttcaatcaaccgcacgatgataaatgaatgctggccaaaattattggcaaaatccaacatggcttagacatagagaagtgaataacctgtttgtggccgctcgtagatgaattttaaatacttttaggctttaatgactcaataaagctggccaagtctacgaaacagagggcttgtaaaaaaatacagcggaaaatctaggtagattgaacatttaaatggtaaagcattcacatttttctagagtggtaggggagggggggattaagggaacccagtcaattatatatcattcaggatttatctctgtggattataggactgcatatggttaaaatatgattacattattggtatttgtttaaacatgaaatatgcatatgaatagcaacaattcacaattgcgcggaccagcaatattcactatgaatgcaccgcattaatatgcaaattataaaaaacaacaacaatcacaatgctccgagccagaaatggaaaatggcccaaaccgaaacgaaaaaatatagttgcaattgaaatcgaaccaaacgagataaataataaaggcacaaagaacatgtgcgaatattatggcaaataaattacaaatttgttgttgcctgaaagattgaaaaataatattggccgcagttaaaaaaggggaaaaagctgtcttattcgtgtaagccgacgatttaagtaccctgtacaaaatataagtaatgcgaaacaattttaattcatttttttcatacatacttaagttatgatcaagttgtaaaatagcgttttaaataatgttttcattcttaagttttaagtgtaacgaacattaacatacatttcacatagtttttacgaagaaatgtgaactagtaaaagattttgttaacattttttttaatttttaaagcccctcgaaaaaagggcacaaaaagtgaaaatttattttacaagtgtgttttaatccgtgttcccgcccctttttataccgttagttggctagttacctgcgccgtgtttcccgtaattgttgttcccctgatcgtttccagtgcaacagggacgctcgtagtagaagttccaggtgttctcgtagtccgcagctgtctcgctcacactactgcagaggagtagcaggagtgcgaggagcggcgatagctgtagaagcgacattgcgagggcggtgcgagcgagaggggtggtcgaccgggggccgaatgcgaccccaccaacctcaattggattaaagtgcaagagcgagcgagaggcggttgcttgttgattttaccgtttgatgaataaaaaccggcacgttttttcccacgaataactgttaacacatttaacttgtattatttttacacacttttgcggcaattgcaatggaattgatttcactggcaaatggattttaaaataaacttctttccttgggcgatttatagcacccctctgctatttttttctccttatatatatatgttttttttttggacccgcagtcgtagtgccaatttcgtttcggattaattatgtatgcgttgcaggcgcataaaggcgtaatgcattttacacagttctgtgttcaattcggttttcaattcgatttcaacgcatttagccatcggaaagcatgtgcgatatgaagataaaggcaaaaggaaacgttaaactggtttattatatgcccacgcatcggaaaaacaaaaaaaaaagcaacaatattgggaaacaatgaaaattcctcaacgctggagagtgggaaagagacaaggaaggtgaacgagcgcgtttcttaaagtttatactatttacaaggcactgcatcaataaataaatgatgaatctgcaaatatttccttgctttcagtttaaaatttgcctttaacccacacgcacacaaacttgctcacgcactcacacacacacacatacgcaacaacaaagccagagatacacacttgagttgttgttgggagtttcggtttattggaatttcgaaaatcgaactccgaattgaatgaactgcaaaacgccaattagatagttgcaagcctaatgcatttcagatattttaccgatgcgaaacaagttccgccacgaaagggaacactggtaaaatgcccaagaatctcgagcggaaacaccaaacacaaaagaacaaccgacaacaagtagaagtgagaaaacaacaacaacgcacgatcgctccgatcgcgcagatgtgagaaaaacgctagcgcgtttaagtcgaatgactatcgcagtcacgcgtttgggtttttggtatataccaacaatggtgatcgtgtttgaaaataatatttaaaatatatataatttgcataactttttctctttatatcagaagttttagattttattttggctaactttgaaatatgctttcttatttttgtctgtttacaatgcgcttgctttttaagttagttaatatataatataatattttctttgacgtattcaagccgattttaactatttcttaaattattcttaagaaaaggtaaaaactgttgacacaaaactttgtttaatattcgtggagcgtcgtggattttcatttgtcgatataatccttgctccttgccacaaaatgccgttgcagaatggcggtattcaattttcgtacttcaccgtgcggaagcggcaaagtgatttttagcaaggacaacaaggacaacgacaattttggcaataggcaaacatttgccaacccagacacacacaaaacgggcggcaggatggatggatggatggcaggtatgcagacgaatccttgcatttagcagcctcgagcggcaattaaacgcagtttgctagtgtctctggcatttgagtgtctgcttggcaaaatatttaattaaaaagcaagtcggttatgttttcgcatctccttgatattttctattgtacgggtgccacctgtgcgtgctttcgtttccatcagtggcgtaggggctgtagtttattcaattattcagctgagatgttaatgatgattgtttgaggcactgatcagctcaggtggtacgtgaccatcaaagaaaaaaaaggtaagaaacttataatatagtgcaaacgtttccaactaaaatttaataattt

SEQ ID NO: 9239 - DNA, 2746 bp, DROSOPHILA
cttgggcattttaccagtgttccctttcgtggcggaacttgtttcgcatcggaaagaagtttattttaaaatccatttgccagtgaaatcaattccattgcaattgccgcaaaagtgtgtaaaaataatacaagttaaatgtgttaacagttattcgtgggaaaaaacgtgccggtttttattcatcaaacggtaaaatcaacaagcaaccgcctctcgctcgctcttgcactttaatccaattgaggttggtggggtcgcattcggcccccggtcgaccacccctctcgctcgcaccgccctcgcaatgtcgcttctacagctatcgccgctcctcgcactcctgctactcctctgcagtagtgtgagcgagacagctgcggactacgagaacacctggaacttctactacgagcgtccctgttgcactggaaacgatcaggggaacaacaattacgggaaacacggcgcagatcatgtgcgggagttcaactgcggcaagctgtactatcgtacattccatatgaacgaagatcgagatacgctctatgtgggagccatggatcgcgtattccgtgtgaacctgcagaatatctcctcatccaattgtaatcgggatgtgatcaacttggagccaacacgggatgatgtggttagctgcgtctccaaaggcaaaagtcagatcttcgactgcaagaaccatgtgcgtgtcatccagtcaatggaccagggggataggctctatgtatgcggcaccaacgcccacaatcccaaggattatgttatctatgcgaatctaacccacctgccgcgctcggaatatgtgattggcgtgggtctgggcattgccaagtgcccctacgatcccctcgacaactcaactgcgatttatgtggagaatggcaatccgggtggtctgcccggtttgtactccggcaccaatgcggagttcaccaaggcggatacggttattttccgcactgatctgtataatacttcggctaaacgtttggaatataaattcaagaggactctgaaatacgactccaagtggttggacaaaccaaactttgtcggctcctttgatattggggagtacgtgtatttctttttccgtgaaaccgccgtggaatacatcaactgcggcaaggctgtctattcgcgcatcgcacgggtgtgcaagaaggatgtgggtggaaagaatctgctggcccacaactgggccacctacctgaaggccagactcaactgcagcatctccggcgaatttccgttctatttcaacgagatccaatcggtctaccagctgccctccgataagagtcgattcttcgccacattcacgacgagcactaatggcctgattggatctgccgtatgcagtttccacattaacgagattcaggctgccttcaatggcaaattcaaggagcaatcttcatcgaattccgcatggctgccggtgcttaactcccgggtgccggaaccacggccgggtacatgtgtcaacgatacatcaaacctgcccgataccgtactgaatttcatcagatcccatccacttatggacaaagccgtaaatcacgagcacaacaatccagtctattataaaagggatttggtcttcaccaagctcgtcgttgacaaaattcgcattgacatcctcaatcaggaatacattgtgtactatgtgggcaccaatctgggtcgcatttacaaaatcgtgcagtactaccgtaacggagagtcgctgtccaagctgctggatatcttcgaggtggctccaaacgaggccatccaagtgatggaaatcagccagacacgtaagagcctctacattggcaccgatcatcgcatcaagcaaatcgacctggccatgtgcaatcgccgttacgacaactgcttccgctgcgtccgtgatccctactgcggctgggataaggaggccaatacgtgccgaccgtacgagctggatttactgcaggatgtggccaatgaaacgagtgacatttgcgattcgagtgtgctgaaaaagaagattgtggtgacctatggccagagtgtacatctgggctgtttcgtcaaaatacccgaagtgctgaagaatgagcaagtgacctggtatcatcactccaaggacaagggacgctacgagattcgttactcgccgaccaaatacattgagaccaccgaacgtggcctggttgtggtttccgtgaacgaagccgatggtggtcggtacgattgccatttgggcggctcgcttttgtgcagctacaacattacggtggatgcccacagatgcactccgccgaacaagagtaatgactatcagaaaatctactcggactggtgccacgagttcgagaaatacaaaacagcaatgaagtcctgggaaaagaagcaagcgcaatgctcgacacggcagaacttcagcagcaatcagcatccgaatgagattttccgtaagcccaatgtctgatatcacgaagagagtatcgccctcaaaatgccgtcatcgtcgtccaatcaattttagttaatcgaaagcgaagaggataataacaatgcggaataaaaagcccaggacgagaagaactcattataatcattattatcagcgacatcatcatagacatactttcttcagcaatgaacagaaaactcttcctaaaggattatgcatttaccgaagcatttacaatgcatccattgacttagacttagacattagggtattatcgca

SEQ ID NO: 9240 - protein, 724 aa, DROSOPHILA
MSLLQLSPLLALLLLLCSSVSETAADYENTWNFYYERPCCTGNDQGNNNYGKHGADHVREFNCGKLYYRTFHMNEDRDTLYVGAMDRVFRVNLQNISSSNCNRDVINLEPTRDDVVSCVSKGKSQIFDCKNHVRVIQSMDQGDRLYVCGTNAHNPKDYVIYANLTHLPRSEYVIGVGLGIAKCPYDPLDNSTAIYVENGNPGGLPGLYSGTNAEFTKADTVIFRTDLYNTSAKRLEYKFKRTLKYDSKWLDKPNFVGSFDIGEYVYFFFRETAVEYINCGKAVYSRIARVCKKDVGGKNLLAHNWATYLKARLNCSISGEFPFYFNEIQSVYQLPSDKSRFFATFTTSTNGLIGSAVCSFHINEIQAAFNGKFKEQSSSNSAWLPVLNSRVPEPRPGTCVNDTSNLPDTVLNFIRSHPLMDKAVNHEHNNPVYYKRDLVFTKLVVDKIRIDILNQEYIVYYVGTNLGRIYKIVQYYRNGESLSKLLDIFEVAPNEAIQVMEISQTRKSLYIGTDHRIKQIDLAMCNRRYDNCFRCVRDPYCGWDKEANTCRPYELDLLQDVANETSDICDSSVLKKKIVVTYGQSVHLGCFVKIPEVLKNEQVTWYHHSKDKGRYEIRYSPTKYIETTERGLVVVSVNEADGGRYDCHLGGSLLCSYNITVDAHRCTPPNKSNDYQKIYSDWCHEFEKYKTAMKSWEKKQAQCSTRQNFSSNQHPNEIFRKPNV

SEQ ID NO: 9241 - DNA, 3887 bp, DROSOPHILA
tctggtcgcaggagtatgcgatgcaacgcctcatcaacttcgtaagtttctgtgcgcgcagctcccagctcatttgatcaagtgtacttccttatagatacgacaaaaccagaatgcctgcggggacaacgagtgttacgatggtcagtatcaatgtctcacgtctttttttaagtatgaaaacatttagatttataatacattttgcacagcatgaaatcagtaacagtcttttactcaagtgaagattgtaacattcatttttcgcatttgcatttttaaaacaattcagtatagactagggtcatacgcgcttagtgataagttgccaaaaagtatgcagtgcttctacttgcggactatagtataaaccataactaatccatccgtcctcagtcaccggacgcactccgcaccaggcgcagatcgccggacgcggcgatgacagcggcttctccgtcgccatgatcttcctgatcgtggccatgttcatgtacatagtgaacccgagtacctggggcaacttcaccagcaacaagcgagctggcggccgacgcgacaataaccaggacggctctccgccgcagcctcctccgccggccatcaactaggcgactccgaggacccctgcttctacgaaacctgagcatccacaacacaattttcagaccgcaattccttgttttgttaattctcccactattgggacagaaaccacggatagaaccaaatcaatcgacttggtggcatccattcgcacgtttacacagaacacagattaggcaaattatacacctcttacattgtacaaaacacaaaaccgcgcactctgaaacacaccggcttatcaactaacatatttggacactttttaaaagactttggaaaactaaccgctttccttgtgtatttcctttgtacaagaggctttaaaatctttaaaatgtacatatggtgggcgggaattgatgtggtttgtattgccgtctccctggtctcgtcagttctcgttctgcagtttcaccatcttttcgcgtacgttctttagcagatccttcatttgttcgtactttcccgtggagtcgggcaggttttcaaagttgatcacatcgctgacgcccaccttaaagttgctgcccacaggcagtctgtcgtaaacggagaatttcagcaaaggcgtgccctcataagacgccttaaagggagtcgagggtgctgatcgggactgctcattatttccggactcggcagcagatggaccaacctccgtctcagacgtgtcatccaggtcggttggtgatttcgattcattcgctgtcgtgttatgcgacgcattaacatccagctcttggaggagctcctcctgctgggccttcaaatcttccaggcttggagatggcgagcgcgctgtcagttcgccatcttcgcactcttcgggcggaggtggttgcggcgggggcactgatggtggcagtggagggtcctctgtttcctcttctagttccatgtcgtagtcatcgaagctggtcagcaactcgctgggagcgggaacacggtcgtgtggagcaggcaaatccactagcttcttgcgcttgtaaccgttgatcacgttttcgcccaacgatttaatgaagttctccttggactggctctcttggaatggcggtacattgtggtgcttaaaatcctgtgggtttgtgggataatgaaaggatacgttggttttgtaatatcaatacttacgtcgaaacaattggccttaggctggacgttgaagccgggatactccactattttgttgacgtcgtatttaaaggtttcggactctccctcttcctcgtcggattttgtaacctccgagccctgcaaggagtatatatagagttccgctgatcacaccggcaggtaacttacatctgcattaaacagagctatgcccgagctctgcacctttgcctcctccagccaagcaggcggatagcccagcactcgcatgcggtagaaaatgaagggcaactggccgcgactgtagcccatggcatggcgcgtcttagtgctgatcttgccggggcgtatgtgaccgaaccgctgctctgtatcgacgtgatagcgctctgtgcggctggtcatctttttgcgagcgcgcgttatccttgaattgtttcttggcttggtacagtcgcgtagggagtgctctgtgtcgccgcaattgaagcacgacgactgcgccttgggtcgaaagcacttgttgaccgcctctgccttcagttttttccgttcttccgtctgctcgtccaggatgtcggcattgcagcgcttgtaggagggaacgtttgcggcattcagcttggccgctggctgagtgtcgatcaggaagaggtcttggggctcctcctctggcaaggtcctacttctttcgaaggctgatatcattagttcctgtgggttgtcccggaacacaatttgcttgtctgcaaaagcgccttccaaggcgacgagcacttgctgctgcagactggtgaagtgcgcttccttgttaaatcgaacttcgaagaccaggctatccccatcttcctcggtggtgtcctaaattggaattgcttgcattgccgtagtatcgtatatatccagaattacccacctgaatcgatgtatttgagtgtttttcctcaattttgtcggttggaggttcgatctcttttctggtcaattcttcgggacagacgaacaccacatcgtcttccagctccccatcttccacgtcgtcatccacaatcaccacgctgttttgtgaatcgtctatcagtataacgctgttgtccatttctgtttaaaacggggttttctctgataattcagatttgcttgaaaatatttgttatttttctcccttattgcagggttgtcatgccaacgcaaagcaattgataatatatcgagcgctatcgatttctatttgcgatagctgcaatcgatattcggcgcctaaatttaaaaatcgttgcatatttattggtgtctcctgttttcattttttgtgttatatattctttcgaatggcttctaataaaaaaaattaacaataaaatgtagtgcaattatataaaccgatatattggatttttttttattaaaaaccatacttttcagctcgcatcatcttaagaaatatattaaatatatactatttaactttcctatacatatgtaagtaaaatatttccatcataagcaatttaattatgcaaacgggagttgaccatataaattctggagataacttcaaatttggcaatgtgtaatcatacttccgccttcggattcagaaattatgttaacttttctcagcacatctgacatgcgagtggaaccttgattctcgggagcagaagacgtcatgtcgcggctgatttgaatctcgcgagtcacctgctgaatgccaatcgcatcgatctcgaattaatgtggctcgcactcatggggaggaaaaccctgcttcaggggtaattgtgaattcaacttacaatcggggaattcttccgacagaacgcgtggaatgccgccgcctgccgtagaagatttcgtccaatttgaataaaagctcgccgagattgggccaccagttgcatgccaatgagcgcaagtcagcaccattcagcataaatagatgccatctttgatggggaggcacactcaccatggatcttctcaagaggcacctgctgctcctggtcatcggagcttgcctgtgtgtctgcgcccaggccacgatcaccatccagaaaaccaagccagcgctgccggatcccagccagttgctagccaagctaccgccaaagccggactttctcaaggatccctctaaattactagccaaaatcgcgcaa

SEQ ID NO: 9242 - DNA, 1725 bp, DROSOPHILA
gaaaaataacaaatattttcaagcaaatctgaattatcagagaaaaccccgttttaaacagaaatggacaacagcgttatactgatagacgattcacaaaacagcgtggtgattgtggatgacgacgtggaagatggggagctggaagacgatgtggtgttcgtctgtcccgaagaattgaccagaaaagagatcgaacctccaaccgacaaaattgaggaaaaacactcaaatacatcgattcaggacaccaccgaggaagatggggatagcctggtcttcgaagttcgatttaacaaggaagcgcacttcaccagtctgcagcagcaagtgctcgtcgccttggaaggcgcttttgcagacaagcaaattgtgttccgggacaacccacaggaactaatgatatcagccttcgaaagaagtaggaccttgccagaggaggagccccaagacctcttcctgatcgacactcagccagcggccaagctgaatgccgcaaacgttccctcctacaagcgctgcaatgccgacatcctggacgagcagacggaagaacggaaaaaactgaaggcagaggcggtcaacaagtgctttcgacccaaggcgcagtcgtcgtgcttcaattgcggcgacacagagcactccctacgcgactgtaccaagccaagaaacaattcaaggataacgcgcgctcgcaaaaagatgaccagccgcacagagcgctatcacgtcgatacagagcagcggttcggtcacatacgccccggcaagatcagcactaagacgcgccatgccatgggctacagtcgcggccagttgcccttcattttctaccgcatgcgagtgctgggctatccgcctgcttggctggaggaggcaaaggtgcagagctcgggcatagctctgtttaatgcagatggctcggaggttacaaaatccgacgaggaagagggagagtccgaaacctttaaatacgacgtcaacaaaatagtggagtatcccggcttcaacgtccagcctaaggccaattgtttcgacgattttaagcaccacaatgtaccgccattccaagagagccagtccaaggagaacttcattaaatcgttgggcgaaaacgtgatcaacggttacaagcgcaagaagctagtggatttgcctgctccacacgaccgtgttcccgctcccagcgagttgctgaccagcttcgatgactacgacatggaactagaagaggaaacagaggaccctccactgccaccatcagtgcccccgccgcaaccacctccgcccgaagagtgcgaagatggcgaactgacagcgcgctcgccatctccaagcctggaagatttgaaggcccagcaggaggagctcctccaagagctggatgttaatgcgtcgcataacacgacagcgaatgaatcgaaatcaccaaccgacctggatgacacgtctgagacggaggttggtccatctgctgccgagtccggaaataatgagcagtcccgatcagcaccctcgactccctttaaggcgtcttatgagggcacgcctttgctgaaattctccgtttacgacagactgcctgtgggcagcaactttaaggtgggcgtcagcgatgtgatcaactttgaaaacctgcccgactccacgggaaagtacgaacaaatgaaggatctgctaaagaacgtacgcgaaaagatggtgaaactgcagaacgagaactga

SEQ ID NO: 9243 - protein, 553 aa, DROSOPHILA
MDNSVILIDDSQNSVVIVDDDVEDGELEDDVVFVCPEELTRKEIEPPTDKIEEKHSNTSIQDTTEEDGDSLVFEVRFNKEAHFTSLQQQVLVALEGAFADKQIVFRDNPQELMISAFERSRTLPEEEPQDLFLIDTQPAAKLNAANVPSYKRCNADILDEQTEERKKLKAEAVNKCFRPKAQSSCFNCGDTEHSLRDCTKPRNNSRITRARKKMTSRTERYHVDTEQRFGHIRPGKISTKTRHAMGYSRGQLPFIFYRMRVLGYPPAWLEEAKVQSSGIALFNADGSEVTKSDEEEGESETFKYDVNKIVEYPGFNVQPKANCFDDFKHHNVPPFQESQSKENFIKSLGENVINGYKRKKLVDLPAPHDRVPAPSELLTSFDDYDMELEEETEDPPLPPSVPPPQPPPPEECEDGELTARSPSPSLEDLKAQQEELLQELDVNASHNTTANESKSPTDLDDTSETEVGPSAAESGNNEQSRSAPSTPFKASYEGTPLLKFSVYDRLPVGSNFKVGVSDVINFENLPDSTGKYEQMKDLLKNVREKMVKLQNEN

SEQ ID NO: 9244 - DNA, 3752 bp, DROSOPHILA
cccatcggtggaggcggtgaccacggctacttttcctgccaaacgcttcatcgtgccggctgtcgaactttgactactgctggacaagcgtttgtggcattgattgagattagggccaacaagttttcggctgtaattgttgctgttttgatcgaaacttgaactttgaccacttccactcacagcgctggcattcagacggatcttgggcgccctgaccaccagttgtttgctcagatgcaacatttttgaagtaggacttttgcgaaggatcttgagattcgttgcctaataattgattttccctattttaactacgaatctccaaactgtttactagttcttcttttcagcggtttgccattcacagtgaatgaaaaagctcattcgccggtggcgcgaaatttgaaaatttattaaagttatctctgcagtggcttagtaataaaaaccagattaacctacataataactaaaattagggctaaaaatatcatttatccctagtcaatatgttgtaatactccacttagggccactcagtcatgggcagataagaattcttgaaaagaaaatcttcccacagcaagataaacgctgcgtttcgtaataatataaacaaagataaatacgcatgacaaacaaaccgcaaaaagttggagaatcgcttgacataatggactgttttcggatccgaaacatatatatgtactatatatatgtacatacgagccgaaagtgcaaattaataggggatcgcagcgatccgtacgatctgacttcattatagacgcagtcgtcggcggaatcagcacgcaagtggagtctccggttttccaagtcaatccggcacgcgcttacggctttgttagttagcaacttttcgcaaccgtcggcggggcatgtgatacgaaaaaaggcgcccatgctagtgaaactaatcagcaaactaaagatacactaagccaaagaatattaagtgaaacacacatagaacaagatgagcgagcagacaaaggaaatcgaagctctgccgcccaccttgcaggacttcaaggctcccgatctgccggccaataagccagtgctcttcttccatccgtacaacttccatgcgcaaaaagttagtaaccgcttgctttcaatcatgtgatcattgaaaaggtatttgcccaacagatccagccgctaatgccgcgaaattacaaaactaatcatttccaaatgaaatcatcgttttatttactttttttctcgtatttcttttgtttttttcgatgtaataatggggtggcccgcgtcgaaggttctccacccaagatctttattaaatctctcggccactcggatgcaatggagcatgacctagcgggtggcgggccggaaatgtagtagggctagcgctattggagttctctagttttccattctgtacagatatgacagcatatttacctgctggctgctccaggtgctaatgaagtggattgaagcggagtgaaaaaacaaaataaacaaacttatgtgtggaggaatctgctccaaaagaacgtaatataataactaaaccgaaatgatttaatttaatgccagatcgtgtctaaaaatatctgttttggttaatgaagcgagtaattagtagcggaatattgcatctttgggttcgtctttagatacatttaagcaaatgcacatatatacttaatatctgagttataaatctgctaatatcatagctcagttaaagtgaacccacttatcatcgcaggttcttatggtcttctacgagaagaagatcgacttctttccctatgtggtggacctgtgcaatggcgagcagtactccaattggttcctaaacctcaatcccaagggcgatgtgccagtgctccaggatggcgccctcgtcattcccagctcgacgcacatcatcaactatgtggagagcaaatttcgcggtggtaattcccagttagctacccgcccatagtaacttgacttatcaacttcatcatttagatcgatcgctgaagccagcgcacaactccaaggaattcgatcaaatgctgatcttcgagcaggcaatggcccgccttccagtgggaacactcagcctgggctccttcatacacgacgatctgaagctggtgcccaaggcgcccttcatcggacccgtgcgccagtcctgcctgagtaagttactcgcacctgtgaactcaacaacataactcaacagtcaacactcgtacgccccgcagaaaacaatgaaaaggtgctggatctgctgcgccactcggtggacgaacaggcgaccaaaaaagcagcgctgcagcacaagctggacatacagttgcgccgccacgagctggcctcgtcccgcgaggaattccagaaggttctggatgccgtgcggcactttctgctctatgtggagcaggagctaaccgcccaggcgccacgcgttgagtggctgaccggcgacgaactgagcgtggcggatatctcgctgggattgctgctgcatcgactgtatcagctgggattcgagaatcagttctggaccttcggaaagctgccgcaggtggaggcatacttcttgcgcttccggcagcgcgagtccttccaccgcctgcagccgagcaactttgccatactgcgcgaaatgtggacccgaacgccgggcaactataagctaggagcgggcgccggcttcctgggtatggccatgttcgccgccttcgcgcacaagtgagcggagcagcgggacagcagactttgttaacaaatccttttactgttaaagttgggcacatataaacacacgaacataagaacgcttaaagctacgcactgctgatgaaggatgcttggggtgtcatggtaagaatccggcggtggaggaggatgaggagaagagcgcgcgatccagtgccagcctcggctgcttgcttagtaatatcatcatcgtttcatatcatcgttgctgaatatacaaaaatttggtataaattccaatccgtcacctaactatcaattccttctatgcttgatggctgctctcccctctgttgacttgaccagggttcagctctcagctctccagcgtctgctgctcgcgatccctttcccgtttctgctgatcggacatcagcaaattggcggctgcactggccgccttggggctggtgaacagcggcattcccataaacgtgggtatctgctgatcccttggcactcccgtcgttgccgccttgccattgaggttggtcctcgaactgttggatcccgagctcgtggtggccgcacccgtggataaatgcgagggtcgcttgaaggggaaggtgggtatctctcgctgatagctgaagcttccgttgccaggcgcctcaggcagcagaccgggcgtgggataccagaagcgataggtgaagtaccaggtgagtatggcaataatgccgctgatcaccttctcgatcatgcggtgatagtacagcatggtgcccaccaacatgatgtcccacagcagctgcagggccgccatgccgatgaatagggtgcgaatgatcggcgtcaggcgtttgtacaagaactgcaggctgcgcatttgctcctcgttcagcgttctcagcggattcgtgcccgagttctcggctgtgctgcgattgtgtcgctcgttgcggatgtgctccttgatggtctcccagcggatgatgggacgcgcctcctcgatcagcaccaggctggagtggatc

SEQ ID NO: 9245 - DNA, 984 bp, DROSOPHILA
atgagcgagcagacaaaggaaatcgaagctctgccgcccaccttgcaggacttcaaggctcccgatctgccggccaataagccagtgctcttcttccatccgtacaacttccatgcgcaaaaagttcttatggtcttctacgagaagaagatcgacttctttccctatgtggtggacctgtgcaatggcgagcagtactccaattggttcctaaacctcaatcccaagggcgatgtgccagtgctccaggatggcgccctcgtcattcccagctcgacgcacatcatcaactatgtggagagcaaatttcgcggtgatcgatcgctgaagccagcgcacaactccaaggaattcgatcaaatgctgatcttcgagcaggcaatggcccgccttccagtgggaacactcagcctgggctccttcatacacgacgatctgaagctggtgcccaaggcgcccttcatcggacccgtgcgccagtcctgcctgaaaaacaatgaaaaggtgctggatctgctgcgccactcggtggacgaacaggcgaccaaaaaagcagcgctgcagcacaagctggacatacagttgcgccgccacgagctggcctcgtcccgcgaggaattccagaaggttctggatgccgtgcggcactttctgctctatgtggagcaggagctaaccgcccaggcgccacgcgttgagtggctgaccggcgacgaactgagcgtggcggatatctcgctgggattgctgctgcatcgactgtatcagctgggattcgagaatcagttctggaccttcggaaagctgccgcaggtggaggcatacttcttgcgcttccggcagcgcgagtccttccaccgcctgcagccgagcaactttgccatactgcgcgaaatgtggacccgaacgccgggcaactataagctaggagcgggcgccggcttcctgggtatggccatgttcgccgccttcgcgcacaagtga

SEQ ID NO: 9246 - protein, 327 aa, DROSOPHILA
MSEQTKEIEALPPTLQDFKAPDLPANKPVLFFHPYNFHAQKVLMVFYEKKIDFFPYVVDLCNGEQYSNWFLNLNPKGDVPVLQDGALVIPSSTHIINYVESKFRGDRSLKPAHNSKEFDQMLIFEQAMARLPVGTLSLGSFIHDDLKLVPKAPFIGPVRQSCLKNNEKVLDLLRHSVDEQATKKAALQHKLDIQLRRHELASSREEFQKVLDAVRHFLLYVEQELTAQAPRVEWLTGDELSVADISLGLLLHRLYQLGFENQFWTFGKLPQVEAYFLRFRQRESFHRLQPSNFAILREMWTRTPGNYKLGAGAGFLGMAMFAAFAHK

SEQ ID NO: 9247 - DNA, 3584 bp, DROSOPHILA
gtatatttagatgcgtgttcaactcacttgcattgatttgtgggtgtgtttactcggggtaatttgatcaaagtgtaaggttttggtaatattactttttccaactcaacatgtatatttacgttagcactttatgttatagttagccgagctaatatcatatttacaaatatgccttgcataataaacaaatgcacgtttaaacggtacctaaagcgaatcagctgcttatcgataagtcaggtgccaatcgatacatggcagtgctgcccagtatcgcacagcaaggtgcgtttaaattttgaaaatgggcgctattatggcgtagaagcgaaatattacgtcaggacccagtggataaatatagcagagccagatgatttcccggcgcgcagagagtgatcaatagataaatcacttgtactaggcctcagtcgtcgcgcagttctcagcctttaaacgcggtcctccgccaattcgttaatccaactcgtcttttacaattgcgaagtatgtgcatacccgtatccaaaaaacatggaacacggctgccagttttgggtttccaaaattcgtacacaatcgctgcagcagcgagatccaagatttttcaacaacttgtgtttatttagctatcttttcgcggtcaagactcaggcaacaaatttatttttagagctcttgcttgtgcactgcattcggaaatagttttttttgaacacaaaatgcactggtgtgcaatattttacaacatgctagttattcaaggttcacgagataaggaggccttgattaaagggtcacaagcattaggcatctaaaagttttgtccgcgggaaaaaaaatgcaatcatccatgtaagaatactttttaaagaggaaactgctaaactaataggatgtaggacctaaaatggttatacttcagaataaagcagcataaagtaaagtagcagcataagctaaagtatttaaaaagtgtcattccaaaacgcaggacatgtcgacgacagcgcttgggatcagcgccctcttcatggtgggctgctgtgctctggcccaaattgcccgtgtgatcagccggcgactggtgacccgtgagggcttggtacccatcctgatcaacgaggccatcgccgccgccgagctgtgcgcctgctgtttcgagctcattattggtgagtaaaggtttttgaagttatttcattactgttcattaggctctataaaaattactcatacgaaacgttggccagcttaaatttctttataagaaatcctttctccaactcttgtgtaattatgttgtctcagaagagtgaaatatttggagaaatatacaataattttgactttcatcttgttaatagtaaagcagaatttgtcaaagccaacagtgcgtatgagtaatcagctctgaagaccaatataacctatatataacctatgaactataaagtgtgacaatattatttaaaactgcacttcccagtggccgacaactttggcgtgtccatgtacgccgtctgcctgttcctgctgaccatctggtggggacgcgtgtggggcgacgcttccgcctgcccgtacacacacatggaggacgtggtggagggtcgcaccagcttcaaggagatggctctgcgcagctgggccgagctgatgggcggctgttgtgtgtatcgcgtggtgcaggtcttctggtggctggagctggccgagacccatcgtggacgagcgtttgaggcgtgcaatgccgatatgcaggtcagcccatatctgggtgcggtcatcgagggcgtggccacgctgctgtgccgcctggcctcgaagacgatcagcgagaaggagccacggttcgggagctacatcgactcattcatcggcaccagcctagtcgtggcaggtgagtggcgtagcgcttgctcgatccgatccgcctgcccactgctggtctcctaagtagtttacgcctttaactatgtcctgcttgcagccttcaacttctccggcggctacttcaatcccgtcctggccaccgccctcaagtggggctgtcgcggtcacacccacctggagcacatcattgtctattggatcggcgcctgtgccggcgccgtgctctccattccggtcttcaaggtgcccgcggtgcgacgccttctgctcggcgagggagcggcgtcgaagtccaagcaggaataagaacgaaagttagcctttgtatatcaagtatccgccaatatctagtttgaaaagggcatgtctgtccagcggtaaggtttcagtctcttagtacctaaaggaatcgatatagaagctattgcttgggctacatagtttgagataccctccatccactttcctctcaccaaaggtgatcatcttctgtatccaattggcaggctggagcgaatcgggctcaaatgctaatgaagataatgtatatatagaagattatatatattttatattttattctactactgtgcactttgttcaaaacagattcatgctattttgtttcagcttctatttagtaagtagaaataatttgttaatgttttgggaaaaaaaaaataaaatatatacaaaaagacatttaaacttcttatttactgggccagtttacacattattaagttcatttctatgcaaagaaataataacaaattcgtatcatgataaattgccacatccgagtgctctattttcaatactctaaaaactagtacacttttgaattttttgaaatggctattgtcgataaatttctctactgttttgagctgaagttcggcgtacttataattggattcgtggacatcatcctgagtatactctgcggatgctacttgccatgtaagccgtgtgtcattccggcactgaggataaccacgtttgtgttctcccacagggataagacggaaagtggatgcagatattttgatccttacacaggagccgattactgtacatgggccatcccttgtcaaaagttcggatttgtacaggttttacgtcggtgaagatttctacttcaacaggtttggctactcgatgtatatatttggcctgattgtcctcattcttcacattggcgcctgtatactgatcataatctccgctctttcggtacgtgctccatgctccgtcctgtccaagtaacttatcctaatatacccgtttactcgtctaggaggagaaaatcatggctgccccctatgtggccactgcaccgatgcgcttcgttgtgctgcttctcatcctgatttggatagtgaccaagtcgttcgactgtaccaccagtttttggctcataggtctaagtttgtgtgagtactctccaattgatggttcaatcaaattgagcgctcaatcgtgacatcaatcctctcctcctctccgcagttccggccacttacttttggctaacagtcgtgtcttggtttgaccccgccatctcggcataaatttagtaatcgttggaatgaaaatcgtagggcatcaggtatccttatgaaaaacattcgaaatcctagcttgtcaaacacaagtctcaactgaatcgcaacacatacata

SEQ ID NO: 9248 - DNA, 1180 bp, DROSOPHILA
atgtcgacgacagcgcttgggatcagcgccctcttcatggtgggctgctgtgctctggcccaaattgcccgtgtgatcagccggcgactggtgacccgtgagggcttggtacccatcctgatcaacgaggccatcgccgccgccgagctgtgcgcctgctgtttcgagctcattattgtggccgacaactttggcgtgtccatgtacgccgtctgcctgttcctgctgaccatctggtggggacgcgtgtggggcgacgcttccgcctgcccgtacacacacatggaggacgtggtggagggtcgcaccagcttcaaggagatggctctgcgcagctgggccgagctgatgggcggctgttgtgtgtatcgcgtggtgcaggtcttctggtggctggagctggccgagacccatcgtggacgagcgtttgaggcgtgcaatgccgatatgcaggtcagcccatatctgggtgcggtcatcgagggcgtggccacgctgctgtgccgcctggcctcgaagacgatcagcgagaaggagccacggttcgggagctacatcgactcattcatcggcaccagcctagtcgtggcagccttcaacttctccggcggctacttcaatcccgtcctggccaccgccctcaagtggggctgtcgcggtcacacccacctggagcacatcattgtctattggatcggcgcctgtgccggcgccgtgctctccattccggtcttcaaggtgcccgcggtgcgacgccttctgctcggcgagggagcggcgtcgaagtccaagcaggaataagaacgaaagttagcctttgtatatcaagtatccgccaatatctagtttgaaaagggcatgtctgtccagcggtaaggtttcagtctcttagtacctaaaggaatcgatatagaagctattgcttgggctacatagtttgagataccctccatccactttcctctcaccaaaggtgatcatcttctgtatccaattggcaggctggagcgaatcgggctcaaatgctaatgaagataatgtatatatagaagattatatatattttatattttattctactactgtgcactttgttcaaaacagattcatgctattttgtttcagcttctatttagtaagtagaaataatttgttaatgttttgggaaaaaaaaaataaa

SEQ ID NO: 9249 - protein, 266 aa, DROSOPHILA
MSTTALGISALFMVGCCALAQIARVISRRLVTREGLVPILINEAIAAAELCACCFELIIVADNFGVSMYAVCLFLLTIWWGRVWGDASACPYTHMEDVVEGRTSFKEMALRSWAELMGGCCVYRVVQVFWWLELAETHRGRAFEACNADMQVSPYLGAVIEGVATLLCRLASKTISEKEPRFGSYIDSFIGTSLVVAAFNFSGGYFNPVLATALKWGCRGHTHLEHIIVYWIGACAGAVLSIPVFKVPAVRRLLLGEGAASKSKQE

SEQ ID NO: 9250 - DNA, 2627 bp, DROSOPHILA
tattttaaaatctgttcagaacaaatcgaataaatgataataataatgataatcaaaaagccaatctttagatgatcaattaatttgcattttcgtacttgtttaatatccaaagacaatgttctagatccaagagaatcgatgttatatcgcggatcaccttcccgctggtcttcgccctgttcaacctggtctactggagcacatatctcttcagggaggaggaggatgagtaaatgccgttacctattgccaaacaccaattactttatagaagggttggcgctattggccaacacgaatgtactaacctatttctttcattcttttccatttcggttgtcttcatttcatgctttgtgttgcttatggctttgttggcttcatttccgatttggttgatttcttgattgacaccttgattgaatggttcaaaccactaaaggaccttctaaggcgcgtctctgaaatgcggtggctatgtagaatctaatacgaaattaactaattataccgagggatacgttgcgatatcgctgtatgctaccggctatgtgccgcatgctacatttatggttatgtctcggaacagtgcagataagttaagaacggtatccggcaaggctccatggcacttccactaaacaaataaagaataatgtttgatgaatgacgaaattctagttaaatgtaagttaaattgatcaagagtgactgcatagtagataatgttatgaataattatactaaactatacacaaactgacacacaccgcaacactttgacttgatttgtttaggggatgctcgaaattgttacatagtagcacaattttacaatatagtagaaattattgttgccacccgaaaggaaggaaatcctagaatgcaaaccaggataaaaacgaagtaatgacgtttgtgaaattttataaataaatgatgcaaaacgaaatgaaagaatacacaaaaatggcagtgtctttaacttttaatagtgttatgtattaatttgactaagtaatatatttttcctattttttaaatgcaaaaagtgggccttgttggccattcgattggtctttccattggcactacgctgtaggtcatccacaatgacggctcctccgttcaactgcttgtacttggaatcagtccgagacctcacatagtccaccacatcctgggcctccagctcactgcccagtttcttaacaacagcagcagcagcttcgtctccaaagatgttgctccatatcccgaagacacagacctcggcgacctggggcatctctgagatgacgctttcaatatcgtttggatagtacatgatgttctggtacttcagcatctccttctttcggtccataatgtacaagaagccatctcgatccatgtatccgaggtccccggagtgataccatcccagtgaatctcgcatgttacgagtctcaacttcgtttccgtagtatcccgaccagtgctggttattcatgatgcacacctctccgatctcatcgggtccaagcgattcgccgtcatcattttttatcttcatctttagcccattgaccaattgacccaccgatccggttttctcgtcgaagtgacagttgatggtggccatggcacccagttctgtaaatccataaacaaactgcaggcaattatggctaagacggctacggatgcctttctgaacctccaaggcagcccgagatcctccaaacatgtagcaccgtaggctcgacagatcgcacgtctcgaaatctgggcagttaatcattagagccatagatgatggtggctgtatggtccacgtaaccttgtactcttcgatgattcgcaaggcaaaggcgggatcgaaggcattgtccgcaatgatgcgggtagtgctgaacactccggaggtaatggtggtaagcaaaccagtgatccagtcaagggtgttgtgagagtactgaacatcagcggtggtcagatgactagtggtacaaaaggaagcaaactttaaaatcattccaaataatatgtataaacaacttactagttgcctgcgaggatgtgccgactgttagttatagttactgcctttggagtaccagttgttcccgaagagcagagaatggccaaagtctgatcgttgcccttttccagcttagctggctggaagttttcttcgatgggcgtggccacaacttcatcgatctttatggaatccaacggatgattgcgcatggtgacaatcttaacatccagttctgcagtggcagatcgaaccttctcaaactcatctccatcgcagaaaataatagaaggccttgtgaccttgtagatcttttcgatcgtatcgcgatcgtatgtaatgttgagtgagtgaaaagctattccgttgaagaaacaggcgtaggctacggcaagcatgtgggtggtattccggcctatgaggcccactatatcggattgaaggagtcccaatgatcgcatatagctgcccaagcgcatggcgttggcaaggagctcccctctggtcaacccagtaccctccgtagcagagatctagaagaaatcatgatgaatcatttgtttagtggtggtgacttttaatgtactcacctgggcagtaa

SEQ ID NO: 9251 - DNA, 627 bp, DROSOPHILA
atggccaccatcaactgtcacttcgacgagaaaaccggatcggtgggtcaattggtcaatgggctaaagatgaagataaaaaatgatgacggcgaatcgcttggacccgatgagatcggagaggtgtgcatcatgaataaccagcactggtcgggatactacggaaacgaagttgagactcgtaacatgcgagattcactgggatggtatcactccggggacctcggatacatggatcgagatggcttcttgtacattatggaccgaaagaaggagatgctgaagtaccagaacatcatgtactatccaaacgatattgaaagcgtcatctcagagatgccccaggtcgccgaggtctgtgtcttcgggatatggagcaacatctttggagacgaagctgctgctgctgttgttaagaaactgggcagtgagctggaggcccaggatgtggtggactatgtgaggtctcggactgattccaagtacaagcagttgaacggaggagccgtcattgtggatgacctacagcgtagtgccaatggaaagaccaatcgaatggccaacaaggcccactttttgcatttaaaaaataggaaaaatatattacttagtcaaattaatacataa

SEQ ID NO: 9252 - protein, 208 aa, DROSOPHILA
MATINCHFDEKTGSVGQLVNGLKMKIKNDDGESLGPDEIGEVCIMNNQHWSGYYGNEVETRNMRDSLGWYHSGDLGYMDRDGFLYIMDRKKEMLKYQNIMYYPNDIESVISEMPQVAEVCVFGIWSNIFGDEAAAAVVKKLGSELEAQDVVDYVRSRTDSKYKQLNGGAVIVDDLQRSANGKTNRMANKAHFLHLKNRKNILLSQINT

SEQ ID NO: 9253 - DNA, 3728 bp, DROSOPHILA
tatgtgttcgcgccacagttcgctggccacccacataccggttccaatgccggatccgaagtcaaagaagcttcgtggccgaaactgttcatcccgctgcgccagctccgtgagaacgcgcttcaacacggcgtactcctgggcaccacgagctatggcgtacacaagcgactcgtatgctccatattctattcgcttccaggcgtagatacgctgacccagcctcttgttgatctccagctcccgcttgcgcctccaacgctccgcctcgtcttcgtcgagtgtagctaggcgatccagaggcatcttcgtgttgacctcttcgataacgatgcgtttcttgttctcaatctcttccagcgtgggtggtggatggcgggatttgatataggcgttgagctgctggccatcgtggattagttttttgacgggatgatcccccacgatgcgctttagcgtatcattcaattgtttcggcagttccacatgattgggtctcactactccgggatgttttctgggcttcagtgtggcatgttccagggcagagaccacagctggttcaacgtccactgcaatcttgctggtgaatcggtgcagtcgtggcactagatttctcgttgtgaaattcagtgaaaaattcatattaaattctaattagttaagtaataagtaaccgagaaatcaaaacaaatgagagccacacgagtttaccggcgatttgccagtgctgtaaaagttccagtcccatcagctgacggtgctgccagacgttttgcctcaatcacagattcggctatattaatagcatcttttttctgtttgagttaacatttaatagaattcttaatatacatatgtcttaataataataattttactaccttcaaccatataagcaatttatataaataaatttaaaaagcaaccaaaaatagtcgagaaaacataacaattgaacaaaaagagtactataaccgtgacctctactgtgtgcttgctccttagaatctgaaaacaaacttgccatcagcactatgttgtaaataataaatttaaagaataatggaagaatacgaagcacaagtgagcaaaggtgataacatgagatcccaactatttttatgaaaatacttgcatcaaacagttgctcgttgtggagcaggcattggaaaatgccgcggatgatgcgcaacgccaggatcttttggccctaaagaacaatctgcaggagctgttggccctcacccgggaatcaggagatgaagcaccaatcgatgaactacctcagcagggcgacaatctggatgatgagctgcagcggctcaaaagcgaacttaatgacctagaggcggccggctcctcacaaaccgcgttggatgaagaacgccagctggctgacttgcgaaccaagtacaccgccatggtgggcgagaagtgctccgcaccacacgagcacagttggggcacctgctaccacaatgccctcatctgcggagtggacgacgaggtggttatgaacagcgaaggcgtcttggatgctcgactaagggttctctttacgaatcccacgcatcgagaaatgctgccctgttcgtattacctcgaaggcgagtgccgctttgatgaggccaagtgtcgcttttcccatggcgcccttgtcaccggtagctccattagaaaatataatccacccgatttccacaaactctcccgcagtcgtccagtttttgccctgctaccagatcgattgtggcatcgaggtcgtgtcctttgtgtaaatttcgtagagcagatatgccgcgtccgcttggatgggcaggatcacaaggagcgggaacgagacttcaagttcgaagaactgtatccacttaccaccgatcaggatgaggatgacgagctctccagcgaggagagcaactccagcatgaacgacaacagcagtgacgaggcggagtcggatatggatgatctggaggaagctagaagagcacgcatggtcgagttgagtttgtttacctttaagccgacggaacgacttggcgcctgggaggagttcacacgggtatgttgagcagattacgattcagaaaacttaaattcctataaatactattccctatagggcatcggctctaagcttatggagaaaatgggttacatccatggtactggtcttggctcagatggaaggggaatcgtcaccccggtaagcgcccagatacttccccagggtcgatctctagatgcctgcatggagctgcgtgaggccgccaacggggacaaggattattttagcgtggaacgaaagctaaagcgcgcccagcgacgacagcgaaaggctgatgagaaggcctacgtccgtgagtcacaacgtgtggatgtctttacattcttaaacgacagtgttttggggcctggagaaagcactcagcaaggcgagcaggtgaccaagaaagctaagaccaacgagctacagcagcactcaaccaaaactcttaacgtggaaacagtgcgaattgctgatgaaatccgccgaaagcaaagagatatggccaaggttaaacagtccctggaccggaattctggagatgcgcagctccagaagcgactacaagtgcagatgcaaagccacaaacaggagctagccacgctgcaggcacaggaacgcagcttaagcaaggaacagcagacgcgtaaaagcaagaataaaatgtttgagttttaataatgagtgttttaaagaatttagggaggtatcgtgggtttccaacatctattattgacaaaaacaaaatttaaaaatgattaagaatatcctaattattatctacgcacaattaaatactaccgaaggctcccgctgtgattatggccgtcatgtactgctccagtagcgcctgcgccagatgagccccatgctctacggccagcgagtaggccgtgtctccgtcctcgttggtggcacttagatccaggtctttggccaggagctcgttgcaagtatgcggatgattgccggccgctgcgtacataagcgccgtgtttccaacgatgtccatgtggcccgaatcagcgccgtgttccagcaagaagcggacgatctcgttatgcccaccggcggcagctaggagtagaggactaatcaaatctggagccatagtgttcacattggcaccagccgcgacgaggagctgcacggaaaccagttgaccgtaggaggctgcccaatgtaaggctgtgaaaccatgtgcatccttgtaatcaatgttctgctgacgcgctctttccgctgccacctgctcctccgtgatctcgccttggccagcgcgttcgtgaaaggagagcgaaacttcgacggggcaaaaggtggcctccgtattgccgcgctgcaagttggtcagcacggtggactgggggcggtacggcaagaaggcgctcttccgcttggcgtccagcaccagcatggaggtaggcgccgaccgcactccctcatcgtcgtcggaattcgcattagtttggattgtgtttgctggtgccaccatttgttttggttatatttaccattaataccctgtattggaagccccaaagggtataatagctcgaacttaatgatatacaagattataaaatgccatcttaatataaattctttcaatataaaatttaaaattgatttaccgttaaaatgtctcgtattttaaacaaataaaaatttatttatg

SEQ ID NO: 9254 - DNA, 1607 bp, DROSOPHILA
ctccttagaatctgaaaacaaacttgccatcagcactatgttgtaaataataaatttaaagaataatggaagaatacgaagcacaattgctcgttgtggagcaggcattggaaaatgccgcggatgatgcgcaacgccaggatcttttggccctaaagaacaatctgcaggagctgttggccctcacccgggaatcaggagatgaagcaccaatcgatgaactacctcagcagggcgacaatctggatgatgagctgcagcggctcaaaagcgaacttaatgacctagaggcggccggctcctcacaaaccgcgttggatgaagaacgccagctggctgacttgcgaaccaagtacaccgccatggtgggcgagaagtgctccgcaccacacgagcacagttggggcacctgctaccacaatgccctcatctgcggagtggacgacgaggtggttatgaacagcgaaggcgtcttggatgctcgactaagggttctctttacgaatcccacgcatcgagaaatgctgccctgttcgtattacctcgaaggcgagtgccgctttgatgaggccaagtgtcgcttttcccatggcgcccttgtcaccggtagctccattagaaaatataatccacccgatttccacaaactctcccgcagtcgtccagtttttgccctgctaccagatcgattgtggcatcgaggtcgtgtcctttgtgtaaatttcgtagagcagatatgccgcgtccgcttggatgggcaggatcacaaggagcgggaacgagacttcaagttcgaagaactgtatccacttaccaccgatcaggatgaggatgacgagctctccagcgaggagagcaactccagcatgaacgacaacagcagtgacgaggcggagtcggatatggatgatctggaggaagctagaagagcacgcatggtcgagttgagtttgtttacctttaagccgacggaacgacttggcgcctgggaggagttcacacggggcatcggctctaagcttatggagaaaatgggttacatccatggtactggtcttggctcagatggaaggggaatcgtcaccccggtaagcgcccagatacttccccagggtcgatctctagatgcctgcatggagctgcgtgaggccgccaacggggacaaggattattttagcgtggaacgaaagctaaagcgcgcccagcgacgacagcgaaaggctgatgagaaggcctacgtccgtgagtcacaacgtgtggatgtctttacattcttaaacgacagtgttttggggcctggagaaagcactcagcaaggcgagcaggtgaccaagaaagctaagaccaacgagctacagcagcactcaaccaaaactcttaacgtggaaacagtgcgaattgctgatgaaatccgccgaaagcaaagagatatggccaaggttaaacagtccctggaccggaattctggagatgcgcagctccagaagcgactacaagtgcagatgcaaagccacaaacaggagctagccacgctgcaggcacaggaacgcagcttaagcaaggaacagcagacgcgtaaaagcaagaataaaatgtttgagttttaa

SEQ ID NO: 9255 - protein, 513 aa, DROSOPHILA
MEEYEAQLLVVEQALENAADDAQRQDLLALKNNLQELLALTRESGDEAPIDELPQQGDNLDDELQRLKSELNDLEAAGSSQTALDEERQLADLRTKYTAMVGEKCSAPHEHSWGTCYHNALICGVDDEVVMNSEGVLDARLRVLFTNPTHREMLPCSYYLEGECRFDEAKCRFSHGALVTGSSIRKYNPPDFHKLSRSRPVFALLPDRLWHRGRVLCVNFVEQICRVRLDGQDHKERERDFKFEELYPLTTDQDEDDELSSEESNSSMNDNSSDEAESDMDDLEEARRARMVELSLFTFKPTERLGAWEEFTRGIGSKLMEKMGYIHGTGLGSDGRGIVTPVSAQILPQGRSLDACMELREAANGDKDYFSVERKLKRAQRRQRKADEKAYVRESQRVDVFTFLNDSVLGPGESTQQGEQVTKKAKTNELQQHSTKTLNVETVRIADEIRRKQRDMAKVKQSLDRNSGDAQLQKRLQVQMQSHKQELATLQAQERSLSKEQQTRKSKNKMFEF

SEQ ID NO: 9256 - DNA, 3173 bp, DROSOPHILA
agcccactagagctggaatcactttcacttttgcacggtggtgacctcgcctgcacacacatacacatgcacagagatacagcaagcagcacgcccacatacgcacttacaatttcacttttggctttccagacaacgccaggcccctgccaccgcccccaccacacccccctgcacacaaacacactatggtttttgtttgtaaacacgaagacaagagatacacacacatcgcgaaggaaggagagcgcaaagaggaaacaaaaaaaatacaacgtcgttcgctattgctgtctcatccatcctccgccactgcaatcgtcccgtccagcgttttcacgggccatcagaaactatgaatttcacaacatttctactcactcgtcgccctcgggacaaatcccagtggtctcgtcgtatttggtgcaatagttatccgcactgtagttgaaggtgccatcgcgttttcgcactggacgacgccgacgctggttttgaaaatgccaattgaaacagacgaaggggcgatgctggttgcacttgtgctgtaaaaacgactggcactgctccacgcggaactccttcaggtagctgaaacggttggcggaaaggttgcacgtcaaattaaccatcgtttgcattagttagcatctatttacgtgtagtgatttggtttttcctgctgcgaggaaagcagcagcttgttcgtttcatttgccaacatcgttgttagtgatgtgcaaaaaacatcggtgcgtcgggcatccatggccttaagtcgattgatatcgataatttttgtcggcatcgtccatatcgattggttagcaaatacacacaccccagttgatgggtggttagccgggacgcaaacgaaacaaatttggcgccaaaattaatgcgaaattgttatgcatgtgttttatttataacaacgcctatatattataacacacatttcaaagggaaaacatttcgaagaaggaaagcaaaagcgtttctagtccaagggtatgggaatgaaggcgttgattctgtccgtctgtcgctgcgctatgcattcgctaatccagacgatattgcgtacctccaactgtttaagtttaatgaacgagtagaagatcccgaaatggtactgctgcaggaaggtctgcacattcttcttggcctccatcatgagaaagcggtcctccagcgtaatcatgccgtccgagtcgcgctccaaattgtcaaacattttgccatagccatcgaacacattgcaaacatcccttattttatccgtatcatttaaagtggacatggaggccaaggctattttgggcaggtagccacaggtggggaacatctttagacgctccttcggtctgagtgttggaaggtgggcattatgagtataatatgaagaatttcatagcaacacagatatcttacatgatatcactgccaatagcgttcacagctattgtaatggtccgacgatccgcctcgaaggacaatagattggtcatcacgttggcggtattgccgcccagttggctgcaataggcgtagaatttctccaaataagcacgatacagatgggcacgcacaatctccacgtcgaggtaacgcaacgactccatgggcaaatcgcgtggcacaaaccgagcgatgggcgtgtcaattagaacggcgtcgaagagctccgcagaattcgaggccacttcgatggcgcccagttgatcgaattcgcccagcggatgacacattcttagcagacgcttcatggatcggtgattgtttaggccagcgaccagaagcgccacattatcgatcatgaacggatatcgtatgaactccataaaggtggtcagcggctccgtcgaatgactgcgtatgtagtagtattgctgcagcagacgatccctaaggcatctttcgatcacctcaacggacggcgctgattgttcgccaccaaagatgagaccgtaatccgtgccctggatgctgatcattacgtcctcgagggattcacactgggtcagatttagatagtccgagtgctttagcatgccgttcttgaatccgcgcgttagggcctccaggtagccatactccgtgttgaatatcatcgacattttgacttattattattttcgagctatctattagtaggaattcacacgccaggcaacttttaagtgaaagcagaaattgatagatggaacatgcggtgataggtatttctcggatgaactgattctgatataaatactaaggattctagatgctaaaataatatttattaagctacaaatatatttatatataatatttaaatattcggtggcggtatctaccgatgcacgctagatggcgctaccgatggtgcaaggctgccattcgtttatcctttttgacaatatggcagcgctctaacggttttttaaattttaactttaaatttgaaaagatattatttgtttggtttgttcgttttaaagtgcatccaactagattattttagttataagaaaatgcacctagttaaagcttgctatttgaatttcagatagctatttatcggcccattctaacgcaatttccgcacatgcgcctggaggatgctgtacggaaattacctgttgctctgggccatttgtttacttgctgccaactctgtttgtttactcagtcaactagctgcgctcgggccaatagcatactaactgcaagttgttacacgttcattcaactagaacaaataaacatgtgaatttctcgcccggcctttgtttttgatatttctttgccttgttagtgtcgccgcgtgtgcatcgcataaatgtggcaataaaacgacatttattattgctaccgaagcatttaattgcccatcacaagagggtgtcaccttctcacgttgcattaacatcaaaatgaactaattcctactggcagatgaaaaatggaactgtcaccaaagaaattctgccttctggagttgtgaatgtgctcaaaaaaaaaaaaaaaatggtaagtattgtacttaaatcacgagtttcacctgttgcctttccatgtcgtcaaagactttaaagatatttagacaaagtcatggcagctgacaaaaatcggtcgatatgggcaataaataagatcacgttgtgcagtttaaagttggcattggc

SEQ ID NO: 9257 - DNA, 1106 bp, DROSOPHILA
cctggcgtgtgaattcctactaatagatagctcgaaaataataataagtcaaaatgtcgatgatattcaacacggagtatggctacctggaggccctaacgcgcggattcaagaacggcatgctaaagcactcggactatctaaatctgacccagtgtgaatccctcgaggacgtaatgatcagcatccagggcacggattacggtctcatctttggtggcgaacaatcagcgccgtccgttgaggtgatcgaaagatgccttagggatcgtctgctgcagcaatactactacatacgcagtcattcgacggagccgctgaccacctttatggagttcatacgatatccgttcatgatcgataatgtggcgcttctggtcgctggcctaaacaatcaccgatccatgaagcgtctgctaagaatgtgtcatccgctgggcgaattcgatcaactgggcgccatcgaagtggcctcgaattctgcggagctcttcgacgccgttctaattgacacgcccatcgctcggtttgtgccacgcgatttgcccatggagtcgttgcgttacctcgacgtggagattgtgcgtgcccatctgtatcgtgcttatttggagaaattctacgcctattgcagccaactgggcggcaataccgccaacgtgatgaccaatctattgtccttcgaggcggatcgtcggaccattacaatagctgtgaacgctattggcagtgatatcataccgaaggagcgtctaaagatgttccccacctgtggctacctgcccaaaatagccttggcctccatgtccactttaaatgatacggataaaataagggatgtttgcaatgtgttcgatggctatggcaaaatgtttgacaatttggagcgcgactcggacggcatgattacgctggaggaccgctttctcatgatggaggccaagaagaatgtgcagaccttcctgcagcagtaccatttcgggatcttctactcgttcattaaacttaaacagttggaggtacgcaatatcgtctggattagcgaatgcatagcgcagcgacagacggacagaatcaacgccttcattcccatacccttggactag

SEQ ID NO: 9258 - protein, 350 aa, DROSOPHILA
MSMIFNTEYGYLEALTRGFKNGMLKHSDYLNLTQCESLEDVMISIQGTDYGLIFGGEQSAPSVEVIERCLRDRLLQQYYYIRSHSTEPLTTFMEFIRYPFMIDNVALLVAGLNNHRSMKRLLRMCHPLGEFDQLGAIEVASNSAELFDAVLIDTPIARFVPRDLPMESLRYLDVEIVRAHLYRAYLEKFYAYCSQLGGNTANVMTNLLSFEADRRTITIAVNAIGSDIIPKERLKMFPTCGYLPKIALASMSTLNDTDKIRDVCNVFDGYGKMFDNLERDSDGMITLEDRFLMMEAKKNVQTFLQQYHFGIFYSFIKLKQLEVRNIVWISECIAQRQTDRINAFIPIPLD

SEQ ID NO: 9259 - DNA, 4547 bp, DROSOPHILA
taataatgagtgttttaaagaatttagggaggtatcgtgggtttccaacatctattattgacaaaaacaaaatttaaaaatgattaagaatatcctaattattatctacgcacaattaaatactaccgaaggctcccgctgtgattatggccgtcatgtactgctccagtagcgcctgcgccagatgagccccatgctctacggccagcgagtaggccgtgtctccgtcctcgttggtggcacttagatccaggtctttggccaggagctcgttgcaagtatgcggatgattgccggccgctgcgtacataagcgccgtgtttccaacgatgtccatgtggcccgaatcagcgccgtgttccagcaagaagcggacgatctcgttatgcccaccggcggcagctaggagtagaggactaatcaaatctggagccatagtgttcacattggcaccagccgcgacgaggagctgcacggaaaccagttgaccgtaggaggctgcccaatgtaaggctgtgaaaccatgtgcatccttgtaatcaatgttctgctgacgcgctctttccgctgccacctgctcctccgtgatctcgccttggccagcgcgttcgtgaaaggagagcgaaacttcgacggggcaaaaggtggcctccgtattgccgcgctgcaagttggtcagcacggtggactgggggcggtacggcaagaaggcgctcttccgcttggcgtccagcaccagcatggaggtaggcgccgaccgcactccctcatcgtcgtcggaattcgcattagtttggattgtgtttgctggtgccaccatttgttttggttatatttaccattaataccctgtattggaagccccaaagggtataatagctcgaacttaatgatatacaagattataaaatgccatcttaatataaattctttcaatataaaatttaaaattgatttaccgttaaaatgtctcgtattttaaacaaataaaaatttatttatgtcaaacgctaacataatcataaaactagaaaataacagggcatcatataactggtacacctatcttctagttgctgtagatttttctgtggtgtggtaaagccacattgtaatcagcattaatttgcaactccagcacggtcacattcgattggtttgtttttattttctcgtttcaaagcttaatttgcgtttaattatgtaaatatatttacccgatttgttagcactgtgtttgtgtgtttcataacaggttttgcgacgcggcgcagttgtttctttggccaaaacttccctgcacctgttgcgcctcgccaatttgttttcagtgcaaacctgcgtttggccttttttatgccctttcgttgtacgtttccactgccccaaattaattgcgtcgaaacatcaccaagatgggcaacacgagttccaagggcgagtcggacgccagtgagccacccctggagggaggcaagccgtacaagcagcatcagcagcacaagtccagtgatgcttcccacaacggagtctctgacgtgggcggcagccacaacaatctaaaggtgacgcaggcgcagggctcgatgaccaggtcggcttctggcgcggatgtcaccgagaagtacctcacccagctggtgccggtggagaagctagccgagattctcagggagcagacgtcgtccaaactgggcattaatggcattgtggcagatgtctttgtggtgagtaattaactgataacaccgagcccactcataaaaaataacacctctttcgccagtcacaagtctttccgcagtacgccgacctgggacagcggctgttcaacctgatgcactccaactccaaggccacaacgaaacatctgggcgccgttgctttccggcaacagtgcgaacgctttttgggcatcatggatgactcgaagacgctggagtgctacattaagatgtacgcccaggaggagaatccggaccaaattgacaagacgggagtgacgcggttgctccacatctgctacaccattgccatgcagcactcgggcaacgccgtgctgtgcccggccatcaaccgcacgttcggttcggtgaccaagtccattttcctgtgccacgacagtatgagtctgggctacgtttgccgctggttcgagcagaacctgatgcggctggtgctcctcgtgcacaagtactgtgtgcacactttgtcaaccgcttaccgtggtctagagcagcagaatcagtcatgcggcattgagttgcagacgccggtgcttgagcaacgtaatcccttcacagataccaccgactttagtggcggtagcacgagggagatggactcgctgatgccgctttcgcaagcctggctgctggctggagctctgccgccactctactccaagccccaaactgtgacaccgccggccacaaagggaaacaacaacgttagcgcgtccacagcggtacagattttcaaggacaagctgtcgatgatgccgtcacactggacactgctgtacaactccaatgagcatggcgtgggagccaaccggtttctgcaccacgtcctcggctatcggggtccaacactggtcctgctccataccaaggatgaacagacgtattgcgtggcctcacccagtgagtggaaggaaacgcatctgtttgtgggcggcgagggcagctgtgttatccagctgctgcccaagtgggtagcgaaatggtggagatttacaatccttactaatggaattttttaaaggtttgtgatactggaaaaaaagcccaacattctttacctaaacaccagcatacgcggctatccgaagggcttacgtgccggcgccgatccgcgaaaacccattatagcagtcgatgagcatttcgagaatattgactgcaagggactggcggctggactcatgtccatagaggtaaaaagaacatgcacccttagcaaatcggctttctttccaacttatttagagattagcaattgacaaaatcaaatagaaaccctgatttcatgaacctcatttggaaccaaaataagctaagcagacaacatgtcgaatatttctctgtactttaatcgcattcatgtacaataagccttattcaacagggtatatgttatatatgtgtatatgcatatatggtatatagtgtaaaattcatagacgtatatcgttataaacggcattatctccagtctaagctgttaaaaacagcacacgtatggctccaaatggccaggtgtgtgctctagcgatgcatttaaactaagtctacgattctccatacccaacaacagtcaaccaacaacaagaactacacgttgctcgccatcttttcttcgatctcatccgcaggtgtggggctgcggcgacaaatcatcacgcgaagtgcaattggacatcaagaagtggcaaatcaaggaggccgaacggcagcggacagtgaagctcacggccgccgactggatggaccatccggatcgatatctcctcgagctgggcggcaggcagaactacaacaattgatcgcgactgctgcgcatatatgtattctaaaagcaatggatggggaatgccattcgaaatgaggggcatgccacattgaaatttactgggatttgctatagttatgcactcgcagcacgagaagtaatcactggactgaatttgtttttaattgatgttgattgatattcggtttacttgtttttctttctattatcagtgtttagtactcgatttgatttatgtatgttcgtaacgagaattccgtgaatgcctttaaatgtacttcggtctacttgtgtatccatgtatatgtcacacattgtcttcgttttcgtcaactttttcctttaggtcttctgttatgttccgtatctttgttcaaaaatgtaaaaaagcaagtattatgaaaagacataggattcgaagtgcttaaacaaatatttcaataaatgttacaaatgaaatgaagtcgtattctctacttgcaagcgtggaatgtagttctcatcattattttatctcatgtcacccaactagatgatcctaaaacaatgttaggggattttaaatgaccaacaaaattcaaatttcttatcacatattaacaaaagcaacaaatacataaacaaaagcattagtgtcgaaaattggaatgatatgcacaatgttagtacacaaatgggtgcagtagcaaatgaaaataatcacgaattgtacgagattaaaacataaaaggcggtttcgattattttccaatattatattattgatgtgtatattagttttacaataagaatttctatttaaatacaagtcacgcccttttctgaccggcggcagtcacaaaattcacaatcggttcaggcatgtttttttttaattaactacttcgccacacaaaaagttggagacctacataactatgcggggtcacctagcagggatgtatagagtaaaaatatcgtttcgggaaggtctgttcacaaacaatcagcacataaaaagtacttacaaaata

SEQ ID NO: 9260 - DNA, 1996 bp, DROSOPHILA
atgtcaaacgctaacataatcataaaactagaaaataacagggcatcatataactggtacacctatcttctagttgctgtagatttttctgtggtgtggtaaagccacattgtaatcagcattaatttgcaactccagcacggtcacattcgattggtttgtttttattttctcgtttcaaagcttaatttgcgtttaattatgtaaatatatttacccgatttgttagcactgtgtttgtgtgtttcataacaggttttgcgacgcggcgcagttgtttctttggccaaaacttccctgcacctgttgcgcctcgccaatttgttttcagtgcaaacctgcgtttggccttttttatgccctttcgttgtacgtttccactgccccaaattaattgcgtcgaaacatcaccaagatgggcaacacgagttccaagggcgagtcggacgccagtgagccacccctggagggaggcaagccgtacaagcagcatcagcagcacaagtccagtgatgcttcccacaacggagtctctgacgtgggcggcagccacaacaatctaaaggtgacgcaggcgcagggctcgatgaccaggtcggcttctggcgcggatgtcaccgagaagtacctcacccagctggtgccggtggagaagctagccgagattctcagggagcagacgtcgtccaaactgggcattaatggcattgtggcagatgtctttgtgtcacaagtctttccgcagtacgccgacctgggacagcggctgttcaacctgatgcactccaactccaaggccacaacgaaacatctgggcgccgttgctttccggcaacagtgcgaacgctttttgggcatcatggatgactcgaagacgctggagtgctacattaagatgtacgcccaggaggagaatccggaccaaattgacaagacgggagtgacgcggttgctccacatctgctacaccattgccatgcagcactcgggcaacgccgtgctgtgcccggccatcaaccgcacgttcggttcggtgaccaagtccattttcctgtgccacgacagtatgagtctgggctacgtttgccgctggttcgagcagaacctgatgcggctggtgctcctcgtgcacaagtactgtgtgcacactttgtcaaccgcttaccgtggtctagagcagcagaatcagtcatgcggcattgagttgcagacgccggtgcttgagcaacgtaatcccttcacagataccaccgactttagtggcggtagcacgagggagatggactcgctgatgccgctttcgcaagcctggctgctggctggagctctgccgccactctactccaagccccaaactgtgacaccgccggccacaaagggaaacaacaacgttagcgcgtccacagcggtacagattttcaaggacaagctgtcgatgatgccgtcacactggacactgctgtacaactccaatgagcatggcgtgggagccaaccggtttctgcaccacgtcctcggctatcggggtccaacactggtcctgctccataccaaggatgaacagacgtattgcgtggcctcacccagtgagtggaaggaaacgcatctgtttgtgggcggcgagggcagctgtgttatccagctgctgcccaagtttgtgatactggaaaaaaagcccaacattctttacctaaacaccagcatacgcggctatccgaagggcttacgtgccggcgccgatccgcgaaaacccattatagcagtcgatgagcatttcgagaatattgactgcaagggactggcggctggactcatgtccatagaggtgtggggctgcggcgacaaatcatcacgcgaagtgcaattggacatcaagaagtggcaaatcaaggaggccgaacggcagcggacagtgaagctcacggccgccgactggatggaccatccggatcgatatctcctcgagctgggcggcaggcagaactacaacaattga

SEQ ID NO: 9261 - protein, 526 aa, DROSOPHILA
MGNTSSKGESDASEPPLEGGKPYKQHQQHKSSDASHNGVSDVGGSHNNLKVTQAQGSMTRSASGADVTEKYLTQLVPVEKLAEILREQTSSKLGINGIVADVFVSQVFPQYADLGQRLFNLMHSNSKATTKHLGAVAFRQQCERFLGIMDDSKTLECYIKMYAQEENPDQIDKTGVTRLLHICYTIAMQHSGNAVLCPAINRTFGSVTKSIFLCHDSMSLGYVCRWFEQNLMRLVLLVHKYCVHTLSTAYRGLEQQNQSCGIELQTPVLEQRNPFTDTTDFSGGSTREMDSLMPLSQAWLLAGALPPLYSKPQTVTPPATKGNNNVSASTAVQIFKDKLSMMPSHWTLLYNSNEHGVGANRFLHHVLGYRGPTLVLLHTKDEQTYCVASPSEWKETHLFVGGEGSCVIQLLPKFVILEKKPNILYLNTSIRGYPKGLRAGADPRKPIIAVDEHFENIDCKGLAAGLMSIEVWGCGDKSSREVQLDIKKWQIKEAERQRTVKLTAADWMDHPDRYLLELGGRQNYNN

SEQ ID NO: 9262 - DNA, 2561 bp, DROSOPHILA
gatcagttttgagatcactaaatattactcatacgactcattagccagttacaaacttgttaggcccatctagactgatttccatatagtagatggtgtgaaattattattcatttttcattttcatcaaagggtagtattataataacgatctaaatcaccatgcatgcacgctaagcgcaaggagattggattccctgccagactggagtcgagagtaggcactcgtggagttgtaagttccctagattcccaagaaggatagccttacactttaacatatctccggtttgcctggcaataatatacacctggttttctaggtgccaactggctggttgtgacgctctttctggtcggaaaactgggcatcacctcctcctttgcagtcatctacacgttcacagcggaaatgatgcccacggtacataactcatttactcagatcagcaggttagtttccatttcgtttatcctaggtcattaggagcggcggcgttggtgtgatgtccacatttgcccgcttcggtgcaatgctggctccatttgtgcccctattggtgagttcagtccagaattcagggcaaatcatataatccggattgatttttgacaggcttcgtactatgacccactacctctgctacttttcgggacactatcgctcgtggctggactcctctcgctgttactgccggaaaccttcaaccgaaaactaccggatacggcaagttataactcggagtattagaatccccgtgctaaacattcctatcttcacaggtggaagaggcgattgcattgggaaagtgattcattcttgtttggatggacatatttgccaccgatcagcaatatacacatatatttatataaagcgatgtagctgaccttaaaaaatactcgttataaagtattgtatacaaaaagatggcatgattttctaattcagatattaacaaatgggtatctctggtataacaatcgcctaaatgtatattcaatttccaaagagaccctcaaacaactggcgatcgctgacatgaccgaagcgattaaggagtttgtagcgccttttggaatcgctgcgcaagcaaatgggcgaaacgaatctgagtcgagacggacttccctgctcccagctcggcagcagatcctcggtttcaatgagtgtctcctgtcgccgtccccagaagtctacgtaggccagcttgagcagatcctgttcctcgttcacgtagatgaagcccacgagatttgaggacgcgtagctggctagtgtgagggtgatcaggccagtgactccaatggcggcatagatggccagtgcatccgtgctgagttgcccggcgctgcccagggcgaagacaatgggcgttccggcggccgtgatgacagcctggtagactttcaacctacttaatgcggccacgagccgtatgcccggcatactatagacggtgcgccattcagtgaatgcagatttttcggtttccgttctttttccggcagcctctgttgcaaagcggcgtctctgtgccggctgaatggctagggacatgcagcttctccatggcaatcttgcaggactgacccggcacagcagctccagcactaaaataaatcaattgtgtttttattttataaacattatgtatatttagatgcgtgttcaactcacttgcattgatttgtgggtgtgtttactcggggtaatttgatcaaagtgtaaggttttggtaatattactttttccaactcaacatgtatatttacgttagcactttatgttatagttagccgagctaatatcatatttacaaatatgccttgcataataaacaaatgcacgtttaaacggtacctaaagcgaatcagctgcttatcgataagtcaggtgccaatcgatacatggcagtgctgcccagtatcgcacagcaaggtgcgtttaaattttgaaaatgggcgctattatggcgtagaagcgaaatattacgtcaggacccagtggataaatatagcagagccagatgatttcccggcgcgcagagagtgatcaatagataaatcacttgtactaggcctcagtcgtcgcgcagttctcagcctttaaacgcggtcctccgccaattcgttaatccaactcgtcttttacaattgcgaagtatgtgcatacccgtatccaaaaaacatggaacacggctgccagttttgggtttccaaaattcgtacacaatcgctgcagcagcgagatccaagatttttcaacaacttgtgtttatttagctatcttttcgcggtcaagactcaggcaacaaatttatttttagagctcttgcttgtgcactgcattcggaaatagttttttttgaacacaaaatgcactggtgtgcaatattttacaacatgctagttattcaaggttcacgagataaggaggccttgattaaagggtcacaagcattaggcatctaaaagttttgtccgcgggaaaaaaaatgcaatcatccatgtaagaatactttttaaagaggaaactgctaaactaataggatgtagga

SEQ ID NO: 9263 - DNA, 561 bp, DROSOPHILA
atgtccctagccattcagccggcacagagacgccgctttgcaacagaggctgccggaaaaagaacggaaaccgaaaaatctgcattcactgaatggcgcaccgtctatagtatgccgggcatacggctcgtggccgcattaagtaggttgaaagtctaccaggctgtcatcacggccgccggaacgcccattgtcttcgccctgggcagcgccgggcaactcagcacggatgcactggccatctatgccgccattggagtcactggcctgatcaccctcacactagccagctacgcgtcctcaaatctcgtgggcttcatctacgtgaacgaggaacaggatctgctcaagctggcctacgtagacttctggggacggcgacaggagacactcattgaaaccgaggatctgctgccgagctgggagcagggaagtccgtctcgactcagattcgtttcgcccatttgcttgcgcagcgattccaaaaggcgctacaaactccttaatcgcttcggtcatgtcagcgatcgccagttgtttgagggtctctttggaaattga

SEQ ID NO: 9264 - protein, 186 aa, DROSOPHILA
MSLAIQPAQRRRFATEAAGKRTETEKSAFTEWRTVYSMPGIRLVAALSRLKVYQAVITAAGTPIVFALGSAGQLSTDALAIYAAIGVTGLITLTLASYASSNLVGFIYVNEEQDLLKLAYVDFWGRRQETLIETEDLLPSWEQGSPSRLRFVSPICLRSDSKRRYKLLNRFGHVSDRQLFEGLFGN

SEQ ID NO: 9265 - DNA, 5709 bp, DROSOPHILA
acacgcgatagttattattaaattcattacacgatgcttgtatacccaccctttgtggtgcagcgtccgtaggagttctccacgacgttaaacagcttggtccagaagaaccagaagaaggtggctatgacgatgcgcgggaaatggtgtcgcagcatccgtttgtggtcgccacacgtaatcgtataggccgagagcaccaggaagggcaccacgaagagcagcgtccagccccagccgatcttcacgaagtactggttgaacaggttgtccgatcgggcgaagtacgtcttggggaagggcacaaagtccccgattacggagatcacaaacagactgcccagatacaaggctactttgaggtccgtattgaagaatatggtcttcttgcacaaatggatgacgcccatgaccaggatctcgcggatgctagtgggtgcggccgtgggcctcgttccgcgcgcttccgacctggtgatgtcaggtcctccgggcctgaaattcatgttggaaccggaggaggagggacttcccgcagtaccgcccaaatttggacgcagcggacgtcgcttggtggccatagctggagctgttgctcgggtccaaagtgtgtcacttgaaaactgcgttgtttgctgccgtttttggtaatgctgcgagtgaaaagcgaaagtgaaagcgaaggaatcgtgcgtgtcaaagttcaacggttgccagacgcacttacctgtgaccaaacagtgccagcgcattcaaatcagatcaactggtcaatttgtttgctttttcgccgggcttagagcacccactgcgttgttctcagttgtaatttttcaattcttattttggcccaaatgtacgtgttgcgcctgtaaaaaatagaacagctgcagctggtgagcacgcttcactgtgactggcaactctgattggaatttttataaagagcgggtttcgtggcgaatggcaagccatgtgatcagctgttcgggcctgagatttatctcgagcatttttaattgccggtgcggttttaattgaactgcggcatgtacaactcggccaagcagctgcagcgcgtgctgacagcgcgcgagattcgtaaaacctttttggatcatttcaccgtcaatcatggccacaagttcgttcgctccagcccggtggtgcccttttgcgatcccactgtggctttcgttaacgcgggcatgaatcaggtgaggtaacaggcccattaaaagctattgttcgcttgtttatacgatggccttcgctgtagttcaagtcggtgttcctgggcacagcagcggcgccacacaagcgggttgtcaactcccagaagtgcgtccgcgttgggggaaagcacaatgatctctccgtggtgggcacggatggctatcatcacacgttctttgagatgctgggcaactggtcctttggggattacttcaaggtgggtgcgttcagcttaccctctatcacttctttctcacgagacctttgggttttcagcgggaggcgtgtgcaatggccctggagctgctccgtggtccctacaacattgatccaggtcgtctatacgtcacatactttgctggcgacaaggtgctgggcattccagccgatctggagtgtttcgagatctggaggagcctggggtaaagcttgttacataacgagaagttggtttcttaagtactcgtgctttgcagctttcccgcctcgcgaatactgccctttggctgcgccgacaatttttgggaaatgggcgctacagggccgtgtggtccctgcaccgaaatccacatagatcatcgcccggatttgggcagcgtggagcagcgagccaagttggtgaacgcaggtcgttccgatctcacagagctttggaatcttgtctttatacagtacaatcggtgaggatttgccttcaagtggattgtgttcctagcctaaggttctttatgcattgatagtcatgccgatggcagcatctctcaattgcccgctcatcatgtggacaccggcatgggttttgagcggctaacggctgtgcttcagaataagtcttctaactatgatacggacttgttcacgccgatatttgatggcatccagcaggcggccaagactccggtttacagtggcagctttccggatggtggaaatgcagcagtactcgacaccagctataggatactagccgatcatgcacgcatggtgaccgcctgtttggccgacggcatgcttccagatcaaaagtaagcttgtactcatgccctgcaaatttcgcatataatccaatatctatttcagtcagaaattgcgtcgcgtgctgcgcaaagctctcaacatttcggagcatgtgtttgcccacgacaaattgctgacccagctagttcctattgtggtggagacacttggtgaagcctatccagagatggcggctaagcagcaggctgttatcgacttgatctgccacgagcaggaggtctacaagaatctaagagagagttcttccaaagcgtttgcagaggtgcttatggagtttcccaatctggatgacatcgatctgatggagtgcccgggattcgtgcccgcctatcgagagttgcagatgcagcgctgcaagttttccaataacacaataccaggggacttcctttacaagctgaccgatacctacggcctgaccgaggagagtttcctcaagctggctgaattggagaacatgaactgtgatttggagcgctacagggcggaggtcagtctggcgaagctcaaagccaagggcaaccaaagggagactgctggaggatcactctgcgatctggccacggagcagcgtattgctgaagctcaggcgatgctaacgaagcgtctgacacccaccgacaacagtcacaagtacacctactccttcgacaaggagagtgattcataccaaatacccccactaaagactcgagtcctcggaatgctcctcaacgatgcggaagtgtcacgaacccaaggcagtcgcatacagcaacccttcaccgaccttatttccattgtgaccgctggcagcaatttctactatgaatccggaggtcaacaatcggatggcggaaagatccttgtgagcaatcaccaacagccagaccatcctcattcactagacgtaatcggtgtaaagcatctcaacgattgcgtagttcacatctgcaagttatccagtcccaccgacgcctttcagctggccattggggatgaggtggagctgcaggtggatgcgcagcagagacagctcaacacgtgccatcacacaggtgagatgaatatgttagagttactagaaccgattacaatcaatccctataattctagccacgcatctactaaacgccgccatccgatcgcttttcaagaaggtcacctaccaggtctccagttctgtgagcagcgatcagtgcaagctggagctgggactcctgggcaagcgcattcaaaagaccgatgtacagctcatcgaggatctgatcaagtgggtcgtcctgatattagaaatttttatgaatttaacttacaatcctttgcaatagtcgcgttatctgctctgctgcgccggttgaagttcaattgctgagtgcagctgaagttctggagcagaatgacatcacaatggtgcccggcgaggtttatcctgagcagggattgcgtctagtcaacgtggagagtcctgaactgcagctgagctccaaggaactgtgctgcggaacgcatgcaaccaacaccagtgagctttcgtgcttctgcatcgtgaatctcaagcaaaccaatcgtgcgagattcgcatttaccgccgttgctggccaggcggcggaaaatgtgagtggacttatatatcgccttagactagtcatttaatcttcttactctgttccaaataggtgctgaaaacggctgccctgctgcgacaccgcgttgatctcctcgagaagcagttccaaactgacaaactcacaaacgctacggaggcggaactgcagacgattcggcacaacatgttgcacacggacattaaactgccatacgcttttaagatggacacgctggaacgcatcaccgagatgctgaagagaataaaagattcatcgcgcacaaccttaaagtaagtttaacttattaaagtaatgtgctccatttctaaactctacattttcagagaatttgtggacgtagagatgcgcacgctgctgcaggagaagccgttggacacacaccccttcattctgcactacatcaccagttccgcgctcgtggaggagattcctttgcaacgagccaccaagctgtgcccggatcggcccatcctcgtaatcagcgtgtgtgatagcgtggtcaaggctcgctgttgtgtaccagaaaagtgtatcacggagaaattcaacgcttccgcctggctgcaatcctttgccgacacctttaatggacaaatagccgcgcccaagggccaaaatccgcaggccgtgtgcaacatgaagggtcgacgggtgagcaatctgttcgaggaacagttggagcaggcaatgtccaaggcacatgcatacgctaagctttatctataggtataagttgtgattaccctccaaaatgtgctagctgtaagcttgccctttgaataattgctcatgtgaggagcgagtaaatggcgaagttttaaggaatttcagaatctttaatcactaatcactaccaggtcatcctcctcctcatcttctgcgttatcctcttgatcctggggcaccaagctggagttcatcaactcttcaaagacatccgcattatcggaactttgattgaagaagtaacttatgttatccaagggcttcactggcgttggaatcttttcgctgatgcgatgctgcatcttgaatcgctccactggcgtcctggccagcttctgcagatctcccttgaccagcagatcaaaactgtcctccaaggagaatcgcttactctgcggtagttgatccacttgagagagatctcttttcgtttccactttgggcgattcattcacatttcctagactcatctgcgccagacgtaagctcaaatcttccgccatgggttcgtaatgaagctggtgaccatcgtggttggtcagtgctggcttggcattcggattcgagataatgcctttaactatgtccgacatatcgaactcttcggcatcgcaatcgctttccagatcggagggcaggaacttggtgatgggggtggagcattgctgacgttgcggagcgggagccttgaccggagtaccttccttcttgcgccctaggaattggtgcagtaatggctggttctcttcaggctgagcctttatctttctgaccactcgctttggtttcgaattcggctcgttttccttattctcctcttcagatgcggttttcttctttcgcgtggttttcttggcgggcttctccttcgacttcaaaaaggccgctactaaatcgggatacgctgtctccagcatgtccaatggctcaatggtgtagtaaagttcctcgattcccttgggatgctccgcttcgtactccgcaatctgcttgtccggaataagacccttgaagatgccactgggatcgtgccagcgcaattctaagctgggcacacccttcacagttcgctttttgataatctcgtgtggctggataa

SEQ ID NO: 9266 - DNA, 3187 bp, DROSOPHILA
ttatctcgagcatttttaattgccggtgcggttttaattgaactgcggcatgtacaactcggccaagcagctgcagcgcgtgctgacagcgcgcgagattcgtaaaacctttttggatcatttcaccgtcaatcatggccacaagttcgttcgctccagcccggtggtgcccttttgcgatcccactgtggctttcgttaacgcgggcatgaatcagttcaagtcggtgttcctgggcacagcagcggcgccacacaagcgggttgtcaactcccagaagtgcgtccgcgttgggggaaagcacaatgatctctccgtggtgggcacggatggctatcatcacacgttctttgagatgctgggcaactggtcctttggggattacttcaagcgggaggcgtgtgcaatggccctggagctgctccgtggtccctacaacattgatccaggtcgtctatacgtcacatactttgctggcgacaaggtgctgggcattccagccgatctggagtgtttcgagatctggaggagcctgggctttcccgcctcgcgaatactgccctttggctgcgccgacaatttttgggaaatgggcgctacagggccgtgtggtccctgcaccgaaatccacatagatcatcgcccggatttgggcagcgtggagcagcgagccaagttggtgaacgcaggtcgttccgatctcacagagctttggaatcttgtctttatacagtacaatcgtcatgccgatggcagcatctctcaattgcccgctcatcatgtggacaccggcatgggttttgagcggctaacggctgtgcttcagaataagtcttctaactatgatacggacttgttcacgccgatatttgatggcatccagcaggcggccaagactccggtttacagtggcagctttccggatggtggaaatgcagcagtactcgacaccagctataggatactagccgatcatgcacgcatggtgaccgcctgtttggccgacggcatgcttccagatcaaaatcagaaattgcgtcgcgtgctgcgcaaagctctcaacatttcggagcatgtgtttgcccacgacaaattgctgacccagctagttcctattgtggtggagacacttggtgaagcctatccagagatggcggctaagcagcaggctgttatcgacttgatctgccacgagcaggaggtctacaagaatctaagagagagttcttccaaagcgtttgcagaggtgcttatggagtttcccaatctggatgacatcgatctgatggagtgcccgggattcgtgcccgcctatcgagagttgcagatgcagcgctgcaagttttccaataacacaataccaggggacttcctttacaagctgaccgatacctacggcctgaccgaggagagtttcctcaagctggctgaattggagaacatgaactgtgatttggagcgctacagggcggaggtcagtctggcgaagctcaaagccaagggcaaccaaagggagactgctggaggatcactctgcgatctggccacggagcagcgtattgctgaagctcaggcgatgctaacgaagcgtctgacacccaccgacaacagtcacaagtacacctactccttcgacaaggagagtgattcataccaaatacccccactaaagactcgagtcctcggaatgctcctcaacgatgcggaagtgtcacgaacccaaggcagtcgcatacagcaacccttcaccgaccttatttccattgtgaccgctggcagcaatttctactatgaatccggaggtcaacaatcggatggcggaaagatccttgtgagcaatcaccaacagccagaccatcctcattcactagacgtaatcggtgtaaagcatctcaacgattgcgtagttcacatctgcaagttatccagtcccaccgacgcctttcagctggccattggggatgaggtggagctgcaggtggatgcgcagcagagacagctcaacacgtgccatcacacagccacgcatctactaaacgccgccatccgatcgcttttcaagaaggtcacctaccaggtctccagttctgtgagcagcgatcagtgcaagctggagctgggactcctgggcaagcgcattcaaaagaccgatgtacagctcatcgaggatctgatcaatcgcgttatctgctctgctgcgccggttgaagttcaattgctgagtgcagctgaagttctggagcagaatgacatcacaatggtgcccggcgaggtttatcctgagcagggattgcgtctagtcaacgtggagagtcctgaactgcagctgagctccaaggaactgtgctgcggaacgcatgcaaccaacaccagtgagctttcgtgcttctgcatcgtgaatctcaagcaaaccaatcgtgcgagattcgcatttaccgccgttgctggccaggcggcggaaaatgtgctgaaaacggctgccctgctgcgacaccgcgttgatctcctcgagaagcagttccaaactgacaaactcacaaacgctacggaggcggaactgcagacgattcggcacaacatgttgcacacggacattaaactgccatacgcttttaagatggacacgctggaacgcatcaccgagatgctgaagagaataaaagattcatcgcgcacaaccttaaaagaatttgtggacgtagagatgcgcacgctgctgcaggagaagccgttggacacacaccccttcattctgcactacatcaccagttccgcgctcgtggaggagattcctttgcaacgagccaccaagctgtgcccggatcggcccatcctcgtaatcagcgtgtgtgatagcgtggtcaaggctcgctgttgtgtaccagaaaagtgtatcacggagaaattcaacgcttccgcctggctgcaatcctttgccgacacctttaatggacaaatagccgcgcccaagggccaaaatccgcaggccgtgtgcaacatgaagggtcgacgggtgagcaatctgttcgaggaacagttggagcaggcaatgtccaaggcacatgcatacgctaagctttatctataggtataagttgtgattaccctccaaaatgtgctagctgtaagcttgccctttgaataattgctcatgtgaggagcgagtaaatggcgaagttttaaggaa

SEQ ID NO: 9267 - protein, 1012 aa, DROSOPHILA
MYNSAKQLQRVLTAREIRKTFLDHFTVNHGHKFVRSSPVVPFCDPTVAFVNAGMNQFKSVFLGTAAAPHKRVVNSQKCVRVGGKHNDLSVVGTDGYHHTFFEMLGNWSFGDYFKREACAMALELLRGPYNIDPGRLYVTYFAGDKVLGIPADLECFEIWRSLGFPASRILPFGCADNFWEMGATGPCGPCTEIHIDHRPDLGSVEQRAKLVNAGRSDLTELWNLVFIQYNRHADGSISQLPAHHVDTGMGFERLTAVLQNKSSNYDTDLFTPIFDGIQQAAKTPVYSGSFPDGGNAAVLDTSYRILADHARMVTACLADGMLPDQNQKLRRVLRKALNISEHVFAHDKLLTQLVPIVVETLGEAYPEMAAKQQAVIDLICHEQEVYKNLRESSSKAFAEVLMEFPNLDDIDLMECPGFVPAYRELQMQRCKFSNNTIPGDFLYKLTDTYGLTEESFLKLAELENMNCDLERYRAEVSLAKLKAKGNQRETAGGSLCDLATEQRIAEAQAMLTKRLTPTDNSHKYTYSFDKESDSYQIPPLKTRVLGMLLNDAEVSRTQGSRIQQPFTDLISIVTAGSNFYYESGGQQSDGGKILVSNHQQPDHPHSLDVIGVKHLNDCVVHICKLSSPTDAFQLAIGDEVELQVDAQQRQLNTCHHTATHLLNAAIRSLFKKVTYQVSSSVSSDQCKLELGLLGKRIQKTDVQLIEDLINRVICSAAPVEVQLLSAAEVLEQNDITMVPGEVYPEQGLRLVNVESPELQLSSKELCCGTHATNTSELSCFCIVNLKQTNRARFAFTAVAGQAAENVLKTAALLRHRVDLLEKQFQTDKLTNATEAELQTIRHNMLHTDIKLPYAFKMDTLERITEMLKRIKDSSRTTLKEFVDVEMRTLLQEKPLDTHPFILHYITSSALVEEIPLQRATKLCPDRPILVISVCDSVVKARCCVPEKCITEKFNASAWLQSFADTFNGQIAAPKGQNPQAVCNMKGRRVSNLFEEQLEQAMSKAHAYAKLYL

SEQ ID NO: 9268 - DNA, 2610 bp, DROSOPHILA
gttcgagtgatcgcgagtgactgaagtaacggcgagcttgcgcggcttgattttctaccgatcgcccgattgcgcgcgctccaaacgctggtaaccggttcgcgaaccagttccgaataacagagaggcacacagtgagcatagttgtaattttaaataaccgttaggatttgtcgattttaaaaaagtaatttattaaacgtaatgtatgtttcaatattatcaatattatggaaatatagcagcttaaagttagttacttattattaatacttatactgtacgtaaacgatcagccaaaagtgttgttccttttcggtaatacaaactttcaattaacaatagtacaaatttaaatacgatttttaatgattttgatttcatttcgaaaaaaaaataaagagataccaacagtattaaaatgtactatttaataaggtttctaatattttgtatttaattctaatcatttttacaatcagtaatttttctagttttgcttaacttgatagatcacaaatattttaaacggcgcgccaaactcatcaactgagttaaatagatatcgatagttttctatcgtctgcgtttcgctgttactggcaatgagcattcactgtagtaccataaactttttaggagccctggtttcaaccaaaccgaaaattggcgccaaaatttgaattcaaattgaatttagaattgtatgctccaaaaaagaagtaagcatcctttaaattgtaagtaaaacacatatgaaacgccaactgaaattgcgtaaaactgtaaattaaacttaatttgtacaagcgtaaatgcactctacgtcgcaatacaattattaataaaatgcagtgctaaatgcatgactttgaagtacgtaagttaaagaaaatgtcttattcgtaagaacgaaatcacgagtgtgatattttggactagcaaatccttgcgttgcccccgaatgcaatctctacccaaattcgacaacagtctcgacttgtttatggaaatggttgatggctcaaacaaagtttattttcaaatgacttaaaactagctcgaataacgctcaacatgtgatggtggtggtggcaagcccatctagaatcgtccttgaccctggcgactctcctgctggggatgggtgcggatgtactccagtgacttcaggatggaagccgggattggaggaggtgtgggcagatgggcgccggccgggtggtagccattgctgtcggcggtgtaggtcaactggatgagctggccatcgggggcgtagtaggcgttcgagccgctggcatagtaaccacccacgcccgattcctggccagcgatgccattggacgtctggtactgataggcatagctgccatcctccttcaggtcgctcttatactcgcgagtctcggctcgggcgtcgaaggagtcggcctggacacaggaaacagccagggcggcgacggcaaggacgaactgtggacggataaggataatggtagttgaaagagttttccttctggtcgaacaaaaaaatcctgaactcacgaatttgttcatttttttttttttgtgaattggtgattgggctgggggctgacttgttgtcactgtgaactcgcaacgagaatgaatatgaccgaattggcctggcatggcatttatagcattttggcacgccaatcattttgggccgggcactcgcagtcgccgcaaaaacgcgtataatttgcagcattgaacctgaactgcccctctcacagatacgaaaaaatacccacacactggcacttaaagactccgctggagactcttcgctgattttagtgctttagtgctgttggtgtatgtgtgagatagttttttgttgcccataaactttatgctcctttttgttcaacttgtgggtagccggttaatcaattcttgtgtctgcggcgaggggttaatttttcattaacacctccgcaagttgttttggttagcgcaatttgtagctgccccatcgctttatttccttataaaatggttaacccgattactcgcaaattattttaaagcgcctggctttgtggcaggatcatttataaatgttgcgcctagtccccgttgccaaatcatatgcgaaactttataataaatcgttcgtagaatcggcgaaatcgattaagaacctcacatgctgggtcaacgcatccatttattacaaaatcaccaagcgcgtccaaaaatggaaaagccaaaaaaccgaaaccgacgaagtggcaagcaaccttagcttgctgcaaaagccagacgaacgaccttgccaccaatattggcagactgtccgaaagtacgacagcttatcgacagccaagccggcgagtttgtattaagttttgataagaaaacttgcgatgaaccaacgacgaagatgacgtgactcacggggatcacgaagcttttgggggaaaattggggctttaacctcgtttcaatcggaaagtctgatgaccttagatatttgggcagtaaattaggctgggtatttgaaaagtaaaatagagcacctaaatagcacgtaatatatacatacatatataggtgctaaagtatattgtcatattt

SEQ ID NO: 9269 - DNA, 538 bp, DROSOPHILA
tgacaacaagtcagcccccagcccaatcaccaattcacaaaaaaaaaaaaatgaacaaattcttcgtccttgccgtcgccgccctggctgtttcctgtgtccaggccgactccttcgacgcccgagccgagactcgcgagtataagagcgacctgaaggaggatggcagctatgcctatcagtaccagacgtccaatggcatcgctggccaggaatcgggcgtgggtggttactatgccagcggctcgaacgcctactacgcccccgatggccagctcatccagttgacctacaccgccgacagcaatggctaccacccggccggcgcccatctgcccacacctcctccaatcccggcttccatcctgaagtcactggagtacatccgcacccatccccagcaggagagtcgccagggtcaaggacgattctagatgggcttgccaccaccaccatcacatgttgagcgttattcgagctagttttaagtcatttgaaaataaactttgtttgagccatcaaccatttccataaacaa

SEQ ID NO: 9270 - protein, 127 aa, DROSOPHILA
MNKFFVLAVAALAVSCVQADSFDARAETREYKSDLKEDGSYAYQYQTSNGIAGQESGVGGYYASGSNAYYAPDGQLIQLTYTADSNGYHPAGAHLPTPPPIPASILKSLEYIRTHPQQESRQGQGRF

SEQ ID NO: 9271 - DNA, 6886 bp, DROSOPHILA
atctataattggatataatttagaatggagtattaatccttactaagaggccatatatgaaactagcccagacatttatactttttcaatactttcttacttttgctaagcacttcagcatttatgactaaatattttgtatttgaaatgcattactgctcttttttcaaacaaaagcaaaattgaggattaagattctggtatttaagcataagaccagaggaaattcccaaacaaacatttaaagttatctatcaagacatgttcattaatttggaatataattactttattttttattgtatattttagtttatgtaaagaaaaattacatacatccatgtttgcttacttaaccacacattcatggctgcttatattcgtgaaacatattttattaattatacaggtatttaactttcacaaggataatacaatttcatagcttgttgagtatactgaaatgctacggagttcgatatattttaatgtgtttgtatttacaaaattctaaattttcattttggataaatgttttatattaatcgtatcgattgcaagttggggtaggattgagttcagtgataatatcgattatttataatttaatatccaaacaccgactactatgatacagaagcccatatctactcagaccttgactccaaagaagcgaacaaaattagcaagtcttttaaatcgctttccttggattgtcgtctaggcttaaaatgcaaatgcgttcgttcactatagcgattaatttaacgataattactcgttggtgtatatacaattcaatgaaacttttgattttagacatattatttaggattaggtgtatattgtataaagggtggtagaaaagctttggtgcttttgtgtaatccaatttcataccacgcttggtttcgaccatcgtatggattaattctctttggaattacttcttctttttgttttttagaattatgtcaggctttaacgagttaatcagggatcaagccgatgtttcgttcggttccatccagccctcgctgtcgtcttcgctatccgaatcctcggactcggataattcgatagccacacgtctggccaagattgaagccacatccaatggcgccgcgtttcgttcaatttccttttgctctgacttttcaactttacgtagagtaatacctggaaagattaatttgatgatatttttgcattcgaaccttgaatggcaattacttaccatctcgaatggccttcatcaagtcgttgcgtgggtcatggaatggaggcagcatcttcttgggtgcgacaatgtgaggcacaccattttgttggccgggctgctgcatttcgccattggccagtgatttgggaagaatttgatgcgggcgcagcgtgtgttggttgccactgcccatgccttcctcgactggaggcggtggcggcggcggtggtggcgcggcattaggtggcgacatcttaggcgagtgctgtaaggttttgccacaaattaaaccaaattgtgatatattaacacccatcagtgaacaacaaacctgatctggaaccggcggcggtggcggcaagtcgctaagggagttcagttgattgcccgtcataccgatgctgtggaaagtattgctcagttgcgtcatgaccatatcattggcattctggacgctgttgggagatccagctcccgacgaactgttcgcccggccaagcagtttggccgccatatgcccgctgttgactccgttcatgccagacattggtgaaatgacgtctggaactggtggaggcggtggcaaggcatcccgactggtcgacatacttctgccccttgtcggagtgttggcattggaggctgtgggcgtaccaccaccgctgccattcgatggcggagccggtggcggctgcgacggacgcggtttgttacgcgacggtgttcccggtccgtagatgggctccggcgacatcactccctgtccagtttggccgtacagcgcatgcgactgatacattccggcgtcatacatctgctgatgctgcatgtgcatctgctgggggccacccatgccgttgccgaaggtggcagcatactgattacccatctgcggtggaagctgctcgtaggtgctaccatcgatctgctccgactgatagcttcggttcaattcgatcgagttaggacgtggcggacgtgtatcgtacactcccatatctagaataatgaatgtgagatattagagccgttgactaaccacccattaaaatgaacgtttttacaggacacacatctcatttaaaaacacgccaattattttgtaattacagccgaggaacaataagacacatatgtaattacaagcaattccaaatttctgtgcatatgagaccgctggactcgaatagaaattttgttgaatatacaaacatccgattaaaagtctttgttagctcgttgcacagaaaacaatttagagatactttcgtagaataagatgtggcgacagaaaggaattagtaaagctgcagagtgacatgtagacgtagatatggaaattgactgaactacaacagaaagataggaggatcctaaacaaaaactgcggctcaatcacgaatcgcgagtatgaaatgaattaaagtattatgcaaaatgcaagatgcattgtaaatataatgtgcacacacattacattaaaattgcaagttagaaggtgactagtttacagtgttttgagataataaatctgcactttgcatgaccaatgaaactcataaatcatcgccattccgattgatagtttgaaaaagagagtgttctctgtacacacaaatgctaaaggaactcaaaaaggattgctagtaaggtaatatggggatagaagcgagtgaaagaacatatatagtctttactgagcttgctaaaagtggatgtggatgtctaacctgcaatcgcaacggcggtttgcttggtgacattactgttattctccaaatgcgaaagcatattataaggctttactgtatctgtaaatgagatggttatgcgcgattgatccattcgtaattgcaatgcatatttatgttcacgttcattaatatcataaccgaaaacaacgaaagagtagttcataaaaacaacatgcaaataaataaaagctgcgaaaaataatcgaccattcggagaatgaaattgtaaggttctctgaccgtattgtatttaccatcaacaagacgaacttcattggaacaaagtcagtgaattcaaattagagacaaatcaagttcgaaagtcttgctaacttacaggaggatgaactagactggccatagaccattttgctaatggtgtaataataatgaattagatcgaatatatcctgtatctgagattttaatcaaactttagatggaatttatgttaagtaccatttcatttattttttaagctctggaaactttgtttcggtcacctttctctgggtcatgattgtgtgggttaatttcaattaatagcaacttcaaaataatacaaattagtgatcttcgaactgggttttgaggcgcatcgaaaactagcgagcttttgagtgaagtaggtgaatgaatggcgggtacatctgtatcgtgggatgtctgccgggcggaaatgaaagctacgtggccccatcatcgtacctacgtcttggatattaccgacaacttggtggtgcgcatcgagagtgctatgccgcaaatcgatgtcagcctcgcccacagtctgtattttgactagctgaactacacgggcagacaggacataattgataattaaaatagatgtaccattcaataggcaagacaagtgcaaatagtcagtgcgcgaaacgaacgtaccaataacagcctatgaatttggttcgcactgaatacttggctcacacggagaccaatccctttcgccaagtacttacttccgtatccggcttcttcgttgaccatggaattcggtgtgcggtagatgacgttgttgggcatcaatgtttcgccgtgcaccagtgcacgttgtcgctgctgttcgcgcgtattgtgcggcacccttattttggtcttctgtttcttattgccacgtccagcagctccgccggcaccgccatcctgccgcggtctgttcagcttcttgcccttgtcgtgcatcacacgttcggtatccttcagcatctcctgtcgccacaactcaaagaagtagttcggatccgtgtagaacttaagaccatccttgccatcgtctcgatagacattaagcttgtcgaggggcggcggtttgtcgcactgggcatatgtgtccatcattggtgccggcatggtggcgcgcgagaagatctgttgatcaaaaaccttggccgacttgaaggccttctttcgggtaatgtccgtcaagggcacctcctcaactgtgctgtccagctgggtaactttgatagctaggcgatcgatgcgcgcctgcagggagttagctcgatccccgatgttgcccacgtcgcgggccagttcaccgaacacatcctctgcgtgcttggacagcgaggacagctggcgaatgatgttcgtcagcgtggtgttggtgaccgtctccagctccacggattgcagctcatcctgctgatacacggagcgggccacatgcacgggttctatggatcgtttgggcagcggcatggtcgggcgcgattgacaattatctccaaattggcaaacccgtaaattagtgcgtcctcatcgactgaaaacggcattaataagtaataaattgttttaatacgaattaatgcatttaaaattaattaaatataaaaccctttatttactgatttactacataatctcatgccaaattgggatcaataataaaaagatttctttttatgctgattatcaattgaagacatttcattccgataaaattgtacttcccaaattgtcgtttaactttgtttataaattttcccgtaaaagtagacgtttaaaaagttaattggatactatcaaaattggtttaaaagaaattttgtcatcactatactaaaccgtctatgaacaagactcagaatggtattgcagaagatttcacgagacgcttatccatgtatccatgagacgtgttcattacaatcaccaaaatgccatttgaattgttttgtgatatgcgcgactgacgaactcgacgtctggaccacaccccacgaaacgatacccacagcgaggtgataagggcgtaacgcccaagtcacccccgcaagatgcaccttgcagtcccggcgagattagtcgataatgccccccttttcggtggcagtttctgggtgctacgacctggggcctttacgtgggcacctattccatacgtgcatatacgtatatcgtcggcggcctcccaccaacgcaaattagaccgtcacgcactcacacacacgcatgaaccgcagcagcagcagcacccaagtaaatgtacatacatatgtgtgggacggaacggctgactctttcagattttcgcactgaaacattcgcactaaatcgcaacaatgcacacacaaaggtatctctcacactttctaatcgtagtggctgctgcgattttgattttggttttgaacggcgcagcttagttttacacagtccacctcactttacagcatatcgtacactcaccgcccgtcacacttttcgtttggcggctggcaccacaacaaacattaagcagccacttccgtttcgggggttcggtggcaaattcgatccgatgcgaactctaattagccaatttggggcttgaaaactgcaaatatttgctcgttttgtggaaactaagatttccacacctttgcagtgtgaccgaagctttgtggttcgaaaatactgcagggattcatcatttcggaaaatcagacaaatatactgcacgatgcggtggggaaaaagttatttttatattaaatgtaatatgtattttaattactatatttaaataaattttgcaagggaattttcagtaactcatttcatattgtttatttactgtatagaatgaaatattttaaatataaatatatattcaatttattttattttattttaactctatattatccataataagctattttattaacgttatttaaaattactgtttgcagtttcttccattaactttagaaatgtatatttggtatttttggtatttatccgccgatcgataactagtgctccagccctggccccaatgcataacatctctgtttcgtcgcacactgaataggtaagttttccgcacatttcgttgatttcctcttgtataattccaactgcttgcagaaccaaattgaaaagatggcgagtttggctaccaagggatcaggacttgtgaacagtgagtgtcgtgaatcgaatgcaatcgaatggatacaccaccattggcgcctgtcaatcgcaaaattatgtaatgatcactttttgcagggctcctcacacaggcgaggccccaactggacgtgttcctgaagtacgccaaggtggaactgacgcccccgacgcccgccgatattccggccattcgccaaggactgggcaacatcatcaagggagccaagaccggcgcctacaagaacctcacggttcgcgaggcctggcttaacaccctggtgaccgccgaggtcatcttctggttctacatcggcgagtgcatcggcaagcgtcacattgtaggctacaatgtctaagcttactatagtctccgcttggcagtcactggaatgggcaacgtaatccctaacagatgtgtatatttatatgtctgcgaacatttcgactctgaataaagtgaaatagtaatttaaaattc

SEQ ID NO: 9272 - DNA, 2031 bp, DROSOPHILA
cttcggtcacactgcaaaggtgtggaaatcttagtttccacaaaacgagcaaatatttgcagttttcaagccccaaattggctaattagagttcgcatcggatcgaatttgccaccgaacccccgaaacggaagtggctgcttaatgtttgttgtggtgccagccgccaaacgaaaagtgtgacgggcgatgccgctgcccaaacgatccatagaacccgtgcatgtggcccgctccgtgtatcagcaggatgagctgcaatccgtggagctggagacggtcaccaacaccacgctgacgaacatcattcgccagctgtcctcgctgtccaagcacgcagaggatgtgttcggtgaactggcccgcgacgtgggcaacatcggggatcgagctaactccctgcaggcgcgcatcgatcgcctagctatcaaagttacccagctggacagcacagttgaggaggtgcccttgacggacattacccgaaagaaggccttcaagtcggccaaggtttttgatcaacagatcttctcgcgcgccaccatgccggcaccaatgatggacacatatgcccagtgcgacaaaccgccgcccctcgacaagcttaatgtctatcgagacgatggcaaggatggtcttaagttctacacggatccgaactacttctttgagttgtggcgacaggagatgctgaaggataccgaacgtgtgatgcacgacaagggcaagaagctgaacagaccgcggcaggatggcggtgccggcggagctgctggacgtggcaataagaaacagaagaccaaaataagggtgccgcacaatacgcgcgaacagcagcgacaacgtgcactggtgcacggcgaaacattgatgcccaacaacgtcatctaccgcacaccgaattccatggtcaacgaagaagccggatacggaaatatgggagtgtacgatacacgtccgccacgtcctaactcgatcgaattgaaccgaagctatcagtcggagcagatcgatggtagcacctacgagcagcttccaccgcagatgggtaatcagtatgctgccaccttcggcaacggcatgggtggcccccagcagatgcacatgcagcatcagcagatgtatgacgccggaatgtatcagtcgcatgcgctgtacggccaaactggacagggagtgatgtcgccggagcccatctacggaccgggaacaccgtcgcgtaacaaaccgcgtccgtcgcagccgccaccggctccgccatcgaatggcagcggtggtggtacgcccacagcctccaatgccaacactccgacaaggggcagaagtatgtcgaccagtcgggatgccttgccaccgcctccaccagttccagacgtcatttcaccaatgtctggcatgaacggagtcaacagcgggcatatggcggccaaactgcttggccgggcgaacagttcgtcgggagctggatctcccaacagcgtccagaatgccaatgatatggtcatgacgcaactgagcaatactttccacagcatcggtatgacgggcaatcaactgaactcccttagcgacttgccgccaccgccgccggttccagatcagcactcgcctaagatgtcgccacctaatgccgcgccaccaccgccgccgccaccgcctccagtcgaggaaggcatgggcagtggcaaccaacacacgctgcgcccgcatcaaattcttcccaaatcactggccaatggcgaaatgcagcagcccggccaacaaaatggtgtgcctcacattgtcgcacccaagaagatgctgcctccattccatgacccacgcaacgacttgatgaaggccattcgagatggtattactctacgtaaagttgaaaagtcagagcaaaaggaaattgaacgaaacgcggcgccattggatgtggcttcaatcttggccagacgtgtggctatcgaattatccgagtccgaggattcggatagcgaagacgacagcgagggctggatggaaccgaacgaaacatcggcttga

SEQ ID NO: 9273 - protein, 613 aa, DROSOPHILA
MPLPKRSIEPVHVARSVYQQDELQSVELETVTNTTLTNIIRQLSSLSKHAEDVFGELARDVGNIGDRANSLQARIDRLAIKVTQLDSTVEEVPLTDITRKKAFKSAKVFDQQIFSRATMPAPMMDTYAQCDKPPPLDKLNVYRDDGKDGLKFYTDPNYFFELWRQEMLKDTERVMHDKGKKLNRPRQDGGAGGAAGRGNKKQKTKIRVPHNTREQQRQRALVHGETLMPNNVIYRTPNSMVNEEAGYGNMGVYDTRPPRPNSIELNRSYQSEQIDGSTYEQLPPQMGNQYAATFGNGMGGPQQMHMQHQQMYDAGMYQSHALYGQTGQGVMSPEPIYGPGTPSRNKPRPSQPPPAPPSNGSGGGTPTASNANTPTRGRSMSTSRDALPPPPPVPDVISPMSGMNGVNSGHMAAKLLGRANSSSGAGSPNSVQNANDMVMTQLSNTFHSIGMTGNQLNSLSDLPPPPPVPDQHSPKMSPPNAAPPPPPPPPPVEEGMGSGNQHTLRPHQILPKSLANGEMQQPGQQNGVPHIVAPKKMLPPFHDPRNDLMKAIRDGITLRKVEKSEQKEIERNAAPLDVASILARRVAIELSESEDSDSEDDSEGWMEPNETSA

SEQ ID NO: 9274 - DNA, 3071 bp, DROSOPHILA
acttcacccaaattattagcgtaaagttcaagcaaagcggaattaaaaatgaattgcataaaagggaacggcgaatgcgggaaatcttttcccccaatcgcaaaactccaaccgccatgctcaataattgctagaccagcgtaaaattttgcgctgacttcattaaaaaataacacaaaaaaatgtctaacaaaaaaagaataggaaataaaattgcaagcaaaatgaatgagtctgggccacagagtgtagagcaggaatggcatcgattgagttcaattggcgggcatcggatggcggggaggcaattgtaaaatggtcagaccatgagctaagccaataatcaagggtctggagttggggaccaccagtgtctggcaggtgggcgggggttcggttcagttggtggttgttcagggggcggggccgggctttgcggtccgggaggcggcagctaatttattacgagcatttaacaagcatactcctggggtctctcacgagtccgctttgatttattaggtgtttggtgaaaaaaagcaaggcaacgaaatgaaaagtacaagaggacgagcacgagcaggccgaatcgaggaaccaggaagaaggaacatggcacaaggaccaaggaaccgaccggatgggcaggctgcaaaattccgaaacactaatgtgaatgtaatttgtagttaatgtgctgtcggttggcatgtgggcgggcacctcggctattcaggcattttaattgttcaaacaaaatcgggattttccggaagtttcggtggccttcctacttttcgcagtaccacctccgtcaaaatggacgctttcatttatgcaggctaacggtaagaagattgcggcattttcatcgaaattttttgctattagatgtaattctgtattatttttttaaattcttaaagtaagagccacattttagattgatcagtttagtaattgtacttttttttattaatacttaatatgctgcaaaagcttaaacaaaataatgttcctcttctgaattagctttcaatgtggtattttccacatcgaaattattttgcagatcccatgttttgggagatttttcaccgttgcggtactgtcgccatactgaaagaataaaatcggtgtgactcaggacatccgtataaacgcttgcccttttacatttttggttagtggttgctatgccaattaggacatagcgctgaatattcttgaaggttataatggctcccagaggactgctaaagtcaacattgcacagtttggaatccgagtctccagcacaaaactgactgctcaaaattgcagtgccgtttagggtagaacacatatttgctggttgacgtctgatgtctgtaattctaaatgcatcgctttcatttcgatcattgggtagaccccattgagcaccgcttagcacctgtatgttgtcgatatattttctccaaatggtccaccacactatgcaaattggtctaatggtttctacggagagaacaaattcgatttaagcaaattcaatattcttcgcattattaatagtgttaaaaaaaaaaggaaatacaagtaaacttactcgaaaacacaatatccgtagccaagccgagaatagctatgtcattggcgcttgtggtcgtattgtataaggaatgtataaaggtttggcttacttggtactctgataacatcgtgtcattagcatcatccgttcctataaactctccaattcgagctactctgtaagcatatatattaaaagaaatttattgttggtaaatatttcagatcacgtgcaattgttcgctggcccttgtgcaatgcgctgcagtcagaactaattctgtaatgtaaatcaaaatgtaactggaatcaaagaagtagattgcattgacgaactttcagttatcacagttccgccgcacacatatagcaattccgaagtatgtagataagccatccacggactcgagatattattcgcaatcttcccattcgtcagaagtccgcaccttccgtcgagatactgtgatgatcccgggacggggagcagaaacagcagtgctgagattccaattacaactgaatccattacgctactgcgtatcaatcggtaaagcatttctttttaataggctcgacaatcgggcttatcaggctgtttattccgagaattttgagtcattattatatcagtataatgcattgcaattgaacttgatcattgaacataatcattagcaccgttgctcatatcttaaaatcactaaatattgaataaaatgaattaattttcttgataaattagaaagatgtttccctttggcgcaattacattaacacaataataactcattggatattatttcttttaattaggatgtttccttgtcttctcactgattaacttcaaggcacaccagtcaccacatttattgctgctttttctcattgcgttttttgtttcaaattttttgcagctgcccaatgttaaatgttaaattttcattgtcgaattccttcttcctttattgttcaacagcgacggcgttcgcatcacaagcttttccatcggcggccattaaaggtcataaatcacaacatagcatagaaataaatcaaccctttattatcaacacatcgcaatgtttgttatcgaaagggttatttatagttctcctgggagcgaagggccaaagaatcggcccgagccagccggaatttgtgaatatatttaccggaattaactacggctaacagattgagttcaaggttgaaattcgctgaccgaattgcctacttatcggtgtgtgtatgtgttgtctgcttttttctgtgttctggcaagctcattaagcaaatcgcattatttgcttatacgaatttaagtatctttccagtgcactaagcacacagaacgctctgacagccccacaaggagcttcatttgccggcaattgaaagcctgaaaagacacactggggaggagcaagagctgcacatagaaaatgaatacatcattagctgcataaaatgtccttgccaactcaaacgtactg

SEQ ID NO: 9275 - DNA, 873 bp, DROSOPHILA
ctgtttctgctccccgtcccgggatcatcacagtatctcgacggaaggtgcggacttctgacgaatgggaagattgcgaataatatctcgagtccgtggatggcttatctacatacttcggaattgctatatgtgtgcggcggaactgtgataactgaaagttcaattagttctgactgcagcgcattgcacaagggccagcgaacaattgcactagctcgaattggagagtttataggaacggatgatgctaatgacacgatgttatcagagtaccaagtaagccaaacctttatacattccttatacaatacgaccacaagcgccaatgacatagctattctcggcttggctacggatattgtgttttcgaaaaccattagaccaatttgcatagtgtggtggaccatttggagaaaatatatcgacaacatacaggtgctaagcggtgctcaatggggtctacccaatgatcgaaatgaaagcgatgcatttagaattacagacatcagacgtcaaccagcaaatatgtgttctaccctaaacggcactgcaattttgagcagtcagttttgtgctggagactcggattccaaactgtgcaatgttgactttagcagtcctctgggagccattataaccttcaagaatattcagcgctatgtcctaattggcatagcaaccactaaccaaaaatgtaaaagggcaagcgtttatacggatgtcctgagtcacaccgattttattctttcagtatggcgacagtaccgcaacggtgaaaaatctcccaaaacatgggatctgcaaaataatttcgatgtggaaaataccacattgaaagctaattcagaagaggaacattattttgtttaa

SEQ ID NO: 9276 - protein, 257 aa, DROSOPHILA
MAYLHTSELLYVCGGTVITESSISSDCSALHKGQRTIALARIGEFIGTDDANDTMLSEYQVSQTFIHSLYNTTTSANDIAILGLATDIVFSKTIRPICIVWWTIWRKYIDNIQVLSGAQWGLPNDRNESDAFRITDIRRQPANMCSTLNGTAILSSQFCAGDSDSKLCNVDFSSPLGAIITFKNIQRYVLIGIATTNQKCKRASVYTDVLSHTDFILSVWRQYRNGEKSPKTWDLQNNFDVENTTLKANSEEEHYFV

SEQ ID NO: 9277 - DNA, 4391 bp, DROSOPHILA
caagtgaatcgaaaagggaaaaaacgggaaaaaagactgaaaaacctcaaccggtaatgagatctgaattagaaagtgaactagaatcagaatctgaaatggaaaaaaagaagcgaaaaaataagacctttggtcggcagtctgtattcctcaatgatgaacttgccctagcttatgccaagtcctatgattatgcggaatatctgatgaaaactttgggtcgacatcgatttagggatagctatataggtcccgtgggagatttgagaacaacacgtactcacattcttataagagacttgatcgccagaaaaggaatgaatataaatgaaaaaaatttgaggaaagccttaaaaaaggttgatctcgagtggaaaggaacgacacgggcagattacaaacgtgaaatgaaaaccgcccaggagatttcccggctttacaatgtcattgttcagacaccgtcagatgaaccaattccttggagaattataggtaaggtcagggagaactatccaaaggttccaaaagcctccaagtcgcccagaaaatacttggccgaccaagacgcaatggttttccacgaaccttttgatcataaaaagaactggacctggcaacggcgacaatcaaaacgtactattcgaaattccaattacaaattctcaaccacaaggatcaagccatatataagcagatccatgaagcaagaaatagagccgctcaaggatgaggcttcaattcattcgtcattgagtgatagggcaagattgcagaaacgagagtcttaagatcccatgttaggtttttttcaaaatgtatttccatttatattaaactaaatgggcttattgtaaaaggtttttttttttagtatctcagcatgcttcgaaaattacagcacagaaatcattcaaaattttagtctggaactggcggcaatcacaaaatttgtactttcgtaaatacctggttttcggaacgccaagacggtcaggccaaaatgaattcctgctgctgtagatcgcatagcgatcgcacgaacccgatggcctgtcttcctcagtttccacgtctgcagcgtgtccaaagttgtcggccatttttggagggacgaaaggcagccagctgttgtgtttcgggcgagaggcgatggggtcagagaaacggttgtatgatccaggtgctggccaagatggtcaataagtcgtccagtacggtctgccaatttctacaccaattgacactgcaggtctttgcgagaattctatatcctttgatgttaggctggaatacgctgaaggtaccgtttgttatacccgacatctgtgagctatactacgggatattcgacgaatgtggtaacataaggggttccataccaacaaggacgttgctcatcctcatatccatgatccagtattttctcaatctaccgaagagatgtggacaaaatagcgcttgttcgggatgcagaagccagacggatgatttgaggaacattcacagtcccggttattgtggcaaaaatgccatgacgccattctcgggacgggggattacggaaaaaggaccatcgaagggaagtgatgtgtgggcgggacttaagcgattgggatacgaaagacgtggcgatctagatagttatccctcggatgagtctataccatatggctatgcaccccatcgatgtccttgccaggccggaagtcccagaatccagagatccggaattttgaacccgtatgcaaataggcctggggccatgagatcgttggtctgcgcagaggaactggaaagttccatgttagattccgactataatcagcaaattccaatggcacccatttcaccaaaagcagctcaaattattcacattaatcacatctcgaatctatatgctgcagtcgtacaaaaccaacatacaagacaattatttgctgatggaaggccaccaaggccgcgggtaagaccctgtactgagaaccaaaacagattctccggtggtttcatgatgcccgaaccatatttcaatggtatgccatggagttggctgcacagagatcctcagagaatgatacgtctaccaagtggtggtcttcctttggaaataccgcgttacagacgacaacctttggatgaagagtaccacagttttaaaagtaaatatgaacacttgagcagacgggataaccccttcaaaggaagtagtctattgcctttagacacttacccatctgagaatagatttaaccaaggaaataggttgcaatctataagttgggagaaaaaaatactggatcatcaaaatcagcctacaaaaaatatttccaataatctaataatcccaattaaacaacaaagaaaacttgagtgggagcagctctttataaaaagaattaatgatgcaaagaaaactaagggaacttttgatttctggaatgagatgatagagagaaataagttcaaagcatttcagcaagcaataaaggacaccaaaccagtattcccttcaaaagagattgggtattctcaatcaaggaaagatagtgcccacattataacgaagagaagcaataattccttgcgatcggcgaggcaaaaccaaaagaaattggaaatcgaaaaacctgaaatttcgaaaaggtcaaataataatcgaactcatgtttcagcacaacatcgagtgaaacaactttgtagtagccaagaaaagcagactttaaaaaatcaaattcaacaagatacctataaaattaaatctgtaaataacactccgcatttggcaaagaatgaaataattcctcaaccaaaatatcctgatcccgaagattatagaaaagaacgggctagaaatctaaaatttaatagaaaaactgccggagaatccgtaatgctaataaagcctgcaaaaagtatcataaagaagcctaaagagactcagttaaaggacgtaagccaggatgagttggaaagtttaaagaaacaattagagatgaatacaaataataaaagggtacgatttagtgtacccacaccttacagcaatgaaagagtgatgccagcagaaaaatatgttcttcttgaagctggagatcagatacctaagcacttcagtaagcttcatagtcaagataaaagtgctacaaaaagtgtatttagccgaagatcgggaaagtcaccggaacgaggttttaggaaaaaacgattgcattcagaagatggtaccgaactgcccacatatagtaaacgagcagcgatgggttctcaaaataaatattatggaaataccaaagcaaagccaaacaaaccacacggtaaaagttgtaaaatcatgcccaaagtattgtattccagagaggaaacactgaagaaattgagttatttgttatgattgcagcgttatttaatatatatatatctatcggattgatgttatatccaatattcacctgaataatctaaaatccatatggtatatatttgttactaagcttaacccgagattgtatagagataccacgcctgaccgcctattaaattttcgtttgaaaagtgtacttgtttaactgaaactattcaaactctcgcctagtttatgagcaaaaaggtaaatattccctagcattgattaaaagccgcaacactgcagcacacttgtggtaaagttggtttcgcttttccgcatttcatttgggcctagaacatcgataatgataacgatgatgatgcggccaaatgcctggccgctgaaaaggatttcctttaaaccatgctactaatcgaaacttaccttattcctctagagttgagttggctgaaaatctcgagtgttcttgtgttttgaggcattcagctttcagttcgttttggttgcttttactgtactttgggggccataacgtctaccacccccttaatttctgttatatatgtatgcgtgtactgaagagctgaaggccttgagccaaaaggcaaatgttttgtgggaagagcgcaattttccgctaaagccgagaatcgtattggtaacaagtgcctctcactttattggcccctgggtgggcctatcaaatttggctgtttgagtagccgggttttaggaacaaaccgattagatattcatgcgagattttagtaacaggacagccctactgctctgcataaattttaaataaattgtacaaaattagcagctggaatatggtttacagagtgagtaactcagcttaattggaaaattggtgtacataatttgtgggttcactttaataactatatagcaagaaaaaagatgtgaaaggaatactttgaatttaatttatgctaaagaaccaatataaaccagctgcagtaccaaatttcatcatcatagctccgccggaggccaagtt

SEQ ID NO: 9278 - DNA, 2391 bp, DROSOPHILA
atgaattcctgctgctgtagatcgcatagcgatcgcacgaacccgatggcctgtcttcctcagtttccacgtctgcagcgtgtccaaagttgtcggccatttttggagggacgaaaggcagccagctgttgtgtttcgggcgagaggcgatggggtcagagaaacggttgtatgatccaggtgctggccaagatggtcaataagtcgtccagtacggtctgccaatttctacaccaattgacactgcaggtctttgcgagaattctatatcctttgatgttaggctggaatacgctgaaggtaccgtttgttatacccgacatctgtgagctatactacgggatattcgacgaatgtggtaacataaggggttccataccaacaaggacgttgctcatcctcatatccatgatccagtattttctcaatctaccgaagagatgtggacaaaatagcgcttgttcgggatgcagaagccagacggatgatttgaggaacattcacagtcccggttattgtggcaaaaatgccatgacgccattctcgggacgggggattacggaaaaaggaccatcgaagggaagtgatgtgtgggcgggacttaagcgattgggatacgaaagacgtggcgatctagatagttatccctcggatgagtctataccatatggctatgcaccccatcgatgtccttgccaggccggaagtcccagaatccagagatccggaattttgaacccgtatgcaaataggcctggggccatgagatcgttggtctgcgcagaggaactggaaagttccatgttagattccgactataatcagcaaattccaatggcacccatttcaccaaaagcagctcaaattattcacattaatcacatctcgaatctatatgctgcagtcgtacaaaaccaacatacaagacaattatttgctgatggaaggccaccaaggccgcgggtaagaccctgtactgagaaccaaaacagattctccggtggtttcatgatgcccgaaccatatttcaatggtatgccatggagttggctgcacagagatcctcagagaatgatacgtctaccaagtggtggtcttcctttggaaataccgcgttacagacgacaacctttggatgaagagtaccacagttttaaaagtaaatatgaacacttgagcagacgggataaccccttcaaaggaagtagtctattgcctttagacacttacccatctgagaatagatttaaccaaggaaataggttgcaatctataagttgggagaaaaaaatactggatcatcaaaatcagcctacaaaaaatatttccaataatctaataatcccaattaaacaacaaagaaaacttgagtgggagcagctctttataaaaagaattaatgatgcaaagaaaactaagggaacttttgatttctggaatgagatgatagagagaaataagttcaaagcatttcagcaagcaataaaggacaccaaaccagtattcccttcaaaagagattgggtattctcaatcaaggaaagatagtgcccacattataacgaagagaagcaataattccttgcgatcggcgaggcaaaaccaaaagaaattggaaatcgaaaaacctgaaatttcgaaaaggtcaaataataatcgaactcatgtttcagcacaacatcgagtgaaacaactttgtagtagccaagaaaagcagactttaaaaaatcaaattcaacaagatacctataaaattaaatctgtaaataacactccgcatttggcaaagaatgaaataattcctcaaccaaaatatcctgatcccgaagattatagaaaagaacgggctagaaatctaaaatttaatagaaaaactgccggagaatccgtaatgctaataaagcctgcaaaaagtatcataaagaagcctaaagagactcagttaaaggacgtaagccaggatgagttggaaagtttaaagaaacaattagagatgaatacaaataataaaagggtacgatttagtgtacccacaccttacagcaatgaaagagtgatgccagcagaaaaatatgttcttcttgaagctggagatcagatacctaagcacttcagtaagcttcatagtcaagataaaagtgctacaaaaagtgtatttagccgaagatcgggaaagtcaccggaacgaggttttaggaaaaaacgattgcattcagaagatggtaccgaactgcccacatatagtaaacgagcagcgatgggttctcaaaataaatattatggaaataccaaagcaaagccaaacaaaccacacggtaaaagttgtaaaatcatgcccaaagtattgtattccagagaggaaacactgaagaaattgagttatttgttatga

SEQ ID NO: 9279 - protein, 796 aa, DROSOPHILA
MNSCCCRSHSDRTNPMACLPQFPRLQRVQSCRPFLEGRKAASCCVSGERRWGQRNGCMIQVLAKMVNKSSSTVCQFLHQLTLQVFARILYPLMLGWNTLKVPFVIPDICELYYGIFDECGNIRGSIPTRTLLILISMIQYFLNLPKRCGQNSACSGCRSQTDDLRNIHSPGYCGKNAMTPFSGRGITEKGPSKGSDVWAGLKRLGYERRGDLDSYPSDESIPYGYAPHRCPCQAGSPRIQRSGILNPYANRPGAMRSLVCAEELESSMLDSDYNQQIPMAPISPKAAQIIHINHISNLYAAVVQNQHTRQLFADGRPPRPRVRPCTENQNRFSGGFMMPEPYFNGMPWSWLHRDPQRMIRLPSGGLPLEIPRYRRQPLDEEYHSFKSKYEHLSRRDNPFKGSSLLPLDTYPSENRFNQGNRLQSISWEKKILDHQNQPTKNISNNLIIPIKQQRKLEWEQLFIKRINDAKKTKGTFDFWNEMIERNKFKAFQQAIKDTKPVFPSKEIGYSQSRKDSAHIITKRSNNSLRSARQNQKKLEIEKPEISKRSNNNRTHVSAQHRVKQLCSSQEKQTLKNQIQQDTYKIKSVNNTPHLAKNEIIPQPKYPDPEDYRKERARNLKFNRKTAGESVMLIKPAKSIIKKPKETQLKDVSQDELESLKKQLEMNTNNKRVRFSVPTPYSNERVMPAEKYVLLEAGDQIPKHFSKLHSQDKSATKSVFSRRSGKSPERGFRKKRLHSEDGTELPTYSKRAAMGSQNKYYGNTKAKPNKPHGKSCKIMPKVLYSREETLKKLSYLL

SEQ ID NO: 9280 - DNA, 2321 bp, DROSOPHILA
acttcaatataaatattaactattgtaaaaatggttcgtgtgggccttcagatttccgccacgctggagaacgtggacaagctggagacgtctcatccggactactccttcttcttgaagctgaagtgcagcaactgcggcgagcagtcggacaagtggcacgatatcacggaatccgaacgtgtgcaacaggattcgcgcaatgcggccggctttaacttcttcatgaagtgcaagatgtgcagccgggagaacagcatcgacatcgtcgacaagtcgaatggtaggctggctttgagtaacgtatccccaccaaactactgagtgcatccatccacacagctccctacacggcggacgattctggcgcatttaagaccatcgtggtcttcgagtgccgcggcgcagagcccgtcgaattctcgccgcgcgtcggttggcgcgtctcatccgctgaaaatggccagcagttcgaggaggtggacctgtccgaggacgactgggtggagtacgaccagaagaacaacaactctgtgggcatttatgaattcgcctcgaagttcattaagctgaagaagtgaatcctgctgcactttacctaggattttcttgatattaggctaacgcctcaaactgataaatgtacactacacggcacccgaaaacaaatatcctttaagcatataaaggcatttcgaattgttttgttaactataaatcaccattgtcaagtaattcttccaaaatgcttttctaattcacccctcctgctcttaaacaatacagaagtgttctagatatatttaaaactttatttgtgatcatcatgcgattctcttagccgctctcccaaactctctcgatatcgattttcatgtgccggctactttgaattgagattgagcacgaagatattagcactctctcaattgtttttgcctctctgtgtgcgtttgcacttgatttcttaatacaatgcagtatttcgccagactgcgagcgaaacggaccggatacgggaatccaaagcgaattgccggacccggatatcgttgcaaaaggcgcgtaatatttggtgaatggtgaccctttgaaaccacctacgtacacctgccaagtgctcagccagtgcgtctccggtaattattcggtctgccgagcgagtgtcgccagtcagaggcactaggcttcgtactatgacccactacctctgctacttttcgggacactatcgctcgtggctggactcctctcgctgttactgccggaaaccttcaaccgaaaactaccggatacggcaagttataactcggagtattagaatccccgtgctaaacattcctatcttcacaggtggaagaggcgattgcattgggaaagtgattcattcttgtttggatggacatatttgccaccgatcagcaatatacacatatatttatataaagcgatgtagctgaccttaaaaaatactcgttataaagtattgtatacaaaaagatggcatgattttctaattcagatattaacaaatgggtatctctggtataacaatcgcctaaatgtatattcaatttccaaagagaccctcaaacaactggcgatcgctgacatgaccgaagcgattaaggagtttgtagcgccttttggaatcgctgcgcaagcaaatgggcgaaacgaatctgagtcgagacggacttccctgctcccagctcggcagcagatcctcggtttcaatgagtgtctcctgtcgccgtccccagaagtctacgtaggccagcttgagcagatcctgttcctcgttcacgtagatgaagcccacgagatttgaggacgcgtagctggctagtgtgagggtgatcaggccagtgactccaatggcggcatagatggccagtgcatccgtgctgagttgcccggcgctgcccagggcgaagacaatgggcgttccggcggccgtgatgacagcctggtagactttcaacctacttaatgcggccacgagccgtatgcccggcatactatagacggtgcgccattcagtgaatgcagatttttcggtttccgttctttttccggcagcctctgttgcaaagcggcgtctctgtgccggctgaatggctagggacatgcagcttctccatggcaatcttgcaggactgacccggcacagcagctccagcactaaaataaatcaattgtgtttttattttataaacattatgtatatttagatgcgtgttcaactcacttgcattgatttgtgggtgtgtttactcggggtaatttgatcaaagtgtaaggttttggtaatattactt

SEQ ID NO: 9281 - DNA, 2030 bp, DROSOPHILA
cgaaacggaccggatacgggaatccaaagcgaattgccggacccggatatcgttgcaaaaggcgcgtaatatttggtgaatggtgaccctttgaaaccacctacgtacacctgccaagtgctcagccagtgcgtctccggtaattattcggtctgccgagcgagtgtcgccagtcagaggcactaggcatttctatttctgatctggtgcccaccttctatatatgtatacaccttcgaaaacacgtgataaacattagaatgccttataattacctatggtaatcgcaggtgaagtgccctaaaactgagagtctgtgggtttaaacccacattaacttcagaatgtcagctccagcggcaggtgcggcgtctgccgtcctggactttgacgacatcctggtcgagatcggagaattcggacgctttcagcggcggaactatctgctcatatgcttgcccgtactttttgctgccgccaatagcctgtcgtatgttttcacggcaggatcgccgacctatcgatgctacgtgcccgagtgcgataagctggttgatgcggaatatggagcgaattgggtgtcgattgccgtgcccggaagctggagcaagcggggccattttacgccgtccacctgcgaaaggttcgtggcgaacggtgaccatcttgagtcctcatcggatccttggagtgcgtggcctttggatcagtgctttgctgagaatttcacgacggaaacggagcgatgcaatcagtttgtgtacggcagttcggaacggaccattgtgcagcagtggggactacaatgccccgagaatctctggaagctggcattcgtgggcactatacactttgctggtctggttgtgggaacagctctatccggctacctcgccgatcgatatggacgcaagcacattttcctcttctgcatcgtgttcatggcgttgacgggagtggcgcaggcgctgtcctgggactacataagtttcctgttctttgccttgctgaatgcagtgggcacttccggtgtctatccgctggctttcatcattggggtggaaatggtcgggccgcggaaacgcgaaatgtcctccattgtgctcaactacttctatgccgtgggcgaggcactcctgggcctgtccgttttcctgcccgactggcggcaattgcaactggcgctctctgtaccgccgctcatctgcgtggcctacttttggctggtaccggagtccgtccggtggctgctggctcgtaaccggcgggagcaagcgggagtcatcatccggcgggccgcaaaggttaacaggcgagacatctccgtcgagctgatggccagcttcaagcaacaggagcttgatgcagaaacgggccaagaggatgatgtcgagggtggcctgcacgtaaagaaggatgacaagatctggttggccgtcaaggaggtggcgcgctctcacattttgatgggcagatacgccatattgctgctgatttgggccgtcaatgccatcgtctactatggactctcgctcaacgccaccagtttgagtggcaacaagtacctaaacttcgccctggtttgcctcgtagagatacccggctacagcctcgcatggctgttcctgcggagatttggacgacgtgtggcactttctggctccttgctgctctgctctatcacgtgtgtggccagcggattcgttacactaggtgccaactggctggttgtgacgctctttctggtcggaaaactgggcatcacctcctcctttgcagtcatctacacgttcacagcggaaatgatgcccacggtcattaggagcggcggcgttggtgtgatgtccacatttgcccgcttcggtgcaatgctggctccatttgtgcccctattggcttcgtactatgacccactacctctgctacttttcgggacactatcgctcgtggctggactcctctcgctgttactgccggaaaccttcaaccgaaaactaccggatacggcaagttataactcggagtattag

SEQ ID NO: 9282 - protein, 561 aa, DROSOPHILA
MSAPAAGAASAVLDFDDILVEIGEFGRFQRRNYLLICLPVLFAAANSLSYVFTAGSPTYRCYVPECDKLVDAEYGANWVSIAVPGSWSKRGHFTPSTCERFVANGDHLESSSDPWSAWPLDQCFAENFTTETERCNQFVYGSSERTIVQQWGLQCPENLWKLAFVGTIHFAGLVVGTALSGYLADRYGRKHIFLFCIVFMALTGVAQALSWDYISFLFFALLNAVGTSGVYPLAFIIGVEMVGPRKREMSSIVLNYFYAVGEALLGLSVFLPDWRQLQLALSVPPLICVAYFWLVPESVRWLLARNRREQAGVIIRRAAKVNRRDISVELMASFKQQELDAETGQEDDVEGGLHVKKDDKIWLAVKEVARSHILMGRYAILLLIWAVNAIVYYGLSLNATSLSGNKYLNFALVCLVEIPGYSLAWLFLRRFGRRVALSGSLLLCSITCVASGFVTLGANWLVVTLFLVGKLGITSSFAVIYTFTAEMMPTVIRSGGVGVMSTFARFGAMLAPFVPLLASYYDPLPLLLFGTLSLVAGLLSLLLPETFNRKLPDTASYNSEY

SEQ ID NO: 9283 - DNA, 4073 bp, DROSOPHILA
ccaaattaaaaaaaatcaggtttcctaattcctcctcctccttttgtttttgaacacaggcaagaatgcttcggatcgcccttcttcaacgcctgcatagaggctcttcagctgcacgaggagatggacaagtataacgaatggcgcgataccctgggtcgcaagtaaagtgcgattctctgggattttctggcaccgtcactggcacgagcagctacttaattctatgaactattaactaaaactattattattgataactgtggcagaacacggcacgaaactatggcaaccaggaaacgatcgacccgaggaatgtgtaccacttgaagaaacaactaagctaacatctagctacaagagaaagcagagcaaaaatgttgaaaaaaaaattatgaagacaattactaaactattacacgctacttatccgcacttatatcggaaagtctaaattggtctatatgttatttctatcatctgtcatgaaacagtctcgtggagcttttagttgtagtgaattacgtaaattatgcttatttcttttagttcttcgcgcagaaggaaagcaaaaagttatgccaagaatcaaatatgagaagaaacaaacaaaaaaaaaacaagcaaacaaaaaaacgaacgaacaaacgaacaagaatcaaaatgtctgatgtatataactatttttgtcttcttttaaagatttctatacatatttataacgcctaactgatttgtacatttcttttatttcgtaagcttaagttaatttgttacggcaataaattttacgttccacaccttcccacacatgctctcctgcaatagaacggaaatcacatctgagcaacaccacacggcataattcgattcgattctatgtagtattgcaatgccttacaattacataacttttaattaatttaaacttgtttggatctagtcgtaaaatataaataaagattgtatatttcaagaggaatcgacagcgaatttgattgcggtgcaaaactttattcaacgtacgataatatttcagtattaataattcacaagtgcaagcattttcgattcgattggactacagatagatcatggatcttgtgatggaatcagcccaggagaacatctcacttgagatgaatgaaatgccaagtgtcgactgcaattacaaaggacgtaaattggtataaaaagggtttatttcaggataacattcagtataaagtatatgtacaacgattaacgaacgcaagcaagccaattacataaattgggtttcagcagtatttacagcatggagtaatctcaatttagcttgctaactggacaattaaagtagctattagtaagcgtgcaggttgtgtttgtgtaaccaatttgtttgcaagttactggtggttaaagcgtgtgttggagtagtgtgtttttggttgggatcgggtgaagcagctataagttcgatctaatatagtgaaccttacctgtatcagacacctcctcgacctggccgccatcgggggcctcggccagtatcttctcggcctcctccttgggaatgacgtgctccgagttgcggttggtgatgttggtgctgcgaaacggacgtacttaggattaattgtaaatgtataaaatggcatttaacccacgtggagatggacccggatgcggggctctggtgcaccaagttctgccagaacttgtgggtctcggcaatgatggtgttggcaaagtccgcattcttggcatcgccgttgaaagcaaactgattctcaggcttgccatcggggatcttgtagatctgcgaaatgcaaagggtaagagagggaatcgtccgaaaatcgaattccacccaccttgaaccactcaacggtggcacgaagcagacccgggaagtactggtccacatcggcgatatcattgactttcgaggccaacggatcgttcacatcgatggcgattatcttccagtcggtttcgccctcgtcaatcaaggcaatggtgcccagcaccttgaccttcagcacgtcgccgcgcttagccactcggtagccaatctcgatgacatcgatgggatcgttgtcacccttgcagccggtggagggctcgatgtggtcggggttttcccaggtctggggcagggctccgtagttccagatgtagcccttgtgcgggaagcagttggccacgaaccgcagcttacccttcttgatgtcctgcttgatgggattcataggggtcttcaagctaatctaagggtcagacatgcaatttttgtattattcagaagtatgaatcttagggacaggcagaccgacctccattttcgcgttggtccaacgtggcacctccaccaccatgttgtagatagttttctcctcgttggcgtacagtggaatgtcgtgcatcggcgagatgacattgccgcacttgttttctgtggagaatggccagaaattattatgcctgatatatgggcgacacctggacacgcgatttgattaatagtgaccggggacctgtcggctagacaaaggtcactaatttgcgtgccagtaaaccgaaattcagccaccagtttcgatatctgctattcggaatatgggctaataaaggaaagagataagcccaaaggggccgaaactcttggtgtttccgccatttccgacgcaagacaaatcggatcggctgatagtgctgataatgcgtcgagttaaataagcagagtccggtttgacctgttgcataaccattccggtaccgatcaactaattctaggtgcattaactgcaccgagtttgggtaacttgcaaatgcgcaagcaaagggttaagccgggtcacattcacatttggcccccaatgcgctactctactcactgaaatacaggctgtagctcggcgaattcttagcgcccttctcaacggtttcgtacagagccatctcgtgtgatttcgtgcgcttccgttctatctgaatatatctgcaattgctggcaagggccgctggtgacgttggaatcgagccggacaagcgaccaaccgcacgtgaagcgtaaaatgaactccttgtaattttcgccaacattttcttcagccctgagttgagtctatcgatagggcgataggacccgattttacagttaacagtgctgctcagaaaatgtatagctcgattccatttcatccattccaatggagaatgaacttcattttttcatacaattagaactattattataaatattattatatgaaaactataacattataattattattattaaatataaaatacaatattgtaattataattattatacaaatctatttacagtataaataagacaactatcaaaaccttaaagattatttagtttttgtcaaatcgtaaaaacttaaacaaaatatgctttgaatatgttcatacctgcagaagaagcacttagaaatattttaaaagtttcatataagtgattgaattttttataaattcgaagtcaataggttttacttgtactggttactgatcgttgcgaaattgtccgaattctggtcatgttaacttaacattaacaaagcttccaactgggaactatcggtgctatcggggatccgagcagtgtcatcgataacattggcaatcgagttttctaaattctgagttttcttttcgtctgtcgtgtgtgcgtgttgccttgctttcgagttggcgttgcaaaaattcccctttattttgctgacgagatattccaaaagagtaaacaaaccgggggatccaagaaaccccagcttttatccgaaagcagtcgttacacgtacattttcaagtgcccgtggcaacaagtaaattccccccctccattcactgcaaaatctctagtgaaatgcagaacggaaaaccgagatcttcggccaggccgtcgttccaccgccgtcccaaagacggagtggccaacaccaccactgataacgctgctgtcaagccggaggccttggagagctatacgggcaacgacgacaacgcctgcgtggtgtgcttcaaaaacgtggaaattttctccatcggcg

SEQ ID NO: 9284 - DNA, 1130 bp, DROSOPHILA
aaggagttcattttacgcttcacgtgcggttggtcgcttgtccggctcgattccaacgtcaccagcggcccttgccagcaattgcagatatattcagatagaacggaagcgcacgaaatcacacgagatggctctgtacgaaaccgttgagaagggcgctaagaattcgccgagctacagcctgtatttcaaaaacaagtgcggcaatgtcatctcgccgatgcacgacattccactgtacgccaacgaggagaaaactatctacaacatggtggtggaggtgccacgttggaccaacgcgaaaatggagattagcttgaagacccctatgaatcccatcaagcaggacatcaagaagggtaagctgcggttcgtggccaactgcttcccgcacaagggctacatctggaactacggagccctgccccagacctgggaaaaccccgaccacatcgagccctccaccggctgcaagggtgacaacgatcccatcgatgtcatcgagattggctaccgagtggctaagcgcggcgacgtgctgaaggtcaaggtgctgggcaccattgccttgattgacgagggcgaaaccgactggaagataatcgccatcgatgtgaacgatccgttggcctcgaaagtcaatgatatcgccgatgtggaccagtacttcccgggtctgcttcgtgccaccgttgagtggttcaagatctacaagatccccgatggcaagcctgagaatcagtttgctttcaacggcgatgccaagaatgcggactttgccaacaccatcattgccgagacccacaagttctggcagaacttggtgcaccagagccccgcatccgggtccatctccaccaccaacatcaccaaccgcaactcggagcacgtcattcccaaggaggaggccgagaagatactggccgaggcccccgatggcggccaggtcgaggaggtgtctgatacagtcgacacttggcatttcattcatctcaagtgagatgttctcctgggctgattccatcacaagatccatgatctatctgtagtccaatcgaatcgaaaatgcttgcacttgtgaattattaatactgaaatattatcgtacgttgaataaagttttgcaccgc

SEQ ID NO: 9285 - protein, 290 aa, DROSOPHILA
MALYETVEKGAKNSPSYSLYFKNKCGNVISPMHDIPLYANEEKTIYNMVVEVPRWTNAKMEISLKTPMNPIKQDIKKGKLRFVANCFPHKGYIWNYGALPQTWENPDHIEPSTGCKGDNDPIDVIEIGYRVAKRGDVLKVKVLGTIALIDEGETDWKIIAIDVNDPLASKVNDIADVDQYFPGLLRATVEWFKIYKIPDGKPENQFAFNGDAKNADFANTIIAETHKFWQNLVHQSPASGSISTTNITNRNSEHVIPKEEAEKILAEAPDGGQVEEVSDTVDTWHFIHLK

SEQ ID NO: 9286 - DNA, 4858 bp, DROSOPHILA
atcgggaaccggagccgaggagcagccgagcagcagtacaccagcggctgaggaggaggaggccaggaccactgtgcaggcagaacaggagacggaaccggcggaggaagcagttccagccgcgacagcggaactgaccaccacagcggaggaggctgcactcggaagccggaccaggcgatccctacccgatacggacgactatgagccggagttcccgtgggatcgcgtgctcgaattccagcagagcatcatttgggactaagttccggaaataccaagcaaccaatcctagtagatacaatttcaatagcacacaaggcgacatttccggcgactataaaaactgtgcaaaaaatcaactgtgactgaagaatgagatgagaaaaacggaagtaaagttcacgtcacgtaacgtctagcgtaacgtaacgtaattagctaagcttttcataatttaaaaacatgtttttaggcatttcacttggcatttcttcccagcgtaccaccatccctcttaatttatatatttatacatgtatttatttacaaaacaatttacgaattaattaaacaattacacgggcccgggcacgatcgcactaattgtttaattaatttgttttgcatttaagcgtaaacaaggcctcaactttttaaactaatatttaacgatttaaacgaatagtttaggtgcaaaactggaaactatttaaaaaaaaacgaaacatatgaaaaaaatgataattaaatacataaaccaacaccgaaattatttaatctaaatttagttgcttatttatgtttagacctaagctgcatttactagtagttaaataaaatactatttaaaaaacatctttaaattatgattaccgagtgtatataagtgtatatttgattcaaataggcttttttaatagaatgactaaagaatcaaagatcaaagattgggctgatcatcatggaaattatattttatataattgtatttaattcacttacctaacatttcggcgttgaccacaatattgcagctatacatgggagttaccaatctttgtggctgattctggaaagcctgtcggcaaacctctttagcagcagtcaaaacttgacctgaaacatcggatcgaatataaatactttcttatatgcttagtcgaaattgcgttaacatacccgaaaaggggccacgggaattcaaatcctctccttcagattggatagaccactcgagaaccgcaaaacaaacgccctgcatgggctcctcgcacaaaggaccggctacggatgtgatttggaagccattaaccagtgaactattgaaatcctttcgcggatccgtcttggaacgaatatccgtatccgattttgcgtgacttgaccagaagtcaggctgctcgtagtcgcttaggttgagtagaatgttggtaccgcagttgcgagggcctagagcccagattcgattcaccagctcctcgggcgatagggtactcaagccaaacagttgaagatccttgagagcagctattagcttaactttaatcgaagctagcagtgctgtccacttttcagagagcagttgatttctaggaatggctgccagttcctgaaggaaataaatatatatgaagaaatgacttaaaaacatttcagtttagttactattaccttgaagaattccgaatgggtttccagcaattccacagcttccgcaggcagtggaaccgctatcaccttcagcgtgcccagtttgttgagcgtctgctgcacggcgatcttcttactgacatccttgtcctccgccgtctttacaatggcctcattaaccatatccactgtggcagctggcacaattgtttcgcggaaggacacaattggtttggaaacattcaccttaatcttggcatagctctgctccagatcgtgcacacacttctccacatggacctcgcccaatgtagtgataacatgctcaccggtaggagccacagatacctgaacacaggcatctgcttggttcagaagcttcaatcccttcaccagtttgggcatgtcctgcggttgaacgggttcgatggccacgcggagaatcggagtggccatgacacttagttcgctgaaggaagtgcaatccaaactgctgctcagggttgctgttttaacgatgtgcgattcaagaccaccgattcccacgatattgcctgccggcacttcatccagcagttgcagctcaccacccataaacatgtagagatctccgatggttacacgactggcgtagggtgcttccccctccttgcgatgcgttggctgacgaggatcgtgtttgggtgagagattaaacagctccatgccgcgtttcaatgtaccgctgaagactctggcgaaggcgatgaatacaaactcattctgatcagcctcttccggttttgattcctccttttccggacctacaacttgagtgctcagctgctccacaccctggctgattttctcgagctccgcttgctcactttgttgcttcctctcttctatccgacgacgcacttcatccctgcgctgctgaacctcttgatcagttagccttttgggacgattctgaggcaaatgggtaatatgcactggcgtcattttcgacacaaacgcaatcacatttgaactattcgcatcacaactcgtaaagctctccttgagttccagggtttctggtggcagagaacttaagtcgacattcgctggataaagcaatctctgtgccctctcatcgctgattttgtgaggcggaggaacatgctgaatgaccatgtgcaggacactcttgtcgatgggcagccattgtcccagaaccgctttaatctgcagcttgggatcggtgagacgcaaatctcgggtggccagcttgagacccagtttctccgcaatgccaggcagcttatctttgtccttccgaatggcaatgatatcgtagaggctccaaatattctccaggacgaattggacaaacatgggcttcttggctttctcctgggctccaggcaaagcttctttcttttttgagttgtagtagaaatcgccccagagtacgttctccaaatccttgcgactcatctccaaacgcttggcgtacatggcggcaaagtcacggacggagaaggcccagccatcgtaggcggagcagaagattacgttgcccgagcttggtgagaaatacagctctgagtcatccacttcctctagggcagactcgtagttatctttcttggttatatcctccttggctaaaatatcggaggcaaaaatgctgcctagcacagcgttaacctgctccaagacttggcacaaatggaaataggcgtcgaggggatccatctgtttctccaggatcagacggtccagtttgttgagcaccaagactggtttcagttgctcctcgtagatttgcctcaagcaagctcgagtttgaggacctacaccttccaccacatccacgacgacgatggctccatcacacagccttaccgccgtggaaacctcactggaaaagtccacgtgaccgggggaatcaatcaaattgatgaggtagtccggattaccagccatttcctccgcttcctgatagtataaagaaatgctgctgctcttcatggtgatgccccgctcctgttcatccgaccggttgtctaggtaccgcagcttgcccgccatccgttgcgaaatgatgccattactggccaccagagaatccgccagagtcgtctttccatggtccacatgcgccaggatgcagatgttgcgcacttgctgacgacgtcgctgcagcagcaccaaatcactgccctcaaccacgggcattcttgcaagttattaggttaataatattcccgattgtcactacgatttcaactgtaaatttcgccagttggtccaattgtatttataaacaaacccgcacgcggcaatttcgcaatttggtgtgaccagctacaaaaactttaaatatgacaagcagttaacagaactgactaagaaactattatgttaagtggtagtctacccgatttatagccagatttggttggtacagctgtagttaaacatgctacgaaatagaagggacattatgaacttatctttcataaacagttacatctttctaattcaacacgttttatttttataacggttagcgtaggctttaacattttgtataaaaattatttctagttttttagctatgtttatctttgcattggcacctctgctgtttggcaatgctgttcaatctgctctgtttaaaccagctgtagaaacagctgatcaccacgcatgcatttgcgttcttcctctttcactttttgtgatttcgcagcgcacgcgaaaatctgataaattccctaaaaaaatggtcggaataacgcccgcagagaagaaagcgctgataacgcgcaatctgcaggagacgctcggcgatgacaagctgaccaagatcctggcggagcgcgatctaaagatctactggggaacggcgacgacgggcaagccacatgtcgcctatttcgtgcccatgtcgaagattgccgatttcctgaaggcaggatgcgaagtgaccatcctgttcgccgatctccacgcctatctggacaacatgaaggcaccgtggtctctcctggagctgcgaaccaagtactacgaacaggtcatcaaggccatgttgagctccatcggcgttccgctggagaaactgaagttcgtcaagggcagcgactatcagctgtccaaggagtacaccctggatgtatacaagctcagctccgtggtcacgcaacacgatgccaagaaggcgggcgcagag

SEQ ID NO: 9287 - DNA, 2733 bp, DROSOPHILA
atgcccgtggttgagggcagtgatttggtgctgctgcagcgacgtcgtcagcaagtgcgcaacatctgcatcctggcgcatgtggaccatggaaagacgactctggcggattctctggtggccagtaatggcatcatttcgcaacggatggcgggcaagctgcggtacctagacaaccggtcggatgaacaggagcggggcatcaccatgaagagcagcagcatttctttatactatcaggaagcggaggaaatggctggtaatccggactacctcatcaatttgattgattcccccggtcacgtggacttttccagtgaggtttccacggcggtaaggctgtgtgatggagccatcgtcgtcgtggatgtggtggaaggtgtaggtcctcaaactcgagcttgcttgaggcaaatctacgaggagcaactgaaaccagtcttggtgctcaacaaactggaccgtctgatcctggagaaacagatggatcccctcgacgcctatttccatttgtgccaagtcttggagcagaaagataactacgagtctgccctagaggaagtggatgactcagagctgtatttctcaccaagctcgggcaacgtaatcttctgctccgcctacgatggctgggccttctccgtccgtgactttgccgccatgtacgccaagcgtttggagatgagtcgcaaggatttggagaacgtactctggggcgatttctactacaactcaaaaaagaaagaagctttgcctggagcccaggagaaagccaagaagcccatgtttgtccaattcgtcctggagaatatttggagcctctacgatatcattgccattcggaaggacaaagataagctgcctggcattgcggagaaactgggtctcaagctggccacccgagatttgcgtctcaccgatcccaagctgcagattaaagcggttctgggacaatggctgcccatcgacaagagtgtcctgcacatggtcattcagcatgttcctccgcctcacaaaatcagcgatgagagggcacagagattgctttatccagcgaatgtcgacttaagttctctgccaccagaaaccctggaactcaaggagagctttacgagttgtgatgcgaatagttcaaatgtgattgcgtttgtgtcgaaaatgacgccagtgcatattacccatttgcctcagaatcgtcccaaaaggctaactgatcaagaggttcagcagcgcagggatgaagtgcgtcgtcggatagaagagaggaagcaacaaagtgagcaagcggagctcgagaaaatcagccagggtgtggagcagctgagcactcaagttgtaggtccggaaaaggaggaatcaaaaccggaagaggctgatcagaatgagtttgtattcatcgccttcgccagagtcttcagcggtacattgaaacgcggcatggagctgtttaatctctcacccaaacacgatcctcgtcagccaacgcatcgcaaggagggggaagcaccctacgccagtcgtgtaaccatcggagatctctacatgtttatgggtggtgagctgcaactgctggatgaagtgccggcaggcaatatcgtgggaatcggtggtcttgaatcgcacatcgttaaaacagcaaccctgagcagcagtttggattgcacttccttcagcgaactaagtgtcatggccactccgattctccgcgtggccatcgaacccgttcaaccgcaggacatgcccaaactggtgaagggattgaagcttctgaaccaagcagatgcctgtgttcaggtatctgtggctcctaccggtgagcatgttatcactacattgggcgaggtccatgtggagaagtgtgtgcacgatctggagcagagctatgccaagattaaggtgaatgtttccaaaccaattgtgtccttccgcgaaacaattgtgccagctgccacagtggatatggttaatgaggccattgtaaagacggcggaggacaaggatgtcagtaagaagatcgccgtgcagcagacgctcaacaaactgggcacgctgaaggtgatagcggttccactgcctgcggaagctgtggaattgctggaaacccattcggaattcttcaaggaactggcagccattcctagaaatcaactgctctctgaaaagtggacagcactgctagcttcgattaaagttaagctaatagctgctctcaaggatcttcaactgtttggcttgagtaccctatcgcccgaggagctggtgaatcgaatctgggctctaggccctcgcaactgcggtaccaacattctactcaacctaagcgactacgagcagcctgacttctggtcaagtcacgcaaaatcggatacggatattcgttccaagacggatccgcgaaaggatttcaatagttcactggttaatggcttccaaatcacatccgtagccggtcctttgtgcgaggagcccatgcagggcgtttgttttgcggttctcgagtggtctatccaatctgaaggagaggatttgaattcccgtggccccttttcgggtatgttaacgcaatttcgactaagcatataagaaagtatttatattcgatccgatgtttcaggtcaagttttgactgctgctaaagaggtttgccgacaggctttccagaatcagccacaaagattggtaactcccatgtatagctgcaatattgtggtcaacgccgaaatgttaggtaag

SEQ ID NO: 9288 - protein, 860 aa, DROSOPHILA
MPVVEGSDLVLLQRRRQQVRNICILAHVDHGKTTLADSLVASNGIISQRMAGKLRYLDNRSDEQERGITMKSSSISLYYQEAEEMAGNPDYLINLIDSPGHVDFSSEVSTAVRLCDGAIVVVDVVEGVGPQTRACLRQIYEEQLKPVLVLNKLDRLILEKQMDPLDAYFHLCQVLEQKDNYESALEEVDDSELYFSPSSGNVIFCSAYDGWAFSVRDFAAMYAKRLEMSRKDLENVLWGDFYYNSKKKEALPGAQEKAKKPMFVQFVLENIWSLYDIIAIRKDKDKLPGIAEKLGLKLATRDLRLTDPKLQIKAVLGQWLPIDKSVLHMVIQHVPPPHKISDERAQRLLYPANVDLSSLPPETLELKESFTSCDANSSNVIAFVSKMTPVHITHLPQNRPKRLTDQEVQQRRDEVRRRIEERKQQSEQAELEKISQGVEQLSTQVVGPEKEESKPEEADQNEFVFIAFARVFSGTLKRGMELFNLSPKHDPRQPTHRKEGEAPYASRVTIGDLYMFMGGELQLLDEVPAGNIVGIGGLESHIVKTATLSSSLDCTSFSELSVMATPILRVAIEPVQPQDMPKLVKGLKLLNQADACVQVSVAPTGEHVITTLGEVHVEKCVHDLEQSYAKIKVNVSKPIVSFRETIVPAATVDMVNEAIVKTAEDKDVSKKIAVQQTLNKLGTLKVIAVPLPAEAVELLETHSEFFKELAAIPRNQLLSEKWTALLASIKVKLIAALKDLQLFGLSTLSPEELVNRIWALGPRNCGTNILLNLSDYEQPDFWSSHAKSDTDIRSKTDPRKDFNSSLVNGFQITSVAGPLCEEPMQGVCFAVLEWSIQSEGEDLNSRGPFSGMLTQFRLSI

SEQ ID NO: 9289 - DNA, 6201 bp, DROSOPHILA
ggagtttgtgctctcgccctttccgtgagacggagtgtccgacacaagactctgagtctcctcgaagccttcgtcattcagttcgtggtgaccactggcggacagttttagcttggagggtgtgatatcccgtggcggactccaaggtcgttctggagttcccgtgggtgatttaagattccgaatggcctcccttacatcctcctgattgatggagcttatgtggcgacccaccttctccagcttgttgatcgtgcgctccttctgcttggacttctcgggtgcgggtggctctggcttcgatggagaagtctttgcctctgctgtgctggtggtcagcgcctcctcattgccactgctgtagtccgtgggtcttttgtagcgtcgtgtgcggcgagccagggcatggcgatcgaagtgacccggcgcatcctgttccgctgggttgatcttctcctccgtcgcagcctttggtttatccgtcatgctcaccgtgaccactgtggtggtgggcgtggctatgacccgtcggctcactggtggcgtctctatattatccgcatccacgtccttggaggagccctgcatctcgttttgggtcttgtggtgactgagcaggctggcaaaggtgtcgtcggacacttgtggctttggtgacttgggtggcagtggatgctcctccgttttcgcaggctgcagttcccggctggaggatcgcctgatatagatttgcaaccgctcgttgctcttgtccctttcaccctgtttctgaataagggactttcgacgatcctcctcggctatcgattgaagtgctatgggactcggctgttcctgcgatcgctgtcggcgatgttgacgcaatgcatcgtgcggctgggcatcggcaatggcctgcagattggccaccacgtccgtctgctccagcgtcctcgagggcttccagtcggcatagacgcgctgatatttgccggactcctgatccattctattagtggagttagtgggattcgtggtcgtaggcgtattcgttggcgtagctgtcgtcgtcgaaggcaggatcttctcctccggcaaggggtccagttttcgttcgttttctgcgaacatagaatatatctaagagatccatttggtcctgagtttgtgaggggcatcttaccagtttcgttttcgagcgatcgcctattggcgttgaccagacgacgcttccgcctgtactcctcgttttgcttctcatcgctctcgttggattgaagccacgtctcgatcttctggcgccactcacgggatattctgtaaaatgtaaatgatagatagatatatagatagatactataagatacttaatgtgaatctcttaccttggtttcgcatcctcgttattagatggcgtctgagcaatcgccgatccactgcccgtgggcgtattcgctgccgttgtgggcgttccagctgtactggccaatggagattgcagtcgctcctggacattttgctgctgctgctgaagaagaggagccggggagctggcccgttcacgatccatgccaaagtcaatgttgagcaaatcgggtcgtttgcgactggaacttccggagcgggcacgacgagcccacgagcgatccaagctgccgtaggccgccttccgctccctgctattgtgtccatcgtggtgaggacccgtcgaactccgaaggaactccatcaggtcatcctcctcggcaagaactcgactacgccgacgcctcagacttccgttgggtgtgatgtccggagaggctccgtcttgttccaggcggatgaaaccattgctgatctctccggatcccaggtggcggcgactcagcgccggactagccctaggatcgaagatagcatcgcccaagaaggaatgctccgagtccgaaactggcgttccagcctgaccaactgcagaataactaagtaagtaaataaatttctttcaagtagatgatgcacttactctgtctggctctgcgggccagctgctcctcgcgctgcttcctcctaagcgtggcctgttgctcctgctgctggcggcgctcgttctccttgaccgcctgcttgaatttatcacagaaattgtggaagatcttgaagcactcctccagccggaaggtggccgcatcgtcgcagaagaactcggacattttgagccgcattgactccacttgtttcatgccagcttggaggacggatagctcggattcggcggcctgcaaaaagtcggccatttgctccttgatgtccacatccgtggcaggttgttcgatctgtctggctattcttctgatcctgccgtccagtgtgttgatttcattgttgatctgctctgatgttgttctatagaaataagaaagttgagtaaaggataacattttatgggatgaatggattcactgacttgctggcactttcgaggttgctcagttgtcctgtgaattgaagcagttcgggattgcgtttctccgcctgaagagccacgaagtgaatgaggttcatgcccggcttattcgcccggatatcagttagcttttgcagcgatgatagcttcacgcccgccgcatttcctgcatagccgccggagttaaggaaatttccagccacaacgaccatgtaaaggacctcctgaagagtcttattattcagtagatcgtcgccagcatagagcatagaattgatacagggctccagataggccacattcgccgcaaactcctccttgagcaacatgctctcgatccgcaatttgtaactatacaagtaaaagggtaaggtgagataatagtaatgtatatttaaggataactacttacttgggcacctcgagcagctgcagcaggaacttctcggcattgcccagtcgtgccttatccccgttgaatcccttcagcatgtccagctcatccacctcgggcattatcttcagcaaacccctcaatctctccgctccgatctcctcgtgggctccctgccggatcaactggatgatgtcgtcgttgctggtgcggaattgcttcaggaagatattcacattcagacttcgcttgccgtcaagcagggtgatctctgtgctctcctttttggactttcggtccagggtatcgcagccattggatccggcggcggcctgactgccatcccgtcccaactttggtgatccctgcgcactggctgtttgcaggcagaagagtccctccatctcgttccagtcgatgtcctgcatcgggctgtcctggtgattgctggccacaatactccagatgttctgcttgcccaggaccttgttgtgcggtatcttgccccagttaatggtcttcatcttggccttgggagcgggtgtgtcctgttgcggcagcagtatggcagtggccaccgcctccgctgccaagggatctggtgtcctgggccgtgaggccatttgcatagagggcggtggtggcggcggaggcaatgcgccaccattgatcatgggcggtggcggtggtggcggtgctgccccatttatcggcggtggcggaggcggtggtgctgcgggtgccatgggtggtgggggtggtggaggcgtcgtcttggccgacacgcccaccggctgagagggcttgcgggtggggctgctggcatcgctgccgcgacaactctggcaggcgaacttctggctactgggcgtgcgcagcaggcgcactgaatcctcgtgactttcgaggagcgtggcgcggtggaccagacgctctgtggtgtcccagatgatgtcgctgagcggctccttgggatcgatgcgcagcaggtgctgcagtatgttgaggaatggcacttcctgtggcgtatcagccacctgtgaaatataatgtgatataagctttaataattcataattatagcaaaaaattgaaaaaagttacttggtgaaactcaataacataaataaatgattctcttgcatgttcatagccaaccacaatgccagtcgcaataaccaatataacacatacgtcctgttgcacactcacctgtcgcaaaatggcgtagaagacatcaagatgcgagttgagattgatgccatcgggcgcctgaaggctctgggcctcgtcgcattcctgctgctccacgaatacgtccaattgtacaatgatatcgcccacactttgtgcgacttttctgtaatgcagaatttaacaatgataattcgttcactggcaattagagggttaagctctggaaaatcttggcattccgtccgacagtccgcactaattattcaagctggcattgctgctggcaatttgtagtttgtagattttgtgttgacacaactcactggcttttaatttatttcctatttatgcatggattttacagatatatgtgaataaatatatatatgaatttatggcccaacaggaggaaggggcttatccacaagtagttgacgcttgccagaatcgatagagaacaacaaactccgcctctgacattgagtaacctccggaggctgccaacgacaaaagggggtggggcagatgcaaaaggaccttcgactcgctgcacactcacttgagattctgcaccagttgcaaggcggcgcagctgtaacgggacagcgagccgcaaaatgtgagccgccgctgcaggtgcaacggcgatggcgatggcgtcacggaagtggaagcggaaccggaaacgggtgacgtcgccgatgaggcggactccgatgagagcgatggcggcggcgagggcgatgctgacgactccacgttgcctgcctcgagcagccttggcaatcaaaacaaaaaaaaaaaaaatcgcttctacaggcacatcatttcacacgcggcgtgcaaaatcgttagccttgcgcaatgtccttgctggcagctccgcttttggccttttgacaattgatatccatacatcgactagcacttttttgttgcccgttttaattgcttgccccaatcgcttttgcggttcgaacgagagaacggccagaatggcaataacgaggacgagacagcctggcactatacaatgtttgagctacggccacgacttgacgctttggcggcacggagagcctcgtcgccaaatccgagtccttgttgtttttggcggccacgtgctgcgcgcgcaggagttttcctcaccatttgcgaagcgcccaaggcggcctctttcattttccggagcaacttcgtcaacatccatcgtgcacattggacacgcggacactagcacgtgatttgttttggccagcagtttctattttggtccgtcacggaagttgtttagggcttttgggagttacttacttgcgggggcacaaggaaattgggtaaccgaaacgccaaattacaaaactttaaacggaagcttcaactaagcgaaagggaaaagtcaaagctgtgaaaatccaacaaaattttagcagaatcttcctattttccatttagagtataaagaccagaaatatatttttacccaagctcttatattaataatttgccttgatccccaagctgttgtttccaattgtgttttcgactctttggacactccataaaaatacttcagtaatcgaaaatgtctattcttgacacggttctaacaatccccctgaaatgcgatactttggagtttatttttagccaacatttatgagtttgacggtaattcgatactagcacacatccatcattctcgggttgataaacaacatagattcggatttcgattcgattagaacacattatgtaggagaacaattaaaatccgcttaaagcatctggacagcttccaagctacgcagaatcgagactcgactgaatctcaatggttctccaactcctccaaatcaaataatttaagaggcggtctcaaatcaaagcgttatgtggctgaatgaaaacgtttaggtcgattcgaaattccaaataaattaaatagcgccagcaaactacgcatttcgttgatgtgtgcgcgttaaaattttaataacaatagaactgaaggggggatcctcgtctgtttgggaatggaaaaatgccgcaagacaaatgggctgggacaatcaattagtcaactctgtgctccaaactgacaagccgaggaatcagccagcttgtttgttattgttcgcatttgggcttgaactattttcaaaattaattgaatttgcta

SEQ ID NO: 9290 - DNA, 3103 bp, DROSOPHILA
atgaaagaggccgccttgggcgcttcgcaaatggtgaggaaaactcctgcgcgcgcagcacgtggccgccaaaaacaacaaggactcggatttggcgacgaggctctccgtgccgccaaagcgctgctcgaggcaggcaacgtggagtcgtcagcatcgccctcgccgccgccatcgctctcatcggagtccgcctcatcggcgacgtcacccgtttccggttccgcttccacttccgtgacgccatcgccatcgccgttgcacctgcagcggcggctcacattttgcggctcgctgtcccgttacagctgcgccgccttgcaactggtgcagaatctcaaaaaagtcgcacaaagtgtgggcgatatcattgtacaattggacgtattcgtggagcagcaggaatgcgacgaggcccagagccttcaggcgcccgatggcatcaatctcaactcgcatcttgatgtcttctacgccattttgcgacaggtggctgatacgccacaggaagtgccattcctcaacatactgcagcacctgctgcgcatcgatcccaaggagccgctcagcgacatcatctgggacaccacagagcgtctggtccaccgcgccacgctcctcgaaagtcacgaggattcagtgcgcctgctgcgcacgcccagtagccagaagttcgcctgccagagttgtcgcggcagcgatgccagcagccccacccgcaagccctctcagccggtgggcgtgtcggccaagacgacgcctccaccacccccaccacccatggcacccgcagcaccaccgcctccgccaccgccgataaatggggcagcaccgccaccaccgccaccgcccatgatcaatggtggcgcattgcctccgccgccaccaccgccctctatgcaaatggcctcacggcccaggacaccagatcccttggcagcggaggcggtggccactgccatactgctgccgcaacaggacacacccgctcccaaggccaagatgaagaccattaactggggcaagataccgcacaacaaggtcctgggcaagcagaacatctggagtattgtggccagcaatcaccaggacagcccgatgcaggacatcgactggaacgagatggagggactcttctgcctgcaaacagccagtgcgcagggatcaccaaagttgggacgggatggcagtcaggccgccgccggatccaatggctgcgataccctggaccgaaagtccaaaaaggagagcacagagatcaccctgcttgacggcaagcgaagtctgaatgtgaatatcttcctgaagcaattccgcaccagcaacgacgacatcatccagttgatccggcagggagcccacgaggagatcggagcggagagattgaggggtttgctgaagataatgcccgaggtggatgagctggacatgctgaagggattcaacggggataaggcacgactgggcaatgccgagaagttcctgctgcagctgctcgaggtgcccaattacaaattgcggatcgagagcatgttgctcaaggaggagtttgcggcgaatgtggcctatctggagccctgtatcaattctatgctctatgctggcgacgatctactgaataataagactcttcaggaggtcctttacatggtcgttgtggctggaaatttccttaactccggcggctatgcaggaaatgcggcgggcgtgaagctatcatcgctgcaaaagctaactgatatccgggcgaataagccgggcatgaacctcattcacttcgtggctcttcaggcggagaaacgcaatcccgaactgcttcaattcacaggacaactgagcaacctcgaaagtgccagcaaaacaacatcagagcagatcaacaatgaaatcaacacactggacggcaggatcagaagaatagccagacagatcgaacaacctgccacggatgtggacatcaaggagcaaatggccgactttttgcaggccgccgaatccgagctatccgtcctccaagctggcatgaaacaagtggagtcaatgcggctcaaaatgtccgagttcttctgcgacgatgcggccaccttccggctggaggagtgcttcaagatcttccacaatttctgtgataaattcaagcaggcggtcaaggagaacgagcgccgccagcagcaggagcaacaggccacgcttaggaggaagcagcgcgaggagcagctggcccgcagagccagacagattggtcaggctggaacgccagtttcggactcggagcattccttcttgggcgatgctatcttcgatcctagggctagtccggcgctgagtcgccgccacctgggatccggagagatcagcaatggtttcatccgcctggaacaagacggagcctctccggacatcacacccaacggaagtctgaggcgtcggcgtagtcgagttcttgccgaggaggatgacctgatggagttccttcggagttcgacgggtcctcaccacgatggacacaatagcagggagcggaaggcggcctacggcagcttggatcgctcgtgggctcgtcgtgcccgctccggaagttccagtcgcaaacgacccgatttgctcaacattgactttggcatggatcgtgaacgggccagctccccggctcctcttcttcagcagcagcagcaaaatgtccaggagcgactgcaatctccattggccagtacagctggaacgcccacaacggcagcgaatacgcccacgggcagtggatcggcgattgctcagacgccatctaataacgaggatgcgaaaccaagaatatcccgtgagtggcgccagaagatcgagacgtggcttcaatccaacgagagcgatgagaagcaaaacgaggagtacaggcggaagcgtcgtctggtcaacgccaataggcgatcgctcgaaaacgaaactggtaagatgcccctcacaaactcaggaccaaatggatctcttagatatattctatgttcgcagaaaacgaacgaaaactggaccccttgccggaggagaagatcctgccttcgacgacgacagctacgccaacgaatacgcctacgaccacgaatcccactaa

SEQ ID NO: 9291 - protein, 1034 aa, DROSOPHILA
MKEAALGASQMVRKTPARAARGRQKQQGLGFGDEALRAAKALLEAGNVESSASPSPPPSLSSESASSATSPVSGSASTSVTPSPSPLHLQRRLTFCGSLSRYSCAALQLVQNLKKVAQSVGDIIVQLDVFVEQQECDEAQSLQAPDGINLNSHLDVFYAILRQVADTPQEVPFLNILQHLLRIDPKEPLSDIIWDTTERLVHRATLLESHEDSVRLLRTPSSQKFACQSCRGSDASSPTRKPSQPVGVSAKTTPPPPPPPMAPAAPPPPPPPINGAAPPPPPPPMINGGALPPPPPPPSMQMASRPRTPDPLAAEAVATAILLPQQDTPAPKAKMKTINWGKIPHNKVLGKQNIWSIVASNHQDSPMQDIDWNEMEGLFCLQTASAQGSPKLGRDGSQAAAGSNGCDTLDRKSKKESTEITLLDGKRSLNVNIFLKQFRTSNDDIIQLIRQGAHEEIGAERLRGLLKIMPEVDELDMLKGFNGDKARLGNAEKFLLQLLEVPNYKLRIESMLLKEEFAANVAYLEPCINSMLYAGDDLLNNKTLQEVLYMVVVAGNFLNSGGYAGNAAGVKLSSLQKLTDIRANKPGMNLIHFVALQAEKRNPELLQFTGQLSNLESASKTTSEQINNEINTLDGRIRRIARQIEQPATDVDIKEQMADFLQAAESELSVLQAGMKQVESMRLKMSEFFCDDAATFRLEECFKIFHNFCDKFKQAVKENERRQQQEQQATLRRKQREEQLARRARQIGQAGTPVSDSEHSFLGDAIFDPRASPALSRRHLGSGEISNGFIRLEQDGASPDITPNGSLRRRRSRVLAEEDDLMEFLRSSTGPHHDGHNSRERKAAYGSLDRSWARRARSGSSSRKRPDLLNIDFGMDRERASSPAPLLQQQQQNVQERLQSPLASTAGTPTTAANTPTGSGSAIAQTPSNNEDAKPRISREWRQKIETWLQSNESDEKQNEEYRRKRRLVNANRRSLENETGKMPLTNSGPNGSLRYILCSQKTNENWTPCRRRRSCLRRRQLRQRIRLRPRIPL

SEQ ID NO: 9292 - DNA, 4087 bp, DROSOPHILA
gccgtccactagctgcggacaggaatataatcggatttggtacagagttcttgtgaggatgtagttgatatacgtacgccatgcttgttgagaaaggcacagtaggcctccgcctcgccgggaccttggacgcactggattcccatggagagcagcagcgtttcgcactgcttgagaacatggttgaaccggctgcgtcccttgtcgcccttggacggctgactttgggtgcactcaggcgaattcttgggcttcactccccgaaactggagctcattccttttggctatcacctggctcttgagttttggagcaactccctccaaaacgaaaaccggagtaacttgctcccaaatcaagtagcaagtgcgaaagaagaggttcctgttggtaaagcgtaaatattaatattttaaaagaatataaggtattaagaattttttaaacctactttaaatgatgccttggatgcacaaagtagtccacaacattaagagattcgcacacccagccggccaggtcgatggccactttctttccccgcagttcattaatgggtttacgttcacaatggggcgttaaaacaccccataattccttgacgcccatttaaataagctaaacaaaaaccccgcgagaaattcgcaacaaatttaaacaatcgcttcttcgtcagagttgcccaatcagttactttctagctacttgaagctatattcaaaagcagccaagtgcaaagttgtgacaataattggcaatgataacttttttaacaataatacatgatgctattttcaataacaaatattatacatataaatgtcatcttattcgattttaagaacacatttcgtttttagctttttttgagcttgtctctagctacatttgacagcactgcgacttccgccagtcactgcgaagcatgctcgataaccgatagcgggctttgttttgacagctgcacaagcgaccgctgcgaatggccagtggtcagcagtctcttcttcttccacgtcgacgtgtcgtgtcagccaaaagaaagtcgaaataaaatattgaattgaagctgcccctttgcgagtaggcccgacaaaattcagaagctgccagtcgtccgtacgccaaaccacacacaaccaccaccggcaagatggttctcgcggatttgggtcgcaagataacaacggcgctgcactcgctcagcaaggcgaccgtaatcaatgaggaggcactgaattccatgctgaaggagatctgcgcagcgctcctggaggctgatgtgaatatccgactggttaagcagctgcgcgagaatgtgcgtgccgttattgatttcgatgagatggccggtggcctgaacaagaggcgaatgatccaatcggctgtgttcaaggagctcgtcaaactggtcgatcccggcgtgaaaccctaccaacccatcaagggcaaggccaatgtggtcatgtttgtgggtctgcagggctccggtaagaccaccacctgtaccaagctggcctatcactaccagaagcgcaactggaagtcgtgtctcgtgtgcgcggataccttccgtgctggtgcctacgatcaggtcaagcagaacgccaccaaggcgcgcattccgttctacggcagctacacggaaatcgatcccgtggtcattgcccaggacggtgtggatatgttcaaacgcgagggtttcgagatgatcattgtggacacctcgggtcggcacaagcaggaggaatcactgttcgaggagatgttggcagtgtccaatgccgtcagtcccgacaacataatcttcgtgatggacgccaccatcggacaggcttgcgaggctcaagcgaaagccttcaaagacaaggtggacatcggttcggtgatcataaccaagttggatggccacgccaagggaggcggagctctgtccgcagtggcagccacacagtcgcccatcatcttcatcggtacgggcgagcacatcgacgatctggagcccttcaagacgaaacccttcgtgagcaaactgcttggaatgggtgacatcgaaggactgatagataaggtgagacatgccacacgagcttaaaattataccgcactacaatacaattgaaaacacgtactgaatataaactcattttgcacaggtaaacgagctgaagctagacggaaacgatgagctgttagaaaagatcaagcacggtcatttcaccatccgcgacatgtacgagcagttccagaacatcatgaagatgggccccttctcccagttcatgaacatgatacccggtttctcgcaggactttatgaccaagggcggcgaacaggagtcgatggcgcgcgttaagcgtatgatgacgatgatggacagtatgtcggataatgaactggacaatcgcgacggagcaaagctctttagcaagcagccaaaccgctgcgttcgtgtggcccagggagctggtgtcatggagcgcgaggtcaaggaactgattgcacactatacgaaattttcggcggtagtaaagaagatgggcggcgttaagggactgttcaagcagggcgacatgaccaagaatgtgaatccaacacagatggccaagctcaaccagcagatagcgaagatgatcgatccccggatgctgcaacagatgggcggcgttggtggtatccaaaatatgatgaggcaactgcagcaaggagctgcgggtggtttgggtggcctggggaacctgatgagcggttttggtggcaagtgagcaggtggcgtgtaaatttaacgatttttatatgattttgttttcgcgtagttcgtaatttgttagccatttgtttccatttgtccaaggccacaaaaattgatacgcgttgtggaagcgaatatagcgtatatagcctataaagcccatatagatgtgcaaacagttaacaaattcggtttttgtacggcttggcagccacagtgtcagtttttatagtttaaacagttttctgtacacgaactaatggaattagcatgcctatcagaataccagtaaggcaattgaactagatataaacaataaataattaatatatgaacttggctttaaattggttgtgtttattgggtttaatctcgggcaacgaaaagcagaaatccagtcaccctgttgacctaacacatacaactaaaacaaaaaacaagttgcgaacaggtgcccagaaagatcgaaaggatgccaacgcagcaaggaaaccaaaataaacaaacaggctggcgggcaaattgttaatgctgtttttgggggagggtctgtacacatactcaaatgtatgcctagtggggttgtacactcaaaaaaaaaaacctgacagaaatttatttttatttgtctgaatcataatgggttatcatagtggattattttgcaaatctttggaaatttatattcaatttctctttttaagttttgacaacacttttttctgcgtgtggtgtttggtggctcagcttttctggtggggctgacagcatccctcgattctgtcccggaagttgtgcttcgtctgggattttggggttgtcactttctctctcccttgcgtgctgaaaactccataatcccagccactctgccttttgcaataacaatgaaatggcgattgcctgccataaaaatgtctattaagctgtcaggttctgacactcataaaaccatcaaacaagtcaaacgaacaggatagcagcaaaatcagcaggacgaaccgctgtcaaagttttcggcctcatcctggcggcttccccacgcacacataggctcacattctcgctaggagattatacatgtgtatgtgtgctgcgtcctttcatatttcttgcgccccccacaaaaggactttatttatgggtgggtgggatgaaaagatacagatacacgcccccacacagagtccaaattattttatgagcgcagaggcagaatgcctttggcatccttggcaggataacccttctccagaaggatatttccttagatttccaaccccagcgtaagatttgctgaaaaaagcgaatcgaatattctacatactaaattcc

SEQ ID NO: 9293 - DNA, 2002 bp, DROSOPHILA
tctcttcttcttccacgtcgacgtgtcgtgtcagccaaaagaaagtcgaaataaaatattgaattgaagctgcccctttgcgagtaggcccgacaaaattcagaagctgccagtcgtccgtacgccaaaccacacacaaccaccaccggcaagatggttctcgcggatttgggtcgcaagataacaacggcgctgcactcgctcagcaaggcgaccgtaatcaatgaggaggcactgaattccatgctgaaggagatctgcgcagcgctcctggaggctgatgtgaatatccgactggttaagcagctgcgcgagaatgtgcgtgccgttattgatttcgatgagatggccggtggcctgaacaagaggcgaatgatccaatcggctgtgttcaaggagctcgtcaaactggtcgatcccggcgtgaaaccctaccaacccatcaagggcaaggccaatgtggtcatgtttgtgggtctgcagggctccggtaagaccaccacctgtaccaagctggcctatcactaccagaagcgcaactggaagtcgtgtctcgtgtgcgcggataccttccgtgctggtgcctacgatcaggtcaagcagaacgccaccaaggcgcgcattccgttctacggcagctacacggaaatcgatcccgtggtcattgcccaggacggtgtggatatgttcaaacgcgagggtttcgagatgatcattgtggacacctcgggtcggcacaagcaggaggaatcactgttcgaggagatgttggcagtgtccaatgccgtcagtcccgacaacataatcttcgtgatggacgccaccatcggacaggcttgcgaggctcaagcgaaagccttcaaagacaaggtggacatcggttcggtgatcataaccaagttggatggccacgccaagggaggcggagctctgtccgcagtggcagccacacagtcgcccatcatcttcatcggtacgggcgagcacatcgacgatctggagcccttcaagacgaaacccttcgtgagcaaactgcttggaatgggtgacatcgaaggactgatagataaggtaaacgagctgaagctagacggaaacgatgagctgttagaaaagatcaagcacggtcatttcaccatccgcgacatgtacgagcagttccagaacatcatgaagatgggccccttctcccagttcatgaacatgatacccggtttctcgcaggactttatgaccaagggcggcgaacaggagtcgatggcgcgcgttaagcgtatgatgacgatgatggacagtatgtcggataatgaactggacaatcgcgacggagcaaagctctttagcaagcagccaaaccgctgcgttcgtgtggcccagggagctggtgtcatggagcgcgaggtcaaggaactgattgcacactatacgaaattttcggcggtagtaaagaagatgggcggcgttaagggactgttcaagcagggcgacatgaccaagaatgtgaatccaacacagatggccaagctcaaccagcagatagcgaagatgatcgatccccggatgctgcaacagatgggcggcgttggtggtatccaaaatatgatgaggcaactgcagcaaggagctgcgggtggtttgggtggcctggggaacctgatgagcggttttggtggcaagtgagcaggtggcgtgtaaatttaacgatttttatatgattttgttttcgcgtagttcgtaatttgttagccatttgtttccatttgtccaaggccacaaaaattgatacgcgttgtggaagcgaatatagcgtatatagcctataaagcccatatagatgtgcaaacagttaacaaattcggtttttgtacggcttggcagccacagtgtcagtttttatagtttaaacagttttctgtacacgaactaatggaattagcatgcctatcagaataccagtaaggcaattgaactagatataaacaataaataattaatatatgaa

SEQ ID NO: 9294 - protein, 508 aa, DROSOPHILA
MVLADLGRKITTALHSLSKATVINEEALNSMLKEICAALLEADVNIRLVKQLRENVRAVIDFDEMAGGLNKRRMIQSAVFKELVKLVDPGVKPYQPIKGKANVVMFVGLQGSGKTTTCTKLAYHYQKRNWKSCLVCADTFRAGAYDQVKQNATKARIPFYGSYTEIDPVVIAQDGVDMFKREGFEMIIVDTSGRHKQEESLFEEMLAVSNAVSPDNIIFVMDATIGQACEAQAKAFKDKVDIGSVIITKLDGHAKGGGALSAVAATQSPIIFIGTGEHIDDLEPFKTKPFVSKLLGMGDIEGLIDKVNELKLDGNDELLEKIKHGHFTIRDMYEQFQNIMKMGPFSQFMNMIPGFSQDFMTKGGEQESMARVKRMMTMMDSMSDNELDNRDGAKLFSKQPNRCVRVAQGAGVMEREVKELIAHYTKFSAVVKKMGGVKGLFKQGDMTKNVNPTQMAKLNQQIAKMIDPRMLQQMGGVGGIQNMMRQLQQGAAGGLGGLGNLMSGFGGK

SEQ ID NO: 9295 - DNA, 15414 bp, DROSOPHILA
gaagccagcggtctgttcgtcaggcagcggactgcttaagttcatcttcatctcataggtcgcctcattgcgcttgcgcacaaagtaccgttccagttcgacaaacacgtcgtccagaacgctcagtcgcaactgctgcttggcttcgggtatgatgacctcttcgagttccgcccgcagctccagctcgatttccgcccgcacagcttgcttgcaagtgctgagcagctcctttttatacgcgtcgatctcgctgctaatgagctgggcggcctgctggcgccactgggcattgttctcggcgcagccagtttgcgtgcatccttccccggagccccgctcctcctccacttcactcagctgcgacttgacaccctgccgctgcaacgccttgtggcgcctcaatttgcgatcggctgcgaggcagcgtcgtcggaagcagtgcatctcctccagttgcagccgacacatggtgcatatgtgctgtggcagaccgtcgccgggctcgatctccagcgatgtgcagaccattatctgcagagcagtcgatccatttgcaccgaaaacggggaaattgggttccttcgacaagcacaggcgacaaacattcatgttgaatttcaaggcaattcggagcgtggcagccggacacctgattaggcacgattcggaatgatggacaatctagcaatctttccaagcaaccagtttagaatatgaaacaaaaaaacatttgaagacaaataactaaaattggaagcggaggaatttcctactaggaaacatcaacaagtctagccgatttgttatcgatattttcagtgtggccatgcggttgagagaatgcattttagtatttcaaggctggctgctctgccattgatgtgcccgtatttcagcaaggcgcttggcgggagaatttcaaatagtcaaaattttacaacgatactatagcgctcatttgaataacctgaaatgcagcaataacacacattcatttatcaaacaatttctttatatttcattaaatattaagtataaatacgcagttaactattaagtattatatacacaattacaataagatattcagtcactataatgcttcttctatatacaaagtacgatatatattatatcaaagggcttgaactcgccgccgcacctcaataaattatgcaattcaattccatgataatatacagtaacagtcgtctgtgttctccgggagtttgccgattgattttctcaggatgatttaggatctgcgccgaggattgcctacttacagctaaaatgtttgcaaaaacaataagtcaaggacatttaacagtgttttcatttcgtttcgcatcgttttgatttcatactcatttgctctttgctttatcgcttgggtggggtgttttgtgtgtgggtttttgatttgtggtggtaaataaatagtatcgatcgattattaacgatattcaacattgaaatacatcaatcattaggcatatacataactacaggatataatacaatacaggatcgttgggatcaggatcgctcttccaggattccatctcaatcgtggcgccagctctgcggcagaacgtagtccttgaccttgtagagcgcattggcataccaatggatgccattctgctgctgcgccgagctcaccaccttcggcgaactgtgcaactgctccttggcgggcagccacgcctccagcgtggacagcaggcgcatgggagccagtccccagtgggccagcgactggctgttgatcaccgcatagcaactggcggccaccgagttgaccacaatggtgccctcgcgggtcagcggcgcgaccacgcccttactgcgcacactgcccaccttgacgactcgctggggcctcagctcgcccgtctccacatcccgtacgagcacctggttcttctcctcgatgcgatccgcaaacacaaacgtgagcttctggctctccggctgccaaacgctaaccaggtgagccggcgtcaccgtgagcactgctccaccgtccgtgtgcagctgcacaaagttttgcatctgctcgaggttgcggtccatgaagaggatcacttcgctgtagacggcctgtccgttggcggtcatgctcaaaacacgatctccgatagagagctcgccgagcggcttccggactccactctccagcagcgctgtgctctccggcgtgaagcagccgtgcacgtgggaactgatcgacgaatctgcaagtaggagaggaaagaatttggttagaaaattggattttaaataaatataaggtgctatttaaatattcatagaaagttataataaatattcgtatccagagtagttacacgattactttaaaggcttgcatgggtgttcatgtattttacacaatctaaaatctgatctgcagattgcttgtttggttactgagagccgcccaggtaatggcattagtttgctaatctaatttggcgttaagcatccaattgccaagcccaacaagtcaaaaaggttttcacagatccggggctggcccgttgcagcccaatgtgaaacaatggactcgaaaggactgaaaggactgccttttgcggctcgccaacaagccaggaacctaatgcgatcgttgaacagagatccgagatcggagatcagcaatctgcgatctgccaggcatatcaataacaagcggtcgacgtgtttttgtttcggcttgcacaaaaattgtgatcttgttttccctgcaagattagccgtgggatcagcatcagccgcatgcgaagccgaactcgagccaaagccgcttagaaatcccaaggaaaaagaaatgcaaaggaataaaatgagtagaacaaaaaagggggatgtgccaggtagcagcttgtggtttgttttcccaaccatttttggcaacctgttggcaattaccgaacatgctgcaacccacctaaacaataatcgaagtgcaggccacattaatcatcattaatgggtatcggattgcagggaacaggcccacccagatgcatctggaatatatcgagatgcactctatagaactttctctgggggccttcacactccacactcgaagcgccgatgctgcttgtaaaattcaaattaaaaattccagaccaaatgcgaccactaaccgcgcgctttattataatgagcggccataaagtggccttgttgccgctgctgctgccgctgctgctgccatggaattccaaagaaaatgcaccttcccagtggccagcccgaaattcccattgatgcattttggtaaacagagacaggcggacacacaaaagtgtagaaacaataaaaatcggattaaatacatatggctggcggtctataaaacccataatcgatgtggatggacgaaaggggaatgggatcggaaagagaataggaatcggaatcgaaatcgggcccaaaagaacacacgaaatggacaaaagattctggggagatggagagaaggaagcgcggtagtaacaagaaaaattggtgtgaaatctaccttctaccaaaacacggcactgaaaccgaaacagaaacagaaaccaaaaataaaaaataaaaacgagggacaagaaaaatctcaggccgtcttcgttgttggcggtgagtggaaagtgaagaacttgaagggtcataaattaataaaccattaaagtggttaaaattatcgttattttatctttgttgtgaagactaaactgataaattattacaaaacagaggacagccgagctggtgctgctgctgttgttgttgtttttgttgctgctgttgttggcttggtgactgatcgtttggacagcattaacatgaacatgcaacagcaacaacaacaacaacaacaacacgcgcttgggggctttaatgcgcgcgcgcgacacaccagcaacaacaacaaaagacagcagcaacattggtaagagcgaaacaaaaaaaaaaactgaaaaaaaaattagtgtcgacaaaaaggtttacagccattactcttcgtcgtcgtgctgctgctgttgctgttgttgcttttgcttttgcttttgctgttgctcttgctgctgccgtttaggcccctacaaacgaaagacttaggcagcgaactcgaggcacagcgaatgctgtgccaaaactgtcataagcccgtggtttatgtgcagcggcctatcagcaatcaatcgccccgtaatttattgatagctagcagcagcactagcctcactagcaccactggcaacacatggctttcaggacccgctggaccacacacacacacatgttgccgaacgggcaatggtatgacctgcttgccacttgttgtgcgtcggctgaccttttgatattgcccaaggagaccaagttggagtgggggaggatgacagcaggatcaaggttcatagcctggcggctcctttcataagcaattagaatcaatgagcaaggacactcggctccgtttcctttccatcgcccttttgtcctgccgcaatctttatgggccgccaccaaaagtcacaatattgtgactcgactgcgtgtgtgggaaagaggcgtggcatcttgtaattgtagatggaaattaaatgaacaactgacagccggtcgcacccaaagtgtctatctgtctgtatgtgtgggaaacttgaaagggaaaatccctctagagccgctaaagacatgcaaaaaaaaaaaaaacatgaacatgaagaaaatgaagtatgaaaaaggaaccgaagagagagagcaaatcttggcaagaaaacttaattgtcttggcccgttttggttggctgatcgggccaaaagcattttcttctcggtctttggggcagtttcgttatgtttcggggaaaactggttgctggccataatggcagctcacggatacacactttgacggccaggcttgtcttaactgatgatgctaacttgctggccgttcagtgttttttttttttttctttttttcaattaggcccgcgctcaggttttagcccggcatttaattcatctttgccagtttgcctgttgcccgtttgcctgcttctccaacagtctcggccagtttgtgctgcctgagaaacgctttgggtgtcgtatcatcaattcgtttaatttgacaggcgcaaacctaaacatgtcaaaacaacagccatgcggttagtagtggtggttgccgcctctggagccgacttttcgggttccagcccagtcttcagtcctccgtccccagttcccagttcccagtcctcgtaccctcagaccatccacatgcacagtccggttttctgactttgttgccgtttttcttcctctttcggatcttgagagtcgtgtcttttaactggcactggcactggtactgggcactgcagccgtggccaattcggcggatgcgaagtgcagggcgagctgcgagcggctgaaatttgccaacgcctgtcagcttagcgatcgccagtacgaaacatgcgaaattacgcttgttagtgtcacttctggctaactgaccaggcccacccatcagccagcacctaggccagcactttatgcttcctacggactgcactagcttaaaacaatcctaagttttaagggaacttaatttaattttatattaccataacattaagagtcataattgtataatattcatgatgcatgcttttgatatttacactggcttaactgttacataacttcagaaaaaaccggaaaactacgagtattcattatgaaaaatgaccaaataatgaatataaaaacagcgattaagtatagtatatatgtggataattacctgacttgacggagcagtagatgtggcgcctgctgacgtaggagacccaatcgaatccagcctcgacggccaggcgagcgagcatgccgtatttggactggtcgcgatcggaggtggcaatggtcaccgctcggccctcgtagtggagcgactcctggccgtgatggtagtcctcgtcccagctctcggtgaccagcagccggatgccgggccattcgttcatcaccgagtaggccagcacgtttagcttctccttgcagcgctgcaaaagagggcagagaacggagagatcgattaggtattgttaatagccagacgccatgttttaagacacgcagcacgcagcacgcacgagggagcgggatggctacactgctgtcggcgggggcgtggcatgcgggcgttcatttcggttgcccaaagggcccaatgcgttcattttgcccacttagtgcactcaacaaaattattgagcatgttgatatggagataatctaattttttaaataagaactgaaggaatattatcaatcaaattctctatgaaaatcattaactttataattaacaagactatagctagatctgaaaaacaaatgactagccagaggaggttctacttttttccgagtgcttctacctctttgcgctctgtgagtctgccctttttggccgcatcctttgaacctgttgctgcaacctcaacaaacaggcgatcttatttgcccagttcccttttggccaaaggcttatttgcccatgcttacgtgcagttcaaacactgaccctcgacgatggcgatggtaatggtgaccctaacccacgctcgcagatagaccttttattttctcccttttcactctttgtttttcctgtcgataatatgaaaatgcttacgctttgtttgccaatgtggtgggtgctcatccgtttgtcggctcgttttcatttgatttttttagtggatagaactggcccggcctggagaaatgccagccaagcagaaaaggattcgaacaagtctatgcaaatatttgagatcccaaaattcaaaattcgaaatacgaaaaggaaaaaaaaaacgtgtggactcaggcggggcaacaagagagtgtcttaaagattgagccagccacaaaatcaattatcaacggactgagtccgggggtgacaggatgttgcctttgtgggcaaacagaatgcgagccgtaaaatcaatttgcgacacgaagatccttttcttcttttttagttgatggcaaaccacagcgatcagttgctgttgccttttcgggcttatgttttgatgaggtgtggatctgtagcgttcattgtttgctattatttggccaaaacaggacaaccgaatttgtcacacagtcgtggccctgtggcaaattgcgatggcaggccgcattccgagaagagttcaatgatatttgcccaacgcgctgcaactttgctttattaaaaggcttaaccagtcgagagttgagacttaagaggcgagagccaagtcgtgctaatgagcacaaaagcgtaacgacaaacagaggatcgctgccaacgagtgtgtatatccatatccatggagccataagttggggtaaagacaaacgcttttgtcttaagcactgccaacgatgtttacccaacatgctaatgcattgagctcgaattcgaatcgatgcgctggacgcgcaatgaacaaacaacggcccgtctcagatctcggatctgagatctgggatctgagttctttgggatctctcgagactgggatctctcctcgcagatcccatattccactgcactctccgcccaacttcgtttgccgacgggtgcgtaaggtaaacatttacgtatacacggcgtcggcggcccaaaaagatggctaaataatgtgtgtgccttgtaagtggccgttagacaacagcgtcaagtgtaaataagcccgtgccctggcaactcggggtatcggaaaatcccaatacccatattaatacgtattatacccatagccatagccataccatctccccctaggaaagctgcattaattagacattcaacaaggtgtgaactttgccttttcttcagccattaccccgaaaaaggcggaaaactcaaatcttcgaaaaatccgaccacgccccattgtgcatttttgtttatatgcgtgtatggagggggggggggggggcgactgcatttgattttggctatttcggtttctgtttttttttttattcctcacccattttattcgcctctgatgcgtttttaatggacgcgcgactgcagttttattgatttaaattgtctgactggctggctgccaatttgacgctcttaatggtcgggcgaaattattatggcacgaagattattaggcactcatcatcattagccaagtcaggacgcgagttggccaagtcaggtcgagttaatagcccgctctcgaccagagacaagttcgggggctttgtttgttttgcccatcccaaacccaagtccaggccataccataccataccatgtaccatctcccatctgtgggctttttttttgcgagggtctcggattacttgtcttgggtaccccagggaaaccgacgattaggaaacgacacaatttaacgacataattcaagtgcgcattaagttacggctgccaggggagtcacccctttttttatatatatacatatatgtatgtatgtatatatgcagcatatatgtgaatatatatgcagatgcacgtgctctatggtgtaagcagatatggcatatcctttgattcccggcactgattgagatcgcagaggaagcgaaaacttacaactgaggaagcgacacaggatatagtcgaaaaaatacgagttgaaactctgaagaaatcacgtcacccacctaaacgattcacacacacacaaacacatacgttctatatgtgcgatatgtgtgtcaacggggtctgaggtgggccacttgagggccgccacttaggtggcaacttagggtttctcagttttgtggagtttggagtcttgagtcccagaatcccggaatcccttgccatcagtcagcgggcctttttcccaccctgtgtggcccactcgagcgcacagttttcctcacttaattggcaaactgttatggatcctctgattgattcaagtgcaatgccaatccgcagctccagctggatctgtttatttgtgttgccaatctattcacagctcgtcatcgcttcattagaattagcggcggtctttgatttgtttacgatgcgctggcagcgcaattattacagcgcaaaaatcaaatcaaatatcggctatcggccagcagaaaaaactgaagttttaattaattggaaacgaatggtactgtgtttacggaatctggagaaatcatctgggttctgaagtctgctcctgtctgtttattttcgccttttttttttttttgcttccattataaatggcagagcataaagaagttgaaacctttattggattaatgggggattaagggtgctgtatcgcggctaattgaatttttaccacttcgaaagatggtatagtggttaaagtcaacgggtagataagccaagtttcgcaagtaattgaatttcccactgtaaaaatgcaaattaaaattttccatttactagaccttaaatccactcgccacaaacaaaaaaaaacaaaacccaaacgcattacaaatgctcgtaaatcacgcgtcaaataaatgtccataaggggaaggcgtcattttattgttattaattaaatgctattaatttgcagaaatcgtaaattaaatctcagctgtggcctattgcccgctgccccacctgcctgccacatttaatgtccccccggcgatcagcaaaagtcatttggagctcgatcttggagcttgaagctggcagttggagtagccaagagtcaggtaagagccgagttcgggccgggtcttaaatgataagcgccataatccctgatgtgtgattaactttgatgatgagttatgagccgcacactggcaccgatggagcaacggacagcgggtaggcgagggggtggcggctgccttggggtcttccgttcgatccccggatcccctggatcttggatgacttgcaggaatggatgcagagcaggagaggagccatgtgaaatgtgagtcactcgcccagcagtaatgtgatagccgcgacgcgatctctgatcgcgatcttccatattctctcccggcgcaagttcataaaagttttatgcaaataaagcaaaagccagagatccaaaaaggcaaatatcgatggcattttggggcaacaaatccttgaacattcgcgcctgagtgccctcgtaaaagtatcaaattgattaataataataatataaaagcatctcgcacaaaagcaaaacaaacaaataaacagtgcgaatccgcatcggcgatacatatacaacatatatggggttcatattgggggggctctttttttgaaagagacgatttgtccactttgcctgactgatgtttgtttgataagtttgattactttgttcgccgcaggaatgttcccacgaaattggctgatgtttgcttatcgcagcatttgacgtgatttgatttgagttcctttgtttttttggcaaagggaaaatgaaactgaagctctgacatcatcccacccagcgatttctgttctttctcttaggttttagttattttttttttttttatgtcataataggatcaattttgagtcataatgctctattagaatggctcggctgagggcttactttgatttgatttgagtggagttgatttgatggtgatgtgcatgtctggaagatcagggagtgaggagctggcgtatggagtctggaggactggcagtgctgcatgcatgtcaataatcatatcggattacccattggctttgccctcagccccattgttgctacaatttatgaaattttagaacttatgctgcggcttttgacgcattcttttgtccacatccatatccatctgtccgctgcggtttctgctgctctgctgctctgctgctcgtctaatcccgtggcattcaagattcaacttcagataccgcagatacaacagttcagcgctgaaaaggtctgaagagaagtgttgccctagacacattcgccggtaattacctgagccaatgacttgtcataagctccagtactttacgatgcatttgttcgtttcggttaggagtagctgcattgcatggcgactgctgaaatttcgcaatttgtttatgcaaccggcggagggaagtgcaacacacccacagtcagggccacgcagctagcagtccgactttcgagccttttaaatggccacaacgaattgtttagcagctgaaattcacgcacagcggccagtaagtcattcggtctgatagccagatccaaatccacataaaatgcgttttagttgcgctctgctggcactccacggtactctttgcagctccttgcaggaatggcaaaagatttcaatgtcactggatatatgtatacgacttcggtagcggaacagttgccgttgtaaatatttgtcccgtgaacaacaggatttttatgctcgccgagtgtccttggccgtttagtcaatcgcccgaaggaccttggccttcggtgtgtcactgcgtttgtgctgccgtgcgagcaactgttaattgttcgccagtttctggaaaggctgcgataccttttgattgcatatcaaattcaaggtaacatctgaaatggctgcaaccatttagaatcccccgatgggcgcgtggcagttgccaaatgcaatttggaattggttttcaagtgaaactctagcaggcgaacaactggttcgataatacgatttaactttacagtacagtaaaatctgatttttaaagatctaagtcgtttttgcgaaacactaaccactgactaataaatcaacaaatcgaaagtcattgtaacacttgtgtgggcgatactaaaccctttaaatcaactatattagtcggttggcaggcgtaatctgtcttcccacaattctgattattagtttgttgttcaatagcaccaaatcgtccaaggaaactggaagtccgccataaaagcccaatagctcgtttatggcgctaatcaataacaaggctatttttacacatcgacacttaaaatttcattaaagtaacacgaagataagctggtgggaagcgtgccgattatatatatcagcaacttcaatgtcggccctcttagggggtcttgactgtgctaagccgacttctggccgcaacgcaaccaccccactaactgctggctaattggaaatgttgtcgcatggtgcttgaattgaacacttgttttagctgtttcgcactttgaaactcaaccaccgctcccccaccaactgggtggtcatcccaccgccacccactccactttcactacccccgcccctttttttttatggcgataagatactgctgttcttcgccttagctggtatcttagcacacattttgttctggcaccgatatagcgcaactagcaacgtataacgtataacgtataacttgcacctaaactaattttcacattttatttcacacataaaaaccatcatatacctcttttagcataaaccataaagtggcaagcatatagtattatgccaagcgaacccaatttctttcagtgccagcatgtagctacacatgttggcaaatatagggtgactatctggggggatagtaaccgtgtattggcaaacgaactacttggctgcagtccgcttatcagacaatcgccggtgataagcggcaaatgctcgcgtgcctccacttttggggcgcggacagggtgggcggtgggcggtgggcggtggttttggctgagtaaaacctgataaataccgggacttgtaatctcccgcattcgataccctgtttgttgttcagcgcgaaatcgaaaacgcatttgcgaagcgtacacacaatgttgagtaaactatgtatttgcaatgatgacccggggatcgattgggctcgaggttgttgaacgcgttcgctcggtttgtttggatttcgggacgctttgcagctttatggcttagttcgatggaattcaggcgctatctaccgttcagccgtcgagtatcgggcttcctgtttttttgcacttgcgaaacaagtgcagtgcggcgataagatgcataattaatcatataaatggccaatgctcaaaactaatactatatttcagcccagttttatggcagccatcgccaccataaagttggtgaaatagccaatgctcgatcaatgattgggcacttttccgccacgtagcgtttatcaatgggaaccgagtggcacaatctcgtgccatcgggcgatcgctagatacgggctataaaacagcgcgagcgataagcgatcgctaatttgacaattgaatttacggaccacgacgggtggcaaaatgtgagtgcagtgcgcaataagcacggaattagcctagccgcaaatcggaacccagctgtctgatatagaagacgaattcggaacaatatcagcaataaaatctcatctaaatggtgtgtttgacctccatacctcagatttaacaggcatttcattgtgttcctatatcaaagtaggcttacttttatcacaaaataatacctagaccaaatattaagtgtactattaaagcattacaagttccgtttggtagagttatctcacattttttcctagaattagtcatttatttggcgtaagactgggttttcacttcatttgtgttgctaacaatactaaatgttaagtaatttctgattaatcgtgattaataagtcaatatttcggtttttacaaataatttttaagtcactttgtcacaatgattccgataagcgaaactttcccaatgatgtattacaaattttgttactagcttacggtgtttgagggttttccttaccttgctcatcaagcgatccgctccggtgccttcctcgtcgcggaaaaggatgtccctgttgtagttgggcacgaggtccttgaatttgggcgagtcccgacggatcacaccctccagaggtccggaggcgctgttcgtgtactcggatagattgggaattgtctgcttgaggaccagcggatacaggttgcgcgccctatgacgacccaatcctcggccaggaccgcagctgtgagccgggctaaagaccatcggcaagacgatcagcagcagggccaccagagaggtcagcctgctgaggcaacgctgcgtatgcgcaatgtggcgcatcgtttgcgtttcttcttgcgggattgcggagatggagctcgctgcggatttggagctggaactggaactggaactgtggcatttggcatccagggagagacaggtgacactggcggcactggcccaaggcactgagctgtggttatccatgatttatctaagactcgttgtttgctgtttctcttgattggattttgtatctcctttaattttttttatttatttttttggttatttagcacttcacttttggcacacagacacgcttatttggcgacacgtttgttattcagatttatggtattatttggatttaaactggctaaatcgaaatacttgagtcggcgaaatcgcaggtcctaactgacttaactacggtcttaactgttctccgctgaactggcagttagctctcggttcggacaaccgttgcgctcgcactgtgattgacaaatgacatttccgagcggagtatcgtgcgcgcagagtgttcgagtgcgagtacgagtacggcagcgaatacgaatgcgagtataagtacgagtacgacgagggtgctttcaagaaccctaggccttttagctcacacaaacacacacgcacacacacactatcgcctcgagttcattccgcgttgtgattgtatgcgtatgccactcgacgttcgatcggctgtggtgttcatttttatgctgccttatgcgcaagggaagtggaagcgggacaaccagatgatgcagcatactcacaagactggtttgcatgtgttagtgcctgagtcttcggctcttatgtacaagcaatgttggcaacagatgttggatggcattggcatagtgtgctgcggtccattatggccatggatgaaagtgtgtgcctgttgccaattggatgtgtgatagtgtgcgttgctggcgcagaagagctgcagcatcctcgactgcaactgcaatttctcttaacacttgcactactcggactcgactcgactcgagtcttgtggcttgttagccgcttctggccctgcaactcctccatcgcaggccattgttcacttttttccgttgcctttcttcgttttgttgttcgtttcgctttattgcttgtaaattaataatgttccggttttttgtgtattgtgtgactcctgggcagccttatatatatacatacatatatatgtatattgtatatggtatgatatgtggag

SEQ ID NO: 9296 - DNA, 2045 bp, DROSOPHILA
attaaaggagatacaaaatccaatcaagagaaacagcaaacaacgagtcttagataaatcatggataaccacagctcagtgccttgggccagtgccgccagtgtcacctgtctctccctggatgccaaatgccacagttccagttccagttccagctccaaatccgcagcgagctccatctccgcaatcccgcaagaagaaacgcaaacgatgcgccacattgcgcatacgcagcgttgcctcagcaggctgacctctctggtggccctgctgctgatcgtcttgccgatggtctttagcccggctcacagctgcggtcctggccgaggattgggtcgtcatagggcgcgcaacctgtatccgctggtcctcaagcagacaattcccaatctatccgagtacacgaacagcgcctccggacctctggagggtgtgatccgtcgggactcgcccaaattcaaggacctcgtgcccaactacaacagggacatccttttccgcgacgaggaaggcaccggagcggatcgcttgatgagcaagcgctgcaaggagaagctaaacgtgctggcctactcggtgatgaacgaatggcccggcatccggctgctggtcaccgagagctgggacgaggactaccatcacggccaggagtcgctccactacgagggccgagcggtgaccattgccacctccgatcgcgaccagtccaaatacggcatgctcgctcgcctggccgtcgaggctggattcgattgggtctcctacgtcagcaggcgccacatctactgctccgtcaagtcagattcgtcgatcagttcccacgtgcacggctgcttcacgccggagagcacagcgctgctggagagtggagtccggaagccgctcggcgagctctctatcggagatcgtgttttgagcatgaccgccaacggacaggccgtctacagcgaagtgatcctcttcatggaccgcaacctcgagcagatgcaaaactttgtgcagctgcacacggacggtggagcagtgctcacggtgacgccggctcacctggttagcgtttggcagccggagagccagaagctcacgtttgtgtttgcggatcgcatcgaggagaagaaccaggtgctcgtacgggatgtggagacgggcgagctgaggccccagcgagtcgtcaaggtgggcagtgtgcgcagtaagggcgtggtcgcgccgctgacccgcgagggcaccattgtggtcaactcggtggccgccagttgctatgcggtgatcaacagccagtcgctggcccactggggactggctcccatgcgcctgctgtccacgctggaggcgtggctgcccgccaaggagcagttgcacagttcgccgaaggtggtgagctcggcgcagcagcagaatggcatccattggtatgccaatgcgctctacaaggtcaaggactacgttctgccgcagagctggcgccacgattgagatggaatcctggaagagcgatcctgatcccaacgatcctgtattgtattatatcctgtagttatgtatatgcctaatgattgatgtatttcaatgttgaatatcgttaataatcgatcgatactatttatttaccaccacaaatcaaaaacccacacacaaaacaccccacccaagcgataaagcaaagagcaaatgagtatgaaatcaaaacgatgcgaaacgaaatgaaaacactgttaaatgtccttgacttattgtttttgcaaacattttagctgtaagtaggcaatcctcggcgcagatcctaaatcatcctgagaaaatcaatcggcaaactcccggagaacacagacgactgttactgtatattatcatggaattgaattgcataatttattgaggtgcggcggcgagttcaagccctttgatataatatatatcgtactttgtatatagaagaagcattatagtgactgaatatcttattgtaattgtgtatataatacttaatagttaactgcgtatttatacttaatatttaatgaaatataaagaaattgtttgat

SEQ ID NO: 9297 - protein, 471 aa, DROSOPHILA
MDNHSSVPWASAASVTCLSLDAKCHSSSSSSSSKSAASSISAIPQEETQTMRHIAHTQRCLSRLTSLVALLLIVLPMVFSPAHSCGPGRGLGRHRARNLYPLVLKQTIPNLSEYTNSASGPLEGVIRRDSPKFKDLVPNYNRDILFRDEEGTGADRLMSKRCKEKLNVLAYSVMNEWPGIRLLVTESWDEDYHHGQESLHYEGRAVTIATSDRDQSKYGMLARLAVEAGFDWVSYVSRRHIYCSVKSDSSISSHVHGCFTPESTALLESGVRKPLGELSIGDRVLSMTANGQAVYSEVILFMDRNLEQMQNFVQLHTDGGAVLTVTPAHLVSVWQPESQKLTFVFADRIEEKNQVLVRDVETGELRPQRVVKVGSVRSKGVVAPLTREGTIVVNSVAASCYAVINSQSLAHWGLAPMRLLSTLEAWLPAKEQLHSSPKVVSSAQQQNGIHWYANALYKVKDYVLPQSWRHD

SEQ ID NO: 9298 - DNA, 3178 bp, DROSOPHILA
gatggcagaagggggcgggtctgggtggcttactgatataagttgttatttcgcgggggtctctgtcttttattattactttttgccaatttctagcactcttttcggttcgtctcgctggcctccccccgcaaagcgtatcaaacgatgaatacggtaggcaaaagaaacccgaaaaagcaaagatggcgttttacgctgcccatgcaactttgtagcgtatctgtgtgggtcgccttgtgtatgagggggtgtgtgtgtatgatggactatagcggagggagggagtgcactcactccatcgtgagcaaaactcctattacaggacaccgcttccgcccacttaccgtgctcgttccggaagaagaagttcacctcatcggtcttcaccgtaccgcccgtcgaatgcgccatttttcggccgccggagatcaagtgatcttgttgttgtcgcttaccgctcaccaggtggaccgccaaaaacaaaaggaaagagcagtgctacgtgccgtttcgccgcaacgtgtgtgctaggggggggcaaatggagctggaatgggcgacggcggtggataggcggacgtactgcacccacggactggggcacgtgtgcaaatccggatgcggaccacgaccacgacgacgacgactgcaatggggagcgcacttgtacaaaaaataagtgtcgcccaagtcaaaatggcgagcgcatttttcacttccagcggcagggcattttttttttcttttctgctgctcacacacactcacagcggcggccctttttcggtggcctttttcgcggtgtttcggcgcacggattttcacgagattagtggcaaaagatacggcgaacttttagctatcgaacggctggcagcagcgcgaatttccgcaatttctaagcgcaacaaaatggtcacaaaatttccaccaagtggctgcttttcgttttcatgtgggaaaggcaaagcaggctgtgtgcgggtgcgaatgaaatggcagacagtgcgcgccaatttacgcatcaatttacgcagtgttgtaagcagctgtgtgcgacagtcgctatcgcacactggtcgcggatgtaaacaaagttgccactttgtccaggtgagcggtatttcgctggcagcccgccaacggtcaccctgaatcgcagaatattaaagttttcgagttttatttttacccatttggttggtgtgggaaaatgacaatcaacaggaacgggtaaatccaagcagctatctacacgagcccagcagcggagcgcacacgcacacaatggtcgatccggtggcggcgctgtgcaattacaatgtgctggaggtaatcttctcctacctggagctggacgacctcagtcattgctcgcaggtgtgcaaaagttggtaccacttcctcaacgacgagaacagcgacgtctggcgctggcactgcctgaacaagctgcccaaggagtccctcaaatcggacctgctggcctccgtctccacgtacaagacgaagctgcgggcctattttcacgcctggagccccaacgactgttcgaggaatgtgtacattaagccgaacggattcaccctgcatcggtaaggtattcggtttgcttgagtcggcgttatatgtatgtccctccattcccgcagcaatcccgtggcgcagagcacagacgcggcccggggcaagataggattccgccacggtcgtcacacctgggaggtgatatgggagggaccgctgggcactgtggccgtcatcggcatatctaccaaggaggcggctctacagtgtcacggctatgtggctctgctcggctccgacgaccagagctggggctggaatctggtcgagaaccacctgctgcacaacggcgacatgcagggcagttacccgctgctgaacaatgctcccaagtaccaagtgggcgagcggatacgcgtcattctcgactgcgaggacaacaccttgtcgttcgagaagaactacgagttcctcggtgtggccttccggggtaaggggaaatagtttggtgataccagcgatacgaacgattctatgcactttcaccttgcaggcctgccggacaaaaagctctatcccacagtatccgctgtctacggcaataccgaggtctcgatggtctatctgggcacgccgttggacggatagctttgcagagggcctacaacttggttaacaacttccacggatccattaggttattgtgtacatttgtatttatctcaattatgattgcttcattccacctgaaactcagttcgataaatttagttaatagtttcgtttttttgtacaaaattatgcattttgttgatttacgctaagccaaagttcatatccacctcggcactatctcacatggcaatttaccttagttatacgaaccaaatgaatataataagcgattaaacaatagttgaagcaattttttatacaccaatgatcgctgattgtgcaagtaaaattacagacagaagaacgagtcgcgaatacaaatctttcaatccatttattgcgtggtggcctctactgtttcccatcggttttcatcttggcccagttgtcttcatcgaacagatcatcaaaatcattgtagaagtcagcgtggacgtgcttatcgttggagggcaggtggtccatcatcattcctgtggctccgccggactaaaggaatacaatataaatatatacatatgtatatgagcgtatggtggcaggtttttaacatttatgtaggatattgccatgagcattgatgaaaactctggacatgggaacaattaatataataaataaagtcgccaaaagatgaaatgaaagatacatattcctgttttgcggggaaacactacttctaaagaagattgtagatttatctgattgttgtttacttttaattgcaatgttggctacaaggataaacaaagttttcgacgaccatattcttcgatgggaagctatgttgaggacttacctcgtccatttccatgtagccggggccttcggaaaacatttcgtcggcagccagagacggtttcatgtttaaatccatacttatttctattttagcttccaattatcttttttgttattttttttagcgcagaaaaatctttacttgctgaaggcgttgccactgcaatgacac

SEQ ID NO: 9299 - DNA, 999 bp, DROSOPHILA
ggcagacagtgcgcgccaatttacgcatcaatttacgcagtgttgtaagcagctgtgtgcgacagtcgctatcgcacactggtcgcggatgtaaacaaagttgccactttgtccagttttcgagttttatttttacccatttggttggtgtgggaaaatgacaatcaacaggaacgggtaaatccaagcagctatctacacgagcccagcagcggagcgcacacgcacacaatggtcgatccggtggcggcgctgtgcaattacaatgtgctggaggtaatcttctcctacctggagctggacgacctcagtcattgctcgcaggtgtgcaaaagttggtaccacttcctcaacgacgagaacagcgacgtctggcgctggcactgcctgaacaagctgcccaaggagtccctcaaatcggacctgctggcctccgtctccacgtacaagacgaagctgcgggcctattttcacgcctggagccccaacgactgttcgaggaatgtgtacattaagccgaacggattcaccctgcatcgcaatcccgtggcgcagagcacagacgcggcccggggcaagataggattccgccacggtcgtcacacctgggaggtgatatgggagggaccgctgggcactgtggccgtcatcggcatatctaccaaggaggcggctctacagtgtcacggctatgtggctctgctcggctccgacgaccagagctggggctggaatctggtcgagaaccacctgctgcacaacggcgacatgcagggcagttacccgctgctgaacaatgctcccaagtaccaagtgggcgagcggatacgcgtcattctcgactgcgaggacaacaccttgtcgttcgagaagaactacgagttcctcggtgtggccttccggggcctgccggacaaaaagctctatcccacagtatccgctgtctacggcaataccgaggtctcgatggtctatctgggcacgccgttggacggatag

SEQ ID NO: 9300 - protein, 255 aa, DROSOPHILA
MVDPVAALCNYNVLEVIFSYLELDDLSHCSQVCKSWYHFLNDENSDVWRWHCLNKLPKESLKSDLLASVSTYKTKLRAYFHAWSPNDCSRNVYIKPNGFTLHRNPVAQSTDAARGKIGFRHGRHTWEVIWEGPLGTVAVIGISTKEAALQCHGYVALLGSDDQSWGWNLVENHLLHNGDMQGSYPLLNNAPKYQVGERIRVILDCEDNTLSFEKNYEFLGVAFRGLPDKKLYPTVSAVYGNTEVSMVYLGTPLDG

SEQ ID NO: 9301 - DNA, 2232 bp, DROSOPHILA
tccgaggttataacacattacaaactaacataattatgtatatatttatatagttataatatatatcgtatggtggttttgtttatgaaggcccagttgatgtctaactataaccccagaggcagtcagaagaagtattcaaatggatgtacacaatttgagcgctgtacgtgaagttgggagcgggaatcccgatctgatttaagtacatacatatattctatatcctgctattcgtgtcgttgtatgtaaaatcgggcggccgaaacaaatcttgtttgctttaattaagggataaccaatgatctatatccgccacccgatcgataagttgcgataagtccgtctgagtctggctatatcatctgtgtgtttggatttgttggataggttgtgggatgagtgtgagatcaaaatgctatcgagtgttttgggatttggttgtggttgtggctgtggctgtggtgttccgctgatccgctctataactgtccgtggctatagtctacatagtatatttcatgctcatggtagtgtgcctaaaagaacaaaagaaacaatattgaagtgccgaccaagaggtagagaccggagctccgaatctaagcgttcgactccttcagattttgcaaacgtgccaattgatttgagtccaattcctcgggtatgctagctcgcccaccgaccacctgtttgggtgcctcaatatcctcatcgccagccgcagatccagatactattgcttctcctgctgcctctccgttgatgtccaattcgttggactgctccccaccgccacctccaccgcccccacctcctccgattccagcgaaggcgtcatcaaaattggcatcgaagttggcctcaaaattggcctcaaatcccgaaccgtcgccggactctcccttggccttctcgttgaatggatcctccgcatcctgcagtaccggcacatcggcaaccgaagccgaatcggtgccctccgagaaggactgttggtcctctgcatcacaggatggatactcggtcagtgtaatgctcaccacgggcctcactccagcattaccttctttggccggcgcgctctgtggcgccaccttggccagcggcttgggcgcaatatctggctttttggccacttccgccggctgctccttggacaccggctccactggctgtgcatcgctctcgcctactggtgggaaagatttatcggcaccgtcttcaaccatgggggttgcagcggtaacaattatttgtgccatacctaagttcagcgtgttggcgccacctgccgccgcccccttttcgaccttgctcccagatccaggagcggatccgcccgccttcgctagttggggcggcggcaaggacggcggcggctgcccatcgtcactgagatcgtcctggaaaagtgcgaaaaatcattagctgataagataaagaaaaagatatatattctataacaaatgtttatataaaaagaaaatttaaattataattaagtataacatgtttatatcaagaagtgtgaaataatatagacctaatttttgtaaacttaactaaaaagcataatttttggtttttaaatatgtgaatattttacctccatgccaggctcttggatgagtactgagtatgcgttaaaaataaatgagaaaagatttgttggcttagtatcaatcatattttcggaatgctatatcttatatgaatacaattttatcgatccaaatgttatagagcggtgagaaggaaaccaaaaatattttggatcaagccaaggcagccttggaacaaaaactatctaagtacacgattaggtttggcaattggaaactaaaaaaaaaactgaaaactttagcaaaagtataattttcggttacatttattcagattggaggttgacaagcatgcgggaggagatcgttagaaaactagggtttcatataaagtctttgctttccaaattcagtctgataactactactgagctacaggtgtaaaccgataggattgaaatatatacatagaacaagggcttttctttattaaaatattatgtatagatttgatttaaatgtctttagggaatagttgtaaacaggttgataaaaaccttatactgaatatatattgtatatttttttctatataccaagaagaaaatctcattttgaaagttgaacaatagttaagagggggattggacatgctctcaaacagtgg

SEQ ID NO: 9302 - DNA, 630 bp, DROSOPHILA
atggttgaagacggtgccgataaatctttcccaccagtaggcgagagcgatgcacagccagtggagccggtgtccaaggagcagccggcggaagtggccaaaaagccagatattgcgcccaagccgctggccaaggtggcgccacagagcgcgccggccaaagaaggtaatgctggagtgaggcccgtggtgagcattacactgaccgagtatccatcctgtgatgcagaggaccaacagtccttctcggagggcaccgattcggcttcggttgccgatgtgccggtactgcaggatgcggaggatccattcaacgagaaggccaagggagagtccggcgacggttcgggatttgaggccaattttgaggccaacttcgatgccaattttgatgacgccttcgctggaatcggaggaggtgggggcggtggaggtggcggtggggagcagtccaacgaattggacatcaacggagaggcagcaggagaagcaatagtatctggatctgcggctggcgatgaggatattgaggcacccaaacaggtggtcggtgggcgagctagcatacccgaggaattggactcaaatcaattggcacgtttgcaaaatctgaaggagtcgaacgcttag

SEQ ID NO: 9303 - protein, 209 aa, DROSOPHILA
MVEDGADKSFPPVGESDAQPVEPVSKEQPAEVAKKPDIAPKPLAKVAPQSAPAKEGNAGVRPVVSITLTEYPSCDAEDQQSFSEGTDSASVADVPVLQDAEDPFNEKAKGESGDGSGFEANFEANFDANFDDAFAGIGGGGGGGGGGGEQSNELDINGEAAGEAIVSGSAAGDEDIEAPKQVVGGRASIPEELDSNQLARLQNLKESNA

SEQ ID NO: 9304 - DNA, 5627 bp, DROSOPHILA
agcataaagctgcatacgacctctcctccagtgacggaaagaaggctctggacattgcagtggaccaggaaaacgcagacattgtaacgctgtgagtaagaaagcagagcttcaatccggcagatacataaccattcttgtttcagactccgattgacacaactgaatgacgagattggacccaacgacgagtacaatggcgaagatgagacgtacaagaacgtaatgaaggacttctccaagttaccagccagccagacgcgagttctgcgccagcggcacgactcaaatacactcgaatcgcagcgcagctcgcttacaaactccgactagcagtggcagaagggccgcaagagttaggaccttactggatattatggaataatttgttccaattattaggatagcgtgatattggattgttattggctttataacgcattaaccaggaatgttaaacggtttcgacctctaaggatgtcgttgcgggcttgtttcccttggtaatctcatttgaaaagcgcttccgattatacaagaaaatattattcattgcatttggcattcgaatggcaggcacgatcgttcgttttctcttaggcgcattttgaatccgtttttggcgattagcttaagtttaaagtattcgtagagcagttgagtttattaaaaatacgtatatttgcctataaaattgtacatcgtcttatgtggtatttattaaacgatattgtaaaatgtacgtctagctatatgtatcttgttacagagctgttccaaatgttccgatttgtatttgtttgctaaactgtttaatgctgcatgtttctaaatgttttaacgctatcatgttgatgatttttggtgccaactgttgtgagcactctaggttcgcgaataaagttgtaaaatattcagatcaatcaaagttggtctcttcaggtgtaaaacatggtggtccaatctgcggtgtattggtaaaacatgtccagggactattctaggccacagcttgaaactcgttcgtctcggatatgtagtctgtgagcttgttcttcaccttgtgcattgtggttacatgtctctggaccgcactgcgatcgttaaactgacggccgcactgtttgcaggagaacatgacgccagcgtgggtgaccagatggcgactgaggcccgaaacatgattgaagctacgatgacacagatgacacttgtgcgtccgagagttgcccatatgcacgcggccaatgtgctgctgcaggttggacttctgggcaaagcagctcgagcattgggggcactgatggcgctttactcccgtatgggtgtccatgtgacgcttgagcacttcgcgctgggagaaggacagttcgcactcgctgcacttgaagggtttcaggcccgtgtggataatcatgtggcgtttgagcgagctggcgcacgacagttgcagtgcgcagctgggacacttgagcgtgccgccctttccacttttcagtcccttaatgtgggtgttgtggtggcgcgtcagaagtttctgcgtaggaaatgccaccgggcacaaatggcactggaacgacttcaccgtgtccgtaattcgaccggtttttggttgaggacaactggactcctgcttgaacaccaactcactcgatctctttcgtttgaggggcgtctgctcatctctatcgttctgttctttttcctacagataataagatccaagttgaattcgagttcaatttaaaatcacacggttagttaccactataatgacattttcatggaagctgaagacctgttgctcctgagatatctcctcgcccagattaaacacgaccacgtcttcgatttcctctggcttttcgccactgaactgaatttcgccgtcttctttgactaagcaaagaatttaatgaaatgaaaattttttcacattttttttgccaaattatacccacttactgttataggaggtgattccgttgtcctggtcaaattcgggagtggagtcctggttttgatcctctgagctggcagagtttatgatgtaaatctctccattgtctgtgtgcactacatctgatccaaccatgttgatttccctgaagtcttcaccgctttccgcgggcacttcctcgtccagttcgaggccatctatgtttacatcgctattatttgcggggtcggtattgcagcccaatatgaattcctcttcttttgcatccttcctggcctctgtcgcctttagattggcgtcgaccaagctgggtcgtcgctttggaagagctttagtttttgacctagaaggggaggcatcttccttgacttgcggcttggtctctggttcggacccatccaaagactcccaccgaccggcctttttctcggtaagatacacctccaattcgcccaacagcatggccagctgctcttttcttatgtcctcgctcacctcgtttcgcaggtcatctctaacctggctgcgcacctcctcggccagctccttgcgaacctcactgcgcacctcctccgctagttccttgcgcagttcggtggtcagtttcgctcgaagttctagacgagatttgaccagccgtttgtgcatttccgccgcctgttcttccttaaaatcttctcgccacttttcgtcctcaagcttgcgcactttgtcctgcacctcgatgaaggcaatagagtcctcgaactccagctcgtcctcgtcataatcgtccggatccttggagaagacgcggcttcgcttcccgagacccagaagtcggatatgcttgcgaagcttcttctccgcccattggcagcgctgccggaacaggaatgacttctccagctgatagcggcactcctggcagatcctcttcggcagagtatccgtcgccttggcgtccagtgcgacgcaggccatcaggcgcacgggtatcgagagctgggtgtcgtcctcgtcgaagatcgcgtacgcatcctggtgctccttgaggcaaaggcggcacagggtcgccaaatcgggatacgacggctgtgcatccatgaaggcgtctatttttggtaaatcaacgtatttactcggtggcgtctctgcatcgcaagcaatgtgaccgcagacaggttcgctaaaaatacctcctctcgaaacgaaagcaatacagtcacactgttcgtaaataaacaatttgatatatacggcccataaacgtatcataacttaatttattaatgtaaggtttaaaggtattgattttcatacaaatccaatgcataccgaatgtgcatatttaaagtttaatagaatacaatgacaattaaaataggtgatggcttagtcaaatatgcgtgcacaaaaaaaggtactattcttataatatagaggattaaactaaattcgttgttacgtggctacgtcacggtgttatttagcttatccgctcctcttagacgacagcgcacacaacttttgaaatcggcgtacgaactgctgcattttgtcttgaaggaactgtgctttcggcacaggttatcggtcgtctgcttggggctcataaagcgcactttctttcgacacggcgatggggtttttacatcctctaaggcagttgtgttggcacccagaaaggtgtccttgctatagtcgttgcgcagatgactcagctgcgggtcgttcatgttgatctcaaccatgggcacagcaactagtggcgttgcagctggctgtctgctggcttctggttcatcgtctattacatttgagaaatatataagtcgtgcaattgcaaagtaagtgggctggtcttacccagtaactccaccacgctgttatcgctctgctcccttagctcctggcccatgtctgtttcgtagaagccagcggtctgttcgtcaggcagcggactgcttaagttcatcttcatctcataggtcgcctcattgcgcttgcgcacaaagtaccgttccagttcgacaaacacgtcgtccagaacgctcagtcgcaactgctgcttggcttcgggtatgatgacctcttcgagttccgcccgcagctccagctcgatttccgcccgcacagcttgcttgcaagtgctgagcagctcctttttatacgcgtcgatctcgctgctaatgagctgggcggcctgctggcgccactgggcattgttctcggcgcagccagtttgcgtgcatccttccccggagccccgctcctcctccacttcactcagctgcgacttgacaccctgccgctgcaacgccttgtggcgcctcaatttgcgatcggctgcgaggcagcgtcgtcggaagcagtgcatctcctccagttgcagccgacacatggtgcatatgtgctgtggcagaccgtcgccgggctcgatctccagcgatgtgcagaccattatctgcagagcagtcgatccatttgcaccgaaaacggggaaattgggttccttcgacaagcacaggcgacaaacattcatgttgaatttcaaggcaattcggagcgtggcagccggacacctgattaggcacgattcggaatgatggacaatctagcaatctttccaagcaaccagtttagaatatgaaacaaaaaaacatttgaagacaaataactaaaattggaagcggaggaatttcctactaggaaacatcaacaagtctagccgatttgttatcgatattttcagtgtggccatgcggttgagagaatgcattttagtatttcaaggctggctgctctgccattgatgtgcccgtatttcagcaaggcgcttggcgggagaatttcaaatagtcaaaattttacaacgatactatagcgctcatttgaataacctgaaatgcagcaataacacacattcatttatcaaacaatttctttatatttcattaaatattaagtataaatacgcagttaactattaagtattatatacacaattacaataagatattcagtcactataatgcttcttctatatacaaagtacgatatatattatatcaaagggcttgaactcgccgccgcacctcaataaattatgcaattcaattccatgataatatacagtaacagtcgtctgtgttctccgggagtttgccgattgattttctcaggatgatttaggatctgcgccgaggattgcctacttacagctaaaatgtttgcaaaaacaataagtcaaggacatttaacagtgttttcatttcgtttcgcatcgttttgatttcatactcatttgctctttgctttatcgcttgggtggggtgttttgtgtgtgggtttttgatttgtggtggtaaataaatagtatcgatcgattattaacgatattcaacattgaaatacatcaatcattaggcatatacataactacaggatataatacaatacaggatcgttgggatcaggatcgctcttccaggattccatctcaatcgtggcgccagctctgcggcagaacgtagtccttgaccttgtagagcgcattggcataccaatggatgccattctgctgctgcgccgagctcaccaccttcggcgaactgtgcaactgctccttggcgggcagccacgcctccagcgtggacagcaggcgcatgggagccagtccccagtg

SEQ ID NO: 9305 - DNA, 3191 bp, DROSOPHILA
aattttagttatttgtcttcaaatgtttttttgtttcatattctaaactggttgcttggaaagattgctagattgtccatcattccgaatcgtgcctaatcaggtgtccggctgccacgctccgaattgccttgaaattcaacatgaatgtttgtcgcctgtgcttgtcgaaggaacccaatttccccgttttcggtgcaaatggatcgactgctctgcagataatggtctgcacatcgctggagatcgagcccggcgacggtctgccacagcacatatgcaccatgtgtcggctgcaactggaggagatgcactgcttccgacgacgctgcctcgcagccgatcgcaaattgaggcgccacaaggcgttgcagcggcagggtgtcaagtcgcagctgagtgaagtggaggaggagcggggctccggggaaggatgcacgcaaactggctgcgccgagaacaatgcccagtggcgccagcaggccgcccagctcattagcagcgagatcgacgcgtataaaaaggagctgctcagcacttgcaagcaagctgtgcgggcggaaatcgagctggagctgcgggcggaactcgaagaggtcatcatacccgaagccaagcagcagttgcgactgagcgttctggacgacgtgtttgtcgaactggaacggtactttgtgcgcaagcgcaatgaggcgacctatgagatgaagatgaacttaagcagtccgctgcctgacgaacagaccgctggcttctacgaaacagacatgggccaggagctaagggagcagagcgataacagcgtggtggagttactggacgatgaaccagaagccagcagacagccagctgcaacgccactagttgctgtgcccatggttgagatcaacatgaacgacccgcagctgagtcatctgcgcaacgactatagcaaggacacctttctgggtgccaacacaactgccttagaggatgtaaaaaccccatcgccgtgtcgaaagaaagtgcgctttatgagccccaagcagacgaccgataacctgtgccgaaagcacagttccttcaagacaaaatgcagcagttcgtacgccgatttcaaaagttgtgtgcgctgtcgtctaagaggagcggataagctaaataacacctgtgactgtattgctttcgtttcgagaggaggtatttttagcgaacctgtctgcggtcacattgcttgcgatgcagagacgccaccgagtaaatacgttgatttaccaaaaatagacgccttcatggatgcacagccgtcgtatcccgatttggcgaccctgtgccgcctttgcctcaaggagcaccaggatgcgtacgcgatcttcgacgaggacgacacccagctctcgatacccgtgcgcctgatggcctgcgtcgcactggacgccaaggcgacggatactctgccgaagaggatctgccaggagtgccgctatcagctggagaagtcattcctgttccggcagcgctgccaatgggcggagaagaagcttcgcaagcatatccgacttctgggtctcgggaagcgaagccgcgtcttctccaaggatccggacgattatgacgaggacgagctggagttcgaggactctattgccttcatcgaggtgcaggacaaagtgcgcaagcttgaggacgaaaagtggcgagaagattttaaggaagaacaggcggcggaaatgcacaaacggctggtcaaatctcgtctagaacttcgagcgaaactgaccaccgaactgcgcaaggaactagcggaggaggtgcgcagtgaggttcgcaaggagctggccgaggaggtgcgcagccaggttagagatgacctgcgaaacgaggtgagcgaggacataagaaaagagcagctggccatgctgttgggcgaattggaggtgtatcttaccgagaaaaaggccggtcggtgggagtctttggatgggtccgaaccagagaccaagccgcaagtcaaggaagatgcctccccttctaggtcaaaaactaaagctcttccaaagcgacgacccagcttggtcgacgccaatctaaaggcgacagaggccaggaaggatgcaaaagaagaggaattcatattgggctgcaataccgaccccgcaaataatagcgatgtaaacatagatggcctcgaactggacgaggaagtgcccgcggaaagcggtgaagacttcagggaaatcaacatggttggatcagatgtagtgcacacagacaatggagagatttacatcataaactctgccagctcagaggatcaaaaccaggactccactcccgaatttgaccaggacaacggaatcacctcctataacatcaaagaagacggcgaaattcagttcagtggcgaaaagccagaggaaatcgaagacgtggtcgtgtttaatctgggcgaggagatatctcaggagcaacaggtcttcagcttccatgaaaatgtcattatagtggaaaaagaacagaacgatagagatgagcagacgcccctcaaacgaaagagatcgagtgagttggtgttcaagcaggagtccagttgtcctcaaccaaaaaccggtcgaattacggacacggtgaagtcgttccagtgccatttgtgcccggtggcatttcctacgcagaaacttctgacgcgccaccacaacacccacattaagggactgaaaagtggaaagggcggcacgctcaagtgtcccagctgcgcactgcaactgtcgtgcgccagctcgctcaaacgccacatgattatccacacgggcctgaaacccttcaagtgcagcgagtgcgaactgtccttctcccagcgcgaagtgctcaagcgtcacatggacacccatacgggagtaaagcgccatcagtgcccccaatgctcgagctgctttgcccagaagtccaacctgcagcagcacattggccgcgtgcatatgggcaactctcggacgcacaagtgtcatctgtgtcatcgtagcttcaatcatgtttcgggcctcagtcgccatctggtcacccacgctggcgtcatgttctcctgcaaacagtgcggccgtcagtttaacgatcgcagtgcggtccagagacatgtaaccacaatgcacaaggtgaagaacaagctcacagactacatatccgagacgaacgagtttcaagctgtggcctag

SEQ ID NO: 9306 - protein, 1015 aa, DROSOPHILA
MNVCRLCLSKEPNFPVFGANGSTALQIMVCTSLEIEPGDGLPQHICTMCRLQLEEMHCFRRRCLAADRKLRRHKALQRQGVKSQLSEVEEERGSGEGCTQTGCAENNAQWRQQAAQLISSEIDAYKKELLSTCKQAVRAEIELELRAELEEVIIPEAKQQLRLSVLDDVFVELERYFVRKRNEATYEMKMNLSSPLPDEQTAGFYETDMGQELREQSDNSVVELLDDEPEASRQPAATPLVAVPMVEINMNDPQLSHLRNDYSKDTFLGANTTALEDVKTPSPCRKKVRFMSPKQTTDNLCRKHSSFKTKCSSSYADFKSCVRCRLRGADKLNNTCDCIAFVSRGGIFSEPVCGHIACDAETPPSKYVDLPKIDAFMDAQPSYPDLATLCRLCLKEHQDAYAIFDEDDTQLSIPVRLMACVALDAKATDTLPKRICQECRYQLEKSFLFRQRCQWAEKKLRKHIRLLGLGKRSRVFSKDPDDYDEDELEFEDSIAFIEVQDKVRKLEDEKWREDFKEEQAAEMHKRLVKSRLELRAKLTTELRKELAEEVRSEVRKELAEEVRSQVRDDLRNEVSEDIRKEQLAMLLGELEVYLTEKKAGRWESLDGSEPETKPQVKEDASPSRSKTKALPKRRPSLVDANLKATEARKDAKEEEFILGCNTDPANNSDVNIDGLELDEEVPAESGEDFREINMVGSDVVHTDNGEIYIINSASSEDQNQDSTPEFDQDNGITSYNIKEDGEIQFSGEKPEEIEDVVVFNLGEEISQEQQVFSFHENVIIVEKEQNDRDEQTPLKRKRSSELVFKQESSCPQPKTGRITDTVKSFQCHLCPVAFPTQKLLTRHHNTHIKGLKSGKGGTLKCPSCALQLSCASSLKRHMIIHTGLKPFKCSECELSFSQREVLKRHMDTHTGVKRHQCPQCSSCFAQKSNLQQHIGRVHMGNSRTHKCHLCHRSFNHVSGLSRHLVTHAGVMFSCKQCGRQFNDRSAVQRHVTTMHKVKNKLTDYISETNEFQAVA

SEQ ID NO: 9307 - DNA, 6670 bp, DROSOPHILA
aacaacgtgggcgtgctcccatgaacatccactcggaatcggaattggactcggaatccgagtgagtgagtgaaaacgaaagcggagcaaggcggtcgccactggccaaatcgggatgaggttgaaagtcgaaggtttgaaaaccactttcgatttccgctaagtgaatattatagaactaagttctgggtatgataaccatatatttcaaaatcattcgataatgctgggttatattcttccaaatataaatattatttgaataagcaagatgatgcactttcccagaacataagctttcttagacagcagtaaaaagcggtcggaaccaaataaatcgggatgtggccataaatcaatggataccataccctccatgcgaaacaatatgcctaaaaattaaaggcaatcaaatgtaattgccacaagttaattgaaattcaacggaaaagaaaccaacactttcggcataagagttaaaggtacattcaaaataaaaatatttataaacacagtctgctgcgatatatgggtctttcactcaaaaaatatttaaacttaaatagcaatgagcacaagcactctgcacatgagttcgcatacacagaaagcaggtggaatccacgatgtggtggccaaatttaactaaacaatgaaaaaccttgaggggtagcattgaaataaaatttgtattaaatggataacgaaatcaatcattggatgaaagcacacattttccgaatatgcattagatatgcttatccaacttagtataaaaactggtaacagaatgtcctttaaaagcgctttttttaatcaatttaatgtaagtatcgttacaaaatcacatctggcgcagatccatttggcgcctcgtgtagcttctgtcttccttcgtgttttttggtatcgaaagccgaattgttcaacaaatttaactggtatgctaactaaaactaatgactacgattaagcctaggcactgttgtttgagtcgcatctagctgaagaagtacactgagtcgagcacgttgcgcaggtcaaagtctcccttctggggcatctgcttcagaatgcggttcagctggcgcttggacagatcctccacggaaccatcgttgatgaagtcactgcggggaatcattggaatagtttgtgcgcactaacgtcggaagtggcattactcacctgtccttaaagctgtaggtatgtcgcatgaactcggagagctgctccaaaatgggctgcgagtgcagggccacaaactgctcccggcacatccggttgagctcgggcacggtgttggcgtgcgtccagaagcagtcgtgcaccgaaacaaacgtgatgccctgccgctcgcagtgcagcgaggtgagcatcatgtgcgaggagtccagcgagtggatgaagttcggcgggaaggcgttcttctgcttgaggatgtttggccgctcgtacaagtccatgggcatgttggcggagaccttgaagccgctgcgaggcgagtgcttcatctcctggcggttgtagggctgcaccaccggcaggccgagtggcgtgacccactccacgttctggctgcacacgccggaaatcaagcgggcgcactccgtgaaccaatcctgaatttctctcgtggatgtgaacatttcccgcaggctttcgaacgtcttggtggtcaagtatgtggacgcaggccagacccagtccttggggaagtcgtcaatgtcttttagctggcgcgctatctgcagtctggctccgtaacgagtcactccgtagaccgttgtcatcactgtttgtttgatcaccttgcggcgaacgaatccggccagtgcttccgccacatggagaccgttctgggcatccgctttcctgctcttctccaccaaagcggctaccgcactgtaaacgtcctgcggaatggccgatggtgccaggttgacactacgagcaccagcttcatctctgcccaaggcagcgtagtgctgcaatccattgcaggaaccgtcttggtgtatggggaagcgacttagataggcagcgggatcgggacagcgatgaacattggctatttccatgcagcacgccagcgtttgccatggctcatccgatttggaccaccacatccgcccggtgagtggattgtccgcagagtccaggatatctggcatgatctcttccgcgtacaaaagacgttccctcaccgagtcccgcttcttgagaccagtcagattgatgcagtgcagcttaagccaacttaatccatcgactcccagtggctgcgcctgatcgaagatgagcatcgaacgagccaggtccgagcccaggtgattgagatgcggcggcacaggatagacacgtccacggaagtccatgttgtgtggcagccagaagaccttatcacggtactaaaaacaaaagcagttttaatggaagttaataaaagattcccgaagacaacttacatgctgtgccagtgacaacctatagagagcatcgcaccacaagctgtacatctcggcctgcttccttcgatgtccgagcttgtcccggaactgcttagctcggtcctcactggaggtggcattgccttcggcgtccttagctggcaacgtgggaagcggcggcagggaactgggtggctgagggacgtccaatttcacatcgcctccgttctggaacacctttataatcacatccagcaactgagtgttcacccgccaaggcacactggccaactgattcagagaatctagggcaggataaaggtgctgcgggttggaagccataatgcggtcccactgctggatggcttgatgaggcaggcgaatgagctcagtcttgttcagcaggtagccaccattgtgcggagtactccacggttgcgggggacacagcatgggcactaggttggagtcgaacgtgagcgtctgttggcgggacgctcggaataatctcgagagcaccggatgcggcttgacttcctctttaacaaagcgtccttgattccggaaaagagtgtaaaaggcgggcaacagattttgtggctgagcggccgctttgcttttgctcttctgcctcattatgtgggcgtcgatcttgatgtccctcatcagaatgttgtacaaaaatcgacccacgcctgttaggacattagacggccacggcacctccagcagatccatgcttggtccactctcccgctgctcgtacacgagacgctgccaagcctgacgcgtgttatcctgcgacatcccgctgccccacaattcacaatacgaactgtatatctcgccgatcttctccagcgtgccgttgtgtttcttctgctcaatttggtatcgttgctgcaccttctgcccgagttctttgtacagctgacccactgttggactaaatgtctcagagccctcagccagcttgtacagctccttaatcaggatgtccgcaaagtgcgaggcgtcaagggtctttagatacgtgtagtagttcatgaagccgtgtggcttgaagcgcacttgtgcacgcagcgtgttgagatcgcgcacaatggctgccgaaatttgtttgcgccacgtgtcctccagttcttttagaagttcccgctgtaagtagtcatgtttagatataataatagtatatttgattaggttctaacatacgcatttttcggagttggcgaactccttggatttctcgatggacttgatggtaatgctgccgtccaactcaattttaagttgctcccgagctagctgttccaattgagctgcggtatagcctcgcttggagttcattatggcgtagtcagcttttcccggttctttcttagctccaacaggtataacatgctcgttgaggtgatccagcagttcgttgtcgtatccgagttgcggtggcacatagaccggcttaaagtccggtcgaagccgtcttatcgcatccaaagcaatgtcccgctggtcagccacaaactttgacctgtccataatttgattcaaactgaatccttccttttcggctttggaaacgtattcggatatgtattggtggttctcctcatccggttccaggcgacccaagcactcgaaaatggctgcgtacgtttgctcgttgaacgacagtccgtcctcttcgatgagcttgaagacctcctgggctcgatcgaaggatcccttgcccgcatagccgtgcagaaggatgttgtacaggtcgatggtgatgaggccttcggacatgtgcggcaaagaactcttcctcaccttgccgcgataggcaatgatggtggacagggcgcgatttagcatgttggccgagacacacacattcagatatgtgttcaggtttatgtgcagtgcccgttgcttggccagacgctcttgctcctcgtttacgtgaacctttgacttgaaactaaaaggatttgcttaaggaatgttataatgcattttggactaaacttctcaccgtttcttcgacttggttgtgactgcgctggcgttgggcacggccacagtagttactgaacgtttgctcttgtccaggggactgatgtacggctcaatggcctcgaatggatccagcatttcgtgttcttcaggatgcacttttgtggtgctcagactagaagatgaaacaatgaaataataaagctaaatctgtgctgttcttaaccttacccaaaatccgcttcatgctgatcattttccatgctctcgatgatgtcccgaaagttttggaagcttttgagaatgttttgcacctcctcgggattcgctatcacctgttttgtgtactcatccttgccaaagaagagcataggccgatcgtcgtatactccagactctagaatagatccatccaaagcctccatatcgattttctgatattctacaggctgacgctgcgccagatccagtacacatttggttttcttatccttgcgatcttcgcgggcgcgtcgctccagaatttgctgctgggccttatgtatgaagtcggccagcttcttggatttcagccgcttcacacgcgaccttcgctcgctgatggcttgttcggtgactgcaagagatggggttataccacgtccaactgtcaggactggaaggcacttaccctcgaggagctccacgtatttggcgtagcgcggcttgcgcaatcgcttctttttcgcctgggccactgcatccgtttgtgtgggtgttgttgtttgtgtgcgagtggttgtcgttgttgtttttgctgtaattgctccttcaatggaaaagcacatgttgcattagatccataacactttaccgattcgagttagttactcacctgccggcatctggcggtagagcatttgataatactgctgataatgcacgaaatttgaaggcgcaattccgcagccgcaacacactgttgttgttgtagctgttgttgttgttgggtgagcagtgggtggcactcgcagtgctttttgcacggccgccgcccgatttgcactcagcaagcgatacattccgatgaactgcagctagaggcacacgtttcacgcaagcaacggcaaattaacgcagattttggcagttttcacacagcatttgttgcataattacacaccgattccgaccaattggttgtttattcctgcacttcacgtgtggcggcgcaagcagttgttggcagcactgcttgctgggcagaacagctgactgcgatgccagggctgacgagaggaaaatactgcagaacatactgcaaattacaaaagttttaatttatttgccagttactacaaaagttcgaatttacgtataaggctactcttgtatggcaaatctaaataacagcgaacaaaaagtcaaatttcgtgtagcacaaaacctttaaacattttaaagcattgcgaaagagttagcgattttggtatttttctggtattcatttccgactagctgtaccgttgtcaacgacttttccgttaaaagtaaacacaattcaaaagttcgaagcgaaaatgccgcccaagaaggcaaagaagggggcggggccgaagaaggatgacgatctggacaaccgcccacagccgccgaatgtgttcctgtacatccagctggcgaacatcgtcaacatgcccgagtcgcagcatccgctggagattcacattagccagggcgacagtttgctggtcaagtgcgatgagcactacaacaccgatggcatcatagtgcaggaggagttccactcgaagcccacgttcacgctgattttccagcaggacaatgtggaccggataaaccatgccgccgacaatccccttctcgttcagctatatatgcgcgtccttccgccgagaaggattgttcaagtggagtacgagatgcttgaggaggagcaggagggagaccttgaggcagattcagactcggatttgactatgtcgacgactatagcgacgacattgctggacgatgatgcgtttgaggccagggagacggtcaagctggagctcctttgcgttggctatctggacgtgatcaagttgtttggccaccggcgcagcatgatctgcgaggaactcttcctctatcccatgccggatgtgcccaacgagatgcgctctaccatccacacggagtggcacctctacaccctgctgcccatcgccaagaagctg

SEQ ID NO: 9308 - DNA, 4268 bp, DROSOPHILA
actgcttgcgccgccacacgtgaagtgcaggaataaacaaccaattggtcggaatcggtgtgtaattatgcaacaaatgctgtgtgaaaactgccaaaatctgcgttaatttgccgttgcttgcgtgaaacgtgtgcctctagctgcagttcatcggaatgtatcgcttgctgagtgcaaatcgggcggcggccgtgcaaaaagcactgcgagtgccacccactgctcacccaacaacaacaacagctacaacaacaacagtgtgttgcggctgcggaattgcgccttcaaatttcgtgcattatcagcagtattatcaaatgctctaccgccagatgccggcaggagcaattacagcaaaaacaacaacgacaaccactcgcacacaaacaacaacacccacacaaacggatgcagtggcccaggcgaaaaagaagcgattgcgcaagccgcgctacgccaaatacgtggagctcctcgaggtcaccgaacaagccatcagcgagcgaaggtcgcgtgtgaagcggctgaaatccaagaagctggccgacttcatacataaggcccagcagcaaattctggagcgacgcgcccgcgaagatcgcaaggataagaaaaccaaatgtgtactggatctggcgcagcgtcagcctgtagaatatcagaaaatcgatatggaggctttggatggatctattctagagtctggagtatacgacgatcggcctatgctcttctttggcaaggatgagtacacaaaacaggtgatagcgaatcccgaggaggtgcaaaacattctcaaaagcttccaaaactttcgggacatcatcgagagcatggaaaatgatcagcatgaagcggattttggtctgagcaccacaaaagtgcatcctgaagaacacgaaatgctggatccattcgaggccattgagccgtacatcagtcccctggacaagagcaaacgttcagtaactactgtggccgtgcccaacgccagcgcagtcacaaccaagtcgaagaaacgtttcaagtcaaaggttcacgtaaacgaggagcaagagcgtctggccaagcaacgggcactgcacataaacctgaacacatatctgaatgtgtgtgtctcggccaacatgctaaatcgcgccctgtccaccatcattgcctatcgcggcaaggtgaggaagagttctttgccgcacatgtccgaaggcctcatcaccatcgacctgtacaacatccttctgcacggctatgcgggcaagggatccttcgatcgagcccaggaggtcttcaagctcatcgaagaggacggactgtcgttcaacgagcaaacgtacgcagccattttcgagtgcttgggtcgcctggaaccggatgaggagaaccaccaatacatatccgaatacgtttccaaagccgaaaaggaaggattcagtttgaatcaaattatggacaggtcaaagtttgtggctgaccagcgggacattgctttggatgcgataagacggcttcgaccggactttaagccggtctatgtgccaccgcaactcggatacgacaacgaactgctggatcacctcaacgagcatgttatacctgttggagctaagaaagaaccgggaaaagctgactacgccataatgaactccaagcgaggctataccgcagctcaattggaacagctagctcgggagcaacttaaaattgagttggacggcagcattaccatcaagtccatcgagaaatccaaggagttcgccaactccgaaaaatgccgggaacttctaaaagaactggaggacacgtggcgcaaacaaatttcggcagccattgtgcgcgatctcaacacgctgcgtgcacaagtgcgcttcaagccacacggcttcatgaactactacacgtatctaaagacccttgacgcctcgcactttgcggacatcctgattaaggagctgtacaagctggctgagggctctgagacatttagtccaacagtgggtcagctgtacaaagaactcgggcagaaggtgcagcaacgataccaaattgagcagaagaaacacaacggcacgctggagaagatcggcgagatatacagttcgtattgtgaattgtggggcagcgggatgtcgcaggataacacgcgtcaggcttggcagcgtctcgtgtacgagcagcgggagagtggaccaagcatggatctgctggaggtgccgtggccgtctaatgtcctaacaggcgtgggtcgatttttgtacaacattctgatgagggacatcaagatcgacgcccacataatgaggcagaagagcaaaagcaaagcggccgctcagccacaaaatctgttgcccgccttttacactcttttccggaatcaaggacgctttgttaaagaggaagtcaagccgcatccggtgctctcgagattattccgagcgtcccgccaacagacgctcacgttcgactccaacctagtgcccatgctgtgtcccccgcaaccgtggagtactccgcacaatggtggctacctgctgaacaagactgagctcattcgcctgcctcatcaagccatccagcagtgggaccgcattatggcttccaacccgcagcacctttatcctgccctagattctctgaatcagttggccagtgtgccttggcgggtgaacactcagttgctggatgtgattataaaggtgttccagaacggaggcgatgtgaaattggacgtccctcagccacccagttccctgccgccgcttcccacgttgccagctaaggacgccgaaggcaatgccacctccagtgaggaccgagctaagcagttccgggacaagctcggacatcgaaggaagcaggccgagatgtacagcttgtggtgcgatgctctctataggttgtcactggcacagcattaccgtgataaggtcttctggctgccacacaacatggacttccgtggacgtgtctatcctgtgccgccgcatctcaatcacctgggctcggacctggctcgttcgatgctcatcttcgatcaggcgcagccactgggagtcgatggattaagttggcttaagctgcactgcatcaatctgactggtctcaagaagcgggactcggtgagggaacgtcttttgtacgcggaagagatcatgccagatatcctggactctgcggacaatccactcaccgggcggatgtggtggtccaaatcggatgagccatggcaaacgctggcgtgctgcatggaaatagccaatgttcatcgctgtcccgatcccgctgcctatctaagtcgcttccccatacaccaagacggttcctgcaatggattgcagcactacgctgccttgggcagagatgaagctggtgctcgtagtgtcaacctggcaccatcggccattccgcaggacgtttacagtgcggtagccgctttggtggagaagagcaggaaagcggatgcccagaacggtctccatgtggcggaagcactggccggattcgttcgccgcaaggtgatcaaacaaacagtgatgacaacggtctacggagtgactcgttacggagccagactgcagatagcgcgccagctaaaagacattgacgacttccccaaggactgggtctggcctgcgtccacatacttgaccaccaagacgttcgaaagcctgcgggaaatgttcacatccacgagagaaattcaggattggttcacggagtgcgcccgcttgatttccggcgtgtgcagccagaacgtggagtgggtcacgccactcggcctgccggtggtgcagccctacaaccgccaggagatgaagcactcgcctcgcagcggcttcaaggtctccgccaacatgcccatggacttgtacgagcggccaaacatcctcaagcagaagaacgccttcccgccgaacttcatccactcgctggactcctcgcacatgatgctcacctcgctgcactgcgagcggcagggcatcacgtttgtttcggtgcacgactgcttctggacgcacgccaacaccgtgcccgagctcaaccggatgtgccgggagcagtttgtggccctgcactcgcagcccattttggagcagctctccgagttcatgcgacatacctacagctttaaggacagtgacttcatcaacgatggttccgtggaggatctgtccaagcgccagctgaaccgcattctgaagcagatgccccagaagggagactttgacctgcgcaacgtgctcgactcagtgtacttcttcagctag

SEQ ID NO: 9309 - protein, 1369 aa, DROSOPHILA
MYRLLSANRAAAVQKALRVPPTAHPTTTTATTTTVCCGCGIAPSNFVHYQQYYQMLYRQMPAGAITAKTTTTTTRTQTTTPTQTDAVAQAKKKRLRKPRYAKYVELLEVTEQAISERRSRVKRLKSKKLADFIHKAQQQILERRAREDRKDKKTKCVLDLAQRQPVEYQKIDMEALDGSILESGVYDDRPMLFFGKDEYTKQVIANPEEVQNILKSFQNFRDIIESMENDQHEADFGLSTTKVHPEEHEMLDPFEAIEPYISPLDKSKRSVTTVAVPNASAVTTKSKKRFKSKVHVNEEQERLAKQRALHINLNTYLNVCVSANMLNRALSTIIAYRGKVRKSSLPHMSEGLITIDLYNILLHGYAGKGSFDRAQEVFKLIEEDGLSFNEQTYAAIFECLGRLEPDEENHQYISEYVSKAEKEGFSLNQIMDRSKFVADQRDIALDAIRRLRPDFKPVYVPPQLGYDNELLDHLNEHVIPVGAKKEPGKADYAIMNSKRGYTAAQLEQLAREQLKIELDGSITIKSIEKSKEFANSEKCRELLKELEDTWRKQISAAIVRDLNTLRAQVRFKPHGFMNYYTYLKTLDASHFADILIKELYKLAEGSETFSPTVGQLYKELGQKVQQRYQIEQKKHNGTLEKIGEIYSSYCELWGSGMSQDNTRQAWQRLVYEQRESGPSMDLLEVPWPSNVLTGVGRFLYNILMRDIKIDAHIMRQKSKSKAAAQPQNLLPAFYTLFRNQGRFVKEEVKPHPVLSRLFRASRQQTLTFDSNLVPMLCPPQPWSTPHNGGYLLNKTELIRLPHQAIQQWDRIMASNPQHLYPALDSLNQLASVPWRVNTQLLDVIIKVFQNGGDVKLDVPQPPSSLPPLPTLPAKDAEGNATSSEDRAKQFRDKLGHRRKQAEMYSLWCDALYRLSLAQHYRDKVFWLPHNMDFRGRVYPVPPHLNHLGSDLARSMLIFDQAQPLGVDGLSWLKLHCINLTGLKKRDSVRERLLYAEEIMPDILDSADNPLTGRMWWSKSDEPWQTLACCMEIANVHRCPDPAAYLSRFPIHQDGSCNGLQHYAALGRDEAGARSVNLAPSAIPQDVYSAVAALVEKSRKADAQNGLHVAEALAGFVRRKVIKQTVMTTVYGVTRYGARLQIARQLKDIDDFPKDWVWPASTYLTTKTFESLREMFTSTREIQDWFTECARLISGVCSQNVEWVTPLGLPVVQPYNRQEMKHSPRSGFKVSANMPMDLYERPNILKQKNAFPPNFIHSLDSSHMMLTSLHCERQGITFVSVHDCFWTHANTVPELNRMCREQFVALHSQPILEQLSEFMRHTYSFKDSDFINDGSVEDLSKRQLNRILKQMPQKGDFDLRNVLDSVYFFS

SEQ ID NO: 9310 - DNA, 6913 bp, DROSOPHILA
tgtttttctctgcatatttgtgttgaacgataaatttctaactatacgcttttcgctacatggagagaaaaaacatgttttgcataaccaatcaatattaacaaaaggtataagcattgttatacattatttttgtgagttaactattggtcaaatgagttcgaaaaaaaaaggtaagaagtccgtggaattataaaccttataatataatgattatatggaaattttctttcaaaaacacactacattcgctatggatataaatcatcaggcgcagtttactttgcgatggtccgggttggaaaatttgcgtaaatatgtttattaaaatgttatttttttttattttttttgttttttttgtgaaagatttgaggtcggcgcgttggaaaagctagttatggacagccgattgaggtatattaccatttaaagacccacctgacgctggaagaaagtcttgttctggactcaggtgtaaggaatatgcagtgtgatcaccttcaacatacttcatatacgcagagacataaaaagaaattatagtgatggtaacgtcgaacagaaaaacacaaacaagaaggcaacgcaatgcaatgaaatacatatggattcggtgagcagtttctgttaaaagttatttgctataggaacatttcaattacatagaacatctggatttataactatatgcatatggggcctgtcggcaaaagagaacatcactatttgaccatccctctacttgtaattttatttaagcttcgttatttacctatgcattactggtaaagaaaacaaaagatttttacgttatggtagttaaccggtagagatgacaaatacactttgttgtcctggatatattttaaataaagacagtacaaatattataacaagcttactggttttcatctatctactaatattcgagattttattttacgatgactctgcgtggtcaacagataagacttactatggcaaagagcgcggcaccgccaaaagaacgattgtataaatctccaacagccctcaaaatttaacaaaagtagtcgagaatttatgaatattttaactgatttttagaacagtatttttgtgtacaaaataattaaaacgtgggcaaatacttagtgtatgtatagaatgcagtgcaatatgcacttgctttcacaaattaggtttattataaataaaataggataataacttaagatacttgtagtatttaaaaaaaaaaatatcctgacctacatatttgttttgtatagtttacgattcatttaaatgggtcttgtgaaaagcttctgcactattgatgaataaagatctcacctttttggctggaggagttgggacttgaagatgatatttgttttgacaataatcgcgcaacaacgctatcccttctgtgcgattgttagcgtagcgggattcccaggcatccaaaaggcgattgtaataccgcggagtgtcgttgtatttaaggtacttatgggtttgatcagttggaaagatgcgctccagcggtgcacatcgcgctagttcatcctcggctatgataaggcacctcacatcatcgggggtcagattatttaggatcgcatccacatactgtgttgtattaaatgttatagtatgattagcaacctatccatttggagtatcaaatttgcgcctcacctcattccggtcttccatagactttcgggtaaatgtgttatgtttgatcttttcctcgcgcgacaagtagttaatgtaaagccgcttgtcatagcacatttgtgtgccgggaggaaaggaaaattctgcggccagttctttttgcttatcaagcgatagttttggaggtaccttaaaatatgtatcatcatatatatagttatacgttctaaattcatatgtaaaatgccagcacttacgttgtacagcgctgtattaagaacgccctgcactaaaggcgctttaacatgagcatctaggggcagttccgagtgtaaactgggcgaaatattaacttccaacagccaaggcacaagatcagagtccagaataacatcgaagccgaatagctcgaagcagctgtactttgattcaacatttgctctaatcatgctattaatgccattctcgccagcaagaattgtccgaagcaccaaactcctcagagcctcccacagacagtcggtacgcactccacgattcgccaaatacgtccacagcgacttgatagtccacttatgtccgtggcaggcattgacgtcttcgttcttcgaatagttcgaggaaaacttattgatgctgtagttggtcaaatgcatacaccgatcattcaaagtgtccgttttagcgctgtactttactgaatatacatagtatagtttcctttgggttaatatacggctcactcgattttagataaatatttacttacctgaagcgaaccgtgccaatccgttgtggtacatgaacactcgcaagggattcactgatgtaaccaagacatacagacgcagatcaaatttactaccatttattagaagcggtcgctctatatacctatgtaaaacaaatcgggaataattattatgtttccgaagcttttgatccttagatgctacatacttttgtacgataaggggccttctcttgggtatctggccccatcggttgataaccctgatgccagcaccccgagcactagctggtggctttataatccacttagtatttcgctgggcatatttcggccagtgccggcgcagcgctcccagatcattgggaataatgtatgtgcgtggcatgaacccgaattccttgttgctgtgcttacccatctgcctttgcagattcttccagcacgaatcctttcggccgatgcgaaatgaaccgggcaagtgattaattttctgatacgaacgaatggccttaaaacacggtgactttaaatgctttccccatacgcccatccagtcgttggtttctacttgcgaaaatacatattaattgatatctgattattatgtagaaactcactctttagcattcgcattccgctgttggccagaatcagacgaactacctttggcattatgtttgtaatgcgccacttcaaaacgcgatgaagatccggcggcacgcgtggacctctttttgtgttcgacgaaaaagacaaataagggggcacgtagggaaacaaactgggaaccagaagggaatccggatttttcagatcatcctcagacgactgcgaagacaagaagctgggcgtgctttggggcgatgaaaatcgatccacagagtgggtaagcttgaaggcatgggcacgataaccgtcctcagtgtctgacaaaacactcgccgtgtcgctttcgtcgaaatttgatactattatttggttaaacaatgaagtacaaattagttaattatcaattaattaaaaaaaatagatctaaggttaacaattcttacaattgtcgagatcatcatcttcgtcgaagtcgtcattacgatcgaagtcaatggcactacggtgatcttcctgtttgtgttccggctccagcaataagaccgtctgtctttcatcacctgcacccagtaccttggagctctgctgctttacacttagccgctgggtgctgaactgctgcttgcggccgagccgtggactctgagtgctgtacagcaggactcggtgaaccgtgggcattggctttttggtagacacggtcccacctttggccctctttggcgtcatgggcaaccgtggcatgggctgatccgtcgacttacgcataatctttaattcattattgttgttattaataagcgtgtctccggagccatccaggaccgtattttcggtcattctgcagtagcgccgatgtactccgacctgctccagcccattgtcaattacaacaacggggtcatagctatctttaatgtccctgtagtcatcttcgcttccagggtctcctccccagccattgtctaggtaatcggcttttaaatcattgcttgggagcttttcctttagcacgtgcttctcatacttttgaccctgccaggtcctgtcctcggaattgtcccttcgtccaatgataactgtgccatcgacttctcgcgaatccctgcgactggcgccggccttttgaaatttactcattggcactttgcggctattggcagcggcaaacgttggcttggacagtttctccgctccacggttgtagaagtacgaaaaatagtgctgatagtgctggtttgtcgtctgatactggaccgggcgttccgagctgaaaaacgagaatggaaggcggttatttacaacatggggaacaaaggaaactgtttattgtttacacatctatgtatgttcaatgagtgtctgtggatatattgttaatgtactcgcaactagagtgttgtgtggtatctatctgtagttttccaaattgtaactttaagactcgaacacaacaacaacaaaatacgtgtgtgtgtgcgtgtactggaggtatgtagtttcaacaagcaggacaattaacaaaaaggcatttgcataaattacagtatgttatcccaggtcggctctggtgagggggaattgagtggccgatatcggtccggactattgtccacataatcgttggacacacgtccccctcggtctttccgtttctttagctccgcatcaaagtatacgatggatggctgcaacaacatctgctgctgttgctccttgtctacggcatatgaccttgcctgcttgtactgcctattggaatgctgatcctccgatcgctgtaccgtctgatagacgtactcgcagctcttgttgccagctatccgctggttgaccaacgattgctggccaaatgcatcggtaaacagtgatgagtccggcgccgaattggccgccgattggtggtagcttgatctggccgattgcttggtgggaattctctttgtcggcagattatggttctggttgggcactgaattttgattctggttctggcgattgccccacgctggagcgatcaggttgcagttatcgtagctatagtagcaaaacgtattgtccgcattgcagtaacgtgacgccggggctccattgttgttcagactgttgctagctgggatatgatagccgctgttgttacgcatgtcagatcctggtcacccagtcatatatctgttgaggggtacgtactaagctcgatgtgatctctgactccgctaacccaaaaaaaggcctacaaacaggttttaaatgctgtgaatgatttctgatcggatttggacgtaagtttacggatgcggattaatcatatctggtggatagatagagagaagccagaatgcatagtatgccactctggcggtgaatatacaatatagattaaccccgccatcaccctgggctaccaagcgtagctgccactccgtaaaccaggtcatatgtacaaaaacttacttgcctcgcgatttgtgacctttactttgttgctgcagctggaaggattaacgggcacggagcaggattgcggtggcggtggtggtgtcgttactctacccaagcgcaggactcccaaaatctaggtcactggcacttgtcgtcagctagctcggtgtgattacattgccagcacgaaaaatgcgccaggtgtaaatgtatgtaaaatggaggcaaaaactgaaatgcaaatcgaacacacatcctttataatcataatgattgcggaggcacaatatacctacaatataactaatagcaaatgcacaattttgtctaataaatatattggattatttggtagcttccagttaagcgtgaaattcttaaacgttcactaaaacttttcacagcctatgacaacaaaaaactaaactactgttttattgaagaacagaatatccatgtgcacagtttggagatggcagcgtgagcacctcaaactgccacctcgcgatagataccgattgcgcacgcaccagctgttcggccgataggggacttcccgaagaaaccgttttaatcgctcactttacccgtttagcctggttttgaatcggaaaaacacgtaaggaaaatcgacatcataggtttgtttttaataattttaatactgaaagttacaaattgtattcgtaatgggttctgtttgcaagaactcttatttattagcaagcaaaatgggttttaatgaattgtcttcgattgttgtcatctccggattttggtgaccttcctatggaattgaagaaagtggaattaaagggtgaaatgttctgttccgtatctaaaaagataaatgaaaaccaataaacaatgagcactttaggatctatagcattagttagcttaccaatgcttggatcgacccactccatggccatgttgtggagtatggccaacgccgtaatcgtttgctttgcagatccatgggaaccctggatttcggtggcaaggataccgaagcgactcatcagcagattgagacactttctagccgatgcgtaggtgaccgcgtgggcgtggttatacagctcctcggattggttcctcgggaatcgaaccggtgtgaacagggaggaggagcagcgcaccatttcgttgcccagcaaaatacgaccccggaactcgttctgttcgaatcgatcctttattttggacagaccgaacatctcggtgtcggtgagcatggactgctcatcgatcagtcggatatcaaggtcccttatcttatgagccgcatcgcaaacaatctgaatgtgaagttcctcctcccggctggtaagggcgggcaaaagctcctctccatccagatcaggggcacagttttccggttgaaacctcacagttgtctgtagtaaagcaccaatgacttgcggcatattggca

SEQ ID NO: 9311 - DNA, 3248 bp, DROSOPHILA
caataaaacagtagtttagttttttgttgtcataggctgtgaaaagttttagtgaacgtttaagaatttcacgcttaactggaagctaccaaataatccaatatatttattagacaaaattgtgcatttgctattagttatatttttttgcctccattttacatacatttacacctggcgcatttttcgtgctggcaatgtaatcacaccgagctagctgacgacaagtgccagtgacctagattttgggagtcctgcgcttgggtagagtaacgacaccaccaccgccaccgcaatcctgctccgtgcccgttaatccttccagctgcagcaacaaagtaaaggtcacaaatcgcgagctcggaacgcccggtccagtatcagacgacaaaccagcactatcagcactatttttcgtacttctacaaccgtggagcggagaaactgtccaagccaacgtttgccgctgccaatagccgcaaagtgccaatgagtaaatttcaaaaggccggcgccagtcgcagggattcgcgagaagtcgatggcacagttatcattggacgaagggacaattccgaggacaggacctggcagggtcaaaagtatgagaagcacgtgctaaaggaaaagctcccaagcaatgatttaaaagccgattacctagacaatggctggggaggagaccctggaagcgaagatgactacagggacattaaagatagctatgaccccgttgttgtaattgacaatgggctggagcaggtcggagtacatcggcgctactgcagaatgaccgaaaatacggtcctggatggctccggagacacgcttattaataacaacaataatgaattaaagattatgcgtaagtcgacggatcagcccatgccacggttgcccatgacgccaaagagggccaaaggtgggaccgtgtctaccaaaaagccaatgcccacggttcaccgagtcctgctgtacagcactcagagtccacggctcggccgcaagcagcagttcagcacccagcggctaagtgtaaagcagcagagctccaaggtactgggtgcaggtgatgaaagacagacggtcttattgctggagccggaacacaaacaggaagatcaccgtagtgccattgacttcgatcgtaatgacgacttcgacgaagatgatgatctcgacaatttatcaaatttcgacgaaagcgacacggcgagtgttttgtcagacactgaggacggttatcgtgcccatgccttcaagcttacccactctgtggatcgattttcatcgccccaaagcacgcccagcttcttgtcttcgcagtcgtctgaggatgatctgaaaaatccggattcccttctggttcccagtttgtttccctacgtgcccccttatttgtctttttcgtcgaacacaaaaagaggtccacgcgtgccgccggatcttcatcgcgttttgaagtggcgcattacaaacataatgccaaaggtagttcgtctgattctggccaacagcggaatgcgaatgctaaagaaaaccaacgactggatgggcgtatggggaaagcatttaaagtcaccgtgttttaaggccattcgttcgtatcagaaaattaatcacttgcccggttcatttcgcatcggccgaaaggattcgtgctggaagaatctgcaaaggcagatgggtaagcacagcaacaaggaattcgggttcatgccacgcacatacattattcccaatgatctgggagcgctgcgccggcactggccgaaatatgcccagcgaaatactaagtggattataaagccaccagctagtgctcggggtgctggcatcagggttatcaaccgatggggccagatacccaagagaaggccccttatcgtacaaaagtatatagagcgaccgcttctaataaatggtagtaaatttgatctgcgtctgtatgtcttggttacatcagtgaatcccttgcgagtgttcatgtaccacaacggattggcacggttcgcttcagtaaagtacagcgctaaaacggacactttgaatgatcggtgtatgcatttgaccaactacagcatcaataagttttcctcgaactattcgaagaacgaagacgtcaatgcctgccacggacataagtggactatcaagtcgctgtggacgtatttggcgaatcgtggagtgcgtaccgactgtctgtgggaggctctgaggagtttggtgcttcggacaattcttgctggcgagaatggcattaatagcatgattagagcaaatgttgaatcaaagtacagctgcttcgagctattcggcttcgatgttattctggactctgatcttgtgccttggctgttggaagttaatatttcgcccagtttacactcggaactgcccctagatgctcatgttaaagcgcctttagtgcagggcgttcttaatacagcgctgtacaacgtacctccaaaactatcgcttgataagcaaaaagaactggccgcagaattttcctttcctcccggcacacaaatgtgctatgacaagcggctttacattaactacttgtcgcgcgaggaaaagatcaaacataacacatttacccgaaagtctatggaagaccggaatgagtatgtggatgcgatcctaaataatctgacccccgatgatgtgaggtgccttatcatagccgaggatgaactagcgcgatgtgcaccgctggagcgcatctttccaactgatcaaacccataagtaccttaaatacaacgacactccgcggtattacaatcgccttttggatgcctgggaatcccgctacgctaacaatcgcacagaagggatagcgttgttgcgcgattattgtcaaaacaaatatcatcttcaagtcccaactcctccagccaaaaaggtgagatctttattcatcaatagtgcagaagcttttcacaagacccatttaaatgaatcgtaaactatacaaaacaaatatgtaggtcaggatatttttttttttaaatactacaagtatcttaagttattatcctattttatttataataaacctaatttgtgaaagcaagtgcatattgcactgcattctatacatacactaagtatttgcccacgttttaattattttgtacacaaaaatactgttctaaaaatcagttaaaatattcataaattctcgactacttttgttaaattttgagggctgttggagatttatacaatcgttcttttggc

SEQ ID NO: 9312 - protein, 827 aa, DROSOPHILA
MSKFQKAGASRRDSREVDGTVIIGRRDNSEDRTWQGQKYEKHVLKEKLPSNDLKADYLDNGWGGDPGSEDDYRDIKDSYDPVVVIDNGLEQVGVHRRYCRMTENTVLDGSGDTLINNNNNELKIMRKSTDQPMPRLPMTPKRAKGGTVSTKKPMPTVHRVLLYSTQSPRLGRKQQFSTQRLSVKQQSSKVLGAGDERQTVLLLEPEHKQEDHRSAIDFDRNDDFDEDDDLDNLSNFDESDTASVLSDTEDGYRAHAFKLTHSVDRFSSPQSTPSFLSSQSSEDDLKNPDSLLVPSLFPYVPPYLSFSSNTKRGPRVPPDLHRVLKWRITNIMPKVVRLILANSGMRMLKKTNDWMGVWGKHLKSPCFKAIRSYQKINHLPGSFRIGRKDSCWKNLQRQMGKHSNKEFGFMPRTYIIPNDLGALRRHWPKYAQRNTKWIIKPPASARGAGIRVINRWGQIPKRRPLIVQKYIERPLLINGSKFDLRLYVLVTSVNPLRVFMYHNGLARFASVKYSAKTDTLNDRCMHLTNYSINKFSSNYSKNEDVNACHGHKWTIKSLWTYLANRGVRTDCLWEALRSLVLRTILAGENGINSMIRANVESKYSCFELFGFDVILDSDLVPWLLEVNISPSLHSELPLDAHVKAPLVQGVLNTALYNVPPKLSLDKQKELAAEFSFPPGTQMCYDKRLYINYLSREEKIKHNTFTRKSMEDRNEYVDAILNNLTPDDVRCLIIAEDELARCAPLERIFPTDQTHKYLKYNDTPRYYNRLLDAWESRYANNRTEGIALLRDYCQNKYHLQVPTPPAKKVRSLFINSAEAFHKTHLNES

SEQ ID NO: 9313 - DNA, 2543 bp, DROSOPHILA
tgcttcattccacctgaaactcagttcgataaatttagttaatagtttcgtttttttgtacaaaattatgcattttgttgatttacgctaagccaaagttcatatccacctcggcactatctcacatggcaatttaccttagttatacgaaccaaatgaatataataagcgattaaacaatagttgaagcaattttttatacaccaatgatcgctgattgtgcaagtaaaattacagacagaagaacgagtcgcgaatacaaatctttcaatccatttattgcgtggtggcctctactgtttcccatcggttttcatcttggcccagttgtcttcatcgaacagatcatcaaaatcattgtagaagtcagcgtggacgtgcttatcgttggagggcaggtggtccatcatcattcctgtggctccgccggactaaaggaatacaatataaatatatacatatgtatatgagcgtatggtggcaggtttttaacatttatgtaggatattgccatgagcattgatgaaaactctggacatgggaacaattaatataataaataaagtcgccaaaagatgaaatgaaagatacatattcctgttttgcggggaaacactacttctaaagaagattgtagatttatctgattgttgtttacttttaattgcaatgttggctacaaggataaacaaagttttcgacgaccatattcttcgatgggaagctatgttgaggacttacctcgtccatttccatgtagccggggccttcggaaaacatttcgtcggcagccagagacggtttcatgtttaaatccatacttatttctattttagcttccaattatcttttttgttattttttttagcgcagaaaaatctttacttgctgaaggcgttgccactgcaatgacacacagaaaataggtacccgtccggcaaccctatgaaacagctgattgccgctaagaacttcaatataaatattaactattgtaaaaatggttcgtgtgggccttcagatttccgccacgctggagaacgtggacaagctggagacgtctcatccggactactccttcttcttgaagctgaagtgcagcaactgcggcgagcagtcggacaagtggcacgatatcacggaatccgaacgtgtgcaacaggattcgcgcaatgcggccggctttaacttcttcatgaagtgcaagatgtgcagccgggagaacagcatcgacatcgtcgacaagtcgaatggtaggctggctttgagtaacgtatccccaccaaactactgagtgcatccatccacacagctccctacacggcggacgattctggcgcatttaagaccatcgtggtcttcgagtgccgcggcgcagagcccgtcgaattctcgccgcgcgtcggttggcgcgtctcatccgctgaaaatggccagcagttcgaggaggtggacctgtccgaggacgactgggtggagtacgaccagaagaacaacaactctgtgggcatttatgaattcgcctcgaagttcattaagctgaagaagtgaatcctgctgcactttacctaggattttcttgatattaggctaacgcctcaaactgataaatgtacactacacggcacccgaaaacaaatatcctttaagcatataaaggcatttcgaattgttttgttaactataaatcaccattgtcaagtaattcttccaaaatgcttttctaattcacccctcctgctcttaaacaatacagaagtgttctagatatatttaaaactttatttgtgatcatcatgcgattctcttagccgctctcccaaactctctcgatatcgattttcatgtgccggctactttgaattgagattgagcacgaagatattagcactctctcaattgtttttgcctctctgtgtgcgtttgcacttgatttcttaatacaatgcagtatttcgccagactgcgagcgaaacggaccggatacgggaatccaaagcgaattgccggacccggatatcgttgcaaaaggcgcgtaatatttggtgaatggtgaccctttgaaaccacctacgtacacctgccaagtgctcagccagtgcgtctccggtaattattcggtctgccgagcgagtgtcgccagtcagaggcactaggtgcatcaataaaactcgcagtgattagataatgtggggggccagtcttatctggacatttgggcgacgtagttcaacagcctgcagaggttcccaccagtccaatacaataatataacccaattccagccctgacctttgcaaaagtacgtgatttggaatactcatatcaagcggtctacccctggccacttcccacacggttcatccataatgcatgattctaggctggcacgcatcagtcatgcatcttctccatttgtcaattacggcacttggaagacgtattcccattacaacactctacgctttccaagatgcagcattctatctcaattgacactgattggattgcgtgcatgcatataaattccagccactacttgg

SEQ ID NO: 9314 - DNA, 484 bp, DROSOPHILA
atggttcgtgtgggccttcagatttccgccacgctggagaacgtggacaagctggagacgtctcatccggactactccttcttcttgaagctgaagtgcagcaactgcggcgagcagtcggacaagtggcacgatatcacggaatccgaacgtgtgcaacaggattcgcgcaatgcggccggctttaacttcttcatgaagtgcaagatgtgcagccgggagaacagcatcgacatcgtcgacaagtcgaatgctccctacacggcggacgattctggcgcatttaagaccatcgtggtcttcgagtgccgcggcgcagagcccgtcgaattctcgccgcgcgtcggttggcgcgtctcatccgctgaaaatggccagcagttcgaggaggtggacctgtccgaggacgactgggtggagtacgaccagaagaacaacaactctgtgggcatttatgaattcgcctcgaagttcattaagctga

SEQ ID NO: 9315 - protein, 161 aa, DROSOPHILA
MVRVGLQISATLENVDKLETSHPDYSFFLKLKCSNCGEQSDKWHDITESERVQQDSRNAAGFNFFMKCKMCSRENSIDIVDKSNAPYTADDSGAFKTIVVFECRGAEPVEFSPRVGWRVSSAENGQQFEEVDLSEDDWVEYDQKNNNSVGIYEFASKFIKL

SEQ ID NO: 9316 - DNA, 3068 bp, DROSOPHILA
cgcaccggcatccccacgacagatgccctcgccctcggctctcgagaggcagacgacggattcgtagccgtatccggcttcccattcgcacagggatcggctcagcgtattgtagttggccttctgctgtttataggatgcagtaccatccgaaagttcaccccatccagccacatagaccggagttccgttgggcagctcagcgtccacatcttccgtctcctcatcagttgtggggggcagtgcgatgtcttggatgcgatcgctaaagaccagggtctcgtccagctccagtatggcgatgtcgtgcaggaagtttccgtacgatggatggatgatcacgctctttacattcacaatgctgccgccggcgtactggttaatggtgcccaggcgaacagccaaggtgctggcatccactctggggatttagaacaaatagggattagaactggtagatgaatatatattcttaaagttctcaaagtgaagtgcttagggaatccaagtgtatataatcataaagtgtagttagaactcacggggtgatgcccacgctggacacacagtgggcggcggtcaggatgtggtttgttgagatgatggcgccggagcagacgtgggccttgttgtatctcacggatgcggaccaggggtactcgccctgggcaacgtcctcgccgccaagaatgcgaccttgtggcgaggcttccgcggagaggatcaggccaaagattagcaggccgaggccgagagtaatgcgtggatcagccatggcgatggattggcaactgaatgggcccatcagccaacgatcggtggtcaccgccacttagcgatctaatcgatgggcattgtatggcgataaggagagcgacttgaatttatgggggtaacaatcgtgtggcgattagattgcttaacccatggtcgtaaacggggtgttctataaaggtccgccggccggtaggcgcacctttcagttgagatcccacaagccatgagtccggttcagtcatattcacacagtcgactactcctgctcgtggtcatcgtgaccttgggcgtggtccaatccagtcgactgccggcggaggtgggctcccagccacacagcatctcactgcgtcggaatggcgtccatgtgtgcggaggagctttgatccgtgaaaagtggatcctcaccgcagcccattgcgtcagtttgggcggtggacagcagaggtagatggtttttacacagagagaaaaagttcatatcaacttaagttaagcataattcaattagatgctaattgtttacttttcaagacattatttatttatttataaatattttcacattttgaaagaaacttactttaaaagatagagaatgattcaaagtataatcactataaatatatattttagttgagctgttaataccatttaagtaattcaaaagggctgccaagttgatataactttttcactgtgtaggataaccgtgtgaaacagaatacattacccaattcatccatttagctacccagctaaatcctacaatgtgcgagtgggcagcattcagcgactgaccggtggtcaactggtgcctctgtccaagatcataatccacacgaactactccagttcggatgcagttggctctaatgacttggccttgctggagctggaaacgtcggtggtcctgaatgcgaatacgaatccgattgatttggccaccgagcgaccggcggcgggctcccagattatcttctccggctggggatccagccaggtggacggatctctcagtcatgtcctccaggtggccaccagacagagcctgagtgcgtccgattgccaaacggagctgtacctgcagcaggaggatctgctctgtttgtccccggtggacgaggacttcgccggactctgttccggtgatgccggagctccggcgtcttacaacaaccaattggtgggcattgccgccttctttgtgagcggatgtggttccgagcagcccgatggctacgtggatgtgacccagcatctggagtggattaacgaaaacgctgtttaaataaaaccgagacgttgattagggaaatgctgtatgagaacattgttttttaacaattactttcgtgaccgacttaaaatagtatatgttgtttcatactaattaaaaggggaaacaacgtataaattgcttactgaatacgaaatatcagttgtatacttcttttttaatacaaatacaactgaaacagattttataaatattatttcacctaaagtggttcaggtaaagtagtgttttccgtttttgatttacactcaacaatcttctctttctattaaaaaactttacttcgagtgcgtttaagataaagaaggttttgttttctctgatattttaagtgctatcagcattccagcttatatatgggtatatatttacatctgactcagcaatcattgaatccacttgttaatttatgtcttaatcattaacgttttataagatttctaataaagctcctataagtatgctacaaaattcgaatttcaaagtaataatggctatatttatggtctatcgatatttgtttaactttcacctcattagattaagctgcctagatgatagtagtagtacgcttttcctataaataaacaaaataaaagaaaagaaatttaaatggataaaaccaattaaaaagccactaaaagaggaaacatttaaaaaaaattaaaaactacctctaggttttatttagttaatatacatgttataaacatgatatcacaatatcaatgaactatttttaaacaatattggtaacttaaatttcccttaaaaaaaaaaaaaacaaaaaatgaagcttttggaatgcttttgctatcgacattggtttattgctgcaactgctgttggatccaatcgtagttggccgcaatgctaatgaatcgttcgggcagcattccgccgcactcgccaaggatctgtgcacccagacccaccagctggccctggtagacggccggtcctccaatgtccccactgcagattccctgac

SEQ ID NO: 9317 - DNA, 765 bp, DROSOPHILA
atgagtccggttcagtcatattcacacagtcgactactcctgctcgtggtcatcgtgaccttgggcgtggtccaatccagtcgactgccggcggaggtgggctcccagccacacagcatctcactgcgtcggaatggcgtccatgtgtgcggaggagctttgatccgtgaaaagtggatcctcaccgcagcccattgcgtcagtttgggcggtggacagcagagctacccagctaaatcctacaatgtgcgagtgggcagcattcagcgactgaccggtggtcaactggtgcctctgtccaagatcataatccacacgaactactccagttcggatgcagttggctctaatgacttggccttgctggagctggaaacgtcggtggtcctgaatgcgaatacgaatccgattgatttggccaccgagcgaccggcggcgggctcccagattatcttctccggctggggatccagccaggtggacggatctctcagtcatgtcctccaggtggccaccagacagagcctgagtgcgtccgattgccaaacggagctgtacctgcagcaggaggatctgctctgtttgtccccggtggacgaggacttcgccggactctgttccggtgatgccggagctccggcgtcttacaacaaccaattggtgggcattgccgccttctttgtgagcggatgtggttccgagcagcccgatggctacgtggatgtgacccagcatctggagtggattaacgaaaacgctgtttaa

SEQ ID NO: 9318 - protein, 254 aa, DROSOPHILA
MSPVQSYSHSRLLLLVVIVTLGVVQSSRLPAEVGSQPHSISLRRNGVHVCGGALIREKWILTAAHCVSLGGGQQSYPAKSYNVRVGSIQRLTGGQLVPLSKIIIHTNYSSSDAVGSNDLALLELETSVVLNANTNPIDLATERPAAGSQIIFSGWGSSQVDGSLSHVLQVATRQSLSASDCQTELYLQQEDLLCLSPVDEDFAGLCSGDAGAPASYNNQLVGIAAFFVSGCGSEQPDGYVDVTQHLEWINENAV

SEQ ID NO: 9319 - DNA, 3081 bp, DROSOPHILA
gccaggtgatcgcagttcgatggctagtgtttacaccgatcggagagtagctatagctttaagcgtttacctgtgaatttgcctattacgccacaccagagattcccacacatcggcgaacggtcgttggaatcgaaatcaatcgattgcttaggtaagatggaattatctgtacaggtgagccaagaaatacggggaaaaacaagcgaaagtgggcgaagtggggacatacaaagggggtcattccagtgttgaccataactatttgagaaaagtagctaaaatacctatttaacttagctactacgctcttttgcggttaggtcgcaataactgtcgaaaagtgacatcaatccttgggtcaccagcagtataaatccgtattacagaagtaacaagctgaattatttgtactagttaattatagtgtttactttaaagttctgcttgtaaaacgtattaatagacaacaaatttagtatatgcctcgttaaaactgttctatggggttcaaaagtgatatcttagtttgtaaatggtacttttcagtttaatgctactatatttaactcgaaaattgccaagttatcagcctttttttcttattattgcatagtcgctttttcaccgcttgcgttcagtgttgtttaaggagattttttctagctttaacaaacatcaagttttcgaataccacaaatatatagacaaaatcaacaagaagttcctctcgtgtgtagtggagaagtagaaccacgtatattgtttttaaaatgcgttttgattttatttattcgtttgctcaattaacttagcttaaaacataagtaattatttaattgccatcacagctggcgttgtctaactttcgactgattgctttcttttgcttcggcattgcgtcgtcttcgctcttgccaatcggcagtcttcactctacagtctgcagtctacaatctctggtcttcagtcgacgttggccttgcttacccaacggttgtgttgctgcgtaccgctccgcccgcttttaccgcaccgtaccgcccctccccgctcttaccgatcgaacccagttggtggtgtgtttggccgagcttaacgaccgactgcaaatgtaagtatatgtatatccagatactttgcgaaggggtcaaccaatacaattgactttcacggcgacggactttggcgatccggtaaatcagcgccaaagtctgatgcacatagagaaatcacggacatatctttggattttcttattacatttttgtttttaaatataataacacataaaatatatacaaatgggtctctattactagctacttcttttcttttcccatctaccaatttaaatctaataatattttagttaaatttaatagttatcaggttgaccctaatttctttccatgtagtaacaactttcgctgccactaacgggttttcgcccctcatcttttcagtgggaatccagacacacacaaccagatatcgcgatgtcttggctggttgttttgctgatcctgtacgtaatctgggatgtcaactacttcatccgctgcgtgttcacggtgttcgccggccggctgttccagcggaagcgcaaggtcacggacaccacgacgatctatggactgtgcacctcgcaggacgtggacatctttatccggcacatgaacaacgcccgctatctgcgcgaactggactttgcccgcttccatttctacgccctcactggactctatgagcgcatccgggaccgacgcggcggtgccgtccagggagccagcagtgttcgctaccgccgcaccatacccatcttccatccgtacaagattcagaccaagctgatctggtgggacgacaaggccatttacctggagcagcagtttattaccctttcggacggatttgtacgcgcggtggccatgtccaagcagaacatcaccaactgcaatgtgctggaggtactgaagacctatccggaaactgcccagcgaccggagaagccggaggagctcaagctctggctggatgccatcgagctgtccagccagaagctgcgaaaggacaagtgaatcgattgattgattccatctcccgcagcacagctcatttacatatgtttgcctcatttacttagattcgtagtcatcttctattttttttttttgagtgcatagtgaagtaattctagactggtgggtttttcacacaaaaaagagcgtaacaaaatgtacacaagtcatgaatctaaacaatggcccatagcaacttaaagactttatttgctattattttttcactgtgccttagttataggaatattgcattaatggaatggctgaagattttaaatataattttttacaaaccaaaaagtattgtaaatgtttaaataattttagattgaacatacaattttacatctttcgcagtttgatcgttttatcacatatatttcctaaaaacgcgttttgcgtggacgggagtcgttggagtttctttcacgactttcatttatgctaagtttgatatcacgcaacgccaagtctgtgtcgataagtcaatggattgtcttgttttctatattttctttttcgctgtcttcattatggaacagttaattatgaagactgcattttggttatgtaatttgaaacgaaactgctttggaactgttaacctcagaagtttgcaaatattacacacaaataagcataaataatgtgtgcaagggagaaaaattggtatccaatatatttgcataatatatatggattattattttcgttattatggttaaaacacaaaaaaaaagtgttttatttggtttttttgtttttctttgcaaaaagggctgattattttactgcccacttaacggaggttcattgaaccaattgttgtcctatgcttttccatctgcagataactattatcatactttataataattaccatattatcattgacttggacagctgagtgccatccgtaatccgcagcgtaatccgtgacgtcatgtcggatgcaacagctgcacacacggcgtatgagtgctgaccacttccactt

SEQ ID NO: 9320 - DNA, 729 bp, DROSOPHILA
tgttgctgcgtaccgctccgcccgcttttaccgcaccgtaccgcccctccccgctcttaccgatcgaacccagttggtggtgtgtttggccgagcttaacgaccgactgcaaattgggaatccagacacacacaaccagatatcgcgatgtcttggctggttgttttgctgatcctgtacgtaatctgggatgtcaactacttcatccgctgcgtgttcacggtgttcgccggccggctgttccagcggaagcgcaaggtcacggacaccacgacgatctatggactgtgcacctcgcaggacgtggacatctttatccggcacatgaacaacgcccgctatctgcgcgaactggactttgcccgcttccatttctacgccctcactggactctatgagcgcatccgggaccgacgcggcggtgccgtccagggagccagcagtgttcgctaccgccgcaccatacccatcttccatccgtacaagattcagaccaagctgatctggtgggacgacaaggccatttacctggagcagcagtttattaccctttcggacggatttgtacgcgcggtggccatgtccaagcagaacatcaccaactgcaatgtgctggaggtactgaagacctatccggaaactgcccagcgaccggagaagccggaggagctcaagctctggctggatgccatcgagctgtccagccagaagctgcgaaaggacaagtga

SEQ ID NO: 9321 - protein, 193 aa, DROSOPHILA
MSWLVVLLILYVIWDVNYFIRCVFTVFAGRLFQRKRKVTDTTTIYGLCTSQDVDIFIRHMNNARYLRELDFARFHFYALTGLYERIRDRRGGAVQGASSVRYRRTIPIFHPYKIQTKLIWWDDKAIYLEQQFITLSDGFVRAVAMSKQNITNCNVLEVLKTYPETAQRPEKPEELKLWLDAIELSSQKLRKDK

SEQ ID NO: 9322 - DNA, 6835 bp, DROSOPHILA
cggcaaaaaagaatggacgatttaaaaaaaaaacttataaacggaaaaattgctaaaaaaaaaaagtgcgtcagaaaaataattcgttattttgctatactcagggttggcaattgctgcctcagatgtacctcttatcaggaccaactttttgagtggtgcacaaaaactttaggattccggtggcagttgcatgttgtgcagactgggcgttgaattgggatggattgcttcgctaagggagctgcggccgaacaccaagggttcctcgccattgccgttgctggctggtcaatcatttaagtgcacgcgattttcatagtaccagaaccaggctcaaagcaagaagaccaacaataactggctcccagcttgcagcttgtatgcgacgaaaaagtagtaagactaccattacagtacggtgtttgatgaagacgctggccctagggaaaagggtgggggagcagagcgtgtctgcaactgggtcatttcaagcacaaaaatataaataacattaacgaaaatcacagcgcgttctaaatagaagcaggattgtacgtcgctattgaccgctagcctttggacctttttcttgcatggacaatttcataactataagtatacccgtcacttgtagagtaaaaaagaatctaagaggtgatcagaatcacttgccctgcgatcgtgtgaaaaataatctattaatttgtttctatttaagaagcgcacaatgagttagtacaagatcgagccggttagcatgtttataagtacacatatttttgacaaaataaagttcatcaaatgacgtttttgacactttcagtagacgttgttacatgtcatgcacacacagttcttgtatctaatttctgcggcattaattttcgaatttgctaaattagcacaaatgggccataaaacactaggcacgccaaaatgtacttaccgattattcacttctttgttttacttattctaggattggcgcaatcgtctaatgggcataggccaactggagcttgccttaagctcttcgagcaatttggccttggtccaaccgtatctggatagtctgcttcgaaccctcctctcatcggagcgtcactttgaggtctccgatcttaagcgagagctactggttaacctaatctcgcgcctaccattggacaacttggaggagcgcacaccacagattttgtcgggactctgtcgccagggcaacgctggagcaaaccgggtatgcaaggctctgatgcagcgccttcccgcgggaaccatagttgctaagctgacctcaccagaattcctccatgcaaagagttcaaaggtttgttattctgcattgcacgatcccaattattgaatcttcatgtaccgcagttccgggaccacgctcttcaaatgtcaatttttgcgctgatgaccttcccgggaacctgcttcgacatcagcctgttgacgactcaggccgtctactcccttcttaaccgaaaacgacgggtgcggcaggcggctctggaggttctagcagttcttgccgatatctcgtccatcaaagaggttttaaccattgtgtcggagacaacggacggcgtagagcttgggccaatggtgttggaggcgacaagtgtgcggctatcgcgtttacaactgcccatcgttactcccgacagcggcgtgctcttcgttttcaaccagactgatccacctggagccaggcgatttggagctgatgtagactggatccatcagggtgagggctctgcctctcccaatacaattaagaggcgacgcatgcgggctgcaagcagccagcgcaatgtacttgggggagcggaagcaaaaaacaagaatgatccattccccaggtacgaaacaaggtttacttagaggtattcttatccacataagcctcatatcgcaaaatagcattgttacgttagaaaggcgttataagtatagaattaagattaaaaattcgccccaacctttagaactgacaaaagcacttcaataaaatgcatatccgcagtttcaggcaggtcaacgagagcgtgcatcgccattccttccattcccccccggaaacgttggacatggctagcccaattaatgttagtccaataccttttgttatttttaatagaactaaaataacttctccctaggacttttcgcaaagattaagttttggcgctaagactaacggtggtaggtctcttctgaatttattcaatatattcaataacactaaccattgcgaacgcaggaagtcaatcctttattgaacgtcgctttttggccaaggcgtgctctgatacttccatggacggccgaagtaccgacagcaccaccactacctgcagcagtggtagcgccacagacagctttatacagctcacttcccgcacgggcggtcgacttgccggaccaaactccaggtttgcattgtcacccaccaacgtcagagcagcttaataaaacactactcacagatttcccaccatgaaccagcatgcagactttgtcaacaattttatgcgcagcatgcagcgaggctctaagtcccattccgtggagagaccgaactacccgaaggtcagttactcgatcccaaagtcccagcagatgatccgcaagaagttccagcacaaggattctttcacaaagctgggggacgaaccacctggtcaaagttagtatcacttctctgctcgttctgccaacgtttgatatatttcgttattataggcatcgaaaataacaaatttaacgaatctcagaggagaaaatccggtatttccacagaccacatggaatcactggacagcaaatgcgccgacgtcatcaagtcagtgtaagattcgtctatatattttattcgggggccggcaaataggaaacccatttattcagtcgccacaatgatttacccctcgctgggtgcgagtgttaacctaaattttgaaacaccctactcaaatccacacagatatttgagcataaggcagggtgaaagttatggggacaattcactttagcgaatttggttgtttctctggccaatacacgcaccctgctgacaaaactgtggcattaaaggagtcgagttctttaacctaaataatttaaatgcgcagtggaaaccgcgttggtgaaatctaagtatgtggcgggtgacattgggcaacgtcagtagcgacgaaccttcaagtgaccactggcaactcgatacgaaatgctagaaacgattcaaggggcagaaaattattttcttcggcggttttctacaattctttcctgggtaaattaaatgcccgactagttaaacaggtatggattaccaagaccagtttaattcggactggtctcaactatagaaaagtttgccaataagggtaactgctttttggacagtaacattttggctatccaagatgttttacatacatttgaagctctctcgggaaatggcaacttgttgttttatagacttcgggactttccgaaacgaaggcgcccgaagatggcaagaaggtccttgcctagaagtcgagaagctttagcaaatgtcgtaggacctatggccagttggcttagaactttgttcctggtgagcactagacctttccgtggctgacttgacagcctgtgggtggctaggcgttctgaccactggggtagtgttcgtgtgcttgcttggaaaacgcaatgtcctgtattcgtttgcaactttggttttgttgtggattcccggtatggaaattcatttgaaatgaccaaaaggactggcgacgggcattgcaaacagtcagcaaagtcgcgttgttttaagcggacgcctattgcggatagggttagttcgagtatgtgttgtttccagtagaaaatcgcctggataattattcattggctagcgcaaaaaaatgctgaatgcgttttcctgtggcgaacagccatctgatctattgcgtagaacatgtactctattccacacggtcagagactgcatctgccccagggtttcggaggtacactccacattacgtggggctttttctggacaccgttcgttctgcggcttctgctgcactgacacggctctggagtccagaaaatcgatgcaaattgatacagaaacccagctcgccgatgataagcactctttccccgtgtttcagcagccggaagatagtgaaaaagaaaaagttttggctcaatatgtagagttgtgagtcgttataacgtaaatccaattgtactagccatttattcttttctttttgcccaaacagggataccgaaacagaagttaacggtatgacgaatggctcccccatttccgcaagttctactagctattcgcaaaagtcaacagcctcggcgaagtcgagcataagccaaaacgagatggggaagcgaccattctcatccactggcctttggaacgattgcaaggtggaagtgctgaacagggagcacaatcccaacgaagcgttcggggaattggtggtagatgccattaaggtgcagacggaatcagaacctactgcccatgaggagctgctcaagcttaatggaagcctaaatagccttcacagcaaaacggagagcatcaaaactcagctggaggaaactaccccgcaactttcgagggctcagtcagtaaaatcgctgctaatcgaggaggacattgagagcagcaacagtttcgtcgtagttgaagaagtggagaacgagctggagtcatccccagcgaagggcgaggaggaagtccccttgcaggaggagctagcaacaccggtaaaagctacaaaacttgaaaatcatacttttggtccaaagttggttccgacacacgacgaaatagtgatccattcacgtagcgtttccctggactctctttatgggacgcgaccggcttcaaagcagggatctatggacacaagcacaagcactgcggaaaacacttcacaaactggttctcaaattggaaatactagtgtccctgcaaaagctcaacacacgccgcttaaacacaagtccaaaacatcgtacttcctgcgggcacaacggcgaatctcaccttcaaagcagcccatcaaaatgtcgcaggcagagctcttcccgcagaatatggttcgatttgataggccccgtgaggctttgcttaaaacttttgaccagttggactccagcaactgggaagtaaacgtgtccggcttgaaaagcatggtacgtttgattcgctaccatgccgagacattggacaatcagatgcacatgacctgcatccagctcacccgctcagtccgaaatctgcgctcccaagtagctcgagcttcctgccaagcagctgcggagctgttctcgctgaagtccaccagccttcagcaggaatgtgacgacttggtatgtgccctcctgcaccgcaccgccgacacgaataggtttctccgtgctgacgccaatcgagccctggagtcgatggtggaccatgctcagccgcagaagattctaaacattcttgcgacaaaaggagctcaacatcaaaatgccttggtgcgcacgacatcagcaaagctgctcttcagactagttgagcgtctgggcagtgaccggatctatgcaatgggccgcgagagccgcgacaagttttttgtggttggagcgaatcttcttctcgaaggcagtctagagacccgcagctacgcaaagtccttgttccgggctttatccgaaaatcataattatcagcggctgcttttggaggtgataccaccacgcacctacagaaatgttgaaaagactcttaggagcatcacacgttgactatggcagatcaagatctgtacagcataggtttagtatccaaagccactggaagcttacaggattagggtgttcgctaataaattagagtcaagtattaagaataattatacagtacactaataaaacacaatacaccacagagtaaactgcttcatttgatacataattttctgcagatatccagctcattaaacgattaaagacggtaacttttgattttggttttgagtaactgaaggactagggtatacataaagacgaaaatgtggtgaaatcttaaagcaatctgcgtttgttgttggagcgttggtccgatcttctgctgcctccctgcatgtgctggtggtgttgctgtggttttagccggttgcgttccattacggagctgtcgctccggcgccgttgatcggcgttgtgtccaaaaggattgcgatcgtacggcttgccgttatgcaaactgtgtcgggcgtgacgcagtggcgatggctgcggtagagcctccatcatgaactgattgcgcagacgactttggttgtaggcaggtagctgcttgccgccctgctgcttgatggtgactttcttttggaacagttcaaggccctggtacaagtctagggcaaaaggcaccgcacacaggcgttggtatgtgacaaacccgaaattccggggacgcccattgttatcggtcggtatccgcactccttcgatggggccagcttgcaggaacacctcgtaaaggatctcctccgtcacgcgctcgtcgagattcccgcagaacagagtccgttgctcctcgtcctcctcctcatcgtcgtcgtcctccagttgcccaaccaactggtcaccgttttcattgggcaggaaagggtaaattggctgctcttggtgctggccagatggaataccgtatctgtaaccatctatgttcgtttccgaaatcgtcatgaccgacgcaccactatacatttgctgcattagtaactgcaagtccatttat

SEQ ID NO: 9323 - DNA, 2862 bp, DROSOPHILA
atgggcataggccaactggagcttgccttaagctcttcgagcaatttggccttggtccaaccgtatctggatagtctgcttcgaaccctcctctcatcggagcgtcactttgaggtctccgatcttaagcgagagctactggttaacctaatctcgcgcctaccattggacaacttggaggagcgcacaccacagattttgtcgggactctgtcgccagggcaacgctggagcaaaccgggtatgcaaggctctgatgcagcgccttcccgcgggaaccatagttgctaagctgacctcaccagaattcctccatgcaaagagttcaaagttccgggaccacgctcttcaaatgtcaatttttgcgctgatgaccttcccgggaacctgcttcgacatcagcctgttgacgactcaggccgtctactcccttcttaaccgaaaacgacgggtgcggcaggcggctctggaggttctagcagttcttgccgatatctcgtccatcaaagaggttttaaccattgtgtcggagacaacggacggcgtagagcttgggccaatggtgttggaggcgacaagtgtgcggctatcgcgtttacaactgcccatcgttactcccgacagcggcgtgctcttcgttttcaaccagactgatccacctggagccaggcgatttggagctgatgtagactggatccatcagggtgagggctctgcctctcccaatacaattaagaggcgacgcatgcgggctgcaagcagccagcgcaatgtacttgggggagcggaagcaaaaaacaagaatgatccattccccagattaagttttggcgctaagactaacggtggaagtcaatcctttattgaacgtcgctttttggccaaggcgtgctctgatacttccatggacggccgaagtaccgacagcaccaccactacctgcagcagtggtagcgccacagacagctttatacagctcacttcccgcacgggcggtcgacttgccggaccaaactccagatttcccaccatgaaccagcatgcagactttgtcaacaattttatgcgcagcatgcagcgaggctctaagtcccattccgtggagagaccgaactacccgaaggtcagttactcgatcccaaagtcccagcagatgatccgcaagaagttccagcacaaggattctttcacaaagctgggggacgaaccacctggtcaaagcatcgaaaataacaaatttaacgaatctcagaggagaaaatccggtatttccacagaccacatggaatcactggacagcaaatgcgccgacgtcatcaagtcagtggataccgaaacagaagttaacggtatgacgaatggctcccccatttccgcaagttctactagctattcgcaaaagtcaacagcctcggcgaagtcgagcataagccaaaacgagatggggaagcgaccattctcatccactggcctttggaacgattgcaaggtggaagtgctgaacagggagcacaatcccaacgaagcgttcggggaattggtggtagatgccattaaggtgcagacggaatcagaacctactgcccatgaggagctgctcaagcttaatggaagcctaaatagccttcacagcaaaacggagagcatcaaaactcagctggaggaaactaccccgcaactttcgagggctcagtcagtaaaatcgctgctaatcgaggaggacattgagagcagcaacagtttcgtcgtagttgaagaagtggagaacgagctggagtcatccccagcgaagggcgaggaggaagtccccttgcaggaggagctagcaacaccggtaaaagctacaaaacttgaaaatcatacttttggtccaaagttggttccgacacacgacgaaatagtgatccattcacgtagcgtttccctggactctctttatgggacgcgaccggcttcaaagcagggatctatggacacaagcacaagcactgcggaaaacacttcacaaactggttctcaaattggaaatactagtgtccctgcaaaagctcaacacacgccgcttaaacacaagtccaaaacatcgtacttcctgcgggcacaacggcgaatctcaccttcaaagcagcccatcaaaatgtcgcaggcagagctcttcccgcagaatatggttcgatttgataggccccgtgaggctttgcttaaaacttttgaccagttggactccagcaactgggaagtaaacgtgtccggcttgaaaagcatggtacgtttgattcgctaccatgccgagacattggacaatcagatgcacatgacctgcatccagctcacccgctcagtccgaaatctgcgctcccaagtagctcgagcttcctgccaagcagctgcggagctgttctcgctgaagtccaccagccttcagcaggaatgtgacgacttggtatgtgccctcctgcaccgcaccgccgacacgaataggtttctccgtgctgacgccaatcgagccctggagtcgatggtggaccatgctcagccgcagaagattctaaacattcttgcgacaaaaggagctcaacatcaaaatgccttggtgcgcacgacatcagcaaagctgctcttcagactagttgagcgtctgggcagtgaccggatctatgcaatgggccgcgagagccgcgacaagttttttgtggttggagcgaatcttcttctcgaaggcagtctagagacccgcagctacgcaaagtccttgttccgggctttatccgaaaatcataattatcagcggctgcttttggaggtgataccaccacgcacctacagaaatgttgaaaagactcttaggagcatcacacgttga

SEQ ID NO: 9324 - protein, 953 aa, DROSOPHILA
MGIGQLELALSSSSNLALVQPYLDSLLRTLLSSERHFEVSDLKRELLVNLISRLPLDNLEERTPQILSGLCRQGNAGANRVCKALMQRLPAGTIVAKLTSPEFLHAKSSKFRDHALQMSIFALMTFPGTCFDISLLTTQAVYSLLNRKRRVRQAALEVLAVLADISSIKEVLTIVSETTDGVELGPMVLEATSVRLSRLQLPIVTPDSGVLFVFNQTDPPGARRFGADVDWIHQGEGSASPNTIKRRRMRAASSQRNVLGGAEAKNKNDPFPRLSFGAKTNGGSQSFIERRFLAKACSDTSMDGRSTDSTTTTCSSGSATDSFIQLTSRTGGRLAGPNSRFPTMNQHADFVNNFMRSMQRGSKSHSVERPNYPKVSYSIPKSQQMIRKKFQHKDSFTKLGDEPPGQSIENNKFNESQRRKSGISTDHMESLDSKCADVIKSVDTETEVNGMTNGSPISASSTSYSQKSTASAKSSISQNEMGKRPFSSTGLWNDCKVEVLNREHNPNEAFGELVVDAIKVQTESEPTAHEELLKLNGSLNSLHSKTESIKTQLEETTPQLSRAQSVKSLLIEEDIESSNSFVVVEEVENELESSPAKGEEEVPLQEELATPVKATKLENHTFGPKLVPTHDEIVIHSRSVSLDSLYGTRPASKQGSMDTSTSTAENTSQTGSQIGNTSVPAKAQHTPLKHKSKTSYFLRAQRRISPSKQPIKMSQAELFPQNMVRFDRPREALLKTFDQLDSSNWEVNVSGLKSMVRLIRYHAETLDNQMHMTCIQLTRSVRNLRSQVARASCQAAAELFSLKSTSLQQECDDLVCALLHRTADTNRFLRADANRALESMVDHAQPQKILNILATKGAQHQNALVRTTSAKLLFRLVERLGSDRIYAMGRESRDKFFVVGANLLLEGSLETRSYAKSLFRALSENHNYQRLLLEVIPPRTYRNVEKTLRSITR

SEQ ID NO: 9325 - DNA, 2418 bp, DROSOPHILA
gcggaaacagcagacgcaaatatttgtctcgactgcgagatttttgaaagggagcgagcgggcaaccgttagcggccgctattggccggcgaatttcgaccaatttggatacggacgtgggctttgtacgtgtctagcactgagcaaaatatctggcacatacatatggtcatgcttagttatggccacgccatcttgcagttctaaaataagtaatcatttaaaaggcactcatttagtttatgggcgttggaaattgcaataggtcaaggtgacaagtttcgtttagcatgttccagaatatgcgtttcaaaagcgattttttgtactatattttcatcagtgcctgttgcctggcgaatttccataattgagctctgcaggtgtataaactcgcacgaaatgtccactttatgtgtcaccagcactgatattaccacccattagcagctgggtaattgaatttaaactaaacacttactgttgtgtgttgtttgccacagaactaaacagtgtctgaattccaatccggcggtgactttcaatttaagtcattccatatcgcacgatcgcccgcaacgagaaagcttctccccagtgagcaaaatgagcggttaagctccactccgattctcagtggatcgggaagctttcgctgaagtggggctaggcattcgcgttgctgataatgcaggcctacggataacagctccgatttcgattccctgataattcaccccaccaaacaccactgtcaagacacgtaatctcgttcggatcaaagttcgaggggtcccaccgctcccaaatctccatctccattttagttccataatgcacgaaagctccaataaaatgccgctcagccggacaaacacctgattattgctcatatatctggtaatctttattgtccaactaagtactatagtggtgatggcaggtgcatggggggtccgcaatcggaatcggattggatcggatttgatcggttgccggcttaggcgtacttgggggcgtacttctcgtacacctttacgtaggcctccttggcagcctccttggagagacccttgttggagctccaggcctcgtacttggccttgtccttgagagccagagcgccgggcttctcgatgttcacatcgccaacggtggcctgcttgaagagaccgtagaattccaagaactcggcatccgtgggcttcttggtgaacttgttggcgagttcagtggcttcctcgaactgttcagcaaaggaaagtcgcagtcaggaaactttgtacttatataacaccataaaagtgtgaaaaatgggaatttcctcttatgcaatctttcactaaattgacgttatatccaaagtgtagaatactcaccgacaccatgttgctagtataggattcttgttggtaatgctgaaaatttgaaggtaataatcccaattaaatactgagttgaacaaggatccttgactaatgtgcttaccggtgaaaaggcaaagacgattgaaggcttttgggcctttcattcgcgcttatatagtttcgagaccctttcgtttctctgttggtttatggacgcacggcaaatattcccattttgctggtaatcagcagatatcgatatctttatttcgctaatttcgctgcccaactacaagcgggcgacattgtcaaaggtagcgatattggagatagcccccggatacacttgtcgtttatggtaggttctgggagaccgcccttggcactacggccggattcacctgccaattcgtctctggactttaaaactttaacgattagccataaataatgacgaactctgaagttcattatctcaaattcgagctaataatctatttctgtgcaagaggttgtgtgtccttggttagcatcagctgattactgctgaattgtgcccctttttattttatagtaagtaaagtaaagtaaagtaattagaatctctctaatcactttaagcactttgttccagatagtaattatatatcaaatatttctgaatgttttaaacattgcttataaatacatatgggaccaagttgcaaacaatagttgaaaaagttgaccaaaatttgatcttcatttaacgattaacatttttttcatttaacgattaatttttcttcattaaccatttaattttccgcaggtgaccactataattaactcacctcctaaaagtatgctataattttgaagaacatttttctacttattctttaactaagtcctcacatgattagtgagaggtttggttttatcttttatatgttaattgcgctgttatgttactgttattgcattgtattgattcatcgcttctaaataaataaataaataaaaaaaaaaacttattctttaatgtgtaaaatattaatgcataccacat

SEQ ID NO: 9326 - DNA, 285 bp, DROSOPHILA
cattaccaacaagaatcctatactagcaacatggtgtcgttcgaggaagccactgaactcgccaacaagttcaccaagaagcccacggatgccgagttcttggaattctacggtctcttcaagcaggccaccgttggcgatgtgaacatcgagaagcccggcgctctggctctcaaggacaaggccaagtacgaggcctggagctccaacaagggtctctccaaggaggctgccaaggaggcctacgtaaaggtgtacgagaagtacgcccccaagtacgcctaa

SEQ ID NO: 9327 - protein, 84 aa, DROSOPHILA
MVSFEEATELANKFTKKPTDAEFLEFYGLFKQATVGDVNIEKPGALALKDKAKYEAWSSNKGLSKEAAKEAYVKVYEKYAPKYA

SEQ ID NO: 9328 - DNA, 5098 bp, DROSOPHILA
tcagatcataagctaacgtcctggccttgcagttctccaagcccaattcttcggaaatatgtttcacacattccggctccataactccgaccagtaatgatcaaagtgatgatatacctggaaatccatttgatttctatgagaagtatgagaaggaccgagcgaagttctccaagtccaattcctcggagggcgacgctactgaccctgaatcagcgaccaaatcgatcctacgaaacaaatctgctgtggacctggagccgcataatgtcaaccagcagcccaagaagggcaggaaggtccggaatcaaaagaagaaggagcgcaccctagacgatgacctgcgcgacatgagcgcctaccaaaaggtcatgcatgatcttgtggagaaggagccgactgcaccggagcctctgccaccgggcaagttcatcgactcgcatgcgccaaagaagcgggttagccgcttcaaggagcagcgagcccttaacaaaacgtagcgaagagtaaaacttcagctggatattactagtatatttgttcaagtttaatgtgaatttgtattacaaacacaacgcaaacaataaacaactactggtgtggtgtacattcgttttaaaattaaacactaggtactagtccgctgaaacggaatttatttttaaaacatttacatttacagtaggcttcaatttacattagatcagaatgagagtttttgattcaagaatgtacgcgattgaaggacctggccgcccgcacgtgtgcgctatcttacaggctattctaaagtacatattaacagctaatacatacagtacgaaccctaagcataagtgtagttggacgctctactcaaggacacagcccattccattgtgttcaatcatggtctaccgagaatcaaatatgtcttgagtgtctggccagcaggatgcagggatgcctccaacgcggggtctcatggccctgtctggtgttcacagatgctacagaatttctacatgtcaaagtcctccaggccgaggaactccctttctagagcggcgcccatcatgttccattcgccgtcgtcctcgtcctccggttccttctcgctgttggactcggatccaagctccaggtcggaaggcaggtcttcccctggaacattgatgcaaatattaaaaggttaacacaagttttgtgcggacgggctacctcgcctaaacttggcgctgggcatctcatcgtcatcgtcctccttctcgttattgtcatcggcctcctcgttcgagctaatgtccacctccacgaggtttggcgctccaatcattatatcatcgcttcgcgtgaaaaagtcgtgagctctgttggaattatcatcttcgcgctttctcttcaacagcttcttgtccattggtggattttcttgagttattaaagacgtattcgattaaacgtggatacagacacatggattaataagtaaaatacctaccaaaatttacaggaccctcgtcgctggacgagtctgactcgaagaatgtttcgtagtccttattcatagactcgatatctgcgttggtgaagaccagcagcggattcagcgtttcgcggaagttgccgctctgctcctcctgctgcttgctgctcgagggtgagatctccgaacgctcgctgtagttaaccacgtgctcgggactatggcaatgggcgggtggctggcgacccttgttgcgtaccttgcggtccagtggaaagagcttctcctccacgtgctcccagcgctcggcgcaggtccacaaccaattcgcattgaccactttaatggcaggctcttttttggcggcgttaaccttgtaggtgcctgcgttgaccgccactagatgcgttatctccttgtcaatattgggcttcacttcggcgcccaggctcttggctatgaaatacgcccgcgactgctcgagcttcatctgcgtgggcaccaggccggagaacaccaggttcttgccgcgcagcacttcgctccgaatcttcggaacgataacctttagatcgggtatttccgtggtttcgtcgtaaatagagtagaatcgcttgtgaatgttacgaagtatgacctctagatacagcaggtaatcgtcggggtcttcaatctctatctgcttttgcccctcgagcggtgctcgtaagctgggcgtcttagacgtggtggccacatcagcgtcagcagacgggcgcttctcatccggcgaagtggtggatgaggctacaacctcattcttttctgccggtgtggggggcacctcggcttttgtgctctccttggaattatcatcaataactactacgtcttcgccatcgctggctgctttttcagcatctggtgagccagatgagctgtcgtctatgaccacaatatcctcagcattagtcttgccattcaatttgtctctcggctctttgggtgcttctgtagcgcttgaggcgttggaaacctctggatccttggcatcgccctctatttcgaacacgtctactgactcctcgtttacatcgtcatctttgcttgtgcttgtgacggtattatcacccttatcggtgtcttctggtttgacttcgctgctggattccgtcttatctttgtccccatgcttctcggtaatctctgcaacaaatggaaatatcgttagaaacattcaagtcagcttgctggaacacccaacccacctttaaagtcaacgccttcgccatccagttcatgcttagacaaacccggcggggcattgatgtcaccagtgtgttgaaagaagtggtagggcttaacctgaatcaaatttgaagccatgttccacacatcctcgcgatcgtcaatgatgcacaccatggaatcgccattcggaaacagagccctgtaatatacaatttgtagattattgtttaacacgtttaacaagtgaaaatccaaacagctttcaggtatagaaacgcactttaaattgtccgtcttgctggtggcgttgaaacactcgtctctggacagaatcctgtgcgagaagaacttgccctccgggtccagcagctgggcaatcatgtgcgcgtagttacgcgcaccaaaagtgcaaatgtgcagttcgtacagctgggacatgcgctccagaaactcggcggtgccggggcgcaggcgcgtgtggtaccacggggaatgtgggccgtacagctggaagtggtagatgcccttgatgttgtccggcacagtgtcgttggtggtgtggatcaccgtctgatcgagatcgacaagcaggaccagcttcctatccgccagcaggcggcgggtgtcgtcgtgcccgagcttctgggccagcttctgggtgaccttaagatcgggcatggtgtgcaccattggcaccgaggcctcggaggtctgtccctgcgggttaaatgtttaattattctatatgccccttgaggtgggtggcaatgtgcactcacattctcgttctgacgcaagtcggctccgcagtccgcgcacatgtccttgatgaccgtggtgtgtatgcactcggacagctccagaatggcatccctaaagaacaggctcggttagtgtgtatacggctgcataattgcattcccccacgcccaatcgccgcccgattgcaacccccaaactcaccccttcgtaagaagctccccttccttgcgaaggcgcttcttcaccactccggcgcgctgggacttgtacctctggatggcacagtccccgcccggctttcccgcgtccttcgcgtccttcgcgtccacgcccacgggctggtaaagaaacaagatttgggccgccgacacgaattgtccctcgcgaacccgccatttattgattaccgctctcgcctcgttctctcccagcgcagctctcaaaacaatgatgccgccaccgctggtgttgttgttgctgttgccgctggcgctgttcttggctccgcttcctccgccgccatcgtcgccttcggcagctccagatgcggccacgccccctggcgcgcggctgggcgtcgcgccctcctcgtccggtatgttctgcatcgcaaggcttacgtttttatatacaaacgatttgtttaaatcccagtgccttgttgtgtttgcaatttgtgtgaatattgcgcggaattcgcataagagcgcggacaacttttgtaactgctctcaaacagctgactgagcgcgaaaggcggaaagtactgatgggggtttcacttcgatttggttagttaatgtgcgtaattaaccattaattggtaattcaatttattttactcgtttcttttagttttgagttaaaatacaggatattcgtccaaagatatcgcagaatcatttgaatcagctgcttttgaccgttaaccaacactgtttaatcggcggcaaactagttcagtcgtattttgtttattaacttccaaaatgagtgataaaaccaaggaagacctgaagcgcagtgccccggaggaggagaatgagccccaggaggaatctgtgtcatccgaaaaagaggcggaaggcgaggaagacgcctggattggacccatgccttcagagcagagcgctcccgcgcccgccaagaaaaagaagggttattattaagaattagatttcatttaactataactaatcaataaatagtcctgccctatgaacacatctacctggaaaacctgcccaatgctgagagctacgagaggagctacatgcaccgcgatgtgatcactcatttggtgtgcacgaagacggatttcgtagtgaccgccagtctggatggacacatcaaattctggaagaagggcgagctgggcatcgagttcgtcaagcactttcgcagccacctaggtgggttcttgatccacataacgtgtatttcttcgtttaaccaagtgtttgttgcagtacccatcaaatcactgaccaccaacgacagcggcacgctgctctgctcggcggccacggatcagacagccaaggtcttcgatgttgtcaacttcgacatgatcaacatcattcgattgggctacacaccgcagtgcagtgagtggataaatgggccgggagatgccgtaca

SEQ ID NO: 9329 - DNA, 2676 bp, DROSOPHILA
aaatcgtttgtatataaaaacgtaagccttgcgatgcagaacataccggacgaggagggcgcgacgcccagccgcgcgccagggggcgtggccgcatctggagctgccgaaggcgacgatggcggcggaggaagcggagccaagaacagcgccagcggcaacagcaacaacaacaccagcggtggcggcatcattgttttgagagctgcgctgggagagaacgaggcgagagcggtaatcaataaatggcgggttcgcgagggacaattcgtgtcggcggcccaaatcttgtttctttaccagcccgtgggcgtggacgcgaaggacgcgaaggacgcgggaaagccgggcggggactgtgccatccagaggtacaagtcccagcgcgccggagtggtgaagaagcgccttcgcaaggaaggggagcttcttacgaagggggatgccattctggagctgtccgagtgcatacacaccacggtcatcaaggacatgtgcgcggactgcggagccgacttgcgtcagaacgagaatggacagacctccgaggcctcggtgccaatggtgcacaccatgcccgatcttaaggtcacccagaagctggcccagaagctcgggcacgacgacacccgccgcctgctggcggataggaagctggtcctgcttgtcgatctcgatcagacggtgatccacaccaccaacgacactgtgccggacaacatcaagggcatctaccacttccagctgtacggcccacattccccgtggtaccacacgcgcctgcgccccggcaccgccgagtttctggagcgcatgtcccagctgtacgaactgcacatttgcacttttggtgcgcgtaactacgcgcacatgattgcccagctgctggacccggagggcaagttcttctcgcacaggattctgtccagagacgagtgtttcaacgccaccagcaagacggacaatttaaaggctctgtttccgaatggcgattccatggtgtgcatcattgacgatcgcgaggatgtgtggaacatggcttcaaatttgattcaggttaagccctaccacttctttcaacacactggtgacatcaatgccccgccgggtttgtctaagcatgaactggatggcgaaggcgttgactttaaagagattaccgagaagcatggggacaaagataagacggaatccagcagcgaagtcaaaccagaagacaccgataagggtgataataccgtcacaagcacaagcaaagatgacgatgtaaacgaggagtcagtagacgtgttcgaaatagagggcgatgccaaggatccagaggtttccaacgcctcaagcgctacagaagcacccaaagagccgagagacaaattgaatggcaagactaatgctgaggatattgtggtcatagacgacagctcatctggctcaccagatgctgaaaaagcagccagcgatggcgaagacgtagtagttattgatgataattccaaggagagcacaaaagccgaggtgccccccacaccggcagaaaagaatgaggttgtagcctcatccaccacttcgccggatgagaagcgcccgtctgctgacgctgatgtggccaccacgtctaagacgcccagcttacgagcaccgctcgaggggcaaaagcagatagagattgaagaccccgacgattacctgctgtatctagaggtcatacttcgtaacattcacaagcgattctactctatttacgacgaaaccacggaaatacccgatctaaaggttatcgttccgaagattcggagcgaagtgctgcgcggcaagaacctggtgttctccggcctggtgcccacgcagatgaagctcgagcagtcgcgggcgtatttcatagccaagagcctgggcgccgaagtgaagcccaatattgacaaggagataacgcatctagtggcggtcaacgcaggcacctacaaggttaacgccgccaaaaaagagcctgccattaaagtggtcaatgcgaattggttgtggacctgcgccgagcgctgggagcacgtggaggagaagctctttccactggaccgcaaggtacgcaacaagggtcgccagccacccgcccattgccatagtcccgagcacgtggttaactacagcgagcgttcggagatctcaccctcgagcagcaagcagcaggaggagcagagcggcaacttccgcgaaacgctgaatccgctgctggtcttcaccaacgcagatatcgagtctatgaataaggactacgaaacattcttcgagtcagactcgtccagcgacgagggtcctgtaaattttgaaaatccaccaatggacaagaagctgttgaagagaaagcgcgaagatgataattccaacagagctcacgactttttcacgcgaagcgatgatataatgattggagcgccaaacctcgtggaggtggacattagctcgaacgaggaggccgatgacaataacgagaaggaggacgatgacgatgagatgcccagcgccaagtttaggcgaggggaagacctgccttccgacctggagcttggatccgagtccaacagcgagaaggaaccggaggacgaggacgacggcgaatggaacatgatgggcgccgctctagaaagggagttcctcggcctggaggactttgacatgtag

SEQ ID NO: 9330 - protein, 880 aa, DROSOPHILA
MQNIPDEEGATPSRAPGGVAASGAAEGDDGGGGSGAKNSASGNSNNNTSGGGIIVLRAALGENEARAVINKWRVREGQFVSAAQILFLYQPVGVDAKDAKDAGKPGGDCAIQRYKSQRAGVVKKRLRKEGELLTKGDAILELSECIHTTVIKDMCADCGADLRQNENGQTSEASVPMVHTMPDLKVTQKLAQKLGHDDTRRLLADRKLVLLVDLDQTVIHTTNDTVPDNIKGIYHFQLYGPHSPWYHTRLRPGTAEFLERMSQLYELHICTFGARNYAHMIAQLLDPEGKFFSHRILSRDECFNATSKTDNLKALFPNGDSMVCIIDDREDVWNMASNLIQVKPYHFFQHTGDINAPPGLSKHELDGEGVDFKEITEKHGDKDKTESSSEVKPEDTDKGDNTVTSTSKDDDVNEESVDVFEIEGDAKDPEVSNASSATEAPKEPRDKLNGKTNAEDIVVIDDSSSGSPDAEKAASDGEDVVVIDDNSKESTKAEVPPTPAEKNEVVASSTTSPDEKRPSADADVATTSKTPSLRAPLEGQKQIEIEDPDDYLLYLEVILRNIHKRFYSIYDETTEIPDLKVIVPKIRSEVLRGKNLVFSGLVPTQMKLEQSRAYFIAKSLGAEVKPNIDKEITHLVAVNAGTYKVNAAKKEPAIKVVNANWLWTCAERWEHVEEKLFPLDRKVRNKGRQPPAHCHSPEHVVNYSERSEISPSSSKQQEEQSGNFRETLNPLLVFTNADIESMNKDYETFFESDSSSDEGPVNFENPPMDKKLLKRKREDDNSNRAHDFFTRSDDIMIGAPNLVEVDISSNEEADDNNEKEDDDDEMPSAKFRRGEDLPSDLELGSESNSEKEPEDEDDGEWNMMGAALEREFLGLEDFDM

SEQ ID NO: 9331 - DNA, 3110 bp, DROSOPHILA
gcaccatggtctcgtacagcatggtttgcgaggaggcgtcctcctccgcctgcatggccgcagttgccacggctgcttcgtccagttcatcatcggaagcgttatcgtggttccggttattaatgaactccagtttgacccgccgcgaggaaacattccgcttggacagcggtggatgggatacattacgcggcgtcttgcgcggcggcacatggatgtcgtgctcctggcacagctccttgaacagatccttgtgtcggtgctggagatgcgcacgcaaattggtggtgttgccatggttggtcagcaccttgtgacacttaatgcagaccacattctgtttggtaatcacctcattattgtcgttcgaggggaatccaaagtagcgccagtatacgcttttcatcttgggcgagtacagtttggaaaaatttagctgcgacacatcctcgtacttgagttcgccaatggccacgggcgacgctggtaccccttcgctcatcttgtcttctgtgggggattgggatcttcttgtttgttttgaattagattcgacaacgattgctgtgcccaatgcgtgtattagcgcgcaatttctcgattatagatagacggttcaatagtcaatagttttttatctgtatcagaagtacagttcagagttgccacgcgacacgccgtcaatcgataaggcaataaaacgttgctaaatgcttcaaatgcactctcatttatttgagattatttttacagactgctcaaatatgagagtcaccgctttttaatttcaatacgtctgactgtcgtaaaaaatgcgatttgttgagtattctcgctaacactgattgcatcaccaatcgatagctggggaaatttctcgctcggccgggggaatttctctagggaaattttcgcttggcctacgacgtgaagttggttgcgatttcctttttaattcgttgttgggaagaaaaggtgtgtaaatttcgtgagcgtcacgaaattcaatgaaaataaaagataaacgaaatgcaaatcgagccatcgagtgtgccaagtgtggaggacacaagtgggcatcattgacacccgtaggcatgaagaagtgctcggaattacggcttaaacaaatcgaaattcgccagccacgtgggcctgcagcttggttatcccatatatacgagtttacaaagagacattgatgttattattgtgtttttgccctcgttgcagccaatctaaaccgccaagatgggtaagggtaacaatatgattccgaatcagcactaccacaagtggtggcagcggcatgtgaagacctggttcaaccagccggcccgcaaggtccgcaggcatgcgaaccgcgtcaagaaggctaaggccgtcttcccccgcccagccagcggtgccctgcgccctgtggttcgctgccccaccatccgctaccacaccaagctgcgtgccggccgtggtttcaccctggaggagctgaaggtaagtgaagccgaaaacattatcggaatccattggccactaacaaaatctctgtttacagggtgccggcattggcgccaacttcgccaagaccatcggcattgccgtcgacaggaggcgcaagaacaaatccctggagtcccgccagcgtaacatccagcgcctcaaggagtaccgcagcaagttgatcctgttccccatcaacgagaagaagatccgcgccggcgagtcctctctggaggagtgcaagctggctacccagcttaagggacccgtcctgcccatcaaaaatgagcagcccgccgtggtcgagttccgtgaggtgaccaaggatgagaagaagttcaaggccttcgccacgctgcgcaaggtaagttttttggtttcgtgatccgccggtagctcgttatacttattcgccgccaaactatatttgcaggctcgcactgatgcccgtttggtcggaatccgcgccaagcgcgccaaggaggccgctgagagcgaggacgccgccaagggagaccccaagaaggccaagaagtaaaccacatcttaacctgatcgttctgtctacaacatcaaccagaataaaatcttagtttttcttaaacgtgaatatttgtgcacattgttgttattgtcgcgtctggcgtaagacttatcgataacccgtgttgctatcgataagtagctttggcgcgttgaattcaaactggcgcgtttgtttttagctgctgcatccaaaaaaagaaacgtatgttgcttgccattacttttttattttttcttatttttaccagcttcttaatttatttgggttaaattattaaaaagttaaatctgtggtgccatatagaagattttcttaggatacgcatcttgagcaaacgaaaaggttgcagaagctacgtttcttatttttttaaatatcttttgttgaaatgttaattacaatatattgaatttttcattagaatggtgtagggtaaagattaaactaaacaactgtattttatctctgcagtaatatatttgcaataccttttaaggtatttatgcctatgtacatatgtatgtacatatgcgcgtttcactatatctgaaaatattgagtttaaaattgataagctgagtgagtgaagggcttcactatcgcgtttcatctttttttttactcgttttcagttaagcttgtttactgaaatacaatttttgttttgatttccgtagcacaaattcagaaactaaccacaaaactatgaaaaataagtgaacattacggcgttgacccaaatattatcgcatttgcacttcaaccgcaaatattaattgaggccgccaccccgaaactcgtattccatatgttggtaataaggacagaccacaacccacatcccagcgcaaagccaaaaaacaccatacaccataaatacaaatgtacatatgcaaaaacataactcctccggtcctcaaaaaataaaaaaaaagggttgtgcttcctcaaccaaatgcgacaagccaattcaattatcgggtggtgcaggcagcatccacattcagatttaggtcccgaaccagatgcagatacatttacagatacagatacagctacagat

SEQ ID NO: 9332 - DNA, 980 bp, DROSOPHILA
aaattcaatgaaaataaaagataaacgaaatgcaaatcgagccatcgagtgtgccaagtgtggaggacacaagtgggcatcattgacacccgtaggcatgaagaagtgctcggaattacggcttaaacaaatcgaaattcgccagccacgtgggcctgcagcttggttatcccatatatacgagtttacaaagagacattgatgttattattgtgtttttgccctcgttgcagccaatctaaaccgccaagatgggtaagggtaacaatatgattccgaatcagcactaccacaagtggtggcagcggcatgtgaagacctggttcaaccagccggcccgcaaggtccgcaggcatgcgaaccgcgtcaagaaggctaaggccgtcttcccccgcccagccagcggtgccctgcgccctgtggttcgctgccccaccatccgctaccacaccaagctgcgtgccggccgtggtttcaccctggaggagctgaagggtgccggcattggcgccaacttcgccaagaccatcggcattgccgtcgacaggaggcgcaagaacaaatccctggagtcccgccagcgtaacatccagcgcctcaaggagtaccgcagcaagttgatcctgttccccatcaacgagaagaagatccgcgccggcgagtcctctctggaggagtgcaagctggctacccagcttaagggacccgtcctgcccatcaaaaatgagcagcccgccgtggtcgagttccgtgaggtgaccaaggatgagaagaagttcaaggccttcgccacgctgcgcaaggctcgcactgatgcccgtttggtcggaatccgcgccaagcgcgccaaggaggccgctgagagcgaggacgccgccaagggagaccccaagaaggccaagaagtaaaccacatcttaacctgatcgttctgtctacaacatcaaccagaataaaatcttagtttttcttaaacgtgaa

SEQ ID NO: 9333 - protein, 218 aa, DROSOPHILA
MGKGNNMIPNQHYHKWWQRHVKTWFNQPARKVRRHANRVKKAKAVFPRPASGALRPVVRCPTIRYHTKLRAGRGFTLEELKGAGIGANFAKTIGIAVDRRRKNKSLESRQRNIQRLKEYRSKLILFPINEKKIRAGESSLEECKLATQLKGPVLPIKNEQPAVVEFREVTKDEKKFKAFATLRKARTDARLVGIRAKRAKEAAESEDAAKGDPKKAKK

SEQ ID NO: 9334 - DNA, 6566 bp, DROSOPHILA
attaggggtcataacgaagccgagaaacagcggaacaatctcaacggttccgctgggagtcgcaatcgaactcgcaaatcgactcgaattgatacgccgactttctgcaaacaattgcgcccaaaggccgattccgtgatattgacactggcatgttccatgctccaaacgccgtatttacaagcggacggaatgcgctctttatggcctcgtttaataagtcatcaaatttcattgctgtcgtgtaaaaaaaaagagataaaacatgcatttgcatatatttatgcgttgcggggcgggccatcaataaaacgagaaattccagcgtttgcgctcaataagttcgaattggagcaaactatactgccggatgatgtgtgccattattggaggtcaatgggttcctttgtggcagcataaaagcggcattaaaatactggaaaatcgaagaggcgtttaattagattgcaattactatattgacagacaagcttcagctttaaaatcgtacagaatattttgattaggagtgataaattttaccatattaaatatgttatcatgtagatacaaaacaggcgtccatgattaagaaacagagaagctaactttaaagcttacattcaaagaaacgaaaagttttcaatgctaatttccatttttataataatttaatatatgcacacttgggggtagtaatatattttactaaaaatagcactaatagaagtaattaataaataaaaaatatttttagatgcttgctagatggggaaaaggttgagtgttccaaattcggtgtccagcagtgggtgttcccatagaagaacagctgatcacgtcttagaaagctttttcgtgctttggggagaatagagaacagcatgtgattacatatatactcgtacattatcagcacctgtatatatacggcctgtaacactctgtgtccgctcagtcttaatgttccacttacccggatcgctaaacaaaaaacacaatgtcgggcaccaaatactgtttcgcaattgatcgcggtggcacttttacggacgtgttgtgcatttgtccgaatggcaaagtgcgaaccatgaagttgctctctgaggatccggagcggtacagcgatgcgccccgggagggcatccggcgaattcttaaggaggagaccggtgaagatctggccgcgagcggcttggtggatacctcgaaaatcggttgggttcgcatgggcactacggtggccaccaatgctctcttggaacgcaagggagatccagtggtcttggtggtcaacagtggtttccgggatctgctctacattggcaaccaggccaggccgaagatcttcgatctaaacattcgcaagccagcgaatctatacaagtccgtagtcgaggtggattgccgcatagttccaaagcaggcggaccgctgtgagctcagtaagtagaggtgatatataatacccagcttgattttatgtaatatatctacacagaccacagctggaaagagttggagggtgtggccggcaccaagtatctggaggtgcgtcccgttgatgaggtggcagtacgacaagccctctcagatgcccgtgatcagggtgtctcatccgtttccgtggttttggcccacagctacgcctgtccggagcacgagctccgagtgggagccattgcccgggagctcggcttcagtcatgtgacgctgtcccaccaggctatgcccatgtgtcgggtggtggcccgtggctatacggcgtgcgcagaggcctacttgactcctcatgtagaccgctacttggccaggtgagtgcatctaatctctggcttgtaaatttgccgaatgacccagctcttttcggggccaaacatgttttctagagagtcaccatatagataaggtcgtagtcagactgaaagcgaaaaagtccaagctaaacaaacacacactcacagctgagatggggtaacgtaaagtaaacaaatcaagaataatgataaaattataaaaatattatgtgggactcgacgcgacagtaccttttaatggtataaaaacataaaaaatgtaaaagatctcatagatatcaagttttgatagtaacatttttaattaagagggaaatagtacactagtattaatttactaggggacttttggtgtcctcgcggctatttgcggctggtgtttcatatgaactatctaatcacagtatacccaattttcctcagatcttgaggatatttaaacaaaagcacgctaaaaaaaaagtgaacagtcatttatctgtaattttcctctccgtagcttcaaatccggtttcgacaagcagttggagggtgtggatgtgctctttatgcaatctgatggaggtctgaccaatatggagaacttccgtggagctcgggcaattctatcgggtccagctggaggagttgtaggatacgcactgacaggagcccgggaaacggaactgccactgatcggttttgacatgggcggcacatctacggatgtgtctcggtatgccggaacctacgagcacgtgatcgaaagcaccacagcaggtgtaacgatccaggctccgcagctggacatcaacactgttgctgcaggcggtggatcccgtcttttcttccgatctggcatatttgtggtgggtccagaatcggcaggatctcatcctggacctgcttgctacaagaagggcgggccactgacagtcactgatgccaatctaatactaggacgcattctgccacaatacttcccgaagatctttggtccgcaggagaacgagccgctggatcatgagatcgccaggagtaagtttgtggagctccaggccgagatcaacaactatttgaagagttccggagacaatagagttttaagcgtcgaggatgtggccctcggttttattcgggtggccaacgaaaccatgtgtcgtccgattcgtgccttaacccaatcccgaggattggatacggccaaccatgtgctctcctgctttggaggagccggtggtcagcacgcctgttctattgcccgaaatctgggaattgcgaaggtagtcgtccacaagtacgccggaattctatctgcctatggaatggctctggcggacgtggtgcaagaattccaagaaccaaatggcttggagttcagcgatgcgaatgcccagcagctgaaggagcgcttggatgccttgtccaagcaatgtcaggacaagttgtctgagcagggattcaaacgcattgagctggagcccttccttcacttgcgatacgaaggcaccgatggcgccttaatggttgctccttcaactggaaagcagtcatccgattcaaatcccctattagcggcctacggagatttccatgccaccttcctggagcgctatcgcactgagtttggattcgtattgcaaaacagacggattattgtcgacgacattcgcattcgaggactgggcaagaacgaaaccccaccggagtcgaaagttcaggctgccgcagaagcgaagccaccagcggaggcgaatacacgactgtattttgaccagggcgcattcgattctccgatttacctgaccaagaacctactggccggacataggatcaccggaccagcggtgcttattgaccagctctcgaccatcgtcgtggaaccagagtgcggtatccaagttactcagtttggagacctcatcatggacgtgaaaacgggtggcaagcatggcatcaatgcagacttggatcctgtccatctgagcatctttagccatcgcttcatgagcatcgccgagcagatgggcagggtgctccagcgcacttcgatttccaccaacatcaaggagcgtctggacttctcctgtgcccttttcggaccagatggtggtttggttagcaatgctccccacattccagttcacctgggtgccatgcaggaaaccgtacagtatcaactaagggtgcgcggagagaccctcaagaacggcgatgttatcctggccaaccatccatcggcaggaggatctcacttgcccgatttaactgtcatcacgccggtcttttatgagtgagtagtaaagaagtttttgtgggtatttgtccagtcagactaacatatataatttcttccagaactcatccgcgaccagttttctttgtggcctcccgtggtcaccatgcggatattggtggaattactcctggatctatgccgccgcattccacctcgttggcccaggaaggtgccgccttcaagtccttcctgattgtagagaatggcctgtttcaggagcagcagatcatcgagcagctgaccacgcccacggcagcaaagggagctgtgggaacccggaacctgagcgacaacctatcagatctgaaggctcagatcgccgccaaccacaagggcatccagctggtggcggagctgatcggcagctatggattagatgtggtccaggcctacatgtcgcacatccaaaagaacgccgaactggcggttcgggatatgttgcgtcagattggccgggatactttggagcgcactggatcgacagtgctagaggcgaaggagttcatggacgacggatcacccatcgcccttaaggtgaccatcgatgcggagcagggttcggctctttgtgacttcaccggatcgggagtggaagtgtggggcaactgtaatgctccgcgggctattaccttgtccgccctaatctactgcctgcgctgcatggtgggccatgatgtgccactcaaccagggctgcctggcacccatccaggtgatcattccgaaaaactccatcctggatccctcagagggagcagctgtggtcggcggcaatgtgcagacatcgcagcgcatcgtagacacggttctgaaggctttcggagtttgtgccgcctcgcaaggatgcatgaacaatataactattggggatgagtcttggggttactatgagactgtggccggaggagctggtgctgggcccggctggcatggagccggcggagtgcatacccacatgacgaacactcgcatcactgatccggagatccttgaactgcgctatcccatgatcctgaagagattctgccttcgcaccgatggctccggcggaagaggtcagttccacggaggcgagggtgtggagcgggatctcctcttccgcaagccagttaccctgtccgtcctgacagagagacgaactctgcagccctacggtctcgcaggtggagaatccgggaagagtggacgcaatttggtggtgaaacgggatggtcgagtgatcgctctggcaggcaaaacctgcattgatgtggaagctggggtatactttgatatgcatttatttgtaactcaactaactacttatccatccttttcaggacacctttgccatgaaaactcccggcgggggtgggtatggaccaattgaagacttttccaagtccggtgaatccttgaatcaggaaaccagcaaacgatacgtggaacgaggaactgtctttaattatcttcagtgccaggagtctgcctaagcaaatttttgatttcgcttttatatgtgccatattaataaatgtcccttgacttttgaaacactgagttatttttttaaaagaccttatcaaacaaacaaactgagtggcgcatattacagcgagctgtggaaaattgcatataaaatgttcagttaatattcaattaatttttatttaatgaagattctataaagttaaattgtttcgaagaccatttaaaaaagtgcgccatttcggaacgatatgctgtactatcgatattttcaagcgaacatatgttttcagtaagtgcaatcgccgactgtctatcgataacagtgcgtaaatatgtttcgcacgtgttgcatttgaaagaaaattgtccgtaaacaaaagagttttttccgtaaattaagcagtcgagtgtaaactgtagaaacatggcatctttagcggaaaaaacgaaggacaccaatacctttcgggtgagtgtccccagaagtctcgagttgtttggtgaccaaccgccttacacgtttttcacccgcagttcaaatctttcggagatcgggtgaatgaaatcgacctgcggcacttggccctctaccacatcggccatcggaacgaggagctcgacgaagaggagaatgccacctacttccagcagacgattcagaaatggaacgtgctcaatctctccgaggagtacaactacttcagcaagcgctgtcgcaagatagtcaccctgccgcagctgctgcaccagaaggattttgttgtagacttgctcctggaacgtctttccaccgccacgaatttgtcccaacagccgctgttggaactgctctatgtcctggccaaggatctccgtgaggagttctacccgtacttccagcgagtcctggaccgacttatctgcctgctgaacacccaagactccgagcaactggaatggacgctcatctgcctggcgcatttgttcaagacgctcaagccttatttgaagcgcaacataggt

SEQ ID NO: 9335 - DNA, 3831 bp, DROSOPHILA
atgtcgggcaccaaatactgtttcgcaattgatcgcggtggcacttttacggacgtgttgtgcatttgtccgaatggcaaagtgcgaaccatgaagttgctctctgaggatccggagcggtacagcgatgcgccccgggagggcatccggcgaattcttaaggaggagaccggtgaagatctggccgcgagcggcttggtggatacctcgaaaatcggttgggttcgcatgggcactacggtggccaccaatgctctcttggaacgcaagggagatccagtggtcttggtggtcaacagtggtttccgggatctgctctacattggcaaccaggccaggccgaagatcttcgatctaaacattcgcaagccagcgaatctatacaagtccgtagtcgaggtggattgccgcatagttccaaagcaggcggaccgctgtgagctcaaccacagctggaaagagttggagggtgtggccggcaccaagtatctggaggtgcgtcccgttgatgaggtggcagtacgacaagccctctcagatgcccgtgatcagggtgtctcatccgtttccgtggttttggcccacagctacgcctgtccggagcacgagctccgagctatgcccatgtgtcgggtggtggcccgtggctatacggcgtgcgcagaggcctacttgactcctcatgtagaccgctacttggccagcttcaaatccggtttcgacaagcagttggagggtgtggatgtgctctttatgcaatctgatggaggtctgaccaatatggagaacttccgtggagctcgggcaattctatcgggtccagctggaggagttgtaggatacgcactgacaggagcccgggaaacggaactgccactgatcggttttgacatgggcggcacatctacggatgtgtctcggtatgccggaacctacgagcacgtgatcgaaagcaccacagcaggtgtaacgatccaggctccgcagctggacatcaacactgttgctgcaggcggtggatcccgtcttttcttccgatctggcatatttgtggtgggtccagaatcggcaggatctcatcctggacctgcttgctacaagaagggcgggccactgacagtcactgatgccaatctaatactaggacgcattctgccacaatacttcccgaagatctttggtccgcaggagaacgagccgctggatcatgagatcgccaggagtaagtttgtggagctccaggccgagatcaacaactatttgaagagttccggagacaatagagttttaagcgtcgaggatgtggccctcggttttattcgggtggccaacgaaaccatgtgtcgtccgattcgtgccttaacccaatcccgaggattggatacggccaaccatgtgctctcctgctttggaggagccggtggtcagcacgcctgttctattgcccgaaatctgggaattgcgaaggtagtcgtccacaagtacgccggaattctatctgcctatggaatggctctggcggacgtggtgcaagaattccaagaaccaaatggcttggagttcagcgatgcgaatgcccagcagctgaaggagcgcttggatgccttgtccaagcaatgtcaggacaagttgtctgagcagggattcaaacgcattgagctggagcccttccttcacttgcgatacgaaggcaccgatggcgccttaatggttgctccttcaactggaaagcagtcatccgattcaaatcccctattagcggcctacggagatttccatgccaccttcctggagcgctatcgcactgagtttggattcgtattgcaaaacagacggattattgtcgacgacattcgcattcgaggactgggcaagaacgaaaccccaccggagtcgaaagttcaggctgccgcagaagcgaagccaccagcggaggcgaatacacgactgtattttgaccagggcgcattcgattctccgatttacctgaccaagaacctactggccggacataggatcaccggaccagcggtgcttattgaccagctctcgaccatcgtcgtggaaccagagtgcggtatccaagttactcagtttggagacctcatcatggacgtgaaaacgggtggcaagcatggcatcaatgcagacttggatcctgtccatctgagcatctttagccatcgcttcatgagcatcgccgagcagatgggcagggtgctccagcgcacttcgatttccaccaacatcaaggagcgtctggacttctcctgtgcccttttcggaccagatggtggtttggttagcaatgctccccacattccagttcacctgggtgccatgcaggaaaccgtacagtatcaactaagggtgcgcggagagaccctcaagaacggcgatgttatcctggccaaccatccatcggcaggaggatctcacttgcccgatttaactgtcatcacgccggtcttttatgaaactcatccgcgaccagttttctttgtggcctcccgtggtcaccatgcggatattggtggaattactcctggatctatgccgccgcattccacctcgttggcccaggaaggtgccgccttcaagtccttcctgattgtagagaatggcctgtttcaggagcagcagatcatcgagcagctgaccacgcccacggcagcaaagggagctgtgggaacccggaacctgagcgacaacctatcagatctgaaggctcagatcgccgccaaccacaagggcatccagctggtggcggagctgatcggcagctatggattagatgtggtccaggcctacatgtcgcacatccaaaagaacgccgaactggcggttcgggatatgttgcgtcagattggccgggatactttggagcgcactggatcgacagtgctagaggcgaaggagttcatggacgacggatcacccatcgcccttaaggtgaccatcgatgcggagcagggttcggctctttgtgacttcaccggatcgggagtggaagtgtggggcaactgtaatgctccgcgggctattaccttgtccgccctaatctactgcctgcgctgcatggtgggccatgatgtgccactcaaccagggctgcctggcacccatccaggtgatcattccgaaaaactccatcctggatccctcagagggagcagctgtggtcggcggcaatgtgcagacatcgcagcgcatcgtagacacggttctgaaggctttcggagtttgtgccgcctcgcaaggatgcatgaacaatataactattggggatgagtcttggggttactatgagactgtggccggaggagctggtgctgggcccggctggcatggagccggcggagtgcatacccacatgacgaacactcgcatcactgatccggagatccttgaactgcgctatcccatgatcctgaagagattctgccttcgcaccgatggctccggcggaagaggtcagttccacggaggcgagggtgtggagcgggatctcctcttccgcaagccagttaccctgtccgtcctgacagagagacgaactctgcagccctacggtctcgcaggtggagaatccgggaagagtggacgcaatttggtggtgaaacgggatggtcgagtgatcgctctggcaggcaaaacctgcattgatgtggaagctggggacacctttgccatgaaaactcccggcgggggtgggtatggaccaattgaagacttttccaagtccggtgaatccttgaatcaggaaaccagcaaacgatacgtggaacgaggaactgtctttaattatcttcagtgccaggagtctgcctaa

SEQ ID NO: 9336 - protein, 1276 aa, DROSOPHILA
MSGTKYCFAIDRGGTFTDVLCICPNGKVRTMKLLSEDPERYSDAPREGIRRILKEETGEDLAASGLVDTSKIGWVRMGTTVATNALLERKGDPVVLVVNSGFRDLLYIGNQARPKIFDLNIRKPANLYKSVVEVDCRIVPKQADRCELNHSWKELEGVAGTKYLEVRPVDEVAVRQALSDARDQGVSSVSVVLAHSYACPEHELRAMPMCRVVARGYTACAEAYLTPHVDRYLASFKSGFDKQLEGVDVLFMQSDGGLTNMENFRGARAILSGPAGGVVGYALTGARETELPLIGFDMGGTSTDVSRYAGTYEHVIESTTAGVTIQAPQLDINTVAAGGGSRLFFRSGIFVVGPESAGSHPGPACYKKGGPLTVTDANLILGRILPQYFPKIFGPQENEPLDHEIARSKFVELQAEINNYLKSSGDNRVLSVEDVALGFIRVANETMCRPIRALTQSRGLDTANHVLSCFGGAGGQHACSIARNLGIAKVVVHKYAGILSAYGMALADVVQEFQEPNGLEFSDANAQQLKERLDALSKQCQDKLSEQGFKRIELEPFLHLRYEGTDGALMVAPSTGKQSSDSNPLLAAYGDFHATFLERYRTEFGFVLQNRRIIVDDIRIRGLGKNETPPESKVQAAAEAKPPAEANTRLYFDQGAFDSPIYLTKNLLAGHRITGPAVLIDQLSTIVVEPECGIQVTQFGDLIMDVKTGGKHGINADLDPVHLSIFSHRFMSIAEQMGRVLQRTSISTNIKERLDFSCALFGPDGGLVSNAPHIPVHLGAMQETVQYQLRVRGETLKNGDVILANHPSAGGSHLPDLTVITPVFYETHPRPVFFVASRGHHADIGGITPGSMPPHSTSLAQEGAAFKSFLIVENGLFQEQQIIEQLTTPTAAKGAVGTRNLSDNLSDLKAQIAANHKGIQLVAELIGSYGLDVVQAYMSHIQKNAELAVRDMLRQIGRDTLERTGSTVLEAKEFMDDGSPIALKVTIDAEQGSALCDFTGSGVEVWGNCNAPRAITLSALIYCLRCMVGHDVPLNQGCLAPIQVIIPKNSILDPSEGAAVVGGNVQTSQRIVDTVLKAFGVCAASQGCMNNITIGDESWGYYETVAGGAGAGPGWHGAGGVHTHMTNTRITDPEILELRYPMILKRFCLRTDGSGGRGQFHGGEGVERDLLFRKPVTLSVLTERRTLQPYGLAGGESGKSGRNLVVKRDGRVIALAGKTCIDVEAGDTFAMKTPGGGGYGPIEDFSKSGESLNQETSKRYVERGTVFNYLQCQESA

SEQ ID NO: 9337 - DNA, 5235 bp, DROSOPHILA
ctgctcctccgtcgtttctctattataatggcatcattgacttgtgctttgatggctgctttggccaggacagggcatcggtttgcccccaccctagtgtgtgtatgtgtgtgtgtgtgtgtggggggggggctagaggtccacctccacttgatccccatttgggcacggacggctggcgccggttgctgccttttttgaatattcggctcacactttctgctactgctgccgcctttaggttcgcccctttgcactagggacgcgttacttgccggaatttgttggcgaccatggggccttaaactccgcttggctggtcaccgaaagaggcggcgattctgttgtaaaattttcattttattggatttccaaatgattttcaatcaacaagtccatgttatgcaatatgaagtatgtgcacagttattcttattgtttcgcaggcattgcgatttctaatcaaattgattttcacacatttgttcaatgactcgataaaatggctttcaactacacgctactagcaggacctgtgcttcatgtcacggcttaaaagctaaacattgtacaatagatacatgaatgacaacgcttttaacgtgactgcataaagcacatacattgattattaacataaaacaaaaaactgtatggtaatgttgtggattaataattattttttggttagttacaagtcttaaacgctttctaaacgaatggaaatgcctggaattgattgttagtttcggctgggaagaatcgaaccctaaacgtaatgtatgtatatgtattttgcgacgagcagcagctgctttttgttcactgggcgcctaatgtttgctagttcgtaattttctctagattctacataaaaatatatatctcgtataaaaacgtgaatactattagctgtgctgctgccgacacttcttttttggccgcattcatgttatggctaataaaaaattgctcttatgccagaggtttcatttacgttttacaaatgcactttcagagattccatgcgactgacaatacgacgtcgcaattcggcgtatctgcggaaaagtaattctctttcaatgcaaagtcttgggatgtaaaattattttttaaaacccacctttcctttattttggccacttcgcgggccagttcctggtcgtagcgctccagaatagcacggcactcgggcaaagataaattcaaaaattgagcaacttcattactgcagcgatgcaaaagaaacgtaagcaaacttctattgaaaaggagtgttataacttgcctgatttcatcagttttgcgagaatccactaaaaatatacgagccacatcctcatgaggtcccaaagtgacgcgcgttatcaaaggatattcgtcgtccttgagacgtttctgttcaccattgtcgcgaacaatgaagagtgaaaaattgccaggcgaactgtccaccttgtatttctccagcaccaagttgataacctcagtggtggtcaccatcgaggagacccacactgacatttgagaaccgtagggcggcgtgaaaaacgacgtctcccgattgtagtagtgaccattgatagagcaccgacgtttcagcttggtacgagaactattgattaagaagttggaattacaacacaatttcttcattaaaagtttcagtaacttaccgacgattgccacttcgtcgcttgatggcagaagctcctgtgcgtggaggtcttctcagcacaactccatcttccgtcacatgcaacccagccgatccatctccgtctggaccatcaacgccctcgcttgcagtgtacaaatcctcggtttgcgtaagctcatcgccggccgctgcaccactggttatggatggagcatctgcccgacttgactcaccttcgctagcagcagccacattctctttgggataacagtccatctggatttgtatgtaccgctgaggtatgtcgctgcgtcgaatggtggccatacgttggggacgcagcgtggcctcgtcgtcgtcatcgctgtcggagtacacaaaacagctgggtcccgatttggagcggttgatgcccttttcgaacaactgccgcccctgttgatatggcttcttttgatccctgctggttactgtggccgatccactcttttgtaaggcgtactgacgctgtgcggagtgaggagagcccacactactgcgcagattcatggtgtcgttgattaaagtgggatctattgaccgcaatgcatgctcacaattaaagcttttgctcatcgctgaattctcgccgtagagcttaagggagtcgtgaatgcgagagggatcaattggttgattacgcttaagggtgccctcattgggctccgtaaaggagttggccccatttacatagtcctggtggacactacgcttaaagtcctcgaaatcaataggcttcagggtagcgtcatcgcaagtctcgaagttatccagagaggtctcagtagtagacaccgttgttgtattctgcgtattggtgttggcagtcaacgatcccgtggcggtcataaaatcatccgtgctgctggtgtttgttgatgccgattgagtcgagcttgattcagtggtcgtagtggtctctgtggatgttttgctgggcgaactgtcgctggaggattgcgacgacggcagtttgacaggcatagtttcataaatgcgatccttgtcgttgtgacgtctctctacctgcagcagatcgtctatgtcgtcccaatccagtttttccagacggtccaacttcgaaggcaatgtgctggacacacaacttgtgctggcagtaggagcctccaccagggttccagatgagtccgtcgtggtcgtatcctcgtcgtcgttgcacacattaccattggtctgctctttgctgttggctgtggtgttggccgaggcatcttctggggttgtgggcaactcggagatctcgttcaggctacaggagtcgaaggtcatgctctcggaaagggaaacatccgtggatagttgatcgacctcggctgtggtggtggtgggcggagccagcgattcgctagcttcgttttccttatccgaactgctttcctgtgggtacaattgtataaataacgttttgttatgttatagattcagcttacattggcagccttggacacacggcaagagttccttttgcgcactaagatgcgctgatcatcgtcctccttgagatgaatcactccctgcacgccccagtaaactctaagcgcgccttccagcaccaaccggttgttgacctcacgactacgtatctccaggcttttgttgtcgtagaattggttgtagacctgcccattaaaagggaatttggtgagtcatgagatattgatatgtctgggtattgcgttctgcaccttaagtttggactccaggtgatcacgtgggagtggcgggccattggcctgagctccggttggcttctgggctcccttcaccccatagcttttgtgcgattccacccgggtgccgtggccaaacaactggggtccaaacagggcgccatagcagggcacatggcagtagggcacacttttgtgctgaaaggaaaacaaaaggctttatatagatcacatgatcggctaactaacaggtgatcctcctacctcagcatgctggccgggatttaagcgtttgccgcattcctcgcagcgcaaacattccggatgccaatcgtagccgatcgattgtttacgttccgctgtgcggggcataaataaatataatttacaagttatttacggatcgcaatgcgctcgtgtgtgggtgcattaccgaagtaaacgggtttgccgcacttgtggcacttccacattctggattccaaacaggtcggtctaatgcttcctccgggaatgggcgtgtttcactcctcctcctctacttcgccgattttaaagagttgtgacgtaaagccgtcgagttgtatgcaaatgaggcgatttaaagcggacacgaaacgcaaatagaacgctggacaaggggtaaacacatgaggcgaggggggacgtgagactctgatcggtcagtcggtcagctgcgctggttgccgtgcgaaactcatagttttataaatgaaactggcactgggcactcccacacttggtgcacggtgcaggtgcatcggttttcggtgcgtacttgtgtggataattgcacttaaaccaaaacagcaccagcagaaagagaacagaacaatgaaatgaaaaatggcacttgtgcagcactggccgcggattcttgtcgcacaaggcgggcaccctaaaatccagcggtgctgtcagctgatctgttttgtagctagatttgacttggctggcggtagcttgaaacggatttgcttgttttggtgtttaaaattgtcatcgtttgtactttaaatacatctacattgattatggctagaacccaaatcttttttgggctgtatcttcttttagggaatttaagttcctaattagcttcttcttagctacaaaagtttccaacactgataaaccgtgctgacaatgtcaatgtgcgttgttttatgcctttgaattgaaatcttcgtaactaatcgagttttaaaacgaaaatcagcacaaggaaaacactaagcattcaatacatttaaaattttaaaagatatgagcaaaagcaaataagcccgccaaagtgtgtgaccattcgcgctgctagatttgttttcgctgcgagtgcgggcacaccgatctgctctagtagaaagtgagacgttttaatttgttgtctctgcgcgctgtgtaaatttggtaaattcggccccgaatcgcgtaaattggcgagtttcgctaattagggccagtgctcaacgtgtgtagccgtcgattgccaaggatgcgactaatcaccatatctcctgctgcccgcaattagcttctcccagagccgccctcgaaaatcgcgcatcgaaatccccacttcagcaaggaaagcaaagcaaagcagagcagcagcaacaggccaacaaagattcacgggcctcaattagcgtagcgaaatagccagcagtgcagtctaggtgctgcttgcgtggtggccaaaatgcgcgccaccatcgagttcgaggagtgcctgaaggattctcccagattcaggtgcatataagctgcagccccgcccccactgtgtgcccatcctgagccgcatttggcgtgagattc

SEQ ID NO: 9338 - DNA, 2850 bp, DROSOPHILA
ttctgctggtgctgttttggtttaagtgcaattatccacacaagtacgcaccgaaaaccgatgcacctgcaccgtgcaccaagtgtgggagtgcccagtgccagtttcatttataaaactatgagtttcgcacggcaaccagcgcagctgaccgactgaccgatcagagtctcacgtcccccctcgcctcatgtgtttaccccttgtccagcgttctatttgcgtttcgtgtccgctttaaatcgcctcatttgcatacaactcgacggctttacgtcacaactctttaaaatcggcgaagtagaggaggaggagtgaaacacgcccattcccggaggaagcattagaccgacctgtttggaatccagaatgtggaagtgccacaagtgcggcaaacccgtttacttcgcggaacgtaaacaatcgatcggctacgattggcatccggaatgtttgcgctgcgaggaatgcggcaaacgcttaaatcccggccagcatgctgagcacaaaagtgtgccctactgccatgtgccctgctatggcgccctgtttggaccccagttgtttggccacggcacccgggtggaatcgcacaaaagctatggggtgaagggagcccagaagccaaccggagctcaggccaatggcccgccactcccacgtgatcacctggagtccaaacttaaggtctacaaccaattctacgacaacaaaagcctggagatacgtagtcgtgaggtcaacaaccggttggtgctggaaggcgcgcttagagtttactggggcgtgcagggagtgattcatctcaaggaggacgatgatcagcgcatcttagtgcgcaaaaggaactcttgccgtgtgtccaaggctgccaatgaaagcagttcggataaggaaaacgaagctagcgaatcgctggctccgcccaccaccaccacagccgaggtcgatcaactatccacggatgtttccctttccgagagcatgaccttcgactcctgtagcctgaacgagatctccgagttgcccacaaccccagaagatgcctcggccaacaccacagccaacagcaaagagcagaccaatggtaatgtgtgcaacgacgacgaggatacgaccacgacggactcatctggaaccctggtggaggctcctactgccagcacaagttgtgtgtccagcacattgccttcgaagttggaccgtctggaaaaactggattgggacgacatagacgatctgctgcaggtagagagacgtcacaacgacaaggatcgcatttatgaaactatgcctgtcaaactgccgtcgtcgcaatcctccagcgacagttcgcccagcaaaacatccacagagaccactacgaccactgaatcaagctcgactcaatcggcatcaacaaacaccagcagcacggatgattttatgaccgccacgggatcgttgactgccaacaccaatacgcagaatacaacaacggtgtctactactgagacctctctggataacttcgagacttgcgatgacgctaccctgaagcctattgatttcgaggactttaagcgtagtgtccaccaggactatgtaaatggggccaactcctttacggagcccaatgagggcacccttaagcgtaatcaaccaattgatccctctcgcattcacgactcccttaagctctacggcgagaattcagcgatgagcaaaagctttaattgtgagcatgcattgcggtcaatagatcccactttaatcaacgacaccatgaatctgcgcagtagtgtgggctctcctcactccgcacagcgtcagtacgccttacaaaagagtggatcggccacagtaaccagcagggatcaaaagaagccatatcaacaggggcggcagttgttcgaaaagggcatcaaccgctccaaatcgggacccagctgttttgtgtactccgacagcgatgacgacgacgaggccacgctgcgtccccaacgtatggccaccattcgacgcagcgacatacctcagcggtacatacaaatccagatggactgttatcccaaagagaatgtggctgctgctagcgaaggtgagtcaagtcgggcagatgctccatccataaccagtggtgcagcggccggcgatgagcttacgcaaaccgaggatttgtacactgcaagcgagggcgttgatggtccagacggagatggatcggctgggttgcatgtgacggaagatggagttgtgctgagaagacctccacgcacaggagcttctgccatcaagcgacgaagtggcaatcgtcgttctcgtaccaagctgaaacgtcggtgctctatcaatggtcactactacaatcgggagacgtcgtttttcacgccgccctacggttctcaaatgtcagtgtgggtctcctcgatggtgaccaccactgaggttatcaacttggtgctggagaaatacaaggtggacagttcgcctggcaatttttcactcttcattgttcgcgacaatggtgaacagaaacgtctcaaggacgacgaatatcctttgataacgcgcgtcactttgggacctcatgaggatgtggctcgtatatttttagtggattctcgcaaaactgatgaaatcaggcaagttataacactccttttcaatagaagtttgcttacgtttcttttgcatcgctgcagtaatgaagttgctcaatttttgaatttatctttgcccgagtgccgtgctattctggagcgctacgaccaggaactggcccgcgaagtggccaaaataaaggaaagatacgccgaattgcgacgtcgtattgtcagtcgcatggaatctctgaaagtgcatttgtaa

SEQ ID NO: 9339 - protein, 826 aa, DROSOPHILA
MWKCHKCGKPVYFAERKQSIGYDWHPECLRCEECGKRLNPGQHAEHKSVPYCHVPCYGALFGPQLFGHGTRVESHKSYGVKGAQKPTGAQANGPPLPRDHLESKLKVYNQFYDNKSLEIRSREVNNRLVLEGALRVYWGVQGVIHLKEDDDQRILVRKRNSCRVSKAANESSSDKENEASESLAPPTTTTAEVDQLSTDVSLSESMTFDSCSLNEISELPTTPEDASANTTANSKEQTNGNVCNDDEDTTTTDSSGTLVEAPTASTSCVSSTLPSKLDRLEKLDWDDIDDLLQVERRHNDKDRIYETMPVKLPSSQSSSDSSPSKTSTETTTTTESSSTQSASTNTSSTDDFMTATGSLTANTNTQNTTTVSTTETSLDNFETCDDATLKPIDFEDFKRSVHQDYVNGANSFTEPNEGTLKRNQPIDPSRIHDSLKLYGENSAMSKSFNCEHALRSIDPTLINDTMNLRSSVGSPHSAQRQYALQKSGSATVTSRDQKKPYQQGRQLFEKGINRSKSGPSCFVYSDSDDDDEATLRPQRMATIRRSDIPQRYIQIQMDCYPKENVAAASEGESSRADAPSITSGAAAGDELTQTEDLYTASEGVDGPDGDGSAGLHVTEDGVVLRRPPRTGASAIKRRSGNRRSRTKLKRRCSINGHYYNRETSFFTPPYGSQMSVWVSSMVTTTEVINLVLEKYKVDSSPGNFSLFIVRDNGEQKRLKDDEYPLITRVTLGPHEDVARIFLVDSRKTDEIRQVITLLFNRSLLTFLLHRCSNEVAQFLNLSLPECRAILERYDQELAREVAKIKERYAELRRRIVSRMESLKVHL

SEQ ID NO: 9340 - DNA, 3575 bp, DROSOPHILA
cctgttgttgttgcctgtttgttttgcacgatcgctctctcttggctctctctatcactctctggactctctctcagcacctttgctaccgtttcgcagaacaggtgtatcggttttcaaggcaactgtgattttttaactcaacattctatatcgaaaacttgtagaggtcggaatttttcttgagcgcctaaaagtgtgcagtgaaatcatttaatccacttccggttgcaaaacaggaatcacacatatgaagtgattaaaaatcatagaaggtttgacaccttcaaataataagaaaacaaaaatttgtaaactgtgataatttatttaattgaaatcttaatttaatggcctacaaatctgttgaatatccgttgaatacacttttccagggtgtgtcctagtcggctcctctttgttaccccagtttgctggtcttcttagccgcacaccagtttatcgctgttttgcctttgcgcttttcattcataaacaaaaaacaatgttattgttattgcggtggctgtagatgtaaatgtaaatgtagatgtagaggctgcttcttgtgtctgcttccttttctttgctgttgcgatgttgctgattcacctgttgcgcacgatttagcaactggccactagcaacatgttgctatcggcagatgatgttgcgattgcatttaaacaaacccaacttaattcgtgaaaaatcgtggccaattatctaaagcttttcgttaagttaaactacgtacgtcaaacaggatagatggatggctcaaggtcgaagttttaggaaatcttcccctcgactttgaaccccgttcgaagcgcggtttggacaaacacactcgaagatccattaacgatgcaccgctaacaagcgccactggcggttcaaagtactgcaaagcggtgcagccagccacttcctctatttgccagttaaatagccccaggccaggcgtatgcacctcttgagtcaccgggtcaatatcttttagtacaaaattaacatacgaagtttattccgcattaaaggtaacattacaatagtctctagctggtttaagatcgctaattgctgggattgggtttttaggcatacttggccaccaggccctccacaaaggtgatgtactcctgctgggcggcctcgctgctcttgcccttctgcttgttccaggcctcccacttggccttgcccttcaggtccaggagacccggcttggcggtgtcgttgtcaccaacgctggcctgcttgaacagggcgtacagctgcaggaactcgtcatcactgggacgcttggtcaggctcttcaccttctcggcggcggcgttgaattgctgaagatagacgggatgatttattagtggaaaatctatcaagtgggatcgtaaaatctattgaaagtggtattataaaaaaggtttggaatattagttgcaacaatatctactaacaaactgtcattaaaactaacaaaaatagttgtgcgagataaaaatattctctggaaactacaaaaaattataattatcgatttcaaccgaaaacggttattacttcaaaacaaaatcgtatttgaacagctgtccttgcttcagcggaaacacaatcttatctcatattacgattacaattttaagattgaaaagtcaatcgcttatgaatagatttcgctcagtgtatagtaatcgaacaggtgattagcagcaaggctatcgcgccctaaatgttggtagactgttgctatcagtgcataatcttttgggaaaagtacttacctcggaaaccattctgggttagattttatctgtaagtagtggaattgtaaaaaaaaatgtttaattagtcatgtttatgaagtggtcagcttaatgtttattagcataataagtaaaaccagttccgagtgaagaggctggcgtgtgccaaacagagccagctggaaatgacctttggccccggggggcgatcttgaagaccctacgaatgtttgctaatggatagatgtttgttcgactttctcccggctgaaatacataattcgagtagaactgggaaattatgctgcggaaacagcagacgcaaatatttgtctcgactgcgagatttttgaaagggagcgagcgggcaaccgttagcggccgctattggccggcgaatttcgaccaatttggatacggacgtgggctttgtacgtgtctagcactgagcaaaatatctggcacatacatatggtcatgcttagttatggccacgccatcttgcagttctaaaataagtaatcatttaaaaggcactcatttagtttatgggcgttggaaattgcaataggtcaaggtgacaagtttcgtttagcatgttccagaatatgcgtttcaaaagcgattttttgtactatattttcatcagtgcctgttgcctggcgaatttccataattgagctctgcaggtgtataaactcgcacgaaatgtccactttatgtgtcaccagcactgatattaccacccattagcagctgggtaattgaatttaaactaaacacttactgttgtgtgttgtttgccacagaactaaacagtgtctgaattccaatccggcggtgactttcaatttaagtcattccatatcgcacgatcgcccgcaacgagaaagcttctccccagtgagcaaaatgagcggttaagctccactccgattctcagtggatcgggaagctttcgctgaagtggggctaggcattcgcgttgctgataatgcaggcctacggataacagctccgatttcgattccctgataattcaccccaccaaacaccactgtcaagacacgtaatctcgttcggatcaaagttcgaggggtcccaccgctcccaaatctccatctccattttagttccataatgcacgaaagctccaataaaatgccgctcagccggacaaacacctgattattgctcatatatctggtaatctttattgtccaactaagtactatagtggtgatggcaggtgcatggggggtccgcaatcggaatcggattggatcggatttgatcggttgccggcttaggcgtacttgggggcgtacttctcgtacacctttacgtaggcctccttggcagcctccttggagagacccttgttggagctccaggcctcgtacttggccttgtccttgagagccagagcgccgggcttctcgatgttcacatcgccaacggtggcctgcttgaagagaccgtagaattccaagaactcggcatccgtgggcttcttggtgaacttgttggcgagttcagtggcttcctcgaactgttcagcaaaggaaagtcgcagtcaggaaactttgtacttatataacaccataaaagtgtgaaaaatgggaatttcctcttatgcaatctttcactaaattgacgttatatccaaagtgtagaatactcaccgacaccatgttgctagtataggattcttgttggtaatgctgaaaatttgaaggtaataatcccaattaaatactgagttgaacaaggatccttgactaatgtgcttaccggtgaaaa

SEQ ID NO: 9341 - DNA, 394 bp, DROSOPHILA
caaacaacacacaacaataaaatctaacccagaatggtttccgagcaattcaacgccgccgccgagaaggtgaagagcctgaccaagcgtcccagtgatgacgagttcctgcagctgtacgccctgttcaagcaggccagcgttggtgacaacgacaccgccaagccgggtctcctggacctgaagggcaaggccaagtgggaggcctggaacaagcagaagggcaagagcagcgaggccgcccagcaggagtacatcacctttgtggagggcctggtggccaagtatgcctaaaaacccaatcccagcaattagcgatcttaaaccagctagagactattgtaatgttacctttaatgcggaataaacttcgtatgttaattttgtactaaaa

SEQ ID NO: 9342 - protein, 86 aa, DROSOPHILA
MVSEQFNAAAEKVKSLTKRPSDDEFLQLYALFKQASVGDNDTAKPGLLDLKGKAKWEAWNKQKGKSSEAAQQEYITFVEGLVAKYA

SEQ ID NO: 9343 - DNA, 7640 bp, DROSOPHILA
cagaacgtttgacggtcaataagtttatttgttctcgatttttgcgtagatagatacgcgtcacatgcggattttgggcatgcccaataaaaatccccaatagtttaaggtcaactatatacagacttctgcgtcaagagctcgccgcagaaattctcgttggcaggatttttaattagtttctggacggatctgtgtggacttgggcacgtagtccccttttcgagtgactcaaaattggcaatagttaataatttttaatggtactgtcagttatgcggaaataatttgggaaatcccggtcaggtgtgacaaaacttagtcatatttgaattttagagctagtatgctgatgtgtaatacaattgatttgaaaatacaaggtgtgctatattttacagaaataatacttaacaaaatccgtaacaaaatcttgcctgagacgtctaataattttacttaattaataaatcttaatatatattaaaaattaaattacaataaatatttgaaaagatggaatactttttcgatttagacaatataaagatttcctatttcaattttaattcaaatgcccgccaaatagctgcaggcaatagtgttgatctggcaactccccataaactacgtgactatttttggcgggtttcacctcttttacttaacaattactttcctttgataatgcagtgcggtaaatatattctatacatataacattttataatactgaaaattatcccaaagcaacaaaacaaggtaaattttgtatggaaaaatttccccgaaacgctttttcaggataaatcgttcatcagtttgggttttttttttacttttgggttgacttatgccaaccaagttaccaaatacttatgccaacaaaactatcgcataaaaaacgctaaagcgatattcattatgaaaatgtccacctggcaaccctaatacgctacgcataccacgtcttacgtcgcgcgcctcacgtagttctatttgtcactagtttagttttttcctctttaaaactcggtcgaaatggcgggtttagcggctagattaacggttaaaaactgcacaataatcgcccaaaggtcgagtgtgatcgtcggtgttggtcgatcggccagattttccagtagttcgtcacaaatgggcagaattccgggacacaaaactcgacgtctgcttactattgtaggcggtagtgctgtttctttagccgccctggcggctttcatcaaactacgttccgcggaaaaccctgtgaatgcagttagcctaaaaaggcgcatggtaaattaatagcgtgaaaagcgttaacaagtgtgctaagtgttcggtgtggaaaagtcaataattggatggaaaaaagacctgcgcagctatttttagcttgtggcatgtcagtgactacgtcacaccactacgttacgacgtaacgcaacggaagtgatatcttatcagctgttttgcagcgttttgttgtgctccgctcattcgctgcactattattgtttttactaccaaatcgcccatcaaatgtattaaatacacatgcattctgattgattacaaatcaacaacaacgacaaaagcccaccaaattcagttcagggtcgttattaatgatgtaaattgagcttcgttgttgtgcgtgtccaagttcaatgaaatagcaacagctacaactatttgtcaacctgttgacattgtctctgggggtagacctacaaaaaaaaactggaaaacatgtcgacttgagtggcaggctgataagcatttagctgcgagtgattcagggtgtgaagtttaaatatttacatgggcattttcggcaagtgcctatcagggattacaccaaataggtggggattaccccaaaagctttttgtttagcggtcctacaaggtaaaaaaaatgttttatatcttgttaatgtacttagatttgtgtgtagatcttcaaacagtatttgattgatatttttccatattcaaggagatgaacatagtaatcaagttccaacgtaaaaatagcctttgtgtccttagccaaattccttaagtacatctgggactcctcttccccgatggccaatcttcatctatgatttgcatatcttgccatcggtaaatatgtaagctcccaaggctgcagccatttggattaaattccagcgccagtgccacacaccttgaaacgagcatgatgaagtggcaaagtagttagtccgactccggaacgcccacgcacctgcaggcggcaaatgatactcccccgaacgctgacagaatgccagttactgaaaatttatctatcaatcgatctggttgccgatttgatacacccaccaatatcggaggcaaccataatgcccaatgccagacgcgggcgtggcttccatttcagttgcagtatgagccggagtttgggacctggtttcggattttgatttggtttcggttgtggtgttggcctggccctgacatgtgttatgacaactgcgcctgatgatgatgaatgaggtttaattgttgcctatccaaatccagcgcctgcagccacctcgaatctccttgttctgggcgcagggttccagcacagtggttatgtcttggcaaatatcaatctattaatagcattaagtatggtatttaaatacttagataatgattctttttttcatgtgaaaataacgaaatagtaaccttttggactagtaatttagtcccttaaatagaaattttcttttctaaaactatgctctttacttactgacacaataaggggtcactaataactcacagtaatcatttcagacttgaatttattggatatagaataggataattaaattatttacattaaattctaaaccgaactactgtagcctctgctgcagtcagaatgatgtcagctttgcttttatgaggaattgtccccagcccctcgaggtttcttgggggcatgggcatggacgtgggcgtggtcgagaagtgtttgctgcacatgtctaacattcaaagtggcctttgttcggatccaatttttttggaaacaggcgatagggaggcaggcagggtttctgctgtgatcgagagttatggcctgggagttgtctttgcaccactaataaaatacaattgagtcattcgccctgtctacgagactgcgggaaaaatgattgctgattgtgggtggcattaaatgtcagatttatggcggatcaccggtcacaacatgttctcaaattaattaaacactttatttgccaaacgatcaacgtgggaataatcctgcctggccgcccgtcaaaaattcgcatttcgaattaaatgcagatcatacatgtaatttgcgatgtacggcgcaaaccggatcaaattaatatttctgatcgcggtgcgaggtgccatggccgggcattaatcaaaacgtcaccagatcaaacccgtccagactcaagattgctggcccagcttttgtccccgtcggtttgcctttgtgaccaaccaagaggcggaaattcgtctgcccgcgatccaatcgttcgttcgctgatttatttcaataatggtcaccaccaaatacgcacagcggcatattaagttaccatccatcgatggcctgattaatctcttccaacatcctcgatctctgatcccgcagcgcgacgatagcgagctggagaacgtaaaactgacggcccgggagcgccgcttcatcaagtttgcatccgtggagtacgatgaccagctctacatgacaccgcaggacttcctagactccgttgttgagcaggagcccagacgtaagtgagatgatctaattagttggtatctttgatatcctaatttatactgcagctcgcttgaaacgacgccagttgtccagcgatgaggtggataaatacaaggagaacacgcctgctttgaagaagggttccactcgtctgtttcgcaacctaagggacaagggtaagaattccgatatatgtatatgctaaatgtttataaataagattatattccattctacatctaatgaatgattataagagtacaacaattgccattaattacgcatttcaatctatttagagaatattttaagaaaatcttacaaatatattactttaactgccataaatgtagttgttttctgcacgaaatcaagtcacttatcatacgctttcgaataaattagaatagccaagcagttatgtttgttacctggccatttctataaattcaattagcagacaagatctgataaaggcagcactttaacttaatttatggattggtgtactattacaaatgcttacgtactactttgtattgataagaatctcaatgatttccatttttcaaataaatctgtacgataatgttaatgtagactatacattttcctttcaggcattgtctcctacacggaatatttgtttttgctgtccattctaacaagtaagtgatacttacaacggattaaggtggattctactataatttaaaattattttagagccgaaatcaggattccgaatcgcattcaacatgttcgacacggatggaaatcagcgcgttgacaaggacgaatttctagtggtaaatacaggaatctgggtgcccattatatgctcataattcctatgggatcctcgaattgattttatttacttatgatttaatataattttcgaaaaatgtttattattagataatttccattttggccggcgctttaaaagacactcaaaatgtcgatccacaaaccaagcgaattgtaagcatttcatttattaagttaagccataatttaattgtataatttatgaataatgaaaactcattcgaaatagctggccctagggcactgaagtaagctgcacaaacaacacttaccccttagttttatatttcaatttacatcttctgatttttgcataatttatttaatttgtgaccccgttttgggaatacgatttcgatggcagctctcgcgtttagtgtcctacgatgagcaaagccaaatgacgaaacccatggcagtgcctcaggcgaaaaggggtatagtaagtgttagccatcagagttcccaaaaagtattattggctttgcttcgcgaaaactctgctcaaattgtacagaactcgatatgtgccaggagcatattgtagaagctatgctaagttacgttgtgttttgttctatttacgaaggatacgttatcccagtggctttgcttttgttcctttagaccatttaatagttatttagttacagtttttgttacgttacaagcttttgtttttttttcctgtcgctttgttttttgatatcaaaaacaggcctacaccctagaaacgctccaccactgcgttgacccgtactaaaccacctaacttctcttctctcccacctaacacccaatcctgcacaaacaaaaacccgccccctgaaactggcatgtaaataaaatcccagatggagcgcattttcagtggcgcttggaaggagaagcacggcgagcaagagccggaagaggagctcgcaacgcccactcccctggaggtaaggtcatcccgagtcccaagcatgagcctggtgtaactaactaatgggtgaactatctcgaagagtcactaatcctcaataccttgaatgcattccagcagaactatgtaaacgatggcgagggtctgcagcggcgtcacatggtggccaccacactgcagctgcacttcttcggcaagcggggcactggggtgatcaactacgataacttctaccgcttcatggacaacctgcagacggaggtgctggagctggagttccacgagttctccaagggcaacagcgtcatcagcgagctggactttgccaaaatcctgctgcgttacacgtacttggccaccgacgagtatgatgtctttctggagcgcctgctcgagcgggtcaaggatgagaagggcatatcctttcacgatttccgcgacttttgtcacttcctcaacaatctggatgacttcacaatcgccatgcgcatgtatacgctggcggatagagccatttcaaagggtgagtagattaacatagttaatataaaatttaagtgcatatatcgccaatttttagatgaattttcgcgcgctgtcaagatctgcaccggctataagctaagtcctcacttgatcgataccgtgttcgccatcttcgacgcggatggcgatggcctgctgtcctacaaggagttcatagccatcatgaaggatcgcctgcatcgcggcttcaaagtaagtggtcgtttctttgattacaacgaagctctggacgcctatgatgagcccgattatccgctgtttgtcgcctggcgacatcgggtgtgccgccacctggattacttcatagacagcgatgcgctttggcactgattactaaatatttagtttaacccaatttattttaagtcatttaatgaatacctctttttgtttgccgctctctgtcccattgaatgtgtgtgttcatttagtttttgtctcgcctttaagcgtttctttgctttaagctcactgtttaattgcgttaacttataatttagttttaaggatattaacccgattccatgacatttattattattattattaaaattcgctttaatttgaattggccatataaccattaaaccctgaaatatacacagaattggttttttatttgttgcaccttgtatgtccaagaaacatcattgaaatgcaaaggacagcctttttaactattaagatttattttaagtttattgaaagcgttgtttattttgaaatccattcattaccatatcatttccatcgcattgctcgtcgaaggtctgttttttgtgactcaccacttgtctaacaacgaactgtgccacgaaatgagctttgttgtccaagttaaaagtccaaacagcagctgcttattagcaatgagttgtacttttttcccctagcaagatgtcgtagaccccgatgagcgtctaatggtttccattaaggtagtccaaccgaatggagaaaaggtcagtgggcgaaggaacccacaaagtctttgctttcttgctgcttatcatcacttttgtgtctcccctcctctttcattttcacaatgatctccaaaatcccgatcactactaatcccaaacgtattgccttacagtccgtggccaaatcggagggctgggatgctttcaagtactgtgtgcgcaacgagatgaaaacaatgatgaagtcggcaaactaaatttgacaatgaaacaaaagtccgcaaacaacgaggaaaccattgaagccaaagtgaaacaaagttctagttacaaagttttcttctaaagaaccaaaatctcgtgtatagctatagcctttatatttgttatttatgaatttgttatcgaactaagcacccatctcttgtagccaaaatattgagaacatttttaaaatcggctcttgattgccattgtttttataaatgtatagtgcaaataaaattgttttgtaaaatttgttttaaatttttatttagttttcatttcgtttaagattatgatttcttagaaaatgcagctcgttaccaagcatcaagtta

SEQ ID NO: 9344 - DNA, 1670 bp, DROSOPHILA
tgtcactagtttagttttttcctctttaaaactcggtcgaaatggcgggtttagcggctagattaacggttaaaaactgcacaataatcgcccaaaggtcgagtgtgatcgtcggtgttggtcgatcggccagattttccagtagttcgtcacaaatgggcagaattccgggacacaaaactcgacgtctgcttactattgtaggcggtagtgctgtttctttagccgccctggcggctttcatcaaactacgttccgcggaaaaccctgtgaatgcagttagcctaaaaaggcgcatgcgcgacgatagcgagctggagaacgtaaaactgacggcccgggagcgccgcttcatcaagtttgcatccgtggagtacgatgaccagctctacatgacaccgcaggacttcctagactccgttgttgagcaggagcccagacctcgcttgaaacgacgccagttgtccagcgatgaggtggataaatacaaggagaacacgcctgctttgaagaagggttccactcgtctgtttcgcaacctaagggacaagggcattgtctcctacacggaatatttgtttttgctgtccattctaacaaagccgaaatcaggattccgaatcgcattcaacatgttcgacacggatggaaatcagcgcgttgacaaggacgaatttctagtgatggagcgcattttcagtggcgcttggaaggagaagcacggcgagcaagagccggaagaggagctcgcaacgcccactcccctggagcagaactatgtaaacgatggcgagggtctgcagcggcgtcacatggtggccaccacactgcagctgcacttcttcggcaagcggggcactggggtgatcaactacgataacttctaccgcttcatggacaacctgcagacggaggtgctggagctggagttccacgagttctccaagggcaacagcgtcatcagcgagctggactttgccaaaatcctgctgcgttacacgtacttggccaccgacgagtatgatgtctttctggagcgcctgctcgagcgggtcaaggatgagaagggcatatcctttcacgatttccgcgacttttgtcacttcctcaacaatctggatgacttcacaatcgccatgcgcatgtatacgctggcggatagagccatttcaaaggatgaattttcgcgcgctgtcaagatctgcaccggctataagctaagtcctcacttgatcgataccgtgttcgccatcttcgacgcggatggcgatggcctgctgtcctacaaggagttcatagccatcatgaaggatcgcctgcatcgcggcttcaaagtaagtggtcgtttctttgattacaacgaagctctggacgcctatgatgagcccgattatccgctgtttgtcgcctggcgacatcgggtgtgccgccacctggattacttcatagacagcgatgcgctttggcactgattactaaatatttagtttaacccaatttattttaagtcatttaatgaatacctctttttgtttgccgctctctgtcccattgaatgtgtgtgttcatttagtttttgtctcgcctttaagcgtttctttgctttaagctcactgtttaattgcgttaacttataatttagttttaaggatattaacccgattccatga

SEQ ID NO: 9345 - protein, 438 aa, DROSOPHILA
MGRIPGHKTRRLLTIVGGSAVSLAALAAFIKLRSAENPVNAVSLKRRMRDDSELENVKLTARERRFIKFASVEYDDQLYMTPQDFLDSVVEQEPRPRLKRRQLSSDEVDKYKENTPALKKGSTRLFRNLRDKGIVSYTEYLFLLSILTKPKSGFRIAFNMFDTDGNQRVDKDEFLVMERIFSGAWKEKHGEQEPEEELATPTPLEQNYVNDGEGLQRRHMVATTLQLHFFGKRGTGVINYDNFYRFMDNLQTEVLELEFHEFSKGNSVISELDFAKILLRYTYLATDEYDVFLERLLERVKDEKGISFHDFRDFCHFLNNLDDFTIAMRMYTLADRAISKDEFSRAVKICTGYKLSPHLIDTVFAIFDADGDGLLSYKEFIAIMKDRLHRGFKVSGRFFDYNEALDAYDEPDYPLFVAWRHRVCRHLDYFIDSDALWH

SEQ ID NO: 9346 - DNA, 6990 bp, DROSOPHILA
gctgggcgagggattcgcctgagccgaccaaatcctcggagaattagcttaagtttaagttacgttccgttcagcttctgtatatgtacgtccacgtccctgtattttaggttagcttccgccttttgtatatttccatttagttgtaaatgtttattagccagcgatcccaatgaaagtaaacataaaccatatgcgatgtcatggattattggacttattgcttgggttgggtgcaagcagaagggaggaaaagattaaattctctgtttatcatattttacaatatgcaaattacttctttattaacttgtcactcggttcgatttcgtctcacttgtttgcaatttcctttccatccatgcaattatttcgtttcattacacaactacatgctcgacacttaattgttaacgccttatacttgactactaatttgtatttgcatgctgttgtattcacttgaagagggttcaataatataaatacaaattctgaaaatgtatatcgtgttttaattgttattactaattaggtaggttgattatttcgcaactatctgcactcccttgtcaacttaaaatttgggttttgagaatctaaaagaatcgctttgtcaaagggtgttagcaaattaaacatatttcatatgttcgctcttgtctgcagttcaaactgctcgtggcattctaaaaataattgcatttcactgcggttgtgtacagttttggtatattatattattaagagacaattacccataacattatcgcttttgcttaagcctacccaaacatgaaaaggccattggggggaaaagggagactgataacaactaattagagagtgaacattagtctgggcatgtggtttcgcggtattgccttatgtgaattgtggtttgaactaaaaacgcgttctccttaactagacaaattattttaaaaacgtttcagcttaaacataaatcttcaatgatacaattacaaactgtgtatgcaaactacacttacatacatgaactaccgaatctttctcgtcgctgcgagattgtatatatataatttaagagtctcattgagaagtaaacaaaaccaattgtgtgggtgggtcggattgggtgtggagtggattggagtggagtgcggctcctgactaaccagggggccgtggcaaacctaacaaagcgttgataaacgtaaaactaaacgtgtcctccgcatcagcatctgctcctccatccgcatccgtgtccgcatcggccatggctggcacaatgacggcggcaccatcagctcaatcaatgtcgtcgtccagctcgtcatcatccatctccagcttgaactcgccatcggtggtgtgttgtgccgagtgttgtgcaaagccctgggactcattggccgactccaggtacccgttgaactcattgtcctcgtcatccgattcgtacatattttcgccagtcttgccggtgccgtaggctgggccaaatataaagtttaataacagtgaattggaagacaatatatggtcataccttctacgtatttggcaaggtttggaggcacccacgacttgactcgttcaatgttctccggcgtgcattcgcccttatccagtcctgcaggtaatagcatatgcaatgaatttcttatcccgaatgcccaatattaaacacactcacccaataggaatcccatacgcttgagcacctcaatgtcatcgtgcatttcgaaggttttgtcgaacttgaatatgtattcggacctgaaacgatatatgggaaatagaatacaagccatactccgactgagtgtgagcgctcacttgtcgttggtcacactgcagttgattttcgtggacttgtgcgtgttcacgatgatgaacggtagctggatcgaggcattcggggaaggcaccacgccttggctctcgtttcgcttgttccgctcgaccaatcccttgaacgccacatgctgcatgatcatttcgcgcaacatttcgtttttctgttttattcgctcgcggcgctgacagttttcctcttccagggccagaaatgtctatgaaaaggggacaaaataatcacattagcatggagtttggtgcctttggtgaacacaagtcccacctctgtcgaatttgcgggcagtcctatccagcgaatctccttcttgtccttggaaataacattgattgccatcagtacgttgagcgcatcgtagacacgacgtcggatattcttttgatcacagttgttgtcgtacgcattgttcttcatctcctcgctgaccaggtcgtcggccacctcattgtaggtggtcttgcccttctcctccaccttttcgcataccttcatcgagaaatggcgcaaacctttgcctgccttgtccggcttgcgtttcctttgaacggacgatgaggaggccgacatggagtgcaacgagttgctctgaatggcatggctgtttgggaaggaacaaagctatagtatcctcctcgatcctgctcggttggttactacttacagttttgatttcatttttatgggatttggtgtaaacttcacatagcgatctcccttcaagggcaagtcgtaatgaccactgccagcacccgaagtcttttgcgccgaaacggtggtgtaggtggtacctgctacaataagggatacaatgattaattgaagtggtaagaggaggatcacacgcttaccttctgtttttggaatggacagtccgttgtcctgcagtcgtataaactgcccttgactgccctgcgtttaaatcggatcgttaggtactaagtgtaagcaacgtgagcaaccgcgttctacacttaccatctgactaaaggcgcccatgcgtcccacgttgccgatgccgctagcacttccgctgttgcgcgcggatgagccggtggcgtagaccaccgccacgggcttacctccctccatttcggacttgttctgggccggcttcagcattttggatatttgtcctgcagaattggaaattggaagatgcggaggttccttagtttccgatatacacataacacgcgactgaaatgccgtcgttgataacaaaactgcatgtactccacagacacacacatgggtgtcagagtgttagcgagtaactgaatgtatgtgtggtactatcaacgatgcgttttttcgccgtatatacggtgaattcatcgcagcgaagtgaagagaatggaatggagcgagttaagcgcactggagtcggaatacaacaacgaaaggcgagcggcacattaagattggggtgcatacacacatacacacaaggtatacccacactcacgtgctggtggtgagtgtgcgtgtgtttcaatcggtgtgacaaggatacaaatgcagaagcataaacaacccgaaaccagatcgcctggacattagtgatggcaaccacgtgacccttaaccaattagagatggttcgatactaaagttcgtgactcgacaagattgttgatcagtcattagtcggattaatccaagttcgaatataatttgaattaaatatagtgcgattataggtttcccattaaaactcacaattcgacttttaactggaaagacaataaatcaagcagaagcctaagcagaagaaaaagtaagagcaaatatgataccggttagtatttttaaaagcgtgacatttcaaatcactgttcttagttgcgttctttagtaaattttatttactgctaatttggtatatccaacactatgagcacttccattccaaagcaactataatatcaaggcagaattaaccggaaacccattaagactactcggttggcacccctgggtttcgtatccaaccggcttttctaaacatttccagttttagatggtattcattcgatgtaataattgttcacctgtcgccagcccaatatttgcataatcataacaacaaagcaggtggacaacgcataatggagatgaagatgcccaaaacaaaaaccgcaaagggtcgagcgctaaaaatacctgccaactctcccgcacccacgggcacatcacacgcacacacacctgcaagtgagtcagactcacgggggcttgagcagcggacacatgcgagaaaatgccggactgtcccaccagatggtaacgatgggagtcttaaactcggcgggagttatcctacaatgcctaggcagagtcccaaaatgcaggtgaaaccataatccctacaattggagaagcagttccatagttcgtctgcaccagtcaaccagcagataactacaaaccaggtaactcgctggtacgaacaggctgatatactggtctatataaagcgtttatgcgcgcttcatattcaacaaagagcaatatcactgattaaaaattactatttctttacatattggggattaaagagacattttatacaaataaaagcacgtcataaagctatccatatcttcttctttgctatcatgactgaatgaaactcatgaagttaatcagttcagtactgcggggtacggtaaataccgcataaacgcggcgacggacaactacacacgtgtacagcgcttacacctatttgctctcgcctgttttgggcttcagcttcgtggctgactacgtgtgtgtgtgtgtggcagtgttgttcttgctgtggccttttttctctcaccccgatctctcttggcggtgcgccccgtctctctcccactcgctaagatatggcagaatgtcacgctgttcagatacatttgtttcaagttgaatttacaatgtccctcacaataatacctttgtacgtagctgaaatcaacgatttatcactacttcacttcatgctaaatcctcaaagcgaattcgcagtggcggcgaagtaatcagctgttcgccgcccaatgaaaaaacaaaaaaataagtaggagaaaacgcgcgcgtgctagtgtgcgtgcatgtgtgtgtgtgagcaagcgcgccaactgggcgatgggcgtagatggcagaagggggcgggtctgggtggcttactgatataagttgttatttcgcgggggtctctgtcttttattattactttttgccaatttctagcactcttttcggttcgtctcgctggcctccccccgcaaagcgtatcaaacgatgaatacggtaggcaaaagaaacccgaaaaagcaaagatggcgttttacgctgcccatgcaactttgtagcgtatctgtgtgggtcgccttgtgtatgagggggtgtgtgtgtatgatggactatagcggagggagggagtgcactcactccatcgtgagcaaaactcctattacaggacaccgcttccgcccacttaccgtgctcgttccggaagaagaagttcacctcatcggtcttcaccgtaccgcccgtcgaatgcgccatttttcggccgccggagatcaagtgatcttgttgttgtcgcttaccgctcaccaggtggaccgccaaaaacaaaaggaaagagcagtgctacgtgccgtttcgccgcaacgtgtgtgctaggggggggcaaatggagctggaatgggcgacggcggtggataggcggacgtactgcacccacggactggggcacgtgtgcaaatccggatgcggaccacgaccacgacgacgacgactgcaatggggagcgcacttgtacaaaaaataagtgtcgcccaagtcaaaatggcgagcgcatttttcacttccagcggcagggcattttttttttcttttctgctgctcacacacactcacagcggcggccctttttcggtggcctttttcgcggtgtttcggcgcacggattttcacgagattagtggcaaaagatacggcgaacttttagctatcgaacggctggcagcagcgcgaatttccgcaatttctaagcgcaacaaaatggtcacaaaatttccaccaagtggctgcttttcgttttcatgtgggaaaggcaaagcaggctgtgtgcgggtgcgaatgaaatggcagacagtgcgcgccaatttacgcatcaatttacgcagtgttgtaagcagctgtgtgcgacagtcgctatcgcacactggtcgcggatgtaaacaaagttgccactttgtccaggtgagcggtatttcgctggcagcccgccaacggtcaccctgaatcgcagaatattaaagttttcgagttttatttttacccatttggttggtgtgggaaaatgacaatcaacaggaacgggtaaatccaagcagctatctacacgagcccagcagcggagcgcacacgcacacaatggtcgatccggtggcggcgctgtgcaattacaatgtgctggaggtaatcttctcctacctggagctggacgacctcagtcattgctcgcaggtgtgcaaaagttggtaccacttcctcaacgacgagaacagcgacgtctggcgctggcactgcctgaacaagctgcccaaggagtccctcaaatcggacctgctggcctccgtctccacgtacaagacgaagctgcgggcctattttcacgcctggagccccaacgactgttcgaggaatgtgtacattaagccgaacggattcaccctgcatcggtaaggtattcggtttgcttgagtcggcgttatatgtatgtccctccattcccgcagcaatcccgtggcgcagagcacagacgcggcccggggcaagataggattccgccacggtcgtcacacctgggaggtgatatgggagggaccgctgggcactgtggccgtcatcggcatatctaccaaggaggcggctctacagtgtcacggctatgtggctctgctcggctccgacgaccagagctggggctggaatctggtcgagaaccacctgctgcacaacggcgacatgcagggcagttacccgctgctgaacaatgctcccaagtaccaagtgggcgagcggatacgcgtcattctcgactgcgaggacaacaccttgtcgttc

SEQ ID NO: 9347 - DNA, 2203 bp, DROSOPHILA
acacagcctgctttgcctttcccacatgaaaacgaaaagcagccacttggtggaaattttgtgaccattttgttgcgcttagaaattgcggaaattcgcgctgctgccagccgttcgatagctaaaagttcgccgtatcttttgccactaatctcgtgaaaatccgtgcgccgaaacaccgcgaaaaaggccaccgaaaaagggccgccgctgtgagtgtgtgtgagcagcagaaaagaaaaaaaaaatgccctgccgctggaagtgaaaaatgcgctcgccattttgacttgggcgacacttattttttgtacaagtgcgctccccattgcagtcgtcgtcgtcgtggtcgtggtccgcatccggatttgcacacgtgccccagtccgtgggtgcagtacgtccgcctatccaccgccgtcgcccattccagctccatttgcccccccctagcacacacgttgcggcgaaacggcacgtagcactgctctttccttttgtttttggcggtccacctggtgagcggtaagcgacaacaacaagatcacttgatctccggcggccgaaaaatggcgcattcgacgggcggtacggtgaagaccgatgaggtgaacttcttcttccggaacgagcacggacaaatatccaaaatgctgaagccggcccagaacaagtccgaaatggagggaggtaagcccgtggcggtggtctacgccaccggctcatccgcgcgcaacagcggaagtgctagcggcatcggcaacgtgggacgcatgggcgcctttagtcagatgggcagtcaagggcagtttatacgactgcaggacaacggactgtccattccaaaaacagaagcaggtaccacctacaccaccgtttcggcgcaaaagacttcgggtgctggcagtggtcattacgacttgcccttgaagggagatcgctatgtgaagtttacaccaaatcccataaaaatgaaatcaaaactccatgccattcagagcaactcgttgcactccatgtcggcctcctcatcgtccgttcaaaggaaacgcaagccggacaaggcaggcaaaggtttgcgccatttctcgatgaaggtatgcgaaaaggtggaggagaagggcaagaccacctacaatgaggtggccgacgacctggtcagcgaggagatgaagaacaatgcgtacgacaacaactgtgatcaaaagaatatccgacgtcgtgtctacgatgcgctcaacgtactgatggcaatcaatgttatttccaaggacaagaaggagattcgctggataggactgcccgcaaattcgacagagacatttctggccctggaagaggaaaactgtcagcgccgcgagcgaataaaacagaaaaacgaaatgttgcgcgaaatgatcatgcagcatgtggcgttcaagggattggtcgagcggaacaagcgaaacgagagccaaggcgtggtgccttccccgaatgcctcgatccagctaccgttcatcatcgtgaacacgcacaagtccacgaaaatcaactgcagtgtgaccaacgacaagtccgaatacatattcaagttcgacaaaaccttcgaaatgcacgatgacattgaggtgctcaagcgtatgggattcctattgggactggataagggcgaatgcacgccggagaacattgaacgagtcaagtcgtgggtgcctccaaaccttgccaaatacgtagaagcctacggcaccggcaagactggcgaaaatatgtacgaatcggatgacgaggacaatgagttcaacgggtacctggagtcggccaatgagtcccagggctttgcacaacactcggcacaacacaccaccgatggcgagttcaagctggagatggatgatgacgagctggacgacgacattgattgagctgatggtgccgccgtcattgtgccagccatggccgatgcggacacggatgcggatggaggagcagatgctgatgcggaggacacgtttagttttacgtttatcaacgctttgttaggtttgccacggccccctggttagtcaggagccgcactccactccaatccactccacacccaatccgacccacccacacaattggttttgtttacttctcaatgagactcttaaattatatatatacaatctcgcagcgacgagaaagattcggtagttcatgtatgtaagtgtagttt

SEQ ID NO: 9348 - protein, 445 aa, DROSOPHILA
MAHSTGGTVKTDEVNFFFRNEHGQISKMLKPAQNKSEMEGGKPVAVVYATGSSARNSGSASGIGNVGRMGAFSQMGSQGQFIRLQDNGLSIPKTEAGTTYTTVSAQKTSGAGSGHYDLPLKGDRYVKFTPNPIKMKSKLHAIQSNSLHSMSASSSSVQRKRKPDKAGKGLRHFSMKVCEKVEEKGKTTYNEVADDLVSEEMKNNAYDNNCDQKNIRRRVYDALNVLMAINVISKDKKEIRWIGLPANSTETFLALEEENCQRRERIKQKNEMLREMIMQHVAFKGLVERNKRNESQGVVPSPNASIQLPFIIVNTHKSTKINCSVTNDKSEYIFKFDKTFEMHDDIEVLKRMGFLLGLDKGECTPENIERVKSWVPPNLAKYVEAYGTGKTGENMYESDDEDNEFNGYLESANESQGFAQHSAQHTTDGEFKLEMDDDELDDDID

SEQ ID NO: 9349 - DNA, 6596 bp, DROSOPHILA
tgccgttgttgttgagcagcgtcagcgagaagacgccgttcttgcccgtatcatcgtcgtagacccgcggcacgtagggatcaacgaacgtcagtgcggtgccatgtggggcgttctcgtccaccctcgagacatagctgcgggaaaggcggagcggaggagcagaggaggagaaaagtcgtgagccagagattagcatggggaaagaacttcgtgaacgcctgtacactgttgcaaaggcgtgcgacaagctacttctacactcgtcaaaaagctaaggactagccaagttagttctaatcaatatttcaaagtgatatattatatggacagatcaaggctggaccacctataagagtggtctgtaaaacaatcccattagatactatatatattatattcaataaaccaaaccaacaaaaatcaaccaataagccagatttaagcttagttctgaggaactgatgtttcaatcgatcatttttgattgaagatcgctcatttctctgactgcagccgtactggcagttggctgttaccagtttgtcgggaattcggctgggacggactggagttcaaagttagtgcgcataaatggatgctgcagtcgctgatttcagcagaagagtttatagtcctcgtcttcgacttggtcgtcgtctaagtcgtcgccttgtcgccgtcatcgtcgtggttgcctatgccaagaattttaggactttatgctaatggacgcggctaaaatttgttgtttgtgttggtcgcagctcagtggtgtcttttcggtctttgttttcggataagcaacatcactcctacttcgccaaattgcacttggagagagcagggcaacaggcaacagggagcagggaccagagattcgggacccgggactcatagtggttgagcaggtttgccctagcaaagtgtgtttttgtttttgtttttttttttttatgtagtatgccccccggctgcttcgatgggaacctgctggtacttactgatcgttctcgaagtacggcggcgaattggtgcgatcgggcagaaagaacgccaattggaccgtggaggccagtgcgggcggctcgtcacgacccaccttaacctcttccgcaattacggtgagcagcaccggatcacccacatgcgtgatgaaggcaatgtcctcgaggggtcgcatcaggaagatctcgcctgtaatgcaaatagccgaagcgttgattgatttaatgcacaggttggaagggtaagctatatttaagattaattgcatggagttcctgaaaattaatacaacgtaaaataatcctaatgagtccatagcaaagtagcactaatcaagctgctgcttactaaagtagtcttatttgaacaaatttttttctgaagagaattatctgagacccatcagtcacatctagaggcaattagaaaggtcaactgtgggaacttcagtctagttttttgcactttttccggtgtgatttgcgtagtggaaaaactgaaagctgcagccagctgtaaatgctcacaatctgcctgtgggctcaggagcgtttttctttttgcgccacagccgtcatcagaaaacctgataaatggtgcagaaagttggtagttcccacgccaagttcagtgcacgttgattatgccttttttcccaattttttattgaacactttttgtttttgtactttaccccggtggtggtcgttgggtaatatgcaaaaagattctgtgcagctcgagaagaaaagattcccacccataaactttcagcggattagctggcgccacagcagaggttctcagaggttctcagaatccagaattggctgattagccgggccattcataatttgaatagctaatcagcctgaagtgcataccttgtataaaagaggcaacatatttagttacgcgtcgttgccgttaaataattattatacatcgtgtctgcgagcctaaaaatagctgcaacactgctaataaatccgggcagtgggaatatcgaccacaacgctgttaattgttttaccccaaagggattccaatttgaaattcatttggctagagccagcaaactgtgaatcttcgtggcaagagtgcttcccactgcacatggctaaaagaaattgtgggttgattgggggaggaggagttgcatggggtggaggaggaggtggagacagcctggccattatactcgatggtggtggtggggcaagagcgagcgactcggccttatagccaaagtcatcaaagtgctactgccaacgagacgagactagcacgaaacaaggaagtctctgtggtggtttggctttgggtttgggtttgggccaaattgcggcacagaacttggccgcaacgaacgggtattgccgttgacgtcggaggaagttgcctggaatcggagaatcggggaatgggggaatgggggattggggattcgaaggcggggtgaagatgggtttctatctaacgagtctgacgacaaagcgggttgccgtgttgcttgcagtactcgtaccactccaccgctgcaccactgcaccacagcaccacctggtagttatgttaatatcggttacctgacgttgttctgcggctattttcctctcgctcatgcctggcatttgttgctgctattgtggtttctgattttcgtccaatttattttgcttgctttacttgtggtcaatatttttaagtccactgtccatgcgcagaccatttttcttgcttcctgcgactatatttgcaaaagctcgccccctccccgcatccatgagaatctgcgatgggatgcatccgagtttgcaacgctaagacaaaaattttccactatctatgcactatcagtgtcccatgaagatgttatcttattttattacagtggccgttggtaagagtaaccattatataggcgttctcgcaacgatgaccatcacaagaggaattaaagtgtgttatctctttgataaatgttcggaccttgaaaactaagtgtgcttccgcatagagtacgtcctttacttaccgcttgtttcgttgatgtcgaaaaacgaggtgaacggattgttctcggataccaagccgtagcgaacctcccggggattccccttgtcgccatcctcggcgtggacttgcaatatctaagcgggcagagatattggaatttatgttcctaagagatatggaaaagatataccttatcgcctggcagtattcccggtggcagtttggtcactgggggagcagatgtgaacactggcggctgatcctgaacatcctgcacgataaccactatctccatgcccgctatattgcgactatcctgaccaggctcagcataagcatccttcgggcataatggaatgatattttcatttatagctatgattaatcttaaatcttataaatactcacattggctagtatcgttagatggtacatggcttgcttctcaaaatctaatggtcccaggaggaaaacggtgccttctgtggtctcggaagatacgattttttgtcttatggcaaatagcggagaaccctgttggcgaaaagtacgatccataaatcataagctccgttgggttaggggtctccatggccaacgccatccccatagtcatcttccaacttacccataactcgaggtagactggtttctggaacagcggattcttgcgggcaattacgtaatccaattccgtgccgcgtttagcatcctttaaagataaatcggggttggggcttataacttttgatgatatttcggctggagtaaattacacatttgaccctgtccgaatccgcttgtaattttgcaccataacaatgattatcgtgtacgagcatcgcttatgaaaaacgaatagcatcttcttcattgggagacgtgcttctaatggcttatctgattactgctttattaaagtggctacacttgcaaaaaattcgttgacttgggaaggtataggaattttagaaatgccttatcttccaatttgatgaatacctactacctactatctaaaatagtaccttgatgccaaatagtaataagaaaatacatatacaatacaaatacaaaaaaagattaaatctgttttatagaaatccaagatatgtagctaaccaatttcattactcccttttctgctggcccttgactccctttaatcctaagacctctataatagaactttttccaagtacctcagctcctctagacggatctcttcacgggcgttacgtgtaattggtaattgaaacgttctggccgtggccacatccacatgtggatggatgggtgtagtgttctcacctcgggtatcattatgatgccgggcttgtgcgggaagatgaggtcgtgcggcgtagtgaaattggtggccgtaattgagcagagttgcgtggtcatcccgcccttggtgtccttcaccgatacctggaagtcatagtatctgcccggttccagtcgtcgctggagaacgatattcgcctggcacacggaattgtacttggtgcagggtagcgattccaccttaacggtggaggcgctggcatcgcccacgaactcgaaggtcagcggatagtcgaactcctcgtcggtggcacgcaacctgtagattaccgagttgacctgtgcgtccgccggcacaagaaccaggcgcatgcgcgtggtcggatcgaacttggggtccgctccctggacgtgatgtggacacagaatgccaattaggaggctgattgtcagcagtcgataggcggtcattgcgcccaaccagggaccaattggacccagtcgcgatggccagtggtgctgcatctgctggttctgatgattgtgctgctgttgatgatgatgatgatgatgctgaagccgatgatgatgatgatgatgccggtggtgctgcttcaggcgatggtgatggtggtgctggtgatgatggtgatggtgttggtgcggggaggtagctggagcgtagtagtagcattccctctgtccactgggctcctcagcggcacccgtgcgactgacaggctctgttcccaggcggcaaagcgggacatgtgatcggttcttctccggctgactgctacttgtggaagccatttctggaaacagagaaatggtcaaaatttaaggattagtacaagctaaaacattaaatataaggtagcagattttagttgaagtaaagtttttgattagttcacccaacaaagagagcactacttccggtgctttacaatttaaatcagttgagaaatggtgcataaatttaagccccgaaaaatccaaattgaattttccctgccattgagacggtaaccttgttaatttcaattacagcgcaatgcgtatcaaatgaatagtgttaacccggaaattaaaggcaattcaattagagagccaatttggaaacaacttgtaatgcatcatcgtggatcgattaaattgtgctatcagagcagcacacgatctgcatctacggatttccaaaaggttgtgtctggggattgggaagcgaacgtggttgtgcaatgcggtgaccacggtccaaaccgcgccgaatcatcgtcccaaatgcataacttttgtgggccaagacgaatcccaagcaccaagtcgggactggattgcagttggctcgctccgggtgtgtgcaagtgtgaactatgtattaaggtttaactcagcgtccggtggtcgctccacaaaagtggttgactgaccaaccaaccgatcgaccgaccgaccaagcaagcgaccatctactttcattttccattcggggcggtctgggcagagcttggaaatcgaattagatttcataattaatactgcagcactttcatttttccttaagccatgtagagccatgtagccatgaccaacagaagaggccaatttgtatggcttaaccgcagtggaagtggagttggtacgcggctgataaataatgcaattaagagatctacgactgcttatttgtcgcaaacacggtgctctgtttttggcaccctggctgaacaaactactcaaacatcaggcggagttgtaatattattaattaacaaaatactcggatactttggctttatgcaatcgcgcttcgagcaacgcgatttttcacaacgattaagtccagttggtcaatgtttttccgccgctcgtacttatgttttatgtttttttatttcactttttcggtgccatatacgtgtttgttcaaatgtgagcaagagaaatgagcagtgagccgcaaacctaagagctgaaagcgttttggcaatatgttgaaatgggcataaattatgaacttaacacttgaaaaggttatagctgtcctaattgcttttgtttcgcctaaagaatggacgccataaatcgattcgtgaaaaggctttccaactaatgttttaatggccgcacttgcattactttccaaacttgctgtaaaagggcattactttctcacctatcacaggaaattgtaataatcaatttgattttcaaacttattataaacatatcgcatttaacgctcgcaattaaagcttatttgctgaaaatgc

SEQ ID NO: 9350 - DNA, 1512 bp, DROSOPHILA
atgattcggcgcggtttggaccgtggtcaccgcattgcacaaccacaaatggcttccacaagtagcagtcagccggagaagaaccgatcacatgtcccgctttgccgcctgggaacagagcctgtcagtcgcacgggtgccgctgaggagcccagtggacagagggaatgctactactacgctccagctacctccccgcaccaacaccatcaccatcatcaccagcaccaccatcaccatcgcctgaagcagcaccaccggcatcatcatcatcatcatcggcttcagcatcatcatcatcatcatcaacagcagcacaatcatcagaaccagcagatgcagcaccactggccatcgcgactgggtccaattggtccctggttgggcgcaatgaccgcctatcgactgctgacaatcagcctcctaattggcattctgtgtccacatcacgtccagggagcggaccccaagttcgatccgaccacgcgcatgcgcctggttcttgtgccggcggacgcacaggtcaactcggtaatctacaggttgcgtgccaccgacgaggagttcgactatccgctgaccttcgagttcgtgggcgatgccagcgcctccaccgttaaggtggaatcgctaccctgcaccaagtacaattccgtgtgccaggcgaatatcgttctccagcgacgactggaaccgggcagatactatgacttccaggtatcggtgaaggacaccaagggcgggatgaccacgcaactctgctcaattacggccaccaatttcactacgccgcacgacctcatcttcccgcacaagcccggcatcataatgatacccgaggatgctaaacgcggcacggaattggattacgtaattgcccgcaagaatccgctgttccagaaaccagtctacctcgagttatggggttctccgctatttgccataagacaaaaaatcgtatcttccgagaccacagaaggcaccgttttcctcctgggaccattagattttgagaagcaagccatgtaccatctaacgatactagccaatgatgcttatgctgagcctggtcaggatagtcgcaatatagcgggcatggagatagtggttatcgtgcaggatgttcaggatcagccgccagtgttcacatctgctcccccagtgaccaaactgccaccgggaatactgccaggcgataagatattgcaagtccacgccgaggatggcgacaaggggaatccccgggaggttcgctacggcttggtatccgagaacaatccgttcacctcgtttttcgacatcaacgaaacaagcggcgagatcttcctgatgcgacccctcgaggacattgccttcatcacgcatgtgggtgatccggtgctgctcaccgtaattgcggaagaggttaaggtgggtcgtgacgagccgcccgcactggcctccacggtccaattggcgttctttctgcccgatcgcaccaattcgccgccgtacttcgagaacgatcagtaa

SEQ ID NO: 9351 - protein, 503 aa, DROSOPHILA
MIRRGLDRGHRIAQPQMASTSSSQPEKNRSHVPLCRLGTEPVSRTGAAEEPSGQRECYYYAPATSPHQHHHHHHQHHHHHRLKQHHRHHHHHHRLQHHHHHHQQQHNHQNQQMQHHWPSRLGPIGPWLGAMTAYRLLTISLLIGILCPHHVQGADPKFDPTTRMRLVLVPADAQVNSVIYRLRATDEEFDYPLTFEFVGDASASTVKVESLPCTKYNSVCQANIVLQRRLEPGRYYDFQVSVKDTKGGMTTQLCSITATNFTTPHDLIFPHKPGIIMIPEDAKRGTELDYVIARKNPLFQKPVYLELWGSPLFAIRQKIVSSETTEGTVFLLGPLDFEKQAMYHLTILANDAYAEPGQDSRNIAGMEIVVIVQDVQDQPPVFTSAPPVTKLPPGILPGDKILQVHAEDGDKGNPREVRYGLVSENNPFTSFFDINETSGEIFLMRPLEDIAFITHVGDPVLLTVIAEEVKVGRDEPPALASTVQLAFFLPDRTNSPPYFENDQ

SEQ ID NO: 9352 - DNA, 11042 bp, DROSOPHILA
ttccgattcggatgccctgccaagaaccccgaaaacttcttttgtccacccctctttcactccgcaattctcgatttttctctcttcacgaaatgaggctgccaagaaatgtttgctctagagatttctatgtttccaacacacatttattaaagccaactatcgtggggacagaggggcagtgcagcgcagtgcctatgacaggagcggtacgggactgcacgggttgggccgtactggatattaatcatcgggcagacttaaattgcaaatgaaatcggaattgggcaacggtgcgtatgcgtattgtagttgagtagttcgaggcgacgagggagccagaaattggcagactctgtcaagcatttgttggctgcagcaaacacaaacatacatattcaaatgtatacactgaggcaaatcggagaaagaaaataacaaaagtttaaatgcatgtctaaaataatttttaagtcatttaaagcgaaccaggaacgactttttaaaattaacatatacaaattttaataaataattcaattttctaacacactttaaatttaaaatagtgttttgtatccaaatgcattaagacttattaccaagtgccagaactaagtaatcaattcttcgctgtgcatatatatttgcacacatccaaaaaaaaaaaaaagacagagagtcggctaggaagagagagatatccattaagcaaacacagagaaatcgccgctgacataaagcagcaatggctgtcctggcaatgtcctgaatcccccccaagtcctttctcgcgcgtatctgactgccgcctcgctggcgccagctgtcgcctgctttaacttgtgccctcatacatgactatactacagcacatgtatgagtaccattttgtatctgcgagatagtcgcactcgcactcacacacttgctcatatcatcagcatattgccgctcgttgagaaatcttaagtaatttgtcccccttttcgttcgctacttacaggtcccgccgttcagatggtctcccagaaccgacctccaccaccgatgccggtgcccgtccaggtgccgcagtacgtcaacgagaacggaacgctgacccacgtgatgctctcgccgcagcagtaccagcaactgcatcctggccagggacacctccatccagcgccattcgtaagtagatatattcaaaatgcacaagattaagttcatcccagtttcctggggaatcaaacaaaataagctatgataattctatatatgaaaagtagagttataaactagaggtacaagttaaagtgaatcattcataataataataatacatcctgcaattgaattaattaatatcgtagcacattttaagcggaatcggaaaacagtacacgaaacccaaacctttcgcaatcgaatagatggaaaacagtatctcatttccagcccattggcggatttccttcgcttatcaattaattgacagctaattgagcgaacaaccagcaatcaactgcaataattccccgatgcttattcgatttaaaagcgaaatttgcattgggggcgtctgtaaaaataatttattgaacaaatgtcgccgtatgcggcaaacaaaccggattggatccgggtgaagtggttccaggaaaactgaaaactaaaaactaactattcaattacagccagactcgggattcggattcgatgcaaatgcattatgaagctgaaccgggtcgaaacaatggctaaaatgggtaaacttttacctaaacaatagcaacaatttaagtaaagtttaaacaaaaacaaaagcggaaaaacagttggccagctgtcggtgcttttgtgtttataatttatttattcatcggttggcttaagtttttgtttttttttgtttttttcaccagcaatatcgttttgtttgttctgcactgtaagggaaaattcgagggagccgaagggggaaaagcgtgaaatttgcataactaattagtctatttcgcacaattccaaagttccatttacgttgctcaatttctgagtcaccgttcgcaaatatttgaatggcaaatgcattcagttgcagtatgtttatcgcccgaattcgtttcattgcatttcgcgagctgtcatttaggcgtgagctttgacaattgttctgcgaaattgtttggccagaatgctaattagccagttgggaatagctgcttgccaactgtgagaaagtaaccgcgttacgattgtcaggtaaatggtaacttttttaagctaaagtgaactttaaagataaacctatccttttcgattcctgcccgttcgctatatttgctcatgtttccgcagcacctattaccgttttctttcaaacgtattatttattcaagtcatttttttttttttttgagttaagttaaaatgacttcttgggtatttctagcaattaaaagtcattttaatagagtaataacacatttacacgtacaaataattaaagtggtgagtcacaagtttaaagcttatggaaaaatgtttctattgctttgctatttgattaggggttattaaaagttagatcaaaatgtatatttgatttcattgtgtgtatatatttattggcctattattaacaaaaagccatttccttggcaatatcttgtttcatttcactgttacaagttcccttcattttgttttatttcggctattaacatgcagaactagttggctcccatggagatgccaagttcaaagttggggctgctgcattccagttaaattgccttgctaatttgcaaaatggagacgagcggaaaagaaaaacgcttgttaaccaaagcagatgagcgttacatagtcacatcacgtttcggatccccaactgttgctcccgtcgccacttatgtctaataatttaataataacaatttcattgtacagcataaacattcctatcatctcttttatgtgcagaaatcgtaaaaaagttcacagcaaaattgaaatatttttcatttccattgctggaaatgcttgaccaagatgcggcagattcaccgaacaatcctagttcgtgacttggccagactacaaatccggttctgggctagcgcctagcgcaatttaaattctattgcccaactccccctctttaggttatttattgtattattatcaattgctcaattaaagccagaattaattgcaatgtgaattctataattttcaacgattacgcgctttccgtgaggttttaatttactgacacattggcgctgatttatttgtaaaaagtagacacatcgatcacataaataaaagaacatcacaagcattatgtatgttcatcgttttaattaaaatttaattgctttcaaagcactcaaatcaaaaagaagttaaatttatatcggtatctatggagaggggggttttgaaatagagttgaagaaatattttcaaaaatgctgcatttatgctgacgacctagcaacgggcgatttgcataataatttgtaggttttagccgttgtttttttttcccaattgagttagtgcaagccactaaaagttgcagcttggtcgtgcccgctgctggcagcattgttgctcaaagactccgaattgaactccacttgagctgaacctggctatcacaattttacataacccgccaatcctaatgccattttgcccagtggaaaacttgattaatgcagcgggcaaccacttcatccgccttgcactgaaattcggattccagcttggacacatgtggcttcgtcacgctttgctgctgaaatgaaagtgccggcggtgactgctcggctgactccgccattccgacttgactggctgaggctgaattttccttgacttaattaacaatttgctgccacaacacggcagaaacacacacttgagcgtacagcggctagacatgggaaactttgcaggggggtttgccattttgccatatacgtgaccaaaaaagagatagatcttgaagttatatttcaaaatgtgactcggcaatgcaagatggtccattttttaagtttaatattttggctatgaatctatgggggaaagttataaatatttttcaaatgcaaacacatttaccatacgatctaaaatccctttgttcgggcgccactgttcgaagcacagaaattcgcatgctgcacttacaaatggcagcttccgcttgtgtgtttatgttgaaatgtttataatttgattgtatgctaatttgcatagtcggtgttgtggtatccattatgcaacttgactcgaaataacggtatctgtcgcaccattgaaaccgaaaacgaaacgaaaactccctcgcagtacaagttataatctttttcttttttttttttgcccatgtgctaatccgccttcttttgttctccttttttttatttctgttgtattcgagcaaaaaccgcaaaaaaaactcattaactttgacccatattttttcgtatattcatagttgatgatcatcccaaaagaaccgaggggagacacgctttaaagtgtacaaattgcacaactcacataaggccaactttggtcatgcaaaatcgcgaaattagtgtaattttagcgaaaacagtttgctacagttttacaccgattggtgggccaaattatcaataatcagttaggccactttggtaatttttagataatatatgtagcatgcgggcgtggctaattgcccatatccggaaaagcaatttatttaataatcggttgggaaaaccgttatagtctgaaataagttcagagcattttaaataagcatacccttaataaatggagacatattttaaaacaaaattgaattaacttatcttaggcatagctatatttggtgaactatactgaaaataccattacctggaaaacgtacatctttccaaattaagacgtttaaaaagaaaaactgctctcagtgcgtatgctaaaccagtacattttaaatgtacgcgctttgttgtcctctaacaaaagcttacgagtataaaaccatgcaggaacaaaacaaaatgctaactgttgtgaaactttctgggaccctaaaatactagtgactataaagctgtgttgtcaatttagatttttaattatatagctattttttaaggtttttaatagacttcgaccttattacctataacatgaggattgtcttaatgttcccttatgatttaagattaaattgaattaaaatatattctttatgtgaaacgattgcttccattcaattgagcatcccttgttcatacttcgtatgcgttttaaaaaatactgttagagtggtggtattttttcaactcagtgaacgcagccccactgaaaacgtttaatttgttgttccttgaacttatacgggtttagttcctaaatgttactagttagtagttcctaaaaaatcgatgcaatgcacctagacgaaagtcaaaggaatttagtgcgcgaagaagtcgcgtaaattgtctgcttccgttttgcgaaagataagaaaacgaaagtcaataggttgttatcagtttgtttttagtcgtcggcctgttctttagcgagatatttttagccagcgtgtataagttgacgtggaattcgattcgttcagtcaaataagaatggatggttcaaagaaaacgctgctcattaaagtaaaaattagattgaaaccaactgaatgctgaacttgataattaagtgcaattttgaataccttccagataagcgcgaacggcacttcgcatttctacactccggtggcgggctatcctggcccaggacctgcgggcaatggtccaccacactatcacttgccgccaccaccgccgccgcaacagcagcagcagcagccaccacaacaaccacagcagcaggcgccacaaggaccaccaccgccacagcaacaacaacaacagcagcagcaggtggcaccacctgcggtccaaggagcaccaagcactggaagtgtaggagctgcccaaggagcaccagccactgcgacagccacccatacacacgcccattcgcactcccactcacacgcccactcgcacacacatccccagccacatgcacattccccgcactcgccatcgccgcccaattatcgggatgaacgcagccagcggcagcacaacaagctgctccggaagctggagaagcagcgggagtcaagtgagtatcatgcggcgaaagcatgccacgtattcacgtattgtattaatatatacttcactgtcctacagatcccccgcattcgccatctccacgtcgtgccaacgaactgaatggtcacaataataacaacattcctccgggtgtgcccctgcccggtcacctcaataaccaccatcatgcagtgaaccatcaaggacgtcgcctgccgcagcagcaccaagggcaggcccatcaggtggcacagcagcaacagtcgcaggccaggaacgggaatccgcagcatccccagagagccggcagcagtgtgggtggcgccagctccgtgggaacttccgaggatggcgaggataactccagtctggccggcgatgatgaggaggagtaccatcgcgagaacagcatcattgagcaaatctcagctattgaaaaacctgaggtaatcgatgtgacttcgcgggcggccaagataatttgggagagtccagccattgcgaatacagtgacggtggatatgcggcagctccggtaccaagtgctcctctgtgattctggaaagcagtgcaagtacaagagcttgtaccaaggcgaggcctacgagtgcattgtgcaagacctgcagccgggtcaggattacctagtccgcttgcaggtgcactaccaaaaacttacgggaacagtgagtgatcccacagaatttcggacgccaccctgtgagccagaccaaccgccgcctccgaaactggtttcccggaccaagaactccataaaccttcgatgggctgctccggcagcaaacggcgccagcatacagcactatctgctggaatacgatgagggcaggatgccgggacaaccgcaaaagtttgtggagttggccaagatcaaggccaagcactatgtcattggaaaactgcagccgactacggtctacagtttccgtttggcagcggttaatgaagcgggtcagagtccctattctccggtggccagctacagcacctccggaaatcctccgccagtgcctaaaccacctcagctgctggccagcagttccagttccctaaaactgggctgggagcggcgggctcaagatggtgacttcctgctgcaactacaagatgcagaaacaggtcatggtttcctcaatacctacaagggtacagagctgcaaacggagtgcctgcaattaaggcgggctagcagctaccaattccgtctgagatccgaaaacgaagccggtttttcaccctggtcaccggaggttagctaccgcactttagcggaacgcccgggaaggccagggaaaccgcatgccaagggaaagattcatggcactcagtttaaggcccgctgggatgcacccagcgattccggtggtgctgagatcctgtgctaccacttggagttaagtgccgctgggccagctttcgaaaggatctacagtggcgccgaaacagaagccatgtgcgaaagacttcagccgggtaccacatacgctctgcgagcctgttgcgaaggtccagctggtcagagtccgtactccgatataggacacgtcaccacggaggcggtgccaccatctgctccgcctccaccgcattgcagtgatcctccctcgccgtacgccgccctactgaagctccggcctccggaatataacggtggagctccgatcttagagttcgaagcccagatgcgtcgcctagagcaagtgcagcctccgcagttggtttaccgcggcaagcagacctactttgtggcgcaggatctgacacccggtggcatgtatgaaacccaagtaagggccattaaccggattggcgccggtagctggtcccaatggatgagatttacggcagcagctgctgctcctggagttcccgaagagttacgggttctggtgaagtcggccacccacctgggtgtcagctggcaaccgcctttacaggagaatggtgccccagtgaccagttacaccctaaaaagtgccagccaagaaagaaaggaagatgactcggaggaggaggtcaaagagccgcctagctccgaattccacaactgctatcagggaccacaaacctgcgctgaactgagaaacctttcgccctacacacgctaccatttccgcatccaggcgagcaactcagccggaacgggaaactcctccgacgtgataagtgtatgtacgccagccgcagttccaggagctcctcaaatgcagggctatgagttcaccgcccaggaggtcacactcaactggacccagccggcggcccacggctcgcccatatgctcctacaacattgagtacggggagagaactatcgccactccggacgcctgtacacgctatactgttagtggcttaatgccggaaaccggctacaagttccgtgttcaagcggtcaacgccattggtgccggagcttttagtgcctatgctaagctgaccacccaaccagctcctccggcaccacctcgcttagagtgcagcggtgctggccacaattacataaagctcaagtggggtgagaacggaaacggcaaagtggtaaactccaatccgtctggaaatggaggcgactttaccaagtactttgtggagatgtatgtggccagagctaagcagttccaggccgtctactctggcacgaattgtatgtgcaaggtgcacaaattgcaagagcgaagcagctacactttccggatttatgcccataccgatcgggctggcgatggggattactcggaggaatttgtttttgaaacttcggccactctgccggcgaacataaagcctcctcgtgttgtccaagagggaagcgtatgcctaatggagctgcctggccaactgggaatgcaactaacactggagtggcagcactcaaagaactccttcaatgatcgtgtggagtacgaattgcagtatgcagttttgggcgcagctgaattggagggcgaatcattgtcgccaaaaggacgcagcagcagttccagtggcagctcaaatggagcgccaattaatttgcccaaccatgactacaggcaattgtatcgcggtccagagaccaaattcaccattgacaatctggcagctggtacatgctaccagttccgagtgtgtccagtgcggatagcggctggcggagaactgctgtacggtcagccgtccagtccgttgcgctaccaggtgcccagtgaactggatcctagctcggcgacctgtcatcaccacctgcacggctccaccgcaacaccggcgatggcctccagccagagaagcagccgaaaactgtccgccggcaatggctcaaccaacggtctgcacatgcgatcggtaagtgcgtcggcaataagtggagcgagcggcgtgggagcagatcccgtggcaattggacgactgcagcaggagctttctggtttcaatgcctgcgcagatccccagcatcaccatcatcatcatcaccaccaccaccatcagccgtgcggtggcggcgttggaggagccggtggaatatccggggcaacggactcgcaccaccagcatcagcaccacatgcaccactcacatcacatgcaccacgcccaccatccgcacaccggaatgggcggtagctcttcgaactccagctcctcaacggcggcggccatatcctccagtttggcccaggcgggaggattaaggcggatcgtttgtaaagttacttcactgtactccaaccggaggcgtcttagcgaccaacaaaaggccgtgtgcattgtggtctccttcctagtgggcactttcctggtcgccatgctcgtaaatatgttgaggggctaaaaagatacgagattcaaacaaatggcgcccaacgtggagtaccacaggatttgaaggcaaaacgaaaggagaacagtaaaacaaaacaaaaaacaaatatgaaacactttatgtctcaaagaagtgatttaaaccattagttgtaattatgtattttttatatatttaccctaactgaatgaaacaaaatcaaattgtatattgtctaattttaaacaaaacaaacataacaggaaatcaaaaaaaaaaaaaaatggaatggaaagtggaatagagaaggagagatgagaaggcaaaaccccattaattgtattaaatgtacacaaaaccgcaacagcatacattcacacagctaaatgttaaaaatggtatttacttataatatttgttgtcacaaaacgaaagtctaatctccatatgtgctataaacaaaagagaccagccagcaaatgaaactaaaggctcactagtacttgtcaaaacctgtttcgaaatgcttatcaagcttttactttctgtgtggccccaaaaaaagttgcatttgccctcccggcaggattgtaaaattcgtgtataatacgtgtagaactagcatgtgggcgtggccccgcccgcagcgcatgatttttttacaagactttttgtaaaatgtattccaagaaaacgattgtagatagctggtcaacaaattgcaccatctaaaaacactcctaagtagctaaaaaaaagaaaaaaataaacgaatggtggaaggggggcgcttattgaggccagagggcaaatgcagaacgaataattaaacgaaaagtatgaatttattagactactagctacaagtattcagtgctgtataattgtttccccgatcgctccaatctacgcagatatatatatttatatatatatatagatatatacaaaacatagatatatgtaaaacagcagacgcttctttcattctcacaacctttttatacgagttattacacaatttattata

SEQ ID NO: 9353 - DNA, 4385 bp, DROSOPHILA
ttacaggtcccgccgttcagatggtctcccagaaccgacctccaccaccgatgccggtgcccgtccaggtgccgcagtacgtcaacgagaacggaacgctgacccacgtgatgctctcgccgcagcagtaccagcaactgcatcctggccagggacacctccatccagcgccattcataagcgcgaacggcacttcgcatttctacactccggtggcgggctatcctggcccaggacctgcgggcaatggtccaccacactatcacttgccgccaccaccgccgccgcaacagcagcagcagcagccaccacaacaaccacagcagcaggcgccacaaggaccaccaccgccacagcaacaacaacaacagcagcagcaggtggcaccacctgcggtccaaggagcaccaagcactggaagtgtaggagctgcccaaggagcaccagccactgcgacagccacccatacacacgcccattcgcactcccactcacacgcccactcgcacacacatccccagccacatgcacattccccgcactcgccatcgccgcccaattatcgggatgaacgcagccagcggcagcacaacaagctgctccggaagctggagaagcagcgggagtcaaatcccccgcattcgccatctccacgtcgtgccaacgaactgaatggtcacaataataacaacattcctccgggtgtgcccctgcccggtcacctcaataaccaccatcatgcagtgaaccatcaaggacgtcgcctgccgcagcagcaccaagggcaggcccatcaggtggcacagcagcaacagtcgcaggccaggaacgggaatccgcagcatccccagagagccggcagcagtgtgggtggcgccagctccgtgggaacttccgaggatggcgaggataactccagtctggccggcgatgatgaggaggagtaccatcgcgagaacagcatcattgagcaaatctcagctattgaaaaacctgaggtaatcgatgtgacttcgcgggcggccaagataatttgggagagtccagccattgcgaatacagtgacggtggatatgcggcagctccggtaccaagtgctcctctgtgattctggaaagcagtgcaagtacaagagcttgtaccaaggcgaggcctacgagtgcattgtgcaagacctgcagccgggtcaggattacctagtccgcttgcaggtgcactaccaaaaacttacgggaacagtgagtgatcccacagaatttcggacgccaccctgtgagccagaccaaccgccgcctccgaaactggtttcccggaccaagaactccataaaccttcgatgggctgctccggcagcaaacggcgccagcatacagcactatctgctggaatacgatgagggcaggatgccgggacaaccgcaaaagtttgtggagttggccaagatcaaggccaagcactatgtcattggaaaactgcagccgactacggtctacagtttccgtttggcagcggttaatgaagcgggtcagagtccctattctccggtggccagctacagcacctccggaaatcctccgccagtgcctaaaccacctcagctgctggccagcagttccagttccctaaaactgggctgggagcggcgggctcaagatggtgacttcctgctgcaactacaagatgcagaaacaggtcatggtttcctcaatacctacaagggtacagagctgcaaacggagtgcctgcaattaaggcgggctagcagctaccaattccgtctgagatccgaaaacgaagccggtttttcaccctggtcaccggaggttagctaccgcactttagcggaacgcccgggaaggccagggaaaccgcatgccaagggaaagattcatggcactcagtttaaggcccgctgggatgcacccagcgattccggtggtgctgagatcctgtgctaccacttggagttaagtgccgctgggccagctttcgaaaggatctacagtggcgccgaaacagaagccatgtgcgaaagacttcagccgggtaccacatacgctctgcgagcctgttgcgaaggtccagctggtcagagtccgtactccgatataggacacgtcaccacggaggcggtgccaccatctgctccgcctccaccgcattgcagtgatcctccctcgccgtacgccgccctactgaagctccggcctccggaatataacggtggagctccgatcttagagttcgaagcccagatgcgtcgcctagagcaagtgcagcctccgcagttggtttaccgcggcaagcagacctactttgtggcgcaggatctgacacccggtggcatgtatgaaacccaagtaagggccattaaccggattggcgccggtagctggtcccaatggatgagatttacggcagcagctgctgctcctggagttcccgaagagttacgggttctggtgaagtcggccacccacctgggtgtcagctggcaaccgcctttacaggagaatggtgccccagtgaccagttacaccctaaaaagtgccagccaagaaagaaaggaagatgactcggaggaggaggtcaaagagccgcctagctccgaattccacaactgctatcagggaccacaaacctgcgctgaactgagaaacctttcgccctacacacgctaccatttccgcatccaggcgagcaactcagccggaacgggaaactcctccgacgtgataagtgtatgtacgccagccgcagttccaggagctcctcaaatgcagggctatgagttcaccgcccaggaggtcacactcaactggacccagccggcggcccacggctcgcccatatgctcctacaacattgagtacggggagagaactatcgccactccggacgcctgtacacgctatactgttagtggcttaatgccggaaaccggctacaagttccgtgttcaagcggtcaacgccattggtgccggagcttttagtgcctatgctaagctgaccacccaaccagctcctccggcaccacctcgcttagagtgcagcggtgctggccacaattacataaagctcaagtggggtgagaacggaaacggcaaagtggtaaactccaatccgtctggaaatggaggcgactttaccaagtactttgtggagatgtatgtggccagagctaagcagttccaggccgtctactctggcacgaattgtatgtgcaaggtgcacaaattgcaagagcgaagcagctacactttccggatttatgcccataccgatcgggctggcgatggggattactcggaggaatttgtttttgaaacttcggccactctgccggcgaacataaagcctcctcgtgttgtccaagagggaagcgtatgcctaatggagctgcctggccaactgggaatgcaactaacactggagtggcagcactcaaagaactccttcaatgatcgtgtggagtacgaattgcagtatgcagttttgggcgcagctgaattggagggcgaatcattgtcgccaaaaggacgcagcagcagttccagtggcagctcaaatggagcgccaattaatttgcccaaccatgactacaggcaattgtatcgcggtccagagaccaaattcaccattgacaatctggcagctggtacatgctaccagttccgagtgtgtccagtgcggatagcggctggcggagaactgctgtacggtcagccgtccagtccgttgcgctaccaggtgcccagtgaactggatcctagctcggcgacctgtcatcaccacctgcacggctccaccgcaacaccggcgatggcctccagccagagaagcagccgaaaactgtccgccggcaatggctcaaccaacggtctgcacatgcgatcggtaagtgcgtcggcaataagtggagcgagcggcgtgggagcagatcccgtggcaattggacgactgcagcaggagctttctggtttcaatgcctgcgcagatccccagcatcaccatcatcatcatcaccaccaccaccatcagccgtgcggtggcggcgttggaggagccggtggaatatccggggcaacggactcgcaccaccagcatcagcaccacatgcaccactcacatcacatgcaccacgcccaccatccgcacaccggaatgggcggtagctcttcgaactccagctcctcaacggcggcggccatatcctccagtttggcccaggcgggaggattaaggcggatcgtttgtaaagttacttcactgtactccaaccggaggcgtcttagcgaccaacaaaaggccgtgtgcattgtggtctccttcctagtgggcactttcctggtcgccatgctcgtaaatatgttgaggggctaa

SEQ ID NO: 9354 - protein, 1424 aa, DROSOPHILA
MLSPQQYQQLHPGQGHLHPAPFISANGTSHFYTPVAGYPGPGPAGNGPPHYHLPPPPPPQQQQQQPPQQPQQQAPQGPPPPQQQQQQQQQVAPPAVQGAPSTGSVGAAQGAPATATATHTHAHSHSHSHAHSHTHPQPHAHSPHSPSPPNYRDERSQRQHNKLLRKLEKQRESNPPHSPSPRRANELNGHNNNNIPPGVPLPGHLNNHHHAVNHQGRRLPQQHQGQAHQVAQQQQSQARNGNPQHPQRAGSSVGGASSVGTSEDGEDNSSLAGDDEEEYHRENSIIEQISAIEKPEVIDVTSRAAKIIWESPAIANTVTVDMRQLRYQVLLCDSGKQCKYKSLYQGEAYECIVQDLQPGQDYLVRLQVHYQKLTGTVSDPTEFRTPPCEPDQPPPPKLVSRTKNSINLRWAAPAANGASIQHYLLEYDEGRMPGQPQKFVELAKIKAKHYVIGKLQPTTVYSFRLAAVNEAGQSPYSPVASYSTSGNPPPVPKPPQLLASSSSSLKLGWERRAQDGDFLLQLQDAETGHGFLNTYKGTELQTECLQLRRASSYQFRLRSENEAGFSPWSPEVSYRTLAERPGRPGKPHAKGKIHGTQFKARWDAPSDSGGAEILCYHLELSAAGPAFERIYSGAETEAMCERLQPGTTYALRACCEGPAGQSPYSDIGHVTTEAVPPSAPPPPHCSDPPSPYAALLKLRPPEYNGGAPILEFEAQMRRLEQVQPPQLVYRGKQTYFVAQDLTPGGMYETQVRAINRIGAGSWSQWMRFTAAAAAPGVPEELRVLVKSATHLGVSWQPPLQENGAPVTSYTLKSASQERKEDDSEEEVKEPPSSEFHNCYQGPQTCAELRNLSPYTRYHFRIQASNSAGTGNSSDVISVCTPAAVPGAPQMQGYEFTAQEVTLNWTQPAAHGSPICSYNIEYGERTIATPDACTRYTVSGLMPETGYKFRVQAVNAIGAGAFSAYAKLTTQPAPPAPPRLECSGAGHNYIKLKWGENGNGKVVNSNPSGNGGDFTKYFVEMYVARAKQFQAVYSGTNCMCKVHKLQERSSYTFRIYAHTDRAGDGDYSEEFVFETSATLPANIKPPRVVQEGSVCLMELPGQLGMQLTLEWQHSKNSFNDRVEYELQYAVLGAAELEGESLSPKGRSSSSSGSSNGAPINLPNHDYRQLYRGPETKFTIDNLAAGTCYQFRVCPVRIAAGGELLYGQPSSPLRYQVPSELDPSSATCHHHLHGSTATPAMASSQRSSRKLSAGNGSTNGLHMRSVSASAISGASGVGADPVAIGRLQQELSGFNACADPQHHHHHHHHHHHQPCGGGVGGAGGISGATDSHHQHQHHMHHSHHMHHAHHPHTGMGGSSSNSSSSTAAAISSSLAQAGGLRRIVCKVTSLYSNRRRLSDQQKAVCIVVSFLVGTFLVAMLVNMLRG

SEQ ID NO: 9355 - DNA, 3992 bp, DROSOPHILA
aaatatttatttttgcacaaagtggaaaccggattttttgttgcaaatgtgtataataggtatatgcaattgcagccacctaattacagttaattgggaatattcaagcattaaatttacttataatatgctgtgcttaattgtggagaagtaataattaacacctagttgaaggtgcagtccctcgatttttgccttaatcaccgatcattttttttttttttttagcttggttgttctaaaaatgtgatacaatgttatatacccctgttttctgtcagaaccttttataaccatcataaagatgtcgaatatattgccaaagatttatgtacatcatgagctaccgaaagtaggtagaaagacacctgatatcatagccaactccacatcacctgcaatgcaacatcatatcgatgccggtggatctggcataccaaagtgctctatggtacccagtactttttgcgggcatcacggggtgctgggtggaatggaccgagaccgggaccggcaacaggttcaacccttagccagcgaagcttttgtggtcgaaagctgcgaggacgtcagctgagagcggcgagtgctgcgggagctgcgcaggcgtcgactgcgaccgcgacggaggcggcgactgaggctgcggcggactttccgccagcggacggatttggatttggccaaaaaggcgattcagtctcagtgcgctgttgtcgctgcggtaggcgcttcgctagcatgtttttttttttttttgcattttggctaggtttttggtcttgagcattttcgaataaaacaacacctttttgctggccattttttttttcgtttgttttttgtttcgtgtgccttcctgtaatttaataatgtgcggtgtgtggtgcgcgtgctagtggtttttcctgttattggaaaatatcgaaaatgaattcgggacgggtgggcagagcgcggagtatcgaaagtggccgggtggcctgatgtcccgtcgtccgaatgtcctggccatgaatcgagcgacgaatcaacaaattaggggttgtcctggtcgcgcgcgagtgttttccacagtgtctgtgtgtgtctggtacacaggaacgattcggggatgccttttaaaggattttaaataataataagaatggaattatagcctaaatgtcattttctttatgtggttagcgtgcgtgtgtatttgtgtgtgtgtgtgaatcacctgctggtgaaaacatgacctaatttcgttcagcatcttggccagcttagtcaggaccagaacctaacccacgcttagaaaaccacccccggaaccttaaccctcgaacgcccgacgctgattgtctcacccttaacccttagtcgagcacttgcctggcttcctgcttccgcattctaattagattgcaatcatttcacaatttgattgccagccgccttgatgaaccccccacataccacttaccacttgcagtgccccccagccccacggaccacgccccccagccagtccgcccaccaaactgtcagcctgccaatctgccagtccgccgacctgccatcggaatggagcagctgtgctacctggcgctgagcgtccttctggccatcatcgtggtctacggactcctggagctccactacttcctgcgcatgtgcctctgtgttttgctcgcccggtttgtgaagaggcgatgccacatcctggacaccaccacggttaacggtgcgtacttcatgtcgattatcctcgatcctgtgtccttgaaacattaccatcctgcatttgtccagcacagaaagaataattctctaaatactcaagatggttatgaatggaacctctgagctcataaataataaatgaaatatatatttgtttatcttataaaaaaatttagatatattaatagctttaaagtaattacgtaaaagtacactgttcctgaaacgagtagactaattacgtttgagtgccatcaagatggctacagaggctatcactcatacgcagtgttggcttaactcaaatggctggttgaagtttatttaccatttgaaagcaattatttgttttagagttccaggttgccatggtactatagctattggtcgtgttattatggcttaacaataaaaatatctatgaccatgatatgatactaatgatattcatccgaagttgaagaaacgtaatccccttttaatatttcaatattttctcacacctatttaaggtctctgcctcaccaacgatgtggacactttgttgtaccacatgaacaacgctcgctacttccgcgagctggacttcgcccgcgtggacttttacgaacggaccaacctgtaccgcaccatcacgggaatgggcggttccgttttccagggggcggccaccatacgctaccgtcgcttcatccgcccctttcaccgctttaacattatttcgcgggtaagtatacaaaccataaaaaaaaacccaattcatactaagatttatttgttcaaaagcaatataaaaatatataagaaaaatatacttaaggtatcgcatttctaaacgcctatttcctttcagattatttactgggacgagcagtcactcttcatggagcaccgctttgtgcgtccatcggacaagttcgtgcactgcatcgccatctgccggcagcgggtgatcgacgtgtccatggaggcggtgatgtcggagctactgcccaggacctcctccaacggattccgggcgacggtgctgacctcgctggctgctccgtcgccggcagctggtggcataagcaatcccgcgatggacacttcgctggcggagaacggacatgggacgacgagcggtggagcggcgggcacgggtgccacggccagcgcgaccgcggcgcactgcttgaagctgaagccctcgctgccgccggagttggccaagtggatcgagtacaacgatatgtcgagcaagaatctacgcagtggctgctgactggaatcgttggagtcgccggaagcggatgcgcaaccggaaacggaaacgcccattattacatgttttttttttcttgtctcgcgtgcttgtgtgtgtgagtgtgcgtgctaaagtgtgctaatgtttaatgtctaagtgtgcacgtgaaatgtttgtattgtaagctatgtaagggtctgtaaaacaaataagaaaagcccgccctcttttggccttaactaatgtattgtataattacccagagatcagacacgcccccccgaataatgaactagaaatacaaacaaaactccttggtagtccacagtgtgtaagctatgatgtacaatgattgtttagtaaatgaacaaacctaatgtgaataatgatgagctatgtatatattcttgggctttggcgcctaaaggcaggctacactttgctaccaattaagcaattggtgcacggcttatgggtaatcttgtttacattcacgattaagccgtgctaaaacccattggtaaatattgtgtttagatacaaaatcacctgcttaggactagtgagtataccccctcttgaactttcagcagtagcccttttagattttgtatattcgggtaatttgccgtctaaaaaatgccaggtgatcgcagttcgatggctagtgtttacaccgatcggagagtagctatagctttaagcgtttacctgtgaatttgcctattacgccacaccagagattcccacacatcggcgaacggtcgttggaatcgaaatcaatcgattgcttaggtaagatggaattatctgtacaggtgagccaagaaatacggggaaaaacaagcgaaagtgggcgaagtggggacatacaaagggggtcattccagtgttgaccataactatttgagaaaagtagctaaaatacctatttaacttagctactacgctcttttgcggttaggtcgcaataactgtcgaaaagtgacatcaatccttgggtcaccagcagtataaa

SEQ ID NO: 9356 - DNA, 1169 bp, DROSOPHILA
gaatgtcctggccatgaatcgagcgacgaatcaacaaattaggggttgtcctggtcgcgcgcgagtgttttccacagtgtctgtgtgtgtctggtacacaggaacgattcggggatgccttttaaaggattttaaataataataagaatggaattatagcctaaatgtcattttctttatgtggttagcgtgcgtgtgtatttgtgtgtgtgtgtgaatcacctgctggtgaaaacatgacctaatttcgttcagcatcttggccagcttagtcaggaccagaacctaacccacgcttagaaaaccacccccggaaccttaaccctcgaacgcccgacgctgattgtctcacccttaacccttagtcgagcacttgcctggctatggagcagctgtgctacctggcgctgagcgtccttctggccatcatcgtggtctacggactcctggagctccactacttcctgcgcatgtgcctctgtgttttgctcgcccggtttgtgaagaggcgatgccacatcctggacaccaccacggttaacggtctctgcctcaccaacgatgtggacactttgttgtaccacatgaacaacgctcgctacttccgcgagctggacttcgcccgcgtggacttttacgaacggaccaacctgtaccgcaccatcacgggaatgggcggttccgttttccagggggcggccaccatacgctaccgtcgcttcatccgcccctttcaccgctttaacattatttcgcggattatttactgggacgagcagtcactcttcatggagcaccgctttgtgcgtccatcggacaagttcgtgcactgcatcgccatctgccggcagcgggtgatcgacgtgtccatggaggcggtgatgtcggagctactgcccaggacctcctccaacggattccgggcgacggtgctgacctcgctggctgctccgtcgccggcagctggtggcataagcaatcccgcgatggacacttcgctggcggagaacggacatgggacgacgagcggtggagcggcgggcacgggtgccacggccagcgcgaccgcggcgcactgcttgaagctgaagccctcgctgccgccggagttggccaagtggatcgagtacaacgatatgtcgagcaagaatctacgcagtggctgctga

SEQ ID NO: 9357 - protein, 261 aa, DROSOPHILA
MEQLCYLALSVLLAIIVVYGLLELHYFLRMCLCVLLARFVKRRCHILDTTTVNGLCLTNDVDTLLYHMNNARYFRELDFARVDFYERTNLYRTITGMGGSVFQGAATIRYRRFIRPFHRFNIISRIIYWDEQSLFMEHRFVRPSDKFVHCIAICRQRVIDVSMEAVMSELLPRTSSNGFRATVLTSLAAPSPAAGGISNPAMDTSLAENGHGTTSGGAAGTGATASATAAHCLKLKPSLPPELAKWIEYNDMSSKNLRSGC

SEQ ID NO: 9358 - DNA, 15339 bp, DROSOPHILA
taaaattccccatcggatggcattcaaagctagaaatcttaaatttttgccatttttagcataaaatcatgatgttaccccttaccaaaattgcaaaattcgacaaaaaatgtatatgttcaaatctgcagtaaaatggcagaatttattaattgggatcattagctgcataaatacgtaatttttatggcattgtgtcgatattcaagaaagttatgatgaaatcccctccgtaaaatatgcatttttgccaaatctcaatattctgcttaaaaataatcagttttttattcacaaaatttaaaaaaataatctaaacatagaatgccatacctcgtcggactcgtaataaaattccccatcggatggcattcaaagctagaaatcttaaatttttgccatttttcgcaaaaaatcatgatgttaccccttaccaaaattgcaaaattcaacaaaaaatttatatgttgaaatcagcaggtaaatggcagaatttattagttgggatcataagctgcataaataggtaatttttatggcattgagtcgatattcaagaaagttatgatgaaaaacccttcgaatttgagcaaatccaaataatgtttactttttcccagggaatttgatgccattatggaagctttgcgtttgacacaccgactttaatgcaacaatttttttttaccaagccaacagagacaacaaatcatacaaacatgtgcacaacaattgaaatttatttaaaaataaattaaattttccttccatcatttcgttttattttataaaattcttacacaaggattacatatagagaatgcgcgacattcgcacgaaccgcctctaagtgtgcatgtgtacgtgtgttcgcaggacacccatgttttccagtcgctgctagtaagtaagtatgattgaatctttagtttgttttacaccggaatttcgaatggttcatctaggctgcaaattgtggaaattttcgtgtctgggattcttatctgggtagcgagcagatctcgcaggacgttagctcgccgcggttgatgaaggtgcagtggttgcatgtccaggtgttggcgtccaagtccattgcctccgatccagaagctccggcactggccgaagctccaccactgggatagctggtggttccactgtaatggaataatcagcaattaggaatatttcacggtaagattaagttttgggtgaggaaggccactcacccactgccgccggaactggcctggataagcgactcgagcagcttccacacatccacgaccttgaactgggcggcctggttggggttcttggtgcgaactgcctccagcagcggacccatgtgctgtcgcagcggcagcatgtccatcttgtacaggtagaccagcaggtggaaatcggagatggcctccaggaactcctcctcgccccaggcggacagatagcagctgagtgcattgaaatcctgcaggtggccatcgatgtagcggttctcgatggggaatggctggcgcttgtcgtactcggtgaaggtgtaaatgggttgcagcggtgtggatgcgggcacgtccaccagcaaatactccacgggcagggggcgagccagccgctgcacctcgttgccgtacagatccttctcctggagggggcgagaaatcaagagggaacggcgggttataagtggatttaccaagataagcccagtcagacttggcccagtgacctacattagatatgggccacaaagcaaggcaaaaaacgtttgctgacgtctgatttgctctttgctccttttaccccacattctgttctgtttctctccctctctatatctctctctctgtataaaagctcgttggcgagcaacctgttagctcggcaatgaccttgcccacatccatcaaggccggcggtacggttctcgtctttggtcttggacgcagagcagagggtcgccagatgagacggcatggcattcactgagccagcaaagccagcaaagccactgcatccctgaaactatgctgctaaaatgaaaactcgttccggcattcccctgacttctgaaaggtcacaggtctatagtttatgctagttatgagagcacattcagtttatttcgattttaattggcaaccacatgtcgaaatgcatgagtgattatctctacgcatttgcagtctatttttggttaatgatcgaattctttagtagcgagaaatgatgatgaaatcgaaaaaaggccgacggattttgaggttgaggcgcgacgtgccacgcccccattgcctttatagctttagttccgcgacaaacgcaattaagctggctgactgtgcatgtcgtgggatggcgaataggggagaacgggggcgttacagaggcgtcatcatgacaacaatttcttcccacccagcagcagtgcatccgattggaatgacattgctcacacttcctgaacatgcataagttaattagctacgttatccagaaagtgcacacctaacgcagtttgcagttggtggaatatctgatggaacagatggaccaacaaaatcaatggacgtacataatagaggttgagcaggatttcggacgaggtccttctgctgctttaacgatgttaaactttcagagccactcaaaatgtgttgcattacgaatttccgcttccgtttgcgtcagcggtggcaaattaaatttgcagctaaagttgggttacagccaagtgcctcattcgacaaaatgctgcagtggcatacttgtcaatcttttgtcaattaacaacccgaaggcaggacaattgaatgtgggttgaaatcggattggttttttgagacaatgccaaattacacgacctccaagccaaagccactggagtttgtcatcagattgtttgcaagatgtcatacaagcaattacaaaataattgatcatatagaatctattgtgcgaaggaataacaaaaggtacacacgacttgtgtgctttaaactgactcaatatgtggaagtttaattcgaatgccctataaaacaatatcgcaagctagcagagtgcgatatttagtaataataagactttaataattcgttgtcttgtcgaaatataataccacatgtatataggtcactttaccatttataagcttgtgtaacaatgttggagtagcgagaagtaacagagtaaggtatgcaaaaatatttgcatgccctgtgaagcaagaaaagacacccaaacgagaggaaaaacagtttgacattgacattggaaggagccaaaaagagagagaaccgcagccaggacatcgagagctttgcaagctctctcctcctagcggtataaaagccacttcctggcgagtcgagactgcatttgccaacaaatcgcgaaaggggcaggacgagcccaactaagagtagcggtgatagtcgaacggcacgcgtttcatcctcggttatttgtattccgaatatacccatgtagtttttcttatgttggctaacatgcctggcctgaaggagcagccccatccgatgcgtagactcattagacagctatcaaaccatgttctggacggcggtagcctcctccacactctcgtccaacagtgccgagagctcggcgggattggccagtgcggcgcccagttaccagcagcagcacacgaagccatcgccgctgagagcctccgccagcagttggcagcttagtaatgcagcattcaagtcgcgcctgcaacagcaacagctactgcaccagcaccagcaacagatacagcagcagcagcacgagcagcagcaacaggagcagcagcagcaacaggagcagcagcagcagcagcagcagcacgagggcgcatctcatcaggaagtgcaaccgaatagggaggaaagacgggtggtggggcaaaagaccaaacttcagacagcaaatatcaaaaaaaaaatcagtcccaagagtgagagtaaaatattcaaagctttcacctcctgcaagtgcacccaaaagtaggagtagcatcacgtgcaagtgtacaaatgactcaacaataacaaccgaaccacaaatcgaaactgatatgaaatattttttgatgcattttcaaggtagaaacattgagacattgatgaaaatacaaaccaaaggcactataataacaagtaaaaacgttcaagttcctgtgcatttttaagtgaaacaaagtaacattaaatccatgtaatgtgcgcaagttttaaggaataaaacataactctcatggtaagatttgcatattctgggtctgaattatattctctaaacaaatatatgaaagcatatccattactatatattcgcttttaaaagatggctcccatattgcctttgattactcacagacctctgcggttttccttaatccgcaaatttattatcatatctcaacggaagcatatttgtcagatactcgccacatttcatttcgcatccatcaaagttttgctttgattagcacatgatttgacatgctgaaggttaatttgcatgattgaagtcggccagaaaggctttttggccggcggggcaaaggccatcaatcaaaaaaggacgatttccgcccaaaatatgttaattatttgtcaactctgcgcgcaacactcgtatgtaggatgtatggaaactgaagaaaatctactaaaaatctacacatttaaattaatgttttgctagtcaaggaggagatgtaaagatatatcttccttatatcttcccatacctcttccttaccactttgaacgaactttcggaaatcaatttgcttgctctatttgattatctttagtattccttagtttttctacaacttttgctgttttataacatcattataattggttctttgaaatgtgctgcgacataagtaactcaacacccttaaagttaaaatgcattagttatttttaggaagccaaagaaagtgaaaagttggcattgaatcgatgggaaacattttcaaggcaagactgtcagtaatcgcacagccccttattgccacttggctgaaaaatatgaattgcacactttaccatatggctgggaaattctcagcacgtttgcactgtcattaaagtggagaaaccaattatcgtccaggccctagtccgcttatggcaattagcaaaggggaatttgcggtttagtctgtccaggaatagaggagacctcctccatgctcctcctccagccacatcctgccacccgcctgcacatcgaaggtgacacacaggcacgcaataaatttttattgcccaggcataaaacgaaaagccagcacaatgtccaatgggccagaccaacgcccagcggcactgacaatgagtccaaggagaaggaagtgggccaaacggaggcgaaccaggccgcaaattgcttatcgattcgcagatttgccttcaccgattttttatgattttaagccgaatactcggcccgaattcgctgacgcagttgtgaaaattgattaaacgaacggaggcatggaaaattctcagttattcagtgcgtttcgcacatatgattcgctgcaaatgattttcccggaataccatcaatgggccaaactttgactaaggaatatttttcaccgagaattcattaagaccactgtagcaacagttgcattaaacatcaaccaggtgttttatctgccgtggaaaagttttaatttcgttggggaattgcatgtgttaagcgagaggcttcaacaagtggcaaacataagtgtattcccacgtatgtacatatatttcacctcagacaaatggcgattttggaaaaatccccaaggcaaaacacgacacacatggaattgttcaagaggcctctttataaatgtatgttggcaattttaataaataaatcggatttgtttcaaagctaaagagttaacaaacatcacaagttcagacgcccacggaagtagtataaataacttttctaaagcccagtaatcattttgactatttatacccaatattattgcacttaatcaacaatttagtccaattttacaccattgacctttgatagttaataggtttgcgcaaaagttatccaattaagtcaggcttacacaaacgaagaaaagaataaagggacaattgctgactttagcccagcaaatagaatttgggagcaacatttgtcagacgcacagtttccctaattagttcattcaaggtgtcaactgcggcttgatgggtgtaaacgtggctaaatgtgagttaagcctgaataatactgacggacgtggagcggttaatttattgcggacttggtgccaactgaaatctgtcattgtcttccacttgctctactttcccccagttcaaaatagaaggcaacgcacaactgcggcatcaacaattgtcatgaataaagggcgaaacatttttacgccaaattgtcaacttaacttcccgtctagtaaacaattaccgaaacgaatttcgcgcacattttgtgcatttttattctaaacacagcactccagcaggacataaatatgaatttgtgcgtcagtctgctacggcatttgttttttcctgttcaaaattcgcttcgctggcggaaagtgcgaaaaaaaaggcagacgaccccaaaaagtaggcaatgttttatgtgtgaacgcataaggaagttcctgctgtaattgctggggccagccgaattcgcaggcagcttaaggaatttgcataattttgagagaaagggggaaagtaaatggcaggcgaatgtgaaagtgaaagacaaacatacaaccaagagtgaataataaacagaaaccaaaataagcgtaagaaatgccagaaacgtgttcctcgccgtccaatggcatggaaggaaatagaactctagatgggcaaggaaacctaaacgtttgaagccttcaccttggacaggtgtattgtaacacaatgagggaaaatgaggacaacaaatagcacgaaaggtcacttcagaactcattttgcaaacaatgtttgccagttggttattgtttgttttgtacgccgtacaaattgcacagaaaatgggggctttaattcaacgtgtgatttgacattttgtactcggctccatattaataggctcacatttttcataacatatgacacgtagttaaagtaatatttcacacacttcttacatatgtatgctcatttaagtgcatataagcagactaaaataaagttcccttgctgacccaataaaaccactcatttgtgcaaaatctggttaagcagcagtcgcacttacctctatggaatattaattaatttgtttagccccagttcaagccaacatattcaacataaatagagcaaagttttggcttttggtcaacacgttgtccgaatgcgatgccatttcctctggcaactggccagagttttgtgtgttgccaaggccaaattgatgtgacccccgccgaaccgcttgttacttattaaattggggtttctactgttggaagtcccacgccaaacaaagtttgattacacagcttagaacaaagtcgcaatagctgccacacggcaaaaactttctcaaggggtcgcacaaagaattaggccctagtcttagtagcaactttgatttcttattttttttttttgttcggaggggaaggtgtaagcggaaggttaatcacaggacagcacaagtataaacaatttgaaaatttacaaagttttttgcggattaaaaatcaagagtcaaagtaggaaattcagagagatgtttccgacaaaactgtgactcaatgatgagacatacaagtcaaataatttaaagtctctttcaacttttaacgagtgtaggtaggtgaaaaggccttatttatttatttgccaaaacaggaacttttcaattacgtttagtttgcttatttatttatggcgctcaagatgctcaattaagtgcaaacaaagttggagacatctgtgggtgatttgtgcaagacagcaaattaaactgggttccctaatttgtaactttatatatacagatttctccttttgaaaatgattaacccaacatgatcagagtacgtcggcttaataagtttgtaaatttcattggtgttatacctatgtatttttgtttaaattttatactttttagtactgacaaaaatggagtccatccaggtgccaaaggagctgaaatcgctgctgagctgcggtctatgccatcgcccgtacgatctggccaccggccttctgccccaggagctcgcctgccggcacagcttctgcaagaagtgcgtgcaaagaaacaccgaccacaactcgtccgagtgtatttgcaatttgtgcggatatcgcacgcagctggatggccagcagctaccgcaatccgtaaccatcatgtatctgctccgtgagctgccagctttgattctgggcagagccatgttggatttttcgtacaaaaggagcagcactattgaaatgtctattgaagaagcacccagcagcccatcgaaaaactgggtggaagacatcaacgtggagagctttctggccaccagtgcggagcactgtttcatccatgccatgccgaactccacgtggtgtcacaattgccaacgtctgctgtgccgtgcctgctcggatgtcccattgcaccaggaccatatcctggtgcgccaggttgattaccatgaccttatcagccaactgctcaactccgagttgaggaagatcaagagcacggctgtccatgccaaagagttggccacccacgaaatggatctactacgcgagctgtgcgaggcgtgctaccgcgttcagttgcatgtgaagcgtgagatgctggaacaccattctagcatggttgcggcctcgatgatcggttggcatcgactagccgagcgggatctgcatcgagtcggtagacttactggagcaaaaatgctgcaggtgctcgcccacttggccacacagcggcagcgatacgagcgccagttggaccaggtgcactttcaatgtcgaatgcaagccgcaattcaggagaacgggatgcaggtcctggactttgagactctgaataacaggatcgcacggctacgcagtcatcgtcggcccggtgctattcccgccaatgtggggccaccgcaggcgctcatcctcaccaactactgtgtgtacgcctactggtgcgagatgcagcgcgaaatgattcctccacgccacaggaatctgacaccggatccagaattactgccggaaccgcggcgagctgtggtgcctccgcatttcaataatagcctgcgggaggtggaacttctggattatgtgcagcagatcgaactcgagcagtttcgaacgctcagtcaacctccgtatgatggttcacacgaatcctcctcgtcgccgaacagcagcagcagtacaaacagccaaagcaattatattgctctagacacggaatatggacttcgagaattggtgcgccagttgcaacagcagccgcagcaagtgcaacaggaacagcagcagcagcagcagcaagtacaccagcttacccactcaatttaccagccagatgcgattctcgtcaactcggtggagccgcagctaattggtcaacaaagccatgatcatcatcgacaggatggcggtacgagttcatcggtaagcattgtgcgtcagcccatcgttcactgttaccccatctactttctggacatggaaatagcaggagaactggccggacgggtcctaatcgaggtgcgatctgatgctgctccccggatggcggacaactttggggcgctggtgcggcacgagcggggctatggctatcgtggctgcactgtctttcaggcctggggaggcgagagcatcatcaccggcgactttgaatcgcagaacggacgcggtgggcactcggcctttgagagcagatactttttgccagacgaaacgggattgccggcacatcggggaacggttggtatgcgcaggggacagcggcgacaggacagaagtggatttgtgggcagccaatttcggctggtgctaaacgagatgcgatccttcaccgccattttcggattcattgtccagggcattgagctggtggaccgaattgcggccagtggcaatgctctaggacgcccggcccttaggagcattatccggaattgtggggaatatcatttaaaccaataataagtccgactgatccattagctaatcctacttatcgaacagtatcaaaccgaaagctcctaaacactttgaatgtacaacaccacccaatatctattttattcttggaatgcaaatcttggtataaattttgtaaaaataaacgatcaatgtaagacacttgaaactcgacattttcagcaacagaagccaatttttttaacaaagaaagaaagaatttttataaacaatttacaacttattgaaacgttttggatgctattttaaataaaaaaaagactatcaatgatctataaacatttcagattcatggacaaggtggaaattgtaacagaccttgagtatttaaataagtttagcttaaggaaaacgacactaaatgtgcgttggagcgctacgacgatacctggatatagtaaattagctacaataaaaacttaaaaatttgaaaccacgagtaaggtgaaatccaaatacatagctgacatgtaattaatgtcaattcaagttaataattaatatgaaataaacctattagcaataagtaaataaacgagatagttttcggtgtctaaatatgcatttgatgtgatcataactaaggctatgtttgtgatggatgaaataatgaacgccaagaatagccatccataaaaataagggaatcaagtaataatatgaccttagcgatgtaaaggaaggcaaagaatctttttaggaacaaatcgaaatcaattttacgaaatttgtagacttattatactttaaattattttaagtaatcaatcaatcaacgattaacttcaattgaaaagaaaaaaatcaaatcgaaatcttatattttccaaaataataaaaacgcgtatcacaattaagcattagatagaacaaaacagtttggcaaaataaaaataaataaaaaaaaataagggtaataactggaaaattgtgattggcttggcagttgctcagaaagttattttaacaattgaatatgcgctaaataacaacattgtttatgaatgtcctaggtataggaaaaataaaatgaacgtttgaaggagaacccagagcaatgatgagaagtacaaaccgagaaggataaggaaaataatgaagttgttccataaataaatcaacgtaatccaagataatgtaagcctctagatgtcaaatgtttgaattggcgttgctcttgacacccaaattttctttgcatgtatcaaactgaaaaaccaaatcccattcgtattgatgtctaaatatggaagttgtttgtgtaaatgtgtgaacgtaattcaataaaggttgcccgataactgattttgcttgaatgggggggagactttctaacttaccttatagaaaacgtcgggaacatactgcttgtccgtggattcacgcacgtagcccagctcgggcgcatccttagtgggtatcagacaattatcgcgcaccagagccatgcactgagccgaaaccgcatagccttccatgtgcacttgtttggttttatctcctgtaatgttaaaaactattttggtactagttcattaagcagtattaaatcgtgaatcttacctgttacacaaatggtcacaaacttagagccgaagacgccattggaggcatatttacacggatttggatgtcgattctgcagctcgccagctgtgatgcactcctgggccgtaataaagtgcgactcgatgccacggatctgtttgacagtgccgatactcgcatcgtccgtgatgagatcagtgaaaatccaaccaatctataaatgtcacaaaagtcaatactaatgctacatagctactgtctataactaactaaccttcttcagtcccagcgcactggctacggcatccacatcgtcggcgaactcatccggctgaatattgatcgaatccctggtagactcttgtggcggctcataaatggcagccaccttggcccgaatgcccaacggaacatcagtgtgctgctcgtacgtcccatacagatatcccatgcgctggtgtcctgtggtgcgccagtagttgaggaagcgctccacgatcttagtgttctcgaacatgacgttgtccacgtggcgatatgtctgacgattcagcgtaatggccgacggctggcacttggagcagatgcccttgggccatggtggatgctcgcgacatcccggcttgatgcggcaattgatgtcgtcgaagacaaagtacttgccctgatccatgccggatgtctgctttcgtatgtacgagtggaaggacaagtgcttgatattgtgctccttcagataggactcatcatagggctccagtgcggagcagtgaacgcaacggccgttggcattgtggtggcacctacaaaaagttataggttgatcagtttaattttacaattaattgtataatcaaggcctacagcttgctatcacgttcgcgcttaatggtgccatcagccttgctcagagcctggtccacgtcatcttcgatcacattgaaggatggacgagcgctgtttggattgctaatggtgctagtcttgaacgcctgactgtccaggacagtggtgctagtgcgctgagaagtggtgaaaaatgcaggttagtccccgatcgttctgctctatatgatcaacttacgcgcgatgatgtgccagccatctgttttaagtagaccatgtcgccatgcctcaaggaagtccccaccagctgggagccacttgcctgcagctctgtgaggaagttgcgctccttgaagagaccaaatccatccaccttcagggcattctgaacgctgtcgtacagatgctttagatttgacttgggcgagatctcgatgcgtttgatgccctccgccgactgaacgcgaattagctggaattaacaaatgaataacagattctaattagtactaggacaggtgaatttggcaatttctgatccaaccgattgtttacataacacaaacagacgatggcgcacaaaggcgtaggcgaaattgcgcttcttgtagatgaattgctcgagcagcagtggtgcacaggccattttctggactttctggacgggtcactgggtgatgggcggttgggtgggctcttgtgtgggcggtggtgggtggtagattgggtaagggggattgtcaagtgtagctattagctaccaaagcctgtagggctttttgcttagtgtttcgaactgtacgtcatgaaggcgcgaacttgactgcggaaatttatctggcatcgcaattaaaaacaaatgcaattcgttgccaaaatgagtgcatagttaaaaagagaactaatgcctgtatatgtaaattcggatctgtaattgtatgagctttaaataaaaaataaaacagcattttgaaagacaagctgcatgcagttttaaaacaaaaaaattatattaaatttgtatttaaaattttaagttgtgctatttactggtatgtgcagttttcttattttacaaaacatatatttcaaaaattaattttacgcagagacatttttctgagtgtagcaccctatcaaccagaaattgctttattagacagaaatatcctcaaatgcatttcccccaggcggattgcagccaacaattgttaataatttatttggtttttggatcggtttttggtctcaaaacccccgcacactcccctcagtcctactgccgcctagactgcactctttcagtggaaaatctacaagtcatggtaccattcaatttcaccgccagcacctttggccgcatttcgggacttgcagtggatttgcactgccgggagtgcttccaaatgggttcattatgcattatatgcttcgcttttgccggctgaaatgcactttaaatatattttccatacatttaggcaacaacaacaaacgccagcgaactggaaaaccgacattgtttgccggcttttttggtgggtagctatagggaaacacttgaccaatttcactgcacacacttcaccaataagacattcgcttagtttccaccctaaatgcactttttaattttttatcaacaatttacttacaattttgtcatttggcattgtaattttgtctctgtctctgtcgcacagctgtggggatggcgatagtctgcccagaggtggagaaaaatcgattactcccggatatcgatgtctctatgatcggtttcttgtcaatttaaagcgattgttaaccaatcccaattaatcgaaaggtgaggcgggctattttaaaaaagggaaattatctattagcttcaggtagactttgtgcacatttattaatatagcggcgtgttattctacaattagacaacaataaaccaatcgcattctagtggaagacagcgtatgaaagcagtgggggtgatccctccatcggacttcagtcgtacttgaggttgcccatgcaaatgtacttgatgtccacatagtcgtcgataccgtgtttggaaccctcccgtccgacaccggactccttgacgccaccaaacggagcctctgctgcggagatgatgccttcgttgacgccgaccatgccaacctccagtcgcttggccacccggaacacctgctgcagattctcgctgtagaagtaaccggccaggcctctcctggtgtcgtttgccttctttaccgcttcttcttcgtctcggaaccgtatgatggagaccactggaccaaagacctcctccgagtagagttgcgccgagggtggcacatctgtgacaattgtgggtgcgtagaaaagggatcccttgtcgggcaacggctgtccgcccagaataatgttcgccttcttcgacctggcgtcctccacaaagccactgactttgttgaactgcatctcgttgatcagtggtccgatttgcacatcgcaaccctgaccatctccgatcttcaaagcttccacgcgttttttcagctgcccaacaaacttatcgtagacgctgtcctggacaaagaatctattggcggagacgcaggtctgtccgcaattcctaaacttcgaggccatggcgccatccactgctttttcaatgtccgccgaatcgaagacaatgaacggagcattgccgccg

SEQ ID NO: 9359 - DNA, 3219 bp, DROSOPHILA
cagagacagagacaaaattacaatgccaaatgacaaaattacgtacagttcgaaacactaagcaaaaagccctacaggctttggtagctaatagctacacttgacaatcccccttacccaatctaccacccaccaccgcccacacaagagcccacccaaccgcccatcacccagtgacccgtccagaaagtccagaaaatggcctgtgcaccactgctgctcgagcaattcatctacaagaagcgcaatttcgcctacgcctttgtgcgccatcgtctgtttgtgttatgtaaacaatcgctaattcgcgttcagtcggcggagggcatcaaacgcatcgagatctcgcccaagtcaaatctaaagcatctgtacgacagcgttcagaatgccctgaaggtggatggatttggtctcttcaaggagcgcaacttcctcacagagctgcaggcaagtggctcccagctggtggggacttccttgaggcatggcgacatggtctacttaaaacagatggctggcacatcatcgcgccgcactagcaccactgtcctggacagtcaggcgttcaagactagcaccattagcaatccaaacagcgctcgtccatccttcaatgtgatcgaagatgacgtggaccaggctctgagcaaggctgatggcaccattaagcgcgaacgtgatagcaagctgtgccaccacaatgccaacggccgttgcgttcactgctccgcactggagccctatgatgagtcctatctgaaggagcacaatatcaagcacttgtccttccactcgtacatacgaaagcagacatccggcatggatcagggcaagtactttgtcttcgacgacatcaattgccgcatcaagccgggatgtcgcgagcatccaccatggcccaagggcatctgctccaagtgccagccgtcggccattacgctgaatcgtcagacatatcgccacgtggacaacgtcatgttcgagaacactaagatcgtggagcgcttcctcaactactggcgcaccacaggacaccagcgcatgggatatctgtatgggacgtacgagcagcacactgatgttccgttgggcattcgggccaaggtggctgccatttatgagccgccacaagagtctaccagggattcgatcaatattcagccggatgagttcgccgacgatgtggatgccgtagccagtgcgctgggactgaagaagattggttggattttcactgatctcatcacggacgatgcgagtatcggcactgtcaaacagatccgtggcatcgagtcgcactttattacggcccaggagtgcatcacagctggcgagctgcagaatcgacatccaaatccgtgtaaatatgcctccaatggcgtcttcggctctaagtttgtgaccatttgtgtaacaggagataaaaccaaacaagtgcacatggaaggctatgcggtttcggctcagtgcatggctctggtgcgcgataattgtctgatacccactaaggatgcgcccgagctgggctacgtgcgtgaatccacggacaagcaggccgggcgtcctagagcattgccactggccgcaattcggtccaccagctcaatgccctggacaatgaatccgaaaatggcggtgaaggatcgcatctcgtttagcaccagccgaaattggctgcccacaaatccacttctgtcctgtcgccgctgtcccctgcgcataccaaccgttccccgatgtgccggcaatcccgtttcgtctggcaaaaagtatctgctctcaaaggccgagtgcccaccgcgtccgttctgcgattcaaagtcgccgagtctcaaagtccaggacctgcatcccgttctcctgaattgcggcttgcattcgacattgaaagtgcacctggtccaactggcgctcgtatcgctgccgctgtgtggccaagtgggcgagcacctgcagcatttttgctccattgagcagttggctgataaggtcatggtaatcaacctggcgcaccaggatatggtcctggtgcaatgggacatccgagcaggcacggcacagcagacgttggcaattgtgacaccacgtggagttcggcatggcatggatgaaacagtgctccgcactggtggccagaaagctctccacgttgatgtcttccacccagtttttcgatgggctgctggaatcaaagctggcagctcacggagcagatacatgatggttacggattgcggtagctgctggccatccagctgcgtgcgatatccgcacaaattgcaaatacactcggacgagttgtggtcggtgtttctttgcacgcacttcttgcagaagctgtgccggcaggcgagctcctggggcagaaggccggtggccagatcgtacgggcgatggcatagaccgcagctcagcagcgatttcagctcctttggcacctggatggactccatttttgcaaatctgcgaatcgataagcaatttgcggcctggttcgcctccgtttggcccacttccttctccttggactcattgtcagtgccgctgggcgttggtctggcccattggacattgcgcgacttgaatgctgcattactaagctgccaactgctggcggaggctctcagcggcgatggcttcgagaaggatctgtacggcaacgaggtgcagcggctggctcgccccctgcccgtggagtatttgctggtggacgtgcccgcatccacaccgctgcaacccatttacaccttcaccgagtacgacaagcgccagccattccccatcgagaaccgctacatcgatggccacctgcaggatttcaatgcactcagctgctatctgtccgcctggggcgaggaggagttcctggaggccatctccgatttccacctgctggtctacctgtacaagatggacatgctgccgctgcgacagcacatgggtccgctgctggaggcagttcgcaccaagaaccccaaccaggccgcccagttcaaggtcgtggatgtgtggaagctgctcgagtcgcttatccaggccagttccggcggcagtggtggaaccaccagctatcccagtggtggagcttcggccagtgccggagcttctggatcggaggcaatggacttggacgccaacacctggacatgcaaccactgcaccttcatcaaccgcggcgagctaacgtcctgcgagatctgctcgctacccagataa

SEQ ID NO: 9360 - protein, 1006 aa, DROSOPHILA
MACAPLLLEQFIYKKRNFAYAFVRHRLFVLCKQSLIRVQSAEGIKRIEISPKSNLKHLYDSVQNALKVDGFGLFKERNFLTELQASGSQLVGTSLRHGDMVYLKQMAGTSSRRTSTTVLDSQAFKTSTISNPNSARPSFNVIEDDVDQALSKADGTIKRERDSKLCHHNANGRCVHCSALEPYDESYLKEHNIKHLSFHSYIRKQTSGMDQGKYFVFDDINCRIKPGCREHPPWPKGICSKCQPSAITLNRQTYRHVDNVMFENTKIVERFLNYWRTTGHQRMGYLYGTYEQHTDVPLGIRAKVAAIYEPPQESTRDSINIQPDEFADDVDAVASALGLKKIGWIFTDLITDDASIGTVKQIRGIESHFITAQECITAGELQNRHPNPCKYASNGVFGSKFVTICVTGDKTKQVHMEGYAVSAQCMALVRDNCLIPTKDAPELGYVRESTDKQAGRPRALPLAAIRSTSSMPWTMNPKMAVKDRISFSTSRNWLPTNPLLSCRRCPLRIPTVPRCAGNPVSSGKKYLLSKAECPPRPFCDSKSPSLKVQDLHPVLLNCGLHSTLKVHLVQLALVSLPLCGQVGEHLQHFCSIEQLADKVMVINLAHQDMVLVQWDIRAGTAQQTLAIVTPRGVRHGMDETVLRTGGQKALHVDVFHPVFRWAAGIKAGSSRSRYMMVTDCGSCWPSSCVRYPHKLQIHSDELWSVFLCTHFLQKLCRQASSWGRRPVARSYGRWHRPQLSSDFSSFGTWMDSIFANLRIDKQFAAWFASVWPTSFSLDSLSVPLGVGLAHWTLRDLNAALLSCQLLAEALSGDGFEKDLYGNEVQRLARPLPVEYLLVDVPASTPLQPIYTFTEYDKRQPFPIENRYIDGHLQDFNALSCYLSAWGEEEFLEAISDFHLLVYLYKMDMLPLRQHMGPLLEAVRTKNPNQAAQFKVVDVWKLLESLIQASSGGSGGTTSYPSGGASASAGASGSEAMDLDANTWTCNHCTFINRGELTSCEICSLPR

SEQ ID NO: 9361 - DNA, 6634 bp, DROSOPHILA
tcttttgttctccttttttttatttctgttgtattcgagcaaaaaccgcaaaaaaaactcattaactttgacccatattttttcgtatattcatagttgatgatcatcccaaaagaaccgaggggagacacgctttaaagtgtacaaattgcacaactcacataaggccaactttggtcatgcaaaatcgcgaaattagtgtaattttagcgaaaacagtttgctacagttttacaccgattggtgggccaaattatcaataatcagttaggccactttggtaatttttagataatatatgtagcatgcgggcgtggctaattgcccatatccggaaaagcaatttatttaataatcggttgggaaaaccgttatagtctgaaataagttcagagcattttaaataagcatacccttaataaatggagacatattttaaaacaaaattgaattaacttatcttaggcatagctatatttggtgaactatactgaaaataccattacctggaaaacgtacatctttccaaattaagacgtttaaaaagaaaaactgctctcagtgcgtatgctaaaccagtacattttaaatgtacgcgctttgttgtcctctaacaaaagcttacgagtataaaaccatgcaggaacaaaacaaaatgctaactgttgtgaaactttctgggaccctaaaatactagtgactataaagctgtgttgtcaatttagatttttaattatatagctattttttaaggtttttaatagacttcgaccttattacctataacatgaggattgtcttaatgttcccttatgatttaagattaaattgaattaaaatatattctttatgtgaaacgattgcttccattcaattgagcatcccttgttcatacttcgtatgcgttttaaaaaatactgttagagtggtggtattttttcaactcagtgaacgcagccccactgaaaacgtttaatttgttgttccttgaacttatacgggtttagttcctaaatgttactagttagtagttcctaaaaaatcgatgcaatgcacctagacgaaagtcaaaggaatttagtgcgcgaagaagtcgcgtaaattgtctgcttccgttttgcgaaagataagaaaacgaaagtcaataggttgttatcagtttgtttttagtcgtcggcctgttctttagcgagatatttttagccagcgtgtataagttgacgtggaattcgattcgttcagtcaaataagaatggatggttcaaagaaaacgctgctcattaaagtaaaaattagattgaaaccaactgaatgctgaacttgataattaagtgcaattttgaataccttccagataagcgcgaacggcacttcgcatttctacactccggtggcgggctatcctggcccaggacctgcgggcaatggtccaccacactatcacttgccgccaccaccgccgccgcaacagcagcagcagcagccaccacaacaaccacagcagcaggcgccacaaggaccaccaccgccacagcaacaacaacaacagcagcagcaggtggcaccacctgcggtccaaggagcaccaagcactggaagtgtaggagctgcccaaggagcaccagccactgcgacagccacccatacacacgcccattcgcactcccactcacacgcccactcgcacacacatccccagccacatgcacattccccgcactcgccatcgccgcccaattatcgggatgaacgcagccagcggcagcacaacaagctgctccggaagctggagaagcagcgggagtcaagtgagtatcatgcggcgaaagcatgccacgtattcacgtattgtattaatatatacttcactgtcctacagatcccccgcattcgccatctccacgtcgtgccaacgaactgaatggtcacaataataacaacattcctccgggtgtgcccctgcccggtcacctcaataaccaccatcatgcagtgaaccatcaaggacgtcgcctgccgcagcagcaccaagggcaggcccatcaggtggcacagcagcaacagtcgcaggccaggaacgggaatccgcagcatccccagagagccggcagcagtgtgggtggcgccagctccgtgggaacttccgaggatggcgaggataactccagtctggccggcgatgatgaggaggagtaccatcgcgagaacagcatcattgagcaaatctcagctattgaaaaacctgaggtaatcgatgtgacttcgcgggcggccaagataatttgggagagtccagccattgcgaatacagtgacggtggatatgcggcagctccggtaccaagtgctcctctgtgattctggaaagcagtgcaagtacaagagcttgtaccaaggcgaggcctacgagtgcattgtgcaagacctgcagccgggtcaggattacctagtccgcttgcaggtgcactaccaaaaacttacgggaacagtgagtgatcccacagaatttcggacgccaccctgtgagccagaccaaccgccgcctccgaaactggtttcccggaccaagaactccataaaccttcgatgggctgctccggcagcaaacggcgccagcatacagcactatctgctggaatacgatgagggcaggatgccgggacaaccgcaaaagtttgtggagttggccaagatcaaggccaagcactatgtcattggaaaactgcagccgactacggtctacagtttccgtttggcagcggttaatgaagcgggtcagagtccctattctccggtggccagctacagcacctccggaaatcctccgccagtgcctaaaccacctcagctgctggccagcagttccagttccctaaaactgggctgggagcggcgggctcaagatggtgacttcctgctgcaactacaagatgcagaaacaggtcatggtttcctcaatacctacaagggtacagagctgcaaacggagtgcctgcaattaaggcgggctagcagctaccaattccgtctgagatccgaaaacgaagccggtttttcaccctggtcaccggaggttagctaccgcactttagcggaacgcccgggaaggccagggaaaccgcatgccaagggaaagattcatggcactcagtttaaggcccgctgggatgcacccagcgattccggtggtgctgagatcctgtgctaccacttggagttaagtgccgctgggccagctttcgaaaggatctacagtggcgccgaaacagaagccatgtgcgaaagacttcagccgggtaccacatacgctctgcgagcctgttgcgaaggtccagctggtcagagtccgtactccgatataggacacgtcaccacggaggcggtgccaccatctgctccgcctccaccgcattgcagtgatcctccctcgccgtacgccgccctactgaagctccggcctccggaatataacggtggagctccgatcttagagttcgaagcccagatgcgtcgcctagagcaagtgcagcctccgcagttggtttaccgcggcaagcagacctactttgtggcgcaggatctgacacccggtggcatgtatgaaacccaagtaagggccattaaccggattggcgccggtagctggtcccaatggatgagatttacggcagcagctgctgctcctggagttcccgaagagttacgggttctggtgaagtcggccacccacctgggtgtcagctggcaaccgcctttacaggagaatggtgccccagtgaccagttacaccctaaaaagtgccagccaagaaagaaaggaagatgactcggaggaggaggtcaaagagccgcctagctccgaattccacaactgctatcagggaccacaaacctgcgctgaactgagaaacctttcgccctacacacgctaccatttccgcatccaggcgagcaactcagccggaacgggaaactcctccgacgtgataagtgtatgtacgccagccgcagttccaggagctcctcaaatgcagggctatgagttcaccgcccaggaggtcacactcaactggacccagccggcggcccacggctcgcccatatgctcctacaacattgagtacggggagagaactatcgccactccggacgcctgtacacgctatactgttagtggcttaatgccggaaaccggctacaagttccgtgttcaagcggtcaacgccattggtgccggagcttttagtgcctatgctaagctgaccacccaaccagctcctccggcaccacctcgcttagagtgcagcggtgctggccacaattacataaagctcaagtggggtgagaacggaaacggcaaagtggtaaactccaatccgtctggaaatggaggcgactttaccaagtactttgtggagatgtatgtggccagagctaagcagttccaggccgtctactctggcacgaattgtatgtgcaaggtgcacaaattgcaagagcgaagcagctacactttccggatttatgcccataccgatcgggctggcgatggggattactcggaggaatttgtttttgaaacttcggccactctgccggcgaacataaagcctcctcgtgttgtccaagagggaagcgtatgcctaatggagctgcctggccaactgggaatgcaactaacactggagtggcagcactcaaagaactccttcaatgatcgtgtggagtacgaattgcagtatgcagttttgggcgcagctgaattggagggcgaatcattgtcgccaaaaggacgcagcagcagttccagtggcagctcaaatggagcgccaattaatttgcccaaccatgactacaggcaattgtatcgcggtccagagaccaaattcaccattgacaatctggcagctggtacatgctaccagttccgagtgtgtccagtgcggatagcggctggcggagaactgctgtacggtcagccgtccagtccgttgcgctaccaggtgcccagtgaactggatcctagctcggcgacctgtcatcaccacctgcacggctccaccgcaacaccggcgatggcctccagccagagaagcagccgaaaactgtccgccggcaatggctcaaccaacggtctgcacatgcgatcggtaagtgcgtcggcaataagtggagcgagcggcgtgggagcagatcccgtggcaattggacgactgcagcaggagctttctggtttcaatgcctgcgcagatccccagcatcaccatcatcatcatcaccaccaccaccatcagccgtgcggtggcggcgttggaggagccggtggaatatccggggcaacggactcgcaccaccagcatcagcaccacatgcaccactcacatcacatgcaccacgcccaccatccgcacaccggaatgggcggtagctcttcgaactccagctcctcaacggcggcggccatatcctccagtttggcccaggcgggaggattaaggcggatcgtttgtaaagttacttcactgtactccaaccggaggcgtcttagcgaccaacaaaaggccgtgtgcattgtggtctccttcctagtgggcactttcctggtcgccatgctcgtaaatatgttgaggggctaaaaagatacgagattcaaacaaatggcgcccaacgtggagtaccacaggatttgaaggcaaaacgaaaggagaacagtaaaacaaaacaaaaaacaaatatgaaacactttatgtctcaaagaagtgatttaaaccattagttgtaattatgtattttttatatatttaccctaactgaatgaaacaaaatcaaattgtatattgtctaattttaaacaaaacaaacataacaggaaatcaaaaaaaaaaaaaaatggaatggaaagtggaatagagaaggagagatgagaaggcaaaaccccattaattgtattaaatgtacacaaaaccgcaacagcatacattcacacagctaaatgttaaaaatggtatttacttataatatttgttgtcacaaaacgaaagtctaatctccatatgtgctataaacaaaagagaccagccagcaaatgaaactaaaggctcactagtacttgtcaaaacctgtttcgaaatgcttatcaagcttttactttctgtgtggccccaaaaaaagttgcatttgccctcccggcaggattgtaaaattcgtgtataatacgtgtagaactagcatgtgggcgtggccccgcccgcagcgcatgatttttttacaagactttttgtaaaatgtattccaagaaaacgattgtagatagctggtcaacaaattgcaccatctaaaaacactcctaagtagctaaaaaaaagaaaaaaataaacgaatggtggaaggggggcgcttattgaggccagagggcaaatgcagaacgaataattaaacgaaaagtatgaatttattagactactagctacaagtattcagtgctgtataattgtttccccgatcgctccaatctacgcagatatatatatttatatatatatatagatatatacaaaacatagatatatgtaaaacagcagacgcttctttcattctcacaacctttttatacgagttattacacaatttattata

SEQ ID NO: 9362 - DNA, 4494 bp, DROSOPHILA
ggtttagttcctaaatgttactagttagtagttcctaaaaaatcgatgcaatgcacctagacgaaagtcaaaggaatttagtgcgcgaagaagtcgcgtaaattgtctgcttccgttttgcgaaagataagaaaacgaaagtcaataggttgttatcagtttgtttttagtcgtcggcctgttctttagcgagatatttttagccagcgtgtataagttgacgtggaattcgattcgttcagtcaaataagaatggatggttcaaagaaaacgctgctcattaaaataagcgcgaacggcacttcgcatttctacactccggtggcgggctatcctggcccaggacctgcgggcaatggtccaccacactatcacttgccgccaccaccgccgccgcaacagcagcagcagcagccaccacaacaaccacagcagcaggcgccacaaggaccaccaccgccacagcaacaacaacaacagcagcagcaggtggcaccacctgcggtccaaggagcaccaagcactggaagtgtaggagctgcccaaggagcaccagccactgcgacagccacccatacacacgcccattcgcactcccactcacacgcccactcgcacacacatccccagccacatgcacattccccgcactcgccatcgccgcccaattatcgggatgaacgcagccagcggcagcacaacaagctgctccggaagctggagaagcagcgggagtcaaatcccccgcattcgccatctccacgtcgtgccaacgaactgaatggtcacaataataacaacattcctccgggtgtgcccctgcccggtcacctcaataaccaccatcatgcagtgaaccatcaaggacgtcgcctgccgcagcagcaccaagggcaggcccatcaggtggcacagcagcaacagtcgcaggccaggaacgggaatccgcagcatccccagagagccggcagcagtgtgggtggcgccagctccgtgggaacttccgaggatggcgaggataactccagtctggccggcgatgatgaggaggagtaccatcgcgagaacagcatcattgagcaaatctcagctattgaaaaacctgaggtaatcgatgtgacttcgcgggcggccaagataatttgggagagtccagccattgcgaatacagtgacggtggatatgcggcagctccggtaccaagtgctcctctgtgattctggaaagcagtgcaagtacaagagcttgtaccaaggcgaggcctacgagtgcattgtgcaagacctgcagccgggtcaggattacctagtccgcttgcaggtgcactaccaaaaacttacgggaacagtgagtgatcccacagaatttcggacgccaccctgtgagccagaccaaccgccgcctccgaaactggtttcccggaccaagaactccataaaccttcgatgggctgctccggcagcaaacggcgccagcatacagcactatctgctggaatacgatgagggcaggatgccgggacaaccgcaaaagtttgtggagttggccaagatcaaggccaagcactatgtcattggaaaactgcagccgactacggtctacagtttccgtttggcagcggttaatgaagcgggtcagagtccctattctccggtggccagctacagcacctccggaaatcctccgccagtgcctaaaccacctcagctgctggccagcagttccagttccctaaaactgggctgggagcggcgggctcaagatggtgacttcctgctgcaactacaagatgcagaaacaggtcatggtttcctcaatacctacaagggtacagagctgcaaacggagtgcctgcaattaaggcgggctagcagctaccaattccgtctgagatccgaaaacgaagccggtttttcaccctggtcaccggaggttagctaccgcactttagcggaacgcccgggaaggccagggaaaccgcatgccaagggaaagattcatggcactcagtttaaggcccgctgggatgcacccagcgattccggtggtgctgagatcctgtgctaccacttggagttaagtgccgctgggccagctttcgaaaggatctacagtggcgccgaaacagaagccatgtgcgaaagacttcagccgggtaccacatacgctctgcgagcctgttgcgaaggtccagctggtcagagtccgtactccgatataggacacgtcaccacggaggcggtgccaccatctgctccgcctccaccgcattgcagtgatcctccctcgccgtacgccgccctactgaagctccggcctccggaatataacggtggagctccgatcttagagttcgaagcccagatgcgtcgcctagagcaagtgcagcctccgcagttggtttaccgcggcaagcagacctactttgtggcgcaggatctgacacccggtggcatgtatgaaacccaagtaagggccattaaccggattggcgccggtagctggtcccaatggatgagatttacggcagcagctgctgctcctggagttcccgaagagttacgggttctggtgaagtcggccacccacctgggtgtcagctggcaaccgcctttacaggagaatggtgccccagtgaccagttacaccctaaaaagtgccagccaagaaagaaaggaagatgactcggaggaggaggtcaaagagccgcctagctccgaattccacaactgctatcagggaccacaaacctgcgctgaactgagaaacctttcgccctacacacgctaccatttccgcatccaggcgagcaactcagccggaacgggaaactcctccgacgtgataagtgtatgtacgccagccgcagttccaggagctcctcaaatgcagggctatgagttcaccgcccaggaggtcacactcaactggacccagccggcggcccacggctcgcccatatgctcctacaacattgagtacggggagagaactatcgccactccggacgcctgtacacgctatactgttagtggcttaatgccggaaaccggctacaagttccgtgttcaagcggtcaacgccattggtgccggagcttttagtgcctatgctaagctgaccacccaaccagctcctccggcaccacctcgcttagagtgcagcggtgctggccacaattacataaagctcaagtggggtgagaacggaaacggcaaagtggtaaactccaatccgtctggaaatggaggcgactttaccaagtactttgtggagatgtatgtggccagagctaagcagttccaggccgtctactctggcacgaattgtatgtgcaaggtgcacaaattgcaagagcgaagcagctacactttccggatttatgcccataccgatcgggctggcgatggggattactcggaggaatttgtttttgaaacttcggccactctgccggcgaacataaagcctcctcgtgttgtccaagagggaagcgtatgcctaatggagctgcctggccaactgggaatgcaactaacactggagtggcagcactcaaagaactccttcaatgatcgtgtggagtacgaattgcagtatgcagttttgggcgcagctgaattggagggcgaatcattgtcgccaaaaggacgcagcagcagttccagtggcagctcaaatggagcgccaattaatttgcccaaccatgactacaggcaattgtatcgcggtccagagaccaaattcaccattgacaatctggcagctggtacatgctaccagttccgagtgtgtccagtgcggatagcggctggcggagaactgctgtacggtcagccgtccagtccgttgcgctaccaggtgcccagtgaactggatcctagctcggcgacctgtcatcaccacctgcacggctccaccgcaacaccggcgatggcctccagccagagaagcagccgaaaactgtccgccggcaatggctcaaccaacggtctgcacatgcgatcggtaagtgcgtcggcaataagtggagcgagcggcgtgggagcagatcccgtggcaattggacgactgcagcaggagctttctggtttcaatgcctgcgcagatccccagcatcaccatcatcatcatcaccaccaccaccatcagccgtgcggtggcggcgttggaggagccggtggaatatccggggcaacggactcgcaccaccagcatcagcaccacatgcaccactcacatcacatgcaccacgcccaccatccgcacaccggaatgggcggtagctcttcgaactccagctcctcaacggcggcggccatatcctccagtttggcccaggcgggaggattaaggcggatcgtttgtaaagttacttcactgtactccaaccggaggcgtcttagcgaccaacaaaaggccgtgtgcattgtggtctccttcctagtgggcactttcctggtcgccatgctcgtaaatatgttgaggggctaa

SEQ ID NO: 9363 - protein, 1413 aa, DROSOPHILA
MDGSKKTLLIKISANGTSHFYTPVAGYPGPGPAGNGPPHYHLPPPPPPQQQQQQPPQQPQQQAPQGPPPPQQQQQQQQQVAPPAVQGAPSTGSVGAAQGAPATATATHTHAHSHSHSHAHSHTHPQPHAHSPHSPSPPNYRDERSQRQHNKLLRKLEKQRESNPPHSPSPRRANELNGHNNNNIPPGVPLPGHLNNHHHAVNHQGRRLPQQHQGQAHQVAQQQQSQARNGNPQHPQRAGSSVGGASSVGTSEDGEDNSSLAGDDEEEYHRENSIIEQISAIEKPEVIDVTSRAAKIIWESPAIANTVTVDMRQLRYQVLLCDSGKQCKYKSLYQGEAYECIVQDLQPGQDYLVRLQVHYQKLTGTVSDPTEFRTPPCEPDQPPPPKLVSRTKNSINLRWAAPAANGASIQHYLLEYDEGRMPGQPQKFVELAKIKAKHYVIGKLQPTTVYSFRLAAVNEAGQSPYSPVASYSTSGNPPPVPKPPQLLASSSSSLKLGWERRAQDGDFLLQLQDAETGHGFLNTYKGTELQTECLQLRRASSYQFRLRSENEAGFSPWSPEVSYRTLAERPGRPGKPHAKGKIHGTQFKARWDAPSDSGGAEILCYHLELSAAGPAFERIYSGAETEAMCERLQPGTTYALRACCEGPAGQSPYSDIGHVTTEAVPPSAPPPPHCSDPPSPYAALLKLRPPEYNGGAPILEFEAQMRRLEQVQPPQLVYRGKQTYFVAQDLTPGGMYETQVRAINRIGAGSWSQWMRFTAAAAAPGVPEELRVLVKSATHLGVSWQPPLQENGAPVTSYTLKSASQERKEDDSEEEVKEPPSSEFHNCYQGPQTCAELRNLSPYTRYHFRIQASNSAGTGNSSDVISVCTPAAVPGAPQMQGYEFTAQEVTLNWTQPAAHGSPICSYNIEYGERTIATPDACTRYTVSGLMPETGYKFRVQAVNAIGAGAFSAYAKLTTQPAPPAPPRLECSGAGHNYIKLKWGENGNGKVVNSNPSGNGGDFTKYFVEMYVARAKQFQAVYSGTNCMCKVHKLQERSSYTFRIYAHTDRAGDGDYSEEFVFETSATLPANIKPPRVVQEGSVCLMELPGQLGMQLTLEWQHSKNSFNDRVEYELQYAVLGAAELEGESLSPKGRSSSSSGSSNGAPINLPNHDYRQLYRGPETKFTIDNLAAGTCYQFRVCPVRIAAGGELLYGQPSSPLRYQVPSELDPSSATCHHHLHGSTATPAMASSQRSSRKLSAGNGSTNGLHMRSVSASAISGASGVGADPVAIGRLQQELSGFNACADPQHHHHHHHHHHHQPCGGGVGGAGGISGATDSHHQHQHHMHHSHHMHHAHHPHTGMGGSSSNSSSSTAAAISSSLAQAGGLRRIVCKVTSLYSNRRRLSDQQKAVCIVVSFLVGTFLVAMLVNMLRG

SEQ ID NO: 9364 - DNA, 25381 bp, DROSOPHILA
tacagcatctgcactttactgataagaatgcaattccaagataaagcgcacatttgtaaatataaattgatttgagtaaacatatatggcacctaagagtatgcaatgatatatgttagttaaaaaaatatattaaatgagcttactatcatttcaaatcctcattctactttcgaagatttagaagactttatctatgcagcaatttcttggcccagattggaatctactgacacaattttggctggtgacagaactctctattcgagaatgtacccagttcgtccagcttcgtttggctccacaccacgcgatccgatgtgatctgcataaataaacaccctgctttcggtgtttcgaagtatatcccagaaaataaggttcaattttaggtattctcgtttaaatgatttactgtgacgagatgagaaaacactctcaaagttcagaacatcagcgaaagaatcggacaataaaagtcgtgaagagacgccgtcgaaatattaaattctcaatttatcagttggctaagctcgaacaatgcgactgactggcatcgaaaagggggccttggttgtttcggttttggccaggccgaataatttattgactctgccacctttcgtccaaaaatggctatccattattgcaaaaaactcgctgtgtagcttgaaatggaagaaagatctgccagttattttgataacatgcagataagatgggagctttaaagttatgaatttaaatacatatatgtgcagaaatcagattgcaggatcctcatgtaaatacacaagttataaaattgctaaattaatcataaaatgcaaatgcattttccatatagtttcactttcgcacaagccatgtttggacttgaatactactccccttgcacttgctgattatcgcataaatctgctaattgctttattggcttgcacttaaccatggttttagccgcaatctcatctccatctccatcttcgtttccaattgcagtttctttcgagtgcagagtagcaaaacaaaacagacatggatgccatcaagaagaagatgcaagcgatgaaagtcgacaaggacggagctctggagcgcgctctcgtctgcgagcaggaggcacgcgatgctaacacccgcgccgagaaggtgagtcaaccacccacttccctaaaccccagtgcactgaacaaaacaaaagtttactttcaacattaatttacttgccaaaattaccaacaccatatgataaactaatgaatcaaaagcacctcattctctaaatgaaaaagttatacaaataatttcaaacataaaacaataaaacaaaacaagtcttggcttataccaaatgaattttaaaatgtttttttattacattatttaaccacaaaatagtagttttcaatagacaagaatttgttttcggtgcaagcatgcaatgatacaatggatggctatcatgcacaacgaattgaaaagcatttaatctaacaaagagcataattgccggctttcacacaacaccataaatcttgttagcacatgcaatttttgtgtattattatgatttggttttcaaataacattggatttcattcgcttgaatccgtaggccgaggaggaggctcgccagctgcagaagaagatccagaccgttgagaacgagctggatcagacccaggaagccctgaccctggtcaccggcaagctggaggagaagaacaaggctctgcagaacgtgagtttatcttccagaaatatttaatattttaaagtatgtcctaagctatgtttaagtctagctcccaatattttcccttggttttaaaacatttttagtaatcaaataaaagtaggacttttagaaacttaattaagtaatttcatatcttttagttccttatattatatttatttatttttcattactttgccattttatatttgagttttaagcatgtttttccatttcttttgtatctcaagcaaaatgaacacccatacatatatgtgaatatatatggaaatcacttcactttcatgttattttattctggcagctcaaatttaagtttgacaaatattgaaatggatatagaaaatgccactgagcgcccccaaaactactaattagttaagtcacttaagaaaatgtttgaaacacaaggaaaacattccattaatcatttgaaaatgtagtccgacatttgtcagatttcgaatgtccagaattttaagccatttcccctgaaacttaccataagccattttagttcctaagcaaaatacgtatattttgaatgctcctgctcaatattttgaaatgcattcaaggcaagaaatacacataaatttataagaggcgtttatgaagtgacttggtgacagctggcggtttcttttgggtggggattgcttggaaaaatgggacagcggcaatttaacgccaatttcatggcagcttgaaatcggagaaattgtttgggggaaacatttattttgtgtgttctccggcattccaaaaaacatcataaatttctttttttgaatttcaaacagagcagtcagcaattgaaacgtagcacgctctctcatgctctcttttctctgggttggcaacgcctgtgcagagaggcgctatttttaaattcgttgaaaatagccagcgcaagatatcaaataacgcactgaatttttcggttggcttgccaaaaaaaaaaatggttctcgcaaaaaaatacgcgtactctctatttccctgaattagatttgtatctagaacacttttcgtagttggtccccagtgtttccaaaaagaattcgaattgcgattcgtcttttgattgccacattttaggaaagtatttcaaggacatttggcatcgtttcaaaaagatctcagcaggtaaagcgcttggaaaatttatcgctgggagtggatccacaaggtaactacttatcagacaaccatattcacatggccaaacccaaagtcccaaataaatatgacaaagcgaacggatgcctctgactaatattgaaaaataaagaaaaaacagagataagcaattaaatgaatcaaatgctgaaaatgttctccttctgggagaaggaaatctgcggaagagagtaacaaaaaaaaatgatatttctaccaccccctctttctttctctctctctctatctcgctcattgggtgggtggggatccatattggatcctatgcggatccatattgctgactcactcgcacacgtgccacacgcagagaaagagagcgagcgagagtgcgagagcgtctaatggggagcgagatagtgagtttccccatgctcatctaacggtgagcgcatggccccaaaattcaagtacaacacaaacacaacacaacgaggggccgaggaaaaagcagcagaaaagccagcagcagccgcccgctcataaatctagcaagaaaaacctaattaattcaattaattactaccaaaatcataccggcatacgttaaataaaaacccgttcggtctaattaaaatttaccaaaaatcactgctttcatttaaagcgattttaagtgaaattctagtgatttgtataattacataaaaagtgttgcggaaattgactctctctatctttctctgcaaattttcacgcgccgatgaaaattcgcaaaagatctgtattaaatcatcaataaaaatagcgaaactaacggtgcaatgaatccagctgtttgaaatccgcaacataaaagcaaaaaacacaaaactataaaacaacacgcaccgaatcacacggaaacaacaacaacaataggcattgctcataattaatatgtacgagaaaacattaaacataggaactgcgaaagttaataatgcatatgaatggcaaaaagtgagatacaacaacaaaccccaaccgacaacaacagcagcagctgcagttaaacctaaaccacaacaacaacaagttcaaaaacagaaaaatgcaacaaaagccgcgccagcaacaactacagctgcaacaacaacagcaacagtgccaccgttagccggcaacagcgttaccgttaagcaaggccccaaaatcaaatttgttggcaacgcggcgcgccgccaatcgttggcccatcaaatcaagcgagcacatcggcatttactgaccagtggcggtcaggataagcagccgcagcaaaagcgtaaacagtttatctattctttaatgcgaatttcaaattgccaaaatctacacgcgcacaccagctgcaagtgcgctagcagtcagccttggacagtgcgcatgtagttggcaatgcaaattccacatgatcagcaagaaatgcaccgttgccagcacttccaagccaattggtattttcggcatattccagactggtcacactgccccatccagcaacagctggttccagtaaaaaaaattcacgtagcaattttggccacaaattacccaaaaattaaagtaaattattgcattttgtaaatattaaggaattaacgcaacataacagtttgtaaatatacacaaaataccaattggaagcagtggtcaacacggtcaacacgaccctaaacatagtcaatcgaagaaaaacccattttaacttttcagaaaaaacacaagtgcagccgcagtcgggcaaaacagttgccaaaccgaaacagaggcagcagaaacaattgttcaaaagtgataaggcgaaggagaagtccagcaggcagcagagaaagcgagccggcaccaggagcactcgcaatccgaggacgcaatcggaatcttcgggcctgtcatcccgttggtgttccatcgaagagcagttgaacctgctggacgacctgctctactactgcgatgaggaggccgaactgtatctagcccagctgtacgaaaggttcgagacactccggcgtagcaggagttcctcgccagtgagcgatttctggagcgattccgacatggagcacgatgactccagcaccagtggcactggcagccatacagccagcaataccagtctagttcccgcctcgctgaagcgtcgtggccaccagcatcatccgcgattctcgggcactcgccgtcccaatgtgcccaatgtccaggagattctggccgcactctatcgtggcgactcaaagagcgccctgtccaatctgagaggagagacgcaaccggaggaggagcaaccacagcagcagacggaggaggtgctgccacccagcagaagcactttaagcctgcccctcagtgaatcggtgaccaattccctgggcagcaacagtcccacgcccacagacgaaagcagcgtgcaagatgagggggccagtaatccggcagcagctttaatagctgaggatgcagccccaccagcaggcacaaccacgtccaagagcaagaaaaagaagcgggagaagggtgaaaggtcagagaaatcggacaaatctgagaaatccgaccggaagaagaaatcttcaggcaagaaggaacgcagcaaacgatccaatcccatggagcaaagcagcgacagcctggccaccgatctcagtgccggggccatcgatgagggcatcgcactggccgacgacgatgacaaccaagcggcggaatggtccaagttgcgatgcaccagcgaggcggccgagattgtggcggagcgggaggctcgacggaacaagggacgttgtgcggattatccgggactcgcctttggcagatccatcttcagttcggacaccatgatgaagttcaacatcatccgcaacgagctgcacaacatcatgaacacacaactcaaacgggtaattaatggtcgagagacttggagttgtttgcacattccttactaatctatatattcttcaaattaagcgaagaagccaccttgttgtcgttgctgttgtgctgcgaaaaggggactccaaagtttggttaggtttttttttagcaattgctccaatttgttgctgtcgtttttcgcattgcaaaacgattacgtcgtcgtcttcgtcttttcgcgattttcttgttgtgccttaacccttggctggccccagggtctttactcggccctcgtgtattcttttcgccataggtaaagattaagctgcggtatttcttgacccacatcgttcaaatcacttatttctctcacctttcactaggcagaatcgatttgcttatgaatgttgtttgaatgtttttaatagtgcgtgagtttctagaaatagaaaaactttaactacgagtttaccaaacaaaatttagacaagcattctatcttaaaagtattccattaatttgggcaaatatgtttatttgcaggcaattgtttaattagttacgcaattgctggaatatctaacggtactcgccggccacctgttgccctccccctctatcactctctatatcgcctactgttgtgcgggtggtagaaagagagcatccgataagaccgctaaatggtattagtgctttttcattttttttttttaattttgctcagtgcgctgaaaaaggcaacacagtttgaaaagccaaaaggaaaacccggccatttatggccaaagcataaaacagtgcagtgccgcagtgccgcggccaagctcgatttgccaaaattggccaacaaattaattattaaacgccgatactcggcacgaccttccactattatttacttttaatttctcttcaatgtcgcccggctaaaaatgggcgagcgctcattgtttgcattatcaaaacaattacgccatcgccgggaagttgggaataatgtgtggctatagctacaggtggttgagctgttcaaagaaaagcagttagcataacgctattactcattacgttgcgcttacgttgtttgctgataagcgtgataaagcgccggctttgtgttttccgtttgccgtagtggaagcaattagtggaacgagtgggagggggagaggttgcgttggcacacacgcacgcacacacctgcccaatcgccttactcatcttcctcgctgaccattttacatgcccgatttttgcataatattacttgcctggaaatgacaaaaatccaaaatatttcttcactaattaatgccaaaacaacaacaatgtcgacatggacagaattttagcggcttttaacaggttttccagtcgcacacacacgcgtcaccatgcacacacacgcgcaccgttttaggcgaggcagcacagacagactggaaggcagtagctgcagcggcagcagttgtcccgctcgcacaaaccaccaccgccgcttcgacgggcgattcgatggattcatttccagttacgtactcgtcgcagtcgcgtcgtcgttgcctctctctgcgtttttgtgtttttgccaccaaatagcaatattcaatatttaaacgtagcatattcgcctgccagttttgccatcaaacactgccctttaagttcaatcccaagccagggtaaaagcagttgaagttgaagctatcgaagaaaaaaccggtggttcgttcactctgtgtgcgagtgtgtgtgcgtaccgagctctttcctttcggtctgtgtgtgcgtgtgttccattccaaattgaaaatttaatttggtgtgctgtccgaaaaggcagagtgcttcttcagtcaagaaaaaatcgagctcaagtgcccagtcaacataagttaaaaagaaagaaacacccacaacctctgtgctaaagccaagaagaaaaaaaaaaccacaaaaatgacgaccagcattccacaaggcactctcttggacgtgctgaagaagaagatgcgccagaccaaagaggagatggagaagtataaagacgagtgcgaggagttccacaagcggctgcagttggaggtggtgcgccgcgaagaagtaagctcagcaccagccacttacttaatttgctaccccttggtttgggcaaacaaacgactgcgtgacctgtcttccgaattttgcataaatcctacctaaatgacgggaaaaaagactagatagtccagcgcatttctttcgccccctctctctctctcgttctctcttttcttttactttttcgtgtgtgtaggagcgggacaacgcatgtgtatgaaaaggtggcgctctcttgttttttgagctctcccaacggctctctctcttttagctgttgtttttactctttgtgaatttttccagtctggctgttgttcttttcgtggtgaacgaattttcgggctcagatacagggtggttccggccccgtccctcttaactctatttttgggctaactgttcttatcgctgaccaaattcattcacctttcgaattgtgtgttatctcccgcttgacagcacacacacacactcgagcattagcataaaacacacacacggtcagcagtcgctctcccatttacataaggccaaaaaggaggaaagaaatcttttgaaaattgagcgattcggttggccttctagctttctgctttctcagcgacaaaaaaagaacagaaaaacaaaaaccggctttaagtccggcaaagaagccacatcgtttagctagcggtgttctaaattcgattaattatgatttttacgccacggccatcaataagtggtttaattctcctaatgcctttccagcttttttgcccgatggctctgccttgttcctaattcaattctaattagacaattgagtgcgcgggctcctttaagcgtgtgtgtgtgtgtgtgtgtgtgtgtgtgtatgcatgtgcgcatatgacgtcattgctgagggagcataactttgagaacagttcaaactccatagcacgaacttccctttattctcgtgttgaagactgttaaataaaacttctttattctgctcgaagttcgccctgagcaagcttcactgtatttttccgttccgaattcgaattgattttaaatttgaagagattctaaagcgtgatttcactccctcgttgacttttttccacgctgccagcaagtgattgacgtttcgcttccccctttaaaaaacgaggaaaatgaaaactaaaacaaaacataatttgcttcttttcggatttctatacaatgctttcaatgtcactctgccgctcatttgcccccctatttccatcattcacctcccctcactttccccttctgcaattgaacgttgataatttcaatgcgcgcattgtgacaaattggttttgatttgtgtgctttgcctcttgccagtttcgtaattcggagattacagcatatgacgccatcgctccgccctttccctccccctctctctccgctcaacgggccccatagacaaacggaatttttaagaaagaaatattttatgcttgagagcatcgtctttaacacagtgttttacattttcatggcttatttttcggctcataattaaaaatgcatcatcacaatggaaacacgccctacgtgtaccgctccaataagtcttttttgtttttgtttctggtgttttatttttcggttgccagggcaataaaacaaaaacgaaaaacgcaaaacaagtaaatttcaaggtgtgtgtgactaagccgtcaacaatttctggtaccatttctcggccacagttttgcattggattttatggagagtttctttcggcatttcaactatattttttacttatattttttgcactttgccggtaatttttcatacattccacaacaattggaggccacgctctcggacatctctgtctcgctctctctctctctttttgaaacgtgttctgtcaccgcttttctttgcccactgattttcccccctcccctcgcccgttcttggcccgttaataaagcgtttaatcttcaatacgttttgttaatgagctcgaaaaagagacagggagagggtgagaaaaggagagatggctgaaactcccgctacaaaacgaaacccaactggaatccactcttcaacttctttgctttgctgctcttcgtttttttattttggatacccttgataaaggggtataacctaagcgtaatttgactcttcttcagaactaataacagatcaagttctaacataaaaacgatcaaaaccgattgattatctttgcacactccattataacatggttctttttagacataaatatcggtgacttcagaattagctctgtattgaactttcataaggaaattttgtacgaatgaatatttgatttggcaagggtatataagctgcgatctctgccttcacttttaatttgattttttggcattttttcttgtgctggctcttgggcttcatcggcggttttgttgttcgactttcgtgtttggaaagctgcgttgcctgctcccccaattcgaaatgctttttatcgctcatgtgtgtgtattttgtacgatgacgtaacccaacacggttggttccaattcataatcacacgatactttaacgacccgcactcacatcgttcatttggttctaggcgtcgtcagatggtcagtggttcaattgttcagttgttcattcgctcacttagtcattccatgtacatatcagtagctctatatccatctctatctccatgcccggcaccatatcagtcattgagcatggatttggacatggacatggcatggaacttagaactggcaccggactgccttgtccaattgcctttgagccgtttacgattcaaagtttgattcgcctctaattttatatacttttttcaccatttttgggcgggtgcttaccgcgctgttttcgcttttcatcgttttgacgtgctgtggcctctataaggccataaagcagcgaatattttccgttctttaatgggtatagtattttagacggtgggaaaactctcgatcaagcttaatcgatgacgtcacgggccgtgaaccttgtattggcttcatttttggacttagtagccatatcaggtagtggtgttgttgaacttttgtttaactttgatggcgagtatcgattgcatttagccagcaaagcaacacgcaatcattccttcgcttaagggcgtttttggggggtttgctttgaccttgcttcgacgacggaaacagcgacaacaacaacaactacaacgaggtggaaaaagggaacttttctttacaggtggaagccgcaactgaaaatgggatcaacggtcgacattttagggaaaaattaggtttaccactttaagtactatgaacaggggggttaaagagagcgcaaatgcaggagtgtttcatcatagcagtcttgttttactaaaccgaaatgaggatagtatgtttttccaaaccaagcgtagcaaatatttatttatgtgtatttcttgccccaaaatatttaaggtttagcaccgtaagacgtaaagtaaacattaagattttagcaataagtttacagcgaatggatatgctatatctggttctttcgaccatcgaacgtttgtcttataggccgaatccgaggttgccgctctgaaccgtcgcatccagttgctcgaagaagacttggagcgctctgaggagcgtctgggctccgccacagccaagctgtcggaagcctctcaggccgccgatgagagcgaacggttagtaccacgttaccatctaaagtccctgtcccccaactaccccatctatgatctcccccactgtacccgaatatgtaaaatacttcttaagttcacagagaattattaagttcaagttacaacatatatattttaatcgcatctgtatatcgtttcgcaatgctgcgacaaattcaggatacgaaaagcgcttgagaatcgcacaaatatggaagatgacaaagtagctctcttggagaaccagttagcgcaagcaaaattaattgcagaagaagctgataagaaatacgaagaggtatagtctacgaattcatatagtctacggaatttggtctccgttttagggcattagggttattaggttctgctcctttgaggttaggttcacttggtcaacatttgcgttactaattaggtttttgggtctatttaactatctgcgctctctattttctaatttctacctaaccgactctgcaacaacgacaataattgtcgttataataatggtcacttttataatgataacaataatgatgatgtatctaagttagcgtgtaagactttctgtaaacagcatttagttggcacagttcaaagatgtcgacccgccgctggaactggaacaccatggatctgctctgaattattgtaaaaactttgtaaaattatgtatcagacagcatgtcctacttaagcttatggtagtctattagtcaaatggctgttaaacaattatgtctaaaaaaaaagatgaaaaatcccccagtgattgtaatgagacgaaggctaaagtgtgtttggttcttggtctaaatccgttggcttaaatacctcccaaaatatcagctaccaaattggttgcacgtccatttcgcttcgaagaagccaaacacagtttaagcctcttgcttaaccctttccgtctcccctagtgtcccctgccccctgtaaaaacttgttaattaagtagaagttccgaattgttaactcaactggcaacaacaaatttctgtctcttttgcaacaacaaccacgaccaactacaatcaaacttcaatattcacaaaccaaaaatgtatctctcaatgtgaatgtttgtgtaaaacatctgtttgtcgtaacaattgcaacaactacaacaacaacaaccacactgaacactcaacgatgtggacgatgacgtcgaatgaatctcgtgataacttttcggctgtaccaactgcaattccactggggaacggcaaatcatcgctaaccacttggtcactgtcttctatgggcatggtcgtcgcaaccgatggggtctatatactctaccatccacactatattatatagtgctcgcaaaattcttgagaaccgcgcccttgccgatgaagaacgcatggacgctctcgagaatcagctgaaggaagcgcgtttccttgctgaggaggctgacaagaaatacgatgaggtgcagctaaaaaccaatttgtcttctattaagctaagcaacaataacaacaacagtaacagtaacaatattgaaatcagtaaatcagaatcatgcaatgccagcgatattggtggcaccaacaacaataacgcatccagaactattgcatctgctgctgttggtgaagagacttccaccttgtcctccacaagccacgaacacaacaacaatcccaacaacgacacctgatctggttcctttgtcaagcggatattaaagtaacttgaatttgaattgaatgattgataaagggttaaccgaaacccgaatcttggcacaggaatcagccagtgcgttgatgcaaaacttgtgcttaccacgacgattacgaatgatgcttgagggcagttagagcttagatctagacctagatcatgcacagcccgcccgcccgcctgaccatatgcaatatatatacgtgtatagattatgacgatgataatgatgatgataatgatgatgtattagtcgatgtacatatgtacaatgtaaatccaatccaatgaactttcgattgtaatggagtttcgtgtgtattttaatgtgtaaaataccaatggcaatatgtaaagtaattgttaagcggtccatacaatgtccacaagtactctattaattgtcctcaatgctcttccacgtcaaaaagcttgagaagcatatcgccactgaaaattgattgttaaaagtaaatcgtaattgggttagtttcttaaattgttctttttatttccattcaatttccaattacataattgtaaagaaaatgtaatttatactcacgttaaatgcatagagaaacacaccttaagtttaaaattaacccaaggaaatatctaattttggaataatatttttgcaaattattgtttatatacataacatattatatactacaaaaatatataaatacaaatatataattgcagcataaaactaatttgatattattgaccaatgagttggagcagataatatttggttacttcatgatgttgtacatttataggttgagatatgagtaatgggtgtgtaaaagtgtagccatgatgtagggtgcttaattgttaggcgaatattggacaaattactattgggaaatagttgaattcagatgtgtaaagctagaaaattaatgtatctaccaaagattgggactagggcttactgctttgatggattgccagcacatttttgagtgtaaagattttagtcattttctataccctataattcttgccattcccaatccaaggggtggcctaaatgcctacgtgttcagcacgtcaatcggatcgaaaaaatataccaactgataaactacatgcacagataagccccatttctgcagtgttatttcttcgcctttgctaccttatctttttcgcagaaactaaggcaaaggcaacgattgtatgtgaagtacgaaagcgtgaaagtacaaaatggaatccataactgggaccgaaaggagggggtaaggttttgtttaactgccggcgataagaggaggaggccactccccaaacggggcagattggattcgagtagatttcgcacgttgggccctgacataagcgcctaaaaactctggccaaaacgatcgatgatgcattgtgcgagagggaggtgatcacttttgaccctcagacgtaggccaatggaaagtgccgtgagtcagtggacaggaatgtgcgtggagcaactctgtttcagctaaaagatctgacggcactttagtcacttggccatgcctggtgcattggcgtcgtgattcattgggagctcttaaacataccggaacatatcagcatgaggaggaaattaaaatcagttttggctaacaaggctattaaagtttattggcattgcccttaaatgggtcaagttattttcacattttttggtcagattattatctgagatttttactggtttctgaattagaataggaaatcagtgaaatagttaatttaaagatttctatatggtattgttaagcctttaaagctagcgatagtaacttcctttggctgagatggttttatatataacaatttagagattttatggtatttggtttccagaaaatgtacaacaaatgtgaaagttgcaaatattataaatatcccgacagaatatgttatgctatgtaaacagattgagtacaataaataatagtatggatattgaagagccacacgacaagcacaagttttatgggataaacaattgaaaaccacacaataacaataggctacacaaattgttttgttcaatactaaaatatgcaaaggcaccacataaaagacaaaagaccataccaaaacatttataataataccattaaaaactaataaatacttcatttaaagcttctatgtttcatttactaaacgaaatctgtgtaaaaactatgaaattaaatacattttctatatgttctcctgtacacccgacgttccctgtattataccaatcaatcgacaatgaaacaatgaatccatatgtaatattatatgagaaaaggttgcccgtaaattggccatggttgaagccgatttggaacgtgccgaagagcgtgccgagcagggtgaaaagtacgttataagtccagatctaaatatatattgttcgaattgtttgaagcccgttttaatgtgcctaataacgaaaacaatgttgaaactgccgcaacatcctaacctcataaaaagccccaaaagtatatatacttttgcatttccccccgttgagtttaaaatttgattttgttcttgttattttctagctagctagcttttgcccatatgtttataatgtttggttaaaaatgtgaatatatcttagagaaaaccacctacctaatgttttgtataatgaaagcatgctaaatctcaattttagtttagatcaaacagaagcacaaacatggcagcagccaaggcgatcagtttgaatgttctctgaaaatttccgttcagtttcactggctgttaagcgcagtgaactccacttgaggtgggaataaagctgcaatgatctgaagttgcaggtcaatgcgctttatcaaccgctctccaagatcggagcaacgaaatgacagagaatgttcagctccttagctcaactgctctgtggccatggatcatgaatgtaaccagcacagtattcacattttttgccaatctgctgctttaagccagacactaagaaactaatctcgaaaactgttttttctatgccatccataaccctatgccaaaccaatacaaaaatgtgtgtatttaacacaatgctaacaccttgccacgcccccgctatgccacgccccccgccttgcccgcctgcgacgagaaaaggtggccagaaaactcgtgctcatggaacaggatctggagcgttccgaggagaaggtcgagctcagcgaaaggtttgtccacactgccaagcccccacatcttcagcctactattcgctgtctttcaagtgtctactaactgcatttcgttgaatatataaaacacgttcgtttctgtttttgcgcgcaatttatgcccgggatggacaaatatttatttataatttccatagatataaataaccgaataaatgccaaagcgacagcgaactgaaaaagtgaaatcgtttcagttgcgccggtccaaagacaattgttattattattagaaaaatatttgccagaccttcgcatcatgatttgacggtttctcgtctcttggccaagacaacttaactcatcgcctccatcggcaggcagtcacaagatcttttttcgaaagtgaagtgctgtcagcttggagttggtcaaccgtctgtttttttttttttggctttgctcgggcataaattgcgcttgaaagaaacctttatatttgacaattgcatgagttgtgctattcttttttatacccaaacgatctatggagcaactatttaattatcaacttttttttttcgtttctcgcgtgccaacagcaaaattgtggagcttgaggaggagctgcgcgtggttggcaacaacctgaagtccctggaagtctctgaggagaaggtcagtatatccataggttgactaaccaaccagctatttactccattggagttgtatttaaaccaaacgatttaaacaaaccattcttaaatatttcaattgaatacccaaactccctacccaatctcaaatccacgccccaaacaaattgcccacgaaatgaacaaacaacaacgataaaaatgtaggccaaccaacgtgaggaggagtacaagaaccagatcaagaccctcaacacccgtctaaaggaggtagatacgatataaaaaaacgtcaatctgcgcaccaaaaagtggcccaaatgcaaaggggggagcttcccagcccgaaatccatgcgaattgggtgtccaaaccagcgaatatatacttatcttttgttgttgttcttcattttgttgttgtttttttttttaagttaatatcaatgaatgaagggatattcgacgcaatttcccctttcctaagaagggattacttcaattgtattcgtactaaatccttgaaaatgtctaccgacatgaaattcgtttatagctcaagcaaaactactcctttgcccatttttttttattactaattaatattttctgttctttttttcatatatttgttcataatgttgccgctaaaaaacgccaattatccaatgctaatttgcgcacctgctggatgtttaccacctgcaaactgatttgtttttgcatgaaaacttaatctatgttttataaaatgcccataacacaaaacccaactgcttgtcaaaaccgaacaccaaaaaaaaaaaaactgaaacccataggccacacaaaaagaggagacctttgagacgcaaatcaaagtattggatcattctctgaaagaggtattattgataagtatatgctgtggtctcggtgaatctctggtgttggtcgataattatgcgaagctaatatgctacaatatatccactaagctaacttagattaagcacttaaaaataaaaactaaacagaaaagaaaatattgaattgcacaaaacgttattctcaattttaaatttactgtacatattcgtcaattcgacatttaatattttcttttatgtgacaaatacaacaaacgctttgtgaaaatacagcaaatgaaacggaattccgcaagttatgattatgagtttaagatcaatagatcgatatagatcgatatttcgctatatttagagcgtacatcatgggcaagtatctgtgaatccatctttcgcataagacgtgtgtgtgtacatttgttcaaaattgaaaacaactttttgtgcattgattgcaagtgagaaaacccatagtaaaacccatagaaaacgatcagtttagttttcaactacaattacaaattgcaaaatttacaaacctagaaactcctaaaagctaatgcctgattagcggcaatcgaattaattatcgctatgtagacgatcgaaattaattcactgagatatttatttcggtagatattttacccaagatcctcaaaaactcacatccttgcagcaacacacacacacacacacacacacgcacacagacacccaatgtacgtgatattgatcttgatctattgtcataaactataatttgttgtattttcctcgacgtctaggcacgcgtcaatcagaaatattacgaacaggagctcatacagttcaaattaaatgtagaagctgtaagtcgccgcagatttgcgttggcgtagagattatagattccgtcgaattgcgatcttaacagcattttctgatttcctgttttatatgcagtgactgccgtagcctccaccagtaatcgttgctcttatcattcccctaatgatatttaatttgtctgatttaggatttgtctaaaagccctaaataaatacacacaagcgtcagcagtttgtaagcattctagtttaatcaaacaaaaaaacgatatagtttctaagttttttagttgattgtttcattacacttttattaactagtttcattttggcatttgtttattgactaatctacatttgccatgctcattttatttattacgtttttctgctggttttggtagcatatttgggaagcttcttggcttgattgaacttaagttctgaatgagtttcgcaaagtaaaggttttaccattcagaatttatgtttttgcaatcgggcaagagatgaagttcgatgcatttgactgcttcaacttttgcctgctattgtagccactttttgcagcttgctatccagtgaatattaagcacttaactaacttaattattttacctctttcccttcctcaatcaatcaaatcaaaaggctgaggctcgtgctgagttcgctgaacgctccgttcagaaattgcagaaggaagtcgacaggctcgaaggtatgtccgtcaaagattttatacaaattttactgagaatgtaggagaaatagctcagaaattgagaaatattcaactatttttaaattaaagtacagaaccaaagttttattgttgtttattatgatttgtagtagattaagtaggttcaaaattacattccttattccaaatccagtaccaattgtgatctagtgagaactttttatgtacctcgattttgtatttattatcatttaatgcaacatattttataatttgattttctaatttgtttacttttcatatataatttcgttgttattgttattgtgcttaacaaaatacaacttgcgctgcttgctaaaccacttgttgcatgacctgacccgccctgccccatcgcaaaaaaaaaaaactgaccaaatatcgaaaccagatgacctgctcaacgtgcggggcaagaacaaactgctgcaggaggaaatggaggccaccttacatgacatacagaacatgtaaacaactaatttgcttatgtaaattaactaaactgcctgctttgacgtcaaacaaaaaacacccacgcacacacaaaactggcgctttccatatctaaatactagcgaacatatctcgactccactccacacaacaccgcccaagacacgccacgcccaccacccatatgagacaagatccaaggacgccgacagaagtgtcttccatgcggatgcgaaagccatcttcgaacgccaagcaacgggagagttaatcaaaaaatagcgttaaacacactctaaacataaacataaactcaatggagatcagatgaaagggcagaaactaaagcaaaacattctcgtagcacaagcgcattccaattcacgattcgattccatttcgatattttcgattacgtcgatattttcgataccatttcgcaaaattcgaacggttgactggcagctagcgccattttactatactgttgcaatactatttcgttgaatctaaatttaatgattattcaattgattttacttctgcttttgctacccctaccttgttttgttttattttaaaccttaaattatacttgaccttgtacttttgtatttgacgagatgacaacttggacaacacacgcattgccgccttctttttagtttacgtgtattaaatagagagacaatcaatcgctgttatttatatttaaagagtaaattctatgctaaaactttgtattttgtccccagcttaactgtattaataatatgctaatgtttaccttgtttataaatatttaaacgaattgtcgtgtttgcaaaacgttgtgtaatatttgcctacttttaagttgccgccacgcccaccaccacaaactatagccactctttcgatatagttttcaattccacaacaaaaaagacaattttagctagcgcacatcattccaattgcgaatcgtccaccggttcagataacttttattaaacaaaaaaaaaaaacaaaaacaaaaaaataaaacaaaatccaatttccacacaacactaactaaaaaattttctgattctgaatgccgtgacacccaaatgaagataaaacgaatgctgcaacaagaaatggcattaaaaattctaatttgatctatttacgatttacataaattaattatttatactttaatatatacctatacaatacatatactatacaatacataccatgctgctgcaattgcacaaataaagtatttttcgaaaaacgtatgccccgcccatcgatcgtccagcgtttagtgttcgccccaacccgactctgtacgtgtgcccgccccacccgcatttggccaccactggaggttctatcgccctgctctctctctcgaatctgctctaatccgactttctaaccccttgaaccaccaccaaaccacgaaatcacgaaacaaccacacccattcgccacgccagacgagatgatcaaagagatcgagcactatgccctcgtcggcgaccagctggactggaccttcgtggagatgatgggcatgccgccattctacaacgagcgctaccccaagccgcccacaccggagctcaccgaggaggagaaggccgccctggaggccgctgccattgccgaggccgaggcgaaggctagggccgaggagctggctgccctcggcgaggaggcaggcgcagaggctggggagggtggtgcaccggcggagggcgccgctcccggcgagcctggtgcagcaactgagcccggcgtcgaggcaccaccggccgaacccgagaggatccccacgccgccaccaccaccaccattcgagtactccatcgatttgcccccagagggtgctgaggtgccgtacgttaggaacgcggagccaggagactttgctccgcccgccgaagcagcaccagctgaaggagccccaccagccgagggagcaccagcagcggaaggagccgcaccagccgagggagcacccgctgcagagggcgctccaccggcagaaggagcaccagcacctgcacctgctgagggtgaagctgctccaccagcaccggctgccgaaggggatgccgccgccgcacctccaccaccgccggctgagggagaggctgctccggcaccagccgagggcgaagcaccacctgccgaggcggctcctgctgctgaagcaccacctgcttagaaaccccgaacatgttttattgcgatcagtgaaaatagatgaaaggatctctagaaggatctcggcgttcaagaactggccaaagtgttttccttctcactaactattcaagccccaaactcccgaaatattaattgataatccgaaaatgtaaataagctacggtgtatataatttgaagtgttcttttcccacgagaatgtcattttggtgtttcgcgccttgtgagccccttcgcttgcaactcctacccgccatcgaatccctctgtttcccacccaagattattcagtttaattttcaatttacgcttctattccgtttcacgttttattttatttttctctatactctatcccccgtcaccatcgcttgtattgcttttctcacaaacatcttcgcataccgatcctgaatcgccataaccagacgacctaatcgttgaaaaagagcgctattgcatgattggcgacagcctggacgaggccttcgtggacctcattaagggtctggagccgttctggaatccgcgcaaccctaagccgccgactcccaagctcccgacgcccacgccagaagaactggccgccatggaggaggcacgagctgcggccgaagctgccgcagctgcagaagcggaagccgcagaagcagctgcagcggctggcgaagccggaccagatggtgcgcccgctgcacccggagaggaaaaggcaccggccaaggaacccactccgcccaaggagcccactcctccgccaccaccaccaccgccattcgagtactcgatcgatctgcccccagagggtgccgaggtgccctatgtcaagaactacgagccaccaccacccggatccgagccagagccagtgccagccgctgaaggagaggctgctccggcggcggagggtgctgctcctccggctgagggtgctgctccacccgcagaaggcgctgttcctccagctgacggtgctgctccgccagctgagggtgctgctcctgctgctgaaggcgctgctcctcctgctgatggcgccgctcctccagccgaggctgccgcagctccagctgatgcagcggctccagctgccgaggctgctccagctgaagcacctgcagccgaagccaccgccgccgaagctcctccagctgaagcagcgcccgccgaagcggctccagctgctgctgaaggcgaggctcccccagcttaggaccagctcgccacatccgcgccagaaatcgctgctgcacttcgacgaaagagaaaaccactgctaccacatgctgccctgcttttaaaaaacctagttaagagcacgttttttatttttgaaataactcaaaacgaaattgaattaaacattcagttagccaaagcattataaaaacgaaatgctgcttttattttctgttcttgcaaactttttgatttcctttaaccacacagctagcacaactttgcgaactcaactgctggctattatttatttattttatccgaaaccgaggtaactatcattggttattttttaagttataagttttttgtgtaaaggtctcagtttgtgtcaggttttaagtgtaattttaatgattttcaatgaatttatttttattaattttcgttccttactcttgcgttcttttatgatttcccaaacaacaacttgaacagacgacctcgtcctggagaaggagcgctacaaggacatcggagacgatctcgacaccgccttcgtcgagctcatcctcaaggaataagcgacaacccgaccttgacggaccctcgcacccagaccaaaatcgatccgcacagctatatttttgggcggcacacctttcgattgtttgttactgtagtcgcataatcgtaggcccactgtacttgtatctagtagcctgcacttttgatttgtgtgttcgtagatggatagtttgtagattgattttgatcgcggaccaattagagggaagcatcgatgtaattgtgtatttgtttgactcaaacgttttttatttattatttgtatccaaactaagcaataaagcaatcaacttaaaaacataaatccctataaacttgtcacatttattttgtttattccacctgctgcagacgaggtgagcaaaggtaaggaaaagtacaaaaccatcgcccaggaactggagtacgccgatctcaacaactactaagggaatgaaatccacttcatggggagatgagcagcaatcactatgatgaagacaaatggagtccgaacgcattcgacgtccgaattacaaattatttttagcataacacttcttcgcctaagcattcccaaaaaaaaaacaactttcttacataagagcaagagttttacaataaagtaaaaaatacatttttagcaattactattgaaatttatatggagcctaaagttaaaacgagttgtgtaacgaaaagaaacgctgccattttccttgaaactaaaattccagctcgaaaaagtatgtgtaatattttgaatacaaaaccccagaaagcccaccactcaatatcgttaatcagcatcttcaaataaaaaactcagttacgcttaagccagagtcaatttttctcaactttctgttgcttgtgtgtttttatggcagttcgcgaagtgtatctacaaaatttctatggcctttgtatatgtttaaacaacaagaataggagatatattattagaatatataaacgaagacatataaattaaatttacacatttgtcatagcttttgtaattctatgaagcgtgcaaaacaaatataacaatgtatgtatttttctttttcaactcaatatttttacgatcaataaactgaaatcattcttttgcatataaaaaatttcatggattttttatttaaacggtgggttgcattagttaaataataaaaatatgcactgatcatgaatcgaatataaaggacataaagtgtcctgttggtttcaatctgccggaatattgtgtatccttattaaaagttaatattgaaatcaaaatcaaatcatgcttatatcccaaaacttataggatgtttttatttgtgtt

SEQ ID NO: 9365 - DNA, 1212 bp, DROSOPHILA
agtttctttcgagtgcagagtagcaaaacaaaacagacatggatgccatcaagaagaagatgcaagcgatgaaagtcgacaaggacggagctctggagcgcgctctcgtctgcgagcaggaggcacgcgatgctaacacccgcgccgagaaggccgaggaggaggctcgccagctgcagaagaagatccagaccgttgagaacgagctggatcagacccaggaagccctgaccctggtcaccggcaagctggaggagaagaacaaggctctgcagaacgccgaatccgaggttgccgctctgaaccgtcgcatccagttgctcgaagaagacttggagcgctctgaggagcgtctgggctccgccacagccaagctgtcggaagcctctcaggccgccgatgagagcgaacgtgctcgcaaaattcttgagaaccgcgcccttgccgatgaagaacgcatggacgctctcgagaatcagctgaaggaagcgcgtttccttgctgaggaggctgacaagaaatacgatgaggttgcccgtaaattggccatggttgaagccgatttggaacgtgccgaagagcgtgccgagcagggtgaaaacaaaattgtggagcttgaggaggagctgcgcgtggttggcaacaacctgaagtccctggaagtctctgaggagaaggccaaccaacgtgaggaggagtacaagaaccagatcaagaccctcaacacccgtctaaaggaggctgaggctcgtgctgagttcgctgaacgctccgttcagaaattgcagaaggaagtcgacaggctcgaagacgacctcgtcctggagaaggagcgctacaaggacatcggagacgatctcgacaccgccttcgtcgagctcatcctcaaggaataagcgacaacccgaccttgacggaccctcgcacccagaccaaaatcgatccgcacagctatatttttgggcggcacacctttcgattgtttgttactgtagtcgcataatcgtaggcccactgtacttgtatctagtagcctgcacttttgatttgtgtgttcgtagatggatagtttgtagattgattttgatcgcggaccaattagagggaagcatcgatgtaattgtgtatttgtttgactcaaacgttttttatttattatttgtatccaaactaagcaataaagcaatcaacttaaaaacataaatccctata

SEQ ID NO: 9366 - protein, 285 aa, DROSOPHILA
MDAIKKKMQAMKVDKDGALERALVCEQEARDANTRAEKAEEEARQLQKKIQTVENELDQTQEALTLVTGKLEEKNKALQNAESEVAALNRRIQLLEEDLERSEERLGSATAKLSEASQAADESERARKILENRALADEERMDALENQLKEARFLAEEADKKYDEVARKLAMVEADLERAEERAEQGENKIVELEEELRVVGNNLKSLEVSEEKANQREEEYKNQIKTLNTRLKEAEARAEFAERSVQKLQKEVDRLEDDLVLEKERYKDIGDDLDTAFVELILKE

SEQ ID NO: 9367 - DNA, 5470 bp, DROSOPHILA
agagagggcggtgagggcgtatcgctggccaatgatcacggcgccgcagttgtagcttccgccgatggagagggccgcctggtagggcagctggccgagaacggcatcttctccaccggcgatcctgccctgcggctgggcctccagaactccggcggccacaaggattagtccaatggtgagggtcagcttcatggcactttgcttgcttgacttttaatgggatcgcagcgatggcgtgagttcttatagggttcgcacacccgtacagggggtatggcatgggtatgggtatgggtatcttatctgtcagccggagagatagccggatagatagagccatccggtgacagcgactcctcctgattagacaagccccgcgcgtatcaatggtatctccggggatcagtttctggaaaggcgatagggatggcaaaagtctaagtctatacatactatactatttattattgggactattatggtcgcaatttaaaaataattaataattttttaaaatgtagtgtatataaatatgaaataaaagttataataatgactgaaaagtaatggtatgaaaacaggactggctgatttctataattattaccatcatatttacttggatatttttgggatccagtaaattaagatgttgtatgacgattatgtcggcatttccttggccatgtatcaacgaactctgctggggtgatgcttgctctcagctgcaggaatggagggggtaatagtccagggcgaacacgtttcaggcgaggcatgccacacagatacgatagaccaggggccaacgatcgcagatctcgattcgcacgtagcaaagctcatctcatcccataccataccatgccatctcatcttatcccatcccatggcgatccgattcgatttggccagccgcacaaccagttggctctcgtttcgaaccgcatttcgcaccgccagagacaagcccccattatatggtcgttccgaccgccagttttgaccattcgcagactcaccgccgaccgaccatgatcttgcgaacgccactcgttgccggccaccagctgcagctgctcctgctgccctccgtcctgctcctcatgctccatcttcttctctgcgatgcaaagacggtcaatcccggtgattccatgcagatgcagcatcaccagatgaccgcggagccgggactgccggaacccagggcctacatgccggatgcccagcatctggactttgtctaccacgatcacgaggagctcacaagattccttaggtgagtccttcattgggagattcttcgcggagctttttcttttatatttttatggcaaacaaaatactacggaccatttcttttcattttttaaaaaacaatacatattatttaaaagtaagctccattcctacgctttttaaacttgattaagaacttccattatactaactaaaaacggtatattgttaactattttgcttactcacgcattttttaaatagagccaccagtgcgaggtaccccaatctcactgccttgtactccatcggaaaatccatccagggacgtgatctttgggtaatggtggtcagctcgtcgccatatgagcacatggtgggtaagccggatgtgaagtacgtgggcaatatccacggaaacgagccagtcggccgggagatgctgctccacctcatccagtatttcgtgaccagctacaacacggatcagtacgtcaaatggctgctggacaacacacggattcacattctgcccacaatgaatccggatggttatgcggtttccaaggagggcacatgcgatggtggccaaggaaggtgggtttctcttgcagatttttacatagattgcacctcttaacttatccacttcatagatataatgcccgtggattcgatctgaatcgcaactttcccgactatttcaagcagaacaacaaacggggtcagccagaaacggattcggtaaaggattggatatccaagattcagttcgtgctcagtggaagcctgcatggtggtgccctggtggccagttatccgtacgacaatacgccgaactccagtaagtagtctcagtagtttgtatgtcaagatcctgtagcactactccaaatgtccttgcagaaagagatcctaagttatttgcatctacagatcagaaagtaatgtctgtctgcttatttagttgcctatgtttctcagctgatattaaaatgggtgggtcacaatcgaaacattgttaggaagcacatcactcggtttctagatagttccagatgcgtgttatcgacagagccttacaaagtccaatgatagccgaatatttgtggactatgcattatcaagagattttagtgaatgagctgttatgatttagtgaatgagccattatcgtttgagttttgagatataaaacaatcacatttttttttgccaaaacttgattgcgatctgcaaggacatcatttgcttcgttctgcgaggccgtatccttacggctgcattttggactcccagtcgagttccgattgataaagctgattctatactctcccaccaatatggctgctcaaagggatctgccgttcgtccgccctgtgcgcgagtgagtccgcgacattagatccccaacgatccatctaatcgtgtttgcttctctttccgttccgttccgccaaacatgtcctttgggcgcagtgttccagacctactcggcggcgccatcgctgacgcccgacgatgatgtgttcaagcacctgtccctggtctatgcccgcaaccatgccaagatgtccaggggcgtcgcctgcaagtcagcgacgccggccttcgagaacggcatcaccaacggagccgcctggtatccactgaccggcggaatgcaggactacaactatgtgtggtacggctgcatggagattacgctggagatatcctgctgcaagtttccgccagcctacgagctcaagaagtactgggaggacaatcagctggtgagtaaatgattagaatctattcttttgaaattattccatgatctcttcatttcctccatgaagtcacttatcaaattcctggccgaggcgcatcgcggtgtccagggattcgtgttcgatccggcgggcatgcccattgagcgagcctccatcaagatcaagggacgcgatgtgggtttccagaccaccaagtacggcgagttctggcgcatacttctgccgggctactacaaagtggaggtgagtgtccggccaggatcactaaccatatcatatcatatgtctaacttaattatgccaattatattaaaggtctttgccgagggcttcgctcctcgcgaggtggagttcgtgatcgtggagcagcatcccacgctgctcaatgtaacgctgcagccctcaaaggtaggtaacccaaccaatccgcggtggagtggggtcaccactggcactatgctcttaaaaacccaaggtgatggctaacccttttgtgtgttttgaatccacttaatatctgccaacgacaatcagtatctggtggctacgggcacatccaccaccacaaaatcctcaacggtgaatcgccgcgtcaatggaaagctgcagctgtcaccagaataatggcgatccgatttctttgagtgtgtaaataatagctaaattggtttagacctagaaaatgatacgcaactaacccactaaaacaccattgaagtaatctgttttggtttttgctttagttcccattgcgattaagtttatgaaacaaaataacgttaactttccaaattattatagtttaaacacttttagtttgaaaaatctatataaaaaaaattaaattgagtaaaattaaaatattgattacatttttgttattactttttgtttatctaaagcttattctttaaaaaaaaaactgattttctttgtgctttaacaaatcttaccaaaaagttgacaaataatacccttaaatacaatgacctttgctggcaaaaggtttattattaaaaatataatggttgcttgtaacaataatgtagaaagggaatcaaatcctaatctctgtgcacctacgtataacatcttgttgacttcgcagcgcttggagggcattgggcccatgggtcccggcggagtgccagtgggtggtgtagtgggtcccggtgggctataccgccccattccgtcgccgcagcattaccgcccacctgtaccgccctacgcgggcgccgcctccagcgatagtggcatattctcgaccatcagcaatggtttaaacagcctgtactcaaatatattcggctaaggaacggcgatttcgaggatcttcattaaggatttttttattttcttttaagcatgcctagaacttaagttacaaccttcgacgtactatttattgtgaacaggaagagatgggaatggatagacccaaataaagcgttcaaccagtgcaatctattctataagataattgttttttcctttttactgaatagaacttaagctgggaacattcacaattctttaaaacttagcagctcgacaaaagcagtcagattttatgcttagctaaatggcaagctgtagactttggaaaactaggtcgatcagaacgttcattcaaaaactatcaacagaagtcttatctcagaccttttcttacaatttttttgtttttattttggaaaaaacgttcagagcaaaattctattcggttttaaggttcctcgaaaataagaaaacccactgagatatagatgcaacaattgtgaaaaaatagaaaaaacgctaacacttaacagacgtataagaagtacaaagaagatgagctatcaagatatgttcggatgcaatttcgattcacaatcggctggtcgaggaagcaactttgagtttcgggtaagattgatgcagtaatataaatgtttctaaagcaaatggtaacccaactaattggttacttggttacctagttctctggaccggaatccattccgaatgcggtaaggcgttataatgccatgcgaggtgccgaattggctcaaatgaagcggcagcgggaaatgggcagatcccatgtgcccagcatgccgcgattctgtaaggttcgtcgtccgggtcaggatgtgaccagcatggtgacctcacgcgatttggatgtggttacccagctgtccctcgattccgatcccatctgcaatgatgataatgataataatgatgacaatgatgatgaagagtatgttggtagtgagccaaacgactttcagtaccaaacaaaaccttcgcctcgtctttgtggtggttccgaatcaccaagaattgtaaagagtaaattcaagggtcgaaaaaagcagactcgcacgagccgaaagaagaatcatcatgggcaggtcatgcagcagggtcatacctacgaaagattggaggaactgcat

SEQ ID NO: 9368 - DNA, 1729 bp, DROSOPHILA
cagttttgaccattcgcagactcaccgccgaccgaccatgatcttgcgaacgccactcgttgccggccaccagctgcagctgctcctgctgccctccgtcctgctcctcatgctccatcttcttctctgcgatgcaaagacggtcaatcccggtgattccatgcagatgcagcatcaccagatgaccgcggagccgggactgccggaacccagggcctacatgccggatgcccagcatctggactttgtctaccacgatcacgaggagctcacaagattccttagagccaccagtgcgaggtaccccaatctcactgccttgtactccatcggaaaatccatccagggacgtgatctttgggtaatggtggtcagctcgtcgccatatgagcacatggtgggtaagccggatgtgaagtacgtgggcaatatccacggaaacgagccagtcggccgggagatgctgctccacctcatccagtatttcgtgaccagctacaacacggatcagtacgtcaaatggctgctggacaacacacggattcacattctgcccacaatgaatccggatggttatgcggtttccaaggagggcacatgcgatggtggccaaggaagatataatgcccgtggattcgatctgaatcgcaactttcccgactatttcaagcagaacaacaaacggggtcagccagaaacggattcggtaaaggattggatatccaagattcagttcgtgctcagtggaagcctgcatggtggtgccctggtggccagttatccgtacgacaatacgccgaactccagtcctttgggcgcagtgttccagacctactcggcggcgccatcgctgacgcccgacgatgatgtgttcaagcacctgtccctggtctatgcccgcaaccatgccaagatgtccaggggcgtcgcctgcaagtcagcgacgccggccttcgagaacggcatcaccaacggagccgcctggtatccactgaccggcggaatgcaggactacaactatgtgtggtacggctgcatggagattacgctggagatatcctgctgcaagtttccgccagcctacgagctcaagaagtactgggaggacaatcagctgtcacttatcaaattcctggccgaggcgcatcgcggtgtccagggattcgtgttcgatccggcgggcatgcccattgagcgagcctccatcaagatcaagggacgcgatgtgggtttccagaccaccaagtacggcgagttctggcgcatacttctgccgggctactacaaagtggaggtctttgccgagggcttcgctcctcgcgaggtggagttcgtgatcgtggagcagcatcccacgctgctcaatgtaacgctgcagccctcaaagcgcttggagggcattgggcccatgggtcccggcggagtgccagtgggtggtgtagtgggtcccggtgggctataccgccccattccgtcgccgcagcattaccgcccacctgtaccgccctacgcgggcgccgcctccagcgatagtggcatattctcgaccatcagcaatggtttaaacagcctgtactcaaatatattcggctaaggaacggcgatttcgaggatcttcattaaggatttttttattttcttttaagcatgcctagaacttaagttacaaccttcgacgtactatttattgtgaacaggaagagatgggaatggatagacccaaataaag

SEQ ID NO: 9369 - protein, 518 aa, DROSOPHILA
MILRTPLVAGHQLQLLLLPSVLLLMLHLLLCDAKTVNPGDSMQMQHHQMTAEPGLPEPRAYMPDAQHLDFVYHDHEELTRFLRATSARYPNLTALYSIGKSIQGRDLWVMVVSSSPYEHMVGKPDVKYVGNIHGNEPVGREMLLHLIQYFVTSYNTDQYVKWLLDNTRIHILPTMNPDGYAVSKEGTCDGGQGRYNARGFDLNRNFPDYFKQNNKRGQPETDSVKDWISKIQFVLSGSLHGGALVASYPYDNTPNSSPLGAVFQTYSAAPSLTPDDDVFKHLSLVYARNHAKMSRGVACKSATPAFENGITNGAAWYPLTGGMQDYNYVWYGCMEITLEISCCKFPPAYELKKYWEDNQLSLIKFLAEAHRGVQGFVFDPAGMPIERASIKIKGRDVGFQTTKYGEFWRILLPGYYKVEVFAEGFAPREVEFVIVEQHPTLLNVTLQPSKRLEGIGPMGPGGVPVGGVVGPGGLYRPIPSPQHYRPPVPPYAGAASSDSGIFSTISNGLNSLYSNIFG

SEQ ID NO: 9370 - DNA, 2804 bp, DROSOPHILA
agttctggaagcgcaaacgttcaggaaacttctggtgaaaacatgaaccaggctgccaagtattatacgaatgcccaggagaagatcaccgagcacatgctctcgctgactcggaacttaaaggaacagacggagaccgccaacaggattatccgaagagacacggaggttgtgtcgcgttccgccggaatggcggatcgcaatatcaattcgctaggaaaagaggctgagaaactggagcaacattcgaaaaaagcctacaagtgctggctgtggctgatgattgccttcgtaattgccacttttataggtgagtcattgtattttgtggaagttttgttcaagctgcaaaaaagaacccctcttggaaaatcccaattcatttacttaacaaatataccttaagttatccaactcaacaacacacatttaaacacgtttataaaccaagtttcctgaatatgttaatcacaatattataaatattcattataagaacgaaaacagataaatagatattagattccattgctattattattgtatttaaactgaatacgaaaacactgcgagtcacttcacttaagccaaataaacaagtttgccgtgactcagtttgaaattacatttcttaattggttcgatttattgcagttcgattgttgctgcttaattatactaatgagtttattaccctttcaatttacaggtatggttttattcatgaagattatgaagaagaagaagtcgtagaaacaatttccaaactaagcaaactaaagattgtactctaagcaagctttaaacgctcgttaagctcccgagttcaagaggttatccacccaaatcgtgtaagcagaaccacattaaacgatcgaaagccgcccagcgatttatttatgaatagtttatgtacaagcgaaagcgtttagattatggtttttgagcatttttgtttcatcattaagtgtcatttggattcgtatctgtatctcttagcctattcggcagcgataagctgcgtaatgccgtttgtggtgatcagctgcaacagggatccagttttgggcctctcctgatcttgggtccacttaaggaaaagtccggccacctcggtgagcggtgtccaggttccaaaatctgcatccggcatccatttacggttcatgggtgtatctagagttacgggaagtatggacacagccagggaaccagctggcagaccggatttctcagcgcccagcgagcgggtcagctggtggacagctgccttggccattccatagccgatcataccgggtgtgccctccaaagcgggcttagctccagtgagagccagcaagcctccggcctttagatgctgagcagccacagctgccgaaatggcggaggtcaacacgctctgcttccacatgagatcggcattcttggccagatccttcttggcattaccacctgcccagccgccagccacgcagatgacggcatccagtttctcgccggcaagggattccccgactttggacaccaccgtttcctcctgttccacccaactagcatcgcgtggcaccacaatgctaacgtcggccttctcgttctccgtcagatcgatgctgccaacccactgatggattatccaggtgaaggtcgtagttgacgcgagggaaaacaatagataatgaggcaattgtatttaataattaagtgaaaggtaactcacataattgttggctttaaagtgatcgacacaggccgaacccaaggctcctttgccaccgtaaataaccactcgacctgcggacatgatgcgtgctgccagttttaaagttgcaatttaactaaatgcgagaaaaacacgagaacaccgattttggtgagtcaaaatcgtgcgggagctttgaacgcagctggggtttttaaccgcaagaccagttctaccggtaataatcgggagaatgaatttcaagtcgagtttaagcttcagcgtgcagatatagctttttattcgctacaaaaagatacagcagcagcaacaagtggaaaatcaataagatgaccagaaaacgcacagcaaggtcacactgtcgtgagtaaggcgttatttggtattttttttttttggtattccacagctgttcgccgccaactttacccgtctcgctcacgcattgctcgctgctcttttttgaaaagggaaatgcgtgaaattcgtgcgccgcatttccaccagaccagagttacgcgccgtagctgtgttttccactcagtcccaccagtcgtcgtcgcgttacgtcatggacactctaaaatatgagccactttcgaactacaatgtagttcaggcaaatagtgaacacagaaataaaactgtcttatctcaattaaagaaaaatttccccgaattgtttaaatcacaattagaaaatatatgcagcgaatatatagatatatttgcattagaatcagaacctataacagttaataatttgtataaacaacagttgagattaaaagatgatgagccagtatacacgaaaaattatagaagtcctcatagtcaagtggaagaaatacaagcccaagttcagaaattaataaaagataaaatagttgaaccatcagtttcacagtacaatagccctttgctattagtacccaaaaagtcaagcccgaattctgataaaaagaaatggagattagtaatagactatcgccaaattaataagaaacttttagctgacaaatttccactaccgagaatagatgatattttggaccaacttggtcgagcaaaatatttctcc

SEQ ID NO: 9371 - DNA, 708 bp, DROSOPHILA
atgtccgcaggtcgagtggttatttacggtggcaaaggagccttgggttcggcctgtgtcgatcactttaaagccaacaattattgggttggcagcatcgatctgacggagaacgagaaggccgacgttagcattgtggtgccacgcgatgctagttgggtggaacaggaggaaacggtggtgtccaaagtcggggaatcccttgccggcgagaaactggatgccgtcatctgcgtggctggcggctgggcaggtggtaatgccaagaaggatctggccaagaatgccgatctcatgtggaagcagagcgtgttgacctccgccatttcggcagctgtggctgctcagcatctaaaggccggaggcttgctggctctcactggagctaagcccgctttggagggcacacccggtatgatcggctatggaatggccaaggcagctgtccaccagctgacccgctcgctgggcgctgagaaatccggtctgccagctggttccctggctgtgtccatacttcccgtaactctagatacacccatgaaccgtaaatggatgccggatgcagattttggaacctggacaccgctcaccgaggtggccggacttttccttaagtggacccaagatcaggagaggcccaaaactggatccctgttgcagctgatcaccacaaacggcattacgcagcttatcgctgccgaatag

SEQ ID NO: 9372 - protein, 235 aa, DROSOPHILA
MSAGRVVIYGGKGALGSACVDHFKANNYWVGSIDLTENEKADVSIVVPRDASWVEQEETVVSKVGESLAGEKLDAVICVAGGWAGGNAKKDLAKNADLMWKQSVLTSAISAAVAAQHLKAGGLLALTGAKPALEGTPGMIGYGMAKAAVHQLTRSLGAEKSGLPAGSLAVSILPVTLDTPMNRKWMPDADFGTWTPLTEVAGLFLKWTQDQERPKTGSLLQLITTNGITQLIAAE

SEQ ID NO: 9373 - DNA, 10206 bp, DROSOPHILA
acatcttgagcgttgtttacttttacgtagttagttaaaaatgtttgcgtccaatttgaaaggcatcgattgcggctctagatgttttaaccacgtccaaaagaaagaatattttaaagaacgcattccattccatactgcaactagacttatgaaagccgctgcacacaagtgctctagaattccatttgagttggttttgcatttagctaatatagcataccctgcagcatttagactttcaatgctgcatacttttcgtctgaaaatctatttctcaagccctgcagtaatgggctaccaagtattcggattcaagtattatgaaaattgctagaactaaattttttcctagagttaagttcgactttgttgagtagcacttcaaactaaagaactccatcatgccacaccatttaagataatatagcgcaacagattaagaataagtttagcttgatattgaaagcgaacaattgcttatgtgaaattgcctcaaatatcctttgagatatggcacacctcaaaccgatgaattccttgccgcattgccaaaattatgattgcagctacaattcgccattcagtcattagttggagattaaaaacgggtttgttaaagccaaacctcgcgcactgaaaataactgaagcattcgattgcgaaagcaagctgtttgtttaatacacgtacaataaataagcataaactaaatacatatgtataaaaatcaactataaatgataaaaacaatttcgcaaaatttttgaaatcccttgaaatggtaagtacatgctagttaagtctaaggacataggcccaaggtatatataatatatatataatgatatattgtatatatatggtgtgtatatagtcggcagagtcctgtgctcgccgatcctttgtctgtttgtcttttgtgtgttgccgttgctctgtctttacatttacaaataatctcacatggggtttttggatgccatcgcatcctagaatcctagaaggagggcttgctgctgcctatgctgcgggcgggcaggctgttcgtcttggccgtgggattatctcgggcctgcgagtgggctaccacgatgctgaggcactgcacccactcctcggcattcttgccgtccttgggcttgagtattaatgtctggtcggcggtgaagatttcgaaggccttcggtatgttacgggcaccacgagatacctttaccgaacgtatctgattcacatcgatgctctcacctccgctctgaaataatttaagatttagtaagatttaagattaagtttgtctatcgatatactcacagagcctttgcaggacaagtgcgctccggacaaagtgaagtagcgcgttcgccagcgcctgaatagtcgccacttgcccttcttctccttcagctggccctcgatcatgggctgattgctgccattgagaaagcccaccgccttgtccggatgattgcagaggaagcagccccactggtattccaactcattgcagtttgggttggacttgtctgtcttggagacctcgaacacatccagaaagcccgagtgacgcagctcgttcaccaggatctcgcggtcctgaaaaattatattgtataagagatactatagcttatggcattttgaagaggtattgacccaccttaacctgaggaaactgactggtaaccagctcggtgaagctgcggttctcgcacttgagtatctgccaaatattcttgagattgctaatgccggactcccgcgtgctaagcacgcacttctccttcacctaaattttaaaaatcatacaaaattaaaaggacctaatgcaggtgaaaagttgagagcactcacaaaatggcgcacttgaaagtccaggaacatcatatgtatccaggtcttggggttccgagttcgcatcgtgaagcaagttttggagtacaggcaatggggaccacgaatctggcaggcgaaatgcagtttggccacctttttggtacgacgctctgcaaattcattggaaactgtgtgatgtgtttgtgtgtgtatgttgggatgtgtgtttatgtgcgggatgtacggggaaggagttagagattgagggaaaggattgcggctccaaggacttaccctcaatgctgcaacgtgtgggcggcggcagatgctgcgatacctcatccatgtaggacttgatcgaattgaagttcttctcgcagaattgctgaacaggatcacgcataatctggtatggctcaaaggtgctcatccgctggtccatgacactgttggcattcagtagggtcctgctggtattatcgctgcgccgaggtgccacattggtggtgggtcccgaaacgattacctcgctctggaaaatagatttaacatcacttaatattcttctttatccttttgatgtatcttacatttccgttgactggcagtttcatcactgacttggcatgaccattgctggcggattggggcagcgccggcgaggcatgatggacggataccgcattctgtgtctgcgtcgatggcaaagtggccaccgctgccgactgtggtatggagatcgagcccaccgattgattcagtgcatccgtgctgtacttcatcagcaccgtgctcgagttgagcagcgttgatggtccttgggagtgtggtcgcaccttcgagggcgacgtggtcacagtcactcctccagaggtaacaggtataccatgtcgattgtgtccagttatgaccacgttgttgctcaagggcggcactggtgtcacaggcggattgcttagaccagttggggtcttcggagtagcccccgattgcaccacgacattcccattggagctgcctccaggttgctggttaatctgcgagttactcagccgagtcatgctcttgtgaagtcctcccacggatccgctggccacattcaaccgggtcacactccggtgcgtattgctggcgggatgcaggcgacctgtgctccgggaatcgcctagcttcacccgccgcgtgtatcccgcatgctggggagtgggcgtggcagccgatacgggcgtggagctggcaatgggcgccgaggcggaggatggaggtggtgtgggcgtggcactgactacgctggccggctggacgattgtggtgttaatagctggtgcgccaactggaactttaaggtttttgtttagtatatattttatttaagcttatcataattgatcttacctggcttaagcggcggactgggactggagctattcaagctgacaatggtgacaccaccagaggtcttgttcgccaagccattccccacatcctgttgcgagctgagagctgcgttcttctgccgcacgcaggccagtactttgtcggtgaacaaaaccggataggcggaacagaggcgagtggcctcctgttgcaggagtgcctgcgtgggcaggtgctccagcacaaagtccaaagcctgctgggccgtctccttgctcccgattcccgcggtagtcataatctgggcacaaagcggaatcgttccaggattggttttagctgccaggcgcaattgctcgaaatggtcgacaagaaggctgggcgagtgctgggaaagcttcagcagaatctgcatggttatgctagaagtgtcgctatcgagcagggagccacaaagttgcggaacgcaagattccagaacctctggtgacttctgaacgatcagcagatacagctggaacaccgccattctctcctgcggatcacactgtggcagcaggggcatgagaagtggtgcatgtggcgtcaccgcctccggagccacctcgtacacctgtgaaagcactcggagtagaccatagtttccggacagaatggactccatcacggactccgtatgagggctcagcaagccggcgtgatcgatggccgccagtgagaggtaactggccaagtttcgcgatagctcacggtttcccttcggaaggaactgcacggcgacgggaagggctattttcatcagttcttttttgtcatagttctagtaaaaataaagaaaatagttattaaatgaaatctaatctagaaagatgcttgtcttaccaggaaaatgctagagatgatatcggcagcaatcttggcatggggtggctcttcctttgttgttcccgagggttggaggttccatagcagacaggtcctcagaagatccaccagagcagcacagtatcgctccgcagttttcgtttcccggatgcaggatagcacccgtgtcacacagatctccaccacactctggtcattgttgttcttcacatagtccgcgtgcgagatgatcggactgatctcggaaagctttaagggatttcatacaattagtttcgatttgagaacaatgctgaagataacctaccacctccgtgatgtcgtcgactatatctgcatccggcacggaaaagagatctccggctcttgagagatcgcgtttggcgagcactttgttgaaaagttcgtgcatcgtggagaattccccaattagtattcgtcaaaattcttcatctgcagcaactaaaaaaaatatgaattccatattaacaaggatctttgtaaaaattgcatccgatttatatattcttatatgcagttattgcttaatattttagtattgcaaaagaaatcacgatccattgaaattgactatatccaatgagaattagtcgggtgtatttgtttattttagtcagtgcattttttcactgccatgtttggaattggcccattgccaaagttcaggcgcctctggcagccactttttatcttatcgccgggcatttgtatagaggtttcgccaaaatatttacttgttgctccagagcagttctattctcgattgtcccgaaagtgcatatataagttgctgtagttgtataaatatagatattccgcggacaccaaatacttgttgcactgcctcgatgtttatctaagatactctcaggcagaattgcccttgctcagcctctgatggaatgtatatttcatgttatacgagtatgtatgcagcccagccagagaacttgtgatatcggaaatccaagcgaaatatactagctaaaacaactatctttatggcaaacaaatttgggtcaattatctttatggaaccttcaactaatacgcattgagtccatgattggcccacattaattgcacaagctagtttgtttacccaagaatctgcaccgtatggccggccagaaattctgcgaaaatgattcggcggctctgttttccgtggggtttcccgcaaacgctatttgtgtttgcccacttgcagttggccgcttgttggttccgctgatagcaccggtaaattcttggccaacttgccgtcgagttctttggaccttcgtggaatgcaggtcttttgattagatgagcaaaattccggcaagggattagacgcgacttagcggatcagccgggaatttgctggctggccaaatccgtgggcgctaaaaaaaaaacatgaaatgaaaagagctggcagaaaagtcatttcgcgcggctgtcgcgccatcaaggaagcagacgctaacgccaacgcgcctgggttattaaattttcaaataaaaactgaaaactgaaagccgaaaaccgaaaactaaaaaccaaaaccaagagttgcataatccatagaggccagtcaggcgggcaaagcggctctgcacgcgaattgcagacgggacgggttgctttgggtttgggttcgggcctctcgacgggcggacaagccgacaagcggacggacggacggacagacatttgcttcctggaaatcgggacagaagacagcgactgggctgctgtggttgttgttatttatggctcattcgcgctcaggttgcagcaccaacaacaaacagaaaaactggttaaaaaataaataaagaagcagcaacaagtcgcagcaacagcagcggcagcagcagcagcagcagcaactttgagcgcccgagagaaaattaaaagagaaatagaaacacacatatgtatgaaaaaaggggttcgagctcgggtataagtaatggatgatggcgttggctaaaacataaaccgaaaccggtgcggcaggttaatacacacgaagccccgggcccaagatcgcagggggggggaggtttagaggagggcatggtctccagatttcggagacagagtggaaacaaaggctgtgccaaaattcggggccccataactcttcgcttagattctatttgcattgctccacaaaatggcagagttcaggaacggaataaagccagccactaaatatcttagttcgtcaagcctttctattacagtcgaacttcttggactcttggacagcaatttgggtcaattattgtgattactcaagctttaagcatttcaaaatcacgaaatgtatatgttttgaaactacaatccattttaggtaatgaaatgtattttgaatcagtatttttgaagaatttgttaaacccacaataagacttctaggactaggcggctcacggggtgatatttgaatatactcgatgacgcaaagttcgtgaatattcggagtgaaaaagatatgcacgcaatttgtagatcttgaacgtgacaagatcacagttcgacttacagaagtctgtctgtgcttttcgaagagcgtgcgaatgactcaattcccagatggcgacacagatacagagatgcctcgctatgagtaaccctacctgttggccagggctggactagccgaccaagtggcacggccttcgtggatctccttgttgggagtttccgcgaaccgggcagccggctcacataaccgtcacactggacgtatacgtattctgatccagcgagcattccgagcttttccgaaaccgagtcgcattgcgtgcttggcaagtgtttggttcttgtttgtgcattccattgtcatacctggacaatccaatgtggcccgaggagcgtcaagtgtctcgactgccagccactagtcgctggccactggcaacttgcaacctgcaacttgcaacttgcgactgcaattacacgtcggttcaaagtctgcaaggcgcctcgggggaaaaaggagtttttggcggcttatagtcgcaaaacatacataactagtattagtcgatgtcgctggaaaactcgttttcctctaactccgatcgcacaatccgtttttgcgtctgttttggtttctgactacctggtggtgggttgggtttggctgactgggatgcctccgattggaaatatatttatctagtcaatttgaaatctgggttgcaaatgtcatcaataactattggttaaggttgagtagtagtaaggctcttgtgtgggaactatctcaacaatgagcgaagtatgtatcttttcaattgcatgcatttaatatcagtttcacaatgtagatctcttataagcaaaactgaattgccaagtcagctgttttgatcgatccatgagttaaatagagagacgatcatgttcgacaacatttattcaaaatcagtatgcatttaaaatcaaacttatacgttcttagccaattcatatttaagtgtattgcatcaccaggtaaattatgttatctaccccaccgaaagccgaaaactacctacatgtacgaattagcaaaaaattataatttattcgtaccgcttctcctttaccttccccccttgccaagtatttggggactgcgaaaagtaaagacaacatcaacacggtaatccgatccgcagacgaggtgattccggggacaggagtgcgagtatgttgaaaaatgagcggcgcgtgaaacttattaatgaaaaggccgcgaacgaagaaattgctgcgaattagcccaacaacaagaagcgggcacacgggaatatatacaaatatcgccacagatactaacgctcacattttggcacattttaatgggattggcggagtctgcgatcggagattttctggatttctggctacctgggcaactttttattgaaatatctggtgaaattgcggcataaaatcgtttgaatttagcgaataacactgatcttgtggtattattaactctgctttaaagctataagctctcttctgaaaagtctaagattaaacttaagttgagaatttagtttcgaatttaatatatgaattataaatgcatacattattaacatacgcggagatagcaaaagcataacattatactttattattaagtttgtaaggtcaaactttagtcactcacgattagataaatgttacacttttaaaaaacctatcactgtttgatttgtcgaatttcatattattgctttgattatgtttaaagagcactaaaccccatataaagtaagtggctaacgaacgaagttttaactcgcaatccaatcgaggcaatttcaaattgtatctttcggtctgcgaatttgaatgcggcaacggtgaatgggcgaaactcaccgaattgcatctgcggctgctggcagacagatgaccagtccgtatcacttcgaagtgtgggcctcgaattcggagtcggtttccgattcggagctaagccgctctctcaatacatcgctcttgcagcagcaacacaaaatccaaaaaaaaaaaatcaacagacttgaaaaggtaaaaaaggtagacaacgtttgtggttgttgctgctgccgctattgttgttgcggctgtggtgttgtattttttttatggctgctacttttgttaactttgggtgtagttcaatattaatttaattgttgctgctgctgccgataaagcacaaaattcagaattgtcgttggcgttacttatttttttacggccgcgctttgttgccgcgccagcgcattgctttttatgcaaattttcgcatttcgtgtatatctcaaaagatatgtttcgtatgtactattattaatatatgtatatgtgtatattttgttgttttttagtgtcgactgttactgccgccgactgttgtttcagccacaatgccttgttccactatgcctgatttctttgtatttttgctaatcacattttgttaacacacacactcgcatgcacaggcacacacgtaggcaggcgcacgcacacaccgataggcgaagaaagcgacggatacgagccgctggccaagcgaacgcgtttgggcccgaatgaagactgaactgagttatttttcggaatggccgagactggtgtggtggtcggtgtgcctgttgttgttgcctgtttgttttgcacgatcgctctctcttggctctctctatcactctctggactctctctcagcacctttgctaccgtttcgcagaacaggtgtatcggttttcaaggcaactgtgattttttaactcaacattctatatcgaaaacttgtagaggtcggaatttttcttgagcgcctaaaagtgtgcagtgaaatcatttaatccacttccggttgcaaaacaggaatcacacatatgaagtgattaaaaatcatagaaggtttgacaccttcaaataataagaaaacaaaaatttgtaaactgtgataatttatttaattgaaatcttaatttaatggcctacaaatctgttgaatatccgttgaatacacttttccagggtgtgtcctagtcggctcctctttgttaccccagtttgctggtcttcttagccgcacaccagtttatcgctgttttgcctttgcgcttttcattcataaacaaaaaacaatgttattgttattgcggtggctgtagatgtaaatgtaaatgtagatgtagaggctgcttcttgtgtctgcttccttttctttgctgttgcgatgttgctgattcacctgttgcgcacgatttagcaactggccactagcaacatgttgctatcggcagatgatgttgcgattgcatttaaacaaacccaacttaattcgtgaaaaatcgtggccaattatctaaagcttttcgttaagttaaactacgtacgtcaaacaggatagatggatggctcaaggtcgaagttttaggaaatcttcccctcgactttgaaccccgttcgaagcgcggtttggacaaacacactcgaagatccattaacgatgcaccgctaacaagcgccactggcggttcaaagtactgcaaagcggtgcagccagccacttcctct

SEQ ID NO: 9374 - DNA, 3727 bp, DROSOPHILA
ggcccaaacgcgttcgcttggccagcggctcgtatccgtcgctttcttcgcctatcggtgtgtgcgtgcgcctgcctacgtgtgtgcctgtgcatgcgagtgtgtgtgttaacaaaatgtgattagcaaaaatacaaagaaatcaggcatagtggaacaaggcattgtggctgaaacaacagtcggcggcagtaacagtcgacactaaaaaacaacaaaatatacacatatacatatattaataatagtacatacgaaacatatcttttgagatatacacgaaatgcgaaaatttgcataaaaagcaatgcgctggcgcggcaacaaagcgcggccgtaaaaaaataagtaacgccaacgacaattctgaattttgtgctttatcggcagcagcagcaacaattaaattaatattgaactacacccaaagttaacaaaagtagcagccataaaaaaaatacaacaccacagccgcaacaacaatagcggcagcagcaacaaccacaaacgttgtctaccttttttaccttttcaagtctgttgattttttttttttggattttgtgttgctgctgcaagagcgatgtattgagagagcggcttagctccgaatcggaaaccgactccgaattcgaggcccacacttcgaagtgatacggactggtcatctgtctgccagcagccgcagatgcaattcgttgctgcagatgaagaattttgacgaatactaattggggaattctccacgatgcacgaacttttcaacaaagtgctcgccaaacgcgatctctcaagagccggagatctcttttccgtgccggatgcagatatagtcgacgacatcacggaggtgctttccgagatcagtccgatcatctcgcacgcggactatgtgaagaacaacaatgaccagagtgtggtggagatctgtgtgacacgggtgctatcctgcatccgggaaacgaaaactgcggagcgatactgtgctgctctggtggatcttctgaggacctgtctgctatggaacctccaaccctcgggaacaacaaaggaagagccaccccatgccaagattgctgccgatatcatctctagcattttcctgaactatgacaaaaaagaactgatgaaaatagcccttcccgtcgccgtgcagttccttccgaagggaaaccgtgagctatcgcgaaacttggccagttacctctcactggcggccatcgatcacgccggcttgctgagccctcatacggagtccgtgatggagtccattctgtccggaaactatggtctactccgagtgctttcacaggtgtacgaggtggctccggaggcggtgacgccacatgcaccacttctcatgcccctgctgccacagtgtgatccgcaggagagaatggcggtgttccagctgtatctgctgatcgttcagaagtcaccagaggttctggaatcttgcgttccgcaactttgtggctccctgctcgatagcgacacttctagcataaccatgcagattctgctgaagctttcccagcactcgcccagccttcttgtcgaccatttcgagcaattgcgcctggcagctaaaaccaatcctggaacgattccgctttgtgcccagattatgactaccgcgggaatcgggagcaaggagacggcccagcaggctttggactttgtgctggagcacctgcccacgcaggcactcctgcaacaggaggccactcgcctctgttccgcctatccggttttgttcaccgacaaagtactggcctgcgtgcggcagaagaacgcagctctcagctcgcaacaggatgtggggaatggcttggcgaacaagacctctggtggtgtcaccattgtcagcttgaatagctccagtcccagtccgccgcttaagccagttggcgcaccagctattaacaccacaatcgtccagccggccagcgtagtcagtgccacgcccacaccacctccatcctccgcctcggcgcccattgccagctccacgcccgtatcggctgccacgcccactccccagcatgcgggatacacgcggcgggtgaagctaggcgattcccggagcacaggtcgcctgcatcccgccagcaatacgcaccggagtgtgacccggttgaatgtggccagcggatccgtgggaggacttcacaagagcatgactcggctgagtaactcgcagattaaccagcaacctggaggcagctccaatgggaatgtcgtggtgcaatcgggggctactccgaagaccccaactggtctaagcaatccgcctgtgacaccagtgccgcccttgagcaacaacgtggtcataactggacacaatcgacatggtatacctgttacctctggaggagtgactgtgaccacgtcgccctcgaaggtgcgaccacactcccaaggaccatcaacgctgctcaactcgagcacggtgctgatgaagtacagcacggatgcactgaatcaatcggtgggctcgatctccataccacagtcggcagcggtggccactttgccatcgacgcagacacagaatgcggtatccgtccatcatgcctcgccggcgctgccccaatccgccagcaatggtcatgccaagtcagtgatgaaactgccagtcaacggaaatagcgaggtaatcgtttcgggacccaccaccaatgtggcacctcggcgcagcgataataccagcaggaccctactgaatgccaacagtgtcatggaccagcggatgagcacctttgagccataccagattatgcgtgatcctgttcagcaattctgcgagaagaacttcaattcgatcaagtcctacatggatgaggtatcgcagcatctgccgccgcccacacgttgcagcattgaggtttccaatgaatttgcagagcgtcgtaccaaaaaggtggccaaactgcatttcgcctgccagattcgtggtccccattgcctgtactccaaaacttgcttcacgatgcgaactcggaaccccaagacctggatacatatgatgttcctggactttcaagtgcgccattttgtgaaggagaagtgcgtgcttagcacgcgggagtccggcattagcaatctcaagaatatttggcagatactcaagtgcgagaaccgcagcttcaccgagctggttaccagtcagtttcctcaggttaaggaccgcgagatcctggtgaacgagctgcgtcactcgggctttctggatgtgttcgaggtctccaagacagacaagtccaacccaaactgcaatgagttggaataccagtggggctgcttcctctgcaatcatccggacaaggcggtgggctttctcaatggcagcaatcagcccatgatcgagggccagctgaaggagaagaagggcaagtggcgactattcaggcgctggcgaacgcgctacttcactttgtccggagcgcacttgtcctgcaaaggctctagcggaggtgagagcatcgatgtgaatcagatacgttcggtaaaggtatctcgtggtgcccgtaacataccgaaggccttcgaaatcttcaccgccgaccagacattaatactcaagcccaaggacggcaagaatgccgaggagtgggtgcagtgcctcagcatcgtggtagcccactcgcaggcccgagataatcccacggccaagacgaacagcctgcccgcccgcagcataggcagcagcaagccctccttctag

SEQ ID NO: 9375 - protein, 992 aa, DROSOPHILA
MHELFNKVLAKRDLSRAGDLFSVPDADIVDDITEVLSEISPIISHADYVKNNNDQSVVEICVTRVLSCIRETKTAERYCAALVDLLRTCLLWNLQPSGTTKEEPPHAKIAADIISSIFLNYDKKELMKIALPVAVQFLPKGNRELSRNLASYLSLAAIDHAGLLSPHTESVMESILSGNYGLLRVLSQVYEVAPEAVTPHAPLLMPLLPQCDPQERMAVFQLYLLIVQKSPEVLESCVPQLCGSLLDSDTSSITMQILLKLSQHSPSLLVDHFEQLRLAAKTNPGTIPLCAQIMTTAGIGSKETAQQALDFVLEHLPTQALLQQEATRLCSAYPVLFTDKVLACVRQKNAALSSQQDVGNGLANKTSGGVTIVSLNSSSPSPPLKPVGAPAINTTIVQPASVVSATPTPPPSSASAPIASSTPVSAATPTPQHAGYTRRVKLGDSRSTGRLHPASNTHRSVTRLNVASGSVGGLHKSMTRLSNSQINQQPGGSSNGNVVVQSGATPKTPTGLSNPPVTPVPPLSNNVVITGHNRHGIPVTSGGVTVTTSPSKVRPHSQGPSTLLNSSTVLMKYSTDALNQSVGSISIPQSAAVATLPSTQTQNAVSVHHASPALPQSASNGHAKSVMKLPVNGNSEVIVSGPTTNVAPRRSDNTSRTLLNANSVMDQRMSTFEPYQIMRDPVQQFCEKNFNSIKSYMDEVSQHLPPPTRCSIEVSNEFAERRTKKVAKLHFACQIRGPHCLYSKTCFTMRTRNPKTWIHMMFLDFQVRHFVKEKCVLSTRESGISNLKNIWQILKCENRSFTELVTSQFPQVKDREILVNELRHSGFLDVFEVSKTDKSNPNCNELEYQWGCFLCNHPDKAVGFLNGSNQPMIEGQLKEKKGKWRLFRRWRTRYFTLSGAHLSCKGSSGGESIDVNQIRSVKVSRGARNIPKAFEIFTADQTLILKPKDGKNAEEWVQCLSIVVAHSQARDNPTAKTNSLPARSIGSSKPSF

SEQ ID NO: 9376 - DNA, 3767 bp, DROSOPHILA
aaagatgcgctgcaacatccagtccaggttatagcctagctccaggcgaaccttcagcggtcggtggcagtgaaagagcgccgcgatgacaagggatttaagcgcccgggtcttacaattgcgtatcgactccagctgcagctcggcgggcagattcagattccaaccagaggtggctccggtgcagtgacgccggtaaagattgcgccaaaaggcgcgagaagccaccagtctggaggtttgtttacatattagagcgaaggtctgtacgtcctccggatcaatgtgcatggatatgtggaaccaaatgtcataccgcatgctaatcacattgttgttgttgccctccgccatgggcaaagtgggtgcagtggctcggaatgtggacttttgcttcaccgcgacgcagacatccgattgccgggcatatatatctgagggtgaggtaaatttgcactgcaaattcggagcacccaagtgagcgggtcaacttaccacatttccctttactacggaatagtttgtttttaataaactcatcacaatcggcatcaaaactcattgtgttcggctctcgctggttcaacagctgttgtttgcttgcgagttggtcaggtggtgacagagttgttatccgacgcgaatggattaaaataacaattattagtctattttctatgttttattctttattgttatatatttgtaaacttcaaatagtatgcagaatacgaacgtcaagagacagtttgcttaaaaaagaaaacataaattttgattgaatttaatgttactttgttactatggcgcaagtataattatcaaaacaatttgtgttataaaaacaactgcataaagcaaaacttttgaaggagcttaagtagtttacaagctttagctatttacagttgatctagccagagatataaagcccagatctggtaactctgttcaagtgccatcaccggttggaaatctcgctaaatctagctagaaatagataaaacggtacaactgctaaaattgattaattgttaaaacaaaaatttcgtcaaagttcgttgataagactctcctggagttccgagaccataacaacgagcaattccgcacgaagcggtcacttaccgtccgtccaaatcagtgcgaaaaagcgactatcgagccgatcgtacaaaagcaactaccgtgccgtggggtaaagttcacagcacttttccttttgtccgaagtcgaagtcggattttgtcaccatggtcgacaacaataacctacgcagtgcggtgatcagcgatgccccgctactgccgccctcgagcagcatcggagtgggcgtttcaagcggcggaggatatccgccggaagcggtgctgcgtactccgtatggcaatgttagggctctgcccggaccggcgcagccccctcctctgccgcaatccccattccagcagacacaacagtacggtggtttcggcagcgggtacggcggaaacaactacggactcgggggttatggtggtttcaacagtggcgcctttggatatggtggactgggtggatttggaagtggacttggaagtggatttggaagtggatacgggtatggaggtggctatggcggaggctatggtggaggcttcggcggtgggtacaacagatttggagcaatgggtgaaaacgatgcggagcagcggttcatttatatggcagagtccagctcgcgcccggcctttcagagcatcgaatctctggtgtcggccatcggcaacatcgcctctatgctggactccacattcttcgcgctgaccagctcgtttcgggccattctcggcgtggccacgaactttgtacggctgcgaagtgtgtttgcccagttttggaccacgtttgccatattccgcggtctaaactggatgtacagaaagtgagtgcggtgcaaaagtgtggaaaccgttataactatatatatttcgttaaaggattctctattggctgcgcctatcgaacctggacccttcatcggcagcctttaagaaggcctttgccgaggcactgaacgaaaacaacggccaggcgagaggagcacctaatgtgccgcgaaagggcaactcaccctggccggtgctggcctttatcagcttcatctttactgctccctacttgatcatgaagctgctgggaaccgtgacgaacaccgcccaggaggaaggtaagacatgcctgcacattgcacagcccagtttatctaatcgggagcactttgctccgttcatgtgctataatctggccgataaggcctgttcagataagactgcgaataacgcttgtgctctcatcccaaccagcccgtaatccggccaagtggactgcgccgattcagactcaggccgtttacgaattcgtggctcgcagcccgagcgagctttcgctgcgcgccggccaaatgctacatgtggctccccgcgacatccagcagacgctcaatctgctgaacaccggctgggctctagccaccaccaacggacagacctccggcatcattccaattagttatgtgaaatcgccacaacaaatgcgccaagagatgcaggatcaaaccaagcccgctcagccacaacccgaactaatgaatttgtccgcgggagcctttgcgtctcctccgttggagcagcaaatgaactacgactttaacctggctgcccagcagcaggcgcctttgggaccgccctcaacgacgtcagctgtgctgggcgagggattcgcctgagccgaccaaatcctcggagaattagcttaagtttaagttacgttccgttcagcttctgtatatgtacgtccacgtccctgtattttaggttagcttccgccttttgtatatttccatttagttgtaaatgtttattagccagcgatcccaatgaaagtaaacataaaccatatgcgatgtcatggattattggacttattgcttgggttgggtgcaagcagaagggaggaaaagattaaattctctgtttatcatattttacaatatgcaaattacttctttattaacttgtcactcggttcgatttcgtctcacttgtttgcaatttcctttccatccatgcaattatttcgtttcattacacaactacatgctcgacacttaattgttaacgccttatacttgactactaatttgtatttgcatgctgttgtattcacttgaagagggttcaataatataaatacaaattctgaaaatgtatatcgtgttttaattgttattactaattaggtaggttgattatttcgcaactatctgcactcccttgtcaacttaaaatttgggttttgagaatctaaaagaatcgctttgtcaaagggtgttagcaaattaaacatatttcatatgttcgctcttgtctgcagttcaaactgctcgtggcattctaaaaataattgcatttcactgcggttgtgtacagttttggtatattatattattaagagacaattacccataacattatcgcttttgcttaagcctacccaaacatgaaaaggccattggggggaaaagggagactgataacaactaattagagagtgaacattagtctgggcatgtggtttcgcggtattgccttatgtgaattgtggtttgaactaaaaacgcgttctccttaactagacaaattattttaaaaacgtttcagcttaaacataaatcttcaatgatacaattacaaactgtgtatgcaaactacacttacatacatgaa

SEQ ID NO: 9377 - DNA, 1576 bp, DROSOPHILA
ataaaacggtacaactgctaaaattgattaattgttaaaacaaaaatttcgtcaaagttcgttgataagactctcctggagttccgagaccataacaacgagcaattccgcacgaagcggtcacttaccgtccgtccaaatcagtgcgaaaaagcgactatcgagccgatcgtacaaaagcaactaccgtgccgtggggtaaagttcacagcacttttccttttgtccgaagtcgaagtcggattttgtcaccatggtcgacaacaataacctacgcagtgcggtgatcagcgatgccccgctactgccgccctcgagcagcatcggagtgggcgtttcaagcggcggaggatatccgccggaagcggtgctgcgtactccgtatggcaatgttagggctctgcccggaccggcgcagccccctcctctgccgcaatccccattccagcagacacaacagtacggtggtttcggcagcgggtacggcggaaacaactacggactcgggggttatggtggtttcaacagtggcgcctttggatatggtggactgggtggatttggaagtggacttggaagtggatttggaagtggatacgggtatggaggtggctatggcggaggctatggtggaggcttcggcggtgggtacaacagatttggagcaatgggtgaaaacgatgcggagcagcggttcatttatatggcagagtccagctcgcgcccggcctttcagagcatcgaatctctggtgtcggccatcggcaacatcgcctctatgctggactccacattcttcgcgctgaccagctcgtttcgggccattctcggcgtggccacgaactttgtacggctgcgaagtgtgtttgcccagttttggaccacgtttgccatattccgcggtctaaactggatgtacagaaagattctctattggctgcgcctatcgaacctggacccttcatcggcagcctttaagaaggcctttgccgaggcactgaacgaaaacaacggccaggcgagaggagcacctaatgtgccgcgaaagggcaactcaccctggccggtgctggcctttatcagcttcatctttactgctccctacttgatcatgaagctgctgggaaccgtgacgaacaccgcccaggaggaagcccgtaatccggccaagtggactgcgccgattcagactcaggccgtttacgaattcgtggctcgcagcccgagcgagctttcgctgcgcgccggccaaatgctacatgtggctccccgcgacatccagcagacgctcaatctgctgaacaccggctgggctctagccaccaccaacggacagacctccggcatcattccaattagttatgtgaaatcgccacaacaaatgcgccaagagatgcaggatcaaaccaagcccgctcagccacaacccgaactaatgaatttgtccgcgggagcctttgcgtctcctccgttggagcagcaaatgaactacgactttaacctggctgcccagcagcaggcgcctttgggaccgccctcaacgacgtcagctgtgctgggcgagggattcgcctga

SEQ ID NO: 9378 - protein, 440 aa, DROSOPHILA
MVDNNNLRSAVISDAPLLPPSSSIGVGVSSGGGYPPEAVLRTPYGNVRALPGPAQPPPLPQSPFQQTQQYGGFGSGYGGNNYGLGGYGGFNSGAFGYGGLGGFGSGLGSGFGSGYGYGGGYGGGYGGGFGGGYNRFGAMGENDAEQRFIYMAESSSRPAFQSIESLVSAIGNIASMLDSTFFALTSSFRAILGVATNFVRLRSVFAQFWTTFAIFRGLNWMYRKILYWLRLSNLDPSSAAFKKAFAEALNENNGQARGAPNVPRKGNSPWPVLAFISFIFTAPYLIMKLLGTVTNTAQEEARNPAKWTAPIQTQAVYEFVARSPSELSLRAGQMLHVAPRDIQQTLNLLNTGWALATTNGQTSGIIPISYVKSPQQMRQEMQDQTKPAQPQPELMNLSAGAFASPPLEQQMNYDFNLAAQQQAPLGPPSTTSAVLGEGFA

SEQ ID NO: 9379 - DNA, 3654 bp, DROSOPHILA
caactcatcgggcgcaaaggagcagttgaaggtaaccgaatctcgggtggcggacaagcactgcggtgaggtgctgaagcacaacaaggccaagttcgatgagttcctcacggtgccgccaactactccatccacgcaaagcgaaaaggatcccattcgagttagctacacattgcgattcatcgccaagaccttcaagctgcacggtggtggcgacttggtcatggactttccaataaccattggcacagtgccgctgctgggaagtgctgatgacaaggggcccggggcggagaagtcccagcccagtggtgcctctcatccaggtgggttttgcactaaagaaagcataatcgaaagtgttattaatcgacgtttctccggcttaggctcacccaactttcaggaggacgtcagcgatgagcaattcgagtccaacacctttaagccaagatatcccgtctatccatttgatgggaagcctggaaccaatggctcaaacggggcagctaattttcccagtctttatcccaaggcagaggaggcgcatcctgctacgcctgtgaaattcacaccaaatcctgtgtcgccagccgcacaaaaatcgccaccatatacgaccaacacacctgttgcttctccgccaggcggtaattttgaggtgcttggattcagtataccaccagactataaacccacgcctagtgctccagccgcctcttccactggcggcattgggtggaaatagggaccataacttaaccattttgtattctacaccttaaggcatttttaaatatacaagaaagcccgcataagtggcaacgctgtgcatgtgacagctatattaatatcgatagttagtatcattttaatcctaaatggccttttattaactcgagtataaacatagtgatctggtttcaggaattatgcttactattaaaaaatatttatgttcccaattaagaaaaccctaaaactgaattttagcttctagctattttcttactattgttgtcaaccacgatagccgatagttgccatcgctgttcgctaaaagctcatcgccagcggctcgaacagctgattccgtgcacttggcgacgtaatttagtttgttttgttgttgttgcgtagaggtttgaagcagcgcgtcttgaattcggaaaaccagtttgtggaagtgggaagcggccaacttggacagcggcagcaggggattgacacaactgcaacggcatctcaacggcggcgctattacaagtctggcgaaaagaaagttttgacgcaatccacgggccgccgcctgtaatgaagaagcgtcggcgccgcagtcactgctgcactctgcccgcgaacggacgcatctgctccaggtgagctcagattgtagtgcgctgctctggacattcagcaacatcatcatcatcaccatcgagcgtgttgccaatgcctttgtctctttatctgagcagcagcatcggaattttgggaactggacaacggtcgccgagacatcgaacaacaaaagcggaaaaaagtgaaatcgctgataaacccgaataccaaccgagctattgtcaatcaatgaacggccgtttgaacctggagtcaacttgggagctctgcgaattggcgggcaattggccataaccgaccgagataatagtgaagtaatcgcagagacatacgcacgctccgtggagcatgatacttgtaagtctcatcctcagatgaattccactcctactatttcccaattcctgtctacgcacttgtacacaacaatttgtccatcgactttgatgaatgtgtgtaaacaagtcgaagtttgcgccctgccgcacctctaaaacgttttgaatgaaagctacaggcaagctttgctaagtcggattttcgaaaactccatctttgataccagtaaaacctagcatatttcatttttatcaagaaacaatcttaagctttctttttaacagcatctaccttgaatttcacaagagtcaagtaaattacaagtaaccttcaaaacaaattctttatgataatatataagctatacctattagatccagcctcatagaagttgctaagtccgagttaatagttgcatctacatagttccgactgtaataacgtctccacctgtctgcgtttctttattttcagaaatgccattgaaaagttggcagtcgcagcaataaaagtgaaatccgcacgagcaaacatacgcacacgaaaagcaaaaccaaaggtagctccgacgcagacatggcggtaaccacaggctccaccagtgaggcgaccacaaccacaactcccgttccgcgacgcaagcacagtacgcgggagcagctgcatcaaatgctggccggtggactttcggcggccattacgcgctccacctgccagccgctggacgtgctaaagatccgcttccagctgcaggtggagccgctgggcaagaacgccgccaaggagggaccaggagcccttacctccaaatacacatccatcggacaggcggtgaaaaccatataccgcgaggagggaatgttggccttctggaagggacacaatcctgcccaagtgctgagcataatgtacggcatttgtcagttctggacgtacgagcagctcagcctgatggccaaacagaccagctatctggcggatcatcagcatctatcgaacttcctgtgcggcgctgcggccggaggagcagcagtgatcatatccacgccgctggacgtcatccgcactcgtctgattgcccaggacaccagcaagggatacaggaatgcaacaagggctgtgtcggcgattgtccgccaggagggacctcgcggcatgtaccgcggtctgtcctccgccctgctgcaaataacgccgctgatgggcaccaactttatggcttaccgcctgttcagcgactgggcgtgtgccttcttggaggtgagcgatcgcagccaattgcccacgtggacgctgctgggattgggcgcctcctcgggcatgctatccaagacgatcgtgtatcccttcgatttgatcaaaaagcgactgcaaatccagggcttcgagtcgaatcgccagaccttcggacagacactgcagtgccacggagtctgggactgtttgcggctgaccgtgcgccaagagggcgttaggggcttgtacaagggcgtggcccccacactccttaagtcaagcatgacgacggccctgtacttcagcatttacgataagctcaagcaggtgcgcttctaggtcggacttggagtcggggttaatggcgtctgaaagcaattgtgcgcccaaacggaatctacactgtattttctatttttatatatatttaccgcagcgcgtaaataatattaagacttaggctaactctgttgattagttttcggttgtgcgtatcttttctgggggttctgtttatcatagaccaattgacttggtcagcgctttagtacacacacgaatagttggcgcaccagttaagttatagattgtatgtgctaggttgtagttcattattcggcagagcacctctattcacagacacattcaaatttttatttatcttttgtttgattcgcaaacgaaacgactgcgctggcagttcatttgatatttaat

SEQ ID NO: 9380 - DNA, 1198 bp, DROSOPHILA
atcaggctgagctgctcgtacgtccagaactgacaaatgccgtacattatgctcagcacttgggcaggattgtgtcccttccagaaggccaacattccctcctcgcggtatatggttttcaccgcctgtccgatggatgtgtatttggaggtaagggctcctggtccctccttggcggcgttcttgcccagcggctccacctgcagctggaagcggatctttagcacgtccagcggctggcaggtggagcgcgtaatggccgccgaaagtccaccggccagcatttgatgcagctgctcccgcgtactgtgcttgcgtcgcggaacgggagttgtggttgtggtcgcctcactggtggagcctgtggttaccgccatgtctgcgtcggagctacctttggttttgcttttcgtgtgcgtatgtttgctcgtgcggatttcacttttattgctgcgactgccaacttttcaatggcatttaagtatcatgctccacggagcgtgcgtatgtctctgcgattacttcactattatctcggtcggttatggccaattgcccgccaattcgcagagctcccaagttgactccaggttcaaacggccgttcattgattgacaatagctcggttggtattcgggtttatcagcgatttcacttttttccgcttttgttgttcgatgtctcggcgaccgttgtccagttcccaaaattccgatgctgctgctcagataaagagacaaaggcattggcaacacgctcgatggtgatgatgatgatgttgctgaatgtccagagcagcgcactacaatctgagctcacctggagcagatgcgtccgttcgcgggcagagtgcagcagtgactgcggcgccgacgcttcttcattacaggcggcggcccgtggattgcgtcaaaactttcttttcgccagacttgtaatagcgccgccgttgagatgccgttgcagttgtgtcaatcccctgctgccgctgtccaagttggccgcttcccacttccacaaactggttttccgaattcaagacgcgctgcttcaaacctctacgcaacaacaacaaaacaaactaaattacgtcgccaagtgcacggaatcagctgttcgagccgctggcgatgagcttttagcgaacagcgatggcaactatcggctatcgtggttgacaacaatagtaagaaaatag

SEQ ID NO: 9381 - protein, 217 aa, DROSOPHILA
MANCPPIRRAPKLTPGSNGRSLIDNSSVGIRVYQRFHFFPLLLFDVSATVVQFPKFRCCCSDKETKALATRSMVMMMMLLNVQSSALQSELTWSRCVRSRAECSSDCGADASSLQAAARGLRQNFLFARLVIAPPLRCRCSCVNPLLPLSKLAASHFHKLVFRIQDALLQTSTQQQQNKLNYVAKCTESAVRAAGDELLANSDGNYRLSWLTTIVRK

SEQ ID NO: 9382 - DNA, 4640 bp, DROSOPHILA
gatgggcatcacccacgtcctgaggggcgtggagtggcagatatccaccaccaagcatttgctgctctacaagtgggtttcattgatgttttttctctatgattctgtccatttagagatatatatgtctcttctcagagcttttggctggcagccccctaaatttggtcacctgccgcttttggtgaatgcagatggcaccaagctaagcaaacgtcaaggagacattggcattcagcactttcgggaacgcggctactttccgcaggctttagtgaactatgtggtttctgcaggcggaggattcgagcatcgtaccaatgccaagcagcagctgctcagcatgcaggcgctccatgagcagtttcacatagagcgcgtcaactcccatccgagtcgccttaatcccgaactgctcgatgatctaaatcgcctggagattgtgcagcgtttgtctgggaatgagagtcgtacgaaattggtcaatgaagtgcaacagctggtgaaagaagcctatccgcaacagtaagcccaaacattgaatgcaccataaacatatctaactaatctcccgttctattttagctccaacttagatctagccgaggagcacatattggatgtgctgaattggtcatcaaagcgcttaacactgctccaagatttgaccagcagcaaactgagtttcctgtgggtgaaacccagcgattttcaaattaaagacctgaccgcagagcaactagctcacttgctgcagttaatcaacgctatccaggactttcacaaggatgaactcaacgttaagcttaaatcctttgctcaaaaagaaaacatcaaattcccactaatgatgaaaacactaagagcagccctaagtggcctaaaagaaggtcctggcgtagcggaaatgatggagatcctaggcaaatccgtcactctcgaacgactcaaagaagctctgcccaaggaaagtctgcatttagaagaacatcagtgatttggttaagttctgttgtatttgtatgtatatataatagattaatttatatattgataacttttgcaatttgagaataagatcaatgagtagacaccacatgtagagtcaaaattgtgtatggttaatctgcatcagtttcggatactatttcctctccgcgttccgttttggcattctcgttttgctcgtttaagcaccattcctagacgttaatatactaaaatcgcttagctaaagtcgcgattggtaagaacaatgggcgctgcaaggctccagccatagatgaagacacccagccaactggagacgatcttgacccacatggaagcctcgttgccgttgaacagctcgatttccgaatgaggtctgtgggaataaaaaattgctgggattatattttcctagcacgataagtgctgttgctactcacttgtaccagttggtcagggtcatcatgacatagagcgaggcgcagacgaagaccaagtggaacatggaccaggagtaggtgacgccttcggtctcggtgtcggtgctcggctttccgctgccatccgtgcccgcctctgtgtctgatagagcttctgttaaaactacattaatcagagtgcaagaggaacgccagttggccatatttttcacacagtttcgagtaccaaataaccaagtggggattagttgggttagtcggaaaagaaaataaagaataaacaaagcggcaatagcaaacgagtgttaataaccagtattagcttgggtttttcttttttgtacagcgaggaaaatgaaaagtgagggcaaagcgatcgaatgaatgcgtgatgcaaactgtggaaatgtggtaatcgctgggaatgcgaacggagcacggcgaatggaaacagaacacttaccacgcttctcgctattatcgtgcgagatcttggatacctccaccgccgagctaatgcaattgtacaggatgcacagcaaccagacgaccagtccgatgatgttggtcgtatcgaaggtgaccctggtggtgtgggtgggcggtgctgccgtggtggttgcattgccgaatccctccatcatgccaaacatgcctggattgcattctttctctgttgattcaaaacaaccaaatgagatatacacatatagggttctggattcattttcctaccaggattgttggccactgccgaccaggttagatacaccgtgtacaaggtaaccagggagctctgcagtaggccagaatggggcaagcgttcctgcacagctggcagaatcgaaatgacgctaatcgccagacagaatatgagattgatggagatgaagaacttgttgatgccgcagccagtactctacaaatataaaaacaatgctaattacaaagtaaataagccatagaaacgacactcacggtggtgaagtagatataaagcaaggtaattccagtcagcgataagatatagcacaaaagagtgaccccagcgagggcatagtagtatccacgactgttttcggcgctttctgttgaaagaattcgataattagcgagttgaatcatttgggagatgggccggaacatgactcacctatccagttttcagccagcgagtgagcgaaatccacaatgatgaccagctggacgagtatgaaggccaggccaccaattagacccacccacatcatggccggaccaaaggatccatccggaataaagatggctccaatcgcagcgccaaagcagatcagaaatttcagtggccaaaagttgttctggatgtgcgaacgcggatccctggagctcttcacacccagcataatcagtgacatcagagcgaaaaagcaggccatgccaaagcaaaccctatatactgccatgtaaccaagtgcatactcgcagtcgacttgcagagatcctcccgagacagcgctgagtgctcccgagctatacgacgaggtggagttgatgcagaagggcatcttcttcagggtgtcctgcagtccaggggacagcgcaatcgcccccagtacggtgcccaccaggaggatgaaggcgtacatgaagcgcgatgaggaggcgttggtgcagctcgggcaggcggagcagcacatgctggctgcagtgcctccacagcacatggcgcactggaaatgcaagaattaagtattaaatggagacgcaattgaagaattattctatttgatccaacttgctaataagttttgtcaataatccggattaattgaatgatcaaccatcgaaagttaagtttgcaatacatttttcatattgttttcaacttattaaaaatttaaaaattcattaaagtatctaatagctcaaattgcaagctaaatctttcttttagatgaaaatcatagcagcattcatgagtattgtgaaattaataaaatgttgaatttctccgcatttgaaacatatgtctgcttttattgatttgtagccaatgtaaagaattttacctggctaattagctcgcaattttcttacctgagcggctgaacagatgcccaaagcagctcccattgttgcagcaataaacttagatttttactttagtcaaactgcgtttttattaaattaaacaaatctttgtttgtgaaaatgatagagatggactatttactgcctatagtgactatcgaatacagcggctggcgatatttttcagcaatcgtaagcagttgtaaatttaaaagtaaatgggatcaattctttcgcatatttgcattttaaaaatgctctttcaatgtcttaaatttttcaatatgtttcaaattttaaaatttatagttttaaaattgaagtaaattactgcaattttctgtacttccacagttgccatgctgatttctgcaaaagtcgggaggtgccatccgttccctattcaaatttcaaaacttctgccactccctcccagatggcgctttgcagtttctcaaaacaaaatagtttgtctcctaaaataaactaacaaacgttataaataaacataaaacattattgaaagctgaatgagagagaaagttcagatcaatttttgtgaattaaatcataaactaatattatattttgaattaacttaactattgtaacagttattgatagagtcgaaataggtaatacagaaaaaggttctattgatagtagttttaaaagggtatctgttcagtcaaccagctaatattaccgctcataaatctttaaatgtgtacataaatggagatgttcttaattttaataaatctagtcgcgaaactcgaaactttacctaaggatcgagaaaacatttgttcataaattgagcgtaagcataatggaatattatttaaaaagttacttaatatcattctttacttgtgttataaattagttgcttataatttaggttgactccacaattttaaaatttttactcatataagtttttataaaatctattccttgatcttaatttccagtcactggaagtgggttatttttagtgcatctgcactcggccgattgcattcgagaatacgttcgcacgcggcatctggccacactgcctgcaacgctagctcgccttcgcaacgcgaatccgctcatttcaaattttcaaactcccgagagcggttgcggcgg

SEQ ID NO: 9383 - DNA, 1717 bp, DROSOPHILA
aaatagtccatctctatcattttcacaaacaaagatttgtttaatttaataaaaacgcagtttgactaaagtaaaaatctaagtttattgctgcaacaatgggagctgctttgggcatctgttcagccgctcagatgtgctgtggaggcactgcagccagcatgtgctgctccgcctgcccgagctgcaccaacgcctcctcatcgcgcttcatgtacgccttcatcctcctggtgggcaccgtactgggggcgattgcgctgtcccctggactgcaggacaccctgaagaagatgcccttctgcatcaactccacctcgtcgtatagctcgggagcactcagcgctgtctcgggaggatctctgcaagtcgactgcgagtatgcacttggttacatggcagtatatagggtttgctttggcatggcctgctttttcgctctgatgtcactgattatgctgggtgtgaagagctccagggatccgcgttcgcacatccagaacaacttttggccactgaaatttctgatctgctttggcgctgcgattggagccatctttattccggatggatcctttggtccggccatgatgtgggtgggtctaattggtggcctggccttcatactcgtccagctggtcatcattgtggatttcgctcactcgctggctgaaaactggatagaaagcgccgaaaacagtcgtggatactactatgccctcgctggggtcactcttttgtgctatatcttatcgctgactggaattaccttgctttatatctacttcaccaccagtactggctgcggcatcaacaagttcttcatctccatcaatctcatattctgtctggcgattagcgtcatttcgattctgccagctgtgcaggaacgcttgccccattctggcctactgcagagctccctggttaccttgtacacggtgtatctaacctggtcggcagtggccaacaatcctgagaaagaatgcaatccaggcatgtttggcatgatggagggattcggcaatgcaaccaccacggcagcaccgcccacccacaccaccagggtcaccttcgatacgaccaacatcatcggactggtcgtctggttgctgtgcatcctgtacaattgcattagctcggcggtggaggtatccaagatctcgcacgataatagcgagaagcgtgttttaacagaagctctatcagacacagaggcgggcacggatggcagcggaaagccgagcaccgacaccgagaccgaaggcgtcacctactcctggtccatgttccacttggtcttcgtctgcgcctcgctctatgtcatgatgaccctgaccaactggtacaaacctcattcggaaatcgagctgttcaacggcaacgaggcttccatgtgggtcaagatcgtctccagttggctgggtgtcttcatctatggctggagccttgcagcgcccattgttcttaccaatcgcgactttagctaagcgattttagtatattaacgtctaggaatggtgcttaaacgagcaaaacgagaatgccaaaacggaacgcggagaggaaatagtatccgaaactgatgcagattaaccatacacaattttgactctacatgtggtgtctactcattgatcttattctcaaattgcaaaagttatcaatatataaattaatctattatatatacatacaaatacaacagaacttaacc

SEQ ID NO: 9384 - protein, 451 aa, DROSOPHILA
MCCGGTAASMCCSACPSCTNASSSRFMYAFILLVGTVLGAIALSPGLQDTLKKMPFCINSTSSYSSGALSAVSGGSLQVDCEYALGYMAVYRVCFGMACFFALMSLIMLGVKSSRDPRSHIQNNFWPLKFLICFGAAIGAIFIPDGSFGPAMMWVGLIGGLAFILVQLVIIVDFAHSLAENWIESAENSRGYYYALAGVTLLCYILSLTGITLLYIYFTTSTGCGINKFFISINLIFCLAISVISILPAVQERLPHSGLLQSSLVTLYTVYLTWSAVANNPEKECNPGMFGMMEGFGNATTTAAPPTHTTRVTFDTTNIIGLVVWLLCILYNCISSAVEVSKISHDNSEKRVLTEALSDTEAGTDGSGKPSTDTETEGVTYSWSMFHLVFVCASLYVMMTLTNWYKPHSEIELFNGNEASMWVKIVSSWLGVFIYGWSLAAPIVLTNRDFS

SEQ ID NO: 9385 - DNA, 3423 bp, DROSOPHILA
tccattgttgttcagactgttgctagctgggatatgatagccgctgttgttacgcatgtcagatcctggtcacccagtcatatatctgttgaggggtacgtactaagctcgatgtgatctctgactccgctaacccaaaaaaaggcctacaaacaggttttaaatgctgtgaatgatttctgatcggatttggacgtaagtttacggatgcggattaatcatatctggtggatagatagagagaagccagaatgcatagtatgccactctggcggtgaatatacaatatagattaaccccgccatcaccctgggctaccaagcgtagctgccactccgtaaaccaggtcatatgtacaaaaacttacttgcctcgcgatttgtgacctttactttgttgctgcagctggaaggattaacgggcacggagcaggattgcggtggcggtggtggtgtcgttactctacccaagcgcaggactcccaaaatctaggtcactggcacttgtcgtcagctagctcggtgtgattacattgccagcacgaaaaatgcgccaggtgtaaatgtatgtaaaatggaggcaaaaactgaaatgcaaatcgaacacacatcctttataatcataatgattgcggaggcacaatatacctacaatataactaatagcaaatgcacaattttgtctaataaatatattggattatttggtagcttccagttaagcgtgaaattcttaaacgttcactaaaacttttcacagcctatgacaacaaaaaactaaactactgttttattgaagaacagaatatccatgtgcacagtttggagatggcagcgtgagcacctcaaactgccacctcgcgatagataccgattgcgcacgcaccagctgttcggccgataggggacttcccgaagaaaccgttttaatcgctcactttacccgtttagcctggttttgaatcggaaaaacacgtaaggaaaatcgacatcataggtttgtttttaataattttaatactgaaagttacaaattgtattcgtaatgggttctgtttgcaagaactcttatttattagcaagcaaaatgggttttaatgaattgtcttcgattgttgtcatctccggattttggtgaccttcctatggaattgaagaaagtggaattaaagggtgaaatgttctgttccgtatctaaaaagataaatgaaaaccaataaacaatgagcactttaggatctatagcattagttagcttaccaatgcttggatcgacccactccatggccatgttgtggagtatggccaacgccgtaatcgtttgctttgcagatccatgggaaccctggatttcggtggcaaggataccgaagcgactcatcagcagattgagacactttctagccgatgcgtaggtgaccgcgtgggcgtggttatacagctcctcggattggttcctcgggaatcgaaccggtgtgaacagggaggaggagcagcgcaccatttcgttgcccagcaaaatacgaccccggaactcgttctgttcgaatcgatcctttattttggacagaccgaacatctcggtgtcggtgagcatggactgctcatcgatcagtcggatatcaaggtcccttatcttatgagccgcatcgcaaacaatctgaatgtgaagttcctcctcccggctggtaagggcgggcaaaagctcctctccatccagatcaggggcacagttttccggttgaaacctcacagttgtctgtagtaaagcaccaatgacttgcggcatattggcaattgcttgaaacgccgaaccagatcgctccttttccgatagagtagccggcattcggatatacctggaagctttcgatgataggacagatgccacgcgcctagttatttttgccaaagtgcgtaaactaacgccatgggccattgcagttaatttggggtgcttaaataagaaaaaaatttagtaacaaatcttagttttcatttttggcgggcaattttgaaagccagttcacacggttttgatgtacatacaaattcgcgagtctggcatacagaaatgtttactgtacctctgtgccgccccacaagcgaatagcggatagaatctgcaaatctattggaacttgctccctctttaacggctcaaaatattcaatttccaagtcatcccgtacaatttcaataattctgcgaaggttttccttagtgtatcggtactttagtcgaaatttatgctcatttagatcggtcaatggattaaatcttgggttccttttctttatatgcgttgcccgcgctcgagaattgtgtttgatattcagaaaacattgaaagtctttgaaataatcaaagtcttttagagacctttgaaatctttgtatatcttccattttcacttgtttacttgcatagcagggtggctgttttgtatatattagaaaatacctcatacgtacatgcggtatttaaggctcttgcaacgattgaaattttatgatgaaactttacactttaaaaataatctttttaaatgttgttaattaaaaaaatgtaagtaagtaaattaatacttttattttttttaagcacgttatgtacttttggagttaaataatttttttttatgtatttctatacttttaaaaaaacagaacagaaagaaatcaaagctcgaagtaccaaaaaataaatactagggaaatagaacctattgcgaagatttgcaaaagcgattgttttcagttgtgaagactaatatctacacattccaaaagcttaacgatctttgaaatctggccatttggtcacactgagtccaaagcgtcgttttcaaagtactctttcagtttccattgtgaagttttaagtgatcgcgagtgccaaaaagtaacaatggctgatgatcagggacgtggacgcaggcgtccacttaacgaagatgattcctctacttcccgaggtagtggtgatgggccggtatgtaaactcttattcaagctaggaaaaaaaatcatagcggtaaagcaaattccttataattccgttatgtcgcaaacacaaacacagccatgtacatagattgtaaatgcgcgcatttcttcggaattcgacaccaaaaggaagcactaaaactaacaaacaaaaatctgctatgaatttgagcttgactgcataaaatcttcttgaatttctgttgaccaagcacttttttcaaagggaattcattaaacatatttccaaaaacgcttctttcaatttgaatttccaaggaaatgtaaagcattatctgtttcgtttcatttatttttttttaataaaaactgctaaaataaccatcacctgacaggaaggtggctgtggcaagccgaatcttatttacccttgcagtctatgtctttggaatctg

SEQ ID NO: 9386 - DNA, 1227 bp, DROSOPHILA
aagtaaacaagtgaaaatggaagatatacaaagatttcaaaggtctctaaaagactttgattatttcaaagactttcaatgttttctgaatatcaaacacaattctcgagcgcgggcaacgcatataaagaaaaggaacccaagatttaatccattgaccgatctaaatgagcataaatttcgactaaagtaccgatacactaaggaaaaccttcgcagaattattgaaattgtacgggatgacttggaaattgaatattttgagccgttaaagagggagcaagttccaatagatttgcagattctatccgctattcgcttgtggggcggcacagagcaccccaaattaactgcaatggcccatggcgttagtttacgcactttggcaaaaataactaggcgcgtggcatctgtcctatcatcgaaagcttccaggtatatccgaatgccggctactctatcggaaaaggagcgatctggttcggcgtttcaagcaattgccaatatgccgcaagtcattggtgctttactacagacaactgtgaggtttcaaccggaaaactgtgcccctgatctggatggagaggagcttttgcccgcccttaccagccgggaggaggaacttcacattcagattgtttgcgatgcggctcataagataagggaccttgatatccgactgatcgatgagcagtccatgctcaccgacaccgagatgttcggtctgtccaaaataaaggatcgattcgaacagaacgagttccggggtcgtattttgctgggcaacgaaatggtgcgctgctcctcctccctgttcacaccggttcgattcccgaggaaccaatccgaggagctgtataaccacgcccacgcggtcacctacgcatcggctagaaagtgtctcaatctgctgatgagtcgcttcggtatccttgccaccgaaatccagggttcccatggatctgcaaagcaaacgattacggcgttggccatactccacaacatggccatggagtgggtcgatccaagcattgatacggaacagaacatttcaccctttaattccactttcttcaattccataggaaggtcaccaaaatccggagatgacaacaatcgaagacaattcattaaaacccattttgcttgctaataaataagagttcttgcaaacagaacccattacgaatacaatttgtaactttcagtattaaaattattaaaaac

SEQ ID NO: 9387 - protein, 265 aa, DROSOPHILA
MAHGVSLRTLAKITRRVASVLSSKASRYIRMPATLSEKERSGSAFQAIANMPQVIGALLQTTVRFQPENCAPDLDGEELLPALTSREEELHIQIVCDAAHKIRDLDIRLIDEQSMLTDTEMFGLSKIKDRFEQNEFRGRILLGNEMVRCSSSLFTPVRFPRNQSEELYNHAHAVTYASARKCLNLLMSRFGILATEIQGSHGSAKQTITALAILHNMAMEWVDPSIDTEQNISPFNSTFFNSIGRSPKSGDDNNRRQFIKTHFAC

SEQ ID NO: 9388 - DNA, 7144 bp, DROSOPHILA
tggcgttgtaaattattttttgaatgcacagcaattaagtaaagtcagacgggcaaacatgaaacggaaatcccagcatgttgtgcatgtctctgtgtccgattttccacagaaatggccaggtgtgagatatataatcggaatcgaatggataggcgtaatcacggagcgttaacaggaattatatataccggcggggacttaaaactggtttttatcgtcactcaaagggttaatggacatgggcatagggcatcctgaaggtattccaaattgaattatattctaaaattactgcacggtattctcagagagaatgctatagtcgagtttccgcctatcagatacccgttacttagctaatgtgaatggccatacatacttttcaacgaatctagtatacccttttactctacgagtaacgggtagaaaaagccattaagttaatcttattttgaaacacagatctccaataaaaaaaacactcgttaaacttacacttttatgaagcatcgctttaatttgctttaatccaattcattaacattgcccacaatctatcattgacttttttgtgatccatacattagcatgttttgccaagtaattaaaatgaatatttaaataaaattaaatattcaaatgcagttggtaagaaaaaagtatgcaaattaaattatttattgcggccaataagtttgttgacaaactttaacaatccaattacaagtagtacttagccgagactattctaattaaatatatacgattgggaagagtttgggaagacgcgactaatcactggattgtgttttcaaattcaggaacgtttcttttggcgagacttaatccactacttaactatagtatatatacaggcgtgtagacttacttaatggtaggcattcttataagggctcaggcactgagatctttgggcattgaatcgctgacttttccagttggggcatctttaattggttctaaggactaagctaacttaaatgaactgcgggaagtccagcatgtcgaagctgttgtcaaattcgggctgcaaatggaaattagccgggggctgtgggcttttgcattgcggctcgtagacatccgtcagatactttgtcacgtactcgaacgacacaaactcgctcaagtggcatttgctgtcaccattggcgcggccattattgttggccaggctaattccattagcagatgcggctggcgtacctgtgggcttcgccgtcgtcagcaattgctcgagttcgcttaattgattaatattcgcattgtaacggttattgttgctgttactgttactgctgccgccaccgctgcaaacgctcagcacttccgtttccggtgcgggcgccatgttgccattgccatatgttgctgttgccgttgttgttgctgttgcggttgccagtgttgcaggtcctgcaggacctccgctctgattgtgctcgatgatgacaatgcaatttgacaactcattaaagttcattgaattgttattagctgcaacaccggtgccgcaattgctgcggtctgtcgtcctttcgttttctggctgatgctgcttctgctgctgctgctgctgttgctgctgctgttgatgctgctgcagcagcaatgcctcgctgcaactattgctgcggtgttgtcgctgatcccccggagcacttggcacggccacgcccacgcccgcacccacgcccctttgcaccagtgccgactcggagtgacggcgtgttttggccgccttctttggaccggagggcggtacggaagcgccgccggcagatttgcggcgcagctgtccgttggcgttgcgcagcgcgtggttcttgacatgtttgcggaggctggagggatccgtgtagcgcttggtgcatccaggcagctggcaggcatacggtttctgtaccaaatagagcgagaatcgatagagcgttgcgttagtactgtagtatttgcctcagatgcgagttcgcatcaaaccgcagcggctcagtgccgatgccgaaaactatgcaattgatttctcccattcgccctgcaggcgctcctaactcactcacactcacacacccgcacatggcacacacacacccatgcaaacgttcaccagctaacagatgggccagcgtatttgccaagtcaaatcgttttgaaatgtcatgctgcattttgtttattctggccaggcagcagccgctggccgaaagcgacaacagcaaggggcagtgcactcgaaaaaggttcattattaacatggaaactgacatttgtcttggacaaatggagcttaaagcttagaaattaatcaatcgttttagttttatcaaaaaaaagtatacctactgcataaatatatgcactgcaataactatgaaaactatctaggcatttccaaataaaatgtagagagctactaaaaagtgaagaatttctttttgaaacaccaatttttctgagtgtgtcgcaagcattggcagccgcgccaggccaacacacattgtatccttttgtgatcctgattggctgccctgccccttcagctaggcaacgaaagtaactcgtttagtttattcgatttgcctgccgcggttgttgctgttgttgcctgctgttctggccattgctgctggctgaatcgctggccttttcagctggttttgaccttttttccggttgtcgtacgcgctgacgcggctgctgttagtccctgcctctgtactcctgccccaccgtactcccttccgtattccgattgcgattcctattcggattcgtagtcctattccagctgctgttactttggccatcggccaccgctcgctctcacagatacagtacacacgcaaaactataaatcactcaggcagcgaaatgcgaaatgtgcacatgtcatgctggcagcagcaacagtggctccttcgaccatttcctttttcttttttttttctgccactctgagctcctgtttgggccgctaagcgccttggagtccattaaatcttaaagccgcttcacgctcgtcgggtgaagccccagctgcatcttttgcagccgcgagctcttcaatttccttttgacacgcactgcaaattgctgggaccccagagaagaggccaacccatcccggcaccgcccacgcattcagccgcactcatatgcatagcatatagggatactcaccgtatcgtagtgggtcctttgatgtttcgcccgatccgagctattgctgaacgctttgaggcaacctttatactggcagccataaggccgctcgcccgtgtgcgagcgttgatgaattttcaaattttccaaacgcgagaatgctttattgcagccgggaaactgtaatggaaaaacaaaaaggtggaaaggtgtcatcgaaaattgcaattaccaagggtgggagggaaggtgtttttttttttttttgcaaggaatggcgcaagggataaagcaagaggatgaggcactggaaggacgcataaaattgtgacctcgcagcagatgctgttactgttgccgctgacgcccgcaggtgttgcacgtagtagccccgcccactcgcaacactcgaccactccacctgaaaaggggcaaattacgtttttgcaacagaaacagtaagagaaaccgaaacagaaacagaaacatgtgtaatggcaaatggcagctggagcagcatcagtgggccaagttgatgatgcccgagccaatttaatcgaaaaaaaaaatcctgcaagaatccatcaattactcaaaaatcaaaacgaaagagcatggcaaagggcagggatagaagatgtagcgagtgttggccctaataacattaccagcaactccatttcaagtggactccggattccgttcggataccgcctcgcagctctcgcctcgccctgtcaatttctgtgattgccctgcgccgcacaattcatcatcccagcgatggcgcatcaaatgtcaacacgtgcacgataccataccataccataccataccatccaacgatgccacacaaacaaaaaggaaagcgaaacgcacaaaatgggatcctacggcggaaaagtcgtgtttggacgcataaacaaatgcgttcagctgcggccagggggaaaaaaaaatggataaaatccaaatctattgtttgatgtttgaaaaatgatattctatgagggattgaaaaggttggtaaacagagagaaaatatacacatgtatctcaatcgatggattcccgaacagagttgccatttttcttctaaacaaaaaaaaaaatattctacaaggaaatctccgaactagtcaatggggtcaaatgggttttggtcctgcatatagagtcatcttttcatccttaccggacatttgttgggcttctcgccgctgtgaactcgcatgtggatgagcagcttgtagcgggcattgaagggcttgtagcgcctggggcagtctagccagaagcaggagaagtcctcgcccttgcgcacatccacatggcacttctcgatgtgctcgacgaaggcctgttggtgcgggaactcctcgtcgcatcccgtccagcggcagatgagtgggatgacctcattctctggctccgcctcgggatcacagcaggttgaatccggcttgggatcactttccgccggtggggcaaacacgtcattgtccaggtcatcctcctcctcgttgtagttctcgtcatcgtcactgtccaggctccggaactcctcggccttgatgaactcatccgatagatagttgaccagatcgtctttgcagttctgtgtttgctgttcctgcccatgtggctgatgcagttgctcctgctgctcctgcaagtgttgctgctgcagatgatgctgaaggaactgctgctgctcgcccaacatcagttcatccagttcatcgatggtccagatggccttgtgctcgcgattgggcttctcgacgacctgagccatattgttgtggtagttctccgtggaataccccgatccctgttggtagagattcgcgtaatcctcgtagttgctggcgcacatgggaatgcatttgggagtgccgaaggtggagttcatcgatggcagtttcgccggcgaggcctcctctttgacctgctcctcgaacacattgcccaacttcggggatgcggcactcgatgatgcggccgctgaaatctcgccgagattgaagttcagccaggcgtcgaggtgcggtgatgagcacggtgactggtttttcgattggcaattaatctcgtcgtaattaaaataatcgatatccagattaatggagtcattcgccggctgcacggcatactgactattctgtgcactgcacggtgtgtagggtgtgtaaggggtatatggggtatatggcgtctgtggatgttgcaacatgccgggcagttcggactcgccagtcagacgcgctatgtcctccggttcgaagcggaagatatcctcgcgattcagttgcgtgtactgtccctgctgatagggcatgcccgtattttccgccgctgcgcagacaatgtcatcctgatccgaatcctgctgctgatcctggccagcatagttgtgacagtcgctgaacacggagttcggtgtctcggcggcaaagcagaggtgtgaaaagtccggaaactgcagctcaccgcaggcgtaactttcattcgtttccaccttggctcccggcacacggaacatttcccgctccccattattggccgttatattggcactcagcggaggcgacataaatccgccgtagcaactggccgcctccttgccagaaatcgacgaaatacccgaaatcgacgacgtcttgacgtacatgccgccactttggctggtcttcagcgaggatgacatactatatttcgatgtctctgtctctggtgatttgctgtcgtccgttcttctgggccggccgctttcactttcgcatttccggcagttgtctgggaagattgccaatatttcttcttttttttgtttgttttttatggccaccgaacgcgggaaatcccaagaaaatcgaacacttaaacacacacgtaagtcggaggattttctatgtatctatgtagttcaacacttgcgatgttcacgccaccgcgatctggctgacaataaaccggagagctgctgccgcacgatatttaaacgcccggaacgggatgttccacgggtgtgggaaggggaacggaatcgggagcgggtgcgggtgcgggtgcgggaacgtggagcgttggatcctgcctctgccgctgccgcagttgacgcagttctgggcgatctctgtccgcttttgcttcgcctttggcacgcacatgtgctaccgccgctgccgcagtcagcgccgacgtccctccacctcacccctggggcaaccatcactttagacccccttccaccataggtttttcctcttgttttagtcgcagtgctgccgttgtggttgttgttcttgttaatactgttattttaggcttatgtttgcgtatagaaattatgcgtaagctacaacgagtgccctgtggaaaatgggagcaaaacgtagaaatatgaaagtaaaatgtaacagaaaaatatataattcaatttatggggatttttcaacagtaatttactttttatattctcaataaattcatatattaagactgaaattatgcattagtaatcaaaatgcatgtaaaaagtagttaaaacttttgagccgaaaaatacagttgaatttgttttctaagttttgttttactaagacagactagatttactgctaaaacttctgaatattttttatatatttttaatatatatttcaagtgcttaaaaccgacctatttagagcattctactttgacatcccatcgtcgcattttccacagtgcacttgaccgtggcagtgtcgctgtgctctgcgttttcgtgatctgctgtatcctcagcccatttcctcgatccagcagatttccccgcccattttccattcgccagccgtgctgcactgtgcgatcttgttgttgcacacatggtgtgcaagtgtgcgctgcccttcttcttgtttgtgttgcagttgcagctaggctgtcgaatgttttagcactatttttt

SEQ ID NO: 9389 - DNA, 2669 bp, DROSOPHILA
cgcggtggcgtgaacatcgcaagtgttgaactacatagatacatagaaaatcctccgacttacgtgtgtgtttaagtgttcgattttcttgggatttcccgcgttcggtggccataaaaaacaaacaaaaaaaagaagaaatattggcaatcttcccagacaactgccggaaatgcgaaagtgaaagcggccggcccagaagaacggacgacagcaaatcaccagagacagagacatcgaaatatagtatgtcatcctcgctgaagaccagccaaagtggcggcatgtacgtcaagacgtcgtcgatttcgggtatttcgtcgatttctggcaaggaggcggccagttgctacggcggatttatgtcgcctccgctgagtgccaatataacggccaataatggggagcgggaaatgttccgtgtgccgggagccaaggtggaaacgaatgaaagttacgcctgcggtgagctgcagtttccggacttttcacacctctgctttgccgccgagacaccgaactccgtgttcagcgactgtcacaactatgctggccaggatcagcagcaggattcggatcaggatgacattgtctgcgcagcggcggaaaatacgggcatgccctatcagcagggacagtacacgcaactgaatcgcgaggatatcttccgcttcgaaccggaggacatagcgcgtctgactggcgagtccgaactgcccggcattgcacagaatagtcagtatgccgtgcagccggcgaatgactccattaatctggatatcgattattttaattacgacgagattaattgccaatcgaaaaaccagtcaccgtgctcatcaccgcacctcgacgcctggctgaacttcaatctcggcgagatttcagcggccgcatcatcgagtgccgcatccccgaagttgggcaatgtgttcgaggagcaggtcaaagaggaggcctcgccggcgaaactgccatcgatgaactccaccttcggcactcccaaatgcattcccatgtgcgccagcaactacgaggattacgcgaatctctaccaacagggatcggggtattccacggagaactaccacaacaatatggctcaggtcgtcgagaagcccaatcgcgagcacaaggccatctggaccatcgatgaactggatgaactgatgttgggcgagcagcagcagttccttcagcatcatctgcagcagcaacacttgcaggagcagcaggagcaactgcatcagccacatgggcaggaacagcaaacacagaactgcaaagacgatctggtcaactatctatcggatgagttcatcaaggccgaggagttccggagcctggacagtgacgatgacgagaactacaacgaggaggaggatgacctggacaatgacgtgtttgccccaccggcggaaagtgatcccaagccggattcaacctgctgtgatcccgaggcggagccagagaatgaggtcatcccactcatctgccgctggacgggatgcgacgaggagttcccgcaccaacaggccttcgtcgagcacatcgagaagtgccatgtggatgtgcgcaagggcgaggacttctcctgcttctggctagactgccccaggcgctacaagcccttcaatgcccgctacaagctgctcatccacatgcgagttcacagcggcgagaagcccaacaaatgtccgtttcccggctgcaataaagcattctcgcgtttggaaaatttgaaaattcatcaacgctcgcacacgggcgagcggccttatggctgccagtataaaggttgcctcaaagcgttcagcaatagctcggatcgggcgaaacatcaaaggacccactacgatacgaaaccgtatgcctgccagctgcctggatgcaccaagcgctacacggatccctccagcctccgcaaacatgtcaagaaccacgcgctgcgcaacgccaacggacagctgcgccgcaaatctgccggcggcgcttccgtaccgccctccggtccaaagaaggcggccaaaacacgccgtcactccgagtcggcactggtgcaaaggggcgtgggtgcgggcgtgggcgtggccgtgccaagtgctccgggggatcagcgacaacaccgcagcaatagttgcagcgaggcattgctgctgcagcagcatcaacagcagcagcaacagcagcagcagcagcagaagcagcatcagccagaaagtcctgcaggacctgcaacactggcaaccgcaacagcaacaacaacggcaacagcaacatatggcaatggcaacatggcgcccgcaccggaaacggaagtgctgagcgtttgcagcggtggcggcagcagtaacagtaacagcaacaataaccgttacaatgcgaatattaatcaattaagcgaactcgagcaattgctgacgacggcgaagcccacaggtacgccagccgcatctgctaatggaattagcctggccaacaataatggccgcgccaatggtgacagcaaatgccacttgagcgagtttgtgtcgttcgagtacgtgacaaagtatctgacggatgtctacgagccgcaatgcaaaagcccacagcccccggctaatttccatttgcagcccgaatttgacaacagcttcgacatgctggacttcccgcagttcatttaa

SEQ ID NO: 9390 - protein, 806 aa, DROSOPHILA
MSSSLKTSQSGGMYVKTSSISGISSISGKEAASCYGGFMSPPLSANITANNGEREMFRVPGAKVETNESYACGELQFPDFSHLCFAAETPNSVFSDCHNYAGQDQQQDSDQDDIVCAAAENTGMPYQQGQYTQLNREDIFRFEPEDIARLTGESELPGIAQNSQYAVQPANDSINLDIDYFNYDEINCQSKNQSPCSSPHLDAWLNFNLGEISAAASSSAASPKLGNVFEEQVKEEASPAKLPSMNSTFGTPKCIPMCASNYEDYANLYQQGSGYSTENYHNNMAQVVEKPNREHKAIWTIDELDELMLGEQQQFLQHHLQQQHLQEQQEQLHQPHGQEQQTQNCKDDLVNYLSDEFIKAEEFRSLDSDDDENYNEEEDDLDNDVFAPPAESDPKPDSTCCDPEAEPENEVIPLICRWTGCDEEFPHQQAFVEHIEKCHVDVRKGEDFSCFWLDCPRRYKPFNARYKLLIHMRVHSGEKPNKCPFPGCNKAFSRLENLKIHQRSHTGERPYGCQYKGCLKAFSNSSDRAKHQRTHYDTKPYACQLPGCTKRYTDPSSLRKHVKNHALRNANGQLRRKSAGGASVPPSGPKKAAKTRRHSESALVQRGVGAGVGVAVPSAPGDQRQHRSNSCSEALLLQQHQQQQQQQQQQQKQHQPESPAGPATLATATATTTATATYGNGNMAPAPETEVLSVCSGGGSSNSNSNNNRYNANINQLSELEQLLTTAKPTGTPAASANGISLANNNGRANGDSKCHLSEFVSFEYVTKYLTDVYEPQCKSPQPPANFHLQPEFDNSFDMLDFPQFI

SEQ ID NO: 9391 - DNA, 5106 bp, DROSOPHILA
gagcgcaaaatcatcatgctcccgttattttttgtaccccccaactgagacagtgctgcaaagcgatttttggctctgctgctaacggtaagactgttaagtcgagtatggtgaaacggttagaacacaactctttacgttaggaaacccgtaaaatgttaaataagattgaatttaacagaagcaatccggtttttaaagaacacaaatgatttaatttaaagaaatataaatatataaggtaataataagtaacttaatacgaataaatcaaatgtcataaacgatggtatattaaaggaatacaaatgttataagcttaagttcttaagtttgctttatattattacataaaaacttgaaattaaaaataaaattttatttgaaattaaagaacgactttataatggggatttctactgtgaaattacaaaaacaaaaaccatacaaaattgataaggcatagcgcttcgatgaaactttgctttgttttttttcttggaacttttaaaggcgattcaattaatatatacgtgtgcataataggttggggtttttttttgcggattatcgaaaaccatatgacgaacgagacaataaaataaaagaatatgtttaactaaacaatgtaaagttttaaattgtgaaaaataatcatttccttgatgtagagtgcaagcaggtataaaacattgcctagcctaggtgcactgttctttttatattactttaataatttttttcttttttaggttttaaaattttgggagcgaactagttcgcagtaaaaatgaattcgtgtagctagtagtttatacatatataccaaatgacttttactgacaataaaacaaattaataggcaaagtaatttaaaaatgcacaaattatatggcacgaaaaacgtttaacatcgtttcgcttcgcgagttttgaaaatagctgaagaatcgtagctagaaagcagacgatttggcatccctggcagcagttaatcaaaccacttgcgaccgtaaaacattccaaatgcttcggtgaagttaaatcttatcgcagcagagcagtcgcgttccacatcgcattccgtacgaatcgcagccgcaaccgatcccgcaaattgggtagatccgcaaaatgtcggcgacgcacctggtgattctggccgtcgctctgctggtggacatcgcatccgcgggcgttccccttccgcgatacgaggcgctcctcaagcagcagtcccctccatcggatcccacactgggtctctacgacgacggggataaggttatccgcctgtcggtcgacaacttcaatgctaccgtcctggaccagaatcgcggagcattagtcgagttctacaacacttactgcggccactgtcgcagattcgcacccacgtacaagtcggtagcggagcacctgttgccctggtccgaggtgctcatcgtggcggccatcgattgcgccgccgaggagaacaatggcatctgccgcaactacgaggtgatgggctatccaacgctacgttatctgggccccggtttccagccgggtcctcagcattacgggcagagcctgcatacgcaggataaaaacgaaatccgcgaaatactagcgggtatggtggccgcagagaacctgaccagcagccacaacaattcctactggccaaactttcactacttaacggagaacgattcagccagcagtttgttcgaaggtctcagcagcgccacggagtacgtggcagtggttcacgaaccggagaacaccactctaggcgtcgaggtggctctgttcatgacccagtggccagcggtgagggtccggcgcgtcatcgatccagccgtggccgccaaattcaagattgatccgaccaatctgcccctcagcttggtggatcgcaaaggtgaaattacggcgtacgcgccggaatctaccaatggtgaatcgtatgccaagaagctgtgggatgtactgggtaagaagaatatcactcccaggccagtgaaggtgcaccaaccatcggcaacgccggcgtccaagattaagggacaaaacgaattgatcgatgaagtgcaccggaacaagcacttcgtctaccaggcggatctcgagcaggccatacgcacggtgctgcacaacgaggtgtccaaggtgggcgagatcagtggcgagaaactgctcgcactgcagcgattcctagctgtgctgcagcgctacaatccgctcggcgccaatggccaccagctggtgtccaagctgaaggactacgtggtacagttcaacgatcaacgactgacgggtagccagttcgaggaggagctgaagcgcctagaggctcatctctcgcccgtctactcatccaaccactttgtgggttgcgttggatccagtccccgcctgcgcggcttcagttgctccctgtggacactcttccacttcatgaccgtgcaggcggccaacaatgaggagacccaggatccgctggaagtcttgcaggccatgcacgggtacatcaagaacttcttcggctgcaccgagtgctccgagcactttcaggtgagtcagcaggcggagtggtagctacgtgctaatgaccacaatagtgctgattaggaaggcgatcgttatggcgtagggtaggatagttgattaccaaacaaaagacttgagtgctgactcttggaattttccgtgcatgcaaattcgatcttttttttcagcagaaaactaatttaccgcccaaattagaccattaaacagcagcacttgtgtataatttaatgctgtgttcacattaaaaaaatccattctgcggatcagcacctccgattgccggggcttcacgattaatctgtagtgcctacctggtattgatttcgctacacgtactccactaattgaataaccacgatgtagtcactctgataattgttttctgtttttctgaacctctcgctgagcccagattttatttgttattcacgtgagtcacacaacaactttctcttaaggctaactatacaagttatttattagtaggcttcaagggcgaattgtatttattgtatttaaacaatcacttacttgtttcatttcaaatcaatgttagttgttttctctctgaaactttaggactggcttggccttttagaaaatgttctgtattattcttgtaaattaatgtgcaaatttcttgtaaatttatgccaaaaaaaatttgaactgtctcgttcgcactagctgagtaatgggtatctgatagtcgatagtgttctctcttgtttcggattaaggctatagttaagcctcccataaatctattttgtacccacttgcatttattttcgagtttctcccagcgagttaacactgtaattaactaggttttcgttcggcagctgtgacaacaggtgtttttttttttttttttgtgtcgctcactcattgagtaacttattttgtttgcgtttcacaggcaatggcatcgaggcgaaaaatctggagtgtgccgaacaaagaggaagctgttctgtggctttgggctgcgcacaacgaggtgaaccagcgcctggcaggcgatgccaccgaggatccagagttccccaagaagcaattcccagcgccggaaagctgcaacgaatgctaccgcacgcccgtctccaagtcggagaacttggagatcgaatggaacaaggacgccgtgctgggcttcctcaagaacatacacaatccgcagttcgttagccggtacggtgtgcagcgggaggagctgctgcatcccacggcggacaaaatgcggcagaagcgacagatctcaagtgtcttcaccgacatggatatgcggatgggcatgctgctgtacgccttctgcattgtgatgatggtgttggcatttaaattgttcgccttcaagggataccgcaagaagccctatggccacgatctcctgggcaaggtgtaggttaatccgcaggaaagctttcacatattctaaacaacaaagaaaagacaccgaacaccgagaaacggaatttaacacgccacctcattgcatgatttgtattcgtggcacctagagttatgattaagttaaaagtgtgtatatatatatatatattgtatgaacgaacagtcctcttccagttgtagtccctaacctaatcgctttttaccacgacgatgcacctgattgctttattcttaggcatgcaaatgtgatttttccctccagaagtgacagtttgaataaaaacgatcaatgctagacgaatgttcacaatgttgtacacttgttatgggcggtagcacttgtgataaggtgcgaacacagaaataatgcagataagaaaactgacaatagttgcgttgcgtgagttttatttaacgaatctctggaagtccggatgccaccagggcaatactttgtacttttcgatgcgatcgtgcttaacggttaccgacacatttcggcagccatcctcggcgaagtccagctctaggttcttggcccgcatatccgtgcagaggagttcccgggtggctcgcagacggtaacgttgctgctgagggccataggctagatggttggaagttggcacgaagtggcggcagataacaacaagcagaaccacaccctcgtggggattacaaaaagttggagctagctttgtcgcatcatcatccgccagggattcccagtcatttacgacttcgccggtgtgcgtctccgtttcgtcctgctcatgggactgtcggttccaaaacttgtagcacatgatccatagacactggtaatgcgtctgaaaacaggaaacaaagatgcgctgcaacatccagtccaggttatagcctagctccaggcgaaccttcagcggtcggtggcagtgaaagagcgccgcgatgacaagggatttaagcgcccgggtcttacaattgcgtatcgactccagctgcagctcggcgggcagattcagattccaaccagaggtggctccggtgcagtgacgccggtaaagattgcgccaaaaggcgcgagaagccaccagtctggaggtttgtttacatattagagcgaaggtctgtacgtcctccggatcaatg

SEQ ID NO: 9392 - DNA, 2187 bp, DROSOPHILA
ccacttgcgaccgtaaaacattccaaatgcttcggtgaagttaaatcttatcgcagcagagcagtcgcgttccacatcgcattccgtacgaatcgcagccgcaaccgatcccgcaaattgggtagatccgcaaaatgtcggcgacgcacctggtgattctggccgtcgctctgctggtggacatcgcatccgcgggcgttccccttccgcgatacgaggcgctcctcaagcagcagtcccctccatcggatcccacactgggtctctacgacgacggggataaggttatccgcctgtcggtcgacaacttcaatgctaccgtcctggaccagaatcgcggagcattagtcgagttctacaacacttactgcggccactgtcgcagattcgcacccacgtacaagtcggtagcggagcacctgttgccctggtccgaggtgctcatcgtggcggccatcgattgcgccgccgaggagaacaatggcatctgccgcaactacgaggtgatgggctatccaacgctacgttatctgggccccggtttccagccgggtcctcagcattacgggcagagcctgcatacgcaggataaaaacgaaatccgcgaaatactagcgggtatggtggccgcagagaacctgaccagcagccacaacaattcctactggccaaactttcactacttaacggagaacgattcagccagcagtttgttcgaaggtctcagcagcgccacggagtacgtggcagtggttcacgaaccggagaacaccactctaggcgtcgaggtggctctgttcatgacccagtggccagcggtgagggtccggcgcgtcatcgatccagccgtggccgccaaattcaagattgatccgaccaatctgcccctcagcttggtggatcgcaaaggtgaaattacggcgtacgcgccggaatctaccaatggtgaatcgtatgccaagaagctgtgggatgtactgggtaagaagaatatcactcccaggccagtgaaggtgcaccaaccatcggcaacgccggcgtccaagattaagggacaaaacgaattgatcgatgaagtgcaccggaacaagcacttcgtctaccaggcggatctcgagcaggccatacgcacggtgctgcacaacgaggtgtccaaggtgggcgagatcagtggcgagaaactgctcgcactgcagcgattcctagctgtgctgcagcgctacaatccgctcggcgccaatggccaccagctggtgtccaagctgaaggactacgtggtacagttcaacgatcaacgactgacgggtagccagttcgaggaggagctgaagcgcctagaggctcatctctcgcccgtctactcatccaaccactttgtgggttgcgttggatccagtccccgcctgcgcggcttcagttgctccctgtggacactcttccacttcatgaccgtgcaggcggccaacaatgaggagacccaggatccgctggaagtcttgcaggccatgcacgggtacatcaagaacttcttcggctgcaccgagtgctccgagcactttcaggcaatggcatcgaggcgaaaaatctggagtgtgccgaacaaagaggaagctgttctgtggctttgggctgcgcacaacgaggtgaaccagcgcctggcaggcgatgccaccgaggatccagagttccccaagaagcaattcccagcgccggaaagctgcaacgaatgctaccgcacgcccgtctccaagtcggagaacttggagatcgaatggaacaaggacgccgtgctgggcttcctcaagaacatacacaatccgcagttcgttagccggtacggtgtgcagcgggaggagctgctgcatcccacggcggacaaaatgcggcagaagcgacagatctcaagtgtcttcaccgacatggatatgcggatgggcatgctgctgtacgccttctgcattgtgatgatggtgttggcatttaaattgttcgccttcaagggataccgcaagaagccctatggccacgatctcctgggcaaggtgtaggttaatccgcaggaaagctttcacatattctaaacaacaaagaaaagacaccgaacaccgagaaacggaatttaacacgccacctcattgcatgatttgtattcgtggcacctagagttatgattaagttaaaagtgtg

SEQ ID NO: 9393 - protein, 637 aa, DROSOPHILA
MSATHLVILAVALLVDIASAGVPLPRYEALLKQQSPPSDPTLGLYDDGDKVIRLSVDNFNATVLDQNRGALVEFYNTYCGHCRRFAPTYKSVAEHLLPWSEVLIVAAIDCAAEENNGICRNYEVMGYPTLRYLGPGFQPGPQHYGQSLHTQDKNEIREILAGMVAAENLTSSHNNSYWPNFHYLTENDSASSLFEGLSSATEYVAVVHEPENTTLGVEVALFMTQWPAVRVRRVIDPAVAAKFKIDPTNLPLSLVDRKGEITAYAPESTNGESYAKKLWDVLGKKNITPRPVKVHQPSATPASKIKGQNELIDEVHRNKHFVYQADLEQAIRTVLHNEVSKVGEISGEKLLALQRFLAVLQRYNPLGANGHQLVSKLKDYVVQFNDQRLTGSQFEEELKRLEAHLSPVYSSNHFVGCVGSSPRLRGFSCSLWTLFHFMTVQAANNEETQDPLEVLQAMHGYIKNFFGCTECSEHFQAMASRRKIWSVPNKEEAVLWLWAAHNEVNQRLAGDATEDPEFPKKQFPAPESCNECYRTPVSKSENLEIEWNKDAVLGFLKNIHNPQFVSRYGVQREELLHPTADKMRQKRQISSVFTDMDMRMGMLLYAFCIVMMVLAFKLFAFKGYRKKPYGHDLLGKV

SEQ ID NO: 9394 - DNA, 3871 bp, DROSOPHILA
tatatattatatatttggagtgtttccacgtgcttacctgctgtatcctgagaaccaaacatatcctcagtgagctccagttccagttcgtgggccgtactctggtggcagggccggagcgggtggcagtgcaaaagtgggcgctgcggtgggccggaggtgactcgtcgccaccctcgctaagcggctcgcccatctcgtcgcactcctcgacgaccagcgatggaaagttaccgaacttgccatccagttcgccctcccaccaaccgtcgtccacgccgtgggcggtcttcgtgatgatcttgatcttgtcgccctcctcgaaggtcagctcatcctcggcggtggcgtcgtagtcgtacagcgcgatgcaccattccacgtccgatttgactcgcttctggggcgccatgatgaccgacacctggtcgggtgattgcatcgagtccactgtctgatcttcattgtcaacggtataatcgacagatgagaatgagatttgagatcgcaattgattgccggaagtaccattaaaggcgctgcccgctgtctcctgatcgatgtccagatagttgtgtggcacgtagccctcctcgccgcgatagttgcgggcccttagccacccatcgccgtcgccttcgccaaccacctcgagctgttcattttcgacgatggtgagctcgtcgggattctgggcctgtggaaaaagtgaaaaattagtggcaagaaaaagtatatagttctttaaagctcacataccgtatagctgtagagtgcagtgcacttgaagatcgcctccttgggttctggaacaatcggttcgtccttgtcgtcctcctcctcgccagctccccagttgacctcagtgggatcatcccagccaccagcgctactggccatcatggatgacgaggcagcagctgcagaagaagctgccgctgccgatggacgcacttcgggctcatcctcactatcgctgaaggtacgatccctggatagctgttgctcctgcttgggcttcgtttgggcagctgcctgagtctcctccttgtcgctgtcgtagaatgaatcggaactgggattctcgccctggccagaggcgtcggtgcgcatcgaaatggaactggccgaacgcgtcagctcctgtacacccatattctcggcctcctgcacccactcgtccacgttaatgccgccatcgcgcaggcactgcagacatgcctccgcttttgtcttttccgtctcggatcgacggatttgatcacggaactcctcgatcttggtgtccagatccggtccatttggatcgttgggatccgtgcgctggccagagtctcgcagcgactggcacaaggccaacttcttggcattctccctgatcgaggcattctccttgaccactcttccggccagattcttggcctccttggttagcgtctcggcggcggactcatgctccgcggtcaccttgcgcaccggatcattgtcgcacgcctcgaagtcatattggatgtgctgcttcagcaccggatagaataggtagcagcactgcaggttgtactcccgcgtcaactgctgcgcctggtcacggatctttccgaagctattctgcgtagccgagcaagtcaacagctctgtgcgtctggaaaagatgtgttttaatggttaggcaacattaagataaagatttcttaagacagcactgttatgtacatatgtacatattgagtcataagattaaataaaatgatttaataactttatgagccatatcaggtagcgccataaaaattatcagaatgtaattgacgacttgagcaaacattgattagaaaatggctttgaacttgtaaaatttataattgatttaccgattttgcacttctggatggtttataatttatgagcaatgccattatacacttaccccattaacatcaggtactcggcaacccgctcgaaaacatagttctccatggtggtcatcgttgtctgcagatcgacggtgaagtagcgattctgatgcgcattggccgccgccaagctgagtacgtagtcattccgggcgccagatgacttctcctccagcagctccttgcgagatgtgacccgggcgctgttcttctgcagcgaagtgattgattgaaagaaggagcccttcttcttcttaagcttctcctcgatatcgcgggccttgtcccgaacatcgtgagcacaatgctcttcgtcaaagtatgatttcttggtcttatccacatcgcccacgctcagatggagttccttctgcacattgacaattccggctagcgaacgcttagctatggccaacttatagtcccgcagaaccttggcctcatccgcgatttgctgttgaaacacctctatggcggccaatcgagcacgagccagtttctcattctcctcgagcacagtgcgccaaacgctccacatgttcctatgagattacgtataagtaggtgggtaattcaaattgactgaaggttctcgaaagaacgttactagttagctggaaagcaatacccaccagcgttcctccatgccctccatcttaatatctggtatattgggtatcttcttgttgagatactgcgatgagatcttcagcagcgactcactgtatgacttctcgacagcggaacgcttgatggtgaactgccggatgtcctccaggaggtcgcattcatgctgattcttcagctgcagcttggccacctgctccgtgtgcaaattcttgaggaatttcacatagtttccctgcaggattacgaggtatacgatgaatgattattgtggaactatctttatcaattcgatttatttatgatttaccttacgcggcggcggctgcatcatggggctttttctacgacaatcgggtcactctacaattggctttttttttctattttagctccgacttaatggtgttacattacctctagcaactgtaaatagtatgattgctttatgagaggatatgatatacgggtattaaaatacgatacgatatttaagatcccatcttatttttttaatataaaaaaatttatatttcagtggcttaaaaggggagatttatttttaacgccatgacttatatcaaagaatctaacattatcaaattaaagattagataaaatgtagccctactgatatttattatatatatatattttccgattatttttggctgtgtaaatgggtggtgttggtggtacatgtgggtggttgtgtggtccttaagccgttaataggttcgctacgcagcaacgggtctcaaaacttatgtaactgaaatgcaatgataactgacatcgaaacgcaaaggaaatcaagggttttcttcaagctcaaatctagtactatttttagctggaaattttcactcgggcagcccacgcagcagcccccctttttttgggggtatcgtatcgatttctctggccccggactagcttattttttttaagcatttacaccaactacgttattcaaaacacttggctaacactttttttggacatggccggttaagatggttgtttttcagctggattagtactttttgggattcttatcgctgggttttcactgaaatttgtggtctttttctgggcagctaaaatccgttgcttacttatcgatttcgattttcacgacgtttgtgtgagaacttttcaacatgcaccgttaactgctggtgctgctgcgcaagaagagaccgccaaagagagcggtgagagaaagtcgagagagaacgaagtcgtgtttcattcatggcctctagtaccgttaacaaagagggtgagttttattgtttttgccccgtcagctgtttgataacacctca

SEQ ID NO: 9395 - DNA, 2322 bp, DROSOPHILA
atgcagccgccgccgcgtaagggaaactatgtgaaattcctcaagaatttgcacacggagcaggtggccaagctgcagctgaagaatcagcatgaatgcgacctcctggaggacatccggcagttcaccatcaagcgttccgctgtcgagaagtcatacagtgagtcgctgctgaagatctcatcgcagtatctcaacaagaagatacccaatataccagatattaagatggagggcatggaggaacgctggaacatgtggagcgtttggcgcactgtgctcgaggagaatgagaaactggctcgtgctcgattggccgccatagaggtgtttcaacagcaaatcgcggatgaggccaaggttctgcgggactataagttggccatagctaagcgttcgctagccggaattgtcaatgtgcagaaggaactccatctgagcgtgggcgatgtggataagaccaagaaatcatactttgacgaagagcattgtgctcacgatgttcgggacaaggcccgcgatatcgaggagaagcttaagaagaagaagggctccttctttcaatcaatcacttcgctgcagaagaacagcgcccgggtcacatctcgcaaggagctgctggaggagaagtcatctggcgcccggaatgactacgtactcagcttggcggcggccaatgcgcatcagaatcgctacttcaccgtcgatctgcagacaacgatgaccaccatggagaactatgttttcgagcgggttgccgagtacctgatgttaatgggacgcacagagctgttgacttgctcggctacgcagaatagcttcggaaagatccgtgaccaggcgcagcagttgacgcgggagtacaacctgcagtgctgctacctattctatccggtgctgaagcagcacatccaatatgacttcgaggcgtgcgacaatgatccggtgcgcaaggtgaccgcggagcatgagtccgccgccgagacgctaaccaaggaggccaagaatctggccggaagagtggtcaaggagaatgcctcgatcagggagaatgccaagaagttggccttgtgccagtcgctgcgagactctggccagcgcacggatcccaacgatccaaatggaccggatctggacaccaagatcgaggagttccgtgatcaaatccgtcgatccgagacggaaaagacaaaagcggaggcatgtctgcagtgcctgcgcgatggcggcattaacgtggacgagtgggtgcaggaggccgagaatatgggtgtacaggagctgacgcgttcggccagttccatttcgatgcgcaccgacgcctctggccagggcgagaatcccagttccgattcattctacgacagcgacaaggaggagactcaggcagctgcccaaacgaagcccaagcaggagcaacagctatccagggatcgtaccttcagcgatagtgaggatgagcccgaagtgcgtccatcggcagcggcagcttcttctgcagctgctgcctcgtcatccatgatggccagtagcgctggtggctgggatgatcccactgaggtcaactggggagctggcgaggaggaggacgacaaggacgaaccgattgttccagaacccaaggaggcgatcttcaagtgcactgcactctacagctatacggcccagaatcccgacgagctcaccatcgtcgaaaatgaacagctcgaggtggttggcgaaggcgacggcgatgggtggctaagggcccgcaactatcgcggcgaggagggctacgtgccacacaactatctggacatcgatcaggagacagcgggcagcgcctttaatggtacttccggcaatcaattgcgatctcaaatctcattctcatctgtcgattataccgttgacaatgaagatcagacagtggactcgatgcaatcacccgaccaggtgtcggtcatcatggcgccccagaagcgagtcaaatcggacgtggaatggtgcatcgcgctgtacgactacgacgccaccgccgaggatgagctgaccttcgaggagggcgacaagatcaagatcatcacgaagaccgcccacggcgtggacgacggttggtgggagggcgaactggatggcaagttcggtaactttccatcgctggtcgtcgaggagtgcgacgagatgggcgagccgcttagcgagggtggcgacgagtcacctccggcccaccgcagcgcccacttttgcactgccacccgctccggccctgccaccagagtacggcccacgaactggaactggagctcactgaggatatgtttggttctcaggatacagcag

SEQ ID NO: 9396 - protein, 774 aa, DROSOPHILA
MQPPPRKGNYVKFLKNLHTEQVAKLQLKNQHECDLLEDIRQFTIKRSAVEKSYSESLLKISSQYLNKKIPNIPDIKMEGMEERWNMWSVWRTVLEENEKLARARLAAIEVFQQQIADEAKVLRDYKLAIAKRSLAGIVNVQKELHLSVGDVDKTKKSYFDEEHCAHDVRDKARDIEEKLKKKKGSFFQSITSLQKNSARVTSRKELLEEKSSGARNDYVLSLAAANAHQNRYFTVDLQTTMTTMENYVFERVAEYLMLMGRTELLTCSATQNSFGKIRDQAQQLTREYNLQCCYLFYPVLKQHIQYDFEACDNDPVRKVTAEHESAAETLTKEAKNLAGRVVKENASIRENAKKLALCQSLRDSGQRTDPNDPNGPDLDTKIEEFRDQIRRSETEKTKAEACLQCLRDGGINVDEWVQEAENMGVQELTRSASSISMRTDASGQGENPSSDSFYDSDKEETQAAAQTKPKQEQQLSRDRTFSDSEDEPEVRPSAAAASSAAAASSSMMASSAGGWDDPTEVNWGAGEEEDDKDEPIVPEPKEAIFKCTALYSYTAQNPDELTIVENEQLEVVGEGDGDGWLRARNYRGEEGYVPHNYLDIDQETAGSAFNGTSGNQLRSQISFSSVDYTVDNEDQTVDSMQSPDQVSVIMAPQKRVKSDVEWCIALYDYDATAEDELTFEEGDKIKIITKTAHGVDDGWWEGELDGKFGNFPSLVVEECDEMGEPLSEGGDESPPAHRSAHFCTATRSGPATRVRPTNWNWSSLRICLVLRIQQ

SEQ ID NO: 9397 - DNA, 4032 bp, DROSOPHILA
cgcggcaacaccactactcgaaaaatgaaaaatctcagaggggaaacgatggcaaaataaaacgaagaaaggaatcccctttgatggctgctcggggaatcaatcttacatgttctccaaagggggagtaatatgggatgaaatggaatccttgctgattggatgacacgaaataaaaacgttgcacacaacgagattgttaatagcactgtactccggactctgtcttctatatacttttaccccaaaaacctctcgtttggtaagccaattacgtggataccacacagggagcaaaaacaaaaggacaataaaggactcgctcgtaaatgccatcaaagcagcttagctaagcagagtgactccttcgtcgacgagttggttccccagttgatgatgctgatacctacactgctaagttacatatacgccgtgttgcttttcaataaaccgcacggacaaaccgcaaaaatagcaacgaaaaataaaccaaaccaacacaaattctttgcatactttttcgagcccactcaagtggcaagccaacgaacgacagcacttgatgagctttccaattacatttagccgtgttgcctgttaactgtctcttccgttggccggataaggaattaactgccggcctcgtaaaagccaaaagcaaaaatggccctcaactgatttctactgctgacttggcgtgtgcacaataaaaattatcataagtttgctatcccatgtgggagagccgcctcgtccatccagcaaactgcaaacgcaatttgtgtaatgaaagtcgagaggttttaaccgatgtggattttgtctgtgctctgagaacagatcaaatctttctgcaggttagtcaattgattaaaggagcgcctaatggctggtttgttaagagattaatagagaatacatatgattgtatatgttcaagaagtacaggttgtagaaatttgtctataatgtttaagttaaacttaaatgttataatcaagtcaaccggatccacctttcagcagcttgtcaagggtttcggatttcctcttcctcagtaactgccaacgatcggaaacactcgattgaaaattgttaaattatttgtagtacaacaaaagtttttgctatttcaaaatcttcgtaaaatggccaaccgtatgagaggaggagcctgctgtccttcaagatgtcagcccgcctgtccaccatgtccgccacctggtccgccctgcgatgcaccgtaagttgaatttaattcatatttttcatttctataatccctttaaagtctggtgcgactggataaactgtggccggagccctacaatccttgctccttcaagaattgcctgatctttggcggtcacgatgagccctatattcgaccctttgatcctaagggttgtacacgaatgcgtcgcaatgatatcgaccgatcgttgggctatcccataggcgtagtgtctggtacgactgttgtaaagtcgggcattccgaatcaggagagcgtccggtttgcttcaaatcttaaggcatttgctcattcctattacacgcggcgcgatgaatggaaaccggatacgatcgatatggtggtgaacgagggtcaggttttgtttaacgattccgagaacatggaccctccgaatgcatcagactcgccggatatctacgatgaaaatgagcaaaaggtgacgcgccactttaagatcaacgatatcgagtttgccatggagttggaggcgccctttgaggtctatggctacgaaaacgtcatacgcaatctacgcagaatcttaagagccttcttcaaaaaggccaaatacggtgtgttcttcacacccaattggtatctgctgatttggaaagagaagggtgtttggatggtactcgatttgaatggcagggacaaaaacacgatgaaaccgaacaatgaagaggggtatcccctattgttaggcctcaagtccttcgataatgttgtttggttgattaaaaaggagagctatcttgataagaacgctaagttttcaattagagaaatcctcgttgttcgtttggccacccctggaagtactggtcaaagttgggagcgagaacatggcatgcgaatgagccagttcgatgtgattgcctccgattatgcgtatgtcaagtcaaatcttcatctcaccctaaactcgaaggatgcgctaaggaatcgtagtgctctacctgtggccgtggcaactgcattggcatcgaagatcgatcatccagccacttgggaccagaaaatgtacgataaggtcatgtgctatggcgttaatatgtgcaaaaattgctgggaaccctgtatggatcccagtaaaccgatggatctcgatgattttccacgacagattcgcttgggtcagtttgtggccgagattatgctaactccaaatgcctacgagggctggtggaagtgtgtgccgatgtacaagttcaacgatttccatcttatgttggagaaggctctcgatcaaaacgattatataatcttccagatcaacaatcagatgtattcgctgtggaagaagtcggattttatctacctaatggatccgtatcgccacaatatagtgggtcgcattttggaggagggcgaggatccgaaaagtgccacggttcgcatgttcggtaatatggatcgtctgttgagtgttttccatcagatcctattggaatcgaatcgatccgctgtattccatatacatacgctccggattagaaatattacagaatgtccgccgggcacagctcctgccctactacctccggatgaggatgtggaggtaagatcgctcaatgagaatatccgtttcgatgagaactacgacaagtgcttgcaagagctgggtgagatcagcgatttcgaggaggatctcgtctccgagatcgaacccattgtggagatcagttcctcggaggagatggtcgaggaggaggaaggtggtggcggtggtgctgtcgaaggaggcgagggagaggaagacgatgaagattaatctgcggctaatggatattttctttattgaacgaattattgtagatttttaacgcctccatatatgaaattgtttataggatttacaatttggacaatgaatgaaaaaattttaagtacataaattataagttgtttattcatttctgtgatatatattattctgcaagtcccatctcagtagcatcaatttgtcacttactgtttttctacatccaacttcggctcgacatgttatgctttcctcaggactttctaacaagcgcgacaagaggacaatgtgtttgaaaaaacagaaaaacgagatgttgcgagggcgcgcgtaaaacattttgaattaaatgtcacgttgtcggtgtaaagtcgcttgttcagcgacacaatgacaacaggaggatatctggctaaaatagtcacaggacgcgtggctccttaaagcgtttgtcatctctatgttattgccaccactcgacaagcgatgggcggtgagactgggcgtggtccgtatgtgtcattaaaaacagagcaggtgaagtgaggggcaaaaaaaattgtgatgccagcggcggcctgctgaggagccttaccattttcccatttacccgaggattccgtaggaataaaaaaaaaacgtagaacagaacacactctggggcatcagtcacttagacagcaggttacctgtgccaccagatcgcttcttcttcttcttcccatctcacctgtgcttatttgcatggctgacaacagctacattgttgttgttgcacccgtagacatttctgtctgtattttgcattcgcgagctggattctcgcttctacccagcgacgacatttcacaaaagtcgacagcgcgaaattaatggaaatttaaaaattgcatttttcgacatccggcggcaggacgaagaagaaaaggacacgaaactgaaattgtggtctcgcctgtcgttgagagataatagagacaacgggcggaatgtggaatggttttcaagt

SEQ ID NO: 9398 - DNA, 1984 bp, DROSOPHILA
gtcaaccggatccacctttcagcagcttgtcaagggtttcggatttcctcttcctcagtaactgccaacgatcggaaacactcgattgaaaattgttaaattatttgtagtacaacaaaagtttttgctatttcaaaatcttcgtaaaatggccaaccgtatgagaggaggagcctgctgtccttcaagatgtcagcccgcctgtccaccatgtccgccacctggtccgccctgcgatgcacctctggtgcgactggataaactgtggccggagccctacaatccttgctccttcaagaattgcctgatctttggcggtcacgatgagccctatattcgaccctttgatcctaagggttgtacacgaatgcgtcgcaatgatatcgaccgatcgttgggctatcccataggcgtagtgtctggtacgactgttgtaaagtcgggcattccgaatcaggagagcgtccggtttgcttcaaatcttaaggcatttgctcattcctattacacgcggcgcgatgaatggaaaccggatacgatcgatatggtggtgaacgagggtcaggttttgtttaacgattccgagaacatggaccctccgaatgcatcagactcgccggatatctacgatgaaaatgagcaaaaggtgacgcgccactttaagatcaacgatatcgagtttgccatggagttggaggcgccctttgaggtctatggctacgaaaacgtcatacgcaatctacgcagaatcttaagagccttcttcaaaaaggccaaatacggtgtgttcttcacacccaattggtatctgctgatttggaaagagaagggtgtttggatggtactcgatttgaatggcagggacaaaaacacgatgaaaccgaacaatgaagaggggtatcccctattgttaggcctcaagtccttcgataatgttgtttggttgattaaaaaggagagctatcttgataagaacgctaagttttcaattagagaaatcctcgttgttcgtttggccacccctggaagtactggtcaaagttgggagcgagaacatggcatgcgaatgagccagttcgatgtgattgcctccgattatgcgtatgtcaagtcaaatcttcatctcaccctaaactcgaaggatgcgctaaggaatcgtagtgctctacctgtggccgtggcaactgcattggcatcgaagatcgatcatccagccacttgggaccagaaaatgtacgataaggtcatgtgctatggcgttaatatgtgcaaaaattgctgggaaccctgtatggatcccagtaaaccgatggatctcgatgattttccacgacagattcgcttgggtcagtttgtggccgagattatgctaactccaaatgcctacgagggctggtggaagtgtgtgccgatgtacaagttcaacgatttccatcttatgttggagaaggctctcgatcaaaacgattatataatcttccagatcaacaatcagatgtattcgctgtggaagaagtcggattttatctacctaatggatccgtatcgccacaatatagtgggtcgcattttggaggagggcgaggatccgaaaagtgccacggttcgcatgttcggtaatatggatcgtctgttgagtgttttccatcagatcctattggaatcgaatcgatccgctgtattccatatacatacgctccggattagaaatattacagaatgtccgccgggcacagctcctgccctactacctccggatgaggatgtggaggtaagatcgctcaatgagaatatccgtttcgatgagaactacgacaagtgcttgcaagagctgggtgagatcagcgatttcgaggaggatctcgtctccgagatcgaacccattgtggagatcagttcctcggaggagatggtcgaggaggaggaaggtggtggcggtggtgctgtcgaaggaggcgagggagaggaagacgatgaagattaa

SEQ ID NO: 9399 - protein, 611 aa, DROSOPHILA
MANRMRGGACCPSRCQPACPPCPPPGPPCDAPLVRLDKLWPEPYNPCSFKNCLIFGGHDEPYIRPFDPKGCTRMRRNDIDRSLGYPIGVVSGTTVVKSGIPNQESVRFASNLKAFAHSYYTRRDEWKPDTIDMVVNEGQVLFNDSENMDPPNASDSPDIYDENEQKVTRHFKINDIEFAMELEAPFEVYGYENVIRNLRRILRAFFKKAKYGVFFTPNWYLLIWKEKGVWMVLDLNGRDKNTMKPNNEEGYPLLLGLKSFDNVVWLIKKESYLDKNAKFSIREILVVRLATPGSTGQSWEREHGMRMSQFDVIASDYAYVKSNLHLTLNSKDALRNRSALPVAVATALASKIDHPATWDQKMYDKVMCYGVNMCKNCWEPCMDPSKPMDLDDFPRQIRLGQFVAEIMLTPNAYEGWWKCVPMYKFNDFHLMLEKALDQNDYIIFQINNQMYSLWKKSDFIYLMDPYRHNIVGRILEEGEDPKSATVRMFGNMDRLLSVFHQILLESNRSAVFHIHTLRIRNITECPPGTAPALLPPDEDVEVRSLNENIRFDENYDKCLQELGEISDFEEDLVSEIEPIVEISSSEEMVEEEEGGGGGAVEGGEGEEDDED

SEQ ID NO: 9400 - DNA, 3464 bp, DROSOPHILA
ttgtgtgtgttttttcaacgataaccattcgatttgttcatcatacagaggcactaaagcttattgattcattgattcttcgcgtcttcgaagaaccaaaacatccttcaacatattcgatttgtgcttaagtacttaaatgctaaacacgtaatgcagtgagagaaataaatagtaatgttagacctgttttggtatagaatttcattgagacactagatctataaaccgttttcagcagaatctttggacaggcggacgtatataaataagaaatggaagataaataggcgggcaggaaatatgtttcgagtatagtgagtggtgacataaatactcatgagtctttgagtaattcgcaagattcaattctcagaaatgcgcaaggtttggctgtctaagccaataaagttcaaacgaagacagacttctaaagttaaattctcttgattgttcgtttacctaaataattcgtttagcaattttttatcttattttaaactaattttgaatttgttcgaatataatatgtatgcctagtaaaagttaattgtcaaaatagttttcgcttaggattcgatatacttcgcaagtatataatatatttcaatattttctggctattcaagtttttaagttatgaagaacacggcaaagaaacaaatcgcatttttgttgaaaagaaaatacaattgaacaaaaagtattccaatatcaatgtgtataaaaaaaatgcaaattaatatcagactggaaaacgatttgccctatccgaacttagtttcaaacttggtgaaatcaaaggtaaacataaatagggtatatcagcgtataacttgatttgtgcacaatttgcatatggtttgtgctcgaagcgtagaaggtctaggatatattcgatattctgatgctcaataacactataaagtaaacctgaagctctatgtctaggcaaagcttggacgtaactggatggctgctcgggactgcctatcactcctcactttggagttcccggaggtgcgttggccaagccgaagagctcttcgtatgaaggtgctaaaaaaatagatacaagagatagatacaattgtaatgtagaatatcccaacttacgcagctcatgggctccaggcgcctggcgaggctgcaggaacgatgctgaggccgaggtggatggcagttggctataggccggagctcctcctgctgctgcaccgcctgttggcggggcggcgaccactccggccggcggtggtgtgagggcaaggagcgagtattgcggcgactccggcggcgggtaggcgggcagatggggtggcggatacgactgcaccataaggggactggacgaatagggcatgtagggcacattggagctgcgcaagctggtcctggcagagggactaccatactgcgaggactgggagcccgaagtgtaggacatatccatgccaccggttccagcgcccacagcgggactcagagtggccgccgaggagtccgaggttatcgagttaatggagctgcactcgctaaactgcgatgagtgcgagggcgagccaatggaagagtccagtgagggatagaccggcagggcgggctcaaacagattgccggagcccaattccggaccaggtggtccatcgttaggccgtggcggcggcggcggacgcagcgaactctgcctattcgatggatcctgcgagtacaccttaaagggcaaattaaggatcaagttcttaaagaatccccgcagcaccgcctccacacgcagctcgtatacaatggtgatgacgccgctcatctgttcatccgtcggctgggctccatcgggcaggagcagctcgtgcgcaaaactccgctcggtcttcttctgcaccgagcccgtctccttggtggccaccgctatgcactccaccttctgcacccgcagtggtacatggctgtagtaggtcacgtactgcaggacggtaaagcgcagcttctccacagcggtggtgctgttgttgatcacagtagcgcaaatcctaagcggctctccgcgcaccgcaaaatcttcgggcagaagggccaacagggtgatcggtctagtgccaaacaaactgatcgtcttggtcacctgcttctccagcgaactgggtatgctgcgttgcatcggttggagcggcatgttcttcaccacggtgaaaggaatcgtgtggcgctcgtcgaaggtccatggtcgctggatgagcacgcgcatcttgtacttgatggcgccatagctgcccttgaaactcgaaggtagctggcgacccagcgccacctcgaagatgaacgtgtgctccccagccgaaagttccaggccacgcggctcaaaatccggcagaggcgtctcgctatgctcgtacacctctttgctggtgtagaacagactgcgggagtactcgttgttgttcgagttcttgcgcaggatctccatccatttgcattttcccttgccggtgacctgcaccttgatggctgaaattaaagttaagcttatattaaacaaacttatttaattacaaattcaaacgtcttaaaatttaaattagctaagtttttatccatgctagcgttgccagccatttcacttagcgagtgcaaccaccacagcagcagagttgccaagtctcgatattagcgatagtagtgtgattgcattttctttacatttttcagacgccgtatggtattataagcgttagcaaagacgggcctattaatattttcacgtacttttcacattttggcagaaattcaatcaggaaatccttttgttaatgcctgctatactcataacaagaccattaattgtgtagcgtttaaggaaaaccgaaagagtgagctgcttcacttgccccgagtgactggaaatctaatttgcgtttattttgacgcaaaaccggtgccgacattttctcgcccaattaaattgagtgtggattttgccgcatcccgttccctttgccctttaaaaaaccttgatctttaaatgttgtaaagcaaagtggtgcgcgctgccaagatgaacttcgattacatcggccaggccctgggctaccacgggcagccgctccagaagatctgggacgacgagcgcggcgtggacgacctgcggctgatgggactcacccaggtgaactacggggtctaccaggagcggcagaagtacttcaccttccaggagcgggctaagcgattgaagatgcaccagtttctggccaggaaggccaccgatttgtatgatcgcacgctggtggccaatgttatggaggattccctgctggcacaaggtgggtttagggtctatgagtttgagtggtcaatggataactccagtgctatgttctttgcaggcaacacatacatgactcagatggcccccttcgagttcttcctcaatgtgaaggacaaacgcaagggatgggcgcaccgat

SEQ ID NO: 9401 - DNA, 1407 bp, DROSOPHILA
atggagatcctgcgcaagaactcgaacaacaacgagtactcccgcagtctgttctacaccagcaaagaggtgtacgagcatagcgagacgcctctgccggattttgagccgcgtggcctggaactttcggctggggagcacacgttcatcttcgaggtggcgctgggtcgccagctaccttcgagtttcaagggcagctatggcgccatcaagtacaagatgcgcgtgctcatccagcgaccatggaccttcgacgagcgccacacgattcctttcaccgtggtgaagaacatgccgctccaaccgatgcaacgcagcatacccagttcgctggagaagcaggtgaccaagacgatcagtttgtttggcactagaccgatcaccctgttggcccttctgcccgaagattttgcggtgcgcggagagccgcttaggatttgcgctactgtgatcaacaacagcaccaccgctgtggagaagctgcgctttaccgtcctgcagtacgtgacctactacagccatgtaccactgcgggtgcagaaggtggagtgcatagcggtggccaccaaggagacgggctcggtgcagaagaagaccgagcggagttttgcgcacgagctgctcctgcccgatggagcccagccgacggatgaacagatgagcggcgtcatcaccattgtatacgagctgcgtgtggaggcggtgctgcggggattctttaagaacttgatccttaatttgccctttaaggtgtactcgcaggatccatcgaataggcagagttcgctgcgtccgccgccgccgccacggcctaacgatggaccacctggtccggaattgggctccggcaatctgtttgagcccgccctgccggtctatccctcactggactcttccattggctcgccctcgcactcatcgcagtttagcgagtgcagctccattaactcgataacctcggactcctcggcggccactctgagtcccgctgtgggcgctggaaccggtggcatggatatgtcctacacttcgggctcccagtcctcgcagtatggtagtccctctgccaggaccagcttgcgcagctccaatgtgccctacatgccctattcgtccagtccccttatggtgcagtcgtatccgccaccccatctgcccgcctacccgccgccggagtcgccgcaatactcgctccttgccctcacaccaccgccggccggagtggtcgccgccccgccaacaggcggtgcagcagcaggaggagctccggcctatagccaactgccatccacctcggcctcagcatcgttcctgcagcctcgccaggcgcctggagcccatgagctgccaccttcatacgaagagctcttcggcttggccaacgcacctccgggaactccaaagtga

SEQ ID NO: 9402 - protein, 468 aa, DROSOPHILA
MEILRKNSNNNEYSRSLFYTSKEVYEHSETPLPDFEPRGLELSAGEHTFIFEVALGRQLPSSFKGSYGAIKYKMRVLIQRPWTFDERHTIPFTVVKNMPLQPMQRSIPSSLEKQVTKTISLFGTRPITLLALLPEDFAVRGEPLRICATVINNSTTAVEKLRFTVLQYVTYYSHVPLRVQKVECIAVATKETGSVQKKTERSFAHELLLPDGAQPTDEQMSGVITIVYELRVEAVLRGFFKNLILNLPFKVYSQDPSNRQSSLRPPPPPRPNDGPPGPELGSGNLFEPALPVYPSLDSSIGSPSHSSQFSECSSINSITSDSSAATLSPAVGAGTGGMDMSYTSGSQSSQYGSPSARTSLRSSNVPYMPYSSSPLMVQSYPPPHLPAYPPPESPQYSLLALTPPPAGVVAAPPTGGAAAGGAPAYSQLPSTSASASFLQPRQAPGAHELPPSYEELFGLANAPPGTPK

SEQ ID NO: 9403 - DNA, 3907 bp, DROSOPHILA
actgctgcccagtagcgtgtctagttgcaaggcaacgtttcccacttcatccaagggagccgctatgccttttgacaccctgggcaacagcttgggcgccaagagcctaggtcccatcgtgaactttgacgaggagccaccgccattggatcaggacgagttcgaggatgctaaggacaaggtcgacggcgaagcgaataacatgacgaaaccaaatgtacccagcgtgggaaaaaccaaggacagggtttgggtcacttcggcggttagtgtgcaatatgctgccgttccaccttcacccaaatacacaaggttggtttcgggactataagattggatgaaagtacacaattacagtcggttgactcttcaattttcagagggcagaacattgtcagtgggtttgcgtttcgtgaaatcgttggaaaatcggatagctgcattgtggagtgggtgctttgcctagacctaaaaggctatattcctcgctatgtcctggatgcagtaagtgccgttcaacacctacttgtttcttgtttattggataattgtttcgatggtgattttcaggccctcacctcgtccatgaccgactacattagcaatctgcgcaagcatgtcaacgaactgaggcagaaggggcgtggtcgagcccccaggacccactaggaaatcagtaatccgtattttaatttaaatcccattgtatctcaagcgagtgctgttcgcagcaaggtatctaatagaatatttcaataatttgaagcaggagagcgagttcagtgctgtaagtttattgagtattttatgtatatgtatggcataagttctatgtacctatatgcacggcttacattataaattttatacatgacttttttaacgtccggcatttccacattcagtcgcacgagcaggcacagcatctgcccacctgtcgctggtgtgttagtcgtaggctcgagatcagttcttggaggcggagtcgcagggcgtggtcctatttgctgtcgttctggggaaaccacatgggacacgcctccatggccacctcgcaaacggcgctcattttggcgctgtcgtagtctggaaggggatattggtggaggctttaacgggatacggattttcgacttacctaggctgttgcgtttgccgaagatgctgccgttgaacggaggcttcctgtaggctgcctcactggagcccaaaagtatggctgcgaccaggatcgtgaccaggagcagagtgagtgtgaatcgaagagccatcttgcagttttcggtgagcgttgtgggcagtgaaaggaaggaaggtctgagctgtgttagaaaccggatgattctgtgacaaaacaaggcgaatccctgacttttatactcgccaaccgagcagaaggatgctgcgcgcctaatcgagttaccgcgagataattgaaaaccagattgcttggggagtttttcgagtgagaccataaaatgtaattatattccacttatgtacatagctgagttatgcttaacctaggctggatttcataatgcaggagggctcacgtcttggcattccagtcgagcaccttgttgaactccttctcgccgaatccgatggctgccgactgctccaaacagatggtctggcgcttcaggttgtcgatcatgtagagctgcttcttgtacgcgttgagcaggtcgccgcgctggcgtttaagagcccggatccggctgtcccgcagctttagttccttccgatgcgcctccaactggtcgcgctgctcctcgcgcagcagcttgagttcctggcgggcagcgtctgcatcctcctggacgcgggacagtcggttctccaggtttatgttcgtctgcctggaaaccttggcatcccgcttcagcacctccagctcccgctgctgggtgatgaactcgagctgctgctccttctggcgctggttgaaaccctcgcactgccgttcggaccgcatcagttgctcggagaggtgcttgttggagttgatcgcctggtcgcgctggtgctctgacttgcgttgcgcttccaaggcgtgctcaagctgctccttctgtcggatcaactctccggcgtgttgagcgtgatcctcttccagaatggccaccttggccttgaggaatctaaaaggcgaaaattagtcatggtttgtaagaattcatactgtttagctgatcatattatttttagtctttggggtttcttacttaataaagttgtccttggtgacctgcttcttcagctggccattgacgacggttgtgctctctcgcttctgtgtgacctccacttcgaccacatctggttttcggtttgcctcatcggcgtcgttacgcagcagttcgtccaacgaaggactctcgctaaagtttgggttccggtacttgacatacgtagccgtcttgctgctcacatccttcgtgaaggtactaaatttggaaagattgcggggggtgggcgaggtgggtccggcagcgggcttggacttggtcagcagactcatatcgggcatcggcgaacgggctgtgggcaccgtctctctgcctggcgaagctttcggggctgccttcgtgcacgccgtgggagcaccctttttccggagcaggctgctcggccccttttgtttctggaaggtggcgaagcgcggcaccgccaccgccgtggatttggatgacccctttgccggatacatggcgtcggcagctggactgagggtcaggagattcagctcctggtttatcttaaagagctccttctcgcgggacagaagctcggccattacggtgggtcgatgcgaggacggtggctaagtttcttgcaacaacgattgtgatttgataaaagacctggacaatctacacacattgaatttttctcagatttaatttgctagtagctccacacggctatatcaaggttaatactataaattcggctggagttaataaattttccggacgccaaacagtgacagttaccccggctacgtagtcctgaatcccccggccgccttttgggaatcggcctggtccctccggaactccatgtcctgttgctgttcaatggggtggttttcggtttgttcgattgtccccccgacgactgtcgcttggacttccccttttcgacggattgaggagttggaaaattttttatttaaatttatttatagtcaataaggtgggcaggccatgctcttaagagcttgcttaactattttaacataaatatataataaataaataatacattttaaattatttaaaaaatttccactcataaatatatgcttatattttatttgtgtaaagtacctataatgccaaatggtgagggatttacccatcccagtccttgtagaattctctcacgtctcaaaagaataattcgtccacttcatccaagttttccccacacatgtataaccgaaacagaggaacacgcataataataataaatattgatagaactaaagtataaacagcgacgggcagcttcaagggaaatacggcagaaagtaacaacaactcggggtctccgaggtgtcacagctacctgtactcgcacctgggatctcgaggttgcaagggcgctgggttcacagaatgtagagacaagttcaagatttatgtgcctaccgagtaaaacaaaagaagagcagcatgtgtcccacagagaagcctcgtcagtccaagcagtcagccccaccagtggccatatatgccgtcatcaaggtgttctggtgacagcccacacactggccataattgcaccgatctgctgccaagtttgagcagaacctgacttccagttgcgagcgcacagctgtggccgaaagcatgacgttggcctggaggcgctccaaagacacttggataccacc

SEQ ID NO: 9404 - DNA, 1625 bp, DROSOPHILA
aaatctgagaaaaattcaatgtgtgtagattgtccaggtcttttatcaaatcacaatcgttgttgcaagaaacttagccaccgtcctcgcatcgacccaccgtaatggccgagcttctgtcccgcgagaaggagctctttaagataaaccaggagctgaatctcctgaccctcagtccagctgccgacgccatgtatccggcaaaggggtcatccaaatccacggcggtggcggtgccgcgcttcgccaccttccagaaacaaaaggggccgagcagcctgctccggaaaaagggtgctcccacggcgtgcacgaaggcagccccgaaagcttcgccaggcagagagacggtgcccacagcccgttcgccgatgcccgatatgagtctgctgaccaagtccaagcccgctgccggacccacctcgcccaccccccgcaatctttccaaatttagtaccttcacgaaggatgtgagcagcaagacggctacgtatgtcaagtaccggaacccaaactttagcgagagtccttcgttggacgaactgctgcgtaacgacgccgatgaggcaaaccgaaaaccagatgtggtcgaagtggaggtcacacagaagcgagagagcacaaccgtcgtcaatggccagctgaagaagcaggtcaccaaggacaactttattaaattcctcaaggccaaggtggccattctggaagaggatcacgctcaacacgccggagagttgatccgacagaaggagcagcttgagcacgccttggaagcgcaacgcaagtcagagcaccagcgcgaccaggcgatcaactccaacaagcacctctccgagcaactgatgcggtccgaacggcagtgcgagggtttcaaccagcgccagaaggagcagcagctcgagttcatcacccagcagcgggagctggaggtgctgaagcgggatgccaaggtttccaggcagacgaacataaacctggagaaccgactgtcccgcgtccaggaggatgcagacgctgcccgccaggaactcaagctgctgcgcgaggagcagcgcgaccagttggaggcgcatcggaaggaactaaagctgcgggacagccggatccgggctcttaaacgccagcgcggcgacctgctcaacgcgtacaagaagcagctctacatgatcgacaacctgaagcgccagaccatctgtttggagcagtcggcagccatcggattcggcgagaaggagttcaacaaggtgctcgactggaatgccaagacgcgcgcagcatccttctgctcggttggcgagtataaaagtcagggattcgccttgttttgtcacagaatcatccggtttctaacacagctcagaccttccttcctttcactgcccacaacgctcaccgaaaactgcaagatggctcttcgattcacactcactctgctcctggtcacgatcctggtcgcagccatacttttgggctccagtgaggcagcctacaggaagcctccgttcaacggcagcatcttcggcaaacgcaacagcctagactacgacagcgccaaaatgagcgccgtttgcgaggtggccatggaggcgtgtcccatgtggtttccccagaacgacagcaaatag

SEQ ID NO: 9405 - protein, 506 aa, DROSOPHILA
MAELLSREKELFKINQELNLLTLSPAADAMYPAKGSSKSTAVAVPRFATFQKQKGPSSLLRKKGAPTACTKAAPKASPGRETVPTARSPMPDMSLLTKSKPAAGPTSPTPRNLSKFSTFTKDVSSKTATYVKYRNPNFSESPSLDELLRNDADEANRKPDVVEVEVTQKRESTTVVNGQLKKQVTKDNFIKFLKAKVAILEEDHAQHAGELIRQKEQLEHALEAQRKSEHQRDQAINSNKHLSEQLMRSERQCEGFNQRQKEQQLEFITQQRELEVLKRDAKVSRQTNINLENRLSRVQEDADAARQELKLLREEQRDQLEAHRKELKLRDSRIRALKRQRGDLLNAYKKQLYMIDNLKRQTICLEQSAAIGFGEKEFNKVLDWNAKTRAASFCSVGEYKSQGFALFCHRIIRFLTQLRPSFLSLPTTLTENCKMALRFTLTLLLVTILVAAILLGSSEAAYRKPPFNGSIFGKRNSLDYDSAKMSAVCEVAMEACPMWFPQNDSK

SEQ ID NO: 9406 - DNA, 2699 bp, DROSOPHILA
gggacgaattgaacccatttcggaaaccatgtgccaaaatttgtttttagacaaagctctcttaaattacggatatacaataaataatgcaagccatgaaaagcgagtaaatagcagccactaaatatgaacataccaattagagccacagaaatcacaaaataaagtcgcagattaaggtgttcacttgggtaaaatttattccaacccgagccagacagcataattctttagtgtctcatttgaaataaaagcaaaaaacaaaatcgaaaatttacgagccagcagcactctttgtttatatagcgattaacgcgattttagtcggtttttatatgcatttatttgtacgaagcaatgaaatggtttattacatttaacatcgaattttacgaatttattaagaacaacagaaaagttgcgactgcaaggagcaaactcacagcaaagtctacaaatcaaaagatgaaattaacttaatagatcacaatcaaaacgagaacaaaccgagtaattatacgagagggagaaacaatttttatgtttaacatataattagcacaacaactacaaaataaaaactattaatgtaaaaacaaacggcatttaaaaaatataagaaatatttaaaaataacaaacgattgtttatttgttaatcggctgatggaggtaagataaaaacttctttttacagttccaaaactttgaactttattttctcagaaaaatggttcaaatatttcacaactttggtaaatatgaatgctaaattaaatcagcatttcatcaacgaatgtaacttattatcttgaatacctgaacagtatgtattatttgcacccaaaataaagataagcccaccctccattaaaaagaattcatttgaatatttttttcatattttatatattttattatttttttttttttggtttttttatgcgcacttaatatataaaatgaatattgaataatactgaatgaagccagatactcacactgaaatccgaacgggcagagccaggggtagtgctcgagatcgtcgggaatcggtgtaggacctggaacgagaacgcccatgagaacgaccacgcgagtgaccacgggagcgaccgcgagaccgggaacgatcccgcttgcggtcatctcgcgtgtgtcttctccgcggcatgtgcccctccttctccgccaggatcagctcgcagtcactgtggtcggaactggaactggaagatgagctagtgtgatgactatgactatgatgtttgcgtcctctgtgtcgtcgtttacctccatcggagctgcggtgcttggacttggtctccttgatggagagttgagattcctgctgctgctgcttctggatctgtttcatcacatcgttcagcattttctgggccatgttggcctttcgaatgagacgctccatcgacggcaaggccatgtcctcgacttccacgggcgtggcatttggcaattggccgcggcatccttgacatgcatccggccctgcatttgccgcagtttgctcacgtgccacgttatcggattgcgacatttttgcactagtttacaactgacccgataagaaattcactcaacactttaattactgattaactactgtttctctgaactggatataactgctgcggaatctgttgcttatgtttcgactgcttcacttgaacacttgaatttgactggcttctgcggcattcggtcgatgagcttttataggcaactttggcgccaagctaatcgcgactttcggactgtaaacatttgcctttctttatcagtcacatactcatacaaaccacacgataaatgtgacgtcatctgagctatttttaaccaaatcgcattcatgggtttttgggaaattacttccattgatcacgtgtttttaatgttacataatttcattgccgaacgtaacctcaaacatatttcatatttttgcgaaattcttcttacttttgtatttctgcatattatatgcattataaatattctgcgtatttttataagcataccttttattattttttacgattttgtgaaatatgacattattttgatataattttaattttgaatttcgtccaagtgtgtaattttaaaacaattattttatcgttttaaatcatcgaaaattttaagaatataaagtattaagaaatttacacaattttttgaaaatgttttgggatcttaataattgcataaatcaggtttagcacattattttagaaatactaaacggttaaatattttacagaactgctatttaattttaaggtataagactacgtataagacattaccgcttgagactagtatttttattgtggtattttcatgattgcttttgaattgtgcccgccaaaatatgcagtcttaaccacaagcggttaaaatcattccttacgtttacttatatttaaaaatcgacaaaaggtataataattcaaaactattaaaaaattttaaataaaactaaacgagtctaagttttcttaatcaaaatagctgttaatatggataagatatatttggcgcatccaatagatacatttaaccgctgaagagaattaacagtgtgatacgccagactgttaacagactgttaaaacgcgatttcccggctttggtatttttacattaccatcatttggtttctctgatatttta

SEQ ID NO: 9407 - DNA, 635 bp, DROSOPHILA
tcaagtgttcaagtgaagcagtcgaaacataagcaacagattccgcagcagttatatccagttcagagaaacagtagttaatcagtaattaaagtgttgagtgaatttcttatcgggtcagttgtaaactagtgcaaaaatgtcgcaatccgataacgtggcacgtgagcaaactgcggcaaatgcagggccggatgcatgtcaaggatgccgcggccaattgccaaatgccacgcccgtggaagtcgaggacatggccttgccgtcgatggagcgtctcattcgaaaggccaacatggcccagaaaatgctgaacgatgtgatgaaacagatccagaagcagcagcagcaggaatctcaactctccatcaaggagaccaagtccaagcaccgcagctccgatggagttccagttccgaccacagtgactgcgagctgatcctggcggagaaggaggggcacatgccgcggagaagacacacgcgagatgaccgcaagcgggatcgttcccggtctcgcggtcgctcccgtggtcactcgcgtggtcgttctcatgggcgttctcgttccaggtcctacaccgattcccgacgatctcgagcactacccctggctctgcccgttcggatttcagt

SEQ ID NO: 9408 - protein, 99 aa, DROSOPHILA
MSQSDNVAREQTAANAGPDACQGCRGQLPNATPVEVEDMALPSMERLIRKANMAQKMLNDVMKQIQKQQQQESQLSIKETKSKHRSSDGVPVPTTVTAS

SEQ ID NO: 9409 - DNA, 2753 bp, DROSOPHILA
ttaccatctgctattgtccagcgtatttcgctggtcaccggatcgatggctgtcagtccgccgcccagtgtggagaacaccatcagcgcctcctcgtcgcgggcgaggtccgtgcagtcctgcgggttgtggaagagcgagagaaacttatgaacaacatatcgggcaaggtgatgaaatattcattggtagtccagtgttagcccttagtgggtcatacggcccagtgccgcccccacttaccgtcttctcatcctcgccgctgctgacgacttctgccgagtcgccctgttgtgattttgctgtagctgatgcaataagcccgctggccagcaaaaataacacgcaacaaacaacaacgcagaatctcattttgtttttgcaaccggtagggcgcggggcgggggtattagaagagaaaagagagcgaaagagagagggaactagttactgctatttccgatccgtattcagtttgcacgtttagtcagttttcgtttcttgtttgtggcatattatcgcctctttttcaaaacttttcaatcatcaaacactgttgcagctctggccgtgctaaatttcacattttcttcgcactcgcgttcaatattttccaattacgttcgccattgttgagttgagagttcgtcgagtgagcggagtagagtgacagtgggcagataattgggaaaagaccgtactggtttgaagtgtgaccagggagcacgcaacgagccaaatatgcaacgaaataatatcccattcacactgacgcttgagatggcagcaatggaaatcttattgttacccatcgctgttgccataaaatcaatttaaatgtgaaaagatctttttattccaacatggataaaattgtaacatatacgtggtaatataatgtgagctttggagtttctgcgcttgcagtgtaaacttcccagaacttgtattgactttggtcgataaaaatcgataggcgatctaatttcgatattacacaatgcgtcttgtttttacgggtaattgtgtttttaaacgcctgctgcacacggaaataggcggaaagtatgccaaacagcagccgcggaacctcaaaggacggagcaagagctcccaggagtggcttacgcgccaactggcggatccgtacgtggagaaggcccgcatgatgaactatcgctgccggagtgccttcaaattactggagatcgacgacaaatacggaatactgcggcccggagacacagttttggaatgcggagctgctcctggcagctggacccaggtggccgtggagcggaccaatgccaacggaaagcaggagcgggcgccacagggagccgtctttagcatcgacctgttgcatttccatgctgtgccgggtgccacaatctttggcggcatggatttcacttcttcgctggcacaaaagcggctgagggaagcgttacaagacagaaaggtcaactgcgtgctgtccgatatggcacccaatgccaccggagtgaggatgctggaccaggagagcatcactaacctctgctacgaggtgctgcgctttgccctggccatgtctgctccgcaggcccatctggtggtcaaggtgtgggataatggcgacgtgcccaagctggagcgagatatgcttaggttttatgagaaagtgaagagagtaaaaccgcgcgctagccgcggagactccgccgagcacttcctggtggccaggaactttaaaggagcaacggatagttaattattaactgcgttttttggactagttgaattaaaagctttgttaattgactgtagcttatattggatagaataactaaagggaagtaacctaggattaatttcatctcaacatttttgttgattttctttttgatgttttaatctttgttgttatatacagttctgtaacaaattatatgaatttagttgagtattaacaacccaatgctctcatcaacatatttatgcattcaaaactcacaccaaattattcatgattaattttaaaaacaaaggcttaaatttggtctccaaattgtactgaatagtttaagtacgcatttcctagtgcttgtaatgagtaaggtgatcaatcatcatgtacagccacttgggctgatcgtgaggagccatgtgcccggcattgcggaccatgatctccacaagatgtccggcgtgcttgacatagccggccacttccttcccaacgcgccacacttcgcggggagccaccttgtacttgtccgagccggggaactttagttggttgagataattgcgcgtcagtggataggcaacaataatgtctagctgcccgctgtagatgcacacagtatagtgggccagcagttcggctatccacggggccaccgagtccatgatatccttcttcaagtgaagttccaccttgttctccttgtccagatcatggaatgtcttattgcccacatgaattgcccgccgagtggcgcccgcctgcagaaattcgcccaagttggcgccatcatcatcatgcgtcttcaagtagttgtagtaccagttgtatccagtaaggttgctgaacagtgagccattggtaaggtccccgttgattagggaatcaaatacgtcgaaggcgcactccatgtcgtgactcttaatgcattcagcaccctttgcctcggcatcgtggaaactctgcagtccgtgctcgtcgatcaggcccagctggtagagatagtcaccgtacttcagctgat

SEQ ID NO: 9410 - DNA, 753 bp, DROSOPHILA
atgcgtcttgtttttacgggtaattgtgtttttaaacgcctgctgcacacggaaataggcggaaagtatgccaaacagcagccgcggaacctcaaaggacggagcaagagctcccaggagtggcttacgcgccaactggcggatccgtacgtggagaaggcccgcatgatgaactatcgctgccggagtgccttcaaattactggagatcgacgacaaatacggaatactgcggcccggagacacagttttggaatgcggagctgctcctggcagctggacccaggtggccgtggagcggaccaatgccaacggaaagcaggagcgggcgccacagggagccgtctttagcatcgacctgttgcatttccatgctgtgccgggtgccacaatctttggcggcatggatttcacttcttcgctggcacaaaagcggctgagggaagcgttacaagacagaaaggtcaactgcgtgctgtccgatatggcacccaatgccaccggagtgaggatgctggaccaggagagcatcactaacctctgctacgaggtgctgcgctttgccctggccatgtctgctccgcaggcccatctggtggtcaaggtgtgggataatggcgacgtgcccaagctggagcgagatatgcttaggttttatgagaaagtgaagagagtaaaaccgcgcgctagccgcggagactccgccgagcacttcctggtggccaggaactttaaaggagcaacggatagttaa

SEQ ID NO: 9411 - protein, 250 aa, DROSOPHILA
MRLVFTGNCVFKRLLHTEIGGKYAKQQPRNLKGRSKSSQEWLTRQLADPYVEKARMMNYRCRSAFKLLEIDDKYGILRPGDTVLECGAAPGSWTQVAVERTNANGKQERAPQGAVFSIDLLHFHAVPGATIFGGMDFTSSLAQKRLREALQDRKVNCVLSDMAPNATGVRMLDQESITNLCYEVLRFALAMSAPQAHLVVKVWDNGDVPKLERDMLRFYEKVKRVKPRASRGDSAEHFLVARNFKGATDS

SEQ ID NO: 9412 - DNA, 3060 bp, DROSOPHILA
tgcccaacatctacatacccgagcccggtattatggaggagatcctaagagctattgagatcaacggagccgttgagtatgtgccacgcctttggtctgacatggttgtgttcgatcacacgcaccgagagagccttctactctacgttcttcgcattttggtagataataagccgaatccagattcccccgcccaagcacagttgccggagcagggcgccaaggtggcgctggatatgttcgaaagggttgaggaggctatcaagcgtctccgaaaggtctccttcaccggccaaatgctgggagatatactcacgcttctcgttcgcggtggtagctacgaaaaggcgaccgaagtcttcgcccacattgacaagaaccagcacagaattcccggaacaccaagcctaaatgctctgatagaatttgtggacgcaagtgtgcaggagaagtcacccagccaggcgctgtttgccctgcaatatgccgttgagaacaactttgattccagggagttagccaaacgtattcatgaaggatttaccctaaatgaaacacacctgtctaagctgaaatcgctcgtaggcgaaagtttcctcgataagtagtagagtcttttgtaaattatataatgaacgctgttaaataaataaccatttaataaatacttgtttggtttcattaaacagattaatttaatacatataatagacattactgaatgaatacacagtattctaaatattttgtaaagctttatgttaataaaaggctttgtactattttaacttgtaagctgatcaaatgtgtgacttgtaaacattaaaaattaatttccattggtcaagtagagaatagtaagacgtataaatttggatactatttccaattcagatgttgactagtgagtcttaaaataaacaatactgattttgttatgaagtagatataagtaaatgcctctaatgaatgtcaagaatgggtaagacacaattcagatctattcctcctttggagaaaaggcggctatgggttcccagttcattccgtcgtgtggcagatcgctgcgtagaaacggcgacagccaggtgagatgcattctcttgcccagaaccatctccaggttaccccgcaaaccgcgatcgtactttcttgtgccgcgctctcgtgtcaccgaaccgctcttgaatatcgaccagtggaagacaaggagcaaggatgatatggcgaagcccagaagggtgagatcatatatgaccaagtagaaggactcccagcttggagacagcatcaggctaaccacgggagcaaatatggtgaacagcgtagaccagcgccagtagatgtccagatggagatgccacagatagatgctctccatgatggcggccgccaaggatccgatgatcatgtaaaccaggtagtagaagaagtacctgtagttgtgatgcccgatgcagcagcaagtgaaccgacagtggtggtcccgcttcagcacgcacacgttgcacacttcgcagtgccaggatcgaggtggcaccaatgtctgacaatcctggcaagagtgccaccgtgccagctgcgccgcatccaacggtggcttcagcagctcctctataaagacaatcttagaagggataccacaaaatcactgcttgctacccactgcggatactagtgtccacaagcatgcaggccagcatgttggatgtgatgttgaagatgaggaacaggctggccaaccataataacgtgtaccaaatccctccgatggcaaacagttccggcataacaatggtcacatggaagatgtatgtcacgggcacaaagacagccaccaggaggaaacatgcgaaatccgaaatggaacgaggtttaacgcgatcccacgagcgcaaaatcatcatgctcccgttattttttgtaccccccaactgagacagtgctgcaaagcgatttttggctctgctgctaacggtaagactgttaagtcgagtatggtgaaacggttagaacacaactctttacgttaggaaacccgtaaaatgttaaataagattgaatttaacagaagcaatccggtttttaaagaacacaaatgatttaatttaaagaaatataaatatataaggtaataataagtaacttaatacgaataaatcaaatgtcataaacgatggtatattaaaggaatacaaatgttataagcttaagttcttaagtttgctttatattattacataaaaacttgaaattaaaaataaaattttatttgaaattaaagaacgactttataatggggatttctactgtgaaattacaaaaacaaaaaccatacaaaattgataaggcatagcgcttcgatgaaactttgctttgttttttttcttggaacttttaaaggcgattcaattaatatatacgtgtgcataataggttggggtttttttttgcggattatcgaaaaccatatgacgaacgagacaataaaataaaagaatatgtttaactaaacaatgtaaagttttaaattgtgaaaaataatcatttccttgatgtagagtgcaagcaggtataaaacattgcctagcctaggtgcactgttctttttatattactttaataatttttttcttttttaggttttaaaattttgggagcgaactagttcgcagtaaaaatgaattcgtgtagctagtagtttatacatatataccaaatgacttttactgacaataaaacaaattaataggcaaagtaatttaaaaatgcacaaattatatggcacgaaaaacgtttaacatcgtttcgcttcgcgagttttgaaaatagctgaagaatcgtagctagaaagcagacgatttggcatccctggcagcagttaatcaaaccacttgcgaccgtaaaacattccaaatgcttcggtgaagttaaatcttatcgcagcagagcagtcgcgttccacatcgcattccgtacgaatcgcagccgcaaccgatcccgcaaattgggtagatccgcaaaatgtcggcgacgcacctggtgattctggccgtcgct

SEQ ID NO: 9413 - DNA, 1008 bp, DROSOPHILA
aatcttatttaacattttacgggtttcctaacgtaaagagttgtgttctaaccgtttcaccatactcgacttaacagtcttaccgttagcagcagagccaaaaatcgctttgcagcactgtctcagttggggggtacaaaaaataacgggagcatgatgattttgcgctcgtgggatcgcgttaaacctcgttccatttcggatttcgcatgtttcctcctggtggctgtctttgtgcccgtgacatacatcttccatgtgaccattgttatgccggaactgtttgccatcggagggatttggtacacgttattatggttggccagcctgttcctcatcttcaacatcacatccaacatgctggcctgcatgcttgtggacactagtatccgcaaggagctgctgaagccaccgttggatgcggcgcagctggcacggtggcactcttgccaggattgtcagacattggtgccacctcgatcctggcactgcgaagtgtgcaacgtgtgcgtgctgaagcgggaccaccactgtcggttcacttgctgctgcatcgggcatcacaactacaggtacttcttctactacctggtttacatgatcatcggatccttggcggccgccatcatggagagcatctatctgtggcatctccatctggacatctactggcgctggtctacgctgttcaccatatttgctcccgtggttagcctgatgctgtctccaagctgggagtccttctacttggtcatatatgatctcacccttctgggcttcgccatatcatccttgctccttgtcttccactggtcgatattcaagagcggttcggtgacacgagagcgcggcacaagaaagtacgatcgcggtttgcggggtaacctggagatggttctgggcaagagaatgcatctcacctggctgtcgccgtttctacgcagcgatctgccacacgacggaatgaactgggaacccatagccgccttttctccaaaggaggaatag

SEQ ID NO: 9414 - protein, 284 aa, DROSOPHILA
MMILRSWDRVKPRSISDFACFLLVAVFVPVTYIFHVTIVMPELFAIGGIWYTLLWLASLFLIFNITSNMLACMLVDTSIRKELLKPPLDAAQLARWHSCQDCQTLVPPRSWHCEVCNVCVLKRDHHCRFTCCCIGHHNYRYFFYYLVYMIIGSLAAAIMESIYLWHLHLDIYWRWSTLFTIFAPVVSLMLSPSWESFYLVIYDLTLLGFAISSLLLVFHWSIFKSGSVTRERGTRKYDRGLRGNLEMVLGKRMHLTWLSPFLRSDLPHDGMNWEPIAAFSPKEE

SEQ ID NO: 9415 - DNA, 4093 bp, DROSOPHILA
gccaaaatgagtgcatagttaaaaagagaactaatgcctgtatatgtaaattcggatctgtaattgtatgagctttaaataaaaaataaaacagcattttgaaagacaagctgcatgcagttttaaaacaaaaaaattatattaaatttgtatttaaaattttaagttgtgctatttactggtatgtgcagttttcttattttacaaaacatatatttcaaaaattaattttacgcagagacatttttctgagtgtagcaccctatcaaccagaaattgctttattagacagaaatatcctcaaatgcatttcccccaggcggattgcagccaacaattgttaataatttatttggtttttggatcggtttttggtctcaaaacccccgcacactcccctcagtcctactgccgcctagactgcactctttcagtggaaaatctacaagtcatggtaccattcaatttcaccgccagcacctttggccgcatttcgggacttgcagtggatttgcactgccgggagtgcttccaaatgggttcattatgcattatatgcttcgcttttgccggctgaaatgcactttaaatatattttccatacatttaggcaacaacaacaaacgccagcgaactggaaaaccgacattgtttgccggcttttttggtgggtagctatagggaaacacttgaccaatttcactgcacacacttcaccaataagacattcgcttagtttccaccctaaatgcactttttaattttttatcaacaatttacttacaattttgtcatttggcattgtaattttgtctctgtctctgtcgcacagctgtggggatggcgatagtctgcccagaggtggagaaaaatcgattactcccggatatcgatgtctctatgatcggtttcttgtcaatttaaagcgattgttaaccaatcccaattaatcgaaaggtgaggcgggctattttaaaaaagggaaattatctattagcttcaggtagactttgtgcacatttattaatatagcggcgtgttattctacaattagacaacaataaaccaatcgcattctagtggaagacagcgtatgaaagcagtgggggtgatccctccatcggacttcagtcgtacttgaggttgcccatgcaaatgtacttgatgtccacatagtcgtcgataccgtgtttggaaccctcccgtccgacaccggactccttgacgccaccaaacggagcctctgctgcggagatgatgccttcgttgacgccgaccatgccaacctccagtcgcttggccacccggaacacctgctgcagattctcgctgtagaagtaaccggccaggcctctcctggtgtcgtttgccttctttaccgcttcttcttcgtctcggaaccgtatgatggagaccactggaccaaagacctcctccgagtagagttgcgccgagggtggcacatctgtgacaattgtgggtgcgtagaaaagggatcccttgtcgggcaacggctgtccgcccagaataatgttcgccttcttcgacctggcgtcctccacaaagccactgactttgttgaactgcatctcgttgatcagtggtccgatttgcacatcgcaaccctgaccatctccgatcttcaaagcttccacgcgttttttcagctgcccaacaaacttatcgtagacgctgtcctggacaaagaatctattggcggagacgcaggtctgtccgcaattcctaaacttcgaggccatggcgccatccactgctttttcaatgtccgccgaatcgaagacaatgaacggagcattgccgccgagctcgagacaaatccttttgatgccatcagcagagttccggaacagcagtttgcccacctcagtggagcccgtgaaggatatacccctaacatcgggactcttgcagaagagatcgccaatgggagccgctttgtttgtggtgaccacatttatcacaccctttggaatgccagcgtccactgccaatttggccacagccagggcagtaagaggagtgtcttctgaaggtttcaccacgaccgtacatcctgcggccagggcggctcctgctttcctcgtaatcatagccatcgggaagttccagggcgtaatcagcgccgccaccccaatgggctgcttcattactatgatttcgcgattgggcgatgcactgggcacaatttcgccgtagatgcgacgggcctcctctgcaaaccactcgacgaaggcgtttccgtaggccacctcccccttcgactcgttgatcggcttgcccgactcggccgtcattatctcggctatctcctgcgagtgctgctcgatcagtttgtgccacttctgcaagacgagattagattagataagcagaagtaacttggagaccagaggaagaaataatgacaatgacctacagtcgaactttccaactctatagtcccatcatattatatgatggtctttatctgtggggtcaacaatcagcacccctgataacgagtgatcccggcactcaccttgagcaggttggaccgatccttggcggtcagggatcgccactccttggactcgtacgcctgcttagcggcgtctatggccttctgggcatccgccaccgtcatgttgggcactttgccgatgacagcaccattggcaggattccgcacctcgaaggtcgcctttgcattgctggaatccacccaggcgccatccaccagggccttatcctgcaccagtgccgagaatcctcgcattctgcagaggcttaggctgcttcctgttcgtgcgactccgctgagctgtcgccacattctgccggctgctagaaataaacaaactaattgcaattaacaattggctactaatcgattattaaccggtatgtgagttcgcttgctttatcacctttttatcacctgcggggggttagaggcgtttctcttatctgcgacgttatcgggaagactctctgctgtccacagctgcagttctagcttctattgggcgctttgattggatttaattgattttaattttttacgctccgaaccagcagagccttagaaactgccaactcgtttttttactatcaacagcagatgttcgcgctcttaggagctgccaactggcagtcgcgagtgaaccgcgaaaaatgtaccatttgaaaaaaaagaactgcttgataacatttactttttaatttactcgcagcggatattaaaaacatattttcagcttttaaaaatataaaatatttaatagaagtacatccataacgcaaaaaataagaacctaaatatcatatattgatttgccataaatatttcgcctgctgttatcgaatgacttcgagctatcgatcttcagttatgcagcaatcaccttctgtcaggcaactgggcggcagccgtttgactttcaaaaagaaaaagggaacgacaaaaaaaagaaagtccattccaagtaaacttcctgattcccatttttagtcgttgcttttcagcgattttaaggcagcgccacttgtcccagcaatctccggacaatcggtgcctttcgcccgatctgcccgatcttttttgcatgcgccgccaacgtggagcactgtgctccatttattatgactttgtagccaggcatcacgaccatagatttcacatatgccggcagcggttctgtcagaaggtgggtctcctaacccatcctaagcacttagaaaaatgtgtgcacttagggcttaaatttgtaaaaattagaccgatattcagacaactatcagttctttgtaaccacattttccataaagttttaaggataagccagaaaatgttttgtataaatattataatactaataattttctacattttacttcaaatagaagttaagctccattcatctttttcttaatactctttttgctaagtgccatttagcattagacagcggtaggttctgcctactgggctactggtcatggagcttcctcctccggcgcctcacctggttggggcttcccttcgcccaggagcccgcaatctgtgttgcaaattttgtcaataaattttggc

SEQ ID NO: 9416 - DNA, 1849 bp, DROSOPHILA
gcagtttctaaggctctgctggttcggagcgtaaaaaattaaaatcaattaaatccaatcaaagcgcccaatagaagctagaactgcagctgtggacagcagagagtcttcccgataacgtcgcagataagagaaacgcctctaaccccccgcaggtgataaaaagtttgtttatttctagcagccggcagaatgtggcgacagctcagcggagtcgcacgaacaggaagcagcctaagcctctgcagaatgcgaggattctcggcactggtgcaggataaggccctggtggatggcgcctgggtggattccagcaatgcaaaggcgaccttcgaggtgcggaatcctgccaatggtgctgtcatcggcaaagtgcccaacatgacggtggcggatgcccagaaggccatagacgccgctaagcaggcgtacgagtccaaggagtggcgatccctgaccgccaaggatcggtccaacctgctcaagaagtggcacaaactgatcgagcagcactcgcaggagatagccgagataatgacggccgagtcgggcaagccgatcaacgagtcgaagggggaggtggcctacggaaacgccttcgtcgagtggtttgcagaggaggcccgtcgcatctacggcgaaattgtgcccagtgcatcgcccaatcgcgaaatcatagtaatgaagcagcccattggggtggcggcgctgattacgccctggaacttcccgatggctatgattacgaggaaagcaggagccgccctggccgcaggatgtacggtcgtggtgaaaccttcagaagacactcctcttactgccctggctgtggccaaattggcagtggacgctggcattccaaagggtgtgataaatgtggtcaccacaaacaaagcggctcccattggcgatctcttctgcaagagtcccgatgttaggggtatatccttcacgggctccactgaggtgggcaaactgctgttccggaactctgctgatggcatcaaaaggatttgtctcgagctcggcggcaatgctccgttcattgtcttcgattcggcggacattgaaaaagcagtggatggcgccatggcctcgaagtttaggaattgcggacagacctgcgtctccgccaatagattctttgtccaggacagcgtctacgataagtttgttgggcagctgaaaaaacgcgtggaagctttgaagatcggagatggtcagggttgcgatgtgcaaatcggaccactgatcaacgagatgcagttcaacaaagtcagtggctttgtggaggacgccaggtcgaagaaggcgaacattattctgggcggacagccgttgcccgacaagggatcccttttctacgcacccacaattgtcacagatgtgccaccctcggcgcaactctactcggaggaggtctttggtccagtggtctccatcatacggttccgagacgaagaagaagcggtaaagaaggcaaacgacaccaggagaggcctggccggttacttctacagcgagaatctgcagcaggtgttccgggtggccaagcgactggaggttggcatggtcggcgtcaacgaaggcatcatctccgcagcagaggctccgtttggtggcgtcaaggagtccggtgtcggacgggagggttccaaacacggtatcgacgactatgtggacatcaagtacatttgcatgggcaacctcaagtacgactgaagtccgatggagggatcacccccactgctttcatacgctgtcttccactagaatgcgattggtttattgttgtctaattgtagaataacacgccgctatattaataaatgtgcacaaagtctacctg

SEQ ID NO: 9417 - protein, 509 aa, DROSOPHILA
MWRQLSGVARTGSSLSLCRMRGFSALVQDKALVDGAWVDSSNAKATFEVRNPANGAVIGKVPNMTVADAQKAIDAAKQAYESKEWRSLTAKDRSNLLKKWHKLIEQHSQEIAEIMTAESGKPINESKGEVAYGNAFVEWFAEEARRIYGEIVPSASPNREIIVMKQPIGVAALITPWNFPMAMITRKAGAALAAGCTVVVKPSEDTPLTALAVAKLAVDAGIPKGVINVVTTNKAAPIGDLFCKSPDVRGISFTGSTEVGKLLFRNSADGIKRICLELGGNAPFIVFDSADIEKAVDGAMASKFRNCGQTCVSANRFFVQDSVYDKFVGQLKKRVEALKIGDGQGCDVQIGPLINEMQFNKVSGFVEDARSKKANIILGGQPLPDKGSLFYAPTIVTDVPPSAQLYSEEVFGPVVSIIRFRDEEEAVKKANDTRRGLAGYFYSENLQQVFRVAKRLEVGMVGVNEGIISAAEAPFGGVKESGVGREGSKHGIDDYVDIKYICMGNLKYD

SEQ ID NO: 9418 - DNA, 4509 bp, DROSOPHILA
ctctatggcattttgtaccttgtggatgtggtaagccagggcgggaacgtattttccggcataggactcgccggtgacccagaaaccagaggagttgctccactcgaagagttcgtacagctgcatcacagcctcgtgcagattgcggcccacatccttctcgttcgtagcatagccggcatcgttctctgtaaaactaaagccagtgcccacgggattgtcaatgtagatgagattgtgtgtcttgctccaggtatagttgcgtttctgaagcttcccatgaccatccaactctagtggtccattctctgtgaacaaaccgaagagcgaggaggcacctggtccaccctgaagccacaggaccactggcgcatattccggctcctgctcggcggggaagtaccagaagaacatgttggatttgaagccagggtccacggtcaaatagccggagtagctctcaacgccatggaactgggagcctacgacgcgggccagcttttgaacctcttgcttgctcatcgaagcattgttgatcaggggcgtcaggaacaggggctccccgggatcgacaccatcgtcaaagaactggtagcgtggatacggattgatgaagctccgcctgtaggggcgttccccctctactccttttgctccgcttattgcgactatagtcgcgataattaaaaatgcgcaatgagttgcagttttcattgttcaactgcgctgattcgactgaaaagcgatcgaattgtcagtggttgctttgcttattcagcttatgtatatgtattcttatattcttattatcgccccgacctgctcacgaatcggccgataaggggtttaaatcagttctctcacttgccttgcttttattcgcacagccggcgaaaaaatttagctttcccaattgagcagcactgatatttcagtgtatccgcaccggtcaaacggtagggttgtcaagtgaagcgaatttatcagctgtgattttttactaagagcgacttctgagttatggattgcaagtagttcttttgtcggaattattaaaaataatcatcaactaactctatattggtttagtttttcgcaaataaatgaaagcttgaatttgaaaggtttaaccagggatataaaagtctccaaagtacctatatatgttctgttttgttgcttatatcaccatttcttctcacttcaaatggtaagaaattctcgttcccgaggcattcatatttctagaatccaaacaattggcaacatcgaatacaacggcagtccggcaaggccagggcattttgcgtcaaaatttgtagtagcgccgcagctgattttccatcgccaaacaaagtttgagcaaacaatacacaatgtcagtcgctgacaccattgaatacgtgaccctgggcaatcctgtcagcaagatggtagcctcgtccgcatccgccctgctccgcacgcttgtaactaatcgacttttcctagacaatgttccggatttataattcttaactgtcttcctgcagggtctgcgtcccaagaaggtgccggtgcaggagacgagtatggcggtgctccctgccgcccacagctacgcgcattcacacggatcactctatcgactggccggctgccattaccacttcattcggctggccgggatcgtcggcgcgtcggccatctttatgggcgcctactgcaagtacgtcctgaaggacgtcagcgatcccaaggagcaggtggactcgcaggcctttgctgatgtggccaatcgcatccactttctgcactcctttgccatgatggccatgcctctggcccactatcccgtattcgtaagtttaaatggaaaaagtcaaaatttgtatttcgttgaagatgtgcctggttaagtcctacctccgccaggcccatcctctgtactgaccccaaggaaaccatttatcataattgatctcggtcgtgtatttggtttatttgtaaagctttctttgttggtttgtcatttacataaactctgtgtaaagttagatctctgaacggaatttataacaactcgcgttactctcgaatcgaaactccaacattgatactcgaataattgactctctgcttagctagtctaatgcgctgattgacattacaaaattgagctatgaatgaatattgatttgagccaagcgctttctccaagttacttctttataatataggtatgcatatgtatatttatgttgtatatgaaatgtttccaaagctaaagctaaatgttcaacaaccactaattgcagcttacaaagtaattttcaataccacacacgatacttgtataataattgcgttaattcggataactcttaggtttgtgatatgagcaggttcatagctgatatgggttcggggttttgggtaggaatttgttgatttactctcttcataattacaatcgtatgttaaaaatgtaccaaaaaggcatagattttctcgtttttgctgttatcttgtaattggtatttgttgtcatcagccttatttaataagtaaaatctgggctttatcgagctccgttttgtcgacgttttaaagctaacaactaaagctaacaccaaatatgcactcaaaacgctggccatcttcgcaaacttctactcctagactataaactatagggcctgttccgttttagagttttctgattaagaaatgtaaatgcatttagataacaatgtgacttaaattttgggtaaactatttgcaatttggaatttcttacatatgtatatcttgattcctgactaaacatttaaatgctataaattctttgcatcctaaaatcgtttaattacaatagtcgtgcttagcttttcatatagatttcgagaacagtggggcttggaacaggcccaaatgactgtggttacttaaagtaattggtttatttcctcccgcagactggcactttgatgattacgggcatgatgcttttcagcggctgcatgtactaccgcgctttgactggcgagaagcgtctgcaaccgtacgcgaccgtcggaggattctgcctgatggccgcgtggctgtcgctggtcctgtaggatgcgcggggcaggccacctatctatattccatgtagcacatgctgaactgcaatttagtgcagaggcaaataaagctaagccaactctaacatacaacatcatctaacataatacaacatcaactaaatatgagttactatatccgcttttagccattatttacaataattatagtgagggctttgcagctaatggaagatacttttgagttaaatgcgtacaatctcttagtgtatatagcaggctaatgtaagtcgctaaatcgttataatgaaataaaacaaataaaaacgttttaacaaaagaaccaaccgagctgttacatttattgtatacctgtacattaataaattactataaaaacactcatatatttatactaggcgtaacatttcatagaattctcttttagttttttctttttttggggcttttcattgggttttttttttctttaaggttgttattgtcgttttactggaacacataatacaaatgcaatgcgaccttttgaaggccaatgcacaaagttcagctaaaattaattattgcacaatttgcagtttatatcaatctttcttttttttaaggtacaaaaacatttagtccctacgctcctctaacatcagcttattgtcttgctgtttgatttctcatcagtttcctagttttatacacctgactaactattattttgatttgtacacgtcttgtaaaaagtttctcagcggcagctcagtggggatgtctgctggcgccgctgatggcttgctatcctaacaacttctgcttggaggcctccgcaaagaggaaggtcttctgaatgcccgcattggccgccggatgattcgtaattggttccagtatcttaagtatgtagtctttaaaagccttcggaacggcgaaatgtcaagaatccttcttgagccgcaggttgtcatcatgggcctgaaaggaagacaaagagcttaggcatgtggacaagttacattgaatcttaaaacgcaatcccaccttttgggcaaccttcagcagggcatcgaaagtggagtctcccgtctgcttcaccatgctgtggaagaccttcttctcgctggttgtgagcagctcgaacggagatccgaactccaccgcctttcctgcgtccattactagcaccttgtccgagtccataaccgtatgcaatcgatgggcaatcgtgagcaccgtgcagtccttgaatttgttcctaatcgtcgtctggataagagcatccgtctgcggatcgacgttagccgttgcctcgtccatcaccaaaatgcgattctctcggagaatggccctagctaggcacaccagctgtcgctgtcccacgctgaagttggtgccgccttcggatatcttgctctgcaaaccactgggaaga

SEQ ID NO: 9419 - DNA, 1330 bp, DROSOPHILA
ctaagagcgacttctgagttatggattgcaagtagttcttttgtcggaattattaaaaataatcatcaactaactctatattggtttagtttttcgcaaataaatgaaagcttgaatttgaaaggtttaaccagggatataaaagtctccaaagtacctatatatgttctgttttgttgcttatatcaccatttcttctcacttcaaatggtaagaaattctcgttcccgaggcattcatatttctagaatccaaacaattggcaacatcgaatacaacggcagtccggcaaggccagggcattttgcgtcaaaatttgtagtagcgccgcagctgattttccatcgccaaacaaagtttgagcaaacaatacacaatgtcagtcgctgacaccattgaatacgtgaccctgggcaatcctgtcagcaagatggtagcctcgtccgcatccgccctgctccgcacgcttggtctgcgtcccaagaaggtgccggtgcaggagacgagtatggcggtgctccctgccgcccacagctacgcgcattcacacggatcactctatcgactggccggctgccattaccacttcattcggctggccgggatcgtcggcgcgtcggccatctttatgggcgcctactgcaagtacgtcctgaaggacgtcagcgatcccaaggagcaggtggactcgcaggcctttgctgatgtggccaatcgcatccactttctgcactcctttgccatgatggccatgcctctggcccactatcccgtattcactggcactttgatgattacgggcatgatgcttttcagcggctgcatgtactaccgcgctttgactggcgagaagcgtctgcaaccgtacgcgaccgtcggaggattctgcctgatggccgcgtggctgtcgctggtcctgtaggatgcgcggggcaggccacctatctatattccatgtagcacatgctgaactgcaatttagtgcagaggcaaataaagctaagccaactctaacatacaacatcatctaacataatacaacatcaactaaatatgagttactatatccgcttttagccattatttacaataattatagtgagggctttgcagctaatggaagatacttttgagttaaatgcgtacaatctcttagtgtatatagcaggctaatgtaagtcgctaaatcgttataatgaaataaaacaaataaaaacgttttaacaaaagaaccaaccgagctgttacatttattgtatacctgtacattaataaattactataaaaacactcatatatttatactaggcgtaacatttcatagaattct

SEQ ID NO: 9420 - protein, 181 aa, DROSOPHILA
MSVADTIEYVTLGNPVSKMVASSASALLRTLGLRPKKVPVQETSMAVLPAAHSYAHSHGSLYRLAGCHYHFIRLAGIVGASAIFMGAYCKYVLKDVSDPKEQVDSQAFADVANRIHFLHSFAMMAMPLAHYPVFTGTLMITGMMLFSGCMYYRALTGEKRLQPYATVGGFCLMAAWLSLVL

SEQ ID NO: 9421 - DNA, 3072 bp, DROSOPHILA
ctgattatgtgttaaaattgtcgttttaaaaagtaataaaatctgtgaaatttagaagtagtgctttaagaagaagtgttttaagaatagaggctttcaatttattttggtaaagcgaagttggctttttcgtaaaggcgtggccattgtgacctgtctgttgtaaagtgacctttgattgaaagtagaaatcgcgcctacagattttgggtccacgcatcaaagtcgaccagattgatagctgagagatggggactcgcttttctcccaggctcggcaatcaaagtcaaaagtggctcacgattggcaagtaatcgagaggacaagagtgcagtaccccagaaaacgttgacatcgttttcagtttttcgtcggcgcgcgctcaaatttctaatttcattaaaatttgttcaaagggctgacggcaaagggcggttgtcggatggatgttggagtcccagacgttgacagacacaaatcgacacaatagacgtcaaacgcaggctagtgggcggctctggggcttgtgggaggggcagctttggcaatcaaagagcgccgatcaaagttgaaaatcgattttaattgcaatctaggctcgaagccgcggtgctcgattagcggtcaagtgggcgagtgtggaactgtcagtgaacattagcggggcgtggcatgtcggaaggtttttctgcttccccttatttccagttgaaataaagcagtactcgaaatttcggaaactttggctcttgaacacggtttcgcaattctgtatattttttcaagagaaaaataattttcggtcacataagatatttcttagttttatttatattcatttgctgtgttttttcttataaaatattccttataatgctatttgaaaatatcctaatattagtggaaaattggaaaattctaaacatccatgagatttctttcagttcttatgtcaatgatttgcccccagcacaacaccccacgcgcagtcttctcaaacgctccaaagggagcacatctaaaacaaaaaaatgcggtgcggtcagtagttaaattgcgaaattgaaatcgaagtaagctcgtggcgtcttaccagttttacccaaaattatctcgttttgatttgaagactcgctgcaaaataattttaatcaaacaaaattaaaatgcttgccaaaagcaaaccgctgattggcatgtctcacttgctgcaaaagcaggttttaggctttctgcctccgtcttcgtttcgccactttaactccgagggcaatttgtactcccaggatggctgggagagtggctatccggcgcccttgctgccgcgcaaggacctaaagccgttggagaagaaagacagatcaaaggtatacgatgcctgttggcaaacgacgcggcggaccgaatacaagtgccgttcggatccagagtttcagatgcacgcctttatcgattcgcgcaaaagttgtttagaagacccctgcgccaccgagatgttggccatcgatctcacccactataagccctcggacatgggcaaacgaaagtatccgcgcacctggttcgaatgtgtggtcaagcggcggaagcggaaggcccactgcgtccccgtaccgccaccgatgccgcggcgcaagcgcaagtcgaaaaagccccgctgccccgaggatttgtgtgtattgggcaaactggagcttaacctcatcaaaccctgcgttaaggaatcatcgaaatgtccgcgcttcagaatgcccaactgctgtgtggccgcccgcgatccgcccaagtgccgtcgtccctttagacgttgtggccagagacccaagaccaagtatccaagtttctccgagtgtcgacgcgatcccttcccggatcctcgacccatcgagtgcaactgcctgctcaagccggccatctgcgatatgtggcgccactaccgccgccgatttggctaatcaacttcgatttcaccaaaggatttttaccaagttttgaccgaactaaattaatgtcgcgaggcctatcgcaacaaaagatgctttcgcattttgagagcatatgacaattctatcccaactatgtgttgtgtcatgctcgtattaaagaactatacaaatattagaaatgaattacatttattggtattgggctttgcgcaaacattcattactcctaaatgaacgcctaaattggaatttacatcctagtaagtcctggtgaatatgttaactcgaccttcgagtgtgagctgatatgaatttggtgttggcatttggtgccgggtgccctgacatgctcgcaaaaatgcaatatgcaacagcccgtacgcgagtttgtatctgcagattgtccgaaatggttacaattcccagggaaataaccaaattccattatacagatacaaatcaaattggcaaaaggcattgaaagggatcaaacgagggtcggttggaggagaggtaggtagggataaaatgcaaaaatcaaattaccaggacttgagaaatcgcagacatcagagagccataaatcagtagggaagacgaagggaaaggaatcgtacttatataagaaattgttaccgctagttaacggtttattgatgcgtcgcttttggctgaatttattggcctggtcgttggtctttcgcttccgcacgcaaatggaaaatggccaaaaccgaaatggaggaaaatcgtgcaaagcgttgaattgatttggctcttagccggcttcttaagctgtcaaatgctgtgctctaaaaaatacttggacgccaaatgtgcggagaaatcaaaaatggaaaataattcttcacaggattcaaggtaaaaactaaattttcacgctttgataaactataaagtatgtatctatgtaagttaataaaagaattttttaagagtatactagtaatttcattttaaaaactagaacgctcttctttcccattcataagcatttagactaaataagtaacaaatttcggaaaaagtttccgaatttccttccccttgatttcccgatcatcctaaattttgataacagccaatgccatggataatggggagg

SEQ ID NO: 9422 - DNA, 1072 bp, DROSOPHILA
gctccaaagggagcacatctaaaacaaaaaaatgcggtgcggtcagtagttaaattgcgaaattgaaatcgaagtaagctcgtggcgtcttaccagttttacccaaaattatctcgttttgatttgaagactcgctgcaaaataattttaatcaaacaaaattaaaatgcttgccaaaagcaaaccgctgattggcatgtctcacttgctgcaaaagcaggttttaggctttctgcctccgtcttcgtttcgccactttaactccgagggcaatttgtactcccaggatggctgggagagtggctatccggcgcccttgctgccgcgcaaggacctaaagccgttggagaagaaagacagatcaaaggtatacgatgcctgttggcaaacgacgcggcggaccgaatacaagtgccgttcggatccagagtttcagatgcacgcctttatcgattcgcgcaaaagttgtttagaagacccctgcgccaccgagatgttggccatcgatctcacccactataagccctcggacatgggcaaacgaaagtatccgcgcacctggttcgaatgtgtggtcaagcggcggaagcggaaggcccactgcgtccccgtaccgccaccgatgccgcggcgcaagcgcaagtcgaaaaagccccgctgccccgaggatttgtgtgtattgggcaaactggagcttaacctcatcaaaccctgcgttaaggaatcatcgaaatgtccgcgcttcagaatgcccaactgctgtgtggccgcccgcgatccgcccaagtgccgtcgtccctttagacgttgtggccagagacccaagaccaagtatccaagtttctccgagtgtcgacgcgatcccttcccggatcctcgacccatcgagtgcaactgcctgctcaagccggccatctgcgatatgtggcgccactaccgccgccgatttggctaatcaacttcgatttcaccaaaggatttttaccaagttttgaccgaactaaattaatgtcgcgaggcctatcgcaacaaaagatgctttcgcattttgagagcatatgacaattctatc

SEQ ID NO: 9423 - protein, 262 aa, DROSOPHILA
MLAKSKPLIGMSHLLQKQVLGFLPPSSFRHFNSEGNLYSQDGWESGYPAPLLPRKDLKPLEKKDRSKVYDACWQTTRRTEYKCRSDPEFQMHAFIDSRKSCLEDPCATEMLAIDLTHYKPSDMGKRKYPRTWFECVVKRRKRKAHCVPVPPPMPRRKRKSKKPRCPEDLCVLGKLELNLIKPCVKESSKCPRFRMPNCCVAARDPPKCRRPFRRCGQRPKTKYPSFSECRRDPFPDPRPIECNCLLKPAICDMWRHYRRRFG

SEQ ID NO: 9424 - DNA, 5276 bp, DROSOPHILA
tatatatttatgtatattgtatgcagatttatgtggtatataatatataggtgtatatattaggtataaacttctacatgtcatatggattttcacagaaaatcttcaactttgagtaatgcttttcaattgtttccttgtgcgtgttttcacatccttaattgctcatttctatgcgctttcacttttcccttggagaaattgttcaatcctgtagttactttgttgagcactatgcacattaggcaatctggaagattcttctttcttcgctcactgaaccctccgccggcaccatcgcagctagctttgatctgtgcccgcggagctcctcgcttcgaacaagctttgacacaaggcagaaagcaacaactaactaattgttaacaacaatctctacacgattacacgggttgtttgatgtgtgtgcgtgtggggttatacaaaaatgatcatctcatgtcgatctatagctatcgttagacatttgctacatcatgtaaattcactatttgctcacgattctttctggctaatatcaccgttatcactgcattgcctaaactcggcttaagtctaggcagaaagaagtcttctcctggatagaacaggtaatgtgcgcaaaccaaatggtgccattggaaggtaaacaaaggaactaacttagttgctaaatatttgcactgtcacacaacgaatcggaacgaaaacgataccggtgaaatcataaaacaaaagattgtgtgtgctaaacaaagaactaaagactcaacgctgcacaacaataataactaacagctaagaagcttagtaattaggccctaaattacgggtgagagactgtgtgtttgggtgtgcaggtggagctaattccgctccagctttctgcttctgcttcagcttctgctttccggatgaatggctgtgtgcgggggtgtggctgatgtggaggcgtgtttgcagtctggctgtcgaaggaactgggcggggattccgcgctctagatgcgaccgcttttgctcgccgtcgacgtggacagctgttccaggcgggagcacagctcctgggccaggcgcagttgattcgcagcggcagcggcacacgaggtggcggctccagcgcctgctcccacgggcaactggactccggccacgacttccgggtagctgatgcacacgcccacccagcgagcttgactgcaggcatgggactgtaaggaaaagaggcggaaatggttagtttggtaagtaaacacaaacacgttcagctaaatttgtataactcgaatatgtttcactttgataataatataatataatattttggattgttcgccaagtagaagcttggcacatttgtttaaacaatctacgaaatgtgtatgcacgtataatctagaaaacctcaatgctaattcccgactttgaatgcttcgttcggtgttgacttatcgaaaaaatgcggaggtgtcaagcggagctgttatgtatattaacttttctcaattattatcggtttcatttttcgtactcccaaataattagtatccatcaaaatgggactagcagaaagactcaacacagcaaacaaacggcttgagataaagaaatttcagttatgacgagcagtgaatccaggaaatttggctttggttcgagttacgcaaatttcgacagtgggagattccactcgttgactgcaactcaccatggcgaaatcacgtttccattggacaccgcactggccgtcgcacaggggacagggacgctccaggctgtagccaccgcattcgctgcagtcgagggacacatggtcgtccgtccaggagacgccgcaggtgaagcaggagcccatgtgctggcgcagctcctcaatggtcagcacgttgtccatgctgatctccaggggactgcccaccagatctggcagcgaggcagacagaccgagattgtgatgcctggaagagattaggccgaagcggggaattcttgattagtaatagtgacaaattgcggctggcgtcgggcaaccgtgaccttgccaagtgggtggcggcgtgcgctggcgtgattatgataatgagctgcgtgccggtgggccggtggtggaatgggatttgggatggcccgattgggatgcggggatggggacgagggcaatgattggcaactgtacccgactctacggcgcgactttcgcccgatcatgtgagcgatggcgacgggcttttgttgcttttgtgcggccccaaaatgcgaaatgataatgatacgactgcgaacttgtatatatacatatgtatatatgtttatggctgtatacaaacacagacggacgccgaactgttgaggtgaaggtgctggcccccttcattaatgggccaaagtcgtggccaaattgcaggtgtggtttctactgcgacactgtgttgtattgagtggtattgtggctgtgtgtactctgcaccctggcccagtcgccattccccgcccgataagattgctaaaatcatgaatgagccaccaccaccaccaactcacgccccttcgtattcccccacaaatcagccctgacattgtttacatcgatatttagcaaatgcgaaaacggaaatggaggcgaattatatcgaatcgctgcttccagctaaatgaatcatgaatgtacgtctgtagatctgaagatgggcatccaaaattaaaatacttacgacaggggactgcagatgtcggcgatttggggaccgtgaacactggcgatcgacatattggctgctgatggcactgcaaagagggaaacagaaagcagaagaagtcagttaaagttcatcaaatgtaacaaggtgagttcaatgctggccaggtaggtaggtaggtaggtaggtaaacgatcgacggcgaaggtaagcgagcttgttgtacaggtgcgtgactcaaatgtcagagagctcgactgtacacacaccgtaccaagctgagcttcagatcattcaaatggctatatgtatcattttccgcagcaactcggacgacattcttggctaaaattaacaactattcgtggggaaactgaaggtggagtgcggtccaagaccacaaccgctgaaatccggttgaaagcaccataaacacactgcgaggccgttgatcagtgcgtcatctcgtgtagtttcaattgtttggggctgggacaattaagaaactttaatgtgcgaattattcggaattggaagcgaaacgttaatggcccgcgcttgtgtctcaaatgggggaatactgtctataggtatatacatatgtatggccaataccatttggctggctgtctacattgtccacacgattttggcaaagttgcaaaaatctttgtggcgagccgaggcacatgactgctgtggcgtctgctggcctggcatcataataaataaataaataagtacattttctgcgttgttatgcggccatccgttggacgttctatatttagctcgatcgaattgagaaagtatgtataatcgcgggacgtgaccgaaataaaccaaacaacatgggatagtctgggcatcggtttgcgcccctgctcggctgcagttcggtttgagtctcggttgggaggcaattttcagttgctgaaacggcaacggcgcaaaagcgaaattgctgtaatttatccgatccgagcatattgtgtgccgcacacacaactagttgcatttaatttgatttgattttatttatttatagaagggcacacacaatggcacacaaatcggggggacaccgacgggcgcttcatttttttttttagttatttttggcacggaaatacttacatttgttgggttatttacagcaacggttgttgttttatgattttttatacagcgctattaataaatccaaattgggattcctgtgctgctttattcgccgtatttattggtaattgtagttggccttgcgtaagctagacaatcgaattgctttttataattgcctggacattaacattaaccgttggcaattgtttttgtgttgtttgtaacttttcacacgcgatgcgagacagttagctcatgaaaatgcaattggcaatagtttgtatctgaatgcagttgtttgactgggactgcagcgcacttttatagttggactgggaagcgaaactgaactgtgtagctgggactcggactgattttccccagattcaattcaattcgatgcgagtagttttctccagagccgaaagaccaagtgggcaagcaaagcacctcgaaccgcgaaactcaaatgaacggcgctcgctgagatcgcaccgcttttatagccgatccgactggcgagagcggagagccgttagtcagcgcggagagcgagtgcgagagacgagcgagtgatattgctcggacccgaactcaaatccgaatcgcatgacaaagcaaagctaacgaactgaacttgccaaaacacaagcacacgcacgaattaaaaaaaaaaatcatccaagtgccgtgcaaaatacgtaacaaagatcaaaacacaagcgaaatgccaaaacaaagtctgatgctgaccaaattagcggtagttggcaacaggagaggctctcagcgagagcagagataagaaaccaaaacaaaacgatagccagcgagtgtctcgaccagaggatacctgttactcgctggatacaccatgttatgcggcttcgttaaactgactctgtcttagataagtattacatattttcaactattaagttaggcaccttgaacttaatcatacacagcatttgaatcacatacatttaggtatagaacatgctacatatcgctcctcacgcacgttataccctttgtactctacgagtagcgggtaccagcacagatggcgagatagcgagcacatttaacggtcaagcacagcaggcgagcacccttacactcatgcacccataccgataaccagatacccacaccgatatctcctccatacgccccgtcggccggacggtacgtatacgacacattgaccggacggacactagtacatcgactaggtgtaatcgcccgctggttattgacgcatgtccaagaagacggcaaacaagatgccccctggcaaccgtcagaggaaccgacggacgacgttgcttcatttgaataacaaatcacttcgcgctatgacaggtagagcgccgggcaaggacagggacggttacgggttcgaattcgggttcgtgtccgtgacaacagcgcaggtggaaagccgcaggaa

SEQ ID NO: 9425 - DNA, 977 bp, DROSOPHILA
ttcgaggtgctttgcttgcccacttggtctttcggctctggagaaaactactcgcatcgaattgaattgaatctggggaaaatcagtccgagtcccagctacacagttcagtttcgcttcccagtccaactataaaagtgcgctgcagtcccagtcaaacaactgcattcagatacaaactattgccaattgcattttcatgagctaactgtctcgcatcgcgtgtgaaaagttacaaacaacacaaaaacaattgccaacggttaatgttaatgtccaggcaattataaaaagcaattcgattgtctagcttacgcaaggccaactacaattaccaataaatacggcgaataaagcagcacaggaatcccaatttggatttattaatagcgctgtataaaaaatcataaaacaacaaccgttgctgtaaataacccaacaaattgccatcagcagccaatatgtcgatcgccagtgttcacggtccccaaatcgccgacatctgcagtcccctgtcgcatcacaatctcggtctgtctgcctcgctgccagatctggtgggcagtcccctggagatcagcatggacaacgtgctgaccattgaggagctgcgccagcacatgggctcctgcttcacctgcggcgtctcctggacggacgaccatgtgtccctcgactgcagcgaatgcggtggctacagcctggagcgtccctgtcccctgtgcgacggccagtgcggtgtccaatggaaacgtgatttcgccatgtcccatgcctgcagtcaagctcgctgggtgggcgtgtgcatcagctacccggaagtcgtggccggagtccagttgcccgtgggagcaggcgctggagccgccacctcgtgtgccgctgccgctgcgaatcaactgcgcctggcccaggagctgtgctcccgcctggaacagctgtccacgtcgacggcgagcaaaagcggtcgcatctag

SEQ ID NO: 9426 - protein, 171 aa, DROSOPHILA
MSIASVHGPQIADICSPLSHHNLGLSASLPDLVGSPLEISMDNVLTIEELRQHMGSCFTCGVSWTDDHVSLDCSECGGYSLERPCPLCDGQCGVQWKRDFAMSHACSQARWVGVCISYPEVVAGVQLPVGAGAGAATSCAAAAANQLRLAQELCSRLEQLSTSTASKSGRI

SEQ ID NO: 9427 - DNA, 4110 bp, DROSOPHILA
tattttccaggtaacgctccatgataatatacgcctcggtcagcttgcgttcatgatgtgccacatcgacattggcgaatccctggcggacagtcgccgactgggaaaaataaaaaacaaaatatgtaaacagctagttttagttgcgaatcacccaccataaaatcactgtcacgtcggaacaaaaaggagcactcgaagagcaggaggttcagaaccttcatccgttctgcgtgctcctgcggccacaaactaccgccctcatcgaacttctccgccaggtgaatgagtatagcatgactgtccgtcagcaccagatcaccgtggactagggtgggaacactgtgctggggatttaactaaataaaaatggcaaaatataaaacagaaattataattataaggaattttcgcaaattaaattattcgttttcttaaaataatgattgattcaatttattcattgaataaatttgacttacttaccgctaagaaatctttttggaattgctcgcccttgaagagattcacaaacctgagctccacatctatatcgagcaatttgattagcataaggcaactgcggaccggcggactgcgctcgtcgtaatacaaaatcggcttgggctgagacattaagttaggatcaggtagaaaaacagacaaacgaacgccttgaaagtcgatcagtaactgaattgaaaagcatttgtagccacagtactgattgatggtggcattttaatgtatactacgagataattcatcaattaattgttatattaaaatcaaatatataaacactgttcactttcaccaaaagtacagatctatggaaattgaaattgataagatagataacgaagtcattttaaatttggcgctcatttttcaatttgtgtggtatccctgatgtagtgctggaaaacgacatactataacgcactgttaaccggactgttagactcagctgatcggccacactttctggacaagaagaagcacctgcatttttccccacttaaaccagaaaaacatttaattttcttggttttattactgaaaatcaagttgatttgtgtccagcccgctaaacaatgtacctctcgcgccaattgagactgctgcccagggcgaacatcgcgtgcagcttgagttccagcggagcacattacacaacagcggcgccggcggaagatgcccccattgagattcccaatcggatcgagcgttcgcccaccgatctgctccaggctctggctagcacggtggccagggattacaccgcaccccactacaagtaccacgatgacccgttcctgatacccatgtccaatgcggcgaagcgtacttatgccatgtcaaaggaatcgggacgcaaggctgccaagtggatcaaggaggagcaccgcgagctgtttatggtaagcagctaagtagaaatgtttcatacatactaatcatttcccatttcacagcaccaagaggcacagccggccatcgaaaaattcgcccccagcatggtctataccgaggattcagtggtggacgagacctccctcgcccaactgatttcccagggtgaactcaaagacgctgtgctagtctacaaccttctggaacaaaaaggaaatccaatcagtcccgaacttaagcagagcctgctggaactggtgtgcttccataacaaccaggagccgataccggaggaatacattgaggagcgctggttcctgcagaacaataaacgaagagagcgtagtggcaagacctggaaggatggcgatcttgcagagaaactgtattccgaaatcgaaccaaagacgccccaatcatatgcctcgcttatccgcggaatggcgaagtacttgcagtgcgagcgggcatacgcattgctccaggaggctggcgagaagcaggtgcaactggacaccaacacctttaattccgttatcgaaatagtgagcttcctgaaggacacagcagagcagcgttggcagctctgcaaggatcttctgaatgaaatgtcgcagcagaagctaagacccaacttgggaactttgaacgcagtgcttcagtgcattagtacctttggcaactttaaggtggcacgcgcggctgccctccaagctctgccggaattcaaacaattgggtgtgaatcctagcctgggttcctactactacctgctgatcatcttctgccgagagagaggaccagtatcccatgttattgtggatatcctcaacgatatttctggcaaggagttccagattcagcatcccaaagacacatacttctttgccaccgccatggatgtgtgccgcaatcatttacacgacaaatcgctggcgaagaaggtagacgaactgctgcacacgggcaagaactacgatttggttggcgactcattcaaggaatcaatctactaccgcaattatctggcactgctttgtcaaactgagtcaactgaggacttcatgctgagctacgacctgctggtgcccaacatctacatacccgagcccggtattatggaggagatcctaagagctattgagatcaacggagccgttgagtatgtgccacgcctttggtctgacatggttgtgttcgatcacacgcaccgagagagccttctactctacgttcttcgcattttggtagataataagccgaatccagattcccccgcccaagcacagttgccggagcagggcgccaaggtggcgctggatatgttcgaaagggttgaggaggctatcaagcgtctccgaaaggtctccttcaccggccaaatgctgggagatatactcacgcttctcgttcgcggtggtagctacgaaaaggcgaccgaagtcttcgcccacattgacaagaaccagcacagaattcccggaacaccaagcctaaatgctctgatagaatttgtggacgcaagtgtgcaggagaagtcacccagccaggcgctgtttgccctgcaatatgccgttgagaacaactttgattccagggagttagccaaacgtattcatgaaggatttaccctaaatgaaacacacctgtctaagctgaaatcgctcgtaggcgaaagtttcctcgataagtagtagagtcttttgtaaattatataatgaacgctgttaaataaataaccatttaataaatacttgtttggtttcattaaacagattaatttaatacatataatagacattactgaatgaatacacagtattctaaatattttgtaaagctttatgttaataaaaggctttgtactattttaacttgtaagctgatcaaatgtgtgacttgtaaacattaaaaattaatttccattggtcaagtagagaatagtaagacgtataaatttggatactatttccaattcagatgttgactagtgagtcttaaaataaacaatactgattttgttatgaagtagatataagtaaatgcctctaatgaatgtcaagaatgggtaagacacaattcagatctattcctcctttggagaaaaggcggctatgggttcccagttcattccgtcgtgtggcagatcgctgcgtagaaacggcgacagccaggtgagatgcattctcttgcccagaaccatctccaggttaccccgcaaaccgcgatcgtactttcttgtgccgcgctctcgtgtcaccgaaccgctcttgaatatcgaccagtggaagacaaggagcaaggatgatatggcgaagcccagaagggtgagatcatatatgaccaagtagaaggactcccagcttggagacagcatcaggctaaccacgggagcaaatatggtgaacagcgtagaccagcgccagtagatgtccagatggagatgccacagatagatgctctccatgatggcggccgccaaggatccgatgatcatgtaaaccaggtagtagaagaagtacctgtagttgtgatgcccgatgcagcagcaagtgaaccgacagtggtggtcccgcttcagcacgcacacgttgcacacttcgcagtgccaggatcgaggtggcaccaatgtctgacaatcctggcaagagtgccaccgtgccagctgcgccgcatccaacggtggcttcagca

SEQ ID NO: 9428 - DNA, 2056 bp, DROSOPHILA
agcacctgcatttttccccacttaaaccagaaaaacatttaattttcttggttttattactgaaaatcaagttgatttgtgtccagcccgctaaacaatgtacctctcgcgccaattgagactgctgcccagggcgaacatcgcgtgcagcttgagttccagcggagcacattacacaacagcggcgccggcggaagatgcccccattgagattcccaatcggatcgagcgttcgcccaccgatctgctccaggctctggctagcacggtggccagggattacaccgcaccccactacaagtaccacgatgacccgttcctgatacccatgtccaatgcggcgaagcgtacttatgccatgtcaaaggaatcgggacgcaaggctgccaagtggatcaaggaggagcaccgcgagctgtttatgcaccaagaggcacagccggccatcgaaaaattcgcccccagcatggtctataccgaggattcagtggtggacgagacctccctcgcccaactgatttcccagggtgaactcaaagacgctgtgctagtctacaaccttctggaacaaaaaggaaatccaatcagtcccgaacttaagcagagcctgctggaactggtgtgcttccataacaaccaggagccgataccggaggaatacattgaggagcgctggttcctgcagaacaataaacgaagagagcgtagtggcaagacctggaaggatggcgatcttgcagagaaactgtattccgaaatcgaaccaaagacgccccaatcatatgcctcgcttatccgcggaatggcgaagtacttgcagtgcgagcgggcatacgcattgctccaggaggctggcgagaagcaggtgcaactggacaccaacacctttaattccgttatcgaaatagtgagcttcctgaaggacacagcagagcagcgttggcagctctgcaaggatcttctgaatgaaatgtcgcagcagaagctaagacccaacttgggaactttgaacgcagtgcttcagtgcattagtacctttggcaactttaaggtggcacgcgcggctgccctccaagctctgccggaattcaaacaattgggtgtgaatcctagcctgggttcctactactacctgctgatcatcttctgccgagagagaggaccagtatcccatgttattgtggatatcctcaacgatatttctggcaaggagttccagattcagcatcccaaagacacatacttctttgccaccgccatggatgtgtgccgcaatcatttacacgacaaatcgctggcgaagaaggtagacgaactgctgcacacgggcaagaactacgatttggttggcgactcattcaaggaatcaatctactaccgcaattatctggcactgctttgtcaaactgagtcaactgaggacttcatgctgagctacgacctgctggtgcccaacatctacatacccgagcccggtattatggaggagatcctaagagctattgagatcaacggagccgttgagtatgtgccacgcctttggtctgacatggttgtgttcgatcacacgcaccgagagagccttctactctacgttcttcgcattttggtagataataagccgaatccagattcccccgcccaagcacagttgccggagcagggcgccaaggtggcgctggatatgttcgaaagggttgaggaggctatcaagcgtctccgaaaggtctccttcaccggccaaatgctgggagatatactcacgcttctcgttcgcggtggtagctacgaaaaggcgaccgaagtcttcgcccacattgacaagaaccagcacagaattcccggaacaccaagcctaaatgctctgatagaatttgtggacgcaagtgtgcaggagaagtcacccagccaggcgctgtttgccctgcaatatgccgttgagaacaactttgattccagggagttagccaaacgtattcatgaaggatttaccctaaatgaaacacacctgtctaagctgaaatcgctcgtaggcgaaagtttcctcgataagtag

SEQ ID NO: 9429 - protein, 652 aa, DROSOPHILA
MYLSRQLRLLPRANIACSLSSSGAHYTTAAPAEDAPIEIPNRIERSPTDLLQALASTVARDYTAPHYKYHDDPFLIPMSNAAKRTYAMSKESGRKAAKWIKEEHRELFMHQEAQPAIEKFAPSMVYTEDSVVDETSLAQLISQGELKDAVLVYNLLEQKGNPISPELKQSLLELVCFHNNQEPIPEEYIEERWFLQNNKRRERSGKTWKDGDLAEKLYSEIEPKTPQSYASLIRGMAKYLQCERAYALLQEAGEKQVQLDTNTFNSVIEIVSFLKDTAEQRWQLCKDLLNEMSQQKLRPNLGTLNAVLQCISTFGNFKVARAAALQALPEFKQLGVNPSLGSYYYLLIIFCRERGPVSHVIVDILNDISGKEFQIQHPKDTYFFATAMDVCRNHLHDKSLAKKVDELLHTGKNYDLVGDSFKESIYYRNYLALLCQTESTEDFMLSYDLLVPNIYIPEPGIMEEILRAIEINGAVEYVPRLWSDMVVFDHTHRESLLLYVLRILVDNKPNPDSPAQAQLPEQGAKVALDMFERVEEAIKRLRKVSFTGQMLGDILTLLVRGGSYEKATEVFAHIDKNQHRIPGTPSLNALIEFVDASVQEKSPSQALFALQYAVENNFDSRELAKRIHEGFTLNETHLSKLKSLVGESFLDK

SEQ ID NO: 9430 - DNA, 3714 bp, DROSOPHILA
ctcggcgcagccggaacctccagcacctggacctccgggctgtacagctactccactgccgcgtgtggaaagcattgatctgattgtaacacccgatatcgatgagttcgtgcaggataccgtgccggatatatgcataaatcaggataattgcatcaaacagcaggttacgggcagttacttggccttggtgcgccgcaaaaccctgacacatttgaatgaaaagtacctgattcgccgggcggagcagagaggactctttggtaagcccgaaaaggatgtcaaggagcggtcgagaccgaagactgtgaagctgcaggagcagcaatcggagccagcgccccaggacatgggctatgatccgaggggttccgcccacacttcaagtgcccagcaaattgtgagtaaacaaactatgccaaattcgatacctctgaccgaccaaaacagagatacactagggctgttagactttacactttattgttaacaaaaaaaaaaacagaatttgaaggtgggcgattgttgttaaaaaataggcgattggcggtagatacatatatagggggtaatgtgactggggactgaggtgtggggctatgtacactcgggtcttatgagctaataattaacatgtcgatactgtctgcggattgatcatcatcgatggacacgcgatcgatgtcatcattaccgaagatcgaacatcatgcattcaattatctcgatcggcttaattatcttgtatttcgacaagatcattgctatcagctcgaattagtgattctatacttttagttattttaatttttacttgatagtacatagctatgcacacactttctattattgcaatgcccttactttctatttgcattatcttcatctgtattcattcacatggttttgtttttttttttttatttgcatgtgcaatctagtacgcttaatccatggaggtatttaaattgccgcattgttagttataacattaacatttgtattatttgttttatttgaacattcacatcattatcgtcttagttgtactgatagggattggttatgattatcgcgaaacagggatcagatcacctccatctcgttgcacccagtatggctctctcatcacaatttaatctatattcacatcctataatcttcggccacctcatcgccattagagggtgaggtatcggggtaattagcatgaggtggcaatcactttgccctggcttagtcacaggctccaagggattaggtcatgctcgatacgcttatctcactggaccgccgatcgattggagggtgagatcgtctagccatgtcaactactacttcttccaagcactagccgacgaggtcttcgagtagttctgactcttctgctgctggtagttctgcttgatgtccgacttcttggtactcgagtaattcgatcccatgcccgaattgctgctggtgccattgtagctgaagctggacttaaaggtggggttgccaatgctcttgaacatcggatgattcttgccggcgcccaccggcggagccgactgattgtagtagctcttcgtgctattctgctgtcccttgtcgttggacatttgacgaacgtaggaggagagtcccaaccccacagcgcccatgcccattccgacgcccacgccaacggtgctcacgcccactccgcccattcccacgccgtaggactgctgcttgtggctggtgctgaaggtggccgcctgatggtcactggccagagatccgctctgtgtgtagaactgctgctgcacctccactatgtagcgataggcctcctccatgctcttgggattccggcgcaggatcatcgagtgcgtcggctcgggcagatgatctcggaacacctgcagcgtgatgcgctctatgtcctcgagactgtacagggtgtcattgtgcgtgagctttctattgatcagtctgtgcttgagtttggccatcttctggtagtacaactctatgttcgagtccaagacagcgctgcgtatcttgtgtatcagcgagtagctagactcccgctccgcatagttgtacagcagttgatccttgagttttagccaggactcggccttcaggagatgaccattcccgccgccattgccattgccattgcccacgggagcgctcatttgtcgcgtgaagaccgcctccctggcgcgatctgtgcacttatttttgatatgtcctatcaattgaaacttgtagtagtcgtcgaaactatttatggccggcataagggcctcgattttgtgcaggaactgcggcagcttgccaggatcactgccatcgaagttctccactagcttcagacggctaaggacctgattgtatttgttcacgaactcgggatccattctggactaatctcccgtaggactactattactagttccaaagagggtggccttctatatctttaccgttaaccgatcgttgcgttcgcggcgacgtttcgggcgcgactgcttcaaaattcgaaatcgccgccaagcagcgactgccgcgtcaataattgttgtgtatggaaaaacagattttagattcttacaaatgtataaattaacattcattaacatgaattttacttgcaagaccctctccgcgatccaatccgacaatggcaacggattcgcaatcgacacgaaccgtggtcgctccaaccgagctgagcacaactgaactgaatgagcggatccgaacccgaaccgaaatcaactggcagaataaaacagaacggaacacagcgcccgccattcattgtggtgggagttgtggtacccgttgtgtgtggagtgcaacgggtatactagaccatccaggtggtatggttcgcacaatgggtagtcacagtgatatcaatcgaggattctgggaaaataagtaggacatacgcatgcttccctactccctacttcactctatgggtcttacatacaagatatctccttaatattactttcttcttagaagtatgggagttcttatagagtttccttgttgccttcaaaagggaacgatattttttgtagcatacatttgggtgaacaatgccggaagtcctgataatcgtatggtagtgaagaactcgatttttcttttcagctaaattccgctttaagcttacatttaaagtgaatcaaaactaatgtgattatatgtagaaatttataaagagaaaaatcgcgacctaaagcgacctagttgaactgctaaatagtaactttaatagatgacataaaatagatagtgaatttaatagattcaatgggtatctcatagacgtgacaccaacttcccccaaacgctatttgcttactgttgttgcgacgctgagtcatagccacaaaatcccagcacggcgacaccctgcgaccgatcgcgatagatatatgtatgtatagccgggcagatagagatggcgatagtgccagccgaacggacacgggccacaaaaaggccgtagcacgcacatagtcgttactcgtacccctaatacaacatcaaacacagcagcgaatttcattaaagagcgcacacaaatcgcttaaacgaagcgttagattcgctttttgtttgcctcgtcgctgctcgccgtgttaattgtcggggttcaaatggctaacaaaaaataaataaataaataaataaataagcaaatggggaaagtctacgcta

SEQ ID NO: 9431 - DNA, 1714 bp, DROSOPHILA
ttgtgctcagctcggttggagcgaccacggttcgtgtcgattgcgaatccgttgccattgtcggattggatcgcggagagggtcttgcaagtaaaattcatgttaatgaatgttaatttatacatttgtaagaatctaaaatctgtttttccatacacaacaattattgacgcggcagtcgctgcttggcggcgatttcgaattttgaagcagtcgcgcccgaaacgtcgccgcgaacgcaacgatcggttaacggtaaagatatagaaggccaccctctttggaactagtaatagtagtcctacgggagattagtccagaatggatcccgagttcgtgaacaaatacaatcaggtccttagccgtctgaagctagtggagaacttcgatggcagtgatcctggcaagctgccgcagttcctgcacaaaatcgaggcccttatgccggccataaatagtttcgacgactactacaagtttcaattgataggacatatcaaaaataagtgcacagatcgcgccagggaggcggtcttcacgcgacaaatgagcgctcccgtgggcaatggcaatggcaatggcggcgggaatggtcatctcctgaaggccgagtcctggctaaaactcaaggatcaactgctgtacaactatgcggagcgggagtctagctactcgctgatacacaagatacgcagcgctgtcttggactcgaacatagagttgtactaccagaagatggccaaactcaagcacagactgatcaatagaaagctcacgcacaatgacaccctgtacagtctcgaggacatagagcgcatcacgctgcaggtgttccgagatcatctgcccgagccgacgcactcgatgatcctgcgccggaatcccaagagcatggaggaggcctatcgctacatagtggaggtgcagcagcagttctacacacagagcggatctctggccagtgaccatcaggcggccaccttcagcaccagccacaagcagcagtcctacggcgtgggaatgggcggagtgggcgtgagcaccgttggcgtgggcgtcggaatgggcatgggcgctgtggggttgggactctcctcctacgttcgtcaaatgtccaacgacaagggacagcagaatagcacgaagagctactacaatcagtcggctccgccggtgggcgccggcaagaatcatccgatgttcaagagcattggcaaccccacctttaagtccagcttcagctacaatggcaccagcagcaattcgggcatgggatcgaattactcgagtaccaagaagtcggacatcaagcagaactaccagcagcagaagagtcagaactactcgaagacctcgtcggctagtgcttggaagaagtagtagttgacatggctagacgatctcaccctccaatcgatcggcggtccagtgagataagcgtatcgagcatgacctaatcccttggagcctgtgactaagccagggcaaagtgattgccacctcatgctaattaccccgatacctcaccctctaatggcgatgaggtggccgaagattataggatgtgaatatagattaaattgtgatgagagagccatactgggtgcaacgagatggaggtgatctgatccctgtttcgcgataatcataaccaatccctatcagtacaactaagacgataatgatgtgaatgttcaaataaaacaaataatac

SEQ ID NO: 9432 - protein, 352 aa, DROSOPHILA
MDPEFVNKYNQVLSRLKLVENFDGSDPGKLPQFLHKIEALMPAINSFDDYYKFQLIGHIKNKCTDRAREAVFTRQMSAPVGNGNGNGGGNGHLLKAESWLKLKDQLLYNYAERESSYSLIHKIRSAVLDSNIELYYQKMAKLKHRLINRKLTHNDTLYSLEDIERITLQVFRDHLPEPTHSMILRRNPKSMEEAYRYIVEVQQQFYTQSGSLASDHQAATFSTSHKQQSYGVGMGGVGVSTVGVGVGMGMGAVGLGLSSYVRQMSNDKGQQNSTKSYYNQSAPPVGAGKNHPMFKSIGNPTFKSSFSYNGTSSNSGMGSNYSSTKKSDIKQNYQQQKSQNYSKTSSASAWKK

SEQ ID NO: 9433 - DNA, 4415 bp, DROSOPHILA
tcaagcagcgacctggactcttcgtgaccaccgtgcaattcgtggccgtcatgatcgtccagattttcttgccctgttactacggcaatgagttgacctttcatgccaatgcactcactaatagtgtcttcggtaccaattggctggagtactccgtgggcactcgcaagctgcttaactgctacatggagttcctcaagcgaccggttaaagtgcgagctggggtgttctttgaaataggactacccatctttgtgaaggtaagatttccgcaaaagtttaaaaaagatatcagataactttaaagctttatataaataggaagatgcacatcttaattttcttaatatatttctactctctaacccataacttttggcagaccatcaacaatgcctacagtttcttcgccctgctgctaaagatatccaagtagagtgaagcgtgagtagggatccgccgactgctgcggcgccacaatggaaacgcacccacgggtcggatacgtaacattgtaactcatacgccccgttgttgtgaacatgaagaataaacgcctgcagccaacaaggcatttcgccagctattaaactaagtgtcgcagccaaaaagggaacaagaaatcgggctagcctgcgactagacgtcgttggatatgagaatgagatatgcctgctaacaggatacaaacaggacccccaaatcccgctcccgccatcccgttttaagaccagcggaagcacgcgccgctgcctagtgcagcgtgaacttccacggagacattgttggcgcacaaaagaaatacaaaatacaaaatacgaaacgagacgagaagtaaagaaaggcagccagccaacggatatgcgaaaaacgcgtgcaatgcaagtgtgaatggcggcgctgctgtcccgccggaagtgcattcaaagggttaagcgcaaatccgcacaatggcagccccaacctccaacccgcagtgctggccacatgagcttttcacttaccatttgggtcctttgtactcgtcgcccggagttgcgttcggagttgggtagccggagacggatcctgggccgtagttggtgttggtgctggtggtggtgctggagttgcccgcattgttggcggcaacattttgtgttgttgtatttgttaaatttaatgatgtcggcgttaaaattattgttgcagcgttttgtgtggcgtcagcgccagcctcatcctctgggattttctgtatgtctaatttggtatgcagcgggcgggtgggcaggatgtcgccctgtgagtcctgcggcgctgcaccttgtgtcatgttgtcacctggcgccagtgcccttttggtgttgttgttgttgcttgacggctgctgttgctgctgcagctgccactgatttggctgctgtctgctgcgttttgctgtaagtggcaaacagatttaaacgccttaatagatgtgtctttcacttggtggtaatcgtttgggagttttttacttattagggggaacgtatgtgcagtatggaaaaattgtaaagcttactagagttatgcattttgtttacagcaagaaacaatatatattccaacctatttatttcataaatccttttcgaaatagagcagaaccatcgaccggcttataagcgccaaactggtgcatttagcccatttggcattcattcccgctgctcatgcataacgaaagcccaacagcagtcggatcgtttaaattgcaaagtgcagccgacacacaagtcactcccaccactcgaggcgatggcgaaatgaagattgcaacaaagattgacaaccgttgattgtgccgccgaggaggcacgtcggcgaacaagacgtgggggtgaagagcaccgctgccggcaggaagctgtcttcacctggcccaggacgagcacaaggacgatgcaggcggcaggctgaggacgaaccaagccagccagacgacagtagacaggtgcctccataattggcttcattgttgccgcgacaatttcacaggttgcgaatggcggaaaaggcgctaggtggtggtaggaaatacataaatatttccatttataattagcgcacttaatgccggctagctgcgagtgctttcaagcaattgacgcctccgccacagcgggctaattggagtggagactgatatttgcatttgaagcgccgttctaataacgagaatttacaatccacttcacatctcaattattatgcagagttcacactgtctgccggtgtttgtgtgtgtgtgtgtcgctgccacataggctgtgcaatcagcagttgatttgatttgatgccagattctttgccctttttatcccagtttgtatttgatttgaaaagacaatctgcttgacatttgccaccactcgaatggctacgtgttaattgtgcgcaaatatttagcgtcaattctcgccggtgcgaactgtcgatgtttcagtgcttagattctatatgccatactattatatacaatatttgcgtattggtccatcgatcacgtgtcgcttgtgattcagtgcgtcatgcgactctttgacacacacgcccaaattgattgccaatgctaattgggtgtcataatgcagcagcacaaatattgaatctatgcagtaaagtggcgactaatggagctcggattattatagccgcaaattaaataagagcattacttaatttgacttcatttcgatttatatctctttattggggcttagcagctagtcgttcttttcggataggaatttactagctgatttctggtttctggtttattacaaacaaatattaataagaaaatcaagattcctcctaaatgtttcaaggtcgatctactatcattttttgtgcttctgagactgaataaataaaataaataaatagaacaaacagctgatgagcacggattccccgtctgaaagagataacgcatcgcaaaacaacggcaatcgaaatagggaaaaacactgcttctcttcgcagtgtaaaaaccaaaacagaaattaattttattttaattatagttacgctcgaaataataaagtaatctgctttggaatcgcgggggccagagaatatattaaatatacaaagtttttgaaacaataacgaatatatgttagcaatttatgtgcacggtgaaatgcggtgaaaatgttctaaactgcaacaataaacacaatgatgagagttggaaaactatggtttttcccaacgttgtgaggggcttacctgttcggcggataatttaattagattgcactcataaaactaacagtattcaaattcatcacgcattccgattcagtggaaaatgcgattttattgaaacagtttcacaaccgaaccgcacaattttaatgccgaacaccgactaatcgcgttcaatggcagcggacaactgagatgtcagctctcttaggcggatagctccacagcctcgatacggaatatgtatatattttttatcttatgctaataaaaaaaaacatatatctgggagttcgaggtgctctcgtgggcacgcgagcgaaccagacaaaatatttgtttaataacttaaaattagcaagcaaactgagagagagagagattgtgtgataacgagaacatatgggattattagatggaaccctggatcggaacgcaggtgctaattatgataaaccgatcgcgattatgatgtttcccacatacatcacattgagttgtaatctttggggggcagacggcgattgcagtagctgggaaatttctaatcccgacccgccttgcaacataaacacttatttggcccaaagcatttgcttatcaattaattagccataaccaatagggaaacttatgtacgccctgcaaatatttgccatttcagaggggctaaactctcggttcagttggatttcggttgagttgattatggctgcgagcttattgattatttaccagttcaatgcaaagttcgcgtttgaactacaacaaatatttaagttttgctaattaatttaaaatatctacccgcccctaaaaaaccgaaactgaaatggcgctcgggtgaggggaaagtggaagggaatgaaatgataacagaggcaagatttcttctccatctttttgaattatgtgcctcatttaaaagtttttgcggcacttacttttactatttttttccatagctgcctggcaaaaaaaaaaaaaatggtgcataaattgtgcaaaggtgtcggcgaagatagcgttcaggtattgtaaggcagcactttcggaggtcctgccgctgctgtgatatttcatatttcacattcatgcgctgcactcgagaaaaaggggaagccgttgagccaacttgaactgcaagttgggcaggtcattaaggcttcattggacgc

SEQ ID NO: 9434 - DNA, 805 bp, DROSOPHILA
attgaacgcgattagtcggtgttcggcattaaaattgtgcggttcggttgtgaaactgtttcaataaaatcgcattttccactgaatcggaatgcgtgatgaatttgaatactgttagttttatgagtgcaatctaattaaattatccgccgaacagatgaagccaattatggaggcacctgtctactgtcgtctggctggcttggttcgtcctcagcctgccgcctgcatcgtccttgtgctcgtcctgggccaggtgaagacagcttcctgccggcagcggtgctcttcacccccacgtcttgttcgccgacgtgcctcctcggcggcacaatcaacggttgtcaatctttgttgcaatcttcatttcgccatcgcctcgagtgcaaaacgcagcagacagcagccaaatcagtggcagctgcagcagcaacagcagccgtcaagcaacaacaacaacaccaaaagggcactggcgccaggtgacaacatgacacaaggtgcagcgccgcaggactcacagggcgacatcctgcccacccgcccgctgcataccaaattagacatacagaaaatcccagaggatgaggctggcgctgacgccacacaaaacgctgcaacaataattttaacgccgacatcattaaatttaacaaatacaacaacacaaaatgttgccgccaacaatgcgggcaactccagcaccaccaccagcaccaacaccaactacggcccaggatccgtctccggctacccaactccgaacgcaactccgggcgacgagtacaaaggacccaaatggtaa

SEQ ID NO: 9435 - protein, 215 aa, DROSOPHILA
MKPIMEAPVYCRLAGLVRPQPAACIVLVLVLGQVKTASCRQRCSSPPRLVRRRASSAAQSTVVNLCCNLHFAIASSAKRSRQQPNQWQLQQQQQPSSNNNNTKRALAPGDNMTQGAAPQDSQGDILPTRPLHTKLDIQKIPEDEAGADATQNAATIILTPTSLNLTNTTTQNVAANNAGNSSTTTSTNTNYGPGSVSGYPTPNATPGDEYKGPKW

SEQ ID NO: 9436 - DNA, 3356 bp, DROSOPHILA
tgtgagaaatggtggctcttctccccgctgaatccgtagcctattcatatgcttatgttgtaagggaaataaaaaaattgtaaacgacgacgaatggaaaatcagactaaaagagtgaaaatttctgttggcggcggtgcagcagcagcagcataagcagaagcagcaccatctgctggaaaaaaggagtaacaccgaccataaaaagtagcagaaacatcataatcaacagcaaaaaaatattaatggagttttcatgtttataatgtcattagctcacaaatgctgcggatgctgtggaagcttatgttgcttccaatgttgctgttgcttttgctgttgcacatgtgccgtgattctgtgccacatatttttctgtgattttttcactcctgccacacttcttgggtcgcacatcctttgcgcgcacactgagagacagccgtaaacatgcagcacacacacccatagacacatctataaatgtgcgaacactaatgtgcacattatgttggggccattatgccggcttctccagcggctctagcagctccagcagcttcaccatggtccccataaagccaaggggcccaacagctgcccaccagaccatgcacaatgagttggtttggtggtttggctgcttggttgcttggcgacggggtggcgctaccagttagcaagtaaaaaccctttaactcatttgttttgcttagcacatgagcagcagtaacaacaaaaacttgtgaatccgaaaagggggcagcttgtaaagcaaaacaacgtttagctagacattatgggccaagatgtacccaccccactggaaagaactttctttgatttaccaacttaattacattataaaatcggttttaaaaacggccaagatttattacatttttatagaggaaagctttttataggtcagtgggtaaaaaaaatttggcaaaaggtgttatttatttataaaaaccgttgtaatacgtgaccactttagtcagttctggaaatccgtcattgagggcggttttacaggcaattcaagttgatcccgctgctggccatcacagaatttgagtcctgcgaagtgttcaatatcacgaacatcggctaaaaatgagcgcagatccatatccttgtcgacatatgcattgggaacaacataaccttccataatgggcatatccctattaaactcatcctctcttatgatgattttgaagaagtgcgttggaacagcaaccgtgttcatgcccattacatggtaacgcacagaccagttcctgaacgttatcctttggggcataaacagaggaccggtataaacatgaactgaatcgaattcgatcgccttgtctctaacatagctttccaaacggtaccaaatatggtttttcagccctcgattaatgggcacgatattcgtaaacttgtaggcctccaaaaacttcagcgcatcgcatttgtagttttgaggggaggccaagtgaccaccaacccaatcggaattcttaaagtcccgcatatttgcactaaatatcgttggtattgtattgtctgttatgtaggcatttggcttattcaatgtcttttcatccctctcctgtacgcatccgcttttgacatgttcacatacccaatgggcaatacgattgcgacgatcgtatgagagtacgaagtttttatagacgtgtatttcatccatgcccggaaatccatacttcataatatcagctacatgttcaatattctcatgtctgcttccatttggcccgacagataatgtcatcttcgatatcttaaatgatccaaagtcacaaacaattcttgcagcatttaattttcgactcactgcgttatgcgccttcctgcgaccccacagtaaaaagtgttcgaatatggatacactaccaggatcttgtctttctgaatatcgtttgctagtcccagactcgtctccaatacttgctgtctgattagattctgtccttgtaattgacttcctagacgaatgcccaaacattgacaactaaaatatatacgcttttaaatgcttaattaatataaaatgaatgacatactgccctataaattggttgacggcattgatagacatacggatcagtaagcatgacagatttaatttgtctaaatgaaagatgttgttgtaccagagctccgaggataaaacaggatgctcccgttactgcacacaatgctatggctacataagttaacattgtctgaatgcctaacttatggtgtataaaactgtactttcagaaccaaaatttttgactgaatataaattaaaatagacatattaaacaaatttactgaattgaatttcgccgaaagtatttgcgtgacattttattatcactaaatggataaaagaacgaaatatatattttttcacaattttgacagtttaagcaaaagtgtttcaactagcctgaattttctttttgaaatatcttgttagaaaaattgaatgtcatcaacaagaagtccctttagtatggtcttttgtagcattcaaatgttcctactacaactttcatttacttaaactgttaaaatgaaccttgcatattcgcagttcaacactacatactcgtaaatattatgagtaatgtgaacttaatgacttgccatatatgtcagcaagtttaatgtattttaaagttacttctcacttatgcggaagacatcttcattgagcagctcaagaaagttgtctgcctaaagaaaatggattgtgctaattcatgtcaggatctgaatcccccttttcccatcccttaacacccacaaggaaagctagagtttgccgctccctttcgcgacgtttttctactttataatgataacattttcatgttttacaatgttgtaatgcctcgatatgagtccccaaagcgacatcttgccccagacgatgtttttatgacgtcatttaggggttaatgtgtgtgcgagtgtgcgcgtcatggctgattcattaattttgaaaagttttcaaaactattaacagcaacaatctttccacagcggcattgcgatttgcgaggcgagctccccgacttttcgttgtcaattaacattttcgccaaggaacagcagcgcacggttgcattattaaagagctcaatcagccttggaagcggaaacggaagtgaatttcaagtttttattcttacacttcccatggggaaacttttcggggcgtcggaaggggaaaagtgcacgtttacatccgcgtttagttcgcctttgtttgaggcccagaaaagttagcgcatttcatttattcatgcctccttgaccagtactcttccgctcttcccctt

SEQ ID NO: 9437 - DNA, 1145 bp, DROSOPHILA
ggcgaaattcaattcagtaaatttgtttaatatgtctattttaatttatattcagtcaaaaattttggttctgaaagtacagttttatacaccataagttaggcattcagacaatgttaacttatgtagccatagcattgtgtgcagtaacgggagcatcctgttttatcctcggagctctggtacaacaacatctttcatttagacaaattaaatctgtcatgcttactgatccgtatgtctatcaatgccgtcaaccaatttatagggcattgtcaatgtttgggcattcgtctaggaagtcaattacaaggacagaatctaatcagacagcaagtattggagacgagtctgggactagcaaacgatattcagaaagacaagatcctggtagtgtatccatattcgaacactttatgaagtatggatttccgggcatggatgaaatacacgtctataaaaacttcgtactctcatacgatcgtcgcaatcgtattgcccattgggtatgtgaacatgtcaaaagcggatgcgtacaggagagggatgaaaagacattgaataagccaaatgcctacataacagacaatacaataccaacgatatttagtgcaaatatgcgggactttaagaattccgattgggttggtggtcacttggcctcccctcaaaactacaaatgcgatgcgctgaagtttttggaggcctacaagtttacgaatatcgtgcccattaatcgagggctgaaaaaccatatttggtaccgtttggaaagctatgttagagacaaggcgatcgaattcgattcagttcatgtttataccggtcctctgtttatgccccaaaggataacgttcaggaactggtctgtgcgttaccatgtaatgggcatgaacacggttgctgttccaacgcacttcttcaaaatcatcataagagaggatgagtttaatagggatatgcccattatggaaggttatgttgttcccaatgcatatgtcgacaaggatatggatctgcgctcatttttagccgatgttcgtgatattgaacacttcgcaggactcaaattctgtgatggccagcagcgggatcaacttgaattgcctgtaaaaccgccctcaatgacggatttccagaactga

SEQ ID NO: 9438 - protein, 242 aa, DROSOPHILA
MKYGFPGMDEIHVYKNFVLSYDRRNRIAHWVCEHVKSGCVQERDEKTLNKPNAYITDNTIPTIFSANMRDFKNSDWVGGHLASPQNYKCDALKFLEAYKFTNIVPINRGLKNHIWYRLESYVRDKAIEFDSVHVYTGPLFMPQRITFRNWSVRYHVMGMNTVAVPTHFFKIIIREDEFNRDMPIMEGYVVPNAYVDKDMDLRSFLADVRDIEHFAGLKFCDGQQRDQLELPVKPPSMTDFQN

SEQ ID NO: 9439 - DNA, 23710 bp, DROSOPHILA
ctggtcagagctcaatgaaatcgacaaatgtttggacaaatagaaaaaccaagcgatgatttttcccccgttgttgtttttgtaattaacttgtgcaaatattggatactggtcaggtaagagtatctgtggtatcgttgggttttgggtcaaaaagtgtagctaaaatatttttgccgagtgccttgccctttcgggaatgtgcgtagagtctttggtgagtgagagaaaaaaggtaaataacaaacagctaaagttgaagacaagtggaaaggtgagttgcatgcacagggagaaaagcaatcacctgattgttaaagtcacctatagattgcattttgctcataatatcttcaatttccacacatttttcatttgagaaaccaataaaacgaaagctgatgctcaattgcaataagaacatttattattcttccaaaataatcgtacgtactacttttctaggatatatcaaaatacattacaaaatttctcaccatttttcacagtgctaccggatggataagcctgaggagaaaagtgtcttacagattgaaagactgcctgatggatggactgggcaagcaaacatggaaaaacctcggcaaaccaaactccggtttatctgggtaaagaagataaacggagtggccggaaaatgcgcggtagctggtacaagtgactaacccagagacacttgcctgccaattagccacggagcaattacggctgacaagttgtcgccataattaatgaagtgatgtccacatattgtgactgcgatcaattggtaagcaacatgttgcaagtttgtcactggctgcgcacgcacacgcatttgcctatcagaacggccaccaaagacggccaggcacggctgcaacaccaccagcaataggaacagcagcagcaacagcacaagcagcaacaccaacagcagaagcagcagcaacaccatcggcaacggcaacacgacggtcggctgtcgatgattcagattcagtcgagtgccgaacgagctgatggacgcacgtgtggcgcggtggttgaagaaattccaagctaaaatcccgaaatcagattcaagcaaacagacagtaccgtcgaaagcgaaactcgcacgcatcaaaagtgttgggaaagcgtgaaaacttctggcatccggaaaaagaaaacaaaaaaaaagagaagaaaacttcgaaattctagtggatccccggtgtgtgataacttctgtgatctcttagctgctgtgcgtatggcgagtggccggccggccggccccaagaaaattctccaaatgcgcggcggcgacttttcatgtgctgcggaaaaccctcaagcccaagctgcccagatggatggatcggcggtataaagaagcactggcgacggcgtcgctggcggtcagcaacactcattgcaactgcagcagcagcaggagcagcaacattgcagcaccagcaacaccttcgaaacgggtttccccgcgttttgatacgcccgatcgtcttgggtggggggaaaagtgcgccttttgatctagcgctctgcgatcggagagatttcgatttcccaggaagcgcaaaggaaaataccactcgggaaaaacgcacatagcttaagcaaataaatcatcttttgccgttcgaaataacaagagaaaaacgtttgaagtgccaatgtgaaaagttaaaagtttatacggtccgctaataagcaggaaaaacaaaaatgtagctatctgaaacaagcaagtggaaatcaaacgaaaagtattaagcagtccaaaataagttacacaaaaataaaataaaattcacgcaactatcaaaagcacataatctcaaaacaaaatcgcatcgaatagaatattaaacaatttttatacggccacttaacaattttatattaatcgaaatcattttgacaaacatacaagaagtaaatttaattataacgctaaagaaataaatattaaataacgtagaaccctagcatctagtaatttattaactaaagtacttaccacaaaagcatccacaatatatcacgccaaaaagtagactatagaaaccgcatttagcaaaatccacaattcaccaacaaccgcttcgataatcaacaagaaatattaaaaagatccaataaatcagtaaaatgccatcgccaacgggagtctttgtgctaatgatcctcacccacctgagttttggtttgggccaggtgcgaaacgaggaccagctgctgatggttggccagaatggcgatctcgacagcagcaatcctgcgattcaccaccagcaacaccaacagcaccaacaacaccagcagcatcagcagcaccagagcaatcacaatctgaacaacgggaacatgaacagcacgatactgaatacactgatgggaaacaatgctggtcaggtggtgaacagttccccgggtggcggcggatccatgatcaaccaattgggcagcagtacatcgagtgtaccctcggtgattggaggcggcgtggggtccgtgggaaacccctggcattcggcagtcggactcggagttcctggcaacggaatggggctaccatcgagccacggtctcggcggcaacatgggctcccatcctcatggacacgctctggctggactggccaaattgggcatcatagtgccgggcggccaaggattacctgggaatctgggatacggcgggaccatgctgaacggcggaggagttggaggtgctgccggaatgggcctaggaatcggctccaacactaataacatggatatgcagcaaggcctttacaagtgagtcaatctagagctactccccatcttaattgaactgaaatcttatcaattgatggagatctttcactcggccatcaaattgttttgtcctacgagcatttctgcagtcgccgcattttatgggcgcttttttatgccgctttttgtggccccaactccagttgggcaatcaacgattacgattattttctgtgtccgcaattattaaaacatgcccacatgttcaagtttaacccatcttgtgaactctggtttgcttgggattctgatttcttaactaaacggccctcggtgaactttgattacataaaatcgacaatttatggctagaacaagtcagatcgcggtaattaggtgaatggaagggctctatatggagtggagtggttcttaatttaaaacataattagattaatacaaggtcaaaagctcttgtttttcgaggaaattattttttttagaattttttgatgttctgtgctagttttgacaaataaaagtataaaaaataaaagcataagcaatgaagtacgagatgcaaaataaaattattctaagaactcgggcaaaattctagaaatcgaaaatattgatttcctgtttgccgtcctcaaatgctattataattctgaaaagtttataataatcgcttcctgatccccccagacaattgtgtatatctccagcgctcttttgatctggcaatttacttgccaagtcaaataaataaaataacgcgaaaagtgcagcagtcggcatacgaatcgaacttcaagaccttttcagtttggactctgcgatattttcgagttgctaatcagttgcaatgcaacataagtagaaaccgcactcagacactgggaatggtggaggggagggatggggtctgagttggctttaaacaataaagtaaaattatttatatttgtttagcttgcggctggtgctcattcggcggctgtcagccgaaaccttctgaaaagggggtgctgcaattgtggggtgttgtcggttgtcaaaatgctgctctagccgccttttttatgattattagcagatgcgaacagcagtgaagtggcaaggtggcaagtggttacggaatggggcagggatggggcagctgcggtggcagagcgtaaattttacttacacttcaccattaatttgcccactgacagggcagccatgggtgggggccaacgggcaggaccaccagttattatttgtcattacaaaaccacccaacaaaaggggaaaatcccataatgttcctgcaactggagggatgagattctgcactgcgcgaatgtttctaggtgtgcttatgaatattttaaaaacttgtcagcattttcttttggaaagttgtatttattttatgatttttttttaccctaaaccataaaagaaattatgttttttcaaccgaaaaggcattgtaaagattggtttaaaaacctacaggatatatggaataaatttaaaattttacataaaaacttttattaatccttagtttacattatttttatttaaacttataaacgatagtgtcaaaacatggtggtaatagagagacaacataaacaaatatttttctgtgcgtataagcttgaagcctttctcgcaattggccattctttttattacacaatactcctggtgggggagtggctcctcgtggggtggaaagtgtttcacttattttgctttgcaattttgttattttctgtttgtttttttttgtatttgtttatttccttgcgagcacatgcattgacccaagcggccagacgacagaaatcgatagacaggggatcccatccagaaagtacgtccagttccgctcgattccgggcccagctgaatacgaagtcggtgtccatttagacgcgctgcttgattacaattaatcggcttatttgagcaagacatcgtttgctgttggccattaaactggatggtaatactggtttatgtgtgtgtgtgtgcttcccccacttgccgacccaccaaattccccgtaattgcgatcaggtggcagtggcagtgcactttattgattcgaaatgtcagcacgaatcgcaaaagtcaaatcaacactcaaagttgcccaagacgcacgatgtgatttgcaagggtttggttttgaagcagattgcatttgtggcttaatgaagttggtttaggcaatgaatgctggatttatgcactgcgatattcggactacaagaatgtagaaataaaaagtaggcaacccttttagtaagcccctttatccatttgataattattccatttaggtcctcaatcaattgagcccattaaaaagccattccccattgagctggccacttccacacctgcctaaaccattttgccagcccagcaaatcacagcactaaccctttaccaaacaactcgacttttaaatcaattttcccgtcccgagttcgaaatcaaaatgtgaacgagtttctgaagcgactacgtgacgcctgtttacacaatcaatatgcacaaaatgctgattaggggatgtaatgaaaatttaataattgctgtcagggggcactctcgatgatgatggcgatgatgaagttccctccgttggccagaacacaaaactctgagttgtaaaagactggcgcaattaatctcccatgtcagggttgatctggcactgagagtcgagctagtctaagaaccagaaatcccaatcccagagatggtaaagtagaagccacggggttggtttcagtttcagattcagattcaaccttttgacggacccaaaggcaaaaggcaaataatgtaataatgtttgacagtctgcgtcaccgttctccgtcgtctgttgttttgttaacaggcatttatgacattatacggcgcaaaattatgttgttacaaccccaccggatctgagtttcgaaaccgtatccgtatctgcaaaccagactgtctttgtgtccttccgtgatttcattggccttacaagcggcaaaaatctgtttaattgtgcgtaagacaaggtcccttcactgcgctcctttggcaactcccgaacttaaatatttgtcaaagagtaattaaaacttacttaccgtttccttggttgcctcaccacccggcctttatgtccttgctttcatgtccttacctcattggatgtctgtatgccaactatgggtgcaagtttccattgttgtggataaaaactttccgactatatcatcttagttgagttgagtcgagtcgagtgggggttgtgtgtaaccctggcggaagcataaaaatgctaatttccaagacacaagaaaagcctttgttttggccgcaaattatggtcaagtcgaggggttttcctgcgaggttttccgggggcttttcctctcaacatcgacgataacgattatgtgcaaagttttatttctcactctcgccgcaaaattaaaaaaaatatatatatatatccaggcaaattctgcgacgactgcagttggcatcgccatgtggcaccacccgaaatttatttgtctcaataagacgacaatgaaaatgtcggcgggtcttgaggttcagatttggtaatggggcggaacaacaggatgaggggcagcagctggacgacttatgaatcttgtacttgtttctgaaaaatgtaatttcagaaagttcttgttttcttgtactacttcattttctactgacagtagattcactttggtttgataagtacgaataagtgaatttatatgcaaacattattaactgatttttagcctgatcgcataccgccaacaccttaacctaatttccactcaatataaatttagctgaaatttttattttgaatatttccatctcctataaaacccatatattacctacacaattgaggatcaacatgcgaggaatttcccatcattatgctaataaattagcgattattcgactctggaatattcctacctttcaagacggttaaagtattagcacttcgttgtttatggaaaatgttttccatagcattttctagtgattttacggctaacaatttgcctgccatttgccatttgaactttttaattttgtcgtttttgatggctgcgttttatgaggccgttgtctctcaacttggactgcttctcgacatctttttattcctccaactcctgatggcatttccgttgctgaggtttttgtctcttaatgataaactggggttcaactccgtcttcgttttggacttttttgtgaataagttttccccgttttggataaattcctttatgccgaatgtccttttgttgaaataaaaaggcgggccaaaggaaaagctaaagctgcgccataaaagtttaaacaaaaagcagctgccagacgagggagcacacaaaagcgagatcggagtcataaattggccatgatgaaacccaataaaaatgccagcacacaaaatgccgatgattctgtgtcgatgctgctgatgatgaacaactccggagcaccgaaaagaaactgcatttccgagggttgcaactgccacaacaatagaatgcattcggcagcctcagcgttcccatgacataaaatgcattttcatgtaatcatcgaaaagtgcgtaaagaaaatcgtccaaatgacttaaacaaatcagggagtttgaagccgaattccaaagcgattcaagcgtgaagcctaaaatcagacaacaaaacacacatattgaaaggtgtaaaaagtaagacaaacttcgaggagcagatgcagaaacagattaaagatccaaatgcagttgcacacttggaaaaataatttatttttatataccataaattctatttcgatttttcttagcagcaacgtagatcgaaaattttcttctttaataatacaatgcatttgacttcgttttattatacttctaagtcttagatgttcaattatttttttttagtgcacctacaaatgctgttttaggtggcagccaagtgcaagatgcggttgattctgttttatttcatttcttggagtttgccgtgatttggtcgtgtgtctaaaagcgtgatggcttttcgagttgcctttgatctcatctgccgcggactcagcaggccctcgcccccgtttcatcatccatctttttaactgtctctgtctctggaccaaagttttcccagtttgcccgtttggcagcgcattgaggaagttgcatcaaagacaaacaacgagttgccccacacacatgtgtatacagatacaaggcatagatacagatacacccgcagttgggaccttgaagttttgtggaccttgaggcacgcaccgcacatcaaagcgtcagagggcgagatcaaagagggggcctaagcgttttgccacacgcagtttgcgactcccaattgcagtcacaagccccaaaaaccccccaccatttcccattcaccactcacatactcgtacatcctgtcctaaacggtttaacctacaaagcgttgacgttcctgtttacttaaccctttgctcgggttatgataactttcgcaagcgattggcgtttgtgggtattttttttttttttgttatgaaaatatctattgcagaatgcctggagttttgaattgggagattgttatgtaaacaaactcttacgtcaacgagctattcaaaattaattgactttccttgtaattctaaaatgattataacactttcttgaaatatctacttgcatgccttgactatttttatacagaagttaacgcaatttgttttattgtttgctaattagaaattattttgaaatatatatatattatatatattttttttgagagtatatcttttccgtccttcaagtgccaatagatcttgtctgccacggattgtcaccgaagaaatgctgctgcaacctgtcccgcagcaacatgttgtccgcgtggcggcatcccatgcacttttccccggcttttgccctgcttttccccgctttcccggctttctgctgtctcgaagaggtgaggagccgcaagacaggccgcctggctgggctttgatgttgcgcctgccgcggttgctgttgacataattggagttttggatggttggttcctggccgggattgctgggctgttgggttggctgggctgttggcactcactttgcggtactttaagagggccggcacataatttgcgcaaattagcgacaagagtcatggcatgccgtcaaacatcgttggcggggtctttaagcctaattgatgctcaggcttgaagcctaatggtctaagccgcctctccggattcgtttgctttcatctcgcctgcttcagaggtgttaccaagatggcaccgcttgatgcacttgtcgtcgagtggcgtaggtgttaatgtgcatttctttgtgggttgggatcgctccccagatcgatatatatggccaatttgaccctgaacaaaagacgcgacaatggcggcgacataaaaaccaaataaatgccaagcatctccgctttttccaagccaatcagacaaccgaaaacagttatggaaatgaggagtatctcgaaaaagaataaaaaaaaaaacaggagctaagttaagaagccgccgacagcacgacatcatcattgaatgctagcccgaaaaaacaaacatgctgggtattttaattcaatttgtgggcttgtcgaggggtaaaatgaaatggatatgctcaacttgatgttggggagtaatctggctgaatctggaaagaaagatgtttagtcagcaagctgaaggaaatggaaaattagtaaattctgtggaaagaggtttgtataggaatctaaaatacaaattcattttaatgatttaacatcagcgttataggcgcctttaagatttcaacattataatgtgtcatttagtgacttaattaactaagtttactgatacagaagtaaaaaattgaatccaccgcactgtaatatataaatttgtttaaaaatgtcccctttttttataccacaatttatcaagatttcgtaacgaaataaatgtcaaaagtattttcaaaatgaattaatctagctggctaatatttaagcgaacctgataggtccccaacgcagtccaccctcttgccccatattgcagcccactcagatcccaagaactttcctattagctggtatcacttttggcccccatccacacatcaataaaccgcaccacccacttgacatctcaagttttctagatcatagaccgaaacataaatatccacttgacaaaacgttgtgtgatcgcccagacacacaaaccatatagaatatctccctctggatcccttcaaaaatttcactttgcacaggcgaaattcaagagcaaaatagcagagcgaggaacagagatgatggaccttgaatggcagtcgaagtaaaaaaaaaaaaggaaaatgagaggaaaatgccacagactgagaggaaaaacgctgattgacaaatgcagttgggggaaaattcacagcgagttgagcgatcggggcgttgatggatgaacagaaatacggacgggtcgtttaccgtgaatgtctgaagcccccttgcaccgcagcccattttccccgtttgggcgaatcacggcccaaattaaatgaaattaacacgcgtttaatgtcaaactggggaaactcacctgccacccgcgttccacacaaacaaacccacacgatttcccagccaattgtttacttaatgacgttcatgtgtcttttgtgaccgtctgcgtgtgtcatttgtcagctttttctgactttcctgccttttttccgcaacgagtgagcgcgctgtcataaaacgatttgattaaagtgattttaccgccgccttcgaggtctcaaaaataaaaacgaaataaagatacgaacgccaacagctggagctggagatggagctggaaactttactttgctctccgtgttttccaattaaaacgcagtcctgtgccgcaggcgatgcgctaacatttattttcggaaatcgaaaaaattcaaaagggggcaggcagccagctcgactctcggagccagaagactgagttcgagccagaaaaaaaaatagagccaggctacgagcgatgacccactggaaagtgagagtgagttgtgggaaaagtgcagtttatcgaagaatatttggtgcgcttttacaaaaaggatataggcatgtcctcaaaataacagaatgcttagtcataaaaaccaattgaacagactagcaaattttgtacaaaatattcaggtttctaccttttgtgattgtctaagtaaatattttctgagaattgagggctaaattatttacaatccgaactataaacgatatcgcaatggggttgcgctctttcagttagagtatctgtgcaaaagagggcaaaaagtaaaagtggcggcggcacaaattctttgtaattagtattaaaatgctttccgctacgttttcacttgcttcccgactgccagtcgcattgcgattcccgagtaaaattcaacaggcagcattcagcaggcactcaggcagtcagatgtattcaaatgcagtcaagcagccagccagttagtcagtcagtcagtcagtcaatttgtctatgtgccctcagggcgctttaccatatcccatatcccatataccgtatcgcatattccctacaagccatacccataccctttcccattgccagcccttgctgctctttctcgcatgattgaaggcaacatgtgtttcggaaattatgcaaaattgcctttctggccaacatagcagcagcagctatacagcagatgccaatggatgtgactggcgatctgctgctgcaactttccccgctacatccatcggattgtcaaactctttttcgcggcaagtgcatttgcattgcatatttcgccgctcattatcatggcgcacagttcatttcgaaaacgattaataatgcttaagcgcttcttggcgttgacagccggctggcaaaatacgacgagaagaccagcgaattttgtgtggtcacagcaaaagtttttttttttcaattccgaaatcggcagcccctcggtttttctaattcaaatgcactcgagaaaacattcagaagaaatttgagcagcaaagatcatagcgatgaacttcaaaatcaaagcgaatgatttcttattcatttttgaaaaaccttttcttaagaattgaaaaatcaaacgaatacaggaatttgttttttctttctgtgtatctgttcctctgaatttttcgtctgtgtttggtcatttgtttggcttaaatttgttagagtgttgagtggaaacaacgaacggaagcggccaacaaattgggaatatggagtggcagaattgagtttaggaaaaatattttcataacattatttttagagaatcctaacagagtgcgacattccctggaagattgtaccattttcttaaaacacttccttcattacgcttatgtttaaaagtgcatttgatttgttgcttctagtttgttttccaatgtttatgctttttgttatgctggcattaatattcattaactggaatgatacattaacaatcgatcttgccaagctctggaggaaactactctcgactaataggccaataatcggatttgtaaagtttacaaatcgaaagcagaccagaagatgccagaaggcaagagatccgtgcaacatgaacttgttttatcacctcataacaacaacagtgccagcaagtgaactcaactgattgaatgccttcgtggcagcatttgatttgtttagagaataaagcacagacctttctgtatctctatctggtacaagtacgtgtatctgtatatctgtctctgtatctgtacgtgtatctgtattcgtatctgaatctaaatctatgcgtggttgttgcctgttggttgtggcatcttttttgtgtatatggcgccaacttggcctcgtttgtggggcgggatttttgcttaattagcactcaatgaacaacttggagagctgggaaagagtcgaggaatgtgtgcgatggtacttcaatcccgcccatacaaaacctatagtgcatataggaaaacaccacctccaaggccattttgtgagccaggccagcgagtcgaagcgagggttgcttgtaaaaatcttacgagctttacgtgaccgtccattaatacatcattgcggccatgttagccacgctttcaccccccgcaaaaggtttcccgttttccgagggaaatgagctgatgatggcgtggaaagcgatgccggggtttccttcttagtttcgctgtgagcctgttcggggtgtgatatcaggatcgttttttcgtcatggtcataaaaacgcattttatgcgaaacgcatttgagtggatccggatcccacagagcaagtgagtctggagtccatggctctcggtttgagccagaattctgggcgtggatgtgggttcttatcggtttatacccgtgcgtttctcttttatgggaaagtaaataaaatgtaagccaagagctccctcgcaaacttttaatgttgattgcgtttcgcgttgatgtttaatttttatgcgagtctcttattcaaagctcttactccaccacctattcttccacatgcacttaggaaaatattttagtttttaataacatataagcttaaaaaattctttaaaatctcacagaaagtcaaagatttctataaaaactacagttacttggcttttaatgaatattattataattatcatgatttttgaacatttttcttagtgtataaaaaacagtcaagccaagtcgcaaaattaatcattaatagctaagcttaagctttgtttccccgctggtggtcgttgccttggagctaaaaggaaaattgccaggaaaattaatttaaatctattcgctggcaatttttatgggaaaacttcggagaagagcgggaaaagcgagaaccgaaatgccagcaattaattttaattgcccggcggagaagagataatgttatgacaattccataaataagtctcaatttagatggaattggaagttgatttctgaaatgcaaaggctatcttataaatcagtaacaagatgtctatatttgtcggagtattttcggtctttacacaaaattacctgataaattcttgggggcaggaaagcactggctttgcaacaacaaatgtctgtaaaatgctggagtaattatagcggctaacaaaaatgaaaagaaatgcagacaaattgctggaatgccgttcaagcataaacgagaaaataccagccataaacgcggcagtggcagcaacggcagcaacaacaaaaccatctaatattagctgaaaaatagtttggcaatgtattcaatgaaagggagagctgcatgcactgcatgttgctgttgcaactgcaacaacaagcggaagctgcaatgccaagcagttgaagattgagtgccagaaggaggagttttttgatggttaacgaagccgatttgccgttcttgaaggatgataagtgtcaaacgcaatgattggtctaaaatgttgcacgattcgtctgcattcagtggcagaaacaaaggcttggcgcacacaactggagtgaaaccgcaccctttgaggatttttcatctagaattccatctcacctatattgcatcttaaggcttaaattggcgtgacacaaacgctgtttgaaggttcaaaaaccaagccaaacttgttatcgtcaaagaaatagttttaacttcacaacttacaacttaaggatctgaatccaataacaatcgttgaaaggcctggagttgttatctgtaattgttataggagtttctttttaagttatgttaatatttggggcgtggcgaaggtaatcgcgtttgctgcttaggcgtaaaatggcttgcagatgatgcattaaggtagcaacatcggtgcagtacggtagcaacatggggcaagaacggaagatgctaggtgtgaagtgtgccgtaccgtacgattaagcctatatatacatatatttatatatatacatatatagggtaaatatatgtagggctgtgcttgtgccccaatgtgagggttgcaagcgaaatgtgtcgtaaagatttttattgcatttttatggcgcacacgcagcagcagcatcagcaacatcagcttccgctgcactcagaaaaaaactccaacttaaacaacacaacttgcctccctcttaagtccaaatgcagcgtaatcaagccagaagtgccaggatttctttcgagtgtatcagcaacagcagcatcatggcatttttggtaggcttcccctgcttactgataaactttaacgcaaacaaattaggaattaaggtggtccgcccctattccaaagggggcgtcacatgcttttgcattttccgattccgttcttgccacagaaatcggttttgagtaaataaaccgcagcggcagcatcgccggcaacatgagcctaagtaagccgttaaaatgcttttaaaactaaaatagcaatccagtgcggaagagcaagtggccgagcgaccctcgctttctgggtgggcaactaaattgattgctgctgctacttttgctgctgttgttgctactacgcagtggctggctttttgtttttaatcatttgccgcaacgttttattaaaaatccaaaaaagtagcgacgtcattttattgtctacttactgcttcagtccaaaatcccatgcacaaattttatgagccagcccataaaaatgccttttaccgttctccgtttttgttttttggttttgggttttctttttttttttttgtaattttgtgccaaactctcggggggcacatttgttgctgctgcgctgaagttgccgaggggaagcgacattgtttacggctacaactgtttgttggatgatgccaaaattgatgaccataatcttcggcacagggagctgggcaaaaggatgcgctttttatgatgaaacgccgagttgcagccgaaaaacaaccaccgactattgctgccccacactaaccaccacccacaaacactgaaaaaagtcaaaaaagtcgtcaagaatagctgggacatctaaaataatatgaattatttgacactgaattatctacattaaactacttaaaaacggtagacattaagatttccgttttttcaacatgttggaatgtaggctatagtttctctcagtgcaacagcgttctcctttcccttgttgcaacaacattattcatgggggggttcgtaagaagcgggagcggaagcatattttatgttttaacgctgccgaaattgggcagcaacaacaacatctcatacatcagcatttagagacccctcgtcctggaataacaaatggaaaggggacttcccccaaacggggcggacgtttgtcttgcggttttcgcacttgcaatttggctccatcccttccccgttttttgctttttttgctgacagcaattgttgctgttggctgcttttaccgcctttaccgcttgcaatttagcggcttaagcgcaatatttacaacgcattttgaagtgtgtttcgtgtgccataaaacgaatgaataaataagccgacaggtgcaggaagcggactcagcgcaagatttaaaaagatccaacaaatgacaaaaggagacgacactgttaagctgtaaagccaaacaaatggggtctgcatgaattattgaaaaagagttatggcaattaatgggtgcaattttaaaaccctctttgggaagactcagaaactgctacacagaaagaagaggtttcatcatgagtaatgcatctcaaaacggtaaaatataaacgattttataccaatcctgagctttgtaacatacagagttctaagttagtacttcagtaaatgaatcatttaatgaaaaaagatattcctcgaatcttcatgaggcgaatcggcctaataatgatcgccactattaacgactgtttgtgcccatatagtatttgagaaaactgcttgtctctcagcaaattgcccatagaaatgacgcctcattggccccattcttgctaggcaagcaagcagcaagcaagcagctaagcaaaaagcacaagcacagaagcacaaagtcggaaaatctgagaagcccagaagcagcgccttctgcttcatttgccagctatcaattaaagccaaccgaccgcgtcgcgttttgcttaagttcatcaattttccgatccgattgggttacagtatttgcacttgcgttttaattgaacgtttcggaccggggtgaattatgcgacagctacgccaaaagcaaacagaggaaaccaaaacaagcggccagcaaacaaacaaacattttgccgccacccagaaaagaaatcgactggagagttggtagcccaatgcaagtcaaatcttttaaaaataagcaatgcatttcggtacgggaagaacccgaactgtgcgtggctagcagctgcatttatgttttggcaataaaatgctaatgataaaaagtccataaaaaagttcaagtcgagagagcattttcagctttcgatatgcttatgctactttaaaaaagattttatggatgcacgcctgggttgatttccgtttttatcggcatctacacagggagaagtgggaatatggattggaagcatttctagggtatttcaacaaaacattgttttgttaaaactgtaatgttaatctttcaaaaagtgttttaattagattgaaaataataacaaatgttaatgactcttatcgaagtagccattttgctaagttttttttttctttctcgaactgctttcaatcgcccactgctgcaattgctacctcagcctcctgttgctgttgcacatttgctatgctgtttggggcagcatcagcagcagaagcaactaaaaactgtaaagtccataaaatgcttttgccgcagcacaaagggatttatacatgtgctttgccagtgcacctgtgtgtgtgtgtgttgaatattttacgtttctgaaaatttgatgaatctccacaaatgcagaggggaaaatgaggcaaaagcgagtaaaaaagagcactcaaagcacacaacttcagcgtcatcatcgcacgaggaaaatatccatcaacacttttgttttacggcgctatcttcctcctcccccccgctccacactccgccgcatgtttgctggcacacatccgtccatctgtccatcaatttgttgtttggcctaaccaccaactcttcacagtttgttttgctctgtggccattttaatagctttcgactactttgtatctgatagatacgcatctatatctatgtgctccgcagtatttagccgggggctgaaatttgtgatattgaagtggctcctaagatgcctgtctaattgttttagccagttgcctgagctaattgtctggcattttggcccgtaaacgttttgtcaaaaggattagctccaagctgctccccgttcccacccacttcccaagcttatggcttgtaattcctcaatgttttcaatggctaaggcgacacacattatccaaacttgaaatgggtaaaaggggagtcgttggctgggggctttgcctaatgcgctttgcactacacttgcaacaaccaaatcgaatgtgataacaatgcaaagcttacacgacgacttacttgggctttgagctgtaattgaagaccccaagggttttggacggggcagtacaaactctgaataggtctcatggagtaaagatctgcagatcgacacatgtcaattcaaataaacattttgtgtacttcttatgactatagataaagtattagatgaatcaacctgtataatgatagaaaacctgttctattgtcttaagttctagaccaaaaaccgaaaaataaaaactttcccctaccagaccacccaatttaaattccaattcatactagttttcgtcaatcgtcaaatgatattttaatcaagccaaaaactacgtcaaatatcgaaataaaacagcgggagataaatagataaaaattggccagccgcagcggcgaatttgtgagtccaaacaaatgccacaagtgtagccgaaactacttgtaaacatttcaaacattcaattaattaattaattgcgaaaatgtggcaaattaatttcccataaaaagtgagcaaacggaaaatgaagaacaaatctcaatggaatattatcaacagactttgagtggcgaaagtttggatcaaattggggggggggtctgttggggcaaatgaatcggagaaagaaaggggaaatgtggggaaaatcggtgcctcgaggcgcagacggagacggaaatagtcggatagccagatagcccgatagccgcagatatgctgagctcgttactcatacgccaatttacgatgcacttaagttttatgagaatttaagatttcctgcaaatcagcatactccaccagtcccgcggcggagtgggtgccacaaaatgataaccgacgctggccaggaagcgggtaaggtgcagcggcggctttccttttgatataattcaaagatacttgcattctcacaataagcttcgaaataactggaaacagatatggcatgggaaaccaattcaagggaaattccttctgctatttctagaaaactgataagagaaggccatactagcatgtgtgttgtaacttttgataaatcaaataaaagtttctcatgtgccggtttattattagcagtaaaaactttgtagttcagaatttcgattgtgcaatcctaaggttggtggttgctaattaattaatttaataaatttaatttaattattattattaattaattattaagtgttcaaatgacatattggtttaactaagtaggcgcacaaaatttaaattctctttgaaacggtatttttaccgattgctcgcacacaaagcttcatacaagttctgctagatggcgcactgggcgctgaaatctgtgtaaaaatcatctgcaagccaaagataggtgtcgctttaatagaaatccgaatccaatatacctgttatacttgtagagtaaaagaataacgggtacctgtttcttttattattttttaaccataaaaaataaagtaacacccgaatttttttacatttttcaaatcccacctgtccgtcaaagcatattcatcgaaccttcaaaagcgtctacttcatccagtaaatctatattgtcccttataatagttgaatccctgatttcgtttaaatattttgggttctctacgatttctctatataatttctgtagatcgctcttcaatttatagaaaaagttagttaactttttctcttcttcgagagaacgaccgctttcagtgtcgacagtgtccaaatattcataagtctcaatatggctgggagtagtgccatcaattaagtgatttagctcatccgccattgaagaaaattcttttaaatatttatcttgcagagctctctctactcgtagttggttctgaagttccgatttgttagtattggaaaacgagggttccattttttttgttggtgatggtgacagcaccttgttgtctggcaattatatgagcttagatataacaatggtcagttcattctgtgttcatacgtaccaagaatcttattttgtttaaaatcagaaaaatatttttttatgttaagatcgaacctcactttctcactcacctcactcaccgcactatataagttttctgactgtagggtctatttggacttgacacttaacacaactgcctctccgttcgaaattttcccttactcgtagagtaaaagtgcatactagattagaaagaattttgcgttcccactagctgagtaagggctttctaatagtcggggagttcgactatagaattctctcttttttataataaaaacgtaatttaattgtggtatagctctaaaaaggacttttaagaatacctttaccttttcttatgaaaaatttcgaatactttatgtctgccagcgaacacttcatttcggagcacacggtgatggcggtgttcacttcgcagggccaagtgggtggaccctgcagatacatgcctgccacgcggcgtcagaaccaccagtgtcgcaaggagacgggattgccgggaacccttagcgaggcccgccgtctggccaccacccactgcgaggaacagttccgctacgaccgctggaactgctcgatcgagacgcgcggaaagcggaacatcttcaagaagctctacaaggagactgccttcgtccacgcgctcacagcggccgccatgacccactcgatagccagggcctgtgccgagggacgtatgaccaagtgcagctgcgggccaaaaaagcacaacagggaggcgcaggacttccagtggggcggctgcaatgacaatctgaagcacggcaagcgggtgacacgcagcttcctggacttgcgcggtggtgatggtgacgaggtcagcgagatattgcgacatgactcagaggtaaagagatatattttaaggagcagaaggagatattttatagaatacctgtgctaattaaactttcttttcaggtcggcatcgaagctgtctcctcgcagatgatggacaagtgcaagtgccacggcgtctccggctcctgttcgatgaaaacttgctggaagaagatggccgacttcaatgccacagccacgctcttgaggcaaaagtacaacgaggccattcgcaaggcgccaaaccagcgatcaatgcgacaggtgtcatcgagtcgcatgaaaaaaccaaagcagcgacgcaagaaagtaagttcttcaaagaaaagtagagtagatgtagaattatatgtagaatacattcgaaaaggtagatctataacgggaattggtttctatggagaaaagggtatctgatagtcgaggtagtccatctttatgtttagacttttaaccacaaaagactttgttaatattttagaacctaaacttaaaaaactaataagtaatttccctttacagccccaacaatcgcaatacaccacgctgtactatttggagacctcgccctcctactgcgcggtcaccaaggatcggcagtgcctgcatccggacaactgtggcaccctgtgctgtgggcgtggctacaccacccaggtggttaagcaggtggagaagtgccggtgccggttcaacaatggacggtgctgtcagctgatctgcgactactgccagcggctggagaacaaatacttttgtaaatagacggggtgccatctctcgcagactttctttgccccgtctccgtcactttctatccctctactgtgctctttgaaaatgtaatttgtaaagtttttttctacctttatggcttgtaatttttttccattcctaacaaatattactgaaatgataagcaaaaagaacgaatgcagaacgatagagatcgatcagaaagctaaggcttagctaaaggccaaactcaccagctcacacacacacacacacatactcaaatgcatagacacacacagtcacacagacacacacaagcgcatacatgcatctatctatttaattactatataatatatagtaaacattagctaccgtcgcaaagaaaaaatctcaaaaaaaaatcgcaaaactttatttagcaaaacggaaaaccaacaaaaaaacacggacacacacacaaagaacaacagaaaagcagaagctaacaaaacacacagcaacaaaaacgaaaaataaaaacaaaaaacaaaaacaattttaataagtatttaaacatacaaaacaaaccaaaaaaaatacaaaactgaaatgaaatataaagtttcacataaaaataaatactccaatgatcttttattgcgggtttgtctaatttaagttagagagtaactttatagttagaaactaaagtccttgcgaaaatcagagcagacctaaaaataaacttttaattaaattttcgttcggcactcaacagtgatgtgcagccgtgcaaacatttgaacaattagcgtactgtcgctataaaaattcgatccatcacgttacttcaggtgacttggccaacgatgaagcggcgaactcttatcaactttcggtcggttacattgatcgccagtagatatcagtgtcagtggcagtgggccgccactcgaggccgtttcaacagcttcaaacccgaccaaaccgaagtatgaaccgccgaacctcaagtgttagataactggttttatcaattgtcaaattgactgctcacgatgtccacgcgacatcgcttaacacgagactcagcgcaaaaccacacgactcgcctaaccccaaaaaagcacctgtgtaaacttccggtgatctcagttttctaatagtaacagtaaagcttacttaaaacaaaccgatatgaatatggtttgtaatggaataaccagcagtacttcttcgtatgtcaaatatgtcgaagactaagatgagcgacatctgttgactacttactttacatacttgaagcctttttacattgcatacacttgggtgtatttatttatttacatggcactaaagtacttgttcttccttgctatgatatacaaatattgttgtcctcaataagttttaaacaacaagctgattgaaaacatttgaaatatctagaagtatagaaaataaaatacttaaatcaatatttaattttatacaaatatgttggatcagcagtcgaatttatttactactaaattgaatgtatcaatattcttagctctagaaggacatataattgttttagatttagg

SEQ ID NO: 9440 - DNA, 3324 bp, DROSOPHILA
cagtcgagtgccgaacgagctgatggacgcacgtgtggcgcggtggttgaagaaattccaagctaaaatcccgaaatcagattcaagcaaacagacagtaccgtcgaaagcgaaactcgcacgcatcaaaagtgttgggaaagcgtgaaaacttctggcatccggaaaaagaaaacaaaaaaaaagagaagaaaacttcgaaattctagtggatccccggtgtgtgataacttctgtgatctcttagctgctgtgcgtatggcgagtggccggccggccggccccaagaaaattctccaaatgcgcggcggcgacttttcatgtgctgcggaaaaccctcaagcccaagctgcccagatggatggatcggcggtataaagaagcactggcgacggcgtcgctggcggtcagcaacactcattgcaactgcagcagcagcaggagcagcaacattgcagcaccagcaacaccttcgaaacgggtttccccgcgttttgatacgcccgatcgtcttgggtggggggaaaagtgcgccttttgatctagcgctctgcgatcggagagatttcgatttcccaggaagcgcaaaggaaaataccactcgggaaaaacgcacatagcttaagcaaataaatcatcttttgccgttcgaaataacaagagaaaaacgtttgaagtgccaatgtgaaaagttaaaagtttatacggtccgctaataagcaggaaaaacaaaaatgtagctatctgaaacaagcaagtggaaatcaaacgaaaagtattaagcagtccaaaataagttacacaaaaataaaataaaattcacgcaactatcaaaagcacataatctcaaaacaaaatcgcatcgaatagaatattaaacaatttttatacggccacttaacaattttatattaatcgaaatcattttgacaaacatacaagaagtaaatttaattataacgctaaagaaataaatattaaataacgtagaaccctagcatctagtaatttattaactaaagtacttaccacaaaagcatccacaatatatcacgccaaaaagtagactatagaaaccgcatttagcaaaatccacaattcaccaacaaccgcttcgataatcaacaagaaatattaaaaagatccaataaatcagtaaaatgccatcgccaacgggagtctttgtgctaatgatcctcacccacctgagttttggtttgggccaggtgcgaaacgaggaccagctgctgatggttggccagaatggcgatctcgacagcagcaatcctgcgattcaccaccagcaacaccaacagcaccaacaacaccagcagcatcagcagcaccagagcaatcacaatctgaacaacgggaacatgaacagcacgatactgaatacactgatgggaaacaatgctggtcaggtggtgaacagttccccgggtggcggcggatccatgatcaaccaattgggcagcagtacatcgagtgtaccctcggtgattggaggcggcgtggggtccgtgggaaacccctggcattcggcagtcggactcggagttcctggcaacggaatggggctaccatcgagccacggtctcggcggcaacatgggctcccatcctcatggacacgctctggctggactggccaaattgggcatcatagtgccgggcggccaaggattacctgggaatctgggatacggcgggaccatgctgaacggcggaggagttggaggtgctgccggaatgggcctaggaatcggctccaacactaataacatggatatgcagcaaggcctttacaacgaacacttcatttcggagcacacggtgatggcggtgttcacttcgcagggccaagtgggtggaccctgcagatacatgcctgccacgcggcgtcagaaccaccagtgtcgcaaggagacgggattgccgggaacccttagcgaggcccgccgtctggccaccacccactgcgaggaacagttccgctacgaccgctggaactgctcgatcgagacgcgcggaaagcggaacatcttcaagaagctctacaaggagactgccttcgtccacgcgctcacagcggccgccatgacccactcgatagccagggcctgtgccgagggacgtatgaccaagtgcagctgcgggccaaaaaagcacaacagggaggcgcaggacttccagtggggcggctgcaatgacaatctgaagcacggcaagcgggtgacacgcagcttcctggacttgcgcggtggtgatggtgacgaggtcagcgagatattgcgacatgactcagaggtcggcatcgaagctgtctcctcgcagatgatggacaagtgcaagtgccacggcgtctccggctcctgttcgatgaaaacttgctggaagaagatggccgacttcaatgccacagccacgctcttgaggcaaaagtacaacgaggccattcgcaaggcgccaaaccagcgatcaatgcgacaggtgtcatcgagtcgcatgaaaaaaccaaagcagcgacgcaagaaaccccaacaatcgcaatacaccacgctgtactatttggagacctcgccctcctactgcgcggtcaccaaggatcggcagtgcctgcatccggacaactgtggcaccctgtgctgtgggcgtggctacaccacccaggtggttaagcaggtggagaagtgccggtgccggttcaacaatggacggtgctgtcagctgatctgcgactactgccagcggctggagaacaaatacttttgtaaatagacggggtgccatctctcgcagactttctttgccccgtctccgtcactttctatccctctactgtgctctttgaaaatgtaatttgtaaagtttttttctacctttatggcttgtaatttttttccattcctaacaaatattactgaaatgataagcaaaaagaacgaatgcagaacgatagagatcgatcagaaagctaaggcttagctaaaggccaaactcaccagctcacacacacacacacacatactcaaatgcatagacacacacagtcacacagacacacacaagcgcatacatgcatctatctatttaattactatataatatatagtaaacattagctaccgtcgcaaagaaaaaatctcaaaaaaaaatcgcaaaactttatttagcaaaacggaaaaccaacaaaaaaacacggacacacacacaaagaacaacagaaaagcagaagctaacaaaacacacagcaacaaaaacgaaaaataaaaacaaaaaacaaaaacaattttaataagtatttaaacatacaaaacaaacc

SEQ ID NO: 9441 - protein, 389 aa, DROSOPHILA
MGSHPHGHALAGLAKLGIIVPGGQGLPGNLGYGGTMLNGGGVGGAAGMGLGIGSNTNNMDMQQGLYNEHFISEHTVMAVFTSQGQVGGPCRYMPATRRQNHQCRKETGLPGTLSEARRLATTHCEEQFRYDRWNCSIETRGKRNIFKKLYKETAFVHALTAAAMTHSIARACAEGRMTKCSCGPKKHNREAQDFQWGGCNDNLKHGKRVTRSFLDLRGGDGDEVSEILRHDSEVGIEAVSSQMMDKCKCHGVSGSCSMKTCWKKMADFNATATLLRQKYNEAIRKAPNQRSMRQVSSSRMKKPKQRRKKPQQSQYTTLYYLETSPSYCAVTKDRQCLHPDNCGTLCCGRGYTTQVVKQVEKCRCRFNNGRCCQLICDYCQRLENKYFCK

SEQ ID NO: 9442 - DNA, 3570 bp, DROSOPHILA
ctagtagctccgccatgatgcccacatggtgatgcacctgcgcattttcacagatccctcgcagcaaacagtgacgacctcgaccaggagatccactcacttggtccatatagttctccaaggcggcatatacgaacaggcgagtgtcgtcctcgtgcgtctcatccaagctcctgatcttctcctgcaacgaacgcgcatatatcgtctcccatttgtcccagggatatagtggtgccgatggcagggtaaatgccccgaaatgcagcacatagtagtagaccaaactgcgccagaccacgggatcctcgagctgagtggacagcacgggacccactaccaaacggatggttcctccattccggtagatcaactgatgcctcttctggcgcgcatgcatatactccgtaatattttggccaactggagcagctactaacatatacgcactcctaaccacaggtaatgaacaggccaataaatatatccaagaaaccagttgcattgtgtggaaaaacgtctgtaggtggcacaataactttcgagaatgaaactcactggaatcgatacccatttgtgatgctgaaaattaaagcattatggactcaagcaattagcatccaaattgggttataaagacatccagatctgctttacattttcgttctgcataattaattgggtaaataattacagatacatttctacatatcttaaaaacacaattcaaaaattctttcttaatttgaacttctattaacataaggaatttattgtcatgtgtatttatttaatattatgtcgtcatagcacattgatttatagtttagtatttatattttacatatacaaaacaagaataaaatgtatattcccgcaaaatttaaaatatcgcttaagaaatccctgcaatgttttctatgttcttaccgccatttctggtatttcagtgaatgtacgcaactggtcactctagtattattaactaacaaaataaacaataacataaccaaggatataaaggaaactgtagagcagcgatgaacgccgtgatagcgctgtgccacttttgcgaggcgcacggtccctgcgccatcttctgcacccagacactgagggacaccaagctggaggacctgtcactggaacagcagacgcaaaagacctgctccgcctgcaattactccatgggcaagaataacaatgcgatctacagcagggacacggaaagcggggccacattcgtcagcaccaaggtggcggtgctgccggaggtggccagtctggtcaagcaggcggcggtgctcagtctgagcaatggtacggatgccagcaaggatggcgagttcgtgttctttggcgattcgtccaggggtcacatcctgagtcacaccttccgagtgagcgacctgcaggcccgcggctactcgcagctgttctccatcattgtgctgatgaaggacaagtatttcctgcttaacatcaagccctttctggcggagcacctgaagaaggtgtcgtcggagctgcaggcagctgccaaaaagaccaaggagacggaggagcagacgtactcagagcgacagaggcgtctgtccggcgctcagttcctgatgcccacttcccgtgccttgctggagctaacaggcgaggagcacatcttcgcccagttgcactcacacttctcgtggctcctgctagccggatcccgcttcctcaccgagcacgtgaccttcggcaacctaccgtggctaccgccacaaagtagtggccgtcctcccgcacagcgactcacctacaacagttccacactgccaatgatagagagcatcgacgatcccgatctggaggagttcttctcgttgcgccatctcaagagtgtcgtccgcaaggaggagtttgccacggtctgctattgtgccttgactggggtgaagattgtggtcagaggtgatcccagaaagaccttccgtttcatggtctgcctgaagaaactcctgcccgagcccatgcacaatctaatgcgaatcgatgcccaacatcaacactccatcagctccgagtacaaaatcatatccgtgtccaatgacatagccgtgccaatggccagtagctccgtttatcggatcgattttctggacaaacacgtcaacggacacgaggtgtcggtcaaatggccaggagagctgccacgaaaatgtaagcttcacatccaatccgttcccgctttcactgataaaaacgagtcggggatattgatattgattctattgattctcccactttagtgccagatcttatggtgaaacttttaaaggcggtggaggagaaaaacttcacagaactcgtgctgaacaagcagaccaaggtgctcatcgaagagtggaaaaagtgagtagccgtcctattttgctgcacagatccgaactcaattgaattccatctacagcaaagtgacctgcctcaaccatgccaaatccaccagcgtgcagggcaaacttaagaaggtgcttggcgtgcagccgcacgatcagccgattattaactactggagcacacaccttcactagtacaaccgattaccgcacagattaaggactttctttttcaccttttggaataaaactcttttattgccgtgcgatggcgagaaaaatcattatcttaaccaaaaggatgccgaatccagtccagtcagccagtcgcttacttcttgtagccgcagctggagcgacgaccacgagcacgctcgaacttgcgtcccttagagcggacataggggcgggtgtgcgagtggggcacaccgggagccttgccgaagtgcttgcaggcggtgcgggcggtacgcctgccctgcagcagcagcgtgttcttgccggtgggcgatcggagagccagttgatcgaaggtcaggacctcaccgccggccttcaggatgcgctccctggcggtctgcgtgacgtgcagggcgcacacggtgagcttgggcaccaccaggaggcgggcatcgtcggtgacggtgccgacgaccacgatggtagactccggctggttggcggccttgaagaagcgagcgatgcgctgaagcgatagcggcggcctgttgatcttgctcatgaacaaacgcttcaggatgatgcggttgaacttcttgttggtgcggcgctgaaggaagcggtacagctgcgggggcaaacaaagaaaaaaaaacagattaatctccacattcagctggtagtcaacgccatcgaaagcctcaccttgaccagcaggcgcaggtacacatcctgggatttgggctcggttctgcgaaccttgcgatcgtacttgtggttgatatcaataccctgcaaacgaaacacacgtattagaactggtgtttatgatcggaaaaacaattggtcggcattcgagcgtatgtttactacatatccatggaaccgatcagttaaactgcttatttcatggtattttagcttcacaaactagatgccgcccacacaaatttgtttttatttcattccgtcgccaggaagcttcgcaatgcacgtgggctgagccacagttggc

SEQ ID NO: 9443 - DNA, 1423 bp, DROSOPHILA
ataacataaccaaggatataaaggaaactgtagagcagcgatgaacgccgtgatagcgctgtgccacttttgcgaggcgcacggtccctgcgccatcttctgcacccagacactgagggacaccaagctggaggacctgtcactggaacagcagacgcaaaagacctgctccgcctgcaattactccatgggcaagaataacaatgcgatctacagcagggacacggaaagcggggccacattcgtcagcaccaaggtggcggtgctgccggaggtggccagtctggtcaagcaggcggcggtgctcagtctgagcaatggtacggatgccagcaaggatggcgagttcgtgttctttggcgattcgtccaggggtcacatcctgagtcacaccttccgagtgagcgacctgcaggcccgcggctactcgcagctgttctccatcattgtgctgatgaaggacaagtatttcctgcttaacatcaagccctttctggcggagcacctgaagaaggtgtcgtcggagctgcaggcagctgccaaaaagaccaaggagacggaggagcagacgtactcagagcgacagaggcgtctgtccggcgctcagttcctgatgcccacttcccgtgccttgctggagctaacaggcgaggagcacatcttcgcccagttgcactcacacttctcgtggctcctgctagccggatcccgcttcctcaccgagcacgtgaccttcggcaacctaccgtggctaccgccacaaagtagtggccgtcctcccgcacagcgactcacctacaacagttccacactgccaatgatagagagcatcgacgatcccgatctggaggagttcttctcgttgcgccatctcaagagtgtcgtccgcaaggaggagtttgccacggtctgctattgtgccttgactggggtgaagattgtggtcagaggtgatcccagaaagaccttccgtttcatggtctgcctgaagaaactcctgcccgagcccatgcacaatctaatgcgaatcgatgcccaacatcaacactccatcagctccgagtacaaaatcatatccgtgtccaatgacatagccgtgccaatggccagtagctccgtttatcggatcgattttctggacaaacacgtcaacggacacgaggtgtcggtcaaatggccaggagagctgccacgaaaattgccagatcttatggtgaaacttttaaaggcggtggaggagaaaaacttcacagaactcgtgctgaacaagcagaccaaggtgctcatcgaagagtggaaaaacaaagtgacctgcctcaaccatgccaaatccaccagcgtgcagggcaaacttaagaaggtgcttggcgtgcagccgcacgatcagccgattattaactactggagcacacaccttcactag

SEQ ID NO: 9444 - protein, 460 aa, DROSOPHILA
MNAVIALCHFCEAHGPCAIFCTQTLRDTKLEDLSLEQQTQKTCSACNYSMGKNNNAIYSRDTESGATFVSTKVAVLPEVASLVKQAAVLSLSNGTDASKDGEFVFFGDSSRGHILSHTFRVSDLQARGYSQLFSIIVLMKDKYFLLNIKPFLAEHLKKVSSELQAAAKKTKETEEQTYSERQRRLSGAQFLMPTSRALLELTGEEHIFAQLHSHFSWLLLAGSRFLTEHVTFGNLPWLPPQSSGRPPAQRLTYNSSTLPMIESIDDPDLEEFFSLRHLKSVVRKEEFATVCYCALTGVKIVVRGDPRKTFRFMVCLKKLLPEPMHNLMRIDAQHQHSISSEYKIISVSNDIAVPMASSSVYRIDFLDKHVNGHEVSVKWPGELPRKLPDLMVKLLKAVEEKNFTELVLNKQTKVLIEEWKNKVTCLNHAKSTSVQGKLKKVLGVQPHDQPIINYWSTHLH

SEQ ID NO: 9445 - DNA, 3848 bp, DROSOPHILA
aagtacaataatatagtaccgagtacacacagttatgggccataattcagctgaaacgcagcgcgattcgaatcatttgcaagccaaatttggcgcgaactcttcgcaaacatttttcgcatattaatttgtgttctcgaaatgtgctcaattgtttggaaaaactaattacgtgcgcgcgcctatttccattcccattttgcagctccagcgtctgcagcgctccaccagcgccagtgcgatccgttcgcacctgaccaaggtgtcatcgacgtaccgccgccccatcgccttcaatttcgttcggcgcgagtgcaagcgtttctacgtcttgcccgtctacatggtgagtgtgtttcccccgttggataccttcttttagggtgcaccataatgtttactactgccatccccacacacaaacacacacccttccacacttattgaatccaatcccctttcgattccagcacagcaccaagcagagcattcgattatggtggcaatatgcctacaagtgcgtcacgccctccgcctcggccggtgccgtctggaatccgaatctgaaattccggctctactgcagccggcagctgcgcatccggaaactgagacgtggtccgtggtccaggaggcagccactccggctgcatataaatgacatcaaactgatgtgccaggtgcgcaggcgcagtaaataaatgaggcgatggcaaagccctaaatgatctgaaaaaattccattatacgaattatatgttatcaaagtttagtcgaatttcacagaaaattctgtttgaaatttgaacaataaacttggcgccatttatcgatagaccaagccaaccagttctgcaaacggtaaaattttatattttataagtaccaattttaaaacactttctattattgtattaaaacgtctcatcattttctttattttgttgaactaatactttttggttcaatagtcttcccaaaaattaaataataagtgcttgtaaataaatatgaacttgtttattttgcctttagcatggaattacatccaaagaaacagaaaataaatatattaattcttaaatagatatcttttatgtagcaaacaagaagtcaaggatatttaattttcaaacaaaaaaagtgggaaaacgaggaacattttatcaatacgattttgaaacaaaatgaatttcgcgcgttgttcataagcaaattggaatcaattattaaggaattataattattatatttaatccctaccaacttataatagctaggcatattacactttaaattgtgcttcattgattgagtacaattgcaagcacttaattcaataaaacgcaattgaaaatggtccgccagtgtcctgtgtccttcagtgagttacacggttgagtaaatatatagtagtgcatatgcgatacgtctatatagttatgttttagtaatgctgatgtcctaagtgaagtctatttaaatgccacaagttcggtgatgtgtgtcccaatcgctcagctataacgaatgtattataaaagataggtaaacatgagtacttttccttcaatgcgtcactggataaaacaatttaaaaaaatgcataaaatacataataaatcctacaatgcttacctggcattcacgactgcagtaccattgattctgacagttggagcacataaaggtggctccatagagcttgcactcgtggcattgtctacctgtgttaccgttgatggtggcggaagattcagcctgggacttatgggagctcctatgcttgtgagacttgtgcttatgcgacttgcgcttgtgagacttgtgcctcttttggacattctcatggtcgttgatattagcggaatgttgttcttggtaggactgaatagaaacatttattttcgcggaatgtcaaaaaatattgtgattaagtgcatacctgtctattggccagttggcgacgggaggccatcggactgctgttgaacagcggttcgatctgtgattcattatccgaattattgtcctccattgagacgttactaaaatgcgaataatttttccaagccctaatcttgcgaagcgtctctgaaagattggctgacaaatgtgtcgaggagcttgccatgtcctggttactataaattatatgacgttaaaataatatgttctagtatattatttgtattttctcacctgtcttgcgagtggattagcttcggtcgcttggctggcggatctctgtctggattgctatctagcagatggtcatttaccgcattccgagattcgtaatgctgatcccgcattgatagatgacttacgggcaaggaatctctacgaaaaagcatttggtcatcctcgaaattggccggagacacggacggtgcgcgtttatttaagcccaaggaactgaaaacgatcaattttaacttgggattctcagaattaaacatttaaagatttacccccgcagaagctgtatgatgttctggtttaactcggcgtaattcagtaatttttcaattgccgacaaactatgtttggaggccattggagaatcgatttcctcttctagcatagcctttacctcactgagctccttggtgccgcacttgttgataaggatgggcagtaggtccttaatacgtatcaagcgctcctttcgctccattcgttcatgcagctccttcttaatgcagctcaaatacagcagtcggttatattcatcctctttctgggccatcagcttatctagggctgcaagatccgcaacgatgcgttcgcgctcttttttcaatgaatcttcatcagggggtaccgagttaattttatcaatcattgtcgagttcaattcatcgaaaagttctttgacgcgataatggaagtttgcatcactattattgagatcaacgaatgacttttggcgggttgtcgaagaagaagccgctggtgaccccaagccctgcgtctgggtgctcaccgtttccgatcgacggggttgcggctgttggggcaccgcaaagttgggagcagccactggaacaggatgcagttgagatggcgattgatggacctgctgtgattgggcaagctgatgtggactagcatgcctttgaggggtcaacggctgcaccgaagctggtcttgatgaatctggctgctgtggtggaggagctagctgctgtggtggaggagctagttgctgtggtggaggagctagctgctgtggtcgaggcgctagctgctgtggtggaggagctagctgctgtgttggagctagctgctgtggcggagccatatgttgtggtggagccatatgctgtgtgggagctcgctgttgtggcggagccagctgctgtggcggagctcgctgctgtggcggagctcgctgctgtggtggagctagctgctgtggtggagctagctgctgtggtggagctagctgctgtggtggagctagctgctgtggcggagctagctgctgtggcggagctcgctgctgtggtggagctagctggtgtggtggagctagctggtgtggtggagctagctgctgtggcggagctcgctgctgtggtggagctagctggtgtggtggagctagctggtgtggtggagccagctgctgtgatggagctagctgctgtggagatggtctatgttgagccaggtgccgtggtggagcgaatggagctgtagccagttgctgtggaggagctcgctgctgtggtggaggaagctgctgcggtggaactgatcttgggaagtgcatctgttgcacgggggcttgttgtagtggagcaacctgagatggagctctctgcgcgagggcagccact

SEQ ID NO: 9446 - DNA, 1559 bp, DROSOPHILA
atgattgataaaattaactcggtaccccctgatgaagattcattgaaaaaagagcgcgaacgcatcgttgcggatcttgcagccctagataagctgatggcccagaaagaggatgaatataaccgactgctgtatttgagctgcattaagaaggagctgcatgaacgaatggagcgaaaggagcgcttgatacgtattaaggacctactgcccatccttatcaacaagtgcggcaccaaggagctcagtgaggtaaaggctatgctagaagaggaaatcgattctccaatggcctccaaacatagtttgtcggcaattgaaaaattactgaattacgccgagttaaaccagaacatcatacagcttctgcggggttccttgggcttaaataaacgcgcaccgtccgtgtctccggccaatttcgaggatgaccaaatgctttttcgtagagattccttgcccgtaagtcatctatcaatgcgggatcagcattacgaatctcggaatgcggtaaatgaccatctgctagatagcaatccagacagagatccgccagccaagcgaccgaagctaatccactcgcaagacagtaaccaggacatggcaagctcctcgacacatttgtcagccaatctttcagagacgcttcgcaagattagggcttggaaaaattattcgcattttagtaacgtctcaatggaggacaataattcggataatgaatcacagatcgaaccgctgttcaacagcagtccgatggcctcccgtcgccaactggccaatagacagtcctaccaagaacaacattccgctaatatcaacgaccatgagaatgtccaaaagaggcacaagtctcacaagcgcaagtcgcataagcacaagtctcacaagcataggagctcccataagtcccaggctgaatcttccgccaccatcaacggtaacacaggtagacaatgccacgagtgcaagctctatggagccacctttatgtgctccaactgtcagaatcaatggtactgcagtcgtgaatgccagctgagcgattgggacacacatcaccgaacttgtggcatttaaatagacttcacttaggacatcagcattactaaaacataactatatagacgtatcgcatatgcactactatatatttactcaaccgtgtaactcactgaaggacacaggacactggcggaccattttcaattgcgttttattgaattaagtgcttgcaattgtactcaatcaatgaagcacaatttaaagtgtaatatgcctagctattataagttggtagggattaaatataataattataattccttaataattgattccaatttgcttatgaacaacgcgcgaaattcattttgtttcaaaatcgtattgataaaatgttcctcgttttcccactttttttgtttgaaaattaaatatccttgacttcttgtttgctacataaaagatatctatttaagaattaatatatttattttctgtttctttggatgtaattccatgctaaaggcaaaataaacaagttcatatttatttac

SEQ ID NO: 9447 - protein, 359 aa, DROSOPHILA
MIDKINSVPPDEDSLKKERERIVADLAALDKLMAQKEDEYNRLLYLSCIKKELHERMERKERLIRIKDLLPILINKCGTKELSEVKAMLEEEIDSPMASKHSLSAIEKLLNYAELNQNIIQLLRGSLGLNKRAPSVSPANFEDDQMLFRRDSLPVSHLSMRDQHYESRNAVNDHLLDSNPDRDPPAKRPKLIHSQDSNQDMASSSTHLSANLSETLRKIRAWKNYSHFSNVSMEDNNSDNESQIEPLFNSSPMASRRQLANRQSYQEQHSANINDHENVQKRHKSHKRKSHKHKSHKHRSSHKSQAESSATINGNTGRQCHECKLYGATFMCSNCQNQWYCSRECQLSDWDTHHRTCGI

SEQ ID NO: 9448 - DNA, 3906 bp, DROSOPHILA
aagaatgtatgtatatatatattttaactttacttgttcctgggcaatattttccaaatccttattgcctagcagtgcatttcaaaataaaaaattttttctccttgtatttggttttcattgctggttcacacgcaatcttttttatttttttttggtcaacacgaattttcccagatccatgggcttgattgcaacaaaacatgtgatcattagcatgaaaccaattcaaaaactgttgcttctttcccatgaaagtcgagaagaatggtagtttttggcaatttaactcttggttctctacacattcgcaatgttccaaatacataggttttttatatactagtacatatatacaatgtggcgaataatagtgttcataatcttcagcacttacattttattttaatttctttaaaatcaatgaaagttgattgacaaatggacggccctgaatgctttttgccatccatagtttaaatatacagatgaggacacccacccatttatttgctcatctgcttcgttgaccatggtcattgcggtcgctgctgttgttaattttgttatttttttttatttagttattgttttcattcaatcatacaaaatatttgcataagcgagtgtctacccatgtgtggacatttgtggattactgcatttgtgcagcagttgcagctgcaattgcctaacgaatcgcccccgctggcacacacacacacatacacacatgtgggtactccagttacatggcgctgacaaaaggaaatgccaatgaaaaaacatagtaataatacacataataataacagtaaactatatttgatatataaacgaacagaattgcaattgctgcttcaaaatggatgtttaatggatgcaaggtctggtttttccacaggatatactttttaggatggaattacactaaatataaaggactattaaaggtttcgagctctacctgatggttttttttttcgtttcagatcccgcgatgggcaatgccggctacacttgcatacgccgcacattctgctggctcaacatcattctatgggcaagttatttaagtaaaaaatcctactaattactaataagttgacttgaaatacacacctctatgcctataagtaaacatttctggaaagatacatatattctgactgccgtctccatttcccccagaacggatatgcgcggcatcagaatcgcaggcaaaatcaaaatcagtacgtagggcggctaatcagagccacaactttgccgtcgtctgcgacggaagtgtctttgtgacagcatgttgcattgtctgagcgcctgtcattgacttttgcgtttgcttttggctttgctttcagcacagtttcagtttccagctcgacgtagactttggcggcgtgtttacccttagctttttggagctgcagctgcagcttccgtccgcttttgtttttgcttgccactgggtttcccccgaagtccctgaaaatgtcagatgtcaggccgttgtgaacatgcaacagtttgcaatcgaaagctctccatttggccgtcaatcgggggaattatctgatttcgcctctgaatgatagatccttcagctattcgtgcagcaaagagcaataaatcaaggtctgtgtccaggtgacactgtctggaataattgactcgttgatttatatcaaatattaagctttttgagtcctttaggtatgcagctaccacctctcacttttcgagcattctgctggataatcagtgcctttctaatttctattttccaatttccaattcccaacctgacccattgcagttatgtagctgtgcgtttttaggagcgggactctggttgcgactgagctacgcgggatacgccactttgctgccccagcacgcaggtctgagtgcggacaccatcttcatgggcatcgggggcaccggatttgtggtcagcttctttggctgctgcggcgcctgggtgcaatcccgctgtctcctggtattggtgagtaaatcgggggtaaatcagggtcaacggagaggatttagctcatggcatacatgcatgtcgaatttgtgatctatgtacttttttttgaccattttctttctgtgcaaagccattcaatatcatatctacccgcagtactttatgctgattgtaatgctgttcatgagcgagttcctggttggctccatcgcctttctcttccgcggcggactgggacggactttggccaacgagctgcgcttcgggatcgagcggcattataacagcagcgatcggggatctctggtggcgccttcggtggcctccatttgggacagcgtgcagcagtcggtgagtggtgcctttcgcttgttgcccagttccacgtgctcattgaaacgtgatcccttttggttagttcgagtgttgcggcgtttcctcctacgaggattggtatgacattcagtcgtggccaggcaggcgctgggtgccagagtcctgctgcaggaccctctacgaccagcgccaggtgctcaccgaaggatccggcgacggaatgatgcgtcccgactgcggcaggtgtgttcatgttcggctcctttgcctattgtccatttgttacatcatttcgagaagctagccactataccattatttcgccaactctagatctgagaatccgtcgctgtggtgggacaagggctgtgcccactcgctgcagagctggttcaccggccagctgaacgtggtgggcgccgtgggactgggcatcgcctttgtccagctgttcgggctgatcacctcgatgctgctgttctgcacggtgaagcacaagcgggcctcggacacctacaagtcatactccccgtcgattgatcctcagacccgcaccagcagttgggaagattgaacgcgcctgtgacggtggtaggcggacttctaaattggggggttgcagtcggcctcccgaactccctgtcgctatctctattccttttgttaactctcttagtttctaatttattctgcgaaatgtgccaaaaattaatttaattcaaagtgtatttttttttgtttttttgtttgtaatctgtaggcggagacaagtcgaaacaaaattgaactggcagcaaaatgacaaattcgcactgggcacagtgtgaacatgtcatattgctgccggtgaaacaatcacatatttagttagcagtgtatccatattgtgatgtgctctctagtagtatagtataaggcccaaggcccgaaacgcacctggaacagggtatagtgcgttccatacttatcaggctggctgcttagctgcaagagtacctgacacatatatacagctagtgtgagtcggaatccttggacctggatatgcttatgctcgtaacccttcaactaaaccaatatatcaactacaatatatatttatatataattatataatacttatgttactttatggaaatctgtagtattcgaaatagcagaaaccgcaactgcccgaaaagcgcgaggaaagcgagaagagaagagaaaagaaaagaagagaagacgaagtggagaaagagggagcaaatagttaaagcaaatattacattactactatgcgtatgattattttattcatacatacaaatatttatatcgaaatgcattcctaaacaacatgttcgtgttaagttacaaaataaattaaagtatttatttaaattacacgccttctcaaaggcccaccaatttgcctcctatgatatccaattgagccgtgatccccttcgtcacgctgcgcgccaactctttgggcttctgcaagagagaaatggggggaagagagtggtcaagagagggaaagctggcactggaactgaccttgctcaaagcgaagcgcaagcgcacacgac

SEQ ID NO: 9449 - DNA, 843 bp, DROSOPHILA
atgggcaatgccggctacacttgcatacgccgcacattctgctggctcaacatcattctatgggcaagttatttaagagcgggactctggttgcgactgagctacgcgggatacgccactttgctgccccagcacgcaggtctgagtgcggacaccatcttcatgggcatcgggggcaccggatttgtggtcagcttctttggctgctgcggcgcctgggtgcaatcccgctgtctcctggtattgtactttatgctgattgtaatgctgttcatgagcgagttcctggttggctccatcgcctttctcttccgcggcggactgggacggactttggccaacgagctgcgcttcgggatcgagcggcattataacagcagcgatcggggatctctggtggcgccttcggtggcctccatttgggacagcgtgcagcagtcgttcgagtgttgcggcgtttcctcctacgaggattggtatgacattcagtcgtggccaggcaggcgctgggtgccagagtcctgctgcaggaccctctacgaccagcgccaggtgctcaccgaaggatccggcgacggaatgatgcgtcccgactgcggcagatctgagaatccgtcgctgtggtgggacaagggctgtgcccactcgctgcagagctggttcaccggccagctgaacgtggtgggcgccgtgggactgggcatcgcctttgtccagctgttcgggctgatcacctcgatgctgctgttctgcacggtgaagcacaagcgggcctcggacacctacaagtcatactccccgtcgattgatcctcagacccgcaccagcagttgggaagattga

SEQ ID NO: 9450 - protein, 280 aa, DROSOPHILA
MGNAGYTCIRRTFCWLNIILWASYLRAGLWLRLSYAGYATLLPQHAGLSADTIFMGIGGTGFVVSFFGCCGAWVQSRCLLVLYFMLIVMLFMSEFLVGSIAFLFRGGLGRTLANELRFGIERHYNSSDRGSLVAPSVASIWDSVQQSFECCGVSSYEDWYDIQSWPGRRWVPESCCRTLYDQRQVLTEGSGDGMMRPDCGRSENPSLWWDKGCAHSLQSWFTGQLNVVGAVGLGIAFVQLFGLITSMLLFCTVKHKRASDTYKSYSPSIDPQTRTSSWED

SEQ ID NO: 9451 - DNA, 15101 bp, DROSOPHILA
tatatatttatgtatattgtatgcagatttatgtggtatataatatataggtgtatatattaggtataaacttctacatgtcatatggattttcacagaaaatcttcaactttgagtaatgcttttcaattgtttccttgtgcgtgttttcacatccttaattgctcatttctatgcgctttcacttttcccttggagaaattgttcaatcctgtagttactttgttgagcactatgcacattaggcaatctggaagattcttctttcttcgctcactgaaccctccgccggcaccatcgcagctagctttgatctgtgcccgcggagctcctcgcttcgaacaagctttgacacaaggcagaaagcaacaactaactaattgttaacaacaatctctacacgattacacgggttgtttgatgtgtgtgcgtgtggggttatacaaaaatgatcatctcatgtcgatctatagctatcgttagacatttgctacatcatgtaaattcactatttgctcacgattctttctggctaatatcaccgttatcactgcattgcctaaactcggcttaagtctaggcagaaagaagtcttctcctggatagaacaggtaatgtgcgcaaaccaaatggtgccattggaaggtaaacaaaggaactaacttagttgctaaatatttgcactgtcacacaacgaatcggaacgaaaacgataccggtgaaatcataaaacaaaagattgtgtgtgctaaacaaagaactaaagactcaacgctgcacaacaataataactaacagctaagaagcttagtaattaggccctaaattacgggtgagagactgtgtgtttgggtgtgcaggtggagctaattccgctccagctttctgcttctgcttcagcttctgctttccggatgaatggctgtgtgcgggggtgtggctgatgtggaggcgtgtttgcagtctggctgtcgaaggaactgggcggggattccgcgctctagatgcgaccgcttttgctcgccgtcgacgtggacagctgttccaggcgggagcacagctcctgggccaggcgcagttgattcgcagcggcagcggcacacgaggtggcggctccagcgcctgctcccacgggcaactggactccggccacgacttccgggtagctgatgcacacgcccacccagcgagcttgactgcaggcatgggactgtaaggaaaagaggcggaaatggttagtttggtaagtaaacacaaacacgttcagctaaatttgtataactcgaatatgtttcactttgataataatataatataatattttggattgttcgccaagtagaagcttggcacatttgtttaaacaatctacgaaatgtgtatgcacgtataatctagaaaacctcaatgctaattcccgactttgaatgcttcgttcggtgttgacttatcgaaaaaatgcggaggtgtcaagcggagctgttatgtatattaacttttctcaattattatcggtttcatttttcgtactcccaaataattagtatccatcaaaatgggactagcagaaagactcaacacagcaaacaaacggcttgagataaagaaatttcagttatgacgagcagtgaatccaggaaatttggctttggttcgagttacgcaaatttcgacagtgggagattccactcgttgactgcaactcaccatggcgaaatcacgtttccattggacaccgcactggccgtcgcacaggggacagggacgctccaggctgtagccaccgcattcgctgcagtcgagggacacatggtcgtccgtccaggagacgccgcaggtgaagcaggagcccatgtgctggcgcagctcctcaatggtcagcacgttgtccatgctgatctccaggggactgcccaccagatctggcagcgaggcagacagaccgagattgtgatgcctggaagagattaggccgaagcggggaattcttgattagtaatagtgacaaattgcggctggcgtcgggcaaccgtgaccttgccaagtgggtggcggcgtgcgctggcgtgattatgataatgagctgcgtgccggtgggccggtggtggaatgggatttgggatggcccgattgggatgcggggatggggacgagggcaatgattggcaactgtacccgactctacggcgcgactttcgcccgatcatgtgagcgatggcgacgggcttttgttgcttttgtgcggccccaaaatgcgaaatgataatgatacgactgcgaacttgtatatatacatatgtatatatgtttatggctgtatacaaacacagacggacgccgaactgttgaggtgaaggtgctggcccccttcattaatgggccaaagtcgtggccaaattgcaggtgtggtttctactgcgacactgtgttgtattgagtggtattgtggctgtgtgtactctgcaccctggcccagtcgccattccccgcccgataagattgctaaaatcatgaatgagccaccaccaccaccaactcacgccccttcgtattcccccacaaatcagccctgacattgtttacatcgatatttagcaaatgcgaaaacggaaatggaggcgaattatatcgaatcgctgcttccagctaaatgaatcatgaatgtacgtctgtagatctgaagatgggcatccaaaattaaaatacttacgacaggggactgcagatgtcggcgatttggggaccgtgaacactggcgatcgacatattggctgctgatggcactgcaaagagggaaacagaaagcagaagaagtcagttaaagttcatcaaatgtaacaaggtgagttcaatgctggccaggtaggtaggtaggtaggtaggtaaacgatcgacggcgaaggtaagcgagcttgttgtacaggtgcgtgactcaaatgtcagagagctcgactgtacacacaccgtaccaagctgagcttcagatcattcaaatggctatatgtatcattttccgcagcaactcggacgacattcttggctaaaattaacaactattcgtggggaaactgaaggtggagtgcggtccaagaccacaaccgctgaaatccggttgaaagcaccataaacacactgcgaggccgttgatcagtgcgtcatctcgtgtagtttcaattgtttggggctgggacaattaagaaactttaatgtgcgaattattcggaattggaagcgaaacgttaatggcccgcgcttgtgtctcaaatgggggaatactgtctataggtatatacatatgtatggccaataccatttggctggctgtctacattgtccacacgattttggcaaagttgcaaaaatctttgtggcgagccgaggcacatgactgctgtggcgtctgctggcctggcatcataataaataaataaataagtacattttctgcgttgttatgcggccatccgttggacgttctatatttagctcgatcgaattgagaaagtatgtataatcgcgggacgtgaccgaaataaaccaaacaacatgggatagtctgggcatcggtttgcgcccctgctcggctgcagttcggtttgagtctcggttgggaggcaattttcagttgctgaaacggcaacggcgcaaaagcgaaattgctgtaatttatccgatccgagcatattgtgtgccgcacacacaactagttgcatttaatttgatttgattttatttatttatagaagggcacacacaatggcacacaaatcggggggacaccgacgggcgcttcatttttttttttagttatttttggcacggaaatacttacatttgttgggttatttacagcaacggttgttgttttatgattttttatacagcgctattaataaatccaaattgggattcctgtgctgctttattcgccgtatttattggtaattgtagttggccttgcgtaagctagacaatcgaattgctttttataattgcctggacattaacattaaccgttggcaattgtttttgtgttgtttgtaacttttcacacgcgatgcgagacagttagctcatgaaaatgcaattggcaatagtttgtatctgaatgcagttgtttgactgggactgcagcgcacttttatagttggactgggaagcgaaactgaactgtgtagctgggactcggactgattttccccagattcaattcaattcgatgcgagtagttttctccagagccgaaagaccaagtgggcaagcaaagcacctcgaaccgcgaaactcaaatgaacggcgctcgctgagatcgcaccgcttttatagccgatccgactggcgagagcggagagccgttagtcagcgcggagagcgagtgcgagagacgagcgagtgatattgctcggacccgaactcaaatccgaatcgcatgacaaagcaaagctaacgaactgaacttgccaaaacacaagcacacgcacgaattaaaaaaaaaaatcatccaagtgccgtgcaaaatacgtaacaaagatcaaaacacaagcgaaatgccaaaacaaagtctgatgctgaccaaattagcggtagttggcaacaggagaggctctcagcgagagcagagataagaaaccaaaacaaaacgatagccagcgagtgtctcgaccagaggatacctgttactcgctggatacaccatgttatgcggcttcgttaaactgactctgtcttagataagtattacatattttcaactattaagttaggcaccttgaacttaatcatacacagcatttgaatcacatacatttaggtatagaacatgctacatatcgctcctcacgcacgttataccctttgtactctacgagtagcgggtaccagcacagatggcgagatagcgagcacatttaacggtcaagcacagcaggcgagcacccttacactcatgcacccataccgataaccagatacccacaccgatatctcctccatacgccccgtcggccggacggtacgtatacgacacattgaccggacggacactagtacatcgactaggtgtaatcgcccgctggttattgacgcatgtccaagaagacggcaaacaagatgccccctggcaaccgtcagaggaaccgacggacgacgttgcttcatttgaataacaaatcacttcgcgctatgacaggtagagcgccgggcaaggacagggacggttacgggttcgaattcgggttcgtgtccgtgacaacagcgcaggtggaaagccgcaggaaggacagagcgaggtagccggaagatgggatcctcgaagcggcgcaggtagagcgcatccctaatcactagatccgcaatggcctgaacggaaaattccatccggggttgttttcccataatcataatgtccaataaatgttattcggaaaatcacttaggatttttcgaactcggcgagaatggcgatattttcaaaccagggtagccagaaatgtatatttagttagctcaaaaaaggcatctaatcagcgaaagatgacaatttcatgctgatagtattattctttctctgcggttatttccccaccataaatatacataaacgccgcacatccaccatttttcgcttatcaatctgctcataatcttatcagcaaagtccgcctcccacctcctcctttctgccctttttttttgcaatgcgcgtgtctctgcggcacattgtaaaaaaaaatagtgtaatggtgaaacccactcggtatgtataatatgaagacgagatgactcccgcggctgtcataccgccggaatggaaattttcgctagcgcaggcatgttaatggacaacaaaaaaaacttgccaaactgcagctagaccgggcctaacatatgcacatgagccgggttccaaggcgcgcgtcgctccaaaggcgtctccaattacgccagcccaacgaaaagggagctccccgaccagagccgcagccaaaaattcaaaaacccaaaaccagagacgaaccaaagccaatccgagcgtccctcgccaaattaatgcaattcagcgtcgcgggcgacggtcaactacacacagaaccagatacatatataaactacatatactcgggccagcagcatgcatagtataaacaattaatgtttatttagaaagcaagaacgaaaccctcgccatccagcacgcttttcaactattgtcgcgacgcagtttcgagcttcgctgcacggagagaaacggaatcggaatcgattcccgcggattttggtggaaatcatttcgatggaaaactctcgagttacggacaagccacacttcatgcgtaacaaacatattaccttagatgacagccatcgttttgggtaattgcataatgaccgcgatcatttcgcggcactttggatttgggaatgctggatgggcgaagtggagcaagcgggggctaccatgacaatggcagggagaaggtcacacggcaattgcccgagatgctcgcacaaaaaaaaaagagacagtcccacctcagcggaaattgcgtcagacaacgtgaggatattagtccgaaaataacaatatttaaacaatattttgcaagccttttaaaaacttattaagtgcctgcgcactcacgcgtgtgtatttatatacccttcctttcctgattagtatacatccaccaatttttcagaaactggcatgaaaatactaacaaatatatttcgccaccggacgaattaggcttaccatttgcaattggacagaaatatttatttcaatcttatcgcttgatttatacaccgggtaggtgctatcaatggatcgaatatcataaatatgctattaaaatacttataatttgacatttttaaacaaatattctacgatgtacagagaaaccctttcgaggtatacatctgtttattagaaaacgaaaagctgtttattattttccgaagtgtgcttagaattcccggagatttccatcgggaaaactgcaatctaagtgatttacgtttaagtacgtttatttttcagctctccaagggcttgtggcgattattttagctagctaaattgatttagaatgtataagtcagaagctcgacttaattgcacacttagctaccggctaagctaccttacggaaataaatctttgaaatttaagatcattttctatatacgttttccttgcattcttttttccaaaaagcaatcaaaacagaagtgtgactaaatcaaacaaagttaattgtagatttaaaaacaaataaatcataacgcttttgcaaaatatttgtttgtttgttgtgagcaaataaaataaaattcacttatgatcaatacttaagttactctataaaaacagacccaataactaactatttggctagctgcatgcagcagggtattgcagtttcacctatgccgcaactacaaaactatgtgagccgagatagcccatttggaatcatgcgaacccctagtgttcaagtgctgctcgaagacatgcgcttcctctttggatttgaccagcacgggaggccttgtcttgctccgcctgcagctctgttgcgagcaagttgctccgcagctaagcaaacaaagctgctcctgaaagtaactgttaattattgttatgggtggctggtgtgtaaatacacagctcacatgcggacggatccgtcacagccaaatgcaaaaacaaaggcaaccacgatggattgacgtcaatggcgagggaaatcgggaacccagcccagaaagacaacgaccatgctgggcagaagcgcggctttgttttgccttcgatgcccaaaagacgacgacgagctgcggttcgtgggaggctgattcactggactgggcgggaaactacgccacttttggccagtcagcgccacacttagatcataaaactcgtctttgatcggagctccgatgttccatcatcacatgctgatgctaatgagttagctcgaatgcgacaaacccgttccacgggattccctcgccccgagatgcgagtgtaaacaaaccgaaatcagaattccaaacccgcggctgtactatggaaaccgtttacttaattaatgggggaaaagtacccacgaatctcggggtaaactgccaaaacggggcgtgactccgtctgggcgcagcaatccaacgaaagtggctatcggttctataaccataggcgcacttagtactgaaccccataacctcccaaccctcccgcctcaaccggcaattcgatccgacgtcgatcggaaagatttacggccgccagacgaaactgttgacaagggcaattagaaagccgacggacgaccctgacccttggccccgtgtgcatgctaattccacgggttttgtaagacttccacgtaattaatttgcatagcgtgccagatgaagcgatctcgtcattgagaaatgggaaaagctcccacaaataggtccatgacatgttatctcacggcgccattgcatgtttgcgaatatatacaaatagatcgcgttgttctccattgaccaactgactgatgtctgatgactgatactgatcgcgaccatgtccatgactggaagcgccaagaaggtgggctcgggtttacgcgaccctggccctggatatgtgtaattcgcccaagaactggagctgccttcctcactgaatgcgacgatgagttgctgaaagggcgcatacatacaatatatcatcagtaagcacaaatgaaaggcttatcatcttcgaatgtccataaacaaagtggggtttcatcttaaataacatgcatgtttactcataactaaataaataataatattctaagggatgcctccgcatgaggtacatacatacatatatgttatttatattgggtaaacctatttcctataaacaaacttaaaaatagaacgcgttctattcaggtttaatgacgcctcttcaatatttatagatctcgtttattttgtctgatcgtctcaccattatatacacatacgattcatacgtaaccttcggtaaacttgactactgcaatgatgggtgataaaaccacaaagcgataagatcacagggaaaaagcgtaagaataatagggcaggttttaggaacaaagtctaactaagatcttttaatctaatataatgaaacagtactgcatggagcaataaaacatataaagcaatataataacaataattgctgacaaatatgaaagccggtaaccccagaaatttgcagaagttaattgccgtcgagtattgactgattagaagaacttaaacggtagttataataggattacttggaaaatccactgcaattaataccccctcaatgtttattcaacaaaaaaaaaaaccctactcatgcatcatcccactggaagcacaagccacagatcacatatgtttatgtccagctaaattcctaggaagctatataaaatgtactgaaaacagttggtctatgttctattatccgcggattacctatatctttcattgcgaaaacaacaaattagattcgatagaacggcccagaaacactttgttgcgtttctatttcgatttcttgattatatggcaaaacaatgccctgaatgttacgcaattgaattaaaacgcgaaaacacagggcggcacattgaacactagttcaaggtactacttgcaacgcaaaatcgcgatttgcaaaattcccaaccacaggcaaagtgcgaaatcccgagtcgggaaactagaacactccacatgaccaaggggttgggatgggttggggctgcggtttcgcttggcgtgcgacaattaacacttgtggaagtctggagaacacttaattagcaatttgcataatgcaacagtttgttaattacacgtgacccaggttgatttccacggggaaggtgttcagccccctgaagattgggttcggttcgatctggtttcactctcggtttgctcaatgaatctattcgagtttcgagttttaggctttcccttggacaatatttaattagtttttagcaggcacatggctaacaaacaaactggttcttcgaactgacaattttctcgaacttgcaaatcaaccggggaacaatgcggtttaatctggtttgcttgttttaattttcccagtctaatcatttcgaattgtgagctggagaatgagaagcctaattaataaactgtcaataaagaaactagtttgatgtgagccacattatatgactgaacaatgaaaagcgtgctgagcataagaaacttttgtagtaactcgtttactaagatcttaaaggctttctagcaactctagattatacatcgcgattctacagaacactagattagtgctttcccaagaagattgcggctggattcttatctgtgagcctcaactgtttatgttctcagaaaattgaattcgtatttgaactatgttttgtgtaaattgcgcacaacttcaagttcgccaattacgaaataaacaatggaaatgtggaatctcacagctttgtcccaagacgacacccaggtgccgtctcctaacccttcagatccccatcttaatgacgactaccgtgtgcgatgcaaatggcgggaatttacgacaagttcgagggggtatatttagtcaataaagtggcgcgagcgactaactgacgtcgtcagaagtgagaacgtcgtcgtcatcagcatctcgttgagccataccagaataccagaatactatatggaggcactgcggcgccgcatccacatcatggttgggctcgctgttagatttgcgtcgcacggaacatttgcccagtgtaaacatacacacaaccggtgccggtttgaaccgatttcgaccgccgtagtgccccggcaatgggtctatctatctacatacatctgctcgattgtgtgtgtgctaaaattgtaaattaataaaagaacaaatgaatgaatgagcgagtgagtgagtgaatgggcgcaattcgaattgaaatcaatccgcagcacacggacacacccagcaatcgcaacggccgggcctctccaagtcgagtggggctttaacattacagaacacgaaaatacttgtaactatagattagctgcgctctgttgccaagtaaatatagaaatgcttttggccccatcacctcgttctaaatcgaaactcctcgaactgaggagctgattgaatcggttgaacaatactcagcaataatgattattgaggtccggaaataagcgcatattggttgacactctggtgatcttttctcgctgtatcttggatcaaatccgccaaacgggggggctacttagcaccgaaccggttgagaccaaagcgaatcggttgcacccatctggagccgcctctaactggtgtccagaccacaaagcccggcgccaggtcccgatcagaagtcgaagctgacggatcggattgcatttgggcactttccatcacgccatcgccgcagaattagacacatgtccgcacctgtgcacccagcacacgtccactgcgttgcggagggctatcggctttcgccggagattggagaacctgagacgtcggggctgctgcgccataccggagacgtcggcggcagtcaatgggacttatcatgcacggacggtcgagtcgacaaattaaacaaaatcgtgaacggactgcgcgtggcggtccgttctataatgagcatgggaacgcaaaacgcagacagtgggttgaggggacattgcgaaaccgaaaacggttttatttttaaaaactgtcgttacgtttgtcgttttaataagcattttatgcatgcaaaacgcttatgcaagctcccgtgtccgcgcatgagattcgccagcgaattctacaaacgcttcccaccgctccaacaattataattaatgttgtataaggaatagccggtctagacggcggatgactcaagtcccacgcgagataagcacaagagcgatcagttcagataataaaattccactacatccatcatgataagtggcaaaggtacggcctgtgcgttcagccgaaagatcagatctaatgtgcgtgagtcatgccgataaagctgacttacagtcctataaatagttcggataaatcgcttctcagctttgatcgaccgcgattctacgattcatttaaggccttacaacatcaacatgaaccgtgagaccgtgtagctctggcagacgaagctgattgcaaatcgtctgatgcaatatgctaatcattcgcaaatgtgcgagctaagcgcaatagttcgcaactgaccaactttcgcttccttttgggttgaacaacggaaaatgtgggaacttaagtaccaagatttggagcaataaaccaatcagtcttcataagaaataaatcattcctagaagttgtacctttattaactggcccacttaagaccggataagggagttcatttgcaactctcatggtgggcggctcacacgcaagtttggctccataagccctgctccacagaagccttttatgggcgacacgtgccggttgtcggtggggcaatatgcatgcaaaaaacagctcacgctagcacgcataagccggcaatgttattgtttaccaaaattggggaaaaattccacttgaactgccgggccatcggaaatgtttgcacactcttttggcacccattccgcagccgatgaagcgaaggagaggcatgatcggctggagaggcttgtccgattcgcttcgatccgatccgcagtcacatgacaaacgcgtgaattgggcgttctgagttctgggtgacaagcgaaacgtgtgaataggctagtcgcacgacccgcttgtacgtctaatcagatggcagataaacgggcaaacgggcaaaacaattagccccactgggagcccactctctcatccatttcgaatggtaattgatggatcggccaattttcgtgggatgcgtacgggtacgtgctaaaaacagcacggaatggtactaattttaaatggaactctttggggaagacagagtgttggctattccgggattgtaaaattgatggcccctgcttataggcgaccgacccactatcaatgccattcgaagataaagccggagtgtatgggcattaataaaagtgtacggcagtttccgcccgatcggacaaaagccgggactccaagagacgggaaaaccacttggcgataagccgatgcagctagtacaaaggtgcgactagcgttttccgctgctcaattagtgggcttcgctacggctaatcgtaaataacatagattactccgatgtctagactataaatataatcgggtggctaattatatgtacgaactcgctatggcgcactcacctatgaagttcagcttgtcggtggccagattgcaaaagtcgggatcgtccacatcgaaaatgatgccatcctcccactcggtgacaatgtgagacgaggagacggaaacggaagtggtggagcgttgctgctgctgttgcaccaatgagctgttgttgttgttgttgctgctgctgctgctggcggagatgtggttgttgttgctgcccgttttcatctccataagggtaagagaaacgcaattagaggattccttggctaagcagatacgtgctggcatgcaaacagcaaaaagtacacacgtggcttaaagcgcagcttgtgttgattggccaagtgtttggataaaggggggtgggggggtggttgataacacagtcaagggggaggggagcaggcacacagctgttgcacgcttacccctccccgcacttcttacaacacttctttgcacaagtgcaacatgcaaatcaatagatgcaagctaaattttatttgggtgaaggctacatgtgtgtgagtgtgtgtttgcatgcatgagtgagcaattgcattcgcttcgtgtatttgttgctgttattgcttttgcaaattttgtttggtctccatacatgtgtgtttgcatggaaatgcctaaaatctgtgttacgtgtgctggcctctaagctcactcacctttatactagcagcacgctcagtcgaccagcttgaagttaagtatccaaatttaggccaacgcaaccgaattttaagttaaatttggataaaattcaggcaaaacaaaactttgcttgcaaaattgctggcaactagaggtggtcagctgtcgattatcgtagttggcaacactaatcgataggacagaaagcgttatgcatttcaacttcaatgttcaaatgaacaaactaaaattttctattctcttttgatacctgtaatatgaaaataatatagatagtttgcttagatcccgctgaataaccttatatatatataacaatataacttaaatttattttctaatttgttatctcaaattttagcattctgacaagtatcaagtttgtaatcatttttaacgatttattacaaatatcttaatacaattgtattgttagttcatatgcacactgccatctctaacgtgcgccgtggcagacgtaagcacctcccatcgctataaacgtaaccatcataacgtaaccaaaattcgatcaaaataaatttggaatatcacaaaaatcattattcgcacctggaacagaaagaaaatgcaccagcctggccttctgcagctgaatagattgcactaaggcagcatttcgaatccgaaacgtaggaactagcccacagcgaaatcatggaggagaatatgtggtaaataataaacattgggttggggctacgtcaacaactaagattagtcagagagtctagagattcagctccagcacctcattttctttggcatccatcgcctttggctttctcgaacagaccaccatttgtttcgctgattgagtcagcagcttggtgctgggccagcgggacgcggagcacctgggggtgtgggtgctccgccttatcagcagctggttatttagacacgttgacgtccccttcacccgtagcatgagcagaacaagtaccaagcaactgattgtgatggacatccctctcttgtatgcaggatcattgagctggag

SEQ ID NO: 9452 - DNA, 781 bp, DROSOPHILA
ctggtcgactgagcgtgctgctagtataaagatgaaaacgggcagcaacaacaaccacatctccgccagcagcagcagcagcaacaacaacaacaacagctcattggtgcaacagcagcagcaacgctccaccacttccgtttccgtctcctcgtctcacattgtcaccgagtgggaggatggcatcattttcgatgtggacgatcccgacttttgcaatctggccaccgacaagctgaacttcatagtgccatcagcagccaatatgtcgatcgccagtgttcacggtccccaaatcgccgacatctgcagtcccctgtcgcatcacaatctcggtctgtctgcctcgctgccagatctggtgggcagtcccctggagatcagcatggacaacgtgctgaccattgaggagctgcgccagcacatgggctcctgcttcacctgcggcgtctcctggacggacgaccatgtgtccctcgactgcagcgaatgcggtggctacagcctggagcgtccctgtcccctgtgcgacggccagtgcggtgtccaatggaaacgtgatttcgccatgtcccatgcctgcagtcaagctcgctgggtgggcgtgtgcatcagctacccggaagtcgtggccggagtccagttgcccgtgggagcaggcgctggagccgccacctcgtgtgccgctgccgctgcgaatcaactgcgcctggcccaggagctgtgctcccgcctggaacagctgtccacgtcgacggcgagcaaaagcggtcgcatctag

SEQ ID NO: 9453 - protein, 249 aa, DROSOPHILA
MKTGSNNNHISASSSSSNNNNNSSLVQQQQQRSTTSVSVSSSHIVTEWEDGIIFDVDDPDFCNLATDKLNFIVPSAANMSIASVHGPQIADICSPLSHHNLGLSASLPDLVGSPLEISMDNVLTIEELRQHMGSCFTCGVSWTDDHVSLDCSECGGYSLERPCPLCDGQCGVQWKRDFAMSHACSQARWVGVCISYPEVVAGVQLPVGAGAGAATSCAAAAANQLRLAQELCSRLEQLSTSTASKSGRI

SEQ ID NO: 9454 - DNA, 2735 bp, DROSOPHILA
gcagttccacctggttcgccagtgccaacgagctgcagctgatgaagctctggccctggaaaacacatcctctctgaaggaatgtgctgatctggcgcatgatatgcgtgggctggccttgaactacgctccaggaggaccgaaaaggaggctaaatgcatttgatcagaggtcctttggcaagcagggcgacaaggagcagcgcattcgaagtcgtttgagtgtcttcgaacagccaggggagttcttcaactgccacgtcctgaagtgtcctcagaataacacattttcagggatggtcaatgacagtcgcttcgattactacagcttatatggaaggccaacaggttaaatgaagtatctagcgtatctgtttggttgaataattttgtggttcttgctagtcgtaaggaactacagctgcataccggaggttgggctgttcgtggtgtatactcagcctagtgcctacttgaatgcctcactgacctgttcaaactcctcggagttcactggtagtctggcccacatcgcatccgaacacagaaccagtttattggcccaatggctagtggaattcaacaggaaatcacagtctctggcagaaggtaatgtctatctggcctatgtgggtttggcctacaacagctcaacgtcattgagcccactggacttcaggaactcccaaggggagagcttgcagtgctttctttacagagcctgggatggtggtcatcctcgagttgggtaggctgacagtttattaggttagccgccaatgctatcttctctaaatctaaccgaatttgcagtggtgatctgggcaacgccagctgcgtggccttgacgccgcagggaacctggcaaaccctgaactgcgaccgggagctgccctttatctgcgaaatccacacggcccggtcaactttcggctgggagcagtccagttccgagctggacatcggcccaaatgcagtcttcgagtgcggaagagaccgagtctgagtctatggcagcatggatattcgcagccgttttattcacttaagcagttttcaaaacacaaaagccaaatagatatagtttagtggtgattgcccgcctctcgcacgccttgtggaaagtgtagaatctgttgcagatgcaggaccaccgggcagcgccgcttagtggtacttgtagttcctgtggtgcttcaacttggtgtagttaatcagatagaagaacgtcatgctggcgacggtcagctggaagaagggagcgatcccggcgcgctttgggaacacgtacttgtgctgccagcgccaccaggcacggctcacagctccggccacagcgttgggggtcttgttgcggcgtcccagccaggcgccgatctcgcccagcttgacctggccgaagggcacatcggctgcggatcggagagagcggagaggtcggaaagttgtttaaattatgtaaaacgctgcacatttttgggcagtgcaaatgtgctctgtgcctgccgcaaaaattacgtaacctgctcacctttgccgtagaagcgagcggggtcgtagggcccgtgcaccttggggttgtactcagctggatagtcaccgaatgccatcgcgctggtttggttgagatatattcttaaatcggattcttatgaaacataaaattacgcctgctacttacttccttcgatactgacagtatgaccaaagcggcgagagctgggattttcatcgaccaatataccgaaatatactatgtgcgaatttattgtgtgcgtctccgctaacagggaggatgtattcgctacgtcatcgatacagcgaatatatcgatgcccgatgcacgatgcacttctcacatcactaagctccagtatatacagaaatcaaataggatttttgcaagcctgggcattcgaatcagaatccagccaaagcgaatccagtgtgtaaacaaaaacaatgaaactggaggagttgctgaccaagggagcctcctctccgccggaggacgacgacgaggacgagaaggtggagctgaagccgcagaagtcaagcagcgccaccgcggacgagggggcggagaacgcggaggatgcggccgaggatgctggcgagaaggaaggcgcgggtggcaagaagaagggcacgcgcaagaaacgctcccttaactgggaggaggcggaaagggggctgctccttgaggtcatcaagtccaaggtggccttcgtggagaaccggagcgtggacgccaagagcataaaggccaagcgtctggcctggtcgcagatcaccaagcagtaagttgcgccattgggcagtggagctcgtcttataatggcccttcactccttccattccaaccccccatccaggttcaatgcccttaacttccgccatcgcctgctggagcagatccaggtgcagtggcgcagcatgaagaactccgccaagcgggagcaccagcagaagcatccgaaaacggaggccctggaaggcatgcggatgatcgagttcctggaggagatgcagaaggatccggtcacctcgcgcagtcagacacgcagcgcgaacacaaacggcgctcttaagaaggagctcatggacatcgacgaggacgaagacatgccgctggccgctctgcccaactctacgaacgccagcgaggacacgctgcagacctccacaatagccatcccctcgccgccgccctccactgctggcggagacggggac

SEQ ID NO: 9455 - DNA, 549 bp, DROSOPHILA
gtcgatgaaaatcccagctctcgccgctttggtcatactgtcagtatcgaaggaacgcgatggcattcggtgactatccagctgagtacaaccccaaggtgcacgggccctacgaccccgctcgcttctacggcaaagccgatgtgcccttcggccaggtcaagctgggcgagatcggcgcctggctgggacgccgcaacaagacccccaacgctgtggccggagctgtgagccgtgcctggtggcgctggcagcacaagtacgtgttcccaaagcgcgccgggatcgctcccttcttccagctgaccgtcgccagcatgacgttcttctatctgattaactacaccaagttgaagcaccacaggaactacaagtaccactaagcggcgctgcccggtggtcctgcatctgcaacagattctacactttccacaaggcgtgcgagaggcgggcaatcaccactaaactatatctatttggcttttgtgttttgaaaactgcttaagtgaataaaacggctgcgaatatccatgctgccatagactcaga

SEQ ID NO: 9456 - protein, 107 aa, DROSOPHILA
MAFGDYPAEYNPKVHGPYDPARFYGKADVPFGQVKLGEIGAWLGRRNKTPNAVAGAVSRAWWRWQHKYVFPKRAGIAPFFQLTVASMTFFYLINYTKLKHHRNYKYH

SEQ ID NO: 9457 - DNA, 2976 bp, DROSOPHILA
cattccggtggccatgacaaaaaaaatctctgtacaagcactgacaacatgaagggcagataaatgttgagacaacgccgggtgaaattgaaaaacttgctgcaagtataagcgcaaagtttgccgcgtgcctcgggaagatgctgctcggacagccaacaaaaggcattaggaatggctgcatcttgcccgacacttggcagctggaaagtcagagggtcagaggagcagagaagcagacatccgaccagaggaccaggtgcacgtagacaccaagctgtaaagatggacgtggccatggatgtggagctcgctgcgtgcgccaaagtttgttcgtcttggctggccagggcatcgagttacttgctcctcgaggttcgatgcggagcaattagcaaactggtcctcgaacaggattaccccgctcaactggagggcactcgatacggctattaggcctgacaagctgtcattacgggcgcaaacgtccagagcagtcaaatatttgccagcatttttcgaggtaaacacgggtcatccattcgcatgagttaatgagcttgcttaagggtcgcggccaaccgctaaattactttgaatttggcggaattacaaatacatttattttgccttcaccagagcaaatatatacattggctgcacacccacgtaaaagggttggatggctagatatccgtttacccattagtagtttacactttcaaaaggggaattatttcagaaggatttctgtcatgaatttctattggcgagtcattattattgtctgccatgaatcggtttatttatctttgagttaagacttttacatatgcacattgtatgttgcattagatcttatataagaatttgctaaatataatttacacattgttttagaatttattcaaatgtaagaggttaagaaaacccaaaccaaccataaaattaaatccgattcaatgcttagttaaacaagccttttgataaccctctagtgctactccaccttctcggtgactaccgctgatgacgatgggaactgaaagctaccgacgctctccatcgtttggcggagcttctccaagccactgcagttggcctcgtaggcatccagctgctgcatcgcggtgaaccagcgccgcagacgtgggaactgcgacaggggaaacatgagattgacggtgctcaatgtggtcacgatggataagtcggcgagcgtcagctgaaaccgcggaaacaaaggtgaaattctagacttaattgagccgccacaacgacagggaatcgcaatcagatgagctggtctttttttacctgtggcccggccataaaatcgctattttccaggtaacgctccatgataatatacgcctcggtcagcttgcgttcatgatgtgccacatcgacattggcgaatccctggcggacagtcgccgactgggaaaaataaaaaacaaaatatgtaaacagctagttttagttgcgaatcacccaccataaaatcactgtcacgtcggaacaaaaaggagcactcgaagagcaggaggttcagaaccttcatccgttctgcgtgctcctgcggccacaaactaccgccctcatcgaacttctccgccaggtgaatgagtatagcatgactgtccgtcagcaccagatcaccgtggactagggtgggaacactgtgctggggatttaactaaataaaaatggcaaaatataaaacagaaattataattataaggaattttcgcaaattaaattattcgttttcttaaaataatgattgattcaatttattcattgaataaatttgacttacttaccgctaagaaatctttttggaattgctcgcccttgaagagattcacaaacctgagctccacatctatatcgagcaatttgattagcataaggcaactgcggaccggcggactgcgctcgtcgtaatacaaaatcggcttgggctgagacattaagttaggatcaggtagaaaaacagacaaacgaacgccttgaaagtcgatcagtaactgaattgaaaagcatttgtagccacagtactgattgatggtggcattttaatgtatactacgagataattcatcaattaattgttatattaaaatcaaatatataaacactgttcactttcaccaaaagtacagatctatggaaattgaaattgataagatagataacgaagtcattttaaatttggcgctcatttttcaatttgtgtggtatccctgatgtagtgctggaaaacgacatactataacgcactgttaaccggactgttagactcagctgatcggccacactttctggacaagaagaagcacctgcatttttccccacttaaaccagaaaaacatttaattttcttggttttattactgaaaatcaagttgatttgtgtccagcccgctaaacaatgtacctctcgcgccaattgagactgctgcccagggcgaacatcgcgtgcagcttgagttccagcggagcacattacacaacagcggcgccggcggaagatgcccccattgagattcccaatcggatcgagcgttcgcccaccgatctgctccaggctctggctagcacggtggccagggattacaccgcaccccactacaagtaccacgatgacccgttcctgatacccatgtccaatgcggcgaagcgtacttatgccatgtcaaaggaatcgggacgcaaggctgccaagtggatcaaggaggagcaccgcgagctgtttatggtaagcagctaagtagaaatgtttcatacatactaatcatttcccatttcacagcaccaagaggcacagccggccatcgaaaaattcgcccccagcatggtctataccgaggattcagtggtggacgagacctccctcgcccaactgatttcccagggtgaactcaaagacgctgtgctagtctacaaccttctggaacaaaaaggaaatcc

SEQ ID NO: 9458 - DNA, 699 bp, DROSOPHILA
atgtctcagcccaagccgattttgtattacgacgagcgcagtccgccggtccgcagttgccttatgctaatcaaattgctcgatatagatgtggagctcaggtttgtgaatctcttcaagggcgagcaattccaaaaagatttcttagcgttaaatccccagcacagtgttcccaccctagtccacggtgatctggtgctgacggacagtcatgctatactcattcacctggcggagaagttcgatgagggcggtagtttgtggccgcaggagcacgcagaacggatgaaggttctgaacctcctgctcttcgagtgctcctttttgttccgacgtgacagtgattttatgtcggcgactgtccgccagggattcgccaatgtcgatgtggcacatcatgaacgcaagctgaccgaggcgtatattatcatggagcgttacctggaaaatagcgattttatggccgggccacagctgacgctcgccgacttatccatcgtgaccacattgagcaccgtcaatctcatgtttcccctgtcgcagttcccacgtctgcggcgctggttcaccgcgatgcagcagctggatgcctacgaggccaactgcagtggcttggagaagctccgccaaacgatggagagcgtcggtagctttcagttcccatcgtcatcagcggtagtcaccgagaaggtggagtag

SEQ ID NO: 9459 - protein, 232 aa, DROSOPHILA [sequence omitted]

SEQ ID NO: 9460 - DNA, 3753 bp, DROSOPHILA
cacactcaagtactttttcatatattttttttctacggtttggtaacttttaagagggtgtttgacccataaatgaatttatgccaatttagaacggcaaacacagttgtgggcttggaaaaacttcggttagggggattaagcattgggcgggggcgttggctaaccaattaaagcgagttttttttttgggggttgtttatttatttagtattccctgttgcttttgcaggggcagcataaccggatatatttgtgcaattattttaatggcctaggcaataacacagaaacacacacaaacacacaaatgactagtggctagcccattttttatttgaaatttactttctttgctcgagcttttcttttgcctttggccaaataattttggctttaataattaaaagtattttgggttgcccgctgttttccgagtttctcgtgcgccttggccagcagtcgacttgcaactgagcaagtgaaaaagtcgaaacagctgaaaaagtgcaaggactcccgatcccaaaaccgattcctacagaccagacgaactctgaaccgagtttaaatgtctgtgggggtatttctattcaatggtggccccaaaaactcaatgaaaacggcaagccggctgcaggcgatgcagcgcgcatgtgtcctgtagtaaaacggcggcaaggataatgacctcttcgaggtgcaggtcgcttctgcatgggcgaaaaaaaccgttggtggaaggtaagaatttcttttagattttatattcccttttctacttgatgttctcaaatttttttttttccttattcccaatttgttaaaacctcactttacagcaattttaaaaagtccgcgcaacataacagcgattaggaacactgtcactgtaataatctttgcagtactttttttgcggtagttgtgaatttcgtatcccgtgacttttgttgaataatcgatatcaacgaacagtaatcgatatgtgctctaaacaaacaaacatgtaattaaaattaattaaaatacggacagtttgtttaccccaaaacagatagtttagtgatccaccgaaatgagtgtgttcccaagatatccaaacaccaggctagacctgtagcattaataatattgtggtcttattgtggacttttgcaatgcttagtgcggatcgggattcggtggaggaagaatatggatcgtgctcggcctggaaattccgttgcagcgtggacaggtgcccctacaggacgaacagaccctacaatctggcgcgtcatgaggagtcccacattggtattacgcagtccaagctatacggatgccccgtttgcgtttacaacaccgacaaggcgtcgaacctgaagcggcacgtgtctatcaaacatcctgggtgcaaaaagcgccctccggaagcgcagcacaaggatcgcaatgccaagttgcagtgcctggtgatgggatgcagatacgagacaaatcgtccatacgacctcaagcgccacttgatggtgcacaacaatccggagaagagccacaggacgtttaagtgctccctttgcacctacagctccgaccgaaaggccaatctcaagcggcaccacgagctacgccattcgggcatagaggaggccattcaaactgcggaggaactgcgccaggagatgctgctggagaagcaaatgctgaaggaacataagctaaaatatcagatcacagagaaacaggatttgaagaatctaaagttgaaggaccaaaagcagaaggtgcaaatgctgagggatcagcaaccgaaacaaaggcaaaagaaagaacagttgctggaggaccagagtcctgtgctgaataagcagctggagcacggaaatattcctttaaaagaagccctggtaggcagtatgaaatacgacgaggaaagtttggaatttgtttacgaggaactgcaggaggaggagcagccgcccatcatcaccattagcaacccgcagattctccatggagacatccgggataagcacgtcatcgtaagcattgcaaaatgtagttgttaaattcgctcttcaatcattaacaacatttacaatgtttgcaggctgtcaacgttgatggccagttgcgatggttccagtcaatagatccaccgccgggagctccaacaaaattggagctgcccataaagagcacttcaatttctgtccagcagcaaatggacgaattagacgatgagttggccatgtcccttgccgaagaagatcagcaggatgagtttcttgtgccaatgctgagcggagaggaaccagttaaaataaaacaatcatcgctgaccgatctggcttggagttggagtacgccggatgtaagaaagaactataaacgaaaaaaacgaacttttcctaacaatgtttttatcactaaaggctgtacatcacataagtcccaaagcggaactcaagaaggaccttaaagctggcgatgcagatacagattttccagattggtgggatgatggcaagtacacaaagatgcaaaagaaccaaacatttgcaaagcactcaaagaagccgtcgcaggagaatgtgcaacgcatcctgcgcatcatctatgacatttactacaaacccttcaaggaagatcgcaagcagttcgaggcatttcaaattaaggactcctggctgtgcgcgactcgaatgactcgcatgcagataatcaaggacatgtactctaaacagggcacgttaagtcaaacttgatgataaaaaatgtatcatccctttggtatttgtataagaataccattaagttgtttactatttaaagtgtaaagtaaacgaattaagaaaatcccaagtactttaaaactagttaattaacctttaatttaagcccaaaaacaagtataggagtagtttaaaaaagaaagaatactatagtcgagatccccgactatcatataaccgttactcagctagtgtgaatgcgaacgcgaaatttaatcctctgggatattaataaatattgtataatgtgaaaaaatttaaaaaaaattcaaacgtgtgggcgtgaccggtttggcggctttagggcgttggaatgggcgtggcaaaaagttttttggcaaatcgatagaaatttaagcgactaataaaattatgaaaaatatccaacaattttttttttaaatatgggcgtgtcagttttgtgcggtttgtgggcgtcgcaacatgggttccgctgcgtctttatctctagaatatgtatgctaaatctcaaccttctagcttttaaagtttctgatatctcgtcgttcatacggacagacggacatgactagatcgactcggctattgattctgatcaagaatatatacttatatataaatatatacactttatatagtcggaaacgctttcttctgcatgttacatacttttcaacgaatctagtatacccttttactctacgagtaacgagtatattttaggaattgtgttattcaataaattgtgtgttgaaaatgtctacactacgatcgattattgaagaaaaaataaattcaatgaaaattaaaaacaattagtcaataattatatattattttaaatatgactatttatagtaccggataataatcatatttaaaaaagtgtatttaatattaacagctaaatactgtaatgattttaagctaaatacaaataaaatcagctaaatactgaaatcacaaatttatgtgccttgtgattttcgac

SEQ ID NO: 9461 - DNA, 1624 bp, DROSOPHILA
aacaaacatgtaattaaaattaattaaaatacggacagtttgtttaccccaaaacagatagtttagtgatccaccgaaatgagtgtgttcccaagatatccaaacaccaggctagacctgtagcattaataatattgtggtcttattgtggacttttgcaatgcttagtgcggatcgggattcggtggaggaagaatatggatcgtgctcggcctggaaattccgttgcagcgtggacaggtgcccctacaggacgaacagaccctacaatctggcgcgtcatgaggagtcccacattggtattacgcagtccaagctatacggatgccccgtttgcgtttacaacaccgacaaggcgtcgaacctgaagcggcacgtgtctatcaaacatcctgggtgcaaaaagcgccctccggaagcgcagcacaaggatcgcaatgccaagttgcagtgcctggtgatgggatgcagatacgagacaaatcgtccatacgacctcaagcgccacttgatggtgcacaacaatccggagaagagccacaggacgtttaagtgctccctttgcacctacagctccgaccgaaaggccaatctcaagcggcaccacgagctacgccattcgggcatagaggaggccattcaaactgcggaggaactgcgccaggagatgctgctggagaagcaaatgctgaaggaacataagctaaaatatcagatcacagagaaacaggatttgaagaatctaaagttgaaggaccaaaagcagaaggtgcaaatgctgagggatcagcaaccgaaacaaaggcaaaagaaagaacagttgctggaggaccagagtcctgtgctgaataagcagctggagcacggaaatattcctttaaaagaagccctggtaggcagtatgaaatacgacgaggaaagtttggaatttgtttacgaggaactgcaggaggaggagcagccgcccatcatcaccattagcaacccgcagattctccatggagacatccgggataagcacgtcatcgctgtcaacgttgatggccagttgcgatggttccagtcaatagatccaccgccgggagctccaacaaaattggagctgcccataaagagcacttcaatttctgtccagcagcaaatggacgaattagacgatgagttggccatgtcccttgccgaagaagatcagcaggatgagtttcttgtgccaatgctgagcggagaggaaccagttaaaataaaacaatcatcgctgaccgatctggcttggagttggagtacgccggatgctgtacatcacataagtcccaaagcggaactcaagaaggaccttaaagctggcgatgcagatacagattttccagattggtgggatgatggcaagtacacaaagatgcaaaagaaccaaacatttgcaaagcactcaaagaagccgtcgcaggagaatgtgcaacgcatcctgcgcatcatctatgacatttactacaaacccttcaaggaagatcgcaagcagttcgaggcatttcaaattaaggactcctggctgtgcgcgactcgaatgactcgcatgcagataatcaaggacatgtactctaaacagggcacgttaagtcaaacttga

SEQ ID NO: 9462 - protein, 487 aa, DROSOPHILA
MLSADRDSVEEEYGSCSAWKFRCSVDRCPYRTNRPYNLARHEESHIGITQSKLYGCPVCVYNTDKASNLKRHVSIKHPGCKKRPPEAQHKDRNAKLQCLVMGCRYETNRPYDLKRHLMVHNNPEKSHRTFKCSLCTYSSDRKANLKRHHELRHSGIEEAIQTAEELRQEMLLEKQMLKEHKLKYQITEKQDLKNLKLKDQKQKVQMLRDQQPKQRQKKEQLLEDQSPVLNKQLEHGNIPLKEALVGSMKYDEESLEFVYEELQEEEQPPIITISNPQILHGDIRDKHVIAVNVDGQLRWFQSIDPPPGAPTKLELPIKSTSISVQQQMDELDDELAMSLAEEDQQDEFLVPMLSGEEPVKIKQSSLTDLAWSWSTPDAVHHISPKAELKKDLKAGDADTDFPDWWDDGKYTKMQKNQTFAKHSKKPSQENVQRILRIIYDIYYKPFKEDRKQFEAFQIKDSWLCATRMTRMQIIKDMYSKQGTLSQT

SEQ ID NO: 9463 - DNA, 2990 bp, DROSOPHILA
gaggtgagtgggtgtgtaaaatatgcaaggatgcaacttcaacggcgctcagcgtgaaatttttgtacaaactgcagcactgcgtggatgcggatgtggatgccacttgacgatggcaaaggcgagcgcgacttgcagaaaacaaaagttatgagaactcgacgggagtgtgtgtatacggaggttgtacagatggagggcttgggaggtttgatggcttgcgttgttagtgggtggtgggtggttggtgcagcgcatgcagtgcagtatgcaccacccatggcgtttgattatgcgcgccattagcggtgtaagttgcggcaatgagttttgtggctctggctgcggctgcctcgatgtccccggcataacttcacatagatgctggcagtaactgtcgtcgcaaatgtcgccagcttcgccgttgccgttgtcgttgccgctatgcatgtaagtgtctttttatgcaaaatgcacccacacaaacaaccgtgaatggggggaggggggactgtacggaagctaacactgcgcgaaaaagaggcatctaaaaaaggcatctaggtgataattctctagcttttaggaaaattccatagtctgctagagtaggtaatctgattgattctaatgggaatgataaatagttactgctagaaattggtataaaaataaatgtactaacactttatgcccatgccatattttccattctagaaactagttcatgcgaaatttcccttgtgaagtcaatttttagcttgcaccagtcatttgccccagtgcaattgtctgcagccccacgtacatatggcacagcccccacattccccacccagttcctcgcctctagagactggcgcgcgttttgcatcattaaatgcgctgattgagtgtctaagtgttcactgaatgtgcattttaagtgcagcccgctcgacgacgagatgtagcagcagaaagaagaggaggacggcaggacgcaaaggacgaactgcgtctaggtccgcgcctttgtctggcagcttaccgcgttccgggatggcaagtactggagcatcgagccgtagagatagccaaaaacgagtccaatcccgatgccaatgggaccctgcagcacttgctgggtaagcgaagctggaaatggaagtggaagcgaagtgggggtttatttaactctggctgggattgtgatttcgattcccggtcacgacgggtggcacgcactcgttgagaatattacgctgattatcacgccaaacatgaagatggctaccacatcgttgcatgtggtcatggcatagatgagcgtatgaatgccgctgttcaggccgagtcgatcctccttcaacttcagcatcacggtgacgaccacattcggtgaaacggcggtgatgacaaggctgtaagataaccccaagttctcagtacccattatggcattcgataatccacgtattccattagctcattaacttaccccaaagcaatgccccacagccagggcatggagagtgtaagattggccagtccggcgatggctgccacctccacaattgtgggcagcagggttaaccggagtatcatgaaccacagccgcttgaaggcatctccatccagcccgaggccagccagcaacatgatgttgatcagggccatttcccttcgcaggtggaaacaagctcacattaaatgtaacacggatttaaatgaaatcttacctgaggaacagctcaaacttctgatagccctcgaaattggccaggcccaggttggcataaagtacgccaaagaaaagcatgcccagcatgtcgggcagatggacaaaggtgaccaggatgccggagatctgggcgcccacaaagaggaatgcaatgcgcatgatgacggtcggtggttgggagtactccggcagcagaacccagcccatggcccaaaggcccaggaaaatggccagtagggccaccagctcggaagtgttcacccaatgcgaacggatatatagccacctgcaggaagttcaagaaaagagttaaaccaacggccacaaaggtttcgagtgtactgaggtagttcttcccttaaaaaacgtatcatgtattcctttcttcaactatgtacacataattgccgctaattatcgagcccacttagagctataaaagcggacggcccagggaaaatagagtcaggacaaaatggataaacacaaggatcgcattgaatccatgcgcctaattcttcaggtcatgcaactatttggcctctggccgtggtccttgaaatcggaagaggagtggactttcaccggttttgtaaagcgcaactatcgcttcctgctccatctgcccattaccttcacctttattggactcatgtggctggaggccttcatctcgagcaatctggagcaggctggccaggttctgtacatgtccatcaccgagatggctttggtggtgaaaatcctgagcatttggcactatcgcaccgaagcttggcggctgatgtacgaactccaacatgctccggactaccaactccacaaccaggaggaggtagacttttggcgccgggagcaacgattcttcaagtggttcttctacatctacattctgattagcttgggcgtggtatatagtggctgcactggagtactttttctggagggctacgaactgccctttgcctactacgtgcccttcgaatggcagaacgagagaaggtactggttcgcctatggttacgatatggcgggcatgacgctgacctgcatctcaaacattaccctggacaccctgggttgctatttcctgttccatatctctcttttgtaccgactgcttggtctgcgattgagggaaacgaagaatatgaagaatgataccatttttggccagcagttgcgtgccatcttcattatgcatcagaggattagaaggtatagtatctctcgcaaatacattccttctcttgcttatatattgttc

SEQ ID NO: 9464 - DNA, 758 bp, DROSOPHILA
cattgggtgaacacttccgagctggtggccctactggccattttcctgggcctttgggccatgggctgggttctgctgccggagtactcccaaccaccgaccgtcatcatgcgcattgcattcctctttgtgggcgcccagatctccggcatcctggtcacctttgtccatctgcccgacatgctgggcatgcttttctttggcgtactttatgccaacctgggcctggccaatttcgagggctatcagaagtttgagctgttcctcagggaaatggccctgatcaacatcatgttgctggctggcctcgggctggatggagatgccttcaagcggctgtggttcatgatactccggttaaccctgctgcccacaattgtggaggtggcagccatcgccggactggccaatcttacactctccatgccctggctgtggggcattgctttgggcatcaccgccgtttcaccgaatgtggtcgtcaccgtgatgctgaagttgaaggaggatcgactcggcctgaacagcggcattcatacgctcatctatgccatgaccacatgcaacgatgtggtagccatcttcatgtttggcgtgataatcagcgtaatattctcaacgcttcgcttacccagcaagtgctgcagggtcccattggcatcgggattggactcgtttttggctatctctacggctcgatgctccagtacttgccatcccggaacgcggtaagctgccagacaaaggcgcggacctag

SEQ ID NO: 9465 - protein, 223 aa, DROSOPHILA
MGWVLLPEYSQPPTVIMRIAFLFVGAQISGILVTFVHLPDMLGMLFFGVLYANLGLANFEGYQKFELFLREMALINIMLLAGLGLDGDAFKRLWFMILRLTLLPTIVEVAAIAGLANLTLSMPWLWGIALGITAVSPNVVVTVMLKLKEDRLGLNSGIHTLIYAMTTCNDVVAIFMFGVIISVIFSTLRLPSKCCRVPLASGLDSFLAISTARCSSTCHPGTR

SEQ ID NO: 9466 - DNA, 3288 bp, DROSOPHILA
gccatcgaaagcctcaccttgaccagcaggcgcaggtacacatcctgggatttgggctcggttctgcgaaccttgcgatcgtacttgtggttgatatcaataccctgcaaacgaaacacacgtattagaactggtgtttatgatcggaaaaacaattggtcggcattcgagcgtatgtttactacatatccatggaaccgatcagttaaactgcttatttcatggtattttagcttcacaaactagatgccgcccacacaaatttgtttttatttcattccgtcgccaggaagcttcgcaatgcacgtgggctgagccacagttggcgttttaggttatttgtcagtttcctgctggaatcattgccgcacttttatcggtaacccaccatttcttctgttgaatgtattaatcaacgctaaaatagagaattggacattaatttaagctaaaaacgtggagcatcaatttcttgcacgtacctcgccggaaacgaaagccaaaagaaagaaaatagtgtggctgcaccgatcacaagcaagacgctaaaatatccaattgtgctgttatgataacagcgtgctgttaaggcgcaagcttcatttattttctaagcgatatcctaagtttataaacaaaatttctagcattaataatactgtgggtaaaacttccaaacctctaaatcaaattaaaacaaaattatatgtgaaagctcttatttgcttgatatacaagtgtggcaacgccgctaataacatcattagtatgaccataggatttttttttaatattaggggggtacaacaaaatattaatagtatctgattttttacatggcatttttgtaaattgaatttctaataagcaagttaatgcaagaaggttcggaaatcaagcgaccctttttttttattaaaactgatgccaattctgaataataactattcagcggtgtgtatttttgcattgcctcgtcgggtcacactagaatcttcagtttcgggtttgtgtgcagtagaaagcttcaaatatctatgtctgatccaggaagcgccggctacaacataaccaaggatccggccctggcaaagagtcgaatcttcttgggcaacctgccggtttgcacgcgcgaggagctggtgagcatttgccagccatatggcaaagtgctcggttcgatggtccagaagaactacggattcgtgcagtttgaaacggaggagctggccaataaagccgcctccgccctgcacaagtccacttttaagcaaaacatgctcaccgtacgcaacgccagcattaaatcgaaggcggccaatgctatcgccaaaagaaattcaaatcaaggaggccaggtgacagttcagggtggacttgtgatgtcagcggcggcagcggcagcaggtcaacccctcatcaatgattgcgagatcatagtccaaaatcgcgagaatacgtaagttatgatccccaataccttataactccagacgatactcatggctttcattacctgcagcaaatacgcagaatacattgaggagcggctaaagaattccagtctgcgcgtggatgtactctttcccaacgaggacgtcttgctaggcaaggtcctggccaacatctcttcgcgcggctgcttgtatgcggtattggtcacgccgcagcacgaggaacacaacagcatcacagtaaacattttgtatggcgtacccgctgagcatcgcaacatgccgctggaggacgccatcaccctgatctccaccgattttaggctcaaaaaacagcgcgacgctgtcgtcttaccgccgtcaacatccatacacaagggacagcgacgacatccccaggaaatgcaggggctgctggaaaggctggcagacaatcatccattgaccgcgtcgcagtacgaggtgattcttaagtacctcgaaggcgaacgcgaggagcaactgaagcgagaggtgggcgaggccaatgctctggccaagctaaaagctcccgatccagagatcgagctgcagaagaagattcttagcatcatgaacaagccggcagtaaccgatgtcaccagcgagctcatgtatcccactttcgaggcagtcaaggaggacagaaggctaatggagctacttgctgacgatcgagtgttggcggccctggaaagtgtttacaactcggatctcagacagattttagccgagtatttatagactaccaatacttagtagtattcattaattttagccattaagcatatttaacatttaataaatgtaatacctaatatatatgacgtaaatctcgggcttccagaatgcatttaataagtgtaagacattaacaactaacaattggctgtttctaaggccaggatcgcttggcttcgtgtccctcgtactttccacggtacttgagaccggtgactagggtggagctcttggggaaagccgttttgccgtcgaatttggtatctgtctcgggatggaatcgcacgtactcgtactggatgtgcaaattctccggcagctcgatgcgcttcagtgcatcaaacggcacggtggtgtccacagctgtttggtagaaagcgataacatcgctgacggtgcgcagttcatgtacctgggagttgggcactccgtgctgcagctcctggaagcacgcgttcaggaattcgaatttctcggagagattccccaactggtcggatttcagttgaagcgaggcggctacggttcgaatacgttcggcggcatctgcaggtggggagtacggcttatggggacgcaagaagctacaatcaggagaatatttacttggtttttatgtaaataaattaaagaaagtgcttaccccttggcggcgatggactcgccgacagctgaaatggtgctggttttgacgggctttgcttttgcggccttggcggcggaggcaaaactcctatgcaggcttcccgcaagctaaattcatggtggcattggattttaagtgaacatttttattattttttacttacaattagggttttacgtaaaatcgctgccattggatgtgaccagattgaaaacaatgcggcatggcagtcaatactgaaaatatattcactatacttacaggtaaggagatggtaacacaaaaatactgcattgagcgttgccaggtggactcactgtttacccactgttaaatttataaacaaacttaaaaaaaatgaaaacattatgagtattgagttatttttagtcgaagatctatctcataatagtctttcttgaaacaaat

SEQ ID NO: 9467 - DNA, 1225 bp, DROSOPHILA
tttcgggtttgtgtgcagtagaaagcttcaaatatctatgtctgatccaggaagcgccggctacaacataaccaaggatccggccctggcaaagagtcgaatcttcttgggcaacctgccggtttgcacgcgcgaggagctggtgagcatttgccagccatatggcaaagtgctcggttcgatggtccagaagaactacggattcgtgcagtttgaaacggaggagctggccaataaagccgcctccgccctgcacaagtccacttttaagcaaaacatgctcaccgtacgcaacgccagcattaaatcgaaggcggccaatgctatcgccaaaagaaattcaaatcaaggaggccaggtgacagttcagggtggacttgtgatgtcagcggcggcagcggcagcaggtcaacccctcatcaatgattgcgagatcatagtccaaaatcgcgagaataccaaatacgcagaatacattgaggagcggctaaagaattccagtctgcgcgtggatgtactctttcccaacgaggacgtcttgctaggcaaggtcctggccaacatctcttcgcgcggctgcttgtatgcggtattggtcacgccgcagcacgaggaacacaacagcatcacagtaaacattttgtatggcgtacccgctgagcatcgcaacatgccgctggaggacgccatcaccctgatctccaccgattttaggctcaaaaaacagcgcgacgctgtcgtcttaccgccgtcaacatccatacacaagggacagcgacgacatccccaggaaatgcaggggctgctggaaaggctggcagacaatcatccattgaccgcgtcgcagtacgaggtgattcttaagtacctcgaaggcgaacgcgaggagcaactgaagcgagaggtgggcgaggccaatgctctggccaagctaaaagctcccgatccagagatcgagctgcagaagaagattcttagcatcatgaacaagccggcagtaaccgatgtcaccagcgagctcatgtatcccactttcgaggcagtcaaggaggacagaaggctaatggagctacttgctgacgatcgagtgttggcggccctggaaagtgtttacaactcggatctcagacagattttagccgagtatttatagactaccaatacttagtagtattcattaattttagccattaagcatatttaacatttaataaatgtaatacct

SEQ ID NO: 9468 - protein, 371 aa, DROSOPHILA
MSDPGSAGYNITKDPALAKSRIFLGNLPVCTREELVSICQPYGKVLGSMVQKNYGFVQFETEELANKAASALHKSTFKQNMLTVRNASIKSKAANAIAKRNSNQGGQVTVQGGLVMSAAAAAAGQPLINDCEIIVQNRENTKYAEYIEERLKNSSLRVDVLFPNEDVLLGKVLANISSRGCLYAVLVTPQHEEHNSITVNILYGVPAEHRNMPLEDAITLISTDFRLKKQRDAVVLPPSTSIHKGQRRHPQEMQGLLERLADNHPLTASQYEVILKYLEGEREEQLKREVGEANALAKLKAPDPEIELQKKILSIMNKPAVTDVTSELMYPTFEAVKEDRRLMELLADDRVLAALESVYNSDLRQILAEYL

SEQ ID NO: 9469 - DNA, 6229 bp, DROSOPHILA
cccagcgaaccacccagcaccccagccacccaccgaacaatgacgctttgaggcaaaggccaagcacattctctttactctatttccgtgcccttttctttgtgccggcgaattcgggtggctaaaaagggcggccaacaacaactaaaattcatagcaacatataaaacattttccacaacaatttctccttgggacccgggggcgtgtgcccggctgaagttgtagttgttgctgttggaaaacccgccctaaaccttttcactggccgctgcttttattacaaaatattttaacatttttcgcaagtgttttaagtcggcttttgtgtctacaatgaagtggcatttgagctgccaaagctaggcaaaaacagccgctaaagaagtggcccaacattagcctcttacttctggccaaaaaccgcttcggctctcttcagtgaaaggggcgaactggagtgggtttggccagttcttttgtggtgtgattaaatggcatttaaaatgtaactttagattactctaaatacatattttcggcagcagttgaaagttgagaggcacttcaattaccaaagtgtaccactcaaagggatgaccctaagttgggtgcctctgagtaaggcattatgtattttagggaatcaaaagccagttgaaataaatataaatggacatagaagaggacctcatcgttttgaagtacatgatcaacaaataatttgttaacttgatggatattgtaaattcattcctaaagcatttctcactgtctttacattgcgaagttctaaagccatttacctgttttaaatcccaaacccaaagtcctcgcatttgcagtcatcaataaatcccgccaaactcctaagcaaagaataaataagacccgccagtccatcggcaactacttaatattaataagctctaagtcccctccccttggccaatgccaatcccggccaatatgcaaagtaagccccagttcgtgacaagttatgcaatcggtgtgccctcttattttcgcaggattcgacggcggaatgcggcagtggttcctcatggaaatcttcgatcagcacagtggtcagcttcaggccaacattagtgccaagtttgcggccctgagtgtcacgggtctggatgcaggtcgtctcttccggatctatgtgtatgccgtcaatggacgaggacgcagcgatgccattgccctcgatggatacactttgaaggcggccgaaaagcaaaccggttagtaaaaaacccttacattttaaaggttatatttttaaggcattaacactgcggaaaaaatgttctactatcctacgcttagattcatgcaaaggtcctctaaattaaacatctaaaaatgttatataatttaacgccattataaaaagttagttctttttctgagtgacttttgttttttatgatatttttatgctaatatggagaattactctcatttcttcgccaaacgaagcgaactgcataactttatgcggcgaaaagccgctgtatcagtttcgcagcaaagattgtcctgggttttatgattattatgccacctcgaaatttaattacgctaaactgctcaatgaattgtaaattcagcgacacaaaactttcgcctgcagttttcggccagtaaacgcaaatttttatgcagccctgcctcccacaaagaagcgcaaaaaaaaatctgaaatgattagcattaatgaattggggttggaagaatgcggatggcgagtttattttattgagggtaaggggtctaaacgaaaaaggaaattgtaatgctaattagccaaaggaagagctgacaagaattttattttcattttggtacatttcccttttggggaaagcaaaggaatggaagtcgaatagcaagcagggcatctagaagggacagtcacatcttgtgtaaacaacttgagccgacatttcaatttttcataaagtcagtcggagcagcggcacggtgggcggtggggaaaagtgcaaagcaaacacagcaaacggcagacgggaaaaccagaaaaacggcagagatggaaatcagaaaagaaaattatcttggctgggtcaaagcgtagatgctctgagtaaaggttaagcctgattatgatcagcatttatagaggattcattcagtcaacggaatgatttgaatctcgtctagaaacatggaatgaaataaaatactattgtagcattattaaactcttaccaatacttcaatcggatttacctttgcagttgccttgacctcctacaagggcagtgcccagagtccggacaactttgagctgacaccgatcctgtcgattggcatcttcgttggcatcctggtggccatcgtgtgcatcggaatcggaacaattgccgcactgaagttgcgctcgcacaagcatcagcagcaacagaaattcgtacatcccaatgcgaaattctcacgtccgggcaatttgcaaattaaggacaaaatctcattgccattgagtcactccgaggagatgtacgacgagaagaatcccgatgttgtgccctacaatgagggtaagttaccggttccagaaacactttgcttagatccccatcctttcggtttgccctcaagataaatggcgtctgctcaggcttctgttcacaatttatggccgctggcttgggggcttccccttatgcaaatgcatttgacaggccgtccagggctcatgcaggcaaaacaaacaggacgcaaagtcctgaggatctggagagagctggctgcatttttgtgccagtgctgaaatatttaaatgacagctaattgctgtcaggtcctcgccggttagcttgtttgctcgtgtgtctgtagtcgagggccttaaagaccctgttaaatggggaaaatggggagcagtagcagtagcagcagtagaaccagaaggagcaccagcaatttcactcactgcacgtgctcgcttgattaatggcaatcaagaaatcaagcggcagccaaagcagaaggagctccaccagcacagcacaacaatttaatcaattttccaaacgtaaagcaatttcatggccaaaataaaaataagaaaagaaaaaaaaaagtaaactatgggcaaagccaaggaagctggcggtgggcaaaatggggcagggtgaaaacttgctgccgaaaatcaccaaaagatttgagggcgtcggccggggcagaaacttttgccttgctcctgctacttaacaacaaagcattgaaacgaaaacgacgtcgtcggccagctcaaaactttcccgaactaactaagcgttctccattctgatccgttccatgacgttctctcaatcacccaaccccaaccgaaccgaaccgaaccccacccggaatttccatccagttgatggcgaatataaacaaaaatcagcaacacaaacgccatcgggacatctctcgacgaccagcgaggtggaaatcagctgcaagccaggctcaacatccggcaccggaatcgtccaggccaattcggcggacagtggcacctatcagagcagcaaggtgagtcgccggcagtcggccaaacttttggccaccgaaaagttttaattacagtcgaactactctatgatgaactccccctcgaaatgccgacagcagcattgccatggcaaatgctttgatttgatgtcgcaaatttcttgcgaaaatcctaatgctcttgaaaacaatttgggccagattagaaaataaacttgtgattttagccccgcccggaaaacagttggcaatgaggctttttagcttacttcaaggtgaaggttgcttacttaaggagttatcctacttgtattcctgtatttcttggaatgccaaattgttttcttttttggttaataaattgaaaattaagttacttgtagttaccttgacaaatgcctcggttttatgggacttatttcttataacttttgcaaaactcctttctcagaaagaaatttaatttaagcagttaactaaaatatttgttgactgccgttatgaaagctagacgttttttttttttttggtaaatataaattaaatattacttttgttcaaaatttgatatttctgagaatctacttgtgcttatttgctaaaatcccagcaggaaaagtgatggtattacttaaaaatatgtttttcagaatgttaaaatcaagataaaatttaaagctttagaagtattcgagttcatcaagcaaattgttctctagtggaatctcgactgttcccagaaaatttttccgttctctggcggtttattaaatgcctggtccattttcttttctgcaggacgatgagctgcactacgcggagctgtcgctgaccaacatgccatctggcagcagtggcgcctccaagaagggtcagcccatgggcggggtgggggtggtgcagcacgtggtgcagcagcagcagcagcagcagcaggggcaggttcagcatccccaccagctgctgggtggcaccttgccacacggctccagtatgcggaagctgctgcccaccattccggcgacggcgacgctgcagcgccataagccaaatgcgggcggaatgcagcatccgcaccagcacgctccgccgcccacgtacgactacgattactttgaggagccaacgatatatgcgcaaatcgatgcgtacaagacgatgcaggtggacacaggagtagttgtggcaggtgttggtgccggagcaggatcgggtgtcaacggtgcgggggcaagcatttcatcgccggggtcgcatggcactccctcgacggtgtcgcctggaaccgtgcaaatgtacaccctgccccagcatcccggtggctaccacacactgccgcacaatcatcacgcacagcagcagatggcgggcggtccgcagaactccgcttcgatgatgcaaatgatgcagcagcagcagcagcagcaacagcaaatgcaccaccatcctgcgtccaatatgccgccctcctaccagcaacaccagcagcaacagcagcagcagcaaatggcccatggccagatgctggtatcgagcaacagcagcggattggcctccaccacggcggccgtggccagtcccagtagctcattatcgggactctcgggcgtgggcaagtcctattcgcgcgaaatagtcaccgttcgcaccccgctcatgtactcgcagcaggagagctgcgtctaaggtctccctggcatcatctcgtggatttttccatattcatacgcccagccccgaatacccgaaatttcccaatttagctagttatgtaagtcttgagctcttcgtggttggtgtctaggctaagtgttgccaaaacgaattgaagtgaattgcattgcgttctgaagaattgaagggattcgtttgtgtgctcgtcgaggaactgaatatattttaatacaaagctcatacaaaggctgccacaaatcttctgcaccgagcattacattcctataatatgaaaaaatcggttatcttatcaatgtgcaaccattaagcccaaatttataattcgggaattgaattattgagttatgcatatttaattttatatatatatgcggctgctgcggcagtaacatatcatgagattataatttaggtgtacatacgaacgaaaaatgtttaattaatgcgtcataaaaatataacgattatataaaacacccaagctggcagagatttggcacagattgctacttttttgaatgcagacagagaaatggtggtatttaatttttatatatatactttcaaacaatttaaagaaaagtgtaatgcagcagaagaagattgttccttccttacagtaagtactcagatggacgacacacagcctacgccatattttttcatcagattactacacactaacgagaagtatatattaatttcgaagggtactttgtaaatgtttgtaaatgtcagctgaaggagctgcaatttttaggaattgggctcaatgaacgcatacaactagaataaatttagtaagtatatcctccttgacataataataatagacttaatgctcacactaactcaaccgatgatgggcgagcaatgcgaaagcgcaccttcttggcaattatattgaaaattaattacattattcaaatatatggtaaacaatataaataaaacgaacactcacaccccaacagacactcatacacaaaca

SEQ ID NO: 9470 - DNA, 1599 bp, DROSOPHILA
atgcaatcggtgtgccctcttattttcgcaggattcgacggcggaatgcggcagtggttcctcatggaaatcttcgatcagcacagtggtcagcttcaggccaacattagtgccaagtttgcggccctgagtgtcacgggtctggatgcaggtcgtctcttccggatctatgtgtatgccgtcaatggacgaggacgcagcgatgccattgccctcgatggatacactttgaaggcggccgaaaagcaaaccgttgccttgacctcctacaagggcagtgcccagagtccggacaactttgagctgacaccgatcctgtcgattggcatcttcgttggcatcctggtggccatcgtgtgcatcggaatcggaacaattgccgcactgaagttgcgctcgcacaagcatcagcagcaacagaaattcgtacatcccaatgcgaaattctcacgtccgggcaatttgcaaattaaggacaaaatctcattgccattgagtcactccgaggagatgtacgacgagaagaatcccgatgttgtgccctacaatgaggttgatggcgaatataaacaaaaatcagcaacacaaacgccatcgggacatctctcgacgaccagcgaggtggaaatcagctgcaagccaggctcaacatccggcaccggaatcgtccaggccaattcggcggacagtggcacctatcagagcagcaaggacgatgagctgcactacgcggagctgtcgctgaccaacatgccatctggcagcagtggcgcctccaagaagggtcagcccatgggcggggtgggggtggtgcagcacgtggtgcagcagcagcagcagcagcagcaggggcaggttcagcatccccaccagctgctgggtggcaccttgccacacggctccagtatgcggaagctgctgcccaccattccggcgacggcgacgctgcagcgccataagccaaatgcgggcggaatgcagcatccgcaccagcacgctccgccgcccacgtacgactacgattactttgaggagccaacgatatatgcgcaaatcgatgcgtacaagacgatgcaggtggacacaggagtagttgtggcaggtgttggtgccggagcaggatcgggtgtcaacggtgcgggggcaagcatttcatcgccggggtcgcatggcactccctcgacggtgtcgcctggaaccgtgcaaatgtacaccctgccccagcatcccggtggctaccacacactgccgcacaatcatcacgcacagcagcagatggcgggcggtccgcagaactccgcttcgatgatgcaaatgatgcagcagcagcagcagcagcaacagcaaatgcaccaccatcctgcgtccaatatgccgccctcctaccagcaacaccagcagcaacagcagcagcagcaaatggcccatggccagatgctggtatcgagcaacagcagcggattggcctccaccacggcggccgtggccagtcccagtagctcattatcgggactctcgggcgtgggcaagtcctattcgcgcgaaatagtcaccgttcgcaccccgctcatgtactcgcagcaggagagctgcgtctaa

SEQ ID NO: 9471 - protein, 532 aa, DROSOPHILA
MQSVCPLIFAGFDGGMRQWFLMEIFDQHSGQLQANISAKFAALSVTGLDAGRLFRIYVYAVNGRGRSDAIALDGYTLKAAEKQTVALTSYKGSAQSPDNFELTPILSIGIFVGILVAIVCIGIGTIAALKLRSHKHQQQQKFVHPNAKFSRPGNLQIKDKISLPLSHSEEMYDEKNPDVVPYNEVDGEYKQKSATQTPSGHLSTTSEVEISCKPGSTSGTGIVQANSADSGTYQSSKDDELHYAELSLTNMPSGSSGASKKGQPMGGVGVVQHVVQQQQQQQQGQVQHPHQLLGGTLPHGSSMRKLLPTIPATATLQRHKPNAGGMQHPHQHAPPPTYDYDYFEEPTIYAQIDAYKTMQVDTGVVVAGVGAGAGSGVNGAGASISSPGSHGTPSTVSPGTVQMYTLPQHPGGYHTLPHNHHAQQQMAGGPQNSASMMQMMQQQQQQQQQMHHHPASNMPPSYQQHQQQQQQQQMAHGQMLVSSNSSGLASTTAAVASPSSSLSGLSGVGKSYSREIVTVRTPLMYSQQESCV

SEQ ID NO: 9472 - DNA, 10194 bp, DROSOPHILA
cgtgcgttttctgcagcggtaaaagaggaaatcgggagggggaaagagagatatttgcgtactttagcattcatcatcattattcttccgttgcggttgcattttaaacttttaggcgcagcttaacgtgtcggtcgacttgacagttgcaaattgcaagcacatctgctggcggtcaaaagctagctgctacgcacgcaatagtcgttacgacgaagctttcgttaccctctattgggttcaaagttaatcacctaatagttttcccaaagtagcgttactaaaggaaaaagagagagcttaagataatgaaatgacagtaagctttaacattgagcgacataatcgttaggatggagctttcgttactaactactttgatcaaagctaataaactaatattgaagccaaagtagcctttacttaatgaaatatgaagatggtttaaattagcattctaaaatgaaataaaataaatacagtgtagataaggctctataatatacattttagaatgtgtttactaaaagtatgataacgaaaaaaaaacattgtttaagatttttatattgcgtttatagatgtaaaaattaatttgggttacataggtgaagagttcatctctcatccaattctcaagcaatcataaatgcaaaattcattttaaaacaaagtgtagtgactgaaattgttcaactaaaagttcaatgtcaagcagattgctagtttcaaaattaataaacatatgcctacgtatttatacatcactaccatgactgggagtcattctccatatggccggattataaatagaataccgcatatagtttttgacccttgctcttcactgattgccttctgaaaatgttaaggcgccattttagtgaaccaattgtacttattattaaatttataataaatattcaaaacaaatgaattccggttatgagacatatgaaataacccgcataatatattgcttaaaaagaaaaaaaaaacatttttcgattgatgtatatgtatttgtatatttaaatttaattggagttttaattattgtttaaattaactaagcttaaacacttaaataaacgcgcgagcgtaatgtaatgtaatgtaatgcattcatcggcaaagaacttgtaacctcgtataatcgaatcgcattttccgtatttcgaattaaaatcactcaaaaactgtgcttcacttttgattaacccaatcgaatccaatccaattcgatccaaaccgaacgaatccatctcgctagctcgcccttacgtgatatattatagagtaatataataaacaacgagagagagagagacacacaggacacgacatctatagctagtaattgtaataaaatagacgggaggccaacggagacatagagatcaataaccaccagcatgtcgtaccaccgtcacaactcgtaggtgatgttattcatgtggtcgcgcgtcttgcgcgccttgaagggggccgcaaagtgctcgtaggcattctccgcattgtacgacgaacagcgtcttagtcgatgatgttgcagcgagctgctgtacggagcattcccgtgcccggctcccccggccccaaagcagcgcatggcggcgcacagaagactgcaccagcgccacgacgaggtgaaggcgtagaagtgacgactagcaccgccgccaccaccattaccacctttcgatagcaaatgctggcgactgtgatgcaagtagggattgtaattcgagcggaaactgctgctatcgctgctgtggccgctgtcgtcgctgctgctatcactccgccgcaatccaagtcgaaacagattgccattgttgtgggccgcattggcgaaatcctcaaagtccaaatgcgactcgtactcgaagtcgcgatctatggaaacggcgggtgtgatgatcataaattgactatacttttggctgcgattcgcctgctgctgctgctgatgatgatgattctgtggctgtcgatggttgcgctgctggttggccagcgagttgagcagcgtctggttggtgtccaccgaggagtagctattgctgttcgacaccggcgacatgtcattgttgttattattcacatttccgctgctcgtattattgttgttattgctgtgcgcaaaaacgccagcgggcgaaggttgggtggtggtcacagcagcggcggttgcaacaaccgggtggtgctggggctgatagggctgatactgcaactgcagcgatggtttggcatgtttcggccgcctcttggcaactggagctgaggtctgctgttgtggcggtggcaacggcagtggtgccttctgctgttgttgtggttgcggctgctgctgctgttgctgctgcggttgttgttgcgtttgcggctggtgcagcgcgggcgacgtggttgtgggcgtggacccgacagagggcatccatcatcttgtatcctccgttccactactgctgtcatcgggcttgacgatttggtaggttatcaagtactccggataagactgcaaaaccataacatacttgtagcattactgaactcgcaaagattgtatggaatttacctgttcgccccgatagacaacgtattcggcgaaatgcaagccacccgccgagggtctgcccaccaccgagtggtgtcccggcggtgcatgggccatcttcattgcactgtattgcaagaaggatttgcctaacgccactcggcacagcagcaattgtctgcaaattttggaagaaagggttgaatgagtcggaagatcttcccaaaatgattatcaaatccttacctaggacacacgtagcaggacttatccttgtgcgagggacagccaatgccgccgccaattccgtacacatactggttgcttttcgagctatgctcggcgaaataaatgccagccccaaacatgccgccaatgtaggcgtggcgctcgtcgaatccgcgttgcacaattgcgttgatgaagggactaccgtggaagagcatacgctcgttggactgcaggaaattctcctcggcgatctcttgccgtcgatgagcataacgctcccacagctttcgattttgtaccttttgcacctgtttttatgacaaacaaatattttagattggaattcggtttaccattttggtaaagacttacccgaatgatgttatatcgagtgaaataacctccagcctgtccattatcacgatgttcacgaatcgtggcctgcatctcctcctcgacggccacaaactccttatcgtccggcagcaagtccaccaacaatgtgcatagattcacgttgttaccaatgccttgggtgaaatgaaatgatttttcatataactaacttataaatgttttcatatattcacctgtggtggacctcagctgggcgattcccttgagtatcttgtggcggaagccgtaggcggagacgcccacctgcttgagatcgtcgtggcccatctcggctagaatgtccaaggtgatttgttcgcgctcgaacagttcgattagatgatgcagctgctggctgcttaggaatccggacacatttgttatggtatccgcatccggcagtagatcatccgaagaggagccctcagccccattggcctctgctccttgggcgggactgatgcgcgtgctactggacagtggaagtggaacaggaacactcagaatcatggaggcaccggtgggcagcaacaccgtttccgtggtgggcgataggattgcggatgaggacgatgaagatgtgcccggagccgcagcagcagttgcatctggtgccggggaactgcttgtcagcgattgcgtggaagcactcaacgcctgttgactcaacgaggtggccatcgcgtcctggagcaagcacttaacatcatctgccgtggccaactcaatgggcgtctgcccctcctggtttttcatataggcatcggcaccgtgggccaacaagagcgagcacaattgagtgcgccccttctgtgcagcctcgtggagcggtgtgaatccccatttatctgtcgcattgacaaccgtcttgtgcttaattagcagtgccgcaatatccaaatgcccatagctgctggcattgtgcagaggtattagtccccccttgtcctgtgcattaacatcggctccattctccagaaggtactcggcacactcaaagttgttatatccggcggccaggtgaagtggtgtggaattcctgccctgcgcgtcccggcaattaatggattccggtgtaaccaatcgctgtacccgtgccaagtttcctttctttgctgcgtctagcagagcggacggtcctctcagcagctctgcaacatcgtgatcagattccttaaccaaatccgctggtgtcgcgccatcccgattcttcttcattggatcagcgccatgtttcaagagcagcttgcaaatatcatactttcccttggcggcagcttcatgaagaggagtaaacttccacaaatccgatacatttacattggctccgtgcttgaccagcagttcggttacctcatagtgcccataagagcaggcattgtgcaggggcaccagtccgcccttgtcagccgcataaacctcggcgccgtgttccaaaagaaactgaaccactggcactctattaaacccagcagcaaagtgcaaaggtgtggaatgtcgtccgtccaaatcccggcaattgaccgaaatcggattgttgagcactatacggcgcacagtgtccagatctcccgccttggctgcctccagtaaatgtgtctcactgtccggaggattcttgagcagcttcagcacgctgtccgaggccaattgagcggccgtaagtccctcaagggaaacgatattcgtgtccgctgcgtacgagagcagcagtcgcaccgcttgctcatcacgggcgcaccgatgcagtggcgtttgtccaagactgtccaatgcattaaccttggcgccctgctttagcagcacctccatggcatcgtagtgaagcagctcggcagccaaatgcaggggcgtgaggaaagccttgtttttctcgttcagcaaggatccctttctggtcagcagttccatcagctgcttgcgcttcccatccggactgacaacggccaggtggagcggagtgtctcctgtatatggatgcacgaagttaacaatctctgcgcataccagcttcttggcacgggacacatcacactttcgacaggcgtccagcaggcagtgacccttgtattcaactgaaaagtaatatgaatgacgttagagctaagatatttaaaacgcagacagcttataactcacaggcaatccgctctctcagctccctggtgggcgccgcatcgatggccgacttgctgtggcagtttaggagggtgggatccgctccacgactgagcagcaggctgcagacctcgacgcgacttttggaggcggcctcgtggagcggcgtaaaggcccacagatcgttggcgttgacattggcgcccgcctggataagcagcttggtcacatcgaagtgtccgtaggagcaggcattgtgcagcggcaccagaccgcccttgtccttagcatgtacatccgctccgttggccagcagaatttccacgatgccgatccgattgtagcccgctgccagatggagcggcgttgagcgtcgtccatcgctggcatgacagttgacattgagtggcgtgagtagggccagcaggcgatcctcggcccccgagcgtgcggcttcaagcagctcatcctttcgatattcgccggtcaatacgggacgcgtcgcctcgtccgccagctccagtggtgtcttctgctccgagttgcggatcgtatggtttgcgccatgctgcaacagagccaggcacacatccaccttgcccttgctggccgcctcgtgcaatggcgtgtagttccagttgtcggtggtgtttggactggcacctgccttcagcaacaatcgaactacctcggcgtggccaaaggagcaacagttgtgcagcgggtgcagcccaccctcgtcacacgcctgtatggaggcgccgctgttcagcaggaattcaaccacttcccggcgtccataacctggtaaaataaaaacgaataggttattagatgaatgtcatgtattggtcgatgggaaagccctacaaatgagcgagaaggtcttgccttcggggatttcaaccttgtccatggcatacgaaaagaaagatatgttttccgcatttgcagaactgttgcccaaggaaatctcaaaaaagtttacattagcttatgttcagttgaaagtaaaccttacaattaaatgataaataatcaaaataagtcgcataataatcaatataaacggatgacagttgtgatgatccaaccgagcccccgatttataaacatacttttggcaacttttgcattgtcaatgccagaaatctgagtcatcttaatagggtaccgtaattggtcacaccagagatgatcaacataaaataaatgtttatgatcgtacttattgctacgtttataatgaactgcaaagagaaccggatcgaattacaaatctgggcaaacaaaagcttgagccacccaccaaaaagtggtttgcgaaacgtttgtgccgttcacttttctgtgggcaaacaattacgaaagttttgcattaaaaattaatagaatggaaaacttaattccaactgttgcacttggagcgtcaaagcgccaattgctcgccacttggaagtgtgatccttgggactgtgaacaatatatgaataaaaactgagatatatgtatgcaatttcaacttgatttgcaactaccaccccgaaggttaatttgcacaactttttggccagcgataaacgtatgttttaagtatctcgaatatggccaagatatggaggggaaggtctctccgggtttatcgactatatttactatatatatgtacacacacacacataaatgccatgataacgggccaatgtcagaaaatctgatagtcgcaaagaagcgaagtaaagcgattgcgttttactatgtgtcacgattgcgggaaaggaaggaggaaacgtgagctccgttttggtttccaccgcaacaggtattgtaaaacttcgagtggccaaaaatgtcatacattcaacgaggtgaaaagcagccgcaataaaatatatataacttaaacgccacccgacaataacagacccctcgaagatctcactttttgtgcacagaacgtgacaaaaagacagacgaacataataatggaaaaccagtttatagaaagaaagaaagacccaccgccagataataaaaagtgctcaaaacttaaaaaaaaaaagaagtcacaaatggccaaaaggcgaaattgatatgcaaggggcgtcgagtgaaacggttagaaaagcttgatggcatttttggggtattgttcgaaaggggtgaatgtggatgggggatggggaagggaaagacgtttctttccacttttgattcgatgctgccgactgactaaataaatcgcaatgcataaaatgctaactaggccaaagtcacaacaaaagacgcgaaaatattgagccaaagacgtcagcaggatggcgcatacaacgcagcagccacaacaagtcgccccactgcccactgccccgcccaccgcccactatcactgtcacccccacaaaaacagacacaatagcagtcgaaataatagttaaaaaacatgcatgcttgtattacgaaggattaatcatttgatcactcacagttgaaaaatgtaaataaaataaatatgttagcacgagttattttgtttacccaatctaatatttaaaggccaagcatctaactaaaccctgcgaaacaggttagctatacaatcagaccatatgttgcagacctttatctatgggattctacgtgtaaacaaacaaagctaatcagatgatatatgtgtgttaaacattcaatttccagtgctgagacagtgaaagctctcattgaaatggctaattatgcagtgctattatctcgaccgcagctgtatgagtcttttttgaaaatagaaaatgcttaaatgcagcacgcacgcacacatgcagcggcaaaaggggcagcacgggggattccccttttgagagggggtcttccggaaacaagccaaacatatagaacacatagaacggtggtggaaggagaagcagaagcagaagaggaggcagagccaaaagcagaagcgacatggaaactaggtcaactctcgacgccattggagcaggcgagtgtccgaccgagagcgacgacaatgacgcccgtcacacccaggcgcaactagctcaaggccaaatccgcactgcagcggggggtttgggcgagtccttcaacctttcgttgggcgaatggtggggtgggctgccgtttttagaccgtccttggaagggatttggatgggatctaaccgcatcgcatctcacttacccgctgcgaaatgcaatggtgtggatttgcgtcccgccgtatccctggcgttcacggtctgaggcgttattagcttcttcaccttggcgatctcgcccgttttgcaggcctcgaagagctccctcagcggatcgttggccatgaccgcatcgagattaacgctcaaaatggcccgacttcggctgctgttggccattgttgtgcttgtttgctacgctttggcacacacacgccccgaaaaaaataggcaacaaaaaacaagcgcaatattcagtgggctttcgggttttccactcccagtccagttctctcctccagcagttgctctgcccgtcctacacaagcctcgccgttgtccgtcgctggcttgcccgcatcctgtatccaggtgtcctgcctatgccgcaggagcaacaatttgccactggctgccacgcgaccagccctcgtttttgcttaatatttaatgcacaattgcagacccaaaatcaataggatttctttggttcgacacagcacggttgcaaggatcgcggttggctacgattcgtttttactgagactgcgaccaactctgggactagctccctggtacttggcctccaaagctctgggcacggacgattatttccggattaattcactgctccgcgaaatattgcattgttttgtgaccgagtaagagtgaccgttcgcggggtggtcgaatattccaggttgagtcaagcggtgtgaccaggcgacggggcaagccattctgaaaaaatactgaagtcctcgaatcacataagcttttccattaattatattttttaaatttaatagcttatgttctcacaaggttttacacaaatttgtgcttcagtgtgcactcactatttggtgaaaagcgaaaagacgtttgcatctatattgtgttataagaaacaattttttttgttaaccaaatagacaatattcaattggtggtacaaaaattaagatcatcatttttatgagcttaaattagaattcttaaattagaaaaggccatgtaggaatttcaattatcctaatataagcacataagcctattactagggaaaaaatctcaaaaaaattttttaaaataatagcaagtacctgttacaacaacatgcaatcccaattggcattgctatcgatagcttgaaaaacacctgtttggccatccctggttggctgttggtgcaatcgatttttggcatcgactggatgcccatgccaacaacaatgtttgcttttaaaatttagattaaatccgttaaaaatccgtgaaatcaaaacaaaagcagtggagctgcttcacaacaagattatcgtgcttactagaaagtgaagaaccacggagttaccgcgccggaagtacaaaagtaatcaccaaatcggaaatccgaaaagtgaatcagaatttttctagctcacacacacacgcgcgcatacccgcacgcccagcaaacactcatgcaagcgtatggaaccagtcgtgttgttgttgttgctgtgaataagtgcaagtgaagaagaagcagaaactgtgatcggaaaattaagcaaaaaagaaaaacaggcgaggaaaagtggggttggggaaaagcagacggaaaagtggaaaggcggagtgcagctaacacgcttcgctggctgcgcgacagcagaacgccagtcaa

SEQ ID NO: 9473 - DNA, 5484 bp, DROSOPHILA
tcactcttactcggtcacaaaacaatgcaatatttcgcggagcagtgaattaatccggaaataatcgtccgtgcccagagctttggaggccaagtaccagggagctagtcccagagttggtcgcagtctcagtaaaaacgaatcgtagccaaccgcgatccttgcaaccgtgctgtgtcgaaccaaagaaatcctattgattttgggtctgcaattgtgcattaaatattaagcaaaaacgagggctggtcgcgtggcagccagtggcaaattgttgctcctgcggcataggcaggacacctggatacaggatgcgggcaagccagcgacggacaacggcgaggcttgtgtaggacgggcagagcaactgctggaggagagaactggactgggagtggaaaacccgaaagcccactgaatattgcgcttgttttttgttgcctatttttttcggggcgtgtgtgtgccaaagcgtagcaaacaagcacaacaatggccaacagcagccgaagtcgggccattttgagcgttaatctcgatgcggtcatggccaacgatccgctgagggagctcttcgaggcctgcaaaacgggcgagatcgccaaggtgaagaagctaataacgcctcagaccgtgaacgccagggatacggcgggacgcaaatccacaccattgcatttcgcagcgggttatggacgccgggaagtggttgaattcctgctgaacagcggcgcctccatacaggcgtgtgacgagggtgggctgcacccgctgcacaactgttgctcctttggccacgccgaggtagttcgattgttgctgaaggcaggtgccagtccaaacaccaccgacaactggaactacacgccattgcacgaggcggccagcaagggcaaggtggatgtgtgcctggctctgttgcagcatggcgcaaaccatacgatccgcaactcggagcagaagacaccactggagctggcggacgaggcgacgcgtcccgtattgaccggcgaatatcgaaaggatgagctgcttgaagccgcacgctcgggggccgaggatcgcctgctggccctactcacgccactcaatgtcaactgtcatgccagcgatggacgacgctcaacgccgctccatctggcagcgggctacaatcggatcggcatcgtggaaattctgctggccaacggagcggatgtacatgctaaggacaagggcggtctggtgccgctgcacaatgcctgctcctacggacacttcgatgtgaccaagctgcttatccaggcgggcgccaatgtcaacgccaacgatctgtgggcctttacgccgctccacgaggccgcctccaaaagtcgcgtcgaggtctgcagcctgctgctcagtcgtggagcggatcccaccctcctaaactgccacagcaagtcggccatcgatgcggcgcccaccagggagctgagagagcggattgcctttgaatacaagggtcactgcctgctggacgcctgtcgaaagtgtgatgtgtcccgtgccaagaagctggtatgcgcagagattgttaacttcgtgcatccatatacaggagacactccgctccacctggccgttgtcagtccggatgggaagcgcaagcagctgatggaactgctgaccagaaagggatccttgctgaacgagaaaaacaaggctttcctcacgcccctgcatttggctgccgagctgcttcactacgatgccatggaggtgctgctaaagcagggcgccaaggttaatgcattggacagtcttggacaaacgccactgcatcggtgcgcccgtgatgagcaagcggtgcgactgctgctctcgtacgcagcggacacgaatatcgtttcccttgagggacttacggccgctcaattggcctcggacagcgtgctgaagctgctcaagaatcctccggacagtgagacacatttactggaggcagccaaggcgggagatctggacactgtgcgccgtatagtgctcaacaatccgatttcggtcaattgccgggatttggacggacgacattccacacctttgcactttgctgctgggtttaatagagtgccagtggttcagtttcttttggaacacggcgccgaggtttatgcggctgacaagggcggactggtgcccctgcacaatgcctgctcttatgggcactatgaggtaaccgaactgctggtcaagcacggagccaatgtaaatgtatcggatttgtggaagtttactcctcttcatgaagctgccgccaagggaaagtatgatatttgcaagctgctcttgaaacatggcgctgatccaatgaagaagaatcgggatggcgcgacaccagcggatttggttaaggaatctgatcacgatgttgcagagctgctgagaggaccgtccgctctgctagacgcagcaaagaaaggaaacttggcacgggtacagcgattggttacaccggaatccattaattgccgggacgcgcagggcaggaattccacaccacttcacctggccgccggatataacaactttgagtgtgccgagtaccttctggagaatggagccgatgttaatgcacaggacaaggggggactaatacctctgcacaatgccagcagctatgggcatttggatattgcggcactgctaattaagcacaagacggttgtcaatgcgacagataaatggggattcacaccgctccacgaggctgcacagaaggggcgcactcaattgtgctcgctcttgttggcccacggtgccgatgcctatatgaaaaaccaggaggggcagacgcccattgagttggccacggcagatgatgttaagtgcttgctccaggacgcgatggccacctcgttgagtcaacaggcgttgagtgcttccacgcaatcgctgacaagcagttccccggcaccagatgcaactgctgctgcggctccgggcacatcttcatcgtcctcatccgcaatcctatcgcccaccacggaaacggtgttgctgcccaccggtgcctccatgattctgagtgttcctgttccacttccactgtccagtagcacgcgcatcagtcccgcccaaggagcagaggccaatggggctgagggctcctcttcggatgatctactgccggatgcggataccataacaaatgtgtccggattcctaagcagccagcagctgcatcatctaatcgaactgttcgagcgcgaacaaatcaccttggacattctagccgagatgggccacgacgatctcaagcaggtgggcgtctccgcctacggcttccgccacaagatactcaagggaatcgcccagctgaggtccaccacaggcattggtaacaacgtgaatctatgcacattgttggtggacttgctgccggacgataaggagtttgtggccgtcgaggaggagatgcaggccacgattcgtgaacatcgtgataatggacaggctggaggttatttcactcgatataacatcattcgggtgcaaaaggtacaaaatcgaaagctgtgggagcgttatgctcatcgacggcaagagatcgccgaggagaatttcctgcagtccaacgagcgtatgctcttccacggtagtcccttcatcaacgcaattgtgcaacgcggattcgacgagcgccacgcctacattggcggcatgtttggggctggcatttatttcgccgagcatagctcgaaaagcaaccagtatgtgtacggaattggcggcggcattggctgtccctcgcacaaggataagtcctgctacgtgtgtcctagacaattgctgctgtgccgagtggcgttaggcaaatccttcttgcaatacagtgcaatgaagatggcccatgcaccgccgggacaccactcggtggtgggcagaccctcggcgggtggcttgcatttcgccgaatacgttgtctatcggggcgaacagtcttatccggagtacttgataacctaccaaatcgtcaagcccgatgacagcagtagtggaacggaggatacaagatgatggatgccctctgtcgggtccacgcccacaaccacgtcgcccgcgctgcaccagccgcaaacgcaacaacaaccgcagcagcaacagcagcagcagccgcaaccacaacaacagcagaaggcaccactgccgttgccaccgccacaacagcagacctcagctccagttgccaagaggcggccgaaacatgccaaaccatcgctgcagttgcagtatcagccctatcagccccagcaccacccggttgttgcaaccgccgctgctgtgaccaccacccaaccttcgcccgctggcgtttttgcgcacagcaataacaacaataatacgagcagcggaaatgtgaataataacaacaatgacatgtcgccggtgtcgaacagcaatagctactcctcggtggacaccaaccagacgctgctcaactcgctggccaaccagcagcgcaaccatcgacagccacagaatcatcatcatcagcagcagcagcaggcgaatcgcagccaaaagtatagtcaatttatgatcatcacacccgccgtttccatagatcgcgacttcgagtacgagtcgcatttggactttgaggatttcgccaatgcggcccacaacaatggcaatctgtttcgacttggattgcggcggagtgatagcagcagcgacgacagcggccacagcagcgatagcagcagtttccgctcgaattacaatccctacttgcatcacagtcgccagcatttgctatcgaaaggtggtaatggtggtggcggcggtgctagtcgtcacttctacgccttcacctcgtcgtggcgctggtgcagtcttctgtgcgccgccatgcgctgctttggggccgggggagccgggcacgggaatgctccgtacagcagctcgctgcaacatcatcgactaagacgctgttcgtcgtacaatgcggagaatgcctacgagcactttgcggcccccttcaaggcgcgcaagacgcgcgaccacatgaataacatcacctacgagttgtgacggtggtacgacatgctggtggttattgatctctatgtctccgttggcctcccgtctattttattacaattactagctatagatgtcgtgtcctgtgtgtctctctctctctcgttgtttattatattactctataatatatcacgtaagggcgagctagcgagatggattcgttcggtttggatcgaattggattggattcgattgggttaatcaaaagtgaagcacagtttttgagtgattttaattcgaaatacggaaaatgcgattcgattatacgaggttacaagttctttgccgatgaatgcattacattacattacattacgctcgcgcgtttatttaagtgtttaagcttagttaatttaaacaataattaaaactccaattaaatttaaatatacaaatacatatacatcaatcgaaaaa

SEQ ID NO: 9474 - protein, 1181 aa, DROSOPHILA [sequence omitted]

SEQ ID NO: 9475 - DNA, 3063 bp, DROSOPHILA
atatcccccacattttcagtgtcaagtttgttatttatttgcctgcttttatttattccatccatatatatatgttgaagaaaacaacaaaaccaaggggaaataccgtttggttgttctcattaatatttctagcaaccaattgttggaaattttcaaaattctaaatataccgattcggaaattggcacgctttattcttaatcatcctttctgagcactatttgagtctaaaatattgtacacacgacctgagtacacttcaattagccaaaacgaatgaggaaaatatttcatttgcagactgcgtcatttaaaactaataacaaatccatgctgaatatattctgcgttctaagacatattttttcaatagatctaacatacaattaatacaaaatatttccagattcttccattcctgctctttgctttcagcataataagccaacagagatcaattccacccactgacaaactataataaatcgagaaattagaaaagtgccagctgaaggcgtgaaatattcgcgagagatgtctggtttttttcatttttggcaccagcatagttgcacctgcaatacataatgttgtgtgtgttctttcgtgggaacaatttcacgcctcggacaggtgagtttgggggaaattcctttcgctacatataaaatatatgtaaaagtcagtgtcgagatgcccatcttgataataactctgcccaacgctgatgttctgacctcgacacgcttcgatggaatgtttcacacatcgcacacactcaacagagtgtgtttatgtttgctttataacgttgatacgatgatgcatatatagtatatatatatattcagctatatggctataggtatgaaattcatttttagaacgcaccataggcagataaataaagtctgtacacccacacaaacaacagcagcaagaacgtagagagctcaaggttatagaggtgatcggaaagtggaaaactgggttctttgaattactttattgtactcataaatagattaacttaggcgtatacttaatataaggcgacaagcctttgcgttgcttttatgtgttgttttgtgtgagtgtgtgttcattggtgttgagttttgctttggtgaggaatatcattgtgttcttcatgtttttcatcatacaaaatatatatgggtgtgttcacttagcataagtgtagaaaagggtgtggacatcctggccatcctttggcgcttacttgccgagcaggatcttgcggccagcgccgaggttctggccagcctgggtggctcccttgttggaaccggcctgcagacccacaatggtctggccagccttcagctgctcttcggtgaaatcgcgcttgcactcatcggcgggcttggggcccaggaagggacccttgaagtcggcatgcttgtaggtctgcaatgagccgcaattcaaggattagcctggctgacaatgggatagaaggcgatttgaaacttacggcacggcccaaagcgaagatggtgttggtaacgttggcaatatccttcttctcgtacagatcgacggtctggaagacatcgatgtcgggcacaccgtactccttcagggccttctggaagttgttgatgttctccatgaacttgaactggccgcccgaggagttgaccttgggcacggcattgggcgacagcacgttgatcagtttgcacagcacctgaccgtccttgagcacatcctcgtaggactggccggcggggaacttctcggcaatgatggcctcgatccactcctgggcctccttgtccatctcgggattgcgcttgctggcaatctaggtggatcggataagaaaaaattcatattttaggcacaatatttcacaaaactgtttggtaatttcacatttctttcatctattttcctttatatctatgttttcttaaggatcttttttcttcactgattgagtattcaccttggcacgaacggcacgctcaagagacatgtttgattcttggtttttggtttcgggtcctgcgggatcttcactaaagctctgacaagctaacactgatgccagccaacggggcgtatgcggcttttaaagcgcgagagagcgttctccgacgaattcgttcaagaattttccaaaaatatatccgaattcggagtcgagtgtgtgaaaattttgcagcgtgggcgttctatatattcgaaacgccgactttgcccgtctcccgcgtatgaatcgtgcgttataattttagatcatcatcggttgagaaaaaggaaaaatccaaatgcttcattattttcacacatttccaatcgatggtatgtgtgtgtgtgtgtgtgtgcgagtgtgtgtagattgtgctcttcaaagtactgctcatttgcatgttagccgcattttttcggacttgctgtcctgctgtcattttgaactcatttcgggcgcgtgcattcgttgcccgtaatttccatcggcatgcattgggtcataattaaaaatggcagcaaattggttcccatcgagcgacacatcctccagaatttacagcgaaatttatgatgacatggacatcctcacaattattcacagttatcagatcagatcagcgacatggcaatttcttgttaaaaggactttctgcataaaaagtttacaaaaatgacatgtacttattaatttttactgaaaatgtttttcaaattggatttaattggtatttcaaatatatttgataatcaaatcttccaaagacacgtccttcagaatttacagagatttacaaaatgtgaggagcatcctttgcaatattcacaatttagaacatgccaattagtttattaagagaatattcgaaataatttcatcatactactatcatactaatgttttaaatttttataaatattattgaaatattcatacaatgtatttataatctgataatggatataaataatgtctccaggaaaagacggagcaatttgcaagctttaaaaagtaaaaaggacagcgattactttatgagcgggaaattaacttgaatt

SEQ ID NO: 9476 - DNA, 852 bp, DROSOPHILA
tcagagctttagtgaagatcccgcaggacccgaaaccaaaaaccaagaatcaaacatgtctcttgagcgtgccgttcgtgccaagattgccagcaagcgcaatcccgagatggacaaggaggcccaggagtggatcgaggccatcattgccgagaagttccccgccggccagtcctacgaggatgtgctcaaggacggtcaggtgctgtgcaaactgatcaacgtgctgtcgcccaatgccgtgcccaaggtcaactcctcgggcggccagttcaagttcatggagaacatcaacaacttccagaaggccctgaaggagtacggtgtgcccgacatcgatgtcttccagaccgtcgatctgtacgagaagaaggatattgccaacgttaccaacaccatcttcgctttgggccgtgccacctacaagcatgccgacttcaagggtcccttcctgggccccaagcccgccgatgagtgcaagcgcgatttcaccgaagagcagctgaaggctggccagaccattgtgggtctgcaggccggttccaacaagggagccacccaggctggccagaacctcggcgctggccgcaagatcctgctcggcaagtaagcgccaaaggatggccaggatgtccacacccttttctacacttatgctaagtgaacacacccatatatattttgtatgatgaaaaacatgaagaacacaatgatattcctcaccaaagcaaaactcaacaccaatgaacacacactcacacaaaacaacacataaaagcaacgcaaaggcttgtcgccttatattaagtatacgcctaagttaatctatttatgagtacaataaagtaattc

SEQ ID NO: 9477 - protein, 184 aa, DROSOPHILA
MSLERAVRAKIASKRNPEMDKEAQEWIEAIIAEKFPAGQSYEDVLKDGQVLCKLINVLSPNAVPKVNSSGGQFKFMENINNFQKALKEYGVPDIDVFQTVDLYEKKDIANVTNTIFALGRATYKHADFKGPFLGPKPADECKRDFTEEQLKAGQTIVGLQAGSNKGATQAGQNLGAGRKILLGK

SEQ ID NO: 9478 - DNA, 3095 bp, DROSOPHILA
atatgacaattctatcccaactatgtgttgtgtcatgctcgtattaaagaactatacaaatattagaaatgaattacatttattggtattgggctttgcgcaaacattcattactcctaaatgaacgcctaaattggaatttacatcctagtaagtcctggtgaatatgttaactcgaccttcgagtgtgagctgatatgaatttggtgttggcatttggtgccgggtgccctgacatgctcgcaaaaatgcaatatgcaacagcccgtacgcgagtttgtatctgcagattgtccgaaatggttacaattcccagggaaataaccaaattccattatacagatacaaatcaaattggcaaaaggcattgaaagggatcaaacgagggtcggttggaggagaggtaggtagggataaaatgcaaaaatcaaattaccaggacttgagaaatcgcagacatcagagagccataaatcagtagggaagacgaagggaaaggaatcgtacttatataagaaattgttaccgctagttaacggtttattgatgcgtcgcttttggctgaatttattggcctggtcgttggtctttcgcttccgcacgcaaatggaaaatggccaaaaccgaaatggaggaaaatcgtgcaaagcgttgaattgatttggctcttagccggcttcttaagctgtcaaatgctgtgctctaaaaaatacttggacgccaaatgtgcggagaaatcaaaaatggaaaataattcttcacaggattcaaggtaaaaactaaattttcacgctttgataaactataaagtatgtatctatgtaagttaataaaagaattttttaagagtatactagtaatttcattttaaaaactagaacgctcttctttcccattcataagcatttagactaaataagtaacaaatttcggaaaaagtttccgaatttccttccccttgatttcccgatcatcctaaattttgataacagccaatgccatggataatggggaggagaccatgttgcatctgcccagctatgctgatcgctatacggacattccccggcttatccgattgaagttcattgcccaggtctgtccggagctaagtgttcttgccctcgagttggccctcaatcatgtgaagaccacctacaatgtcaagttgtacgacgaactctacaaaacactgtgcgttgaggtggacaggaagtaccccaaccagtccaaggggaacgaagaacttcataccactggtggaagcgagccaagtacgtcgagtggcagggggagagttgtggttccctatgattcctactgggtggaggacaacattatggaggccactctgatgcttcaggaactagacgccgaactgaacttcaagaaatcgaattcgggcagctcctatgtgcgacgcattctagaggagatcggggatcaccacgagaagagtggaaacttgcagatggcggtcaagttttatgctcgagccaggccctactgtaccagcagcgagaatgtcatcaatatgttccggaatctgattagggtatcaatttatatggaaaattggtggcatgtcctcacctacattgacgaggccaagcagtatgcctatggctttgaaaatctggcccaggaggttccagcacgtctaagctgcgtcgccggtttggctcatttgggcctaaagatatacaagtctgctgcccaatatttcctgagtactccgtatgggcgttacgactacgataaaatcgtggcacccgaagatgttactttatatgctggcctttgcgctctagccactttcgatcgggaaaccttacagctgaacgctatcaactcggaagcatttaagccattctttcagctttcgccaaaaatgtggaccatattggccaaattctacgcgggggaattcgatgcctgtatgaccctgttgcgcgaaatcgaaaatcatgttaggctggatgtttatttgtctccccatgttagtgcgctttacgatttgataatggccagaatgctgaagaaaaggaacagggaagttatgacggaatctgtgaaaaagcggaaatcaagataagggctaaaaaaaaagacatcaaaacatagtatttatttgaatttcggggaccctattgacataaagaccctgttctcttatacagtaaataaagcccaacctgaaagtctaattttataaatatattttccgttggatactgccagctactttaagcttgcattaaaaacatctaacttaaaggatgtttttttatgtcgtcttgtcacattttgacgaatgctccacaactttccaagtgaaagctccagcttttgcaacaatataggcacagtaataacaacaaaatatataattaaatttttcgtgtgctcagcagaacgaacgagcggacttggaatctgacaaagaggacaaaataaggggaaaggactacgaatatagtgggtggtatccagcgaaaggtagtgagcgagcaggagttggtgaaatcatgaaatattgcatagctgaagtgatttttatgaactcttcaaaagtagctcagtgaaaggcgaatagacagtggaagaacttgggctgtttgttcaacataaaggttcccggcacgctaacgagcttaaagatgttgcacaaagtgcgcactgaaattgcatccataatggcgcccaacggaggcggtatgatataatgctcagtaagggctcccttcgccattttccatttcgggataaaggcgattttcatcgaaagctgcgcccaagtctggaaaactctgttaagtgggcaaaggtcaagagcagatcagttcagttagggctccacacaaataagccaattttctatttaagatagatcttactccgtaaggtactctttcaaatagtaatttaattggatttgtttagagaaatttttaaacgtgccttaattcattcaattcaattcattttatttatcaatctaactaaagtcaaatggattatggaaaggttaagttttacatggagtaagcgctcgtgggatcctctttggtttccgttaacttacaacattttct

SEQ ID NO: 9479 - DNA, 1095 bp, DROSOPHILA
atggataatggggaggagaccatgttgcatctgcccagctatgctgatcgctatacggacattccccggcttatccgattgaagttcattgcccaggtctgtccggagctaagtgttcttgccctcgagttggccctcaatcatgtgaagaccacctacaatgtcaagttgtacgacgaactctacaaaacactgtgcgttgaggtggacaggaagtaccccaaccagtccaaggggaacgaagaacttcataccactggtggaagcgagccaagtacgtcgagtggcagggggagagttgtggttccctatgattcctactgggtggaggacaacattatggaggccactctgatgcttcaggaactagacgccgaactgaacttcaagaaatcgaattcgggcagctcctatgtgcgacgcattctagaggagatcggggatcaccacgagaagagtggaaacttgcagatggcggtcaagttttatgctcgagccaggccctactgtaccagcagcgagaatgtcatcaatatgttccggaatctgattagggtatcaatttatatggaaaattggtggcatgtcctcacctacattgacgaggccaagcagtatgcctatggctttgaaaatctggcccaggaggttccagcacgtctaagctgcgtcgccggtttggctcatttgggcctaaagatatacaagtctgctgcccaatatttcctgagtactccgtatgggcgttacgactacgataaaatcgtggcacccgaagatgttactttatatgctggcctttgcgctctagccactttcgatcgggaaaccttacagctgaacgctatcaactcggaagcatttaagccattctttcagctttcgccaaaaatgtggaccatattggccaaattctacgcgggggaattcgatgcctgtatgaccctgttgcgcgaaatcgaaaatcatgttaggctggatgtttatttgtctccccatgttagtgcgctttacgatttgataatggccagaatgctgaagaaaaggaacagggaagttatgacggaatctgtgaaaaagcggaaatcaagataa

SEQ ID NO: 9480 - protein, 364 aa, DROSOPHILA
MDNGEETMLHLPSYADRYTDIPRLIRLKFIAQVCPELSVLALELALNHVKTTYNVKLYDELYKTLCVEVDRKYPNQSKGNEELHTTGGSEPSTSSGRGRVVVPYDSYWVEDNIMEATLMLQELDAELNFKKSNSGSSYVRRILEEIGDHHEKSGNLQMAVKFYARARPYCTSSENVINMFRNLIRVSIYMENWWHVLTYIDEAKQYAYGFENLAQEVPARLSCVAGLAHLGLKIYKSAAQYFLSTPYGRYDYDKIVAPEDVTLYAGLCALATFDRETLQLNAINSEAFKPFFQLSPKMWTILAKFYAGEFDACMTLLREIENHVRLDVYLSPHVSALYDLIMARMLKKRNREVMTESVKKRKSR

SEQ ID NO: 9481 - DNA, 3494 bp, DROSOPHILA
ttgcatctcgaattgagattttcgagtggtgctgtagtcacacggcgtgcacgtggtcaggatgtcttccgtgtatcgtgttttctccgcatccgcgggcgctggctcctctactctttttatgcgttttaccgccggttccgccctctcggcctcgtccatcagcttctcgcactcctcctgctccttcattatgtggcgcctcgactccttgtgccggtcgaagcaataccgtttggcggtcttgtagccgcagacgttgcacgagaacagtgacgattccacctcagactcggagtcagagcaggactccagcagcatgtgcttttgcgaccgcctgtggcgcctcaagtctcttctccggtccgtggagtaagtgcagccgtttatgttgcaagtcagtcgctttatcttcaccgccttgacttgctcctcctttctgggcgcttgttttaggtgcaagtctgtaaaaagcgaaatcaatcgtagttcagccggcatttaggtattcattggtactcacattccatttcgtcctcgtagatgaaatctagagcctctatcgtcagtgtttccgttctctggcatgtctgcgacatatttccctcgtttggtctgcgttcttttaataataactaaacaaatcaacaattatttgatggtaccaacattatttagcttgaaaatgtagaatgcacgcgagaatttacgaatttgggaatttagtatttttcaggcggcatgttggatcttatttccgtgcaccttaggaattatgtttatttcattttaaaagtacccatcagtgttttcgtatgagtgaaaagttagtaatttttaattttaattttaaattagtaacaagacgacttgttaaattcgggacaagagtcaccctgtgatgaaccacttgttacatgcagatgcagccggtgacctcctctggtcacactgtccatttttaattttttgtaatagtagagttttttttataacattttatccgtcttttatgcaatatatttaattattattagtaagaggcaatcccacacaaacatgcaatcagtactcacccgctcgttatgcattggtaagacaaactgatgtgtggactttgagccccagccatttaaatgttttctataagcaagatcctaaaccagatattgatattcagcccgcagatctttaaatgctcgtcaaattgcctcattgtcggcgctttcggagacgcaccagatgctgcagaagtcctgccgggactttgccaacaatgagctcagtggaaacgcagccaagttcgatcgggagcacctgtatccagagaaacagatccgccagatgggcgaactgggcgtgatggcagtagcgattcccgaggagctgggtaattaatattacgcccacctcagccctccttatagtatctcattgtatctctttattgttaatcaggcggcactggactggattatgtggcctacgccattgccatggaggaaatctcaaggggctgtgcctctgctggcgtcatcatgtcggtgaacaactccctgtatctgggaccgcttctctctttcggaaacgatgcccagaagaaggactacatcacaccgtttaccaccggcgaacgagtgggctgcttcgcgctctctgaacctggaaacggatccgatgctggagctgcttccaccatagcaaccgacaagggagatcacttcgtgctgaatggcaccaaggcctggatcacaaatgccttcgaggcggaggcagccattgtgttcgccaccaccaacaagcagctgaagcacaagggcatctccgcattcattgtgcccaaggctaccaagggcttctcgctgggcaaaaaggaggataagctgggcatccggggatcttcgacgtgccagctaattttcgaggactgcgtggtgcccaaggagaacatgctgggcgagccgggtttcggtttcaagattgccatgcagacgctggacgccggccgcataggaatcgctggccaggcgctgggcattggtcaggctgccctcgaattggccgtggactacgcccagaagcgacaggccttcggcaagcccattgccaagctccagtccatccagcaaaagatcgcggacatgtcgttggccatggagtcggcacgtctgctcacctggcgcgccgcctggctgaaggaccaaaagcagccctacaccaaagaagctgcaatggccaagctggctgcctcggaggcggccaccttgtgctcccaccagtgtatccagatcctgggcggaatgggctacgtgaccgacatggcggccgagcgtcattacagggacgcccgcatcactgagatctacgagggcacctccgaaatccagcgactggtgatcgcgggctccattctaaaggaatatgctagttaagatcaaagttatatatccgtactacttgtgtctcgtttaataaagaacgtttttaatatactattttgctagttctattgagttgtataattgtttataatagatagaaatacatgaaaaaaacacctacaacattttaattctttagaaaaagttagcaaaacaataaatcttcgttcaaaaagtaaagtaaaataagtgaaactcttgactactttttagacgttgcatatttgtaaattaattaaaataatgaaccttaagtgcttttaaaatatatttataaacaaagcttattattttatatgcctaattatattatatcttttaaaccaaattttaaatgactcaaaaaaatgggaacttggcgccaaaactgcagcaaggctttgtcggttagcatatttgtgtggtatttttgtgacttcattcggtatattgctggtagctgtgcagcggtcacacagcaaaagcaaaaagtttctttatttatttgataattattcgttacgcggtaattaacgcgatgcaagtgcagcaggaacgtggtaatgagagtttttgccactgagctgcgcgtgtcggccgtccagaaagtgcagaaatcgcgtgaagtgcgcgaaatccgtccaagagcagaaaagtgccaagaatagctgcgatggaaacagcgatggatgtggtgtgtgtaatggatacggcggtgggcgaccatctggaggaccgccagtgtgcgctggaggagatcaagcaggcagtgcagtcggcgggcgccaactttcagcgggttcaggtgcgccagcttggttatacaatggcatatgggtgatttgacttacatcccccccacttggcatccttgcagttcgagcgcctggacttcggcgagacgaatgtgctggagacgttttacaacgccgatgtggccattatcgacctgagcattctcacccagcagcggccgctttcctatcactacggcgttagggagagcttcgggatgaaggagaacatcctcacctacaacgacatcgattccaagcagacgctcagtctcaaggt

SEQ ID NO: 9482 - DNA, 1339 bp, DROSOPHILA
tatccgtcttttatgcaatatatttaattattattagtaagaggcaatcccacacaaacatgcaatcagtactcacccgctcgttatgcattgcccgcagatctttaaatgctcgtcaaattgcctcattgtcggcgctttcggagacgcaccagatgctgcagaagtcctgccgggactttgccaacaatgagctcagtggaaacgcagccaagttcgatcgggagcacctgtatccagagaaacagatccgccagatgggcgaactgggcgtgatggcagtagcgattcccgaggagctgggcggcactggactggattatgtggcctacgccattgccatggaggaaatctcaaggggctgtgcctctgctggcgtcatcatgtcggtgaacaactccctgtatctgggaccgcttctctctttcggaaacgatgcccagaagaaggactacatcacaccgtttaccaccggcgaacgagtgggctgcttcgcgctctctgaacctggaaacggatccgatgctggagctgcttccaccatagcaaccgacaagggagatcacttcgtgctgaatggcaccaaggcctggatcacaaatgccttcgaggcggaggcagccattgtgttcgccaccaccaacaagcagctgaagcacaagggcatctccgcattcattgtgcccaaggctaccaagggcttctcgctgggcaaaaaggaggataagctgggcatccggggatcttcgacgtgccagctaattttcgaggactgcgtggtgcccaaggagaacatgctgggcgagccgggtttcggtttcaagattgccatgcagacgctggacgccggccgcataggaatcgctggccaggcgctgggcattggtcaggctgccctcgaattggccgtggactacgcccagaagcgacaggccttcggcaagcccattgccaagctccagtccatccagcaaaagatcgcggacatgtcgttggccatggagtcggcacgtctgctcacctggcgcgccgcctggctgaaggaccaaaagcagccctacaccaaagaagctgcaatggccaagctggctgcctcggaggcggccaccttgtgctcccaccagtgtatccagatcctgggcggaatgggctacgtgaccgacatggcggccgagcgtcattacagggacgcccgcatcactgagatctacgagggcacctccgaaatccagcgactggtgatcgcgggctccattctaaaggaatatgctagttaagatcaaagttatatatccgtactacttgtgtctcgtttaataaagaacgtttttaatatact

SEQ ID NO: 9483 - protein, 405 aa, DROSOPHILA
MQSVLTRSLCIARRSLNARQIASLSALSETHQMLQKSCRDFANNELSGNAAKFDREHLYPEKQIRQMGELGVMAVAIPEELGGTGLDYVAYAIAMEEISRGCASAGVIMSVNNSLYLGPLLSFGNDAQKKDYITPFTTGERVGCFALSEPGNGSDAGAASTIATDKGDHFVLNGTKAWITNAFEAEAAIVFATTNKQLKHKGISAFIVPKATKGFSLGKKEDKLGIRGSSTCQLIFEDCVVPKENMLGEPGFGFKIAMQTLDAGRIGIAGQALGIGQAALELAVDYAQKRQAFGKPIAKLQSIQQKIADMSLAMESARLLTWRAAWLKDQKQPYTKEAAMAKLAASEAATLCSHQCIQILGGMGYVTDMAAERHYRDARITEIYEGTSEIQRLVIAGSILKEYAS

SEQ ID NO: 9484 - DNA, 4282 bp, DROSOPHILA
acgaaagcctgcgccagttgactaaggagtatggcgccacagcggcctggcaggagcacacgagtcccaggaacgccaagcaactggcggagtacgccaaggcgatgaagcaactggcggccatatgggagaccaacgatgggaaggtggagctgcaggcacgcagccgcatcaagtgggccatcgactacatcaccaagtacttctttaccgagggcatatatttgcagaagcgccagcgggagcagcgactcctggaatcctacagagccgagggaaaactgggcgaggtgcagtgcaggctgatggaggagccgccggacaggctgcacgtcctggatgtgggcagctgcttcaatcccttttccagtgctccgcacttggaggtaaccgccctggacttgtgtcccgccaccgaagatgtgctgcaggcggatttcctcaaagtggaggtggtacccggaatacgagaacctgagctggaggagggcagcgtaagaaggctaccagcaagccactacgagtgcgtcattttcagtttgctactggaatacatgcccagcgccgagcagagactacagtgctgccttcaggcctacgacctgctgctgcccgagggcatccttgtgctcatcacaccggactcccaacatgttggcaaaaacgcccacctcatgaaaaactggcgctactccctggccaggattggactgctacgggtacgcttcgagaagttgccgcacatatcgtgcatggtgttccgcaaggccatcagccgggagctctcacagcactgggcgagcattcaccgggaggaggggatgtgcgaggaaattcggataccgcaggacgatagctagataagattcagcccccataaatcgatgtaaatatgtccacgtctacttatttatggcttaacttatctgtgttaagtgcgagttaataataatggttgacgatttatctactatctatggatgtcgtaaatggacaaatgctattgcttctgttccgactgtgggaacagcgcgccgctggtctggcgcttcttcatcgctgtggtggcgccctgcgaaatcttcatgatgttcggcgggagcggtttcttgcgatccgcctcccactcggctcggtggagccgctgacggtgcttgtacatgttggcgttggaaaagaacgtcatggggcagttaggacaggtgtacagcacctctccggtgtgcgttgatgtgtgctcctgtaaattaggtgtcgaatacttagatttctctgtaagtgagccccacacttaccctcagatcctgtggacgcttaaatgccttttcgcacatcccgcacttgaactttcgctcacagaggtggttgtggtagatgtggcgcttcagggctcgggaattggtggatgtcttgttgcagatatgacagcggtgctcgtcgcccggcggctcgtgtaccgttttcatgtgctgctttagtccggacaagtggcgcagccaggtgccgcagatctcgcactgcacgggatcgggttttggacgcggtttctcggaatgttcaagctcgtgatgctttttgagattcgtttgtgaacgtagcgtcttgccacacttatcgcagatgatggccgcttccgggtcgtgcatgtaacgcaagtgctctttcagtttgcgttccgtaggaatcctgaaagcattaagggattacttggggggttgctcatatgcctcatacctgatggacaattacttcttgttgcactccggacaagagtatttgaactcggatttcgggacatgcttggaaacgtcatgatactccatggccgccttggttgtgaagctcttggggcacttctcgcactggtagatccgcttctccttcggctccgccttgacctccgggtttgtgtgtgtctgctcgtggacctccagggcgcgggagtcctggaatacccgcccgcactgagagcacataaagtgatctgggttcttgtggaccaagacgtgctcggccaaagccttgcgcaggtggaactttctcccgcagcattcgatgtagccagattcgatgttgtgggaaacgcgttgatggcgtcgcatgtccgcaaagttctgcaccagcagattgcacagagagcacggaaactttttgaagaactgcaggataatctcatcgtactcgtcttgctggagcttcctccgttcaatctcctcccgactcagacgaacgggtggaaccagtggcttttccctttttcggtacttcttaggtttcaccacaacccgcttgggaatctcagcgtaacgttcctcaggctctatgtccggcaggctgtggtcggaatcctctccactgctctcactggaggaactggagctgtcgtcagtgcccaagacagcctcgggagccacgaactccatgtcattgttatccctggcattttcttcgccatcttcggagtccagttccttctttggggaaggagccgattccggcttagctttgggtggccgtcctcttcttgcgctccttcgtagctggcgtcccttgttcgcttcgctgttctttgcgggtccaactgaacttctctttgaatccgagtttaaaaaatcggccagaggtgcatccgagtcactatccactggcagctcgtttttaatgcgccgcttcgagtgtggtgagccttcgtttgggacacccaaccgtttcggagctgttctgatttccgttttaactgggtcttccaagagttccaccttgggcaggggttctagttcgttcacctccaccttgacctcactgggcgcaaaaaaggcctccgccaacgcgtccaactccacagaatatagcggattaatgatggcctcctctgtctgaccgcaaaattcgatgggttcgcttttggaatcgctgctccgctgccggtgcaggcaggagacgcgctggtgaaactcctcgaagctgctaacgcagttccagcactcccgacagacctcagcatcaccgccagccgtaagaacctgtggatggcgaagagttcggtttggtttatccaaaacttgcgattatggcgcagagcttacctcggagaacgcgaagtgcttgtggatggtcgccctaatgttcagacggacgccttcctcggattgtaggccgtagccagcattgctactgtccaggcagagcacacagacagtcatgacgaaaccggatgcactggctgagtcctaatcctgcttcatttccacacaaagtttttgtttacgattttgcaaaaatttgttttccaaagcaaagcagggttgacaggggcgtgcatgaagagctggtgagccgatagtatcgagacaagcagaataatcattagtgaaactgaaaaacaatttgatgtgctgatctttgtattgtattaaagcaatttcaattttgggcgaattatataatttaatatattaatgcaagaaatttatattaactgtacaatgtagttacaccctaacgccttttagattgccccctcgcacagtggaaagggcctcgtgcttgaaaaaaataccaaaacataacgcacattgcggtatcagctgtttcccatagctttgttgagtcgataaagatcagagttttaaccatttaatgcattattcagaagcgattgccccgaatgagcgaaaccaataaaaacaaggatcccacggggaccagtctgaagaagcaaccttggcacaagcgcggatcggcctctgcaatggcctcaaatatcttgttgcagctggcggccgaggatccccaaagggacgcttatcctaaggacacggtggtaagttgcctgttttataaatgaaatccatttttgcgacaatatcaagcccgcgtcggcggcacgcgcagtttctgttttcccgcgagtggtaaccaagtggtggtaggggcttctttgggcagtgcgcaatcgccagcgccctgcaccccacattcccatcgaatagtgaaaagttccagaaagaccagctccagccaactgaatcactgctgccgaaatcagcaagtccgaatccaagaggccaaagtatcacctacaacccaccaagtatggagaagatctggaagaaggtgtgcgagcaccacgatgtgcccgagcaggtggccaacgagtggttcgcccgcattcagcagcacctgagctccgaggatcccgctcgcgcctaccacaattgggaggagatgatgcggcgcaaggagccgcacttggcgggcgtggccaatcccaacattgtgc

SEQ ID NO: 9485 - DNA, 2101 bp, DROSOPHILA
atttttgcaaaatcgtaaacaaaaactttgtgtggaaatgaagcaggattaggactcagccagtgcatccggtttcgtcatgactgtctgtgtgctctgcctggacagtagcaatgctggctacggcctacaatccgaggaaggcgtccgtctgaacattagggcgaccatccacaagcacttcgcgttctccgaggttcttacggctggcggtgatgctgaggtctgtcgggagtgctggaactgcgttagcagcttcgaggagtttcaccagcgcgtctcctgcctgcaccggcagcggagcagcgattccaaaagcgaacccatcgaattttgcggtcagacagaggaggccatcattaatccgctatattctgtggagttggacgcgttggcggaggccttttttgcgcccagtgaggtcaaggtggaggtgaacgaactagaacccctgcccaaggtggaactcttggaagacccagttaaaacggaaatcagaacagctccgaaacggttgggtgtcccaaacgaaggctcaccacactcgaagcggcgcattaaaaacgagctgccagtggatagtgactcggatgcacctctggccgattttttaaactcggattcaaagagaagttcagttggacccgcaaagaacagcgaagcgaacaagggacgccagctacgaaggagcgcaagaagaggacggccacccaaagctaagccggaatcggctccttccccaaagaaggaactggactccgaagatggcgaagaaaatgccagggataacaatgacatggagttcgtggctcccgaggctgtcttgggcactgacgacagctccagttcctccagtgagagcagtggagaggattccgaccacagcctgccggacatagagcctgaggaacgttacgctgagattcccaagcgggttgtggtgaaacctaagaagtaccgaaaaagggaaaagccactggttccacccgttcgtctgagtcgggaggagattgaacggaggaagctccagcaagacgagtacgatgagattatcctgcagttcttcaaaaagtttccgtgctctctgtgcaatctgctggtgcagaactttgcggacatgcgacgccatcaacgcgtttcccacaacatcgaatctggctacatcgaatgctgcgggagaaagttccacctgcgcaaggctttggccgagcacgtcttggtccacaagaacccagatcactttatgtgctctcagtgcgggcgggtattccaggactcccgcgccctggaggtccacgagcagacacacacaaacccggaggtcaaggcggagccgaaggagaagcggatctaccagtgcgagaagtgccccaagagcttcacaaccaaggcggccatggagtatcatgacgtttccaagcatgtcccgaaatccgagttcaaatactcttgtccggagtgcaacaagaagattcctacggaacgcaaactgaaagagcacttgcgttacatgcacgacccggaagcggccatcatctgcgataagtgtggcaagacgctacgttcacaaacgaatctcaaaaagcatcacgagcttgaacattccgagaaaccgcgtccaaaacccgatcccgtgcagtgcgagatctgcggcacctggctgcgccacttgtccggactaaagcagcacatgaaaacggtacacgagccgccgggcgacgagcaccgctgtcatatctgcaacaagacatccaccaattcccgagccctgaagcgccacatctaccacaaccacctctgtgagcgaaagttcaagtgcgggatgtgcgaaaaggcatttaagcgtccacaggatctgagggagcacacatcaacgcacaccggagaggtgctgtacacctgtcctaactgccccatgacgttcttttccaacgccaacatgtacaagcaccgtcagcggctccaccgagccgagtgggaggcggatcgcaagaaaccgctcccgccgaacatcatgaagatttcgcagggcgccaccacagcgatgaagaagcgccagaccagcggcgcgctgttcccacagtcggaacagaagcaatag

SEQ ID NO: 9486 - protein, 673 aa, DROSOPHILA
MTVCVLCLDSSNAGYGLQSEEGVRLNIRATIHKHFAFSEVLTAGGDAEVCRECWNCVSSFEEFHQRVSCLHRQRSSDSKSEPIEFCGQTEEAIINPLYSVELDALAEAFFAPSEVKVEVNELEPLPKVELLEDPVKTEIRTAPKRLGVPNEGSPHSKRRIKNELPVDSDSDAPLADFLNSDSKRSSVGPAKNSEANKGRQLRRSARRGRPPKAKPESAPSPKKELDSEDGEENARDNNDMEFVAPEAVLGTDDSSSSSSESSGEDSDHSLPDIEPEERYAEIPKRVVVKPKKYRKREKPLVPPVRLSREEIERRKLQQDEYDEIILQFFKKFPCSLCNLLVQNFADMRRHQRVSHNIESGYIECCGRKFHLRKALAEHVLVHKNPDHFMCSQCGRVFQDSRALEVHEQTHTNPEVKAEPKEKRIYQCEKCPKSFTTKAAMEYHDVSKHVPKSEFKYSCPECNKKIPTERKLKEHLRYMHDPEAAIICDKCGKTLRSQTNLKKHHELEHSEKPRPKPDPVQCEICGTWLRHLSGLKQHMKTVHEPPGDEHRCHICNKTSTNSRALKRHIYHNHLCERKFKCGMCEKAFKRPQDLREHTSTHTGEVLYTCPNCPMTFFSNANMYKHRQRLHRAEWEADRKKPLPPNIMKISQGATTAMKKRQTSGALFPQSEQKQ

SEQ ID NO: 9487 - DNA, 5285 bp, DROSOPHILA
attcgcagttcagcaacgtccgtctgctgatgaaggcaatcataacgtaccgcgatcagctaaaatgatatcaagagaactataacctggccagtggctggttttgatagattacccatccgatccccatccaagatagttaatctatgaccacaaacacatttataaatacacgcttgtagttaagtccaaaaagaagttagtatgctaaaaagctctcagctaagttcatcccttaaaaagttgaaattgaatctatgcctttcattttattgtttatttgttttgtgcgtgatttgtttatagtaaggccgtatatctaatgtttatgtcgctatatcaaaattgtattatctttataatgattcgcctactaaattgcaatatatttttttattattttatttttgcgttccttttattttcctttttatctttatgacgcttaatgaacaaaagaaaacacacaaaaacaagaataggagctgtagaaacttatttaaaaattattttcaaaactaaagcaaactttattatgacggacaaaacaaaaaaattattagattgcaaatgcaaaaactacaagtaaatcgtagaatttaagctaaaaaaaaaaaaaaaaaacagaaagcaaaagtcgataataaaaaagaataaatgtatgtacttgaaaaaatctagaaacagttctttttgaattatcgtaaccatatgattttggttaagtgtatagttgcataaagcttttacccttagcttggctagtaagtggtcatatatttctcaatggtatgcaaatcgtacaaaaattgttggcctaatgactaaaaaacacctaactattttgatatccacacagacgaaagaaagttaagtaagattatttttgaaaggaatgcacatcactcaaggtctgaatcagctgagtagggctagcagctctgaggtgcgctccaagcacttgcagccacacgtagcacagacattgtgtttctgaaagttaaacaagaaaatagcaaacatgaatatatttatatccataaatccataaatccaaatccatacatcgtttggttcgtgaaaaagaaaccagtcgaatcaaactcaaatagataccaacctcaaaccactgcatcatgtgatcaatgtgaccgccatggccacaagccagacacgcattggctgctcctttcacaggcaaacggcagaggacgcagaagagtacgggtcgcttgcagggctcgcatttgggcgtccgtttgggcttggcacacttcctgcactcggtaacgaattccacaccctggactggaggtggtgtattctgcgtgtgcttgaggatcaaagcccgcttcgaaagcaactgccagccaaataaaatttcggcataggcgcgcttaaattgatcaaacagtggcatcttagtccgtctaatcaatgagcaagcgtatgcatcagactggatttgcttaatctccaaatccagggagtcggaccaagagttgctgcgtagttgcttaagttgctgccaagtgttcgatgaagaagatgacttgacgtcaagcggcaggaccgtgtgatacggtgaaatttgcgagttaagctgcggcggaagtcgaactgtcttctccataatggcaccgccacccgtggggcacttgtcaaacaaacaagccagcagcacagcagtctgtatgtcaccggagatagcataatgcattattagtgattccagcagagatttcttgaagggatctttgtagaacagcagatcgttgagtgtttcatgtggaatttggggtgtggctatcagttccgccaatagccacacgggcaccaagtccaagcgcccatgctggcgacagatctcaccatttttacgacacgtttctgctatgttgcacttatcgagggagaactcccgagccattctccgactaatgtggagtaagctacttgtgtcgtatacgtgaaccaccggacttccattcatctgtcggatggctcgctgcttgcccggttttcccgaaatcatcctctcctggaggtaaaaggaggcgttagcttccctctgggcggtggccatcacattgcctagcaatccactaccattaatcgatgaaaaagtccgtggagtcaatgcggtgtgttgccgcagggtcagccttttgttgttcactggttgggcgaaagtggtcagcataccaatggcattgaaatggacccctgacgtccgcggatatggaatgcaggcatcgtgcagggtgctcgacaaagctccttccagccgaggggattgcaggagcagttggctacgatccgctccgcctacagcggccacctttttcttcatagccgccactagagcacgtaggcattgttccaggcacgtgcgggatttcttgacccgttgcaatgcattgcaacggagcacttttagcagaactccactaacttcactggacagagtggttccctggcaaagctgaaagtccggcggagcactaggacttggatacgatgtcgtgaaagtcacttgtaaaataaccgtgtgtccaccggcgcaaatcttgaagcaggcgtaccgctttatggcatctagtgtgtctacctccacatgaggcatgtttgtgttgagcagcgagaattcgtggtgcagcgaacacgtgggttgatctgttagtgatctggctatgtggggctcttccctgcgatagtagccacctccaaagctcggggagcgagccatgggcaaggtattacaagcaccgtcacccgtggatatgggcaacgaagcggcaaccaaaattgatcgtggatgcaggaattctggaggagtaggcactcttaactcactgagatcgggctcgaaacgggattctatttcttccgcagacggttcgcaaagctttagcatattatcatcgatcttccacacccgcagcgtgcgatccctggaccaagtgaccagttcctaattaaagctcaatgcataagtaagaacattgtggtatctttaaaatacttactatttcattggaactttcacgatttggacgccaggcaaagtcaagaatgacatcggtgtgccccacgaaggaacaaatagggtccgtttgcttgctgttgctccagagcagcaaactattctctccgcgtcccaaatggggcaccacaatgctaaccagaccgttgccaataggctgtatggaacaagatgtatttagaatagcaatcaatattgataaaccaatataaattaccgtgtatctcgctctccaaacgggcgacatggttgtaatgatcttctcggccctgcgaggattacatacatcaaagtacttgaccgttccatcctgactggcggttgccaagcaggtctcccttttgtggctccaattgatgccatgcactctatttaaatgtgctgtgatatagtgcgtcgggcaactacccttgcgaatatcccagatgcgtaaatctccatcatgggcagcagccaaaaggttgcccgaaacgcggttgaatcccacttgtgtagcaccagctgaaagaattttaaatataatataaaaaagttgaaattattttgtagaaacttacacatgcacacggcattcaaggacagggctggtttcctgggctcccttaagtcccaaatatgagaaaatgtgtctattgagcagctgaccagcagattcggatccttgccgtgccagtcaatgtcggtcactgttcgagtatgcccacgcaaggacatctcgtagtgtggttccgcagtgccccagcgaacgatgtctatgtgctggctagtctgaaattcaaaggtcaaactgggataaacgccgcctatacgtagataactttatgtatttaccgctatggcgcagtactctttgcgactgggacatatggcaaactctgctacggacacctcgtacttcgattgccgttcatgtcgtcgcagagacccatcgtcctgtcccaaacgctgcaaagccaggtgaccacggcccgcgaggagcacccactgacccgagtaatcaaccgacatggccgtggcctgggaatctcggtgttcatagtatttgttgctctgcctgacgatgtacgtttgttcgggtgctcctgctcccggtccaccggctgttccgcgttctcccggacgcagtgtctccgtgggcggcatattgtcctactctaataagtgctcaaaaagcaaaagactgcgaatttaaaccatttttgcaacaaacaaaaattaaacgaagaaactgaactgataagaacgatagacaataacaacaggcgtctgtgttggcaattaagcattttttccgacaaatgaatttccaggacctcgttaagctggctatttttcaataatgctgttgctatagtttttgataatatattaaaaaaattacaaaattaaactagaacattatatgaaaaaattgtacctaatattttgtcgcaaaagtttgtaacacccataaatctagctggaataacgacagcacaactatagctgaaaatgttgttttttcgatagtatcgataaaattgtggttatagctatcgggatttgaatttatgatataaaacaggtaaacgagctcagagcaaaatttataattttatatatatggtcttgttaaataaaaacgttcgattttttttatagatttattacattttataaattgtcaatcaccaaaaatatacatgtgcattggttcataaatgttatgaaaattattaaagtacgtggctaaatataatttagcatctaaataaatttgtaactagaaagggatattcccaattgactcatttataaaaagttcatcctattattcatttattaactcagcataaggctataaatcatgagatactaaacaaaaagtgcattatatatgtatataacaactcaattatggtctacaacattaagtgctacatattttggatactattatttatttatatgttcgccacttccctccctagtcagtaatagcttatcatttattttacatacacaaagtaattctgcggttattacgattattagttcattcagtttattgtcctctaagttagtgggaaataaacaaattccgctcaactaccgtgactacataggtgcctaagactgggaactccttacggcaaaggctaaaattggataagtatttttatacaaacattggctatttcatagaaataaactaggttttatggctaaggctacgttaatgggtttcaagtctttgacg

SEQ ID NO: 9488 - DNA, 3111 bp, DROSOPHILA
tatcagttcagtttcttcgtttaatttttgtttgttgcaaaaatggtttaaattcgcagtcttttgctttttgagcacttattagagtaggacaatatgccgcccacggagacactgcgtccgggagaacgcggaacagccggtggaccgggagcaggagcacccgaacaaacgtacatcgtcaggcagagcaacaaatactatgaacaccgagattcccaggccacggccatgtcggttgattactcgggtcagtgggtgctcctcgcgggccgtggtcacctggctttgcagcgtttgggacaggacgatgggtctctgcgacgacatgaacggcaatcgaagtacgaggtgtccgtagcagagtttgccatatgtcccagtcgcaaagagtactgcgccatagcgactagccagcacatagacatcgttcgctggggcactgcggaaccacactacgagatgtccttgcgtgggcatactcgaacagtgaccgacattgactggcacggcaaggatccgaatctgctggtcagctgctcaatagacacattttctcatatttgggacttaagggagcccaggaaaccagccctgtccttgaatgccgtgtgcatgtctggtgctacacaagtgggattcaaccgcgtttcgggcaaccttttggctgctgcccatgatggagatttacgcatctgggatattcgcaagggtagttgcccgacgcactatatcacagcacatttaaatagagtgcatggcatcaattggagccacaaaagggagacctgcttggcaaccgccagtcaggatggaacggtcaagtactttgatgtatgtaatcctcgcagggccgagaagatcattacaaccatgtcgcccgtttggagagcgagatacacggtaatttatattggtttatcaatattgattgctattctaaatacatcttgttccatacagcctattggcaacggtctggttagcattgtggtgccccatttgggacgcggagagaatagtttgctgctctggagcaacagcaagcaaacggaccctatttgttccttcgtggggcacaccgatgtcattcttgactttgcctggcgtccaaatcgtgaaagttccaatgaaatagaactggtcacttggtccagggatcgcacgctgcgggtgtggaagatcgatgataatatgctaaagctttgcgaaccgtctgcggaagaaatagaatcccgtttcgagcccgatctcagtgagttaagagtgcctactcctccagaattcctgcatccacgatcaattttggttgccgcttcgttgcccatatccacgggtgacggtgcttgtaataccttgcccatggctcgctccccgagctttggaggtggctactatcgcagggaagagccccacatagccagatcactaacagatcaacccacgtgttcgctgcaccacgaattctcgctgctcaacacaaacatgcctcatgtggaggtagacacactagatgccataaagcggtacgcctgcttcaagatttgcgccggtggacacacggttattttacaagtgactttcacgacatcgtatccaagtcctagtgctccgccggactttcagctttgccagggaaccactctgtccagtgaagttagtggagttctgctaaaagtgctccgttgcaatgcattgcaacgggtcaagaaatcccgcacgtgcctggaacaatgcctacgtgctctagtggcggctatgaagaaaaaggtggccgctgtaggcggagcggatcgtagccaactgctcctgcaatcccctcggctggaaggagctttgtcgagcaccctgcacgatgcctgcattccatatccgcggacgtcaggggtccatttcaatgccattggtatgctgaccactttcgcccaaccagtgaacaacaaaaggctgaccctgcggcaacacaccgcattgactccacggactttttcatcgattaatggtagtggattgctaggcaatgtgatggccaccgcccagagggaagctaacgcctccttttacctccaggagaggatgatttcgggaaaaccgggcaagcagcgagccatccgacagatgaatggaagtccggtggttcacgtatacgacacaagtagcttactccacattagtcggagaatggctcgggagttctccctcgataagtgcaacatagcagaaacgtgtcgtaaaaatggtgagatctgtcgccagcatgggcgcttggacttggtgcccgtgtggctattggcggaactgatagccacaccccaaattccacatgaaacactcaacgatctgctgttctacaaagatcccttcaagaaatctctgctggaatcactaataatgcattatgctatctccggtgacatacagactgctgtgctgctggcttgtttgtttgacaagtgccccacgggtggcggtgccattatggagaagacagttcgacttccgccgcagcttaactcgcaaatttcaccgtatcacacggtcctgccgcttgacgtcaagtcatcttcttcatcgaacacttggcagcaacttaagcaactacgcagcaactcttggtccgactccctggatttggagattaagcaaatccagtctgatgcatacgcttgctcattgattagacggactaagatgccactgtttgatcaatttaagcgcgcctatgccgaaattttatttggctggcagttgctttcgaagcgggctttgatcctcaagcacacgcagaatacaccacctccagtccagggtgtggaattcgttaccgagtgcaggaagtgtgccaagcccaaacggacgcccaaatgcgagccctgcaagcgacccgtactcttctgcgtcctctgccgtttgcctgtgaaaggagcagccaatgcgtgtctggcttgtggccatggcggtcacattgatcacatgatgcagtggtttgaggttggtatctatttgagtttgattcgactggtttctttttcacgaaccaaacgatgtatggatttggatttatggatttatggatataaatatattcatgtttgctattttcttgtttaa

SEQ ID NO: 9489 - protein, 1004 aa, DROSOPHILA
MPPTETLRPGERGTAGGPGAGAPEQTYIVRQSNKYYEHRDSQATAMSVDYSGQWVLLAGRGHLALQRLGQDDGSLRRHERQSKYEVSVAEFAICPSRKEYCAIATSQHIDIVRWGTAEPHYEMSLRGHTRTVTDIDWHGKDPNLLVSCSIDTFSHIWDLREPRKPALSLNAVCMSGATQVGFNRVSGNLLAAAHDGDLRIWDIRKGSCPTHYITAHLNRVHGINWSHKRETCLATASQDGTVKYFDVCNPRRAEKIITTMSPVWRARYTVIYIGLSILIAILNTSCSIQPIGNGLVSIVVPHLGRGENSLLLWSNSKQTDPICSFVGHTDVILDFAWRPNRESSNEIELVTWSRDRTLRVWKIDDNMLKLCEPSAEEIESRFEPDLSELRVPTPPEFLHPRSILVAASLPISTGDGACNTLPMARSPSFGGGYYRREEPHIARSLTDQPTCSLHHEFSLLNTNMPHVEVDTLDAIKRYACFKICAGGHTVILQVTFTTSYPSPSAPPDFQLCQGTTLSSEVSGVLLKVLRCNALQRVKKSRTCLEQCLRALVAAMKKKVAAVGGADRSQLLLQSPRLEGALSSTLHDACIPYPRTSGVHFNAIGMLTTFAQPVNNKRLTLRQHTALTPRTFSSINGSGLLGNVMATAQREANASFYLQERMISGKPGKQRAIRQMNGSPVVHVYDTSSLLHISRRMAREFSLDKCNIAETCRKNGEICRQHGRLDLVPVWLLAELIATPQIPHETLNDLLFYKDPFKKSLLESLIMHYAISGDIQTAVLLACLFDKCPTGGGAIMEKTVRLPPQLNSQISPYHTVLPLDVKSSSSSNTWQQLKQLRSNSWSDSLDLEIKQIQSDAYACSLIRRTKMPLFDQFKRAYAEILFGWQLLSKRALILKHTQNTPPPVQGVEFVTECRKCAKPKRTPKCEPCKRPVLFCVLCRLPVKGAANACLACGHGGHIDHMMQWFEVGIYLSLIRLVSFSRTKRCMDLDLWIYGYKYIHVCYFLV

SEQ ID NO: 9490 - DNA, 3155 bp, DROSOPHILA
ggattaaaatgctaacaagacttttgcgaaataccaatttttggatggcagacagagacacctgagccaggaatatgaaaactattgggcaaaaacggtggataatagggctctgttcgtagtagtggaaacttcgtccagacattgtgttgagtaattcttttgtaatgcggaaggaagcccaaaacaacacagtgcacagcgatttccgtgaagagggaaagggcagcggaaataacttcaagacaaagcacagaactgacctgcgttcggtgggctgggaaaattgggtggtaaaggggttcgcagataaattgctgcagtgtttagttaatacttctgaccgtcttatggcctggcctttcgtccttggctgctgcttccaattcagcaggataccgaacagcgatggattctcgcagctagatacaaggaacaaggaacagcagctggctcgacaagtttatcttttgttactgagacaaatactttgttgagagatactaaactagaaaacattctcctccgccttccattcaggctttttcagttttatttgccggcatttcttgcaggttagcgtcaaaatcctgcaggaggaacagaggccagaacagagcccggaaaacttaaacagaaattaaaacgaatctggacaatgcacagtgggtaaaaatggcttattactccttattgtatgcagtaagtaactttggtttaatgtaatttagcagaactactattcatatttccacgttaatcttaacaaatctttaaaaagcaacttttgtttttattttttttttgtctctgggaactaagaaaacttttttaagaatatttttctacaacacttgacaatcctatattatatttctagtaaatcagtgttgtgcatcgcatagcagtaggcagttagtaatataccgatgtgtaatttttaagtgacatttatttattattcgatactagattgtcgatacaaattggtgtgtgaaaaatggactcgcaggagggtactcagtgccagatcctggccatcgtcattcgggtgtgtgtgtttagcgcgttaacgtactacactgccaaatggatgatcaatgcgctggatcccaataataagatccggggtaaggcgaaatatgttgcggaagagcagctgcgcaagctgaactcctcggcgattggcgcggcaaagaagtttcgagcccgtgactttaatgagcacgagatgatgattgcttcgcatctggtgacgcctgaggacattgatatcagttggtcggatattgccggactggatgggactattcaggagcttagggagacggtggttctcccagtgcgtcatcgtaagctctttagccgatcgaaactgtggcgagcgcccaagggagtcctgctgcatggaccgcctggttgtggcaagaccctgatcgccaaggccattgccaaggatgctgggatgcgattcatcaatctggacgtgggtgtgctaacggacaagtggtacggcgaaagccagaagctggccacagccgttttcacgctggccaaaaaacttcagccctgcatcatcttcatagacgaaattgaatcttttctcaggatgcgcggtagcaatgatcacgaggcaaccgccatgattaagactcagtttatgttgcagtgggatgggttaatgagcaataccaacatttgtgtcctcgttttgggggccacaaaccggccgcaagacctcgataaagccatcctgcgccgtatgcccgcacaatttcacattggagtgccgcgagactgccagcgacgcgaaatccttcagttgatcctccagacagagcaactgagtccttcggttaatctgaaggagctggcccgactgacgattggattttcaggatccgatttgcgggaattgtgtcgccacgcatccatgtaccgtatgcgccagtttatgcgcgaaaagctgaacaccggcgaggaaattggaaaagacaagattgaatgggacttcgaggtaaaggatcaggccttgcaggagtgggagcacttggaaattcaaatggaagaccttctcaagtcgctgtccgtcatgaaggcgtcgaaacatcaggcgcagggcacttttctcgaaaaggatctggagttggactgagggtgccgttttgggtattgatgagcataaaatcggcaataaaagcttcgttatgtgcttcatcaattttgcagttttctcttgtcttatttggaagatttctttgtataagccaaattttatattaattaatattttaaactctaaagcatcaagcctcctttaaaaaagtgtccttgtcttcctcccactttcacttaccgctggtctctctcagcgaattggtatgttcaataacaaattccattgcacagccaagctcattttttctcagtgcttcgccattatcttccggctagttctattttacgagactacgctctttatacctcactttggctcatcctgcccagttaccaacaccccaaactgtcagcccgacctatatttttcacatttcatggcatgcatgaagagtttttgcagccatgaagagcggcgagttatctgaaaaaaggtctgcaaccaggaacggctgcgaaagaacagcaccagcacagtggcacaacaaaaactcaaaataacaacagctacgacagcaacaacaaaaaatcttttatgtaaaattgaatattcataagttgattcacagaagcggcagaagcctaactacggacctcagcctccgcctcgtttgcttctgaattactcttgcgaagagtgtttttaattttatcatgcatatgcaattcagtagtaaagaacttaattaataaagtcggtatatggaaaatgttctttgaaaacgaaataggagtgtttacttatatttaacattttattagccagtcacttcacttgattgcattaaaaaatgaactaaatacatgatttgttatattttagttagtttttatatttgtattatttattctccaattaccaaacaataataaataataaacttaataaataagcttaaagctaacgacttaaagatcgaaaaaaaaaactgtttttttttttaagttcttatttgagcaaagggtactttatattc

SEQ ID NO: 9491 - DNA, 1155 bp, DROSOPHILA
atggactcgcaggagggtactcagtgccagatcctggccatcgtcattcgggtgtgtgtgtttagcgcgttaacgtactacactgccaaatggatgatcaatgcgctggatcccaataataagatccggggtaaggcgaaatatgttgcggaagagcagctgcgcaagctgaactcctcggcgattggcgcggcaaagaagtttcgagcccgtgactttaatgagcacgagatgatgattgcttcgcatctggtgacgcctgaggacattgatatcagttggtcggatattgccggactggatgggactattcaggagcttagggagacggtggttctcccagtgcgtcatcgtaagctctttagccgatcgaaactgtggcgagcgcccaagggagtcctgctgcatggaccgcctggttgtggcaagaccctgatcgccaaggccattgccaaggatgctgggatgcgattcatcaatctggacgtgggtgtgctaacggacaagtggtacggcgaaagccagaagctggccacagccgttttcacgctggccaaaaaacttcagccctgcatcatcttcatagacgaaattgaatcttttctcaggatgcgcggtagcaatgatcacgaggcaaccgccatgattaagactcagtttatgttgcagtgggatgggttaatgagcaataccaacatttgtgtcctcgttttgggggccacaaaccggccgcaagacctcgataaagccatcctgcgccgtatgcccgcacaatttcacattggagtgccgcgagactgccagcgacgcgaaatccttcagttgatcctccagacagagcaactgagtccttcggttaatctgaaggagctggcccgactgacgattggattttcaggatccgatttgcgggaattgtgtcgccacgcatccatgtaccgtatgcgccagtttatgcgcgaaaagctgaacaccggcgaggaaattggaaaagacaagattgaatgggacttcgaggtaaaggatcaggccttgcaggagtgggagcacttggaaattcaaatggaagaccttctcaagtcgctgtccgtcatgaaggcgtcgaaacatcaggcgcagggcacttttctcgaaaaggatctggagttggactga

SEQ ID NO: 9492 - protein, 384 aa, DROSOPHILA
MDSQEGTQCQILAIVIRVCVFSALTYYTAKWMINALDPNNKIRGKAKYVAEEQLRKLNSSAIGAAKKFRARDFNEHEMMIASHLVTPEDIDISWSDIAGLDGTIQELRETVVLPVRHRKLFSRSKLWRAPKGVLLHGPPGCGKTLIAKAIAKDAGMRFINLDVGVLTDKWYGESQKLATAVFTLAKKLQPCIIFIDEIESFLRMRGSNDHEATAMIKTQFMLQWDGLMSNTNICVLVLGATNRPQDLDKAILRRMPAQFHIGVPRDCQRREILQLILQTEQLSPSVNLKELARLTIGFSGSDLRELCRHASMYRMRQFMREKLNTGEEIGKDKIEWDFEVKDQALQEWEHLEIQMEDLLKSLSVMKASKHQAQGTFLEKDLELD

SEQ ID NO: 9493 - DNA, 3121 bp, DROSOPHILA
tttgtataaatttgtatacaatttattttccatgattcattggaaatttttttgtataactcgccttttatttagcaatatacatatctcacacgtcttagccccattttattagccgaatgcaggacttgaagaaccatcgaaagttatgcgagccaacgagagtccttgaaagcgaaacttaccaacgagggtccttcacagtcgcacgccggccgagaataagaagttgggggcaactttttcagatatgccgagcacctcagtacaatggcaggcgaaattgccagctgaccgcccataaatgcatagaaatccagtgcagaaattagaggaaatccacaaatcgaagcaaactttttttgccacaccccctgcaccgcatcgcaccgccccgtttattgttcgcaaatttccctggggccttataaagtccaagcacccagcaccgacaccatctcaccagaatttccgtagtgcaaacatttgcgctcctgattacttttaatgcttttccatcgagagagtgtgtctgtgtgtgtgtgtgtttgagtgtgggtggtccagagggagggctggaaaaatcagcaagaggccgaggcctggcaacatcaatcagttcaagtttggctgcaaaaaaaaaaaaaaacaaaaaatataaataaaaaggaaataggaaaatataaaaaagaaaattgacccaaattctgagcaaacataaatcgttttccactacccaaattcgcagttccatcattcgtgacattcccatgtttatgatagtttgaaatagcctaatatgacgcgattctggccaatgattttctcatggtcccgttcggcttccgaaattttctcgcacctattgagtgaccaaaatgtggaaaattggccatggtcttctgtactccatgcctcctctactaatgatgagggtcaaaaaacaaataggcacaagcgcttaagtcctcatcgggattcctttcgtgattataccatcatgcagtatgaaaatcgactgagactgcacgctcatcccaccaagattttccgctattttgccaccattaaaatgaagaataaatcaggtaaatgggaactatacatgactcccaacgactttcttagatccattcaacccggattgaagcaaccagagaacttgggcctggacaaattccaaattctggatgagcatgcggccaataaatggataccggaagtcaaagatgatagtatctttctaaagatcgagaagcggggcttgctgacctacagtgactatgtgctcctgaccatcctgctctccattccggagcgaaatgttcgtattagcttcaagctattcgatttgaatggtgatggcgacgtgacgatcgatgaactggacacagtcttcatggcaatgacgcagggtgaagtctccatgatgaattcccacttgaagagccacttctttggacatcgactcaataagaccctgagcattgacgaattcctgaagtttctacacgccctgcacattgaaatacatacggatcagtttcagaatctcttgaaggagtccaggtaagtgaacaatttcgggtaaaatataataatgcatgacattttgttatattcagttcggtgatctctgaattggacttcgccaaggtggtcctgggactcaggaagtcacgaagcgaacgtcgtgaaatcctcaagcgggtcaaaaagaagtttggccagatggaccatggtattactctggaggagttcttggccttctttcggtttgtccaggatgtgagtataatggataacgccctagcattttactatttcaccggggcggatatctcacccaaaactatgcggcacattgcgtatgtagtgaccggcgtaaaactctcgcagcatctcacggatgtgattttctgcatcttcgatcggaataacgacaacattatccagcgaaaggaattcacagatatgaggcgacagtggatgcatcccataccgttgcgaaaaaatccgaagctcttatccaagatgtgtattgtgtgcaagtgcacctggaaaatgctgtcggcctggaatctgagagaacctcatcctagatacttgcccctctggtgatttcctttggggctaaacgcttttagttcactgacaaaggtacactgcgacaaatgccactgtgtatttattatttattaaaatttataaatctatctgattcggtggtgcttactttattgattactatgagtatgtaaaatgatgtatgaatgaatgacataatgtcgcatgacatgtcaaagcttttaatcagctttctctcaatgatttgaacaaaaacgcggatacctacaatcgacttagtcctgtagggtatggtcgatggggtcctggctcagcaaagcacagtctgtttgctctggtcttgaaacgtttcaacttcacaagccgccaagttgaacgagttgaaaaatgaagcgagtctacgggacgaaatccattttgttgccccgacactcgagttgcgtgcgagcgatgggaaaattcaaatataaagcagattcagcacctccacgaccccaccaaaccaaaaaccaagcccgacgaccacgtggcttacatgactttgaacttttatcacctgctgccaaacgctgccagccatccgatgagtgggtgggtggccgattgggtggcgatgggtgtacagatgggctcggaatgggtgtaacccggcacttaccaaaacaattttaaatacttgcggtaacacgcactcgagggttgagttgagtggcgtgcagaggagtgatggggagctgaggtcctggagcggcgagacaatagtttgccacatacactttatctggacattggcagccggccacaagttgatgaccgtaggacaattagggagcacaggcattcgagatatttgtataattcactccccatcgcaatgtgtgtcaacattattaaatgtaacgtatccgctgtcattttcaactgcaaatggtttcagtgaacaataattactgtttacatccattaggtgttgttaattgcgggtcttggatacgaaagtagttcatagaaaattatacaaaaaaaaattcct

SEQ ID NO: 9494 - DNA, 1065 bp, DROSOPHILA
atgcagtatgaaaatcgactgagactgcacgctcatcccaccaagattttccgctattttgccaccattaaaatgaagaataaatcaggtaaatgggaactatacatgactcccaacgactttcttagatccattcaacccggattgaagcaaccagagaacttgggcctggacaaattccaaattctggatgagcatgcggccaataaatggataccggaagtcaaagatgatagtatctttctaaagatcgagaagcggggcttgctgacctacagtgactatgtgctcctgaccatcctgctctccattccggagcgaaatgttcgtattagcttcaagctattcgatttgaatggtgatggcgacgtgacgatcgatgaactggacacagtcttcatggcaatgacgcagggtgaagtctccatgatgaattcccacttgaagagccacttctttggacatcgactcaataagaccctgagcattgacgaattcctgaagtttctacacgccctgcacattgaaatacatacggatcagtttcagaatctcttgaaggagtccagttcggtgatctctgaattggacttcgccaaggtggtcctgggactcaggaagtcacgaagcgaacgtcgtgaaatcctcaagcgggtcaaaaagaagtttggccagatggaccatggtattactctggaggagttcttggccttctttcggtttgtccaggatgtgagtataatggataacgccctagcattttactatttcaccggggcggatatctcacccaaaactatgcggcacattgcgtatgtagtgaccggcgtaaaactctcgcagcatctcacggatgtgattttctgcatcttcgatcggaataacgacaacattatccagcgaaaggaattcacagatatgaggcgacagtggatgcatcccataccgttgcgaaaaaatccgaagctcttatccaagatgtgtattgtgtgcaagtgcacctggaaaatgctgtcggcctggaatctgagagaacctcatcctagatacttgcccctctggtga

SEQ ID NO: 9495 - protein, 354 aa, DROSOPHILA
MQYENRLRLHAHPTKIFRYFATIKMKNKSGKWELYMTPNDFLRSIQPGLKQPENLGLDKFQILDEHAANKWIPEVKDDSIFLKIEKRGLLTYSDYVLLTILLSIPERNVRISFKLFDLNGDGDVTIDELDTVFMAMTQGEVSMMNSHLKSHFFGHRLNKTLSIDEFLKFLHALHIEIHTDQFQNLLKESSSVISELDFAKVVLGLRKSRSERREILKRVKKKFGQMDHGITLEEFLAFFRFVQDVSIMDNALAFYYFTGADISPKTMRHIAYVVTGVKLSQHLTDVIFCIFDRNNDNIIQRKEFTDMRRQWMHPIPLRKNPKLLSKMCIVCKCTWKMLSAWNLREPHPRYLPLW

SEQ ID NO: 9496 - DNA, 6977 bp, DROSOPHILA
agcttgtgcttaagccatctaaaaatctgtattccaatttagttgatttttgaaaaataattttttaccaattttttgttattttaatgattgttattttattttccaaattttcgaaaaatggttaaaaaatttaaaagtccagtttcgaatatacgatgttagtacggcacgagctgagttcgggaaggtataacatttgaagatacgacttgttttagccaagttatgatgcattgattttgtgatgaggtggccttaaacaaaagttaagccatttattaacttttaacattcaacaaacgtatgtcaccattttggactacttacttgaagagtaaacaaatcaatatttataatcccaggactctttagtttacttctactgtctggcacattagacttgtcctgcgacgcccaacccaatgtacgctcccatccgcaaaaagccaccaacaattccccaataactcattcagtccaccgtttccacccaccacaaaggcaacaacaaccccaagcaggcaaaacaaacaaacaaacgaggtgagtacttagtatgggtgagtatctgtgtgagcgaggcaatgcctagatgcgcgtgtgtgcgtgagagagtgccaaagggggcggagccaatggaagggtggcttaaaagccgggcttatctacgggaatataactatagaataaactatagccaaagatctgcagtgtttccctatgctactttatgttactttatgtttttgtttgtttttcaaattatagttatagcgagagagagagagagagcggcacagccatgttggggagcaagcgcgaaagagagaaagagagagagagcgcgctcgtggctggagctgtctcgctcgcacttgaaaaggggagcccatctgggctgcgaagccagcggctgcagcgacgctggcagaagctgaggcagcggcagttttcttgcggtgcgcccgccattcgaaatcagtcaatgttgagttgacggcgcgagaagacgcgggagaaagagagcggagaattgaagagctagttgatgaatcagaaaaaagaattagggtccccgtcgctgtgccgtcttgcagaatctaaaagaatctaaatatcacaatatagggataccaaattgaaagaatcaaaaaacgagaaacgaaaataatccaagttgcagaaccgtcgctgtgccgttaaattacttattgttttttgtgtgtgactaactacatgtgtgcctcctaggtaatgagtgaagttggcagtgattccaacagcagagactaaagacttttgggcgccaccaagtgccccgccgtgtggagaatgctggtgccgtcggacatgattgcggcgcagtccaagatggtctaccagatgaacaagtactgtgcggaccgtgtccaggtgcgcaaggcgcagatccacaagcagatccaggaggtgtgtcgcatcgtccaggacgtgctcaaggaggtggaggtgcaggagccgcgcttcatatcctcgctgaacgactacaacggtcgcttcgagggcctggaggtcatatcgcccacggaattcgagatcatcatctacctgaatcagatgggcgtgctcaactttgtggacgatggcaccttgccgggatgtgccgtcctgaagctgagcgatggaaggaagagatccatgtccctgtgggtggagttcatcacggccagtgggtatctgtccgcccgaaagatccgctccaggttccagaccctggtggcccaggcctgcgacaagtgcgcctaccgcgacattgtcaagatgatcgccgacaccacggaggtaaagctgcgcatccgggagcgcatcattgtccagattacgcccgcctttaagtgcgccggcctttggccgagatccgcctcccactggccgctgccgggcatcccatggccgcatcccaacatcgtcgccgaggtgaagaccgagggattcgacatgctatccaaggagtgcatcgcactgcagggcaagaactccgccatggagggcgacgcctgggtgctcagcttcaccgacgccgaaaaccggctgctgcaaggtgagttgccgtcgggaaatcttagacgggttgtattgtcgtctatatgggaactactcagggtagagcacttaactcttttttcacacactagcttaaagactgcaactcttgcaattacatagttcctagtttcctttatggttaaaagatatatcctggtatccacattcacgcctttcaatttatacactaagaaatatattttatcaagcgaatgttatcataagatagatttgaagacaagtatctttgtagtcgcaaaaaattcttaattaatcggaaataccattgctttgaaaactatttctctcagtgccgaatgagtggctaccgtttttcgggcatgttttggtagtgtcccccaatcagtaatcagtgacacacttaaactgaattgatttattcccatcaaatcagcgacttggtcttgatacgcccgtaattggttgtaaattaaccgtcggacgggggaacatcatatcattttggagatctttcagctagttgggaaaaaatgaagttccattttagtttttagtaatctaatgagaagcccacttaatggatttaactaactttagttgaattctaaacggcagattctatggaaagctatggagctatggaaattggattatagaaggatcttaagagatcaccatattaggattctttaaaggatgttttacacttgtatcatttttaaatgttcatgtaagataagatatcatttgagcttaggatctcagaatgactgcttatcgtgtagtattatccaaaatcgatgtatgtatatctacgatgcgaagatggtcacaatcagcttgcagcgattgtcacacggaatctgcatagttgggcgggaaattgcactgcagattcaattaggcagggcgataagatggccggcgattagtggggacccactcgcattgagtcgacgactgcccaacgagacatccgattatcgggcccagatatgatatgagatacgagccagcgtcgcccggttggctacgatcataaatctgatgttcgatcgatggggggagtctcagcccgaacacggggagttggagtctttagctcctcagtttctgttttttttttttttttttttggttatttggtcgcagcgcgacaacgcacacaaatctgctgatccccgagagataagcgcagtctcggtagtcgtagtcccaaggcagttagacggttagttggtcggactatggagctacagagcgaaagaaacgggtttctgtatgaacaatgccaatggctgggccataaataagtttctaaacgattttataaatattttaaatctcggcgattagataaagtcaccaaataaataaaacaacagccaggccaggccaggcatgagatgacacacacacggggtaagaaaggaaaaaaataaagaaagagccccaaagattgggttttcgggggggggggggggggagctaaaagctgggagccgaggcaaaccagagaaacgaaaatccagccaaaaaatcgaaacagagacagtaagagaacagaaacaaaaaaaaaaaacagaaacaaaaaactgaaaccaaaactgaaaccgaaatcaattctaaggccgctgacaacgatctctgatcgatattgatccgacttttttcaccgcgtgtttgtcatttaatttaatgctctccgaaaactgaaaacgaattgagacccagactccgactccccctaaactagctttctgggaataaggtggggtacataagtgtatcgatatcgccagatcgtgactataattagcacggtcactagcagctaccaaattaacgtccacttgacatggactcgattgggattgggatttcgatttcgatttcgattcgaggtacttggaatcgcacttgttttgcccgatttcttgcgaccccacgagtcgagtgccaatattgtggcaatatcgttcaatattgattagcccaaaatgtgaaacggaacccggagcaagacgctccggagcgggaaaaaagccgtagacgtgattatcggaccggagccgagattagcccggctgacatcgtgccaacgtagccatgatttatgtgctccaacgaactcgggccacaataaattaggaatcagtccgactttatacctgtacgtccgcctctcgaaggagaaattgaaaccagaacataagtacctcatatacgtatatgggttgatcaatcaaactgaaggggcgaagaacataaagaattgaatattgccacagccttatgatgtttgtattactcgaatctactcaataatacctatctatgaaatataatatatgtaatttcactggaaggatctcaagtgttttaactttttattggtagtatgaatatcttgaagttttaaatacttttatttgatatcagcgcacgaaaggcatgagtcagggtacgaaaatccaaataggtttctcaagtggtcaaaatagttagcgaaataaatgaaccgatgtacttgagatagaaagacttctaatgaccaaacccatcgatcagttgctgtttaactgacaaagaacgattcagctatagttctgtcgaaatcgtttcgattcaataatatcgatagcatcgcatggacataatgatgcattgagccaagggcaatcttcggaactccattcggaactccatccttaccagcaaggcccacccactaacccaatcaatattatatgctttctatgtttttttttgttatagaactgataggaattgatatgtttcaagtgcttttaagcatcctgtcttatattttgttgcaattctatgagactatttaggcttaactagactttagtttggggaattaccttattcagcaactccattccatttcttcacctcaattccaggagcgagtcgacgacgctgcctgagcattctgaagaccctgcgtgatcggcacctggacctgcccggcaatccggtgacgtcgtaccacctgaagaccctgctgctctacgaatgcgagaagcatccgcgcgagatggaatgggaggagaactgcatcgcggaccggatcaatgggatattcctgcagctgatatcctgcctgcagtgccgccgctgtccgcactacttcctgcccaatatggatctgttcaagggcaagtcgccgggtgccctggagaatgccgccaagcaggtttggcggctcacccggatcatgctgaccaatgtccgttgcctggaggagctgtagagctgcagagctgcagagctgtagaggcaccagcacacactaagcactagctactacgagaatccattggatctgcggacgctgcgggggcagaaccgccactgggacttcttttttttcatacgccttttgtttttttagtgattttttttttctacaactaaagacaaaggatcgcaaggatcaagggcgctgggagggtcgaagctggagaaggagaaatgtgtgagaaagatagagagaaagcagtgaaattgtaacccaaatactatttgatatttcgctagatcgtaacttaagtttaggtgctttcgaaaagtatacgccgcttacagagtttcctataattagagcatacttagtgttatccatttagatcgtcatcgtcgcaaaacgcacaaaagttaccaactagttacatttgtatgtacgacatttttttttttttattggtccatttgctattagcaaagtgcagagcaaaattagctaaattagctgtaagtcctaatgaaactgagacagccgagtgaaggaatatttccccgtcggtcctaaattatttattctatgtttttgccttcttcttgtgagtttagtcaataaaacgtaagttttttcaatgaaaattagcagggttattactttcttttgtgagaggggtaggtaagtacgtacaaaccaaggaaaagtcttaacaatttaagagtatttttacgtaagaacaatttatgtgatattaatgatttgcccagttatcgggttttgaatagttctgacatagcaattttttggtatgcggaatatctgtccgaactgccaacttctcgagggtctcgtccgtcgatcatcggatggccttttgatgttctgccggcattattgataggccacgatttcgatggatttcgatggactgtggaaaatgtcagaggctgacatttcgttggctgtcgacaggttgcgcattttaattgcgaattaacagcgattccgcggacagctaacaatcccaataaactaaacacacacacgcacgcacaatttgtgtgtgccgcatctgccacgcccacccacgcccaccgctcgcgagagtgactcagaaagtaaagatacatttgtgctttcccgtcgaatcgatgaaacattttggtcacgtgtctgtttcgatttcgagcgacagacataacattcaaattaaactttatgtcattcataaattaaataatttaatttttcccccattgtttcgtgttgttaccttcttctgtttttagcttttggcagtcaactgtccacttctgcggctctccattatttttagccttaatttatactttattgcgaccaagttgatttatgcatgtgcggcttttgtattttatagttgtaaattacccagcaaatgacaattgcagaggcgacacgcaaatcatgctaacacggcatagtcgcacctctgaataccctttaatgatcataataatttgcttgagatacatactgcacaaaaaaaaaaaaaaacaaagtacaaatattgttctctttttaatttttgatgagaacattttcgatttcgatttgcattccaacacattcacattcacattcggttggaatggatcga

SEQ ID NO: 9497 - DNA, 2060 bp, DROSOPHILA
cggcgcgagaagacgcgggagaaagagagcggagaattgaagagctagttgatgaatcagaaaaaagaattagggtccccgtcgctgtgccgtcttgcagaatctaaaagaatctaaatatcacaatatagggataccaaattgaaagaatcaaaaaacgagaaacgaaaataatccaagttgcagaaccgtcgctgtgccgttaaattacttattgttttttgtgtgtgactaactacatgtgtgcctcctaggtaatgagtgaagttggcagtgattccaacagcagagactaaagacttttgggcgccaccaagtgccccgccgtgtggagaatgctggtgccgtcggacatgattgcggcgcagtccaagatggtctaccagatgaacaagtactgtgcggaccgtgtccaggtgcgcaaggcgcagatccacaagcagatccaggaggtgtgtcgcatcgtccaggacgtgctcaaggaggtggaggtgcaggagccgcgcttcatatcctcgctgaacgactacaacggtcgcttcgagggcctggaggtcatatcgcccacggaattcgagatcatcatctacctgaatcagatgggcgtgctcaactttgtggacgatggcaccttgccgggatgtgccgtcctgaagctgagcgatggaaggaagagatccatgtccctgtgggtggagttcatcacggccagtgggtatctgtccgcccgaaagatccgctccaggttccagaccctggtggcccaggcctgcgacaagtgcgcctaccgcgacattgtcaagatgatcgccgacaccacggaggtaaagctgcgcatccgggagcgcatcattgtccagattacgcccgcctttaagtgcgccggcctttggccgagatccgcctcccactggccgctgccgggcatcccatggccgcatcccaacatcgtcgccgaggtgaagaccgagggattcgacatgctatccaaggagtgcatcgcactgcagggcaagaactccgccatggagggcgacgcctgggtgctcagcttcaccgacgccgaaaaccggctgctgcaaggagcgagtcgacgacgctgcctgagcattctgaagaccctgcgtgatcggcacctggacctgcccggcaatccggtgacgtcgtaccacctgaagaccctgctgctctacgaatgcgagaagcatccgcgcgagatggaatgggaggagaactgcatcgcggaccggatcaatgggatattcctgcagctgatatcctgcctgcagtgccgccgctgtccgcactacttcctgcccaatatggatctgttcaagggcaagtcgccgggtgccctggagaatgccgccaagcaggtttggcggctcacccggatcatgctgaccaatgtccgttgcctggaggagctgtagagctgcagagctgcagagctgtagaggcaccagcacacactaagcactagctactacgagaatccattggatctgcggacgctgcgggggcagaaccgccactgggacttcttttttttcatacgccttttgtttttttagtgattttttttttctacaactaaagacaaaggatcgcaaggatcaagggcgctgggagggtcgaagctggagaaggagaaatgtgtgagaaagatagagagaaagcagtgaaattgtaacccaaatactatttgatatttcgctagatcgtaacttaagtttaggtgctttcgaaaagtatacgccgcttacagagtttcctataattagagcatacttagtgttatccatttagatcgtcatcgtcgcaaaacgcacaaaagttaccaactagttacatttgtatgtacgacatttttttttttttattggtccatttgctattagcaaagtgcagagcaaaattagctaaattagctgtaagtcctaatgaaactgagacagccgagtgaaggaatatttccccgtcggtcctaaattatttattctatgtttttgccttcttcttgtgagtttagtcaataaaacgtaagttttttcaatgaa

SEQ ID NO: 9498 - protein, 359 aa, DROSOPHILA
MIAAQSKMVYQMNKYCADRVQVRKAQIHKQIQEVCRIVQDVLKEVEVQEPRFISSLNDYNGRFEGLEVISPTEFEIIIYLNQMGVLNFVDDGTLPGCAVLKLSDGRKRSMSLWVEFITASGYLSARKIRSRFQTLVAQACDKCAYRDIVKMIADTTEVKLRIRERIIVQITPAFKCAGLWPRSASHWPLPGIPWPHPNIVAEVKTEGFDMLSKECIALQGKNSAMEGDAWVLSFTDAENRLLQGASRRRCLSILKTLRDRHLDLPGNPVTSYHLKTLLLYECEKHPREMEWEENCIADRINGIFLQLISCLQCRRCPHYFLPNMDLFKGKSPGALENAAKQVWRLTRIMLTNVRCLEEL

SEQ ID NO: 9499 - DNA, 4442 bp, DROSOPHILA
agagtgtgtgccaagtagttgccaatcaatttttggcatcgttagggagtggcaggacgacaataccattgccatgttgtacgaccaggatcctttggtagcgagaaaccaccctgagcagcagcagcagcagcagcagcagcaggctcgtcaatggcattgtggccaacaggcacgtcgatttcaattgaatgtggtgcggccaactaccaatgtctcctgtctcctggcgctcgtctcctgtccgctgttccacatccacatccacatcgtcatcccacatcgcccattatgacacgatgccagcaaaccaaacacaatcacaggaggttgcagtgcccaccgtcacactcacttgcagttgacactttggtagccggctcgcatcctggcatccatgcatcccctgtccttctgtttgtcatccgtccagttcgctggcactcttcgtctcgtctgtagttgactgtcacttggcctatgccatcgatggctccaccctccttccatcctcctaaccagtcgcacgcccactgattcacttgcaacatgaaatccgttgaaatgcccactcagctcaccctttggatgccactttgcatctgcaactgttggtgcgcatcaaatacgcacggaacaatgagctaacccaataaatatgagtatacatacgtttgccgaaggtgtggatgctgtttaattaatagctacggtcgaacagtttattcagttgcattttattggaagatgtaattaaattttaagctctgtgttttcaggatggaaggaaaatcgaaagatgttcttgtattttgctacaaagttgaatacaattaagatttcgaatcaaagcaaaccaatttttttactccctagtaaatcacttcgacttcaacaacacgaactgctaaccaataaatcaacaaaatttgtgcaaatacaatacaaacacattcaaatggctcaacgaacacatagatatatatgtttggcgggttccatggtgcgaaactttcacacggcgcgttttccacgatgtgataaagtggcaatgtcaaattttgataccggaattcccttgccctataagaagttgagggaaaacctggattgcatcaagggtcgactgggtggaccgctaaccttgtcggagaaggtgttatattcccatttggatcaaccggattcacaggaaatcgaacgaggcaagtcctatttgcgattgcgaccagatcgcgttgccctgcaggatgcgactgcccagatgacgctactgcagttcatttcgtcgggcctgaagaaggtagcagttccatccaccgtccactgtgatcacttaattgaggcccagatcagtggcgataaggacttggccagggctaaggatctgaacaaggaggtgtacgattttctgtcctcggcgtgtgccaagtataacttgggtttctggaagcctggcagcggcataattcatcagatcattttagagaactatgcatttcccggactactgatgatcggaactgattcccatactccgaatggcggcggattgggttgcctatgcgttggagttggtggtgctgatgccgtcgatgtgatggcgaatataccgtgggaactcaagtgcccgaccgtgattggatgccatctcacgggtaagatcagtgggtggacttcgcccaaggatgtcatccttaaagtggccgagattctgaccgttaaaggaggtacgggtgccattgtggagtaccatggtcctggcgtcgaatctatttcctgcacaggcatggctactattaccaacatgggtgctgaaatcggtgccacaacttcaatatttccattcaacgaacgcatggtcacatatttgcgtgcaaccggtagaggtgccatcgctgatgaggccacaaagaataaagatcttttggttccggatgagggttgcaaatacgataaggtgatcgagatcaatttggacaccttggaaccgctggtgaatggccccttcactcccgatttggcccatcccattagtaaactgggtcagaactccgagaagaatggctatccgatggaaatcaaagtgagtctaattggttcctgcacgaactcctcctacgaggacatgggacgatgtgccagcatagccaatgacgcactgggtcatggcctaaaatcgtgcgttccatttaatgttaccccgggatcggagcaagttcgagctacaatcgcacgggacggcattatagatgtgcttgagaagtttggaggcaccgtgctggcgaatgcctgtggtccctgcattggacagtgggatcgcaaggatgtaaagatgggagagaagaacaccattgtcacgtcgtataatcgcaacttcaccggtcgaaatgatgccaatccagcaacacattgttttgttacgagtccagaaatggcaactgcattggctatcgccggacgtttggatttcaatccgatgacggatgagcttacgggtaccgatggcaaaacgttcaagctcaaggaaccgcacggcgaagagctgccatccaagggttttgatcccggagaggatacctatcaggctcccccagcgaaagcagatgatatcaaggtcaatgtcgatcccaagtcggatcgcctgcaactgctcgaaccttttgagaaatgggacggcaaggactacattgatttgatggtgcttatcaaaatcaaaggcaaatgcaccaccgatcacatcagtgccgctggaccctggcttaagtatcgcggtcatttggataatatatcaaataacatgttcattggggcaacaaatgccgaaaacaatgaaatgaacaaggtcaaaaaccagaagacaggcagttttgacgccgtaccagcggtggcacgcgattacaaggccaacaagatcaagtggtgtgctgtgggtgaggagaactacggcgagggatcatccagggagcacgctgccctggaacctcgacacttgggcggagtggccattatcgtcaagtcgttcgcccgcatccacgagacgaacctaaagaaacagggtatgctcgccctgacattcgccaatcccggtgactacgacaaagttcagccgtcgagcaagatttcgatactgaacctcaaggacttggcacctggcaagcctgtggatgctgagatcaagaataatggtagctccgacaaaatccagttgaaccacacccttaatgagctgcagatccagtggttccaggctggaagtgccttgaatctaatgaaggagcttgccgccaagggtggcgataagaaatagttctcatcaatattcactttactaaattactacgtttgtatctcataaagagcataaccagtacttaatagtttaagttggcaaccggaagataaatatctccttgtacaattattctggaaataaatcaactttacataaaccgcaggacactataatggtccaaactttaataccaaaatggcacatgaaatgccgaaaaactaaaccgaaagccaaaataattcaaaactaattaaaatccatttaaaattgcacccagcctgcaatgcagaaaaataataataaattttccgacttaagctgcccaacttttttgtcaactggatggttgcatgggtggatcactgggtgaatgggtggtgcagagtggtccacagtggggcacagtgtggcaaagtggtgccagagtggggcagagagacaataagcgacgcttatcaacggtgccaaccgaaactgtcacatgcattgtcattgtcacaggggcgggcggctcaaggggctcaaatgggggttttccgagcagaggccgtgccatatttgcattttgcttctcgctcaaacacacacgtcctgcttatgcgtaagtgtgtgtgtgtgtgtgtgcgtgtgtggacgtatgtgagttggcatagaaaattatttgctacttttaattagtgccaaaaagtcattcacaaaatccagggagagaggaagagacacaaagcacccagtgaaatagctacaagaggaggtagttcggctgcagagcgaaagggaccggtatggagaaagcgaaagagacagaggcagaggatataggagccacagagcacaagttcaccgagcaagtacaaaaatgtctatatatatctgtatccttctcactctgcgaactgccactgctttttgcggcaatatttgcacagcctccgactgaatgagcgggtcgtgaatgtggtgcatgtggcaatacagtgcgtttcatcgcaatataacattagcaaatcagcaaactagactaggtttcttcggcgaccattttgcacagtttcatattcattcatattactttttaatattctaagctatttaatccaaaattaaaagaacaaacattcagataatacatatttaacgaacagtt

SEQ ID NO: 9500 - DNA, 2442 bp, DROSOPHILA
atggtgcgaaactttcacacggcgcgttttccacgatgtgataaagtggcaatgtcaaattttgataccggaattcccttgccctataagaagttgagggaaaacctggattgcatcaagggtcgactgggtggaccgctaaccttgtcggagaaggtgttatattcccatttggatcaaccggattcacaggaaatcgaacgaggcaagtcctatttgcgattgcgaccagatcgcgttgccctgcaggatgcgactgcccagatgacgctactgcagttcatttcgtcgggcctgaagaaggtagcagttccatccaccgtccactgtgatcacttaattgaggcccagatcagtggcgataaggacttggccagggctaaggatctgaacaaggaggtgtacgattttctgtcctcggcgtgtgccaagtataacttgggtttctggaagcctggcagcggcataattcatcagatcattttagagaactatgcatttcccggactactgatgatcggaactgattcccatactccgaatggcggcggattgggttgcctatgcgttggagttggtggtgctgatgccgtcgatgtgatggcgaatataccgtgggaactcaagtgcccgaccgtgattggatgccatctcacgggtaagatcagtgggtggacttcgcccaaggatgtcatccttaaagtggccgagattctgaccgttaaaggaggtacgggtgccattgtggagtaccatggtcctggcgtcgaatctatttcctgcacaggcatggctactattaccaacatgggtgctgaaatcggtgccacaacttcaatatttccattcaacgaacgcatggtcacatatttgcgtgcaaccggtagaggtgccatcgctgatgaggccacaaagaataaagatcttttggttccggatgagggttgcaaatacgataaggtgatcgagatcaatttggacaccttggaaccgctggtgaatggccccttcactcccgatttggcccatcccattagtaaactgggtcagaactccgagaagaatggctatccgatggaaatcaaagtgagtctaattggttcctgcacgaactcctcctacgaggacatgggacgatgtgccagcatagccaatgacgcactgggtcatggcctaaaatcgtgcgttccatttaatgttaccccgggatcggagcaagttcgagctacaatcgcacgggacggcattatagatgtgcttgagaagtttggaggcaccgtgctggcgaatgcctgtggtccctgcattggacagtgggatcgcaaggatgtaaagatgggagagaagaacaccattgtcacgtcgtataatcgcaacttcaccggtcgaaatgatgccaatccagcaacacattgttttgttacgagtccagaaatggcaactgcattggctatcgccggacgtttggatttcaatccgatgacggatgagcttacgggtaccgatggcaaaacgttcaagctcaaggaaccgcacggcgaagagctgccatccaagggttttgatcccggagaggatacctatcaggctcccccagcgaaagcagatgatatcaaggtcaatgtcgatcccaagtcggatcgcctgcaactgctcgaaccttttgagaaatgggacggcaaggactacattgatttgatggtgcttatcaaaatcaaaggcaaatgcaccaccgatcacatcagtgccgctggaccctggcttaagtatcgcggtcatttggataatatatcaaataacatgttcattggggcaacaaatgccgaaaacaatgaaatgaacaaggtcaaaaaccagaagacaggcagttttgacgccgtaccagcggtggcacgcgattacaaggccaacaagatcaagtggtgtgctgtgggtgaggagaactacggcgagggatcatccagggagcacgctgccctggaacctcgacacttgggcggagtggccattatcgtcaagtcgttcgcccgcatccacgagacgaacctaaagaaacagggtatgctcgccctgacattcgccaatcccggtgactacgacaaagttcagccgtcgagcaagatttcgatactgaacctcaaggacttggcacctggcaagcctgtggatgctgagatcaagaataatggtagctccgacaaaatccagttgaaccacacccttaatgagctgcagatccagtggttccaggctggaagtgccttgaatctaatgaaggagcttgccgccaagggtggcgataagaaatagttctcatcaatattcactttactaaattactacgtttgtatctcataaagagcataaccagtacttaatagtttaagttggcaaccggaagataaatatctccttgtacaattattctggaaataaatcaac

SEQ ID NO: 9501 - protein, 769 aa, DROSOPHILA
MVRNFHTARFPRCDKVAMSNFDTGIPLPYKKLRENLDCIKGRLGGPLTLSEKVLYSHLDQPDSQEIERGKSYLRLRPDRVALQDATAQMTLLQFISSGLKKVAVPSTVHCDHLIEAQISGDKDLARAKDLNKEVYDFLSSACAKYNLGFWKPGSGIIHQIILENYAFPGLLMIGTDSHTPNGGGLGCLCVGVGGADAVDVMANIPWELKCPTVIGCHLTGKISGWTSPKDVILKVAEILTVKGGTGAIVEYHGPGVESISCTGMATITNMGAEIGATTSIFPFNERMVTYLRATGRGAIADEATKNKDLLVPDEGCKYDKVIEINLDTLEPLVNGPFTPDLAHPISKLGQNSEKNGYPMEIKVSLIGSCTNSSYEDMGRCASIANDALGHGLKSCVPFNVTPGSEQVRATIARDGIIDVLEKFGGTVLANACGPCIGQWDRKDVKMGEKNTIVTSYNRNFTGRNDANPATHCFVTSPEMATALAIAGRLDFNPMTDELTGTDGKTFKLKEPHGEELPSKGFDPGEDTYQAPPAKADDIKVNVDPKSDRLQLLEPFEKWDGKDYIDLMVLIKIKGKCTTDHISAAGPWLKYRGHLDNISNNMFIGATNAENNEMNKVKNQKTGSFDAVPAVARDYKANKIKWCAVGEENYGEGSSREHAALEPRHLGGVAIIVKSFARIHETNLKKQGMLALTFANPGDYDKVQPSSKISILNLKDLAPGKPVDAEIKNNGSSDKIQLNHTLNELQIQWFQAGSALNLMKELAAKGGDKK

SEQ ID NO: 9502 - DNA, 5319 bp, DROSOPHILA
tgtaataaaattatgcagctcatagataaagaaatattaaaataatataagtgcctagggtatttcctgttttgtatatatatatattatcaaatcctttgcggcactttgtttgccatgccgccgaacttatcaaaactaatgatataatttatgggctaacaaagatttgtcaaaactgcgaagatcaaagcggaaacctaaagtccaacaataattgaaatgccattgcaacaacagaaagccgactagtttctttaaaactcaaaatgagtttagtttaattcaagaggcagattatgtaagaaagtttatcatcaatctattaattttcatgaatttagagtgaacttttcaaatacaagagtatacagcattcaaaattaaagctctgtatgaaatcaatgccaataaattgctgcgcctgtggcttcaaaaaataataacgctcttagtgatgctgcttaattcctccaacataattaagctcttgttaacaatggcttaatacgtcaaactaaatgccaatggcggaagcaagttctattccaagaaccaaacaagccagcaaaaaagaaatcccaaaaaaatcaagaaaaatcaccggcgaaaagaaaagaaccagtaaaaaaaaaaaataaagaactcactgattctttcagacatttgtttgaacaacgaagatagcaaacaaattgcgtccatcaatcaagatggtcaaagctatagtttcaagtatatgcacacatgttcaaacattcttttttaaatggtgaacgcgattgaaagagaatttccaaaggaaattgaaagcactgcgaatgaaagttggcttacataattccattgcaaattgttttgttgaagaacaacttttgaaaatatctaatcaaatagtccttgaattacatcatatatttttatgtcaaatcacattacctattccttcgctttcaacttgtgaataaacctcacttctcattgaagggccgattaacgaacacatattccgcttctcgaaaaaaaaaaattcccaaaaattttttttatattttaaacaatcctaaaatgaataactccaaacgctcgcgactcagcgacaaggatgaaggtccgtgcaaaattcgaaaagcgaccaacctgtcggataagaaggcaatcgtagatctattctctagtttcgtgaatacacatcattttcgacccaaccccgatggtcagaggattgataaaataattgtaataaaggtgagtgcaatagatcttaaagagtttggagttaactaattactaattcctatagttagtggaacgcttagaaactacagatgtaaatgatcgcaaatttatgcagagtatattgcggcgcgtctatttaaagtgcaccgacttgcgtctatttattcgaaatcagctcaacgatgtattctttcgattgattttcgaaggaactgactttcattgcatcccagaaattctggaaatttactatgagtacgtttttttttttttttcaaagctgctttgatatgttgcttgataaatattttttttcttttttccatattttttttttttttttgaacagtataatcaagggatttactcaaccatatgagactgaacatgagcaactgctctttaagatccttttgcctttgcacaagccgccatcgttaacaaagtattttcatcagctgataaaatgcattattgcattccttaaccaatatccatctttcattgaaaaatatgtcaaaggtcttctacggctctggccgaagacgtcctttactaaggtgacattgtttctaagcgagattgccagaattttggtaataaaaaatgagcaagaggtcaagaaagtcatgctgacgatttttaatcatattgcaaaatgtctgtgtgatgaaagcaataaggtaagagtcgaccgaattaaaaatggtattaataattacctttcagatagccgagcacactcttcttttgtggaaaaacaatgcggttttggaggttatacatcgaaaccacgcgctcatcatgcccattgtatatccacacgtattacgcgtattgatacgtcattatatgagaaaaccaatgcaaacgaatgcctccattgctttatgtactttactaaaaatgaacaatccgatgcttagatgcctgactactgtatgcatgagcaccgatcatagaccgatgaaacacgacgccgagaattctatacctaagtagattatataagaactacattaatgataacaacagaaacattgcatatttattttatatgtcaatatttcttaacacttcatactttacaaaccataaagaacttttagcacaatcgaaatatatctgcaagcgggctaatcttttcaatgctgatcaaattaagacataaacacgttcctgcatatacatgatcaatcgccaaaaattaatcaattaatcgaggattttatacggacttttgcatacaacttaaaaatggtggcttgataattatcacaaaacaatatgacaaaacggaaaaaatgcaaccgaatttcgtgcgttgtgtattcgtggtggaattgaaaacgatattttgatagtgatgctgatatggatattgatattgatccacctgcgatcaacaacgtcgacgaccggcaaatatatatgaactcgactatgatttatgatcgcaccgaataaaaaaaaaaaaaaaacaaaacgagcaacgctggacaacaggtcatattaaaggaagcgcgaaagagacggtgccaagaggtgcgacagagagggccacacaaacaagtcaaatgtcagaggttcggcatagtgaaataattgagcaattaattaaaccggcgaaaagaaaaaaaaaattatagaaaaatcgtaagaagcggaggaaccaatattcggtgtataaaaggccacaaatcatcaagggggagcatcattaagccaacaactgaaaaccattcaacatgcgtctatttgtggtaagttaactgacggattaaccggaggaacaaccgcaggattaacgccggaggattacattatttttttttgtgtttctagacactttgctctctgctggttcttagccaagccaagccccagggctataactatggcagcggagtgtctggttctttgaccacgtccggttccagtggaggatccagcggcggtttcctgacggctcccagccattcttcggtggcttcctatggaccgctgggcgcattccagaccgccagcgttggctccctggtgggcagctcctctgccccccattcggtgagccactatggcggtggtaatggagccacctacaccactggtggcggtaatggccacgcagccacctactcgactggtggacatggagccacctactcgactggaggaaatggagccacctacagcactggtggctcttccaactacggcggtagctccttcactggatttggacccacgcccaacattggattcggtgctctggccggctatcaggcacccacctaccagcagcagcaagagcaggaggtccagcgtggcttccaggagcccatcatccacaagcagttcttcaccgtcgccgcacccgaagagcatgagaatctggagcgctccaagcatctggtgattggacgcccgcagaagaactaccgtgtggtattcattaaggccccatcctcaagcaatgccaacgtcaagctgtccgccgaatatgcacccaaggaggaaaagaccgtcatctatgtgctcagcaagaaggacaaccagctggaggtcaacgatattgccacgcccgcacccacggtgcccagcaagccggaggtcttcttcatcaaatacaagaccgacgccgaggcctctcatgcccagcagcaaattcagggtgagttgtccgcatgttggcacagttaattaggatatttgcaaaactggtactgattacatatcgttcttatcatccgtcagccgaatacgacaggatcgaaggaacttcagagcaccaggatggtggtgtggctcccgctcagtcggttgttggcattttggatggtggtgctattggtgccgcaagctctggcagctctaactacgtttccggaggcactactggctccactggcggcacctctcactacgtttccggtggcactggctccactggtggcagctacactacgacctcgttgtccggcggcacttcgggcggaatcacaggaggagtcatctccggtggcaacatcatcaagaatgcccagagtgccacctatctgccacccaatggcaaatagatgttgttcatcagaatagtgataaatagccaccaattttactgtacagtcatgcaatagtcaaaggttttttttttaaacatacataaatacaccgaaatacaagaatataaataatggtctcgattttttaagtgcaacgaagaatgaaaaaaccggaatttaaagctgaaggcccaaaagttatcggaacaaaacttcctaatgttttggtcaatttggtcaacactttaactaagaagcctaaaagtatgtcatctttttgtatagagaaaagcaataagttcatagcaaagcaatcagcatctttccgtgcacataacccccgaaaagtgtaggtaatcattactagaactcacacactgcattaatggcccgtttcaggagcagatccgactggctcttgtcgaggacatcggtctcgcggcaactgcgatatagactgctcaccgtggactccacggaaccctcttgcgaatttggcagcattgcaataaatcgattcagttcattgagttctgtgaaaagatatagtatatacatgaatgaaatggcagaaagatgggtaaaggggataaagctcggctcaccctgatactcattgtaggtctcgtagttccactcgccgcgtttgatcacaaagtactcatgattggcataatcgctggcaaaattgccgcatgcccactcgtatgtctcgtggcaaggactcttcgaggtgttggcccacaggagcagctgccggctgctctccacgcactccttatccaggcagagcggcgcccgcaggtagaagggcacctccggccaaaaggccagcagcaggatgatgatcagcaggagcagggcgcacaggcaggcggtggttacgtacaggatgcgtcgcttgcgcgacaggctcatcagcgcgtcgaaggatcgtcggcctggaagcaacaaggctatcatcgggcgagggccagggataggaaaaatgtgatattaatgatatgaggatgga

SEQ ID NO: 9503 - DNA, 2135 bp, DROSOPHILA
acacatattccgcttctcgaaaaaaaaaaattcccaaaaattttttttatattttaaacaatcctaaaatgaataactccaaacgctcgcgactcagcgacaaggatgaaggtccgtgcaaaattcgaaaagcgaccaacctgtcggataagaaggcaatcgtagatctattctctagtttcgtgaatacacatcattttcgacccaaccccgatggtcagaggattgataaaataattgtaataaagttagtggaacgcttagaaactacagatgtaaatgatcgcaaatttatgcagagtatattgcggcgcgtctatttaaagtgcaccgacttgcgtctatttattcgaaatcagctcaacgatgtattctttcgattgattttcgaaggaactgactttcattgcatcccagaaattctggaaatttactatgatataatcaagggatttactcaaccatatgagactgaacatgagcaactgctctttaagatccttttgcctttgcacaagccgccatcgttaacaaagtattttcatcagctgataaaatgcattattgcattccttaaccaatatccatctttcattgaaaaatatgtcaaaggtcttctacggctctggccgaagacgtcctttactaaggtgacattgtttctaagcgagattgccagaattttggtaataaaaaatgagcaagaggtcaagaaagtcatgctgacgatttttaatcatattgcaaaatgtctgtgtgatgaaagcaataagatagccgagcacactcttcttttgtggaaaaacaatgcggttttggaggttatacatcgaaaccacgcgctcatcatgcccattgtatatccacacgtattacgcgtattgatacgtcattatatgagaaaaccaatgcaaacgaatgcctccattgctttatgtactttactaaaaatgaacaatccgatgcttagatgcctgactactacactttgctctctgctggttcttagccaagccaagccccagggctataactatggcagcggagtgtctggttctttgaccacgtccggttccagtggaggatccagcggcggtttcctgacggctcccagccattcttcggtggcttcctatggaccgctgggcgcattccagaccgccagcgttggctccctggtgggcagctcctctgccccccattcggtgagccactatggcggtggtaatggagccacctacaccactggtggcggtaatggccacgcagccacctactcgactggtggacatggagccacctactcgactggaggaaatggagccacctacagcactggtggctcttccaactacggcggtagctccttcactggatttggacccacgcccaacattggattcggtgctctggccggctatcaggcacccacctaccagcagcagcaagagcaggaggtccagcgtggcttccaggagcccatcatccacaagcagttcttcaccgtcgccgcacccgaagagcatgagaatctggagcgctccaagcatctggtgattggacgcccgcagaagaactaccgtgtggtattcattaaggccccatcctcaagcaatgccaacgtcaagctgtccgccgaatatgcacccaaggaggaaaagaccgtcatctatgtgctcagcaagaaggacaaccagctggaggtcaacgatattgccacgcccgcacccacggtgcccagcaagccggaggtcttcttcatcaaatacaagaccgacgccgaggcctctcatgcccagcagcaaattcaggccgaatacgacaggatcgaaggaacttcagagcaccaggatggtggtgtggctcccgctcagtcggttgttggcattttggatggtggtgctattggtgccgcaagctctggcagctctaactacgtttccggaggcactactggctccactggcggcacctctcactacgtttccggtggcactggctccactggtggcagctacactacgacctcgttgtccggcggcacttcgggcggaatcacaggaggagtcatctccggtggcaacatcatcaagaatgcccagagtgccacctatctgccacccaatggcaaatag

SEQ ID NO: 9504 - protein, 688 aa, DROSOPHILA
MNNSKRSRLSDKDEGPCKIRKATNLSDKKAIVDLFSSFVNTHHFRPNPDGQRIDKIIVIKLVERLETTDVNDRKFMQSILRRVYLKCTDLRLFIRNQLNDVFFRLIFEGTDFHCIPEILEIYYDIIKGFTQPYETEHEQLLFKILLPLHKPPSLTKYFHQLIKCIIAFLNQYPSFIEKYVKGLLRLWPKTSFTKVTLFLSEIARILVIKNEQEVKKVMLTIFNHIAKCLCDESNKIAEHTLLLWKNNAVLEVIHRNHALIMPIVYPHVLRVLIRHYMRKPMQTNASIALCTLLKMNNPMLRCLTTTLCSLLVLSQAKPQGYNYGSGVSGSLTTSGSSGGSSGGFLTAPSHSSVASYGPLGAFQTASVGSLVGSSSAPHSVSHYGGGNGATYTTGGGNGHAATYSTGGHGATYSTGGNGATYSTGGSSNYGGSSFTGFGPTPNIGFGALAGYQAPTYQQQQEQEVQRGFQEPIIHKQFFTVAAPEEHENLERSKHLVIGRPQKNYRVVFIKAPSSSNANVKLSAEYAPKEEKTVIYVLSKKDNQLEVNDIATPAPTVPSKPEVFFIKYKTDAEASHAQQQIQAEYDRIEGTSEHQDGGVAPAQSVVGILDGGAIGAASSGSSNYVSGGTTGSTGGTSHYVSGGTGSTGGSYTTTSLSGGTSGGITGGVISGGNIIKNAQSATYLPPNGK

SEQ ID NO: 9505 - DNA, 2900 bp, DROSOPHILA
gcgcaattgttgctggcacaaaggatatcgcagaacatcgatggcgaggaaaacaatggcgcgtaaacaaacaaatggcgactatgaaatggatgcgggttacagggtatgggttatgcaaatcgaaggtggagaagtacgcacgctttgttaattgaaattctgtcgcgcacactcgtttccgctgggcccagccagttaggagcacatcctatataccacacccacacccacacaatcacattccaacctaaccccacccactgcaaaccaaatcaaactcaaggacgacgggctcctggcgcctgaaacaatgtaattgagtggcgacaggaacaaaacagaagctgtgcaccgcccaaatggggaagcctttcattcggcgagactttgtaggcggatttccccggttactattcccagtgcctctttcccggctgctttcagtccacttccggtttccttgccgccgttagcggtcctcattgttacgccaaagtgtcattattgttttcgctggcactcgccatttatttaaagtgtcacttcgtgatgtttttgttttgaatttaaaaaatatatatattttaaatgattttgagtacttaaaacttccaaagtgtatcactcaaaacaaagacactagaataactatgtataactatattctagtgtctttgctcaaaaagagaaaacttatcactttactttatgaaatatgatttgtgttaaaaaatctggaatttttaactttagcttactttaaaaagctttgaatgttttttaagttactttctttattttagctttaatttgtagtaattaatctacaaaaaaaaacataaacaaatgtcatccatccctggttcgcttatcagctgtttgccggcaaactactttggttttcctaccattcgcttcgctttaaaatcaaatatgcaacgattcctgaaggtattcaaacagcaaacatgcaaaataatcggcatgatacacgtggatgcgctgccaggtgagagaagctacaccaaagcctcagaaaccaacaaatccgattgctactaatccgggaaacacaacaccaggaacgccacgatacgccggcaactggaagcagacaattgagaatgccatctacgaggcgaatctgtataagaaacaccaactggtaggatgtacatacataagtgatattccatgctgtttaaactgacggcaagtccttttgcaggatgccgtgctcatcgagaacatgcacgacattccctatgtgccggagcgtcttcttggcgccgagatagtcgcctgcatgactcggctgggacgggcggtgcgcgaggtgatcccccaggagattccgtgtggtgtccaagtgctcgcctgcggcaataaacaagcactggccattgccaaagccagtcagctgcagtttatacgcgctgagggattcgtctttggccacgtggcggatgagggtttcacggatgcctgtgcgggcgatttgctgcgctaccggaagctcatcgatgccgaggatgtgctcatcttcacggatctgaagaagaagcacagctcacatgccataaccgccgatgtcagtctcttggaaacggcccatgcggcagagttcttcatgaccgatggtatcatcattacgggtacagcgacgggtcatgcagccagtcccgaagatctgcagcagctatccggcagggttaaggttcccctgataattggctctggggtgaccagggataatatcgacagttactacaaagatgcgcacgcagtgataattgggtcgcattttaagcgaaatggcaactggctggaagagatcagtgaaccagctgtggatgaattcatgcaaaagatttgccaactgcgacactcgaaatgattataattgttaatggatttattgatgtgtataaatgttgtaaacgatgatatatgtttgtatacgatttagtttgatgtcatctagttctagaatagattagcaaagaaatcataaatccgctcacgcaaagatgtgggttttagggcggaggacgactcgctggagaaagcaaaaggcttctcgaccaaaaccggagacactgcatccaaggtgtcgtcgaacttgacgcgctttttctgcggcggcgtgcagatctcctcatgactctttaaatgcacagggaacatattgtccccgttgaacagatcctctcgctttacaaatgttggtatggtgttgtccacattgtgggccctgaaatacgatttggaatcggagtagcgactggcaaagccgtagcttggatcgtgatcattgttaggcgccggtacattgctgcgtttgaggatgccgcgtacattggccaccttgtcaccggcagcaatctttttgtacaactttgagatgcggttctccttgctggcggtggccagctctccaggccttcccggctggtggcgcatctgcactgccggaggcggtggaggagctggtggtggtggtgcaacacgtttcatggaaacagaggaggaggaggaggaggaggcctttcccattggatttccatttggagcccttaaaattccactggccacttttcgctttcgagaaaagcaagcactgtcctcggtctcctcttcggaatccgtgctgcgattcttattgcggaaaaccgtatcatattcctatagattatttagaaacatgaatgtttatcttgtaaatgtgactgtttggtacttacgcatttgcgcttattgggactcagtacataatcagctccgaacttcttcatgtccttcttgcgtatgggcgttcttttgctcgagtcctttcgcagtgtctttcggcactgaacgtgcagatcgatggcatcgcggatgaagcccacccaagt

SEQ ID NO: 9506 - DNA, 837 bp, DROSOPHILA
atgcgctgccaggtgagagaagctacaccaaagcctcagaaaccaacaaatccgattgctactaatccgggaaacacaacaccaggaacgccacgatacgccggcaactggaagcagacaattgagaatgccatctacgaggcgaatctgtataagaaacaccaactggatgccgtgctcatcgagaacatgcacgacattccctatgtgccggagcgtcttcttggcgccgagatagtcgcctgcatgactcggctgggacgggcggtgcgcgaggtgatcccccaggagattccgtgtggtgtccaagtgctcgcctgcggcaataaacaagcactggccattgccaaagccagtcagctgcagtttatacgcgctgagggattcgtctttggccacgtggcggatgagggtttcacggatgcctgtgcgggcgatttgctgcgctaccggaagctcatcgatgccgaggatgtgctcatcttcacggatctgaagaagaagcacagctcacatgccataaccgccgatgtcagtctcttggaaacggcccatgcggcagagttcttcatgaccgatggtatcatcattacgggtacagcgacgggtcatgcagccagtcccgaagatctgcagcagctatccggcagggttaaggttcccctgataattggctctggggtgaccagggataatatcgacagttactacaaagatgcgcacgcagtgataattgggtcgcattttaagcgaaatggcaactggctggaagagatcagtgaaccagctgtggatgaattcatgcaaaagatttgccaactgcgacactcgaaatga

SEQ ID NO: 9507 - protein, 278 aa, DROSOPHILA
MRCQVREATPKPQKPTNPIATNPGNTTPGTPRYAGNWKQTIENAIYEANLYKKHQLDAVLIENMHDIPYVPERLLGAEIVACMTRLGRAVREVIPQEIPCGVQVLACGNKQALAIAKASQLQFIRAEGFVFGHVADEGFTDACAGDLLRYRKLIDAEDVLIFTDLKKKHSSHAITADVSLLETAHAAEFFMTDGIIITGTATGHAASPEDLQQLSGRVKVPLIIGSGVTRDNIDSYYKDAHAVIIGSHFKRNGNWLEEISEPAVDEFMQKICQLRHSK

SEQ ID NO: 9508 - DNA, 5484 bp, DROSOPHILA
ccgagctcctggtgccaaaggaaacggatccgtactacatatggcagcaagctggaagtccggcttatcccaacgccactctaagggaagcgatgcgaagagcccaagcacctagactctacaagacgggacccatctggcagtacaacagcgagctagttatcaactccgccagcatcccactgccctgggcgatgctgctccgggtgtgttccgcatcttggcccaaactgcgacgaccgcagcaactttccatcgcagaggtgactcagcgtgaggtgttcattagctggatggaacaccccaaatccacgcagtgccttctcagctacgaggtgtggtttaaggaacgcgataatctgggtcgctccgccgactggatgctcatctcacagggctggcatctgccatatccgtcgtttcagtatgcgcccggcgataagggatccgtcaatggtgagcataacctgcaaaatttccatctttcataaccgaaatctttttttgtcggcaggtttctataaagttcgcggtgtggatgtgtttaatgaaaccagtccctactcacaaatagtcgaatatctggagttgtagttcaacaaacagtttataaatcaaaagaaaatatttatgcaatgtgaaagctaacataatcaggtttcggctaggcgctagtggaccgatcctactctcaatctgtctctcttggaatggactgacttcaccggcacaatcttctggacttgcgccttcgccttaacgccggcaatatcatatatacatatattatttatatataaagatatttatagtacattatatgtgttgtgttcgtaatatataaatgccttcttcctgcgaaggaatcggcaaaagcgtacatacttagataaattgaattttctgtgagggatatttacaaacaaataacttagtgacttaatcgagaacaatcgcaaggggacgcgttcctattttatttaaattttcttgtttagccctaggcatccaagaccaaccacttttcggtgatgtgctccatttgcttggtgagaataggattgcgaacgcgtatcttgacttccaattttccacctacttgcttgcgaccatccattagctgttttaaggaatacataggttaaatttaagtttatattattttattatagtagttatcacttacatcatatgtgtcgtgtatctcgcacttggtctccaatggctgcagcttgacatttacggttccgatcaacgtatccgatcgcagaaaacctctgaaacaacacaggggcagtttacgacttagtccacaacaatctatactgcagctatttatattaaatgcgtagcattggatgacatttattttttgtttgaattgttgggaattgaggcgtaaaaatttgtaaaaatatttcattaaaatgttccttgtgagaatcaatcaagaagatcaatgggtagacacatacggtgaaatatatgtgtgcttgaagccgtgactcgtacgatactgttttacgggaccaaaggaacatgcttactacgggaaaaatttaataattcaaattaagagctgaaacttaatattaagagcaaattaatacccaagcgaaacctacaaattggataaaaatatttagtaggtatgcagctcaatcaacagctttttaaattttcgcaaaatgatctatgccaaatattttttaaaattatatatatatttttatttaagtctttaaggctatttcaaaatgtagaagattactactcatcggatattactaagtattccttggaaaattaatacgcgtaaataagatcatataccgcctccgttagttgagattaatatgcatggaaagcttcttagtacggattaaataattgttctagctcagttcttttatgtacgggcaacttaccctctagagtatatttcaaacttgacgccatgccgcttaaagattctctggaactgacgattggtccgctggatgtcaaccttgaagcgttcatcgtagtcaggactgctggtgtctctgataacattggttttagtcttgaaagattcatccttaaaacgaaaacatataaataattggtgaaactttaaatgttggtaattagcttacattgagcaggggaaactctacgcgcacataagtatccacgtccttgggattggccacattgtagctgattccccggaccacaacaatttcaagctcactgtctgtgagatctgtgttgcaatgcacaatgttgaagctacgcttttcatagtgaaactttggcagtggttcattctttcgtttcgagtatcgcaccaaatccaaatccttttgcacagttaaggctaaattttcaaaccgattcatgcctgctacatctcccatagctttgtgatgatctcgcgtatttttgcacatcatcagttgttttgccagctgctcctccatgcgaacaccaatttcacagatatcatctgtcggatcgcattcctcagcagatacaatggcaaaggaggcttctagattatccctttgtgaaggcgggacgggaagctgaaaaaaaaaaatatatagttagccatacaagaagaagatgtaatgcaaaacttacagtgctgaggtccactggcaatccactactcgctgcattaagaagggaatcgaatcccttgaagatcttgaggtactccttcgcctgatctatttctcccgcttttttggcctctatagcagctagcttaaactccttttggcgctcgaggagcagtttcatttgttgctcggcaatattattcttctgctgattgccagacgtgcgtgttgttaactctttgggcttaggaggtgaaggtgcttttcgaggagctgtaggtgtcgtcgcactggaactggagggtgttcctcctgcggaagtacttgctgttggcggtggagatgtaggcgaagtgggcagcgacggtgtcggcgcgacaggagcagcatcagccgtaggcagcggtccaaaacctggtggcacaggcagctcatcgtaaggcactggtttgcctgccttgtacaactttatggcatcttcgtattgcttcacaatccttccaaagcgtcttgcttttccgctattgttttctgccttggctgccgcttctacagattgatatttctctaaacgttgctgcagagcctccaacatatttgttgcagctgctagaacaggagcaggagcaacaggtgtgggttctggggcagcagtaggttctgcgacagcttctgcggctgcttcttcttgcatttttttaaggaattcaagaaactcagctggtggagggggcatgtcactcaaatcaacttcctgtccgtcttcacacatttttataactacgtcaaattgcttgaccactttgagaaactgaagggcagtagatatgtcaccactgcgcttagattgcagtgcagcagctttgtagtccgtctggcggctgcgcatttgcgtcacaagaggattagggggagatgtgggagccacagatgtagtgggctccacgggggtgccgggggttggtggatctggagctgcacgactaggcacaggcggaggggaagcaggtgtggaaggagctggtgactcctctgcaggcactggaggagcctgcccgccaattggctttacactgacttcaggtggaatgtcatccacgttaatggacttgccagccgctgcctgcctgtgcagatctttcagagtcttaaggcctcttccaaatcgccttgctttgccagaatcgccggcagtcttggcattggcctcggcctgcttgtacatttccaggcgctgtttgataatgcttaatgtgtccacagtcgtcgtgggcagaaaggtctggacgggttcctcagaggcagctggcggttgtgcgacaggctcctcttcctctgcctcctctagaccaccgattccgctcagctcgccaagaagatccggatcgctttccaaattgtcatcatcatcatcgtcgctgacatcacgcaagctgtcggctatcattttgtccaaatcactggcgggtaacagctttgctttgggcttgggctttggcttggctccttctccgccggttatggccgcaagctctgcctccaaatcactgtcacccccatcgtcctcaccatatccagcgctgggatcaaaatcatctgggatttccgtaagaccgaactaaacacaaaaaacaaaaaagacagtccaaacgatgagtcataattaataaatagacggatctagactgtttgtttttcctctcacctgcgataaatcgtgttgccttcttttcgctggctctggcttctttctggagaacatccttgattgcacagaggctgtttattaactaaaataagtctataaagactttcaaatcctttaaatttttgcgtcgcaacagttcagccgcagacaacaataacagagtggggatcactgtggtgcaacgaaaggtgacgcaggaaagtctttgcgaattggtgacgtcagtggcacagggctacaggaaatttgttgacggttaaaaaaatatcgttaaaaataatgaagaaatgattttttcttcattcagcaacattaaattttattatagtttaatccataatgaaatataaatgaacatggtaagccaccttacaaaacatcaatcctgcggaactaaacttttgccggtaactagggctgcgaaacgctaacaggtacagggctgccgcgccagctgtctaatcgaatcgataccgcaacctatcgatatcgagagccagcgcacacacagtgcaaaagagtttgcgaaaaaaaacctggacaaaaagccaaattgattgtgcgccgagcagcttgaggcactaggtgtaccctcgtcgaccagtgccgtgaatcctctaaccatcgtggttgtggtggcaccaagaagttagcgaaaccatcgtccccgcagttctcccagcttccacctcctccaactccgtcttgggggccaaaggcagaaaatcatcagacttctggttgtgagcagcgcggggcagcggggtcggcactggcctgctgggttaaacgtggaagtaaacaaacgaattggattccgggtccaggacggacgaacggggcgtggctcgttaaccagcggcttggtaaacgaaaccagagacggcaacaagtaggcgacaggcatggacgtgtccctcactgagccggagacgcgcttctacagtgagttgttccaatgctgcgacgtggagaagacaggcaaggtgcccatgcttaaggccaccgagctctttcgctcggcggacatcgccaatgagaccgtgattgaggtaggtccaatttgtgtgatcgtgagtgattaattatctgggtctgggcttatagatcaccggtctggcggggataccctccacggcgctacacatctcgcggacacagttctac

SEQ ID NO: 9509 - DNA, 2564 bp, DROSOPHILA
ccccactctgttattgttgtctgcggctgaactgttgcgacgcaaaaatttaaaggatttgaaagtctttatagacttattttagttaataaacagcctctgtgcaatcaaggatgttctccagaaagaagccagagccagcgaaaagaaggcaacacgatttatcgcagttcggtcttacggaaatcccagatgattttgatcccagcgctggatatggtgaggacgatgggggtgacagtgatttggaggcagagcttgcggccataaccggcggagaaggagccaagccaaagcccaagcccaaagcaaagctgttacccgccagtgatttggacaaaatgatagccgacagcttgcgtgatgtcagcgacgatgatgatgatgacaatttggaaagcgatccggatcttcttggcgagctgagcggaatcggtggtctagaggaggcagaggaagaggagcctgtcgcacaaccgccagctgcctctgaggaacccgtccagacctttctgcccacgacgactgtggacacattaagcattatcaaacagcgcctggaaatgtacaagcaggccgaggccaatgccaagactgccggcgattctggcaaagcaaggcgatttggaagaggccttaagactctgaaagatctgcacaggcaggcagcggctggcaagtccattaacgtggatgacattccacctgaagtcagtgtaaagccaattggcgggcaggctcctccagtgcctgcagaggagtcaccagctccttccacacctgcttcccctccgcctgtgcctagtcgtgcagctccagatccaccaacccccggcacccccgtggagcccactacatctgtggctcccacatctccccctaatcctcttgtgacgcaaatgcgcagccgccagacggactacaaagctgctgcactgcaatctaagcgcagtggtgacatatctactgcccttcagtttctcaaagtggtcaagcaatttgacgtagttataaaaatgtgtgaagacggacaggaagttgatttgagtgacatgccccctccaccagctgagtttcttgaattccttaaaaaaatgcaagaagaagcagccgcagaagctgtcgcagaacctactgctgccccagaacccacacctgttgctcctgctcctgttctagcagctgcaacaaatatgttggaggctctgcagcaacgtttagagaaatatcaatctgtagaagcggcagccaaggcagaaaacaatagcggaaaagcaagacgctttggaaggattgtgaagcaatacgaagatgccataaagttgtacaaggcaggcaaaccagtgccttacgatgagctgcctgtgccaccaggttttggaccgctgcctacggctgatgctgctcctgtcgcgccgacaccgtcgctgcccacttcgcctacatctccaccgccaacagcaagtacttccgcaggaggaacaccctccagttccagtgcgacgacacctacagctcctcgaaaagcaccttcacctcctaagcccaaagagttaacaacacgcacgtctggcaatcagcagaagaataatattgccgagcaacaaatgaaactgctcctcgagcgccaaaaggagtttaagctagctgctatagaggccaaaaaagcgggagaaatagatcaggcgaaggagtacctcaagatcttcaagggattcgattcccttcttaatgcagcgagtagtggattgccagtggacctcagcactcttcccgtcccgccttcacaaagggataatctagaagcctcctttgccattgtatctgctgaggaatgcgatccgacagatgatatctgtgaaattggtgttcgcatggaggagcagctggcaaaacaactgatgatgtgcaaaaatacgcgagatcatcacaaagctatgggagatgtagcaggcatgaatcggtttgaaaatttagccttaactgtgcaaaaggatttggatttggtgcgatactcgaaacgaaagaatgaaccactgccaaagtttcactatgaaaagcgtagcttcaacattgtgcattgcaacacagatctcacagacagtgagcttgaaattgttgtggtccggggaatcagctacaatgtggccaatcccaaggacgtggatacttatgtgcgcgtagagtttcccctgctcaatgatgaatctttcaagactaaaaccaatgttatcagagacaccagcagtcctgactacgatgaacgcttcaaggttgacatccagcggaccaatcgtcagttccagagaatctttaagcggcatggcgtcaagtttgaaatatactctagaggaggttttctgcgatcggatacgttgatcggaaccgtaaatgtcaagctgcagccattggagaccaagtgcgagatacacgacacatatgatctaatggatggtcgcaagcaagtaggtggaaaattggaagtcaagatacgcgttcgcaatcctattctcaccaagcaaatggagcacatcaccgaaaagtggttggtcttggatgcctag

SEQ ID NO: 9510 - protein, 816 aa, DROSOPHILA
MFSRKKPEPAKRRQHDLSQFGLTEIPDDFDPSAGYGEDDGGDSDLEAELAAITGGEGAKPKPKPKAKLLPASDLDKMIADSLRDVSDDDDDDNLESDPDLLGELSGIGGLEEAEEEEPVAQPPAASEEPVQTFLPTTTVDTLSIIKQRLEMYKQAEANAKTAGDSGKARRFGRGLKTLKDLHRQAAAGKSINVDDIPPEVSVKPIGGQAPPVPAEESPAPSTPASPPPVPSRAAPDPPTPGTPVEPTTSVAPTSPPNPLVTQMRSRQTDYKAAALQSKRSGDISTALQFLKVVKQFDVVIKMCEDGQEVDLSDMPPPPAEFLEFLKKMQEEAAAEAVAEPTAAPEPTPVAPAPVLAAATNMLEALQQRLEKYQSVEAAAKAENNSGKARRFGRIVKQYEDAIKLYKAGKPVPYDELPVPPGFGPLPTADAAPVAPTPSLPTSPTSPPPTASTSAGGTPSSSSATTPTAPRKAPSPPKPKELTTRTSGNQQKNNIAEQQMKLLLERQKEFKLAAIEAKKAGEIDQAKEYLKIFKGFDSLLNAASSGLPVDLSTLPVPPSQRDNLEASFAIVSAEECDPTDDICEIGVRMEEQLAKQLMMCKNTRDHHKAMGDVAGMNRFENLALTVQKDLDLVRYSKRKNEPLPKFHYEKRSFNIVHCNTDLTDSELEIVVVRGISYNVANPKDVDTYVRVEFPLLNDESFKTKTNVIRDTSSPDYDERFKVDIQRTNRQFQRIFKRHGVKFEIYSRGGFLRSDTLIGTVNVKLQPLETKCEIHDTYDLMDGRKQVGGKLEVKIRVRNPILTKQMEHITEKWLVLDA

SEQ ID NO: 9511 - DNA, 4386 bp, DROSOPHILA
gggtgagcaccattattgcctaaaaaaaatacatgggctaatgaacaaatttcccgcagaacgcaataccgatctgaagaggatgcgaacccagttcctcatggacgttcatctcacgcgacacaatcgagaaaaggcgctggctctggcggaaaattttgagctaagtaaaatccggttgaagaatgccatgaaaaatcagacagacctgcgtagacgtctctacgaagtgaaattggagcggaagaagatgcgtcagcagtcaagggatatgaccttccacggcggcatcctggcgatgccctcgctgatgtacgactacgacaacactgtggagcgattgaaggagaagcgggaaacggtggccaagctcagggaaaccctaaagtcactccaacgtcggctcagctatgtagagggaagaagtatatagagttgtaagaatccacaaatcaataaaacagtacaatttataataaaatcgtttggctgcttttactgtgacaataagttgtaaatggattgaaagagcaatacttgtacaccactatagtgtacccttcacaacatctgtctcgatgaaaaaactgtcaaaaaaagcatagggccagatacataacaaatgtacacgagtacacaacaactctatacataaacactaaaaatataataaaaaacaaaaaaaacagcaaaagcacattaaaacaaatataaaaaatacaaatacttaagatcgtatgcaaaaacgaaataagtagtgaagtaaatatatacatacacgatggaaacggagaataatgaagaacctcagattgatttgttggaggaaaacgaagcggtacgaagcttggctgatgaagttctctcgagattttcaggcgatagtaaaaagtctgtttcggtgaatatttcaatggtttctatgtcatcaaatgaaaacagtgaagaaagactgaaaatcattagaaaggaggaaagaaaattggcaataaaggacatcatgaatcgactaaaggagcgtgacgcggaggagatgaaaatgaagaagtccggcgaacaggagggggaccaaagggaagacgaaatggccagcaagtcacaagacagtattcaacggcacatgtccatttcacaagtggaggagcaggacgatgaaacattgctgtggaccaagctgggtgaggatatcgacagtgacaacagaagaaccacggatattgctcccgcagcagacactttggacgcagttaatgccgaggacgaagacatgctcgatctcatcgaaaccccatcggaatctgattcagaagcaccagtgaccgagaggtccaagagcatagatcccatgaaagtggccgttaaatctttaatgctggtgcccagtctgtcggatatttcgctgccaagtgcgccgcccacgtcaagaaagtcttcccattctattaaatcgaacagatcattaatttttaaaagttccccaaccgatggcaattcaagcttcgataccgaagagtcggaagaagaatccaccattggccccattgatccgcgtactccaatggatcaattgtacgactcactatcgatttgcgagtctttggcacccataaaagacgaattttcaagaacaacagctttggaaaaagaaagaaatgattacatgggctttgaacagttgtttacagtaacaacggaacaccttgaaacggacgaaatcgatgtggcagcccaactgaggactatagagacaagccaggttatttctgaatttataaaccatttgatacataaggtagtcatgccagagcatcggggtactgaggaatatattcgggtgcgactggacaaagaaaagctgctggtcgctctgcagaatgaggtgcatgattacacaagtgtaagggatcataacaaacagctggaggagcgaatggtagattacttccgacgcacgaaaaacttccgatactttgaccgcctaacgccgaacgccgagtcaacctactcccgtcgccttgatcacgccctgacctatctgtcctatggtcaagagcgcctcatcagggtaagggagaaatatggcattctaatgaccactgcgtttttggacctcgccaacgccatgaacatcgttctcagcacggagcatcatctcgagcagacgttaaaacgcatcctggttcgtccggacgccgagaccgatttcctcaagcgcctggttgcccgcgaactccgacttatggccgaccatcggaatcaaattagcgatgcccggctgttgctcatgtcgcagaaacacaccttggcccgcatcttagaagtaggtatccaggatgttgtccaaaaagttgtccacgatgttgaacgcgttgttgagagattttccgccatgttgtccgccatgttatcctccgtattttttgtaatgtcattcgccattttatatgctatgttacatgctatattatccgccatgttgtccgccattttatcagccgtgttgtccttcatgttattcgccatgttatccgtcatattacattatatgttaatcgccgtgttgtctgccaactcatgttacatgctatgttatccgacatgttatatgctatgttagcaaccatgttatccgccggttatgctcattcaaattgtcacataatgctattaagttattcacaatattttacaacacattgcttcccactatccagccatgtagtttttcattatatttactatcaccaatattgttttccaatttttcatatgttttctaatttgattgttttacttgtatcaacatacttttctgaaacatctccatttagaaaataagagatgtagaaacggtttgcgacggtgtgagcttgaatgactttatttccgtgcaaaacaaaacgatcggcctagaaaagaagattgaaggtatagtcctatgaacatctctgcttaaaatttgttcattattatatgcataataatcatctccatcagagcgaaatattgaattaaaaagacagcgcaggctctaccacaccgaactgcatatgactaagcacaatcgagagaagtcccacgagcttaagaacaaaattcacgttcttaaagataacctgctggaaaagcacaagttgaaaaataaactaaaatccgagctgtgtcgccgaaaactggagcacaaggctattaggcgccggatgagagatttgacatgccagggtggtatcctggctatgcccgcattgatgtatgactacgatcgaactgtcgcctatgttcgtgaaaaggagaaaatggtctcgagtctccgggaaaccctaaaatcacttaccaatcagctgcaaagtttgatgtcacctcgaaaaaagagctcgattatttaatagggctattaccacttttcaaccaaatacatttttccacaaaaataatataatatttgtcgtttattaatgctataaacaatggaaaattcaagacttcctagtcgtaagcttatgcatcaataataaccctgaaacggtagagaaaatctcttaatgaaccattattaatatatatgtatatatatatatatatcccccacattttcagtgtcaagtttgttatttatttgcctgcttttatttattccatccatatatatatgttgaagaaaacaacaaaaccaaggggaaataccgtttggttgttctcattaatatttctagcaaccaattgttggaaattttcaaaattctaaatataccgattcggaaattggcacgctttattcttaatcatcctttctgagcactatttgagtctaaaatattgtacacacgacctgagtacacttcaattagccaaaacgaatgaggaaaatatttcatttgcagactgcgtcatttaaaactaataacaaatccatgctgaatatattctgcgttctaagacatattttttcaatagatctaacatacaattaatacaaaatatttccagattcttccattcctgctctttgctttcagcataataagccaacagagatcaattccacccactgacaaactataataaatcgagaaattagaaaagtgccagctgaaggcgtgaaatattcgcgagagatgtctggtttttttcatttttggcaccagcatagttgcacctgcaatacataatgttgtgtgtgttctttcgtgggaacaatttcacgcctcggacaggtgagtttgggggaaattcctttcgctacatataaaatatatgtaaaagtcagtgtcgagatgcccatcttgataataactctgcccaacgctgatgttctgacctcgacacgcttcgatggaatgtttcacacatcgcacacactcaacagagtgtgtttatgtttgcttt

SEQ ID NO: 9512 - DNA, 1806 bp, DROSOPHILA
atgaatcgactaaaggagcgtgacgcggaggagatgaaaatgaagaagtccggcgaacaggagggggaccaaagggaagacgaaatggccagcaagtcacaagacagtattcaacggcacatgtccatttcacaagtggaggagcaggacgatgaaacattgctgtggaccaagctgggtgaggatatcgacagtgacaacagaagaaccacggatattgctcccgcagcagacactttggacgcagttaatgccgaggacgaagacatgctcgatctcatcgaaaccccatcggaatctgattcagaagcaccagtgaccgagaggtccaagagcatagatcccatgaaagtggccgttaaatctttaatgctggtgcccagtctgtcggatatttcgctgccaagtgcgccgcccacgtcaagaaagtcttcccattctattaaatcgaacagatcattaatttttaaaagttccccaaccgatggcaattcaagcttcgataccgaagagtcggaagaagaatccaccattggccccattgatccgcgtactccaatggatcaattgtacgactcactatcgatttgcgagtctttggcacccataaaagacgaattttcaagaacaacagctttggaaaaagaaagaaatgattacatgggctttgaacagttgtttacagtaacaacggaacaccttgaaacggacgaaatcgatgtggcagcccaactgaggactatagagacaagccaggttatttctgaatttataaaccatttgatacataaggtagtcatgccagagcatcggggtactgaggaatatattcgggtgcgactggacaaagaaaagctgctggtcgctctgcagaatgaggtgcatgattacacaagtgtaagggatcataacaaacagctggaggagcgaatggtagattacttccgacgcacgaaaaacttccgatactttgaccgcctaacgccgaacgccgagtcaacctactcccgtcgccttgatcacgccctgacctatctgtcctatggtcaagagcgcctcatcagggtaagggagaaatatggcattctaatgaccactgcgtttttggacctcgccaacgccatgaacatcgttctcagcacggagcatcatctcgagcagacgttaaaacgcatcctggttcgtccggacgccgagaccgatttcctcaagcgcctggttgcccgcgaactccgacttatggccgaccatcggaatcaaattagcgatgcccggctgttgctcatgtcgcagaaacacaccttggcccgcatcttagaaaaaataagagatgtagaaacggtttgcgacggtgtgagcttgaatgactttatttccgtgcaaaacaaaacgatcggcctagaaaagaagattgaagagcgaaatattgaattaaaaagacagcgcaggctctaccacaccgaactgcatatgactaagcacaatcgagagaagtcccacgagcttaagaacaaaattcacgttcttaaagataacctgctggaaaagcacaagttgaaaaataaactaaaatccgagctgtgtcgccgaaaactggagcacaaggctattaggcgccggatgagagatttgacatgccagggtggtatcctggctatgcccgcattgatgtatgactacgatcgaactgtcgcctatgttcgtgaaaaggagaaaatggtctcgagtctccgggaaaccctaaaatcacttaccaatcagctgcaaagtttgatgtcacctcgaaaaaagagctcgattatttaa

SEQ ID NO: 9513 - protein, 601 aa, DROSOPHILA
MNRLKERDAEEMKMKKSGEQEGDQREDEMASKSQDSIQRHMSISQVEEQDDETLLWTKLGEDIDSDNRRTTDIAPAADTLDAVNAEDEDMLDLIETPSESDSEAPVTERSKSIDPMKVAVKSLMLVPSLSDISLPSAPPTSRKSSHSIKSNRSLIFKSSPTDGNSSFDTEESEEESTIGPIDPRTPMDQLYDSLSICESLAPIKDEFSRTTALEKERNDYMGFEQLFTVTTEHLETDEIDVAAQLRTIETSQVISEFINHLIHKVVMPEHRGTEEYIRVRLDKEKLLVALQNEVHDYTSVRDHNKQLEERMVDYFRRTKNFRYFDRLTPNAESTYSRRLDHALTYLSYGQERLIRVREKYGILMTTAFLDLANAMNIVLSTEHHLEQTLKRILVRPDAETDFLKRLVARELRLMADHRNQISDARLLLMSQKHTLARILEKIRDVETVCDGVSLNDFISVQNKTIGLEKKIEERNIELKRQRRLYHTELHMTKHNREKSHELKNKIHVLKDNLLEKHKLKNKLKSELCRRKLEHKAIRRRMRDLTCQGGILAMPALMYDYDRTVAYVREKEKMVSSLRETLKSLTNQLQSLMSPRKKSSII

SEQ ID NO: 9514 - DNA, 3784 bp, DROSOPHILA
ggtaattgtatccacttgagtatcccaagctgcacaatagtcccaagatcaaggtgaacgtacgcatggtgatgaaaatcaaccggcgaaccaataaccaaaccgaactgagcgcgtttctgcaacacactgataatgcctactatgctcaacatggatctgagtatatatacaatcattgtgaaattaaacttttgtaaattcaacgagagacccagcatggaattcgcaggaatcaaaaggtaagcacacaattttgattgtggaaaatcgtgctcgtcaagtcgactgttgaatgacctatatttatctatatcaatatattttaagttggctaatacatttataatacattatatacttaattaaattattagttcatatacaattgtattactttacaattattactcacttttaaagagtagtgcgaaggggtggaaatgcgctgatcaatcagcattaagttctcatgtttttgcaaattctcaagagaactcaagcaaacaaaaaagtttttcgctcaataaaaatctttcagttaagagtaatttataatcaaagagagaagaacgaatgctataagagagaaactttaactcaactaaacaaacatcgatagaaaataaaacaactttttaataaattagttattatttaagcaacgaggttataaatatatcactttaactattaaaaataaaatttattaaaaccatattattatatattaactataccatgtatcattttctcaatgaatatacagacacacaaagttgtaaaagaatattctttgtggggcagccgccacttcaaacgtttcactaatctactgacaaagtttcttatcaaatactataactactagaaattaagtaaacctgcttcagtctgttttttaaccttcaaagacgctgtcgcaatgcgttggctcctaaattcgtggcttttgctaatcttagccctttttggccaatcatggggctattcctacctgatgatcagccatactgcatcgaaatcgcactacgccgtctgctttgcattggccaaaggattagccgccgccggtcatgaagtcactttggtatcgccatttccccaaaggaagcccattaagaacataattgatgtggaaacgccgaatattatcaccgtgatgggcggtgagtactatcatattatcgctaatcaaaaaactacaaccatttggcacgtattgcttatcgcttgaaataagcgttgtcatatctgataaggaacacgtgaaagttgcccaaatctcagggggtcaacaacaaattggttataccggctattttcgggtataaaaatcatcgaaaaaaaacattaagcatatttatagaactttaacttaagcgaccataaaaactaagctattttggtgctaggaactggttatatatttgttatttaaatgcattcttttctcccgtagtttacaaagcgcgaattctggagaatgccaaaaagccggttctattgcgatatccaagaatcagtttaatgggcttggatataacagaaagtcttttaaaggagccgaaagtacaggagctattaaaacaaaaccgcacattcgatggagtaatctgtgagactttcatgaatgacgcccactacggttttgcagaacatttcggagctccactgatcactctgagcagcttgggtgccactggttggacctctgatctggtgggcacaccctcgccaccatcgtatgtgccacactcattgctgcggttcggggatcgcatgaatttctgggaaagggctcagaatttgggattccagatatacgaatttgcctatgagaatttgattaatctaccaagacatgaagcactgtaccgaaagtatttccctaacaacaaacaggacttttataggatgcgcaaggatacgtcattggtgctacttaacaatcatgtatcgatcagcaatccacggccctattcgccaaacatgatcgaagtgggcggaatgcacgtgaatcgaaaggcaccaaagccactgccccaaaatattcgcaaattcatcgaagaagccgagcatggggttatctatttttcattgggctccaatctgaacagcaaagatttaccggagaacaagcgaaaggccattgtggagacgctaaggggactcaagtaccgagttatttggaagtacgaggaggaaacctttgtcgacaaaccggataatgttctcatatcgaactggttaccgcaggacgatatcctggcacacgaaaaagtgattgcctttataacccatggaggacttttgagcacaatggaatcgatttaccatggcaagcccgtcgtgggtattcccttctttggcgatcagttcatgaatatggcaagagccgagcaaatgggctatggcatcacggtgaagtatgcccaactaacggcttcactattccgatccgccatcgaaaggattactagtgatcctagcttcacggaaagggttaaggtgatatccagtcaatatcgggaccaaaaggagactccactggaacgagctgtttattgggtggagcatgtgactcggcataaaggagccaagtacctgagaagtgcctgccaggatctgaacttcatccaataccacaatctggatgttctggcgacattcttttcggtcattggattgaccgttattttcgtctttctattagttcggtttttagttactattgtaaacggctttctatataaacctagttcgaagctaaaaattaactagtttatatataaatatttttttagtacaaaactaagctatatagaatattatcttttttaagtatattggattttttcggtggacttaaatacaaataattttttacataatacatcaaactattattaaattttatggtggcttaataattatctcaaattttgatctcaaacaaaaattcgcaacgtgcattttctaaaatacctcgcatagttttctttatcaacaacaaatattgtttgaatcagaattctacaccaaccatgcatcagaaagagaaccaaagtgaaaaacaaaacaaaatattgctccccaccaaaaaagccggtgtgaaaacaaagcgaaggagaatccgagaataaaacctatccaaaactgataatatatgcgagagagcctctccactttgtagagatattgacactcgatcgtgaatagcgtacaaaatattgagatttggcactgtaacgatgacgaagaagagagggcgtgagaatagaagagcagagcagagcacactctccaaatctgattgggacctaacccaaccacttataattacctcatcgcagtcccatgttaactcagtttactgcgaggcgtcgaggcgttcgtagcccccatttagtatcagtttcacggtcgttggtcgttaagaacgcatttcacaactggcaacaattaagccaaattaattgtattgaattcgcagttttcgaaactaacgatgaaaccaacagctggccaaacgggttttctggccctactgctgttctgcctgctgagctgcgtgtctgcctacaactacctggtggtgctccataccgccgcacgatcccattaccatgtgggatctgccctggccaagggattagccgctgcgggacatcaggtgaccatcatctcccccttcgagctgaagaaacccatcaagaacatcaaagatgttccggccaagagcattctgacttccatgcagggtatgtttaacgaccgaaat

SEQ ID NO: 9515 - DNA, 1491 bp, DROSOPHILA
atgatcagccatactgcatcgaaatcgcactacgccgtctgctttgcattggccaaaggattagccgccgccggtcatgaagtcactttggtatcgccatttccccaaaggaagcccattaagaacataattgatgtggaaacgccgaatattatcaccgtgatgggcgtttacaaagcgcgaattctggagaatgccaaaaagccggttctattgcgatatccaagaatcagtttaatgggcttggatataacagaaagtcttttaaaggagccgaaagtacaggagctattaaaacaaaaccgcacattcgatggagtaatctgtgagactttcatgaatgacgcccactacggttttgcagaacatttcggagctccactgatcactctgagcagcttgggtgccactggttggacctctgatctggtgggcacaccctcgccaccatcgtatgtgccacactcattgctgcggttcggggatcgcatgaatttctgggaaagggctcagaatttgggattccagatatacgaatttgcctatgagaatttgattaatctaccaagacatgaagcactgtaccgaaagtatttccctaacaacaaacaggacttttataggatgcgcaaggatacgtcattggtgctacttaacaatcatgtatcgatcagcaatccacggccctattcgccaaacatgatcgaagtgggcggaatgcacgtgaatcgaaaggcaccaaagccactgccccaaaatattcgcaaattcatcgaagaagccgagcatggggttatctatttttcattgggctccaatctgaacagcaaagatttaccggagaacaagcgaaaggccattgtggagacgctaaggggactcaagtaccgagttatttggaagtacgaggaggaaacctttgtcgacaaaccggataatgttctcatatcgaactggttaccgcaggacgatatcctggcacacgaaaaagtgattgcctttataacccatggaggacttttgagcacaatggaatcgatttaccatggcaagcccgtcgtgggtattcccttctttggcgatcagttcatgaatatggcaagagccgagcaaatgggctatggcatcacggtgaagtatgcccaactaacggcttcactattccgatccgccatcgaaaggattactagtgatcctagcttcacggaaagggttaaggtgatatccagtcaatatcgggaccaaaaggagactccactggaacgagctgtttattgggtggagcatgtgactcggcataaaggagccaagtacctgagaagtgcctgccaggatctgaacttcatccaataccacaatctggatgttctggcgacattcttttcggtcattggattgaccgttattttcgtctttctattagttcggtttttagttactattgtaaacggctttctatataaacctagttcgaagctaaaaattaactag

SEQ ID NO: 9516 - protein, 496 aa, DROSOPHILA
MISHTASKSHYAVCFALAKGLAAAGHEVTLVSPFPQRKPIKNIIDVETPNIITVMGVYKARILENAKKPVLLRYPRISLMGLDITESLLKEPKVQELLKQNRTFDGVICETFMNDAHYGFAEHFGAPLITLSSLGATGWTSDLVGTPSPPSYVPHSLLRFGDRMNFWERAQNLGFQIYEFAYENLINLPRHEALYRKYFPNNKQDFYRMRKDTSLVLLNNHVSISNPRPYSPNMIEVGGMHVNRKAPKPLPQNIRKFIEEAEHGVIYFSLGSNLNSKDLPENKRKAIVETLRGLKYRVIWKYEEETFVDKPDNVLISNWLPQDDILAHEKVIAFITHGGLLSTMESIYHGKPVVGIPFFGDQFMNMARAEQMGYGITVKYAQLTASLFRSAIERITSDPSFTERVKVISSQYRDQKETPLERAVYWVEHVTRHKGAKYLRSACQDLNFIQYHNLDVLATFFSVIGLTVIFVFLLVRFLVTIVNGFLYKPSSKLKIN

SEQ ID NO: 9517 - DNA, 4131 bp, DROSOPHILA
actttaaagtgacacgttctcaaagcaccattgcaaataataaaaggaactttgaaagcgagtttggggctaacattaagtggttcccaaacggatgacagtgcagtaagttatggcactttgttttggctttgttccaaagctgccactttggcattttaatttacgagtgcgaaatacatacttaaactatgatacacgatctacagatgcggtcaatttgttttagagtaagtgttagtaacaacccgcaaatataaacaggattttagtcaaattgaatttgagccaaaacagttaatacaaataacccaggaaattggactattatcttgaccgcagctgtgcgcaaatataagaatgtaaattcccttaccgtgtgtgaagtttccttgatggccgttgtctggtgatgattgctagctggcaatttctagtcaattttccgtggttaaaatgtatttagaaatctagcttgaggaaaagttcaatctgcaattagaggaagaaggaagggggcaaaaattagtaacgacgcgagcagactctgtgagcacaaacaacttttaattatacgctacaggatgatgatgagtcggtaccaaccttgggcccggaaaagccattagctcattaactaatacgtttacatacgagtatatatatacacataagacttgaagctcggataggcagctaccttgagggtcaagtgcgaatacagcccacggaacgcgattatcagatgcgagagtgggagaatgggaggaaaatgagcactcaaattagaatttaggaattttaggtcagtcgcgtaattgagaggctgagcaaattcactgcaacggttaatggaactaattaaccaatcaagcggcggtggtgacgataagcctcggttcaagtcaaaaatcgacgcatctctcgattcccgctcagtttcgtttcggcaatcattcggatcacacggaaaacgtagaagcctcatttgccgtacattatggcctctcaaccgcttggactcctgctgggagccatcctgttttcgatatgcgcaatagatgcttcagtgcctcatcctttggcggccaactattcgatagacatcctgcgactggccaaggctgctcacatcaaagcctatatgggcgatgaaaaggagcaggcttgcaataatttctacaactatgcctgcgccaattggcctcgtttgcatcccgctcgaaagtcaaagacgcggaccaactacctggaggaactccaggagctatatatccgtaagagcgcagatatgctcaagagtgcgaccagaggagctgagaacagtgccgatcgtcagttgaagtacttctatggatcgtgccgcctacaaacaaacgacacgcgatccgccctgaataccctgcaaaatgtgacggatttccgaggcggttggccggagattcgtgtggcgtcctggtatcagtacgagtatgattggctgcaggtggtggccaatctgaaacgcaagcttggcgtggacatcttcatcggactggaggtgatactcgactacaaggaggagaagatgcatcgcctgaagatcggtgcaccacagtttcccatgtcacggcgtcactacttgcatccccacttcgaaggaactcgggaaatctacgagcgttcgatcgaaaataagctgaaattgtatttcccggaacaatcggaacactggaggcaggaggtggccagtcaagtcgtccaaatagagcagcaactggccaagggattgcctcacaatccagccctcaccttggcgcaaaccactcgtcaaaggaccgccgctgagatgaagactgcctatggtagctatgtagatgtgacccggtatttgcaattgattttcaacgacaacttgtacatggatttgtatgagacaccggaggattacatgtcaaatctggtggatgtgataagggaaacacccaagctgcagctggccaactataccatgtggaaggctttggaagcgttggatatcgcccgagtgcccgcgtctcagagagcggatatttggtgtgtccagctggctcagcaattcttcccgcatcagctggagagtctgtttcatcgcaactacaaccacatgcagatgatcaatgagttgcaatcgacatggtcggacatcaagcgagtctttcgcgaggatctgcaggcctcggagcgtttactttggcttacattggagaccaggcagaaggcaatcaccaaactggaggctttgaagctgcacttccggacccacgacgacaacaaattgattcgccagatgcacggacttattctgaacatggatcgcttttatccgaacttggtcagtgttctccagtggaagacacaacgcggtttggccaagttgatgaccgaaccggtggccgaagatgaagtacacaagctgccgcactacgagatccagaagaatcgcatccaagtgccaattactttcctgcaggcaagattcttctgggatcccgcctatcccaacggcttgaagtacgccaccttgggtgttctcctcgctcgacaaatgcttcacggatttgatggcgttggaaggcgttacgatgcctatggttacaagaacaactggtgggatcacacctcggagagttcatactctcgacgtacgcagtgtttccaggagcagtacgccatatttgtggaatacaagggtaagccggtgcaggataaggatctgctgcgtagaattgtagccgataatggagcactggatatcgcctatcgcgcctaccaacaatggctgaagaatgctgccgaaacaccggttatatatcaaagggaacgtctgccactcctggatcatgaccacaatcagattttctatctgggttatgcgcagctgtactgcaccgattatccggaaactgtggagcgttttgatgagcttcccgagcagctgcgggttaacacagcgctatccaattcgcaacagttcgccaatgcctacggttgctccagggaggaaaagctaaacgcccgctttaagtgcactctctactgagatgagaattttgccatccatatacctaatatgtatctattctacgagatttcgaaataaaagcatttgttgcacttgtcatacgtttgattggagtttctattactaaaccccaaatctttcgaataatctaatttaaagagcacccaagtttagtatgactcaaattattacaaaagctattacattccaatcagtttctggaagcgaatctctttctctgcgcgcttcactctcttgatgtctgataaccccaactgacccttggtcatatcaacttggactctcggctgctggaatgcgattgtgagtggcgaaggcagtcgatagcttcaccgagctccggcagcatgtcggacccgtgttggacgacagtatttttatggctgctctggctgccacacctccagcaaaatgctttggtttctggcgaggatctaccaccgccgttccagcggatctaccaatcggaacagacggtacgacgttcaaaggctcaggatatgggcagtcatgtgaacaaaagcatcgatccctgtgtggatttctatgcatatgcatgcggcaattggaagtcaactctaaccccacagcagcaattgcagcagcaaacagaccgggagcttcttctgctcgtggaggaggctgtaaggagagaggatagcgtcatagttcgacaggccaaggagctattcaagtcctgcgtatcggcacaggctcatcagagccagcagcagcagcatttcctcagcgagttcatcaaccagaacggaggctttccagctgttcccggttcccaatgggcagtgcatcaccatgactacaattggcttagtgtgttaggtggtctaagacttcgctatggaatggacatcctgatcggactccgagtgggctataactatggcaatgtaaatgagaacagcttgtatttaagtgaaccgagcacattgattccaaccgagttgtgcactcggaatcgctcagatattcgggactccatttacgaaccccttgaacatcgagtggcatccgaactaaaatcttggttggcattgggacacgatgaa

SEQ ID NO: 9518 - DNA, 2131 bp, DROSOPHILA
atggcctctcaaccgcttggactcctgctgggagccatcctgttttcgatatgcgcaatagatgcttcagtgcctcatcctttggcggccaactattcgatagacatcctgcgactggccaaggctgctcacatcaaagcctatatgggcgatgaaaaggagcaggcttgcaataatttctacaactatgcctgcgccaattggcctcgtttgcatcccgctcgaaagtcaaagacgcggaccaactacctggaggaactccaggagctatatatccgtaagagcgcagatatgctcaagagtgcgaccagaggagctgagaacagtgccgatcgtcagttgaagtacttctatggatcgtgccgcctacaaacaaacgacacgcgatccgccctgaataccctgcaaaatgtgacggatttccgaggcggttggccggagattcgtgtggcgtcctggtatcagtacgagtatgattggctgcaggtggtggccaatctgaaacgcaagcttggcgtggacatcttcatcggactggaggtgatactcgactacaaggaggagaagatgcatcgcctgaagatcggtgcaccacagtttcccatgtcacggcgtcactacttgcatccccacttcgaaggaactcgggaaatctacgagcgttcgatcgaaaataagctgaaattgtatttcccggaacaatcggaacactggaggcaggaggtggccagtcaagtcgtccaaatagagcagcaactggccaagggattgcctcacaatccagccctcaccttggcgcaaaccactcgtcaaaggaccgccgctgagatgaagactgcctatggtagctatgtagatgtgacccggtatttgcaattgattttcaacgacaacttgtacatggatttgtatgagacaccggaggattacatgtcaaatctggtggatgtgataagggaaacacccaagctgcagctggccaactataccatgtggaaggctttggaagcgttggatatcgcccgagtgcccgcgtctcagagagcggatatttggtgtgtccagctggctcagcaattcttcccgcatcagctggagagtctgtttcatcgcaactacaaccacatgcagatgatcaatgagttgcaatcgacatggtcggacatcaagcgagtctttcgcgaggatctgcaggcctcggagcgtttactttggcttacattggagaccaggcagaaggcaatcaccaaactggaggctttgaagctgcacttccggacccacgacgacaacaaattgattcgccagatgcacggacttattctgaacatggatcgcttttatccgaacttggtcagtgttctccagtggaagacacaacgcggtttggccaagttgatgaccgaaccggtggccgaagatgaagtacacaagctgccgcactacgagatccagaagaatcgcatccaagtgccaattactttcctgcaggcaagattcttctgggatcccgcctatcccaacggcttgaagtacgccaccttgggtgttctcctcgctcgacaaatgcttcacggatttgatggcgttggaaggcgttacgatgcctatggttacaagaacaactggtgggatcacacctcggagagttcatactctcgacgtacgcagtgtttccaggagcagtacgccatatttgtggaatacaagggtaagccggtgcaggataaggatctgctgcgtagaattgtagccgataatggagcactggatatcgcctatcgcgcctaccaacaatggctgaagaatgctgccgaaacaccggttatatatcaaagggaacgtctgccactcctggatcatgaccacaatcagattttctatctgggttatgcgcagctgtactgcaccgattatccggaaactgtggagcgttttgatgagcttcccgagcagctgcgggttaacacagcgctatccaattcgcaacagttcgccaatgcctacggttgctccagggaggaaaagctaaacgcccgctttaagtgcactctctactgagatgagaattttgccatccatatacctaatatgtatctattctacgagatttcgaaataaaagcatttgt

SEQ ID NO: 9519 - protein, 638 aa, DROSOPHILA
MGDEKEQACNNFYNYACANWPRLHPARKSKTRTNYLEELQELYIRKSADMLKSATRGAENSADRQLKYFYGSCRLQTNDTRSALNTLQNVTDFRGGWPEIRVASWYQYEYDWLQVVANLKRKLGVDIFIGLEVILDYKEEKMHRLKIGAPQFPMSRRHYLHPHFEGTREIYERSIENKLKLYFPEQSEHWRQEVASQVVQIEQQLAKGLPHNPALTLAQTTRQRTAAEMKTAYGSYVDVTRYLQLIFNDNLYMDLYETPEDYMSNLVDVIRETPKLQLANYTMWKALEALDIARVPASQRADIWCVQLAQQFFPHQLESLFHRNYNHMQMINELQSTWSDIKRVFREDLQASERLLWLTLETRQKAITKLEALKLHFRTHDDNKLIRQMHGLILNMDRFYPNLVSVLQWKTQRGLAKLMTEPVAEDEVHKLPHYEIQKNRIQVPITFLQARFFWDPAYPNGLKYATLGVLLARQMLHGFDGVGRRYDAYGYKNNWWDHTSESSYSRRTQCFQEQYAIFVEYKGKPVQDKDLLRRIVADNGALDIAYRAYQQWLKNAAETPVIYQRERLPLLDHDHNQIFYLGYAQLYCTDYPETVERFDELPEQLRVNTALSNSQQFANAYGCSREEKLNARFKCTLY

SEQ ID NO: 9520 - DNA, 4091 bp, DROSOPHILA
tggccgaagatgaagtacacaagctgccgcactacgagatccagaagaatcgcatccaagtgccaattactttcctgcaggcaagattcttctgggatcccgcctatcccaacggcttgaagtacgccaccttgggtgttctcctcgctcgacaaatgcttcacggatttgatggcgttggaaggcgttacgatgcctatggttacaagaacaactggtgggatcacacctcggagagttcatactctcgacgtacgcagtgtttccaggagcagtacgccatatttgtggaatacaagggtaagccggtgcaggataaggatctgctgcgtagaattgtagccgataatggagcactggatatcgcctatcgcgcctaccaacaatggctgaagaatgctgccgaaacaccggttatatatcaaagggaacgtctgccactcctggatcatgaccacaatcagattttctatctgggttatgcgcagctgtactgcaccgattatccggaaactgtggagcgttttgatgagcttcccgagcagctgcgggttaacacagcgctatccaattcgcaacagttcgccaatgcctacggttgctccagggaggaaaagctaaacgcccgctttaagtgcactctctactgagatgagaattttgccatccatatacctaatatgtatctattctacgagatttcgaaataaaagcatttgttgcacttgtcatacgtttgattggagtttctattactaaaccccaaatctttcgaataatctaatttaaagagcacccaagtttagtatgactcaaattattacaaaagctattacattccaatcagtttctggaagcgaatctctttctctgcgcgcttcactctcttgatgtctgataaccccaactgacccttggtcatatcaacttggactctcggctgctggaatgcgattgtgagtggcgaaggcagtcgatagcttcaccgagctccggcagcatgtcggacccgtgttggacgacagtatttttatggctgctctggctgccacacctccagcaaaatgctttggtttctggcgaggatctaccaccgccgttccagcggatctaccaatcggaacagacggtacgacgttcaaaggctcaggatatgggcagtcatgtgaacaaaagcatcgatccctgtgtggatttctatgcatatgcatgcggcaattggaagtcaactctaaccccacagcagcaattgcagcagcaaacagaccgggagcttcttctgctcgtggaggaggctgtaaggagagaggatagcgtcatagttcgacaggccaaggagctattcaagtcctgcgtatcggcacaggctcatcagagccagcagcagcagcatttcctcagcgagttcatcaaccagaacggaggctttccagctgttcccggttcccaatgggcagtgcatcaccatgactacaattggcttagtgtgttaggtggtctaagacttcgctatggaatggacatcctgatcggactccgagtgggctataactatggcaatgtaaatgagaacagcttgtatttaagtgaaccgagcacattgattccaaccgagttgtgcactcggaatcgctcagatattcgggactccatttacgaaccccttgaacatcgagtggcatccgaactaaaatcttggttggcattgggacacgatgaatccgctcgtctagctgccgacattcttagtttcgagcatgagttatgtggtggaatgaaaggtggatcctttgaatcctgggatgccgaggaacagctctatctagccaactacacccgcaaaacgttgcgtgagttctcgaattcgatcgaactggatttggattcatatgtaagggcaagttttggccaggatatttataaacccgtttacatggcagcaccggaatattttcgccaacttaagcgcactgtgagtgcccacaacataagtctagtggctaactatataatgtatcgagcggtgtctgctctgaattttcctctagatgatcgcccgcagttaaggaaacgggagtgcttggaacgaactaaagaactacttcccacggcattgggtgaattatatgcccggcagtttggaactgaagatggcagaatagatttggacaacctttatgatacattaaagacagctttgaggcaaagtctaggtgcggaatggttggtggagggcactcagcgggtgggccaggaaaaacttaggaacctaaagctgcagatgcccacttacgagcgtccagtgatccttaaactgcagctggaacgtggcaattattggcaaaatctccgccagctgctgggagtggttcagtcccaaagaaacaatcgacttttcgaagagtttttgcctgctcccaccgatcccgtggaggcctatgaggccagggtgcgactgagaccagttcagcgacgtttggatatgggtttggccctgctgcagccaccagcctacgatcctcgctatggccatgccatccgctatgccacattgggcgtacagctggcgcaacagttggtgatggcttttgacgatccgcattggtcggtgggattgctcgagcgggataattgggatggtcaaacagcctggcaatatcacattcgaagcaattgctttgcccgccaggtggacaattatttgaggcccaatgtaagtgccaccacgcagctgatcacggacagcgcagccatcaatgtcgcctttcgggcgtatctcacatggctgggtttccaggagccaaacaacgacttcactaaactgaccaaggagactctgccggatctgaactactcaaacacggcactattcttcttagcttatgcccaagagcattgcagtctggaggaggctcgtcccagggatgagcaagggactccggaaggatacctctatagtgcacgacagaatcacacctggactcgcctgcttgtaaacggacctttgcgaaactcagttgaatttgcgagtgaatttcggtgccccattggatcacccatgaatcctgcatccaagtgcatcatatactaacaataattggattttaaactattctattctatttttaactattctattctatttcacttattgaattaatagtagcatctgtattgaattcttcctaggctaacgttgaataaaccgcacatctaaacaccaattattgtttgtttagaataatctaaattaactatgaattgtctcgatttaatgacagtctatagtatagatcggaaatgtttccctgtctgagagaaattgtaaaccttctcggaccgttggattacaacatttgctagcttgatagtgggagaaccttgtcaccaagcgaatggtgttgttttgctgtcaatgccaagttctcggttgtcgaggccgagtttgtttacttctctcgcagatccctcaatgagcctcgatggatgtgataacccacagggactgagagtaaacttgacccagttctcccaggttcaagcccagccaggagaagcttccgattcgcgcattatcaagcctccagacaccgcagctcagtcgatttttcaacgccaagatgagagctaccagaagcgcttggttgggctttctgctcgagctgctactcctctttgaaatccaactttgcgatgtgactgaagcccgacaaaaccatatgaatcgcatgcagatgagtggaaactttccagactcacgtgaggagcaactggtgcgccaaaaaatagctacagatgtgcaaaagtatatgaacctgagcgccgatccctgtacggatttcttcgagtatgcctgcggtcagtggggccgttatcacaagcgacagcttcgtccggatgagttgtccactgcccagcaactgatggagaccaaaatttcggagcaactgcagcagcttctcacccagccactgccgccgcaacatcatccgaacggatatagtggagccagcatgacgaatgttcgaaaagtgcgagccttctacgaatcttgcgtcgcagtggaagcaaatgccagtgagagacgtcgt

SEQ ID NO: 9521 - DNA, 2091 bp, DROSOPHILA
atgtcggacccgtgttggacgacagtatttttatggctgctctggctgccacacctccagcaaaatgctttggtttctggcgaggatctaccaccgccgttccagcggatctaccaatcggaacagacggtacgacgttcaaaggctcaggatatgggcagtcatgtgaacaaaagcatcgatccctgtgtggatttctatgcatatgcatgcggcaattggaagtcaactctaaccccacagcagcaattgcagcagcaaacagaccgggagcttcttctgctcgtggaggaggctgtaaggagagaggatagcgtcatagttcgacaggccaaggagctattcaagtcctgcgtatcggcacaggctcatcagagccagcagcagcagcatttcctcagcgagttcatcaaccagaacggaggctttccagctgttcccggttcccaatgggcagtgcatcaccatgactacaattggcttagtgtgttaggtggtctaagacttcgctatggaatggacatcctgatcggactccgagtgggctataactatggcaatgtaaatgagaacagcttgtatttaagtgaaccgagcacattgattccaaccgagttgtgcactcggaatcgctcagatattcgggactccatttacgaaccccttgaacatcgagtggcatccgaactaaaatcttggttggcattgggacacgatgaatccgctcgtctagctgccgacattcttagtttcgagcatgagttatgtggtggaatgaaaggtggatcctttgaatcctgggatgccgaggaacagctctatctagccaactacacccgcaaaacgttgcgtgagttctcgaattcgatcgaactggatttggattcatatgtaagggcaagttttggccaggatatttataaacccgtttacatggcagcaccggaatattttcgccaacttaagcgcactgtgagtgcccacaacataagtctagtggctaactatataatgtatcgagcggtgtctgctctgaattttcctctagatgatcgcccgcagttaaggaaacgggagtgcttggaacgaactaaagaactacttcccacggcattgggtgaattatatgcccggcagtttggaactgaagatggcagaatagatttggacaacctttatgatacattaaagacagctttgaggcaaagtctaggtgcggaatggttggtggagggcactcagcgggtgggccaggaaaaacttaggaacctaaagctgcagatgcccacttacgagcgtccagtgatccttaaactgcagctggaacgtggcaattattggcaaaatctccgccagctgctgggagtggttcagtcccaaagaaacaatcgacttttcgaagagtttttgcctgctcccaccgatcccgtggaggcctatgaggccagggtgcgactgagaccagttcagcgacgtttggatatgggtttggccctgctgcagccaccagcctacgatcctcgctatggccatgccatccgctatgccacattgggcgtacagctggcgcaacagttggtgatggcttttgacgatccgcattggtcggtgggattgctcgagcgggataattgggatggtcaaacagcctggcaatatcacattcgaagcaattgctttgcccgccaggtggacaattatttgaggcccaatgtaagtgccaccacgcagctgatcacggacagcgcagccatcaatgtcgcctttcgggcgtatctcacatggctgggtttccaggagccaaacaacgacttcactaaactgaccaaggagactctgccggatctgaactactcaaacacggcactattcttcttagcttatgcccaagagcattgcagtctggaggaggctcgtcccagggatgagcaagggactccggaaggatacctctatagtgcacgacagaatcacacctggactcgcctgcttgtaaacggacctttgcgaaactcagttgaatttgcgagtgaatttcggtgccccattggatcacccatgaatcctgcatccaagtgcatcatatactaa

SEQ ID NO: 9522 - protein, 696 aa, DROSOPHILA
MSDPCWTTVFLWLLWLPHLQQNALVSGEDLPPPFQRIYQSEQTVRRSKAQDMGSHVNKSIDPCVDFYAYACGNWKSTLTPQQQLQQQTDRELLLLVEEAVRREDSVIVRQAKELFKSCVSAQAHQSQQQQHFLSEFINQNGGFPAVPGSQWAVHHHDYNWLSVLGGLRLRYGMDILIGLRVGYNYGNVNENSLYLSEPSTLIPTELCTRNRSDIRDSIYEPLEHRVASELKSWLALGHDESARLAADILSFEHELCGGMKGGSFESWDAEEQLYLANYTRKTLREFSNSIELDLDSYVRASFGQDIYKPVYMAAPEYFRQLKRTVSAHNISLVANYIMYRAVSALNFPLDDRPQLRKRECLERTKELLPTALGELYARQFGTEDGRIDLDNLYDTLKTALRQSLGAEWLVEGTQRVGQEKLRNLKLQMPTYERPVILKLQLERGNYWQNLRQLLGVVQSQRNNRLFEEFLPAPTDPVEAYEARVRLRPVQRRLDMGLALLQPPAYDPRYGHAIRYATLGVQLAQQLVMAFDDPHWSVGLLERDNWDGQTAWQYHIRSNCFARQVDNYLRPNVSATTQLITDSAAINVAFRAYLTWLGFQEPNNDFTKLTKETLPDLNYSNTALFFLAYAQEHCSLEEARPRDEQGTPEGYLYSARQNHTWTRLLVNGPLRNSVEFASEFRCPIGSPMNPASKCIIY

SEQ ID NO: 9523 - DNA, 4517 bp, DROSOPHILA
ggtacccgctggatgggcacaatcatcagcgaatttagcttgcgttgcacctccggacgactctcggtctgctccagaaactttcggaacaccggattcttgctgatcaaatcctggatgatgaacagagctccgcggtagtcaaaggcgtacaccgagtacagtttgaagaaaggagccattttcaggaatgcgtgcgcaacattctccatgttcgcctccagttcgcgcaggaattctccgttaagattgtgaatcatctcgatttgaccgaagagcagcgtgtgattggagcaatcgatgatagcctgttccttcaagggacgcacaaaaaagttcatcagcagctccagctgctccagatacgatttctccgacgaaataatctcctggatggcctggcgacggaaacccaatctttttcccgcgtccggattgggggagccaatcggactgctgttgttgctgtccagcatggagcaaactgcatgaaccgaatggtcacaattagttgttgaacacctggcgccgcctttgtgtgctgctcacctttcctacgcgacttggcagttagaagattccgctcctgcagcacctgccgcagttcccggctgaagctgagaggtgtttgtggcgagtgaatgaagccattcccgtatcctttctgcctgggcgtaaacattttccaatcgactttctggaaagaagatccaaaaagaaaacgacgccacacctgttcaatttgaacaatgccgcttctgcagtgttaccgtttgttagtggcagccacactggaaagtgtaagaccgcattggcgaggggagattgaagaataagaaaaagttaagcaaactataatataatcttgtctatttttgtagctttctattcatcttggctgtggttattatagatcttataaaaattgtaatattaaattaatttcatttaaaacttttgtgcccgcgtatgcgttgcaccagtctagcctattgtattgcgacatggtcacactggctaaattatttattttttatacgtggttcgtggcccgtttagcttttaatttaaatgttgttttagctattgctgcaccgaaatgcatgcagaactcagcgaaatggagttgcgcatagtggcgcgactaaacgaggagatcggaaaggatgccagccagctacaccgggccagccacctcgttagccactacaaaaagcacctccaagttttgtcccaaacggttggacgaatatctatctatctagatcatgattttgatccatatatttcaacagctcgactacgaggatccccagaacgtgtcctgctacaaaaccgccttccaatgccagcaacaggtttgcgagagcatcgacttcgagctggaaaagctggctcacttcgaggacaagctgaaaagaaagctaaaggagtgccagcccgtgcttgagggagtggcagaggatttagacaaggtgcgacaactgcagcgtttgcaacagtatctgctcctggtgcaggacattcaggagataagcgctgccctaggcaatgccatcaatggcaaggacgaggacaaactggttaatatctacctaaccctctacgagggcaacgactgcgagcacagcgtagtgggtcgcctgcatgctgtgcaggcacagtcgctgaaatcctttgccgaacgcactgccatctactggcacaagctgctcctcaagcgcctgtccagcgcattcgaggctgtactgaagagcatgcgctgggcgcatctagaacagcaggcccttaactattcgtccgcacgagacactgccaaggcgcaactgctagcggagtacatgttcctcatcaaatctccagccgaagagcgggcgccactgcaaagcatcacgcccagcatcgtgtgccagcccatcaaccgggtggtgcagctcctattggcgccgtatcgccagcgtttccaatttcacttcacaggcaccagacaaaccaatagattagacaagcccgagtggttctatacgcaaattctcaactggggcaaggagacgcatttctttgtaggcaaaacatttcagccagctgccattaaagcgggtaagctggactacaatctcagggtaagtgtctcggtgtcttaccagaccactcaaaattctaattgtgttactcttttagctggagtttattcgaggactggtgcagttagccattgaaaagttggcggtggacatagaacagattgcccaggaccagatactatttgcccatctacttgatgagacgctggccttcgaatccgagttacgggaaacatttgggtatccggctagttttcccagcgcgatttctgtaatcacacaacccatgtatttgctacgctggatttcactggaagaacgatgtgagatatggtcgctgccctcgattgctgttatttaataatgtgcttacctagtttgtgcggaaaaaatggatgacattctgcaggcggagacgccattccagctaatcgatcccaactcattcgagaacgatctgaaaatacccaagtgtgcggatcagtttatgcgactgctggacgccattaaggatcgttactatggtctgattcaaccgggccaccagctgcagttcctgcacctgcaactggagctgatcgatagcttccgacaacgcctggtgcaactgcacagcagtggagcggtgccaagcattcccatactgaatgccatcaactatttggtaatggtgctccgtgaatggggcgaaaacgtgcattatctgcacctgcatgcggcacttgccggtccaaatgccacggagattaattcagtgttcgagcatgccgtcgctgagttggaacactgggccagacaactaatgcggaatctggccaccaaggcaaccaatgaaatgaaggcgaaatcgatgagctatcgccgtgacgcgtggccgactatgcccgaacaaaacagccgggagccgttcatcctttcgcccagtggtggcgaaatgttccaggtgctggtcaccctgctacacaatctggaacgggaactctccgccaatctgttcacccaaacgctccgtttgatagcccatcaaatcgatgacttcatgctcgagagcatggtcatgaacacgaagttctcagctgcgggagcagcgcaattcaattatgacatgacacgcaatttattcgcgctctttggacagtatacacgtcgtcccgagctgctcttcaagcggtgagtcatctctacatttgctatggtgcacaataaacataaatctgacacctttcatttccattcgattcgccagaacacacgatgcctgcaagctgctggcggcggcacgaggaacagctttgttgctgctggaaacgctgcgtggtaatcaatcggtggaggagaagacgaagccgctgagggaactgcatgtgctcagcatggacagcaaacagtgcattgaggttctggagcggaggatggacataaagatgttttaggtgatggaaattaatttaagctagttaattgggccctaggaacttttgaaatgatatacaacgttcggacgccgtttttttgcgaaataaaatcattaacacccaaaatgaaagttaaaagatgtttatcgtaatttacattcattttatttgaagaaaggcatgtgtataaacatagttatcatgacggagatttaactaatttgtatttaaccaggacacagtttcgaactcgtgcgaatgctagtaacaaacgaccaagttgtatgaatgagatataattttgagtacatatttacaattaaatagcaattcgttgctctaggcgcacaagtcttgaatgttttttgtgataattaaacatttagttggaattgtggtctcaatgtttggtttaatttgtaaaacgttgacacaaaaacatgcggtaactttaactttaataataaattgatctaaaaatacatagcgtaaaatagcatataaaccggcctgatcgggctcgaatcgcatatcaatactgattcatggctgatcagggcgtattgtatatccctatcgtcggatgacaaacaattgcagttagtaaataccaatttgcgactcgagacgcacatcacacatcatcatcacatcgtggaacggaccaaggcgcattgcccgcagagagtaacttttatgtctacactaaataaccgataataatccgatctgcgggcgccgttcgcctttgtatccccccctttctattcaaagttctgataattctcggcgctgacgaactgtgcccgttgctggggtgtcatgttgagattaccgcggttcttgttgttgtaggcccagatgacgccggtggagatcagggcaatggtcagccagcccatgaagaacaactgcagccacatgtgctcgccgccgctgtgatccacgataattccagccacgatagtgatgaccgccaagccaagattctgtatcgattggcagaagccgtaggccg

SEQ ID NO: 9524 - DNA, 2127 bp, DROSOPHILA
cgacatggtcacactggctaaattatttattttttatacgtggttcgtggcccgtttagcttttaatttaaatgttgttttagctattgctgcaccgaaatgcatgcagaactcagcgaaatggagttgcgcatagtggcgcgactaaacgaggagatcggaaaggatgccagccagctacaccgggccagccacctcgttagccactacaaaaagcacctccaagttttgtcccaaacgctcgactacgaggatccccagaacgtgtcctgctacaaaaccgccttccaatgccagcaacaggtttgcgagagcatcgacttcgagctggaaaagctggctcacttcgaggacaagctgaaaagaaagctaaaggagtgccagcccgtgcttgagggagtggcagaggatttagacaaggtgcgacaactgcagcgtttgcaacagtatctgctcctggtgcaggacattcaggagataagcgctgccctaggcaatgccatcaatggcaaggacgaggacaaactggttaatatctacctaaccctctacgagggcaacgactgcgagcacagcgtagtgggtcgcctgcatgctgtgcaggcacagtcgctgaaatcctttgccgaacgcactgccatctactggcacaagctgctcctcaagcgcctgtccagcgcattcgaggctgtactgaagagcatgcgctgggcgcatctagaacagcaggcccttaactattcgtccgcacgagacactgccaaggcgcaactgctagcggagtacatgttcctcatcaaatctccagccgaagagcgggcgccactgcaaagcatcacgcccagcatcgtgtgccagcccatcaaccgggtggtgcagctcctattggcgccgtatcgccagcgtttccaatttcacttcacaggcaccagacaaaccaatagattagacaagcccgagtggttctatacgcaaattctcaactggggcaaggagacgcatttctttgtaggcaaaacatttcagccagctgccattaaagcgggtaagctggactacaatctcaggctggagtttattcgaggactggtgcagttagccattgaaaagttggcggtggacatagaacagattgcccaggaccagatactatttgcccatctacttgatgagacgctggccttcgaatccgagttacgggaaacatttgggtatccggctagttttcccagcgcgatttctgtaatcacacaacccatgtatttgctacgctggatttcactggaagaacgattttgtgcggaaaaaatggatgacattctgcaggcggagacgccattccagctaatcgatcccaactcattcgagaacgatctgaaaatacccaagtgtgcggatcagtttatgcgactgctggacgccattaaggatcgttactatggtctgattcaaccgggccaccagctgcagttcctgcacctgcaactggagctgatcgatagcttccgacaacgcctggtgcaactgcacagcagtggagcggtgccaagcattcccatactgaatgccatcaactatttggtaatggtgctccgtgaatggggcgaaaacgtgcattatctgcacctgcatgcggcacttgccggtccaaatgccacggagattaattcagtgttcgagcatgccgtcgctgatggtggcgaaatgttccaggtgctggtcaccctgctacacaatctggaacgggaactctccgccaatctgttcacccaaacgctccgtttgatagcccatcaaatcgatgacttcatgctcgagagcatggtcatgaacacgaagttctcagctgcgggagcagcgcaattcaattatgacatgacacgcaatttattcgcgctctttggacagtatacacgtcgtcccgagctgctcttcaagcgaacacacgatgcctgcaagctgctggcggcggcacgaggaacagctttgttgctgctggaaacgctgcgtggtaatcaatcggtggaggagaagacgaagccgctgagggaactgcatgtgctcagcatggacagcaaacagtgcattgaggttctggagcggaggatggacataaagatgttttag

SEQ ID NO: 9525 - protein, 675 aa, DROSOPHILA
MHAELSEMELRIVARLNEEIGKDASQLHRASHLVSHYKKHLQVLSQTLDYEDPQNVSCYKTAFQCQQQVCESIDFELEKLAHFEDKLKRKLKECQPVLEGVAEDLDKVRQLQRLQQYLLLVQDIQEISAALGNAINGKDEDKLVNIYLTLYEGNDCEHSVVGRLHAVQAQSLKSFAERTAIYWHKLLLKRLSSAFEAVLKSMRWAHLEQQALNYSSARDTAKAQLLAEYMFLIKSPAEERAPLQSITPSIVCQPINRVVQLLLAPYRQRFQFHFTGTRQTNRLDKPEWFYTQILNWGKETHFFVGKTFQPAAIKAGKLDYNLRLEFIRGLVQLAIEKLAVDIEQIAQDQILFAHLLDETLAFESELRETFGYPASFPSAISVITQPMYLLRWISLEERFCAEKMDDILQAETPFQLIDPNSFENDLKIPKCADQFMRLLDAIKDRYYGLIQPGHQLQFLHLQLELIDSFRQRLVQLHSSGAVPSIPILNAINYLVMVLREWGENVHYLHLHAALAGPNATEINSVFEHAVADGGEMFQVLVTLLHNLERELSANLFTQTLRLIAHQIDDFMLESMVMNTKFSAAGAAQFNYDMTRNLFALFGQYTRRPELLFKRTHDACKLLAAARGTALLLLETLRGNQSVEEKTKPLRELHVLSMDSKQCIEVLERRMDIKMF

SEQ ID NO: 9526 - DNA, 4226 bp, DROSOPHILA
gagcgggataattgggatggtcaaacagcctggcaatatcacattcgaagcaattgctttgcccgccaggtggacaattatttgaggcccaatgtaagtgccaccacgcagctgatcacggacagcgcagccatcaatgtcgcctttcgggcgtatctcacatggctgggtttccaggagccaaacaacgacttcactaaactgaccaaggagactctgccggatctgaactactcaaacacggcactattcttcttagcttatgcccaagagcattgcagtctggaggaggctcgtcccagggatgagcaagggactccggaaggatacctctatagtgcacgacagaatcacacctggactcgcctgcttgtaaacggacctttgcgaaactcagttgaatttgcgagtgaatttcggtgccccattggatcacccatgaatcctgcatccaagtgcatcatatactaacaataattggattttaaactattctattctatttttaactattctattctatttcacttattgaattaatagtagcatctgtattgaattcttcctaggctaacgttgaataaaccgcacatctaaacaccaattattgtttgtttagaataatctaaattaactatgaattgtctcgatttaatgacagtctatagtatagatcggaaatgtttccctgtctgagagaaattgtaaaccttctcggaccgttggattacaacatttgctagcttgatagtgggagaaccttgtcaccaagcgaatggtgttgttttgctgtcaatgccaagttctcggttgtcgaggccgagtttgtttacttctctcgcagatccctcaatgagcctcgatggatgtgataacccacagggactgagagtaaacttgacccagttctcccaggttcaagcccagccaggagaagcttccgattcgcgcattatcaagcctccagacaccgcagctcagtcgatttttcaacgccaagatgagagctaccagaagcgcttggttgggctttctgctcgagctgctactcctctttgaaatccaactttgcgatgtgactgaagcccgacaaaaccatatgaatcgcatgcagatgagtggaaactttccagactcacgtgaggagcaactggtgcgccaaaaaatagctacagatgtgcaaaagtatatgaacctgagcgccgatccctgtacggatttcttcgagtatgcctgcggtcagtggggccgttatcacaagcgacagcttcgtccggatgagttgtccactgcccagcaactgatggagaccaaaatttcggagcaactgcagcagcttctcacccagccactgccgccgcaacatcatccgaacggatatagtggagccagcatgacgaatgttcgaaaagtgcgagccttctacgaatcttgcgtcgcagtggaagcaaatgccagtgagagacgtcgtttcctaatgaagattctcaaggataacggaggattacgcaacgttcccaactccaactggcagcacaatcgtcagtgggtacaaacactgggcgaactgagaaggaactacggattggacatacttttgggtctggaaatcgatctgaatctgcaaaccatgaagggtaataccatatactttggtgagcccaagctcaccatcattccagctgagcactgcaatgccttggcaacgcgaggagctcaagtgcgagatgaggtctacgagctggtgcagcagcaggtgaccgagaatttgcgcgattggtttggcatggacaccggagaggcggctagatttgcaggagatattattcgtttcgagtttgagctgtgcaaacaaatgggagagcaggatattcagaagccagaggaggagtttccacccgccatacaggcgcaaatttacggcgcgcgatcgcgaactggtcaagagcgtctgcggcgccagaaaggaggaatgaccctgaccgagctcaccagcgagatgggaaatcacttggactttaaaatgctggtagaggtcatcctggagagtcagtacccatcccaagtctatcttcgttctccggaatatgttaaacatgtggtgaggactgttaaggccaataaccgcatcaccgttggtggctacattctatacgtggccctgaacgaactgaatcagccgccagaggaagcaccttcacaacgtgcccgccaatgcgtccaggtgacgcaacgtctctttccgcaagttttgggtgagatgttccagcgccatgtacagcgcgataatgcaaaacatgatctggacgccgttttcaacgatgtgatcaaggcgctcgaggagcagttccacgtggaatggatggacgagaacgatcgcagggcggccagaaccagactgtcacaatatcgagtgtctctgccggattaccaaagtttggatctaaccgatttgcagttccagaagtcagaagactactggcgccgtttggagattgcactaaagtatcgttcccatcagcagttcgaagccctcaggggcaacgattttggtcaggatgcagacggtctggatgcattcgaggtgcgagctgctctatccccccgccagcaaatggtcctggttggatggggtctgctgcaggctccatactacaattactactacccaaagtctttgaaatatgcgctattgggccatcgattggccagtgcattggttcaggcattcgatgacgagggatggaacaatcatccacaggcgacggcccagtggaatgaggtgaccatgtctggttaccgaaatgccagcgaatgccaacgggctcagtacagtagttacttgtacaatgaacctggcgaatttcgcaatgccaccaggctaagagagattatagccgatggcagtggtctcaacttggccttcaacgcgtatctagcttggctggagcagcaggatcacaagctacgtccactactggcgaaggaaacgctgtcggagttaaatttcaccaacacccagctattcttcatatacttcgcacagacgcgctgctgggcaaaggacaaccaggatgccatcctggactcgatgcctctgatgcagcacacaccggagagatgggatgtcaatggaccgctcagcaactccgcggaattcggacgagagttcggctgtgccctgggcacaccgatgaatagtggcgacaagtgtttggtttactgatgatgacaaggcggaaataaaatatacttggaaagtaagtcaagagagtggagtttctgattgaagtgcggtcagtaggatgccagtttttttgtgtttaggtgggtacataaacatctaagagctcgcatttactgtaaaaacagacatctttaaaatggtagtatgcaaggtgggcccttaagttctcgctgtctcacagttttttgtgtcaatcgaagctcttgaaagcagaacgacgtgtctatccagcctgggctgggttttgagccctcgagcacgcagcgctccattcaaaccgattccgtaagagatatgggcactcgttaatacccatccaacggatgtgggcagatgcctcgaccttgaaccgcctgtcaatcgattgcccgtggccatatgaggcacacgcatttccgtttcagtttgatattaagcttacctgcaatgacacaagaattgagaagaattattaacaatattcaacagaagttaagctaatgaaacaaaaacaatatacaatataagaggaatcaatgaagtaatcattcttttttgcgacattggctgaaccttttattgagcttaattttctgattcacctttgctgatctcaattataaatatgcaatttttagacattgaatttgttttgcattccacagaatgcatcgccatatgtatatggcgaccaatttgactaaatcgtttgctaagcatcgcagtcaagcatcgcgatggctccaaatggagcggaagtgcaccatggccagtggataatattctgtaacctcttggagcgtatcatccaattgcagctatgcaaaaatggcatacatcttttcgacgctatgcgtcatgggagacagaaatgactatggcgataataaatggtggaagttttgtaatcgctttgaaagacgaaaaaatgagaaaaacaaaacccaatagaaagagcccgcaaagtaattttcaattcacattcgtaggaaaaagatgc

SEQ ID NO: 9527 - DNA, 2226 bp, DROSOPHILA
atgagagctaccagaagcgcttggttgggctttctgctcgagctgctactcctctttgaaatccaactttgcgatgtgactgaagcccgacaaaaccatatgaatcgcatgcagatgagtggaaactttccagactcacgtgaggagcaactggtgcgccaaaaaatagctacagatgtgcaaaagtatatgaacctgagcgccgatccctgtacggatttcttcgagtatgcctgcggtcagtggggccgttatcacaagcgacagcttcgtccggatgagttgtccactgcccagcaactgatggagaccaaaatttcggagcaactgcagcagcttctcacccagccactgccgccgcaacatcatccgaacggatatagtggagccagcatgacgaatgttcgaaaagtgcgagccttctacgaatcttgcgtcgcagtggaagcaaatgccagtgagagacgtcgtttcctaatgaagattctcaaggataacggaggattacgcaacgttcccaactccaactggcagcacaatcgtcagtgggtacaaacactgggcgaactgagaaggaactacggattggacatacttttgggtctggaaatcgatctgaatctgcaaaccatgaagggtaataccatatactttggtgagcccaagctcaccatcattccagctgagcactgcaatgccttggcaacgcgaggagctcaagtgcgagatgaggtctacgagctggtgcagcagcaggtgaccgagaatttgcgcgattggtttggcatggacaccggagaggcggctagatttgcaggagatattattcgtttcgagtttgagctgtgcaaacaaatgggagagcaggatattcagaagccagaggaggagtttccacccgccatacaggcgcaaatttacggcgcgcgatcgcgaactggtcaagagcgtctgcggcgccagaaaggaggaatgaccctgaccgagctcaccagcgagatgggaaatcacttggactttaaaatgctggtagaggtcatcctggagagtcagtacccatcccaagtctatcttcgttctccggaatatgttaaacatgtggtgaggactgttaaggccaataaccgcatcaccgttggtggctacattctatacgtggccctgaacgaactgaatcagccgccagaggaagcaccttcacaacgtgcccgccaatgcgtccaggtgacgcaacgtctctttccgcaagttttgggtgagatgttccagcgccatgtacagcgcgataatgcaaaacatgatctggacgccgttttcaacgatgtgatcaaggcgctcgaggagcagttccacgtggaatggatggacgagaacgatcgcagggcggccagaaccagactgtcacaatatcgagtgtctctgccggattaccaaagtttggatctaaccgatttgcagttccagaagtcagaagactactggcgccgtttggagattgcactaaagtatcgttcccatcagcagttcgaagccctcaggggcaacgattttggtcaggatgcagacggtctggatgcattcgaggtgcgagctgctctatccccccgccagcaaatggtcctggttggatggggtctgctgcaggctccatactacaattactactacccaaagtctttgaaatatgcgctattgggccatcgattggccagtgcattggttcaggcattcgatgacgagggatggaacaatcatccacaggcgacggcccagtggaatgaggtgaccatgtctggttaccgaaatgccagcgaatgccaacgggctcagtacagtagttacttgtacaatgaacctggcgaatttcgcaatgccaccaggctaagagagattatagccgatggcagtggtctcaacttggccttcaacgcgtatctagcttggctggagcagcaggatcacaagctacgtccactactggcgaaggaaacgctgtcggagttaaatttcaccaacacccagctattcttcatatacttcgcacagacgcgctgctgggcaaaggacaaccaggatgccatcctggactcgatgcctctgatgcagcacacaccggagagatgggatgtcaatggaccgctcagcaactccgcggaattcggacgagagttcggctgtgccctgggcacaccgatgaatagtggcgacaagtgtttggtttactga

SEQ ID NO: 9528 - protein, 741 aa, DROSOPHILA
MRATRSAWLGFLLELLLLFEIQLCDVTEARQNHMNRMQMSGNFPDSREEQLVRQKIATDVQKYMNLSADPCTDFFEYACGQWGRYHKRQLRPDELSTAQQLMETKISEQLQQLLTQPLPPQHHPNGYSGASMTNVRKVRAFYESCVAVEANASERRRFLMKILKDNGGLRNVPNSNWQHNRQWVQTLGELRRNYGLDILLGLEIDLNLQTMKGNTIYFGEPKLTIIPAEHCNALATRGAQVRDEVYELVQQQVTENLRDWFGMDTGEAARFAGDIIRFEFELCKQMGEQDIQKPEEEFPPAIQAQIYGARSRTGQERLRRQKGGMTLTELTSEMGNHLDFKMLVEVILESQYPSQVYLRSPEYVKHVVRTVKANNRITVGGYILYVALNELNQPPEEAPSQRARQCVQVTQRLFPQVLGEMFQRHVQRDNAKHDLDAVFNDVIKALEEQFHVEWMDENDRRAARTRLSQYRVSLPDYQSLDLTDLQFQKSEDYWRRLEIALKYRSHQQFEALRGNDFGQDADGLDAFEVRAALSPRQQMVLVGWGLLQAPYYNYYYPKSLKYALLGHRLASALVQAFDDEGWNNHPQATAQWNEVTMSGYRNASECQRAQYSSYLYNEPGEFRNATRLREIIADGSGLNLAFNAYLAWLEQQDHKLRPLLAKETLSELNFTNTQLFFIYFAQTRCWAKDNQDAILDSMPLMQHTPERWDVNGPLSNSAEFGREFGCALGTPMNSGDKCLVY

SEQ ID NO: 9529 - DNA, 8265 bp, DROSOPHILA
caaggagaacatgctgggcgagccgggtttcggtttcaagattgccatgcagacgctggacgccggccgcataggaatcgctggccaggcgctgggcattggtcaggctgccctcgaattggccgtggactacgcccagaagcgacaggccttcggcaagcccattgccaagctccagtccatccagcaaaagatcgcggacatgtcgttggccatggagtcggcacgtctgctcacctggcgcgccgcctggctgaaggaccaaaagcagccctacaccaaagaagctgcaatggccaagctggctgcctcggaggcggccaccttgtgctcccaccagtgtatccagatcctgggcggaatgggctacgtgaccgacatggcggccgagcgtcattacagggacgcccgcatcactgagatctacgagggcacctccgaaatccagcgactggtgatcgcgggctccattctaaaggaatatgctagttaagatcaaagttatatatccgtactacttgtgtctcgtttaataaagaacgtttttaatatactattttgctagttctattgagttgtataattgtttataatagatagaaatacatgaaaaaaacacctacaacattttaattctttagaaaaagttagcaaaacaataaatcttcgttcaaaaagtaaagtaaaataagtgaaactcttgactactttttagacgttgcatatttgtaaattaattaaaataatgaaccttaagtgcttttaaaatatatttataaacaaagcttattattttatatgcctaattatattatatcttttaaaccaaattttaaatgactcaaaaaaatgggaacttggcgccaaaactgcagcaaggctttgtcggttagcatatttgtgtggtatttttgtgacttcattcggtatattgctggtagctgtgcagcggtcacacagcaaaagcaaaaagtttctttatttatttgataattattcgttacgcggtaattaacgcgatgcaagtgcagcaggaacgtggtaatgagagtttttgccactgagctgcgcgtgtcggccgtccagaaagtgcagaaatcgcgtgaagtgcgcgaaatccgtccaagagcagaaaagtgccaagaatagctgcgatggaaacagcgatggatgtggtgtgtgtaatggatacggcggtgggcgaccatctggaggaccgccagtgtgcgctggaggagatcaagcaggcagtgcagtcggcgggcgccaactttcagcgggttcaggtgcgccagcttggttatacaatggcatatgggtgatttgacttacatcccccccacttggcatccttgcagttcgagcgcctggacttcggcgagacgaatgtgctggagacgttttacaacgccgatgtggccattatcgacctgagcattctcacccagcagcggccgctttcctatcactacggcgttagggagagcttcgggatgaaggagaacatcctcacctacaacgacatcgattccaagcagacgctcagtctcaaggtgcgttcggaagtgtttacctggccgggcgtgcctggcaaacatctgcgttcgtgatcgggaatccgcttccgataagataaatgctatgaccagcaactgcgtggactcctggactagttgttcttgctgatctttctacagtcgagcttccacaacgcgaactgagtttataacaagtctctaacctaggtgcttagacacctctttctggaaaatgactaaaaattattctatctactagtcttcctttagcaaattgcaaaagaaaccgaaaaacttcctctttccagaggttaataactaaaacctctttcccatatggcagccaataatttgaactatggaagttcgactgtatttccgtcgaatcgttttcgttatttttgttttggctgcggccataaagcaacaaaagcattggcccagcaataacaataacaaatgcgagcacgcccacgcaaacactcaaagaggcacgcacacactaacagcacggtgtacaccaacgcagcgtggcctgcattcacagtggcggtcattaaattaggtacactctactccccttgcagctctcgtgtgccaactacctgtttctcagctacaagcggaatgcggagaccaattcctgccacctgaccagccagcccaacagcggcaacaacagcaaggaacccaatgccgaaggacgagtgcccactttgcagtggcgcctcaagcgaaagctgcaagatgttgagatccagtcgaagtgagtacaatctagggagtccccttttgcagtaagtcatgcacggtgattgcatatcggaacactatttataacatcccctgcggcagattggctgcaaaagtcacgccctgcatctaaaatgaatcagaccgatttattgtgttggccttggaattgcatataaaatatcaataatcgctgaaaattcttaagtctctttatagtatcataattgtcctttcaatttaaattacttcgaactttagtgatactactacgggttaacaagtaatgaaatgaaagtaattgaaatcttaaatttggtgtaccagatagatgctaagttaattagtctttcagccagagcacgaaacactgttcctattatgcattatttgtgtacctaaaaactaaacgaagctattttcggttatttacagagcccacatgcgtgagaaatttctgagtgacatgcgaacggcgcgggacacgtacgccaccaacggcgccaagctgcagagtatattgcacgagatgcgaaagcggctggacgatccgcatgtcctgtctggcgaagtggtacacagtttcatgtgctcgctgagggatgtgcaggactacgatgccatggtgcgactggtcaatgacctgaagaacatacccaacacccggaagtacgtggagacgggcaacatgagtttcctgtacgccttcgccctgaaccgaagaaatcgaaagggagaccgtgaaaaggctctggaatcttcgctgaaggcgctggaaaagaaggagaaccactttccggacatgctctgcctgtgcggccgcatctacaaggacatctttgtggaatccgactacacggacgccaccagtttggcgcacgccatcaagtggtaccgccaaagctttgaggtgcagccgaatgagtatgcaggcatcaatctggctactctgctggttatcgagggcaaggagtttaccaatacggaggagttgcagcacatcggcatgaccttaaacaatttaatcggtaaaaagggcagcctatcctcgctgagtgagtattgggatgtggccaccttctttgagatctccgttttggccaacgactacgccaaggcgattcaagctgccgagtgcatgttcaagctaaagccacccaactggtatctgaagtcgaccatcggaaatatctctcttatacatcgatttcgaaagaagcccgaggaacgccagccgcccatcgaggagcaggtgttccagttctggatggacttctttctggaggccaccaacaccgaggaggttaagaacagcattcgctttccgattctggttggtacccctgatctgcagtttaagctttattattaactcaaaacaaattccagatcctcgagcctcagaagatttatatgcccagttatgtgactataaacatggatgcggatgagaagtccattcagattgtgaacatctgtttggctcacgcaaagaatgcgtgtaagaaaatccacgacttccttttcgtggcatcgaagatcaagtccgtcagcctttacaagagggatgatcgttgtgcctacttgtacgtccatcacaactcagatgattttcaaatatattttccctccactgaacgacgacaaaagttctacgatatgatcctggagatgactgcagatcaggtggtgtttgtcaatctcagcaatgatgacgctaatatcgaggtaagttatttattattcatatatacatatattccggccacttttgctaattattattaattgtagtacgagtacgactacgatgagcagaatcgcaaaatggtgctgggcaaaggtacttatggcaccgtgtacgccgccagggacaagcagacgcaggtgcgaatcgccattaaggaggtgccggaaaagaactcgcaggatgtgcagccactgcacgaggagattaagttacactctcagctgcgacatcgcaacatagttcgctatttgggatcgtgctcggagaacggcttcttcaagatcttcatggagcaggtgccgggaggatcgctttccgacctcttagagaccaaatggggtccgctcaaggacaacgagtccaccatggccttctactccaagcagatcctcgaggggctgaagtaccttcacgagcaggacattgttcatcgcgatataaagggtgacaacgtgctggttaacacgtatagcggcgtggttaagatctccgatttcggcacctccaagcggctggcccgcatcaacccgatgacggagacctttacgggcaccttgcagtacatggcgccggaggtgattgaccagggagtacgcggctatggcccggcggctgacatctggtcctttggatgcacaaacgttgagatggctacgggcaaaccaccgtttatcgagctgggtagcgcccatgcggccatgttcaaggtgggcttttacaagaagcatccgaacatacccgaggagctgtccgccaacgcaaagaactttattttgcgttgctttgccatcagcgtgatggaccgaccctccgcctcgcaacttctggaagatcccttcctacaagagtgagtttgcttaattgttttgcctaattcctttctaattgcacttttaattttctcaataagtaaaccccgcaaggtgcgcccagccctgcccatcaatactgagttcggacgcagcatttcggtgccggctgatcggtttgtgcacaaaaccacaccgccgctgagctacaacacaacctgcaatacgcccacaacgccggaattggagtaagttaaacgctgcgactattcttatcatgttcgaccttcctcaattacaagcagaggttatcttatctgttgaaaattatcatttatattttgctaattttaatgaatataaaaatttttccgtgcttctctatattttcccatatcgtctactattataagagtaacaagtgcctttgcttatcgtgtagttaacacattgattgttgctatcagtaaagtgcatatttaatgattggaaaatgcgcactcggattttgatactgagaagagatagcacttgatgtattgtaaaataaacgtaattttatattgtactttctgtttcctatttcagcataacgcattcatcctcggtggacattgacgagctgcccagcaaccagtttatgcttgaacggcgaaattcccatggatttttgctctcgccagagattgaaccttccacgccgtccttgcgtacgagcattagtgagacgagcgagactgacggtttttacaggcttaaaaaggattcgcagaggcggacaacgctttccaaggtgctggcactagacgaatccaagatctgcgatatttggctgaagaaggtcgacgctgatcagaactcgattgcgattaggaaaagcgatttggaggttctaatccgaggactgcgggactacattatgaacgaaaacgaaaagcatttggaagcgactatcaacgaactgaaacaaaagctgaacaacgacgcagttgctctggaccatcttcatttggcgctgtactcctttcaggacgccgtggtctgcgtactgcggtaccattgcatcaaaccccattggatgttcgcattggataatctggttaagcgggccgtccaggcggcggtcactattttctctcctgaactgggcgccaatctggcggacaaagacctgtctggaaatgatgatgagagcttgcgtacaagtctaatgcagaagggttccaccgagagccaggaaaagcagagcctggaaaaagttcttcccacgagcaacactcgcgaaggtgtgggattaacgcctgcggaatcgggcggggatgctctgtccagttcgatggagtgcgcgcgcatcctgagagacatccgtgacaatcagcagaagctgcaacgccagctccttgagcagcagcggcagagcatgagggccctgcataatatcagtcaggagctggctcacatttacatgggcggcagaaagagattaaggttggtaaaccaagtaggacattgtaaattttattataattcacaatttcatcttaacagacgcacaataaacggctttaacaaaaagtgccatagaatgagtaccagtgtgggcggaacgtccggagtccgtccgaatatagcgggcaatccccggaggcagctaaacaagcatcactttggtcttcacgaagtagacgagcagttggagcagtggttgacccagcaggaaatagacgagttctcaaagacgctcatcctgaatgaaggttttacatttgacgactttatctataacatggaaaagctggacctcatgaggctgggtctgcggtgcgttaaagcttataagaaaagtacacttaatccatgctcaactaacttttggtattttgcagcgttggcatcgaagtgcgtttgtggaaactcattatacaagaacgtgtgtgcacctcgtccgattgtgtggacagtccaccaagcacttaccacaaacccattggaggcaatagctcttttgcgcttattgacaacaacaatacgctaccatcacccacaaccacaactcccggaacgccgggcatcaaaacgaaaatcaagaaaagcgaaagcgagtacgattcgtgcagcgagtgactggagttgaaagctttctgagttgtgcctttacagatactactgattaattgttaatgttctccatgtgctactaaccgctgcgaggctcagctcaatgagtctccagcagccctgggttaagttctcccatgctgactcatgtcttttcaactttgagttcgaaaaggcgttgtctgtgtgtccagttttaacgattgcatgttaacttataaaaatggaatttacataagtgcctttaatttaaaaaaaaaagaaaacaaaaactgaaatagataatatattgtgaagtgctttgcaaaaaaggggtatttcttgttaactggaaaggatttatagcttctgaagaagactattatacatataagaatgaataaactcaaatttgttgtggttctccaaactttaaaggcgaaagataaccgaaagttgatatccgaacttttgtaggttcgtcattagggtttttccacgctaaaagctgcttttgttagatatactatgttttgaaaaggctcattttaatttataacttttctagttcgtttgcatttattttttttgttgagtttttttttgtccttaactgacattgcaggaaatttaataactgagtttacattgctttttgttatgtaagaaagttgcataattttttcattattgttgaagtttttgatgttattcgaaagcgtttcgttctgttgctgcagttgttcttgctgttgtttttgttgctgttgttgttgctgttgtaagtagttagatgttcttgttgttgttgttgctgttctggttgttgcgccaaagaatttatgccttggactcggcctcgctggcggtggcctgcgattgggcatcgctcgatttgccatcgtcgaccttgccaaagacgcagcaaggacacttctccttgagggccaggcgatatttcggatggctatacggaatgaaaataaaaaattggttaaatattaaggtatatacgtttcatagcccataaccaacctgatgccgtatacaattggattgtagcaggcggccgatttggcgaagcaagctccccaaatggtattcagtggtgtaaggccctcgaacttgaacagtcccatgcagttgatgaccaggtatggtgtccacgccatgaaccacagcgtgatggtgaccagagccaccttggccagcttgccctcggcgctcttctcggcatcctcagaggagcggagggacttgacattcatcttcttggcctgctcgcgcatggccttctcgtgggcggagacagcctgtg

SEQ ID NO: 9530 - DNA, 4408 bp, DROSOPHILA
ttacgcggtaattaacgcgatgcaagtgcagcaggaacgtggtaatgagagtttttgccactgagctgcgcgtgtcggccgtccagaaagtgcagaaatcgcgtgaagtgcgcgaaatccgtccaagagcagaaaagtgccaagaatagctgcgatggaaacagcgatggatgtggtgtgtgtaatggatacggcggtgggcgaccatctggaggaccgccagtgtgcgctggaggagatcaagcaggcagtgcagtcggcgggcgccaactttcagcgggttcagttcgagcgcctggacttcggcgagacgaatgtgctggagacgttttacaacgccgatgtggccattatcgacctgagcattctcacccagcagcggccgctttcctatcactacggcgttagggagagcttcgggatgaaggagaacatcctcacctacaacgacatcgattccaagcagacgctcagtctcaagctctcgtgtgccaactacctgtttctcagctacaagcggaatgcggagaccaattcctgccacctgaccagccagcccaacagcggcaacaacagcaaggaacccaatgccgaaggacgagtgcccactttgcagtggcgcctcaagcgaaagctgcaagatgttgagatccagtcgaaagcccacatgcgtgagaaatttctgagtgacatgcgaacggcgcgggacacgtacgccaccaacggcgccaagctgcagagtatattgcacgagatgcgaaagcggctggacgatccgcatgtcctgtctggcgaagtggtacacagtttcatgtgctcgctgagggatgtgcaggactacgatgccatggtgcgactggtcaatgacctgaagaacatacccaacacccggaagtacgtggagacgggcaacatgagtttcctgtacgccttcgccctgaaccgaagaaatcgaaagggagaccgtgaaaaggctctggaatcttcgctgaaggcgctggaaaagaaggagaaccactttccggacatgctctgcctgtgcggccgcatctacaaggacatctttgtggaatccgactacacggacgccaccagtttggcgcacgccatcaagtggtaccgccaaagctttgaggtgcagccgaatgagtatgcaggcatcaatctggctactctgctggttatcgagggcaaggagtttaccaatacggaggagttgcagcacatcggcatgaccttaaacaatttaatcggtaaaaagggcagcctatcctcgctgagtgagtattgggatgtggccaccttctttgagatctccgttttggccaacgactacgccaaggcgattcaagctgccgagtgcatgttcaagctaaagccacccaactggtatctgaagtcgaccatcggaaatatctctcttatacatcgatttcgaaagaagcccgaggaacgccagccgcccatcgaggagcaggtgttccagttctggatggacttctttctggaggccaccaacaccgaggaggttaagaacagcattcgctttccgattctgatcctcgagcctcagaagatttatatgcccagttatgtgactataaacatggatgcggatgagaagtccattcagattgtgaacatctgtttggctcacgcaaagaatgcgtgtaagaaaatccacgacttccttttcgtggcatcgaagatcaagtccgtcagcctttacaagagggatgatcgttgtgcctacttgtacgtccatcacaactcagatgattttcaaatatattttccctccactgaacgacgacaaaagttctacgatatgatcctggagatgactgcagatcaggtggtgtttgtcaatctcagcaatgatgacgctaatatcgagtacgagtacgactacgatgagcagaatcgcaaaatggtgctgggcaaaggtacttatggcaccgtgtacgccgccagggacaagcagacgcaggtgcgaatcgccattaaggaggtgccggaaaagaactcgcaggatgtgcagccactgcacgaggagattaagttacactctcagctgcgacatcgcaacatagttcgctatttgggatcgtgctcggagaacggcttcttcaagatcttcatggagcaggtgccgggaggatcgctttccgacctcttagagaccaaatggggtccgctcaaggacaacgagtccaccatggccttctactccaagcagatcctcgaggggctgaagtaccttcacgagcaggacattgttcatcgcgatataaagggtgacaacgtgctggttaacacgtatagcggcgtggttaagatctccgatttcggcacctccaagcggctggcccgcatcaacccgatgacggagacctttacgggcaccttgcagtacatggcgccggaggtgattgaccagggagtacgcggctatggcccggcggctgacatctggtcctttggatgcacaaacgttgagatggctacgggcaaaccaccgtttatcgagctgggtagcgcccatgcggccatgttcaaggtgggcttttacaagaagcatccgaacatacccgaggagctgtccgccaacgcaaagaactttattttgcgttgctttgccatcagcgtgatggaccgaccctccgcctcgcaacttctggaagatcccttcctacaagataaaccccgcaaggtgcgcccagccctgcccatcaatactgagttcggacgcagcatttcggtgccggctgatcggtttgtgcacaaaaccacaccgccgctgagctacaacacaacctgcaatacgcccacaacgccggaattggacataacgcattcatcctcggtggacattgacgagctgcccagcaaccagtttatgcttgaacggcgaaattcccatggatttttgctctcgccagagattgaaccttccacgccgtccttgcgtacgagcattagtgagacgagcgagactgacggtttttacaggcttaaaaaggattcgcagaggcggacaacgctttccaaggtgctggcactagacgaatccaagatctgcgatatttggctgaagaaggtcgacgctgatcagaactcgattgcgattaggaaaagcgatttggaggacgccgtggtctgcgtactgcggtaccattgcatcaaaccccattggatgttcgcattggataatctggttaagcgggccgtccaggcggcggtcactattttctctcctgaactgggcgccaatctggcggacaaagacctgtctggaaatgatgatgagagcttgcgtacaagtctaatgcagaagggttccaccgagagccaggaaaagcagagcctggaaaaagttcttcccacgagcaacactcgcgaaggtgtgggattaacgcctgcggaatcgggcggggatgctctgtccagttcgatggagtgcgcgcgcatcctgagagacatccgtgacaatcagcagaagctgcaacgccagctccttgagcagcagcggcagagcatgagggccctgcataatatcagtcaggagctggctcacatttacatgggcggcagaaagagattaagacgcacaataaacggctttaacaaaaagtgccatagaatgagtaccagtgtgggcggaacgtccggagtccgtccgaatatagcgggcaatccccggaggcagctaaacaagcatcactttggtcttcacgaagtagacgagcagttggagcagtggttgacccagcaggaaatagacgagttctcaaagacgctcatcctgaatgaaggttttacatttgacgactttatctataacatggaaaagctggacctcatgaggctgggtctgcgcgttggcatcgaagtgcgtttgtggaaactcattatacaagaacgtgtgtgcacctcgtccgattgtgtggacagtccaccaagcacttaccacaaacccattggaggcaatagctcttttgcgcttattgacaacaacaatacgctaccatcacccacaaccacaactcccggaacgccgggcatcaaaacgaaaatcaagaaaagcgaaagcgagtacgattcgtgcagcgagtgactggagttgaaagctttctgagttgtgcctttacagatactactgattaattgttaatgttctccatgtgctactaaccgctgcgaggctcagctcaatgagtctccagcagccctgggttaagttctcccatgctgactcatgtcttttcaactttgagttcgaaaaggcgttgtctgtgtgtccagttttaacgattgcatgttaacttataaaaatggaatttacataagtgcctttaatttaaaaaaaaaagaaaacaaaaactgaaatagataatatattgtgaag

SEQ ID NO: 9531 - protein, 1310 aa, DROSOPHILA
MDTAVGDHLEDRQCALEEIKQAVQSAGANFQRVQFERLDFGETNVLETFYNADVAIIDLSILTQQRPLSYHYGVRESFGMKENILTYNDIDSKQTLSLKLSCANYLFLSYKRNAETNSCHLTSQPNSGNNSKEPNAEGRVPTLQWRLKRKLQDVEIQSKAHMREKFLSDMRTARDTYATNGAKLQSILHEMRKRLDDPHVLSGEVVHSFMCSLRDVQDYDAMVRLVNDLKNIPNTRKYVETGNMSFLYAFALNRRNRKGDREKALESSLKALEKKENHFPDMLCLCGRIYKDIFVESDYTDATSLAHAIKWYRQSFEVQPNEYAGINLATLLVIEGKEFTNTEELQHIGMTLNNLIGKKGSLSSLSEYWDVATFFEISVLANDYAKAIQAAECMFKLKPPNWYLKSTIGNISLIHRFRKKPEERQPPIEEQVFQFWMDFFLEATNTEEVKNSIRFPILILEPQKIYMPSYVTINMDADEKSIQIVNICLAHAKNACKKIHDFLFVASKIKSVSLYKRDDRCAYLYVHHNSDDFQIYFPSTERRQKFYDMILEMTADQVVFVNLSNDDANIEYEYDYDEQNRKMVLGKGTYGTVYAARDKQTQVRIAIKEVPEKNSQDVQPLHEEIKLHSQLRHRNIVRYLGSCSENGFFKIFMEQVPGGSLSDLLETKWGPLKDNESTMAFYSKQILEGLKYLHEQDIVHRDIKGDNVLVNTYSGVVKISDFGTSKRLARINPMTETFTGTLQYMAPEVIDQGVRGYGPAADIWSFGCTNVEMATGKPPFIELGSAHAAMFKVGFYKKHPNIPEELSANAKNFILRCFAISVMDRPSASQLLEDPFLQDKPRKVRPALPINTEFGRSISVPADRFVHKTTPPLSYNTTCNTPTTPELDITHSSSVDIDELPSNQFMLERRNSHGFLLSPEIEPSTPSLRTSISETSETDGFYRLKKDSQRRTTLSKVLALDESKICDIWLKKVDADQNSIAIRKSDLEDAVVCVLRYHCIKPHWMFALDNLVKRAVQAAVTIFSPELGANLADKDLSGNDDESLRTSLMQKGSTESQEKQSLEKVLPTSNTREGVGLTPAESGGDALSSSMECARILRDIRDNQQKLQRQLLEQQRQSMRALHNISQELAHIYMGGRKRLRRTINGFNKKCHRMSTSVGGTSGVRPNIAGNPRRQLNKHHFGLHEVDEQLEQWLTQQEIDEFSKTLILNEGFTFDDFIYNMEKLDLMRLGLRVGIEVRLWKLIIQERVCTSSDCVDSPPSTYHKPIGGNSSFALIDNNNTLPSPTTTTPGTPGIKTKIKKSESEYDSCSE

SEQ ID NO: 9532 - DNA, 5506 bp, DROSOPHILA
tcagagccagtgagtggtgcatttacgcagctgcaaatagtagtgtacgccggctgtatctaacgcgttcgttgaactcgaagtcgaaaacaactgcgacagtgcttgcagcactgcacacaagcacgaaagaagtttttgactattatttaccccgcttctgggtgacacgagcaaagacaattattgaatcgatttctgggtcagccaagacagttgttatcagagacctttggttgaaaagttttgtattatttaaaaacataaggatttatttacatacctaatcttttatatacatgtacgtgaaattaattcgttggactcttgatgcatgtatcacagttcaatattctcgcttcagtacattttacatgcaccattactcacagcaccggccaaaatgatttgccggcgagtcgcatattgtataccctagacaagcaagaaaaaacgtcttgctatgagcagcataatacggcattcgcaagacgctaaacgaaactgatttaaacggtatcaaaaagtggcgccaatggtgaggccgactcacaattaaatttgtattcatagactgacgctttcaacagataaagcggttcggttgccaaaacatgagacccgcaatcagtcaaagtaaaaagaagataaagagtgaataataacgtaaagattgcgcatccgtactgtccgcccgaccgccttaaatctagtgccgatccaaacttccgctatgggttcacccactcgctgataacgcacgaatttctcagaaagttctgtagtgttgaagctgcatcggaataattgcaaatcgactgcccagtttcggtttgtattgcctttactcagcagctcgccatgccacttgctcttcccccattccctgactgggtcggcatatacccggaccgtcagatctccgggccgtcgttgaagtcagacgactagtcattcggtcagaactcgagcaggctgtcagtcgtgcatgtactgtgtactgctttccatcaattgaaaatctgagtttgttttcgggctgcgctcagagactacgatcgcgcatttcgtagggtaaatgaaattaatttaaaaagttcttcggtcagttcggaatttgtttccagaacgaagggagggcgctttccgtggtcccagatacgcgtaagtaatttttagaaatgcaaattaccgcttttaattaacttgaattgaggtagcaagcaaacgacacatgagttgatgatgagtttatcaaactggtttaagccaaaaaaacgtactgccttctcttgtactgttaaccaattaatttctagtgtatagtgcaaataaaactgcgccttaaaacgaggattccagatttcgaacgagcaccttaaaaggttatctttaaaagcaaagcattatgtgaacggtaaacagatcaattcttataagcgattttagtgcgaagtgaaattattgaatttcttatcaaaaaatcaccattttccttctcaaggagcaatgacatcgattcaaaacaacaacgaagtctagaaatattaaaatggaaactgccagcagcgtaaaaggcagtacaacctcccaaatcagctcccttcaatatagcagcgacattaacgccgatagcctcgagcccgatcaatctgaggactttcaaacagtcctcggcctcaagtatttgccatcctggccagcggtaaatttgcagttttcggaactatgttatgtggttcccgaccagaccaatggtgagtgtatcaaatcagcttatgtctattacggttgagtaattgataatgaatatattcgtgattgataatggggtattaagaatggtaattgcacattttcgaagtaattactgcttccacagctcgcttgatttctaatgctgaacatgcacatattaaatagcaatttccgtctaattccacattaacgacaataaattaatgccgacatcttcccttacaatgaaacattaaaattattctttttaatatggtcatcacaccccacagcttcaaaaacaaagacgattttgcggagagtcaatggaatgtttcactctcacgaacttactgcgattatagggccttcaggcgctggtaaaaccacactgctaaacctgctggcgggctttgggtaagatataacacaaacgacccccttataatactcctttaatatttaccgatagcgccgtgtgcgaatccggcgagattttggtaaacaacagtccgcgagatatgcgagtctttcgcaaaatgtctcgatatataatgcaggtaaaagtggattactgaattgcgttcccataaatattggtgtaattcatagactgatgtcctggactcacagtttaccgtactagaaatgatgattttggcggcaaacttgaagttgggaaaagaactaaatttaaaacaaaagctagaagtggtaagattgattttaaatcatgcactttgtcgtgtatttatcttaacatttgagcagattgacgaaattttgggaatgttgcgcctaaaagacaccctaaacaccatggctcaaaagctatctgggggtgagcgaaagcgtttatgcattgcccttgagctggtcaacaacccacctgtcatctttctagatgaacctacaacgtgagtataagataaatattgaagtcgaagaactaatgttaccaccaactcaacagtggtttagacgatttatcgagttcacaatgcattgccctactcaaagttttggccgccggggggcgcactgtgatctgctccatccatacgccatctgccaagatcttcgagatgctcgatgcagtctacgttctagccgaaggccagtgcgtctaccaaggaaaggggtccaacattgtacctttcttgaagaactttgggctttgttgtccaataacctacaacccggctgacttcattatcgaagttgcttgccttgagtatggcgggtcctatcacgagccaatggtagaagccgtgggcaacggcaaagttgcgcgatggagtcctccagcagtggaaggtgaaacaacaacaaccaaaaccgacaccacatcgggggcatcgtcgttttacgaaagggatcagtttgacgaagagattagcccaaaacttttggaggccaaatgtagctggtggctacagtacaagctattgcttgtgcgtatgctaatccaaatgtggagagataaggtgagtgcacttagaaaacgacgtagaaaggcaatgtaattttattttttccgtagtcgtacatcaagcttaagttctacatgaacatcgttcttgctttactggtgggttcgctctactttggtatgggaacctcggcctctaaagcgctttttaacttcggtttcatgttcaccattgtgatagcatacctctaccttcctatgatgcctgtgctcttatattgtaagtactatattttaacctcaagcagtaattcttaataataaatacctacatttaagttcccacggaaatcaatctgttaaaaagggagtacaacaaccagtggtaccgtctgagctcctactacgcagcaatggttacctcaaagctaccatctatgtttattttggccgttatttatctatccattgtgtacttaatgtccagccaaccacttgaatggttccgctttgccatgctatttacaatagctttcgtaacggccctaacttccgacagttttggcttgttgatctccagtagactgagcttagtggtaagcgatttggcgcacatttatttttaatatatcctgattagttcacttatactttagaatgcaatgttcatggggccagttctcgccgtgccgctgatcctgctttccatttacggcattgggtatggcggaggaacatacatatcccctcttatgaggtttctcatgcatcttagctaccttcgccatagtatggaaggcctagtcgcatccttgtacgactacggacgcgccgacacaatttgcgaagacacggaaatcttttgctcatttaaaaagtcgaaagttttgttagcctttttaggattcgaaaacatgcactatttgtggtctctatcttgcttgatgagtttttatttgctgttcaccgtagcagcatactttatgattagactgcgactgaaacactccgaggtcagccccatttttgcatatgtcatacagctgttaacgaaatattttaactttacttcgtacaattactaacattaacaacatgggcggtttgacctcggtgctagaaaaattattttaagcggtatttcaggggacagtcttaacctcccatattatttatgggcttcaataatattaataaactatcaaagtgatattggattctgaataaaagtttatgatcaagaatacaaatataatcaagggaacaataaattactataattcgatcatattgttaacaaggcagaagaaacactacgaataaattattaagtacgcataaaattgttttcaccaaatatgtaaaaaatattagtgggtttacttttttatgcgatggcgtaagtttatatgtatatcatggaaatattaaatataaacaagagagaatactatagtcgagttccccgaatatcagataccccttactcagctagtgtaaatgcggacgcgaaatttcataatttttctgggtgtggctgttttgggcggttttagggagttgcaaaaagttttttagaaaatcgatctatcgatttttacaagactaatcaaaaatgaaaaaatttcaacacattttttaaaattgtgtaaaatttttgagtgggcgtggtaacaaaggtcaacaaatatctgtctctagaatctgtgtgctgaatctcaacgttctagcttttatagttcctcgacgttcaaacggacatgtctagatcgactcggttattgatcctgatcaagaatatgtatactttatacagtcggaaacgtttccttctgcctcttacatacttttcaacgaatgtagcacacccttttactctacgagtcacgggtataaaaatatatagatgtagatatgcttcaaattgcataagagttagaatcaagtcttgcccaagattagaatttaggattgagttaaagatctgcgccgttcgttaccaaactctatctgcctttagactaattttaagtcagaacggcaaagtatgacttcgcctgttcccttgattcactttaaagtattcaaattatttggtagctctatcaattgtgatatgagccgtcacaataaaaaccgacaaagttaattatggaaattatttgaacaactgccgtcgctgtggattggcgcacagttgtctatttaagaggcaaggaaactggactgccgtgaatacagttgatcgataggagccaaagcagtatgttttacgcattcatagcacttgttttggccatgctccacctgtcattcgcagtacaggtgcaaacggag

SEQ ID NO: 9533 - DNA, 2396 bp, DROSOPHILA
ctgctttccatcaattgaaaatctgagtttgttttcgggctgcgctcagagactacgatcgcgcatttcgtagggtaaatgaaattaatttaaaaagttcttcggtcagttcggaatttgtttccagaacgaagggagggcgctttccgtggtcccagatacgcgagcaatgacatcgattcaaaacaacaacgaagtctagaaatattaaaatggaaactgccagcagcgtaaaaggcagtacaacctcccaaatcagctcccttcaatatagcagcgacattaacgccgatagcctcgagcccgatcaatctgaggactttcaaacagtcctcggcctcaagtatttgccatcctggccagcggtaaatttgcagttttcggaactatgttatgtggttcccgaccagaccaatgcttcaaaaacaaagacgattttgcggagagtcaatggaatgtttcactctcacgaacttactgcgattatagggccttcaggcgctggtaaaaccacactgctaaacctgctggcgggctttggcgccgtgtgcgaatccggcgagattttggtaaacaacagtccgcgagatatgcgagtctttcgcaaaatgtctcgatatataatgcagactgatgtcctggactcacagtttaccgtactagaaatgatgattttggcggcaaacttgaagttgggaaaagaactaaatttaaaacaaaagctagaagtgattgacgaaattttgggaatgttgcgcctaaaagacaccctaaacaccatggctcaaaagctatctgggggtgagcgaaagcgtttatgcattgcccttgagctggtcaacaacccacctgtcatctttctagatgaacctacaactggtttagacgatttatcgagttcacaatgcattgccctactcaaagttttggccgccggggggcgcactgtgatctgctccatccatacgccatctgccaagatcttcgagatgctcgatgcagtctacgttctagccgaaggccagtgcgtctaccaaggaaaggggtccaacattgtacctttcttgaagaactttgggctttgttgtccaataacctacaacccggctgacttcattatcgaagttgcttgccttgagtatggcgggtcctatcacgagccaatggtagaagccgtgggcaacggcaaagttgcgcgatggagtcctccagcagtggaaggtgaaacaacaacaaccaaaaccgacaccacatcgggggcatcgtcgttttacgaaagggatcagtttgacgaagagattagcccaaaacttttggaggccaaatgtagctggtggctacagtacaagctattgcttgtgcgtatgctaatccaaatgtggagagataagtcgtacatcaagcttaagttctacatgaacatcgttcttgctttactggtgggttcgctctactttgttcccacggaaatcaatctgttaaaaagggagtacaacaaccagtggtaccgtctgagctcctactacgcagcaatggttacctcaaagctaccatctatgtttattttggccgttatttatctatccattgtgtacttaatgtccagccaaccacttgaatggttccgctttgccatgctatttacaatagctttcgtaacggccctaacttccgacagttttggcttgttgatctccagtagactgagcttagtgaatgcaatgttcatggggccagttctcgccgtgccgctgatcctgctttccatttacggcattgggtatggcggaggaacatacatatcccctcttatgaggtttctcatgcatcttagctaccttcgccatagtatggaaggcctagtcgcatccttgtacgactacggacgcgccgacacaatttgcgaagacacggaaatcttttgctcatttaaaaagtcgaaagttttgttagcctttttaggattcgaaaacatgcactatttgtggtctctatcttgcttgatgagtttttatttgctgttcaccgtagcagcatactttatgattagactgcgactgaaacactccgaggtcagccccatttttgcatatgtcatacagctgttaacgaaatattttaactttacttcgtacaattactaacattaacaacatgggcggtttgacctcggtgctagaaaaattattttaagcggtatttcaggggacagtcttaacctcccatattatttatgggcttcaataatattaataaactatcaaagtgatattggattctgaataaaagtttatgatcaagaatacaaatataatcaagggaacaataaattactataattcgatcatattgttaacaaggcagaagaaacactacgaataaattattaagtacgc

SEQ ID NO: 9534 - protein, 643 aa, DROSOPHILA
METASSVKGSTTSQISSLQYSSDINADSLEPDQSEDFQTVLGLKYLPSWPAVNLQFSELCYVVPDQTNASKTKTILRRVNGMFHSHELTAIIGPSGAGKTTLLNLLAGFGAVCESGEILVNNSPRDMRVFRKMSRYIMQTDVLDSQFTVLEMMILAANLKLGKELNLKQKLEVIDEILGMLRLKDTLNTMAQKLSGGERKRLCIALELVNNPPVIFLDEPTTGLDDLSSSQCIALLKVLAAGGRTVICSIHTPSAKIFEMLDAVYVLAEGQCVYQGKGSNIVPFLKNFGLCCPITYNPADFIIEVACLEYGGSYHEPMVEAVGNGKVARWSPPAVEGETTTTKTDTTSGASSFYERDQFDEEISPKLLEAKCSWWLQYKLLLVRMLIQMWRDKSYIKLKFYMNIVLALLVGSLYFVPTEINLLKREYNNQWYRLSSYYAAMVTSKLPSMFILAVIYLSIVYLMSSQPLEWFRFAMLFTIAFVTALTSDSFGLLISSRLSLVNAMFMGPVLAVPLILLSIYGIGYGGGTYISPLMRFLMHLSYLRHSMEGLVASLYDYGRADTICEDTEIFCSFKKSKVLLAFLGFENMHYLWSLSCLMSFYLLFTVAAYFMIRLRLKHSEVSPIFAYVIQLLTKYFNFTSYNY

SEQ ID NO: 9535 - DNA, 5397 bp, DROSOPHILA
gttctctgcttaaagctaactctagacggactatttatttcattttcatttgacagtcatggcaactcaaacgtgttttcatcagagggaataaagtattgcttgcagtattttgagaaaatgggtcacgaagttaaggctgtggttccaatgttccggaaaaacaacttcaagtcttcgaatcccgagcttctcgataagctgcacaaggaagggaagattgtgtttacgccgtgcaaaaacattcccggtcaaattacgtctagctacgatgatcggtgagctccttagaaaaaacttctatttagaaatggaaatgcataattttttttttcagtttcattttgcagctggcatacgaaaagaatgccgccgtggtttccaacgacaactacagagacctgattaatgaaaatcctgcatttaaattgatcgttgagaatcgagttcttggttactcctggtgcgacaacatattcattttacccaaggatccttacggccgctggggacctaccctcgacgaaattttgaggtgctaatgcacctagccatatatttgttttcaaattattctttagtttcgtgttatatcttaagttagtagttttcatttagtttggttgcgaattattcaactttcttttcctttacaattagcgttaagttggtcaatactgaagagttaatacgcagcgtttactcattttattagcatatagcatatagttttcgaccagaagggttttcatatgcctactattttaaaaatcttgcaaaattacgaagttcattatttacatataattttcgaccagaaaaattttttaatatgcactatacgtttatttatttatttactccaatggggtttataagttatgcaaaattaaagagttgccgaggagcaagatttatttacaaaggcaaagctgtacagtgtcttgtttagtgtataaataataatagatttactatttctcagaagtccaatgctttgttacaccactggtggttggccgttgaccaaaaatacggtggtggtggtggaagtggtggttgtggccacgttcgcctcgtaaaccggcggtggttcgttaattccaaccgccaaattgggattgctcgcttccaagctggtggctatggtcagtgtgctgtcctgctttcgctcgctaaaagcggcctcgtcgtagctgggcggcaaatccaaggtcttgggcaggacactaacttcgttctggctgtttgagcacacgtttccgactcctccggagccgccgttgcaattgttcgtcacattgatctccatttggcgacgggctgcgaaaaaagagatttaaatcgtagtggacaaggaaacctcagagaatctctttaaaaacggaagttagcaactatatcttttaaatatacgtctaaatcgctgcgttctgttaaccgatacctgctaatattggtattcctttatatatagcgtaacatgttctgttaaccgttaaatgttacccgcttttaaagcagaaaaagcaaccagccttccacaggggggtcgggtctcactaatgactttcaacatactgttcgagtcgttctttattttaaacgacatttataataacgtttttcatgctgattaaaaagccgttatattatggtaagagcactcaacccccttatgccaaaacaactacgcccttgagctctgctattgggtcagctgctctgacgccaggccaacagctgattgcgccaactaaggccaccacagaagtggaagcgcatcaatttaatcacagactttggaatttcaacacctacgcgccgttgaactccggcgctatctgtagtgcaccatatcgagtaagtgaaactattggcagtcattccgagcgagccgcgactcaccttcagtcagttgtgtttacataatggcgcagacgaaattactgaggtgaaagtttagctacatgtgagcgctggaaaatgtaaatgggaaaaatgtaaatgaaaatgctggcggagatgcaacaggttaagtgggctgtattcgccaaaaatcagttagcggagggcaaagttcaaagtgcctcagtgccttggttccgcgtaaaactacgcgcttaatttaggtgaaagcccaaaggttaatcggcattgacacctgttgtttttgcacaccggactaaacgctcttcattttgcagccggaggaatgctgttgcgtcgcgttctgggctacggagtagtcggcgccggactggcctccgccggctggagcctgcacaccaacgactacgatcccaactcactcggaatcgtccggctgtcgcgatccgccgccgccgtcgtggacgtggcactcacctacaagcgggaactttactacaaggaatgggataaggagacgcccgagtacaaggcggaaaagagccgggtccacaagatagccgccgagaagctacttcagctgatctgcataaacaagggtgtctacatcaaggtgggccagcacataggggccttggagtacctgctacccaaggagtttgtgcagaccatgaaggtacttcactccgatgcgccgcaaaaccccattgaggacctgtataaggtaatccgacaggatctgcactgcaatccggaagaaatcttcgacagcttcgagagggagccgctgggaactgcttcccttgcccaggtacataaggcgcgcctcaagaccggcgagctggtggccgtgaaggtgcaacatccctacgttaagggtaactcccgcgttgacatgaagaccatggaactggccgttaatgtgctggctcggatatttcccgacttcaagatccactggctggttgaggagtctaaaaagaacttgccaatcgaactcgatttcctaaacgagggacgtaacgccgagaaagtagccaagcagttcaagaagtactcgtggcttcgggtgcccaagatatactggaaatatagctcttctcgagtcctagtcatggagtacctggagggtgggcatgtcacggacttggactacatacggcgaaacaaaattgactcatttgcggtggccaatcgcattgggcagctctactccgagatgatcttccgcaccggtttcgtgcacagcgatccgcatccaggaaacatcttggtaagacgcacgccggaaaacagtctggagatagttctgctggatcacgggctgtatgcaaatctgacggacaagtttcggtacgattattccaatctctggctgagtatccttaaggtggaccgcaaagcgatgcgacaacacagtgagcagctgggaattaaggtattttcgcttgggaggtggatttgaacctaaaccttctaaccttctaaaccttcaatccagggcgatctgtacggtcttttcgcatgcatggtgacgggacgaccttgggagacggtgatgcagggcctgaccaaagtcaaatattccaaagaagaggtaagttcgtgccggaaattcttctcttcaattactcgtagtatatgctttgattctgcagaagaacacgctgcaaaacaacacgtccctggtgctgccgcacatttccgacgtattggagcaggtggaccgtcagatgctgctcattctgaagacaaatgacttgatccgcggaattgagtccacgctgcgcacgcagaaccggatgaccgccttctgggttatgtccaagtgctgtgttcaatcttcgtacgctgaacagcgagccaagcagtctgattccggatcctcgcgaatcctgtggctgcgggtgcgcgagcgatgggagcttttcaagctcaactgctactacctctacctgggactgattaattttggtttccttgaagctctcaagcaggttatttagactaaacggtgtcccccaattaaaagtacaaaactcttcacgaggaaagggaaattacctcgttgtctctgctgggccagattccgcacattggtctctcgcttgcgtttggcgctcttcggggagagagtgaatcattagcaggagcaggtagtgtcccattccgaatgggcttaccataatcatggccagaggaaaggcgatgacgaagaggaagaccagcacaatgtaaatgacatagctgggataaaataacatgtatggaccatcgtagccgccaccgttgatccaaattgtgacggaagtggtgttaacgtattcccaatccgatgtcgtactttcagtggtgttaagtgttccgttggccaccgtggtggagtcaaaaggggtgctgaccgtcgcgtttatggcaggggccatgttgaactcgggtgttaattcctgattggaactgaaaaatgtctcgaagacagcagttctctgacgaacagacagagccgactaacctgaactactggccaccgaattgataggacatccgggcatgggtcagactcggggctgacagcgaagaacgcacatatttgctttgtaatcattagctgataaggcgacaaaaccagtgtcgagccagggctttgttttttgttcgcattcgcaatttatctaatgaggcgatatgataaatgtgcgcaaatagatatatgttcgaacgcacgcatacgtatatatatatatatatatgtatattaatgtcgcccttgatttatggcggccgggaactcttgctctccctcatctcgagaacgagttcagtggcccaaccacgacaaatatttatgtttgccctcctcaaatgcctgaagaactcaccttgttcctgcttcgggcgcaacgacatcgagtacgagcgacaggcaatcagaagcacctggaagacgacactgggcagtgcgggataaacagacggctctgaggagaatactcactcgcaggagaaagagcaggaagctgaaggcgcacaggaccaggagcacgacgcccagattatccatttcggttaaatgacccgcaagatgacccacagaatgagtttttttggccaaaaacggaatccgcgattcactctaaggccccgggcacatgtcaaagcgataagatatgtaagatatggcgagtgggccgaactctgattacattttaagcagttgatggactttttaccacctttgtctccggccgcaggggatcccttccagactaatgagcgaactgggcccactggcagccgctctccaaatggccaactcccggagtgagcagccccagttatctcggccagattgcatttatgtttgtgccggctgttatctcctcgggattctgtccgccagtcacttgttaacggctaattgaagctaatctcatggttgttgcgtttgtgcatcctcgaattgcggccaaggaacgaccctcgaccctcgaccctcgaccctcgacc

SEQ ID NO: 9536 - DNA, 705 bp, DROSOPHILA
tcggctctgtctgttcgtcagagaactgctgtcttcgagacatttttcagttccaatcaggaattaacacccgagttcaacatggcccctgccataaacgcgacggtcagcaccccttttgactccaccacggtggccaacggaacacttaacaccactgaaagtacgacatcggattgggaatacgttaacaccacttccgtcacaatttggatcaacggtggcggctacgatggtccatacatgttattttatcccagctatgtcatttacattgtgctggtcttcctcttcgtcatcgcctttcctctggccatgattatgagcgccaaacgcaagcgagagaccaatgtgcggaatctggcccagcagagacaacgagcccgtcgccaaatggagatcaatgtgacgaacaattgcaacggcggctccggaggagtcggaaacgtgtgctcaaacagccagaacgaagttagtgtcctgcccaagaccttggatttgccgcccagctacgacgaggccgcttttagcgagcgaaagcaggacagcacactgaccatagccaccagcttggaagcgagcaatcccaatttggcggttggaattaacgaaccaccgccggtttacgaggcgaacgtggccacaaccaccacttccaccaccaccaccgtatttttggtcaacggccaaccaccagtggtgtaa

SEQ ID NO: 9537 - protein, 207 aa, DROSOPHILA
MAPAINATVSTPFDSTTVANGTLNTTESTTSDWEYVNTTSVTIWINGGGYDGPYMLFYPSYVIYIVLVFLFVIAFPLAMIMSAKRKRETNVRNLAQQRQRARRQMEINVTNNCNGGSGGVGNVCSNSQNEVSVLPKTLDLPPSYDEAAFSERKQDSTLTIATSLEASNPNLAVGINEPPPVYEANVATTTTSTTTTVFLVNGQPPVV

SEQ ID NO: 9538 - DNA, 4363 bp, DROSOPHILA
ttaacagccatcaaaggggattggcccattgcgtctgtcataaaaaaagttatttgccctcttactgcggatccaacttattgaatatgattcccagatgtcctccgcaacatcaaagggaaagcagtggattgggtggagcaaagtcgcaggctcatgcataatttaaagcaatttggcattgtgctgaatcaatttccacgcccagacaatcaaacggaaagtattaagacccgaaatccattccacgtgctgcagtgcttcccatgcaaattatactcttcagcactgcagcacttttatgtaaatccttgctccaggcaccaggtgccgctgcccaaaatggcagtgaattaaagcgccgacattttgtcatatttattaaaaatttatcaatgtcataaagtttaccgcacccggacaaaaaaaattccaagaacacacgcacacaatgggcaacgatcaatcaactttaaagccctcgcaagatttacttaggtcctccaattggaccccagatggtgcttaaagtccggcagtttcgccttaattccacacaaagttcggtaatggagctgtagttcttaaaaataaaaaatcgccttcttattaagactaaagaatctgtttacacaagttcatatcatttaaattcattttgtttattgcttaagaacgtttaatctaaatggatatagtattagtatgtcaagcctaaaagtataccagtttttctttaaatcaaatgcgttcatttataacttgtactgcaagagctttgcaaaaagtattggatatatgtatttattatttatatatttaaattttaattaatccatattgacataaactttttattacctattatttagcttgagttatttgtcacaataagatagaaactcaaaaacacaacacacccacaggtaacacaaaataaacacacacaaaaaaatataaaataataaaaacatttaaaaacaacaaaaacaccaaaaaaaaaacaaaacacacacacacattaacaccaaaaatgtcccagaatcatgcctctacggaagaagtcttgcacgtggtggaggccatcgaggcaggtgaaaaatccgaggtagacactgttccagtggttgtgccaccagaatcaacagctgagcccgaagtgatctccaagccagaggagggcaaccaaccagctggcgatgagccgcgggaggagaagccacagatcgaatctggcgcaattaccgcccaggtggcgacggaggagggacaggaagcggaaaccaccgaacacgtagctatcgaagcaactgagcttggtaatgaagtgcagcaaacggaagcatcagatgaactatcgccagaagaaaagaaactgaagctgaagaaggagcgaaaggagcgtttgaagaatttcgcaaccactcgctttgcaccgacagcaatcgagagcccagttcattttacaccggaatatatggaagagatcagggataatgaggtagaggaagaagagcaggaacaggtagtcacctttgatgagcccaccattggagacggggagtctgtgtcctcgtcagttctcaccgacgactcagaagactatccattccatccacccaaattggtcagcctattccccacctatggcttctcagatggccccgctgatagaaacatattccaatcggatgtgaagtatgaggacattgattattcggttagtttgactggcataagcattgtatcgacaagaacgttaaaaaccgaatgcgatccggattcagtccagttaaaaaccaactttctgagggactttgatgtgcccagtctgtcggacatatcggaggagcacgacgagtcttcacagtcattggacgctgggtcggtgataagcgtccagcaagatcatggcttctttgcggatccaacgtcgaacatggactccggttccagctcgtcgtcggaatcgattggagacgtggacaaagagcaacaggctgaggaggcggctccagaaagtgaggtcgactctttcgatgtctccgacataccggaattcgatgaaattccagtcgtaaaaagagtggaacaaaaccaagattctatcgatgcattcagcacattgtcaaaggttgcctttgcagttcccgaggtccgagacgatccagtcatttcgcatgctctcgagatcaaggcggtagtccgtgaactactgtacgaccttttcgaggagacggctagtttatcggacatccacaacaaggacaataaaattcgggcgaaattggacaagaataagctattgaccgagcttgataaagtcatcactacatatttgtatgagaagtacaccaacgaaatggtgggcaatcgacttgtggaatattataaacgcaatcgcaatgcccgtgtcttcgccacactctcgccggaaaatgaaaaacgattccactcccgatacatgcatgccctggccctgcttgacagtctgaagtatcgactggatgtggccaagcacaagcacgccatccagatgaacagagtgatcctggatctccactccgcccagagtgtcgcctcgatcactgaggaacgcttggagcacctgttccgggaacacctggtccggcccgaatcggataatctgcgacgtttagttgatcgcgaactgagaatgatgacagccaagcggaacgagatcagcgactccagactgtttctcatcacaagaaagcacaccttaggtcgcattatgggggtaagtctgccgtggactgcgaattccgcagcagtttttaacaaattaacattattcttctgtgacttgagcagaaaatcaaggaacttgacacactgagtgagaccttgagtatcgaagatttcttgtccgtgcaaaataatgtgtttgccctgcaaaagaaaatcgagggtgagcaccattattgcctaaaaaaaatacatgggctaatgaacaaatttcccgcagaacgcaataccgatctgaagaggatgcgaacccagttcctcatggacgttcatctcacgcgacacaatcgagaaaaggcgctggctctggcggaaaattttgagctaagtaaaatccggttgaagaatgccatgaaaaatcagacagacctgcgtagacgtctctacgaagtgaaattggagcggaagaagatgcgtcagcagtcaagggatatgaccttccacggcggcatcctggcgatgccctcgctgatgtacgactacgacaacactgtggagcgattgaaggagaagcgggaaacggtggccaagctcagggaaaccctaaagtcactccaacgtcggctcagctatgtagagggaagaagtatatagagttgtaagaatccacaaatcaataaaacagtacaatttataataaaatcgtttggctgcttttactgtgacaataagttgtaaatggattgaaagagcaatacttgtacaccactatagtgtacccttcacaacatctgtctcgatgaaaaaactgtcaaaaaaagcatagggccagatacataacaaatgtacacgagtacacaacaactctatacataaacactaaaaatataataaaaaacaaaaaaaacagcaaaagcacattaaaacaaatataaaaaatacaaatacttaagatcgtatgcaaaaacgaaataagtagtgaagtaaatatatacatacacgatggaaacggagaataatgaagaacctcagattgatttgttggaggaaaacgaagcggtacgaagcttggctgatgaagttctctcgagattttcaggcgatagtaaaaagtctgtttcggtgaatatttcaatggtttctatgtcatcaaatgaaaacagtgaagaaagactgaaaatcattagaaaggaggaaagaaaattggcaataaaggacatcatgaatcgactaaaggagcgtgacgcggaggagatgaaaatgaagaagtccggcgaacaggagggggaccaaagggaagacgaaatggccagcaagtcacaagacagtattcaacggcacatgtccatttcacaagtggaggagcaggacgatgaaacattgctgtggaccaagctgggtgaggatatcgacagtgacaacagaagaaccacggatattgctcccgcagcagacactttggacgcagttaatgccgaggacgaagacatgctcgatctcatcgaaaccccatcggaatctgattcagaagcaccagtgaccgagaggtccaagagcatagatcccatgaaagtggccgttaaatctttaatgctggtgcccagtctgtcggatatttcgctgccaagtgcgccgcccacgtcaagaaagtctt

SEQ ID NO: 9539 - DNA, 2289 bp, DROSOPHILA
aaaacaaaacacacacacacattaacaccaaaaatgtcccagaatcatgcctctacggaagaagtcttgcacgtggtggaggccatcgaggcaggtgaaaaatccgaggtagacactgttccagtggttgtgccaccagaatcaacagctgagcccgaagtgatctccaagccagaggagggcaaccaaccagctggcgatgagccgcgggaggagaagccacagatcgaatctggcgcaattaccgcccaggtggcgacggaggagggacaggaagcggaaaccaccgaacacgtagctatcgaagcaactgagcttggtaatgaagtgcagcaaacggaagcatcagatgaactatcgccagaagaaaagaaactgaagctgaagaaggagcgaaaggagcgtttgaagaatttcgcaaccactcgctttgcaccgacagcaatcgagagcccagttcattttacaccggaatatatggaagagatcagggataatgaggtagaggaagaagagcaggaacaggtagtcacctttgatgagcccaccattggagacggggagtctgtgtcctcgtcagttctcaccgacgactcagaagactatccattccatccacccaaattggtcagcctattccccacctatggcttctcagatggccccgctgatagaaacatattccaatcggatgtgaagtatgaggacattgattattcggttagtttgactggcataagcattgtatcgacaagaacgttaaaaaccgaatgcgatccggattcagtccagttaaaaaccaactttctgagggactttgatgtgcccagtctgtcggacatatcggaggagcacgacgagtcttcacagtcattggacgctgggtcggtgataagcgtccagcaagatcatggcttctttgcggatccaacgtcgaacatggactccggttccagctcgtcgtcggaatcgattggagacgtggacaaagagcaacaggctgaggaggcggctccagaaagtgaggtcgactctttcgatgtctccgacataccggaattcgatgaaattccagtcgtaaaaagagtggaacaaaaccaagattctatcgatgcattcagcacattgtcaaaggttgcctttgcagttcccgaggtccgagacgatccagtcatttcgcatgctctcgagatcaaggcggtagtccgtgaactactgtacgaccttttcgaggagacggctagtttatcggacatccacaacaaggacaataaaattcgggcgaaattggacaagaataagctattgaccgagcttgataaagtcatcactacatatttgtatgagaagtacaccaacgaaatggtgggcaatcgacttgtggaatattataaacgcaatcgcaatgcccgtgtcttcgccacactctcgccggaaaatgaaaaacgattccactcccgatacatgcatgccctggccctgcttgacagtctgaagtatcgactggatgtggccaagcacaagcacgccatccagatgaacagagtgatcctggatctccactccgcccagagtgtcgcctcgatcactgaggaacgcttggagcacctgttccgggaacacctggtccggcccgaatcggataatctgcgacgtttagttgatcgcgaactgagaatgatgacagccaagcggaacgagatcagcgactccagactgtttctcatcacaagaaagcacaccttaggtcgcattatggggaaaatcaaggaacttgacacactgagtgagaccttgagtatcgaagatttcttgtccgtgcaaaataatgtgtttgccctgcaaaagaaaatcgagggtgagcaccattattgcctaaaaaaaatacatgggctaatgaacaaatttcccgcagaacgcaataccgatctgaagaggatgcgaacccagttcctcatggacgttcatctcacgcgacacaatcgagaaaaggcgctggctctggcggaaaattttgagctaagtaaaatccggttgaagaatgccatgaaaaatcagacagacctgcgtagacgtctctacgaagtgaaattggagcggaagaagatgcgtcagcagtcaagggatatgaccttccacggcggcatcctggcgatgccctcgctgatgtacgactacgacaacactgtggagcgattgaaggagaagcgggaaacggtggccaagctcagggaaaccctaaagtcactccaacgtcggctcagctatgtagagggaagaagtatatag

SEQ ID NO: 9540 - protein, 751 aa, DROSOPHILA
MSQNHASTEEVLHVVEAIEAGEKSEVDTVPVVVPPESTAEPEVISKPEEGNQPAGDEPREEKPQIESGAITAQVATEEGQEAETTEHVAIEATELGNEVQQTEASDELSPEEKKLKLKKERKERLKNFATTRFAPTAIESPVHFTPEYMEEIRDNEVEEEEQEQVVTFDEPTIGDGESVSSSVLTDDSEDYPFHPPKLVSLFPTYGFSDGPADRNIFQSDVKYEDIDYSVSLTGISIVSTRTLKTECDPDSVQLKTNFLRDFDVPSLSDISEEHDESSQSLDAGSVISVQQDHGFFADPTSNMDSGSSSSSESIGDVDKEQQAEEAAPESEVDSFDVSDIPEFDEIPVVKRVEQNQDSIDAFSTLSKVAFAVPEVRDDPVISHALEIKAVVRELLYDLFEETASLSDIHNKDNKIRAKLDKNKLLTELDKVITTYLYEKYTNEMVGNRLVEYYKRNRNARVFATLSPENEKRFHSRYMHALALLDSLKYRLDVAKHKHAIQMNRVILDLHSAQSVASITEERLEHLFREHLVRPESDNLRRLVDRELRMMTAKRNEISDSRLFLITRKHTLGRIMGKIKELDTLSETLSIEDFLSVQNNVFALQKKIEGEHHYCLKKIHGLMNKFPAERNTDLKRMRTQFLMDVHLTRHNREKALALAENFELSKIRLKNAMKNQTDLRRRLYEVKLERKKMRQQSRDMTFHGGILAMPSLMYDYDNTVERLKEKRETVAKLRETLKSLQRRLSYVEGRSI

SEQ ID NO: 9541 - DNA, 3649 bp, DROSOPHILA
gagcgccatgttagtgcaaaggagcggaacggcaagcgctaccgcaatgtggcacctgtgttcagcatcgacgatgagaacgaggatgccttggacggggcgggggagcgggatgacgcaccgctgaccagcgacggcaaggagatcgtgaatctgaaccagtacttcaagacggcggacatcatcaacgccttcaagtgccaggaggtgcacatgagcggctacatgtacgacagtcatttgatcatcacgcccgggcaactggtggtgctgcgggaactgggacgcggccaggcgcagataatggtgcgtcgcccgctggcgagcatcgtgaagatcacggccaagaagcgacaccgcgacctcatcacgttcaagtacggattccccgatggcgatggtctgctcataaccgacatggaccgcttcctcataccaaatgcggccgaagttacggcactgatttcaaggctcatcgtgcaggtgcttgacgacgccaagtaggataaaccggacaaccgccgcatgctcttcttgtttccgcctttccgcatcaagctttatttcatgaacggccactgatacaaaaatcagagacacaaagtgcaatgcgccgctgcgagcggtgtaatagtttgtaattggcattgttttccttgtattagctgaaatagtatagttcttattgtaaacgaagcgctggctgcaattgtaacatagtgcactcggtgcagagaccggatttgaagaaaatagtcgaacgtagtcccagatcacatggccatcccgagcatgccacgcccccgatcccaattttctaaatttctaagtgcgaataaggaacccttaccgaagccctgagacttacaacgtgtacatgatgagagtaactaatatttattgcaatcaaaccaaacaaataaaactgtattataatcgacacaaaaaattgttaaaaaatcatagctctctttgaaatttcatcggaacttaacagatgcaccacgcagccgcatcttcttttttttttagatttcatgtttttccagcagcggaagattgcaggttgtggtgcgattctgtggatcctggagaccattgacttcgttgacaagattttgagcctgcgcaagttgtttgctccgatgggtgcgatataaccaggtcgccgaaacaagtaaggcgaccagcaatatggctgcgcacacagctactactactacgactaccattgggtaatctcggactgcttccagctttttctgattcagctccagtttgcccacgatcgccaggagttgattaaatgattccaaggtcacggattcctgggaagattttggttccttctgcagcgttgcgtaacctgctttcgaaggaactctttcccggacttctccacggagggcgacagctggactgcgcacggcacagtcgctttgaatgctcaggattccactgccattcaattggagctcctgcctctcaccggagcacactcctattaaagttagctcattggtaagggccaccatccaggagtttggtgccaccatctctgtccacagactcttctccttcacttgacgcaaggtgcagacttcggaagactggttccgtatggccgccagggagcaggcaaaactgtcatccccagtcccgtagataatgcggttgcgcctgcagatgaacctttcttcgcccaacttgatgcagtcgtccaagctctgaagcggaaaatacctgtccatatgatcgttgatgcccagataaggtgtttcggtgtccaccagttggattacgccattgtttaaccgtggaatgggcgtcaatcggtagatattaaacttctccgcatcgagcaagggcactgtgatttggaactccacgtggttgccccgctgccgaggaactacggaggcgagaaggtaaatattccggattgtatatcggccatccagatctcccagaattggcggcatcttcgcttgcagctgtttcattgaaaggacaagaggactaagctttccgtggtgggcagagattatggcttcagttatggcattctgggcactttttagtctgctgcccataaggtatagatacggcttcatcataatcaggttttcaggttcataagcctcgtgaaagggttcttgaagtatcacatttataacattaatggagctgtcaatgcaggatgttcccatcccaagctcgatggacacgtcgtcatctcccaaagaaagtcgtccggccctaaagtccaacgctttctccaagtcaattagtccatcgtgaagaatactatccgcaaacttggtaatgtccagaatttctggacaaagattcctttggatatcgcacacatcgaccaaagccttgtagacaccattgaacgcacgtattgccgtataaagcgactccaagttgaagctggcacataacttccaatctctggaggctagcgatgcctgaccgctgtactccacgaaggtgcccagactgttgttgaatccccgcatcgccatcggacctccgatcgcctcccgatcaactgggcttccatgggagagcgctatcagcgagggggcgaggatgaataccaaactaatcgctttcatctttcgcttgtagaggtgatcgttgcccagagttccgcgctaaactgaaggtgagctcctgagaatcgggtagcaagcggtagtgcatgtccatatgtatgttcaattgctgatatagcaaaatgatcggatcattgtgcgcaatataaatttttaaatatttgcaagtgaggcaattagccagaattagctttcaaataaatataatataaatatataatatacaaatataacataagccatccatatttattatacattttacactagtcaagtgcattgagtactaatatagtgaatttacataacaaccagtgtcatagcggcataaccagcaccacagaggcccaccgatgcgacctggcagtaacgcagctctttgcagatccggcgccggcgcagtagaggattggctcgctgcctcgccaggcaagtacgtaagcaggctcctccgagctccgcggtctttatcaatgagagtgacgtaggttgtgtgcagaccggacgggattcggtcggcgagtggaggagttgggtggcactttaatgtggtctgcaagccaacggccaacggcacggaatcggggcaatacgttaaaaactgttgcactgcgtcgctgggacgtcagttcattcagaacagtcgaagtgcgcagaccactgggatccaaacaccggcagaaaccaggccaggagtcgaagtcgacctcccacctccagccagatccgaatcctatttgggacaccaccagctagagccaagtcaagtgccgtttgccgtaaacatgccacgcatctcgttgcccggcagcagcctgctggtagtcctggcactgatcctgtgcctcagccttccaatccgggcggtgcccacctccgtgctcgcccaagacacggagctctccaccagcgccaaccacaagctccagcagcagcagcaacagcagcagcagcatcaccagcagcagcagctccagcagcagcagcagcagcaacagccggccacaggtaagtgccaaagttca

SEQ ID NO: 9542 - DNA, 1649 bp, DROSOPHILA
caacgatcacctctacaagcgaaagatgaaagcgattagtttggtattcatcctcgccccctcgctgatagcgctctcccatggaagcccagttgatcgggaggcgatcggaggtccgatggcgatgcggggattcaacaacagtctgggcaccttcgtggagtacagcggtcaggcatcgctagcctccagagattggaagttatgtgccagcttcaacttggagtcgctttatacggcaatacgtgcgttcaatggtgtctacaaggctttggtcgatgtgtgcgatatccaaaggaatctttgtccagaaattctggacattaccaagtttgcggatagtattcttcacgatggactaattgacttggagaaagcgttggactttagggccggacgactttctttgggagatgacgacgtgtccatcgagcttgggatgggaacatcctgcattgacagctccattaatgttataaatgtgatacttcaagaaccctttcacgaggcttatgaacctgaaaacctgattatgatgaagccgtatctataccttatgggcagcagactaaaaagtgcccagaatgccataactgaagccataatctctgcccaccacggaaagcttagtcctcttgtcctttcaatgaaacagctgcaagcgaagatgccgccaattctgggagatctggatggccgatatacaatccggaatatttaccttctcgcctccgtagttcctcggcagcggggcaaccacgtggagttccaaatcacagtgcccttgctcgatgcggagaagtttaatatctaccgattgacgcccattccacggttaaacaatggcgtaatccaactggtggacaccgaaacaccttatctgggcatcaacgatcatatggacaggtattttccgcttcagagcttggacgactgcatcaagttgggcgaagaaaggttcatctgcaggcgcaaccgcattatctacgggactggggatgacagttttgcctgctccctggcggccatacggaaccagtcttccgaagtctgcaccttgcgtcaagtgaaggagaagagtctgtggacagagatggtggcaccaaactcctggatggtggcccttaccaatgagctaactttaataggagtgtgctccggtgagaggcaggagctccaattgaatggcagtggaatcctgagcattcaaagcgactgtgccgtgcgcagtccagctgtcgccctccgtggagaagtccgggaaagagttccttcgaaagcaggttacgcaacgctgcagaaggaaccaaaatcttcccaggaatccgtgaccttggaatcatttaatcaactcctggcgatcgtgggcaaactggagctgaatcagaaaaagctggaagcagtccgagattacccaatggtagtcgtagtagtagtagctgtgtgcgcagccatattgctggtcgccttacttgtttcggcgacctggttatatcgcacccatcggagcaaacaacttgcgcaggctcaaaatcttgtcaacgaagtcaatggtctccaggatccacagaatcgcaccacaacctgcaatcttccgctgctggaaaaacatgaaatctaaaaaaaaaagaagatgcggctgcgtggtg

SEQ ID NO: 9543 - protein, 531 aa, DROSOPHILA
MKAISLVFILAPSLIALSHGSPVDREAIGGPMAMRGFNNSLGTFVEYSGQASLASRDWKLCASFNLESLYTAIRAFNGVYKALVDVCDIQRNLCPEILDITKFADSILHDGLIDLEKALDFRAGRLSLGDDDVSIELGMGTSCIDSSINVINVILQEPFHEAYEPENLIMMKPYLYLMGSRLKSAQNAITEAIISAHHGKLSPLVLSMKQLQAKMPPILGDLDGRYTIRNIYLLASVVPRQRGNHVEFQITVPLLDAEKFNIYRLTPIPRLNNGVIQLVDTETPYLGINDHMDRYFPLQSLDDCIKLGEERFICRRNRIIYGTGDDSFACSLAAIRNQSSEVCTLRQVKEKSLWTEMVAPNSWMVALTNELTLIGVCSGERQELQLNGSGILSIQSDCAVRSPAVALRGEVRERVPSKAGYATLQKEPKSSQESVTLESFNQLLAIVGKLELNQKKLEAVRDYPMVVVVVVAVCAAILLVALLVSATWLYRTHRSKQLAQAQNLVNEVNGLQDPQNRTTTCNLPLLEKHEI

SEQ ID NO: 9544 - DNA, 4105 bp, DROSOPHILA
ctgaacacggaattcaatcgcgtttcggcattacatttgctgcccacaatcagcacttcaaacacataaatacaagccgaggcataaataaacaagcagaggaaattgcaaatccccaaattagcattagctaatcaaggtaacaaatggcaagaagaagggccaagcaggtgggtggcaggtgggtgggtggctgtgttctcaaatccttgggcaaataggacattgtgcgcagctgtatgccttaagtgcagtgctaagggtctgaaccgaggccccagggaaactgagtgtgtgtgtgtgtgtgtgcctgtgtgtaatatataatccagaagtatgccatttccgcattcgagagggcaaaattaaatttgactggccaaacgcccgcaaacaatccgagtcaaaggcacaaacacacacacacacacacacacacatataaaacagcatcgtttagccaacatttgccaactgcagttacatggcttgcagtcaaatgctcatgttcacctgatccttggcaggacgaaaaggacgcagttgagcatctaagcctgccagggaccaattaaatattgagagagacatttgccatttcgtgctccgtttgcaattagccataacattctgccggataaatgctggcacgtaagtaagtgcgtcgttcattcgtacgagtatgaataagtatatgtggacaatcaagtcaacctcataatgccatttgccgaattccattgattggcatcaacccctccccctccccaccccaccaatccaccgcacacctcagacttcaaatgcaattttcccgtcactccagccaaaaggtaaatattttatagtcaacataatcacatcgcacatcaaagccaggaaaatccgcaatgctgccatcaatcgagttggaaaatcaggccatatttatacgattggaaatcaaattttgattcgataggtcggttccaaaggtgaaattactcaagttaccacatttgcttgattgaatacttttaatcggcgaatagatttacaattttgcttaaatttggtactatgcatttatataatatgtctaatagctaatttttgcaaaaacatcaatacaatttggttccaacttgaaattctcataatttatacaatttattgccaacgatattaaagtgaacctttacgaggatggcttctccagaccagaatgttttttctgtgcaaacactgtaccaaagcatcaaatatcgaatacatgggccaacatggaggcccacaaggaaggtgtgtctacatggcatggactctactagccggagcaggccatctggtacatgaactggataacagtgcgcgtcgggcgtccggtcatcgagtccttgagtaggtagggcctggggttgattgtggtggtcatgccggtgccacggatgtccagatgggcccattcagcgcacggaaccagggtgtgaaggattgcagccgccaggcaggaactggcaggtcctcgaccggtgttgcacagatcataggtgatattcttgttcacgatctgtttgtagtacttgaacagggggaaacgccagacgcgatcgccagtcagaccgccggacttgcggaagttctgccacacagacttcgaggtggtccacaagccactggcaccgccgccaacggcatagttaacacccatggccacagttccgatatcgatgaccagtttgggcttgtacgtggcctgggcatagagtagcggatcggccagctgcaccaccggtgccttgtccacattcttgatgcccattgtggtgccattgagcagggtcaccacatcgccgcacttgacggccattccagagggcatgtgctcgcagagcggcatcacggccgtgatgttcagcgggagcgaaagggcggcggcggcacgaagaacacccacacaaacagcagctccggccatggcgccgcggtactggtccatacccgtcttgggcttcaggcacaagccaccactgtggaaggtcagaccctggccgagcagcagaacgggacgatcctcgggcgtggtgccgcagtagctgcactccagcaatagaggtggttcgcacgaacccttggcgatcattaggaaggaattgaggttcatatcctcgatccagtccatggagcgcacctccacggaaacgccgcatgggcacaaggcatccacggcggcctgtgcgaatatcgagggcgtcatcatgttggcaggcgtgtcggacaaacgtctggccaaattctgggattccgccttgaacagaccacgcacccaggcatcccgatcacccttgccatacatatcgagcttgggggtctgaatgcggttcttcttcctcttgttggcattataacgccatacggccagcgcggctccctcggccgcctgctccggatagtccatggaatccacatgcacctcatacatgccctggagctgcagggctcgggctccagtgcccgctgccactcgcacattctccataccctcgtccagttcctcgttttcattgtaggctgctccctgtttgccaacaccgacaacggcaaccgcctggtattcaccctcgaagccactgaagagcagaccctttccgggagtgccgtccattccacgttcacggatcagggtcaacagcttgccacccagagcatcatccaaggtcactgcatttgcggtggttttcgatggcttatcgccatccttggtataaacaccaaccacaacacccttgggactcttgcaggatgtcgcatagcggcgatatgacggtatcacagattgtccagaacgattttggcgcaccatacgcaggccagcgcgcaccaaagacatgttcttgtacgaaggcattcttcaatatcaatatcaaattgagaattacaatgaacacacgaataggaaattttgtataactcgcaatgtttctataatattaatacgtttgttggtcacctccgagccacgtaactctaaaatttggtcacgcgcgtattttttcacaaattttttttgttaacactgagaattttgtttcgtatttctattgccagctgatctgtgacccgtacgaaatgctaaagtaaactgaacttttcctgggaccggagctagtgactcgaattgacagcacgtcagttggatttcatggataacctagatcggttttttttttgggcatttgtacaaaatggagatttacgaacaagcaggctatgaaaattttcagattctaaaaaagttatttaattcttttgtattattaccaccaaattctttatattgaagtaaaataaaagttgtttcttaagtattagttgtatttattatgaacagtttgggggcataggaatcatagttgtgatatcataattaagtttttaagtcgccctataatggcttaaccgaagcccactaatatgcattaatttaatttaaacaacagactcaaagctgcgttcttcagcctcgcaaggaatcctgtcaacgtcaaaacccaaccgcccaacgctccagcattctggccaggattatagcaccctcaacgctatttaaatgataatgacaaaagtggagagtgcaaaggaaaataaaaaaaatcatatgaatttcaattaagtagtcaacaagcgggtccagtccggaagctgggccctgctgatgcctcggccaagtgcacagcgataataataacggcgagtggaaataattaattttccaaaccagtgagtcaacgctaattaagcttaatttttggtgctgcataactaattaaggtgcgaacagtcgtcgcagggcagcaggcgcattttacaaccaagatacattattatgcaaaaatgttgcactttaattctatttgtctgcgggcagggccatctataattggaaagtatgctcacgcttatctctcgactatttgaatatggaattcaatttaatgttgccccggtgtcgcagaaatatgcaaatcttttcacagccatcacacacacaaacacaccacacacacacacacccactcagttcaaatgtttgccttttggttttgagcaaggtgaaccgaagggt

SEQ ID NO: 9545 - DNA, 2105 bp, DROSOPHILA
gtacgggtcacagatcagctggcaatagaaatacgaaacaaaattctcagtgttaacaaaaaaaatttgtgaaaaaatacgcgcgtgaccaaattttagagttacgtggctcggaggtgaccaacaaacgtattaatattatagaaacattgcgagttatacaaaatttcctattcgtgtgttcattgtaattctcaatttgatattgatattgaagaatgccttcgtacaagaacatgtctttggtgcgcgctggcctgcgtatggtgcgccaaaatcgttctggacaatctgtgataccgtcatatcgccgctatgcgacatcctgcaagagtcccaagggtgttgtggttggtgtttataccaaggatggcgataagccatcgaaaaccaccgcaaatgcagtgaccttggatgatgctctgggtggcaagctgttgaccctgatccgtgaacgtggaatggacggcactcccggaaagggtctgctcttcagtggcttcgagggtgaataccaggcggttgccgttgtcggtgttggcaaacagggagcagcctacaatgaaaacgaggaactggacgagggtatggagaatgtgcgagtggcagcgggcactggagcccgagccctgcagctccagggcatgtatgaggtgcatgtggattccatggactatccggagcaggcggccgagggagccgcgctggccgtatggcgttataatgccaacaagaggaagaagaaccgcattcagacccccaagctcgatatgtatggcaagggtgatcgggatgcctgggtgcgtggtctgttcaaggcggaatcccagaatttggccagacgtttgtccgacacgcctgccaacatgatgacgccctcgatattcgcacaggccgccgtggatgccttgtgcccatgcggcgtttccgtggaggtgcgctccatggactggatcgaggatatgaacctcaattccttcctaatgatcgccaagggttcgtgcgaaccacctctattgctggagtgcagctactgcggcaccacgcccgaggatcgtcccgttctgctgctcggccagggtctgaccttccacagtggtggcttgtgcctgaagcccaagacgggtatggaccagtaccgcggcgccatggccggagctgctgtttgtgtgggtgttcttcgtgccgccgccgccctttcgctcccgctgaacatcacggccgtgatgccgctctgcgagcacatgccctctggaatggccgtcaagtgcggcgatgtggtgaccctgctcaatggcaccacaatgggcatcaagaatgtggacaaggcaccggtggtgcagctggccgatccgctactctatgcccaggccacgtacaagcccaaactggtcatcgatatcggaactgtggccatgggtgttaactatgccgttggcggcggtgccagtggcttgtggaccacctcgaagtctgtgtggcagaacttccgcaagtccggcggtctgactggcgatcgcgtctggcgtttccccctgttcaagtactacaaacagatcgtgaacaagaatatcacctatgatctgtgcaacaccggtcgaggacctgccagttcctgcctggcggctgcaatccttcacaccctggttccgtgcgctgaatgggcccatctggacatccgtggcaccggcatgaccaccacaatcaaccccaggccctacctactcaaggactcgatgaccggacgcccgacgcgcactgttatccagttcatgtaccagatggcctgctccggctagtagagtccatgccatgtagacacaccttccttgtgggcctccatgttggcccatgtattcgatatttgatgctttggtacagtgtttgcacagaaaaaacattctggtctggagaagccatcctcgtaaaggttcactttaatatcgttggcaataaattgtataaattatgagaatttcaagttggaaccaaattgtattgatgtttttgcaaaaattagctattagacatattatataaatgcatagtaccaaatttaagcaaaattgtaaatctattcgccgattaaaagtattcaatcaagc

SEQ ID NO: 9546 - protein, 526 aa, DROSOPHILA
MPSYKNMSLVRAGLRMVRQNRSGQSVIPSYRRYATSCKSPKGVVVGVYTKDGDKPSKTTANAVTLDDALGGKLLTLIRERGMDGTPGKGLLFSGFEGEYQAVAVVGVGKQGAAYNENEELDEGMENVRVAAGTGARALQLQGMYEVHVDSMDYPEQAAEGAALAVWRYNANKRKKNRIQTPKLDMYGKGDRDAWVRGLFKAESQNLARRLSDTPANMMTPSIFAQAAVDALCPCGVSVEVRSMDWIEDMNLNSFLMIAKGSCEPPLLLECSYCGTTPEDRPVLLLGQGLTFHSGGLCLKPKTGMDQYRGAMAGAAVCVGVLRAAAALSLPLNITAVMPLCEHMPSGMAVKCGDVVTLLNGTTMGIKNVDKAPVVQLADPLLYAQATYKPKLVIDIGTVAMGVNYAVGGGASGLWTTSKSVWQNFRKSGGLTGDRVWRFPLFKYYKQIVNKNITYDLCNTGRGPASSCLAAAILHTLVPCAEWAHLDIRGTGMTTTINPRPYLLKDSMTGRPTRTVIQFMYQMACSG

SEQ ID NO: 9547 - DNA, 7111 bp, DROSOPHILA
gctggcaagaagacacgcatcatgtgcctgctacgggagatgtacggatccggcgttgagcggttgaggagcgagaccatgacattcaccacgccatccaatcggaaggtagaggtgatgacggtcagcagcaactaccacttggaggtgaatccctccgacgctggcatgtacgaccgcacggtggtgatcgatctcatcaagcaggtggcccagacgcatcaaattgagattagtggccaacgggaattcaaggtgattgtaatttcggagggcgacgaactcaccaaggatgcccagcacgccctgcgccgtacgatggagaaatatgtggccacgtgccggataatcatatcggtgaactccacatctcggatcattccggccatacggtcgcgttgcctgggcatacgggtggcggctcccaacgaaacggagatcgtgtccatcttgcagaacacttgcaagcgggagggactcgcactgcccgtggagctggccaaacgggttgtggacaagtcggagcgcaatctcaggcgagcacttttgatgctggaggccgccaaggtggccaaggcgccgtttaccgccaatcaggagattcccgacctggactggcaggtgttcctgcgtgagacagcatctcagattatcagtgagcaaacgcctgccaaactggagaagatccgcgaacgcctgtacgagctactcacgcaaggcgttccacctaatctcatattccgcggcctggtcgaacagctggttaacaattgtgatatgtccatcaaggcaaagacgctcgagttcgccaccgagtacgagcaccggatgcagtccggcgccaagcacatttttcatcttgaagcgttcgtcgctcagtttatgaacatctataaaaagttcctttctgagctggacatgacggatgatttttaaacgatttacacgctttagcatttaattcaaaaaacttattaaataaactgatttaaacgaactattaacgttcttcctgaagatccgttcgcatctgcagaacggccatgctcatcttatcatcggtggtgcgctttatggtctcaatatatctttgaacttcttcttcgagtttaaagtaagcctaaaataggaatagatttggaatatgattggaatgtattttgagtagaacgaaatttatatgtatgacttaccatttcataatcaagatcatccttgccattaatctttaaaccgtgcagcagcaaatcgatcgtgctgatggggaagcagagctgtgggtttgctatgttcaccgcgtgtttgaattcgaaatactcgctacctgctcccagcatgccggcgattatttcacatcccagatctgcggcttccagcagacgattgtgtttcacaagtaagtggagcagttcccgggagtgggataacttgtaggagtttatcagccactggggcaagaaggcgtttaacccgagaagcctttgaaccacgctctttcttatcaaggtggagtcttttgcctcgttatccacaaccagtttttgaagtaaagtccaggccatatcggcagcattacttcgatgaggtagatctgttataagacatatagtaagcctctttttttcatacacgttaaaaaatccctacctgccatgtcgttgttttgcagccagttccaggcgtccgacgacttgtcctcagtggcagcaacacaagcggatgtcagactctcgaatatggggagcacagagaacgagtgtccccgcgaaagtttcaatgccgcggtgtacaggccggaactagccagcaggtatgatagctcctcgggtgtggcccgctcgtaggcagctgtatctttgcggtagaaggaaagctcacgtaaagcttctgcgtgcaccagttcccttcggatatcagccagctctagaacaaccacctcctggcctctcttgtcctcgtcacatttgggctcaccatcgtcgttatcctgatctatggtaatcacctgctcatcaccaagaacaggcttggcaatccatctgtagcggctgtcaactaggtgcaaacagtttaggcaaattaacagcgaggagcaacgtttctctagcgcgtttggtgcatcgctgtctacttgaaaccgcatggcctgctcatacataaccgtagaagctgttcggaaacaaattattaatgcaagaagaaatggaagaaaataaagtaatttttatgcaaaccttttctcatgttacccttgttcgtatggaatgcatacaaaaagttgtagacttcgttctgatcgatgctcattgatcgtgcccgggattcaacaatgctctcgaactcgtcttgcaacccgatgtaggagaactgcataagcagtggcagacatttattctggaacagcgttatgaccaactggcgaaggcaatccttacgccttgaaatatctgcattgttgactaaggcggtgtacgcctccacgtagtgtcccaactgcagatgattattgaacactattgactggaacatgggcaactgaggatcatctggctgcagcaccctaatggccatgtcagccagttgaataatgtagtccaatgcggaatgctgttcaaagagctggataaccttaagatagtagtgaacaattgccagttttgtgtcttcgggggaaattgtatcgccacggctgacgctattctgtaatttgccgtatagaggggtatttttcagtacatgctcaaagaggaagtcatcctccacaatgccagactccgcctcgtgaaagagatgcacggccttgtgggcctcaccgcaatccaatagagatacggctagcataaagcgtcctgcggaaaaaaaggattaatttcaaagctgggaaaactagcaaataatgcatactggcatgtttttgtacggaacaccagtttgacaaaatgcgcacgtaatcctgaacaatgatgtgatgacaggtcccaaataaccattccggaaatacgtaaatcggagatcccggccaactaagagatgtttgaaacttaaaacatgatcaatttttctatatattatacgcacagcatcttattgatgtatccaacaagttggagcaaagactggcgtagattcaattgctccgagtccagcgacaaactgtcatgcttcagcagcatagtcaaggcgctgaacagacctttcgattccaggaacagtcggagcagagtggtctgatcgttcccattatgtttcagatggctggagtatggtcgattatagccgctgaaaagttgggcgcggctcaatcgttgaatagatgcctcgctaaaattaaaatagaagttagaactgtgcaatacaatcaattatatatccttacaatccagctggggtactcgatgaaatgggtgtctcggcaatccaaaccagtgtataatatgagttcaaataatttaaatttgttaaaacattttcgctttccatttcgttctgaccataagccatgtactgcaataccaaaaggtttcggcaaacagaaaacctagggacacatgatttaataaatgataaaccaagttcaaagttttttaaactattacgaaagctcaccgtatcattgccatttgcttcactgtttcggacaaaatagaaagtccatattcgctacccattagagccccagacgactgcaagaagcgcgtagaaagggagtaatctataaagtagaaatgaaatatatgaatcattttcaaacattatatatatttataagtaatttaccatgcggcggttcatctggatcaatcatacacagcacatcgagcagcatttccaaagcgggttcaagatttggtatattctgcagcttctgttggatttgcctcacacagtttgatggcaatattggaccattatcatcgatcatactgattctagccaccagcttagatattacttcaaccggtgactcccgctggtaaagctgtttatctagctcgattttaatgtcctccgaaattagtttatcaagcagtgtcaccacattcatgagctccacaaaacccttggccatttcgggatcgttgcgaaatagtggcgccacatatgtcgccacttcatcgttatgctcgccgatgagcaacaggtgctcgagcacttcgcaggggcgcagcaatgcgaatgattgccttctaaccaaacatactgcatccattccaccaagaacggcgagtcctgtcggctcggaaagcttaatgtgatactgttcgcagcaggagtaaaagcgatcccacagccgagtggatatctccaagtactcctcatcggtgaccacaaagtctttcagttcgttttggatttcatcttccacggcctggcatacctgctccttgagcactgacatggaaagttgctttacatcgaattgcaggttaacgcgtctgaacatctacgatacaaaaaattcaaattactaaactattccaataattcataataaagaatgttttggttatactcacatataaagccttggcaattacatttcggtcaaatcgaccaggatgaaatatatagctgcagtaagtttcgcgtggatccactccctgctccatggtgagacaataccgatccggtggcggttctagagcagccgaaacccatttgattgcgttgttggaggcaaaatatgctgccgagacatggaaatcgccttcagcgttgctccaaagggcccagatgtgcgaggatgtggcatcgaagtcgaccaaatccgtttgcggcgccggcaccatgttctgcaccaaattgataacgctggcatcgtcggcatcgggcattatgctaacgcatataaactcagctcgggaattgtgcgagagaaatagacagaagttttgatcgcttatttttcggagctggctgttttgtgctgttaaaaaaaagaatataatcccattatatctagatcataaatctaaatcgtaataatattttatactcacgtccttgagctgctgagtcctgtcccagttcggtggagcagttaatgctggctacagtctgcaagttatccactgaccatagacgcagctcattattgcgatacagaaccagaatgaaaatttcccccccgatttcactgaaagccatggacgtggctgcctccaacgtttcagagcggccgctacaatgattaatgaaacattagggatttgccatttatcgaggtttatccacttacgtgagggcacccttgagattcgacagaaaccatggcattagcttcggctccttgatttcgtgggtgatagtatggccggtggagcatttcataacgtgaagcagtagtttgctctgatacgccaccgcaaagtaggctgactgggagtcttgagtgaggtacgatacagccgcgttgggcatagttccaaagccatccgtgacatagtaagtgctgggatcattgatcttgtcattgacgtcgtagaaaatggactgggatagcagatcctctggagaagctgcgccaccttcctgcccagcgaccttcaagggaaacacatagcgatgcacactgctgaccgtgaccaccagcagggtgacggatgtaccttgctccgtgagtgatacattcagcacagcggagtcggtgaatcgcagacgcaggtgattcctctgcagggagatgtccaaactaacctctgatagttccaggacatcctggtatgtccgcctgcaaatcagtggccatgtgaaactaatttaacgattctgatttgcacttaccaatatatgaaacggtttctggtctgaacatttttcgtattcttgtagcaatagccgccggaggtttcgaaggtttttaaatcctgcaaagtgctctgggttcctacattttgcggaggagcatttggttactcagaatttctctggcaatcttgcacgaaactcacccgtgttaattttcacctcgatccactccgccggactgaggttccgcggtatgacctcgcggtagctcatgttggcttgcagtttggatgtgggcatcttgctagcacaacaaattaatataaaaacctcaacgaaaacggaaaattattggcggcaccggcgtaaacacgctcagtagtagtgttggaaaacgcttacgccagcggtgcacaccaggcaaaatagtcgacatagctttttatactcacatacaaaagttaattacagaagttagttaaaaattgtacattttcctaaatgtaatttcatgacaataaagtttattatagcaaagcaggaatgatataagatgcctttaaatcttgtgatattaagaaagttgtcgctagcattttaacaattgccacatattggtcacactgcattgcacgtgtgtttccatttgttgatgcggctttattatttagtttattttttaaaataaaaactgtctctggcctaaaaatgagtgaacagcaggatgagactgtagtctgcctgcccggggagcgactctgcagaaccgaggacagcatagtcctgggcataggcacctacgagcagaatggctacatttacgcctccaagtctggaattgtcaacatcgaagattcgggtgataaagtaagtaatcctggcatttcgttgactctgggaaccaattaatctccatttcagtgccaggtggttagtgtgcataagcccggatttcatctaaccatcccagccaccggagacgtggtcacagccagagttctcgtcacaactccaaaattcgccaagtgcgccattttctgcgtacgaaatgtgctgctggaaagcagctaccgcggacttctgcgcaaggaggatgtccgggagaccgaaaaagatcgcgtcgatatctacaagtccttccggccgggcgatgtcatcctggcgagggtcattaaccaactggagcagtccttcctcctgaccaccgccgaaaatgaactcggcgtggtcatcgcctatgccagtgattaccggaagacccgggtgcccatggtgccggtcggctggagcgagatgcagtgcccccagaccacgatcaaggagccacggaaagtggctaaagttctgcctgagagttcaataa

SEQ ID NO: 9548 - DNA, 4299 bp, DROSOPHILA
cggtgccgccaataattttccgttttcgttgaggtttttatattaatttgttgtgctagcaagatgcccacatccaaactgcaagccaacatgagctaccgcgaggtcataccgcggaacctcagtccggcggagtggatcgaggtgaaaattaacacgggaacccagagcactttgcaggatttaaaaaccttcgaaacctccggcggctattgctacaagaatacgaaaaatgttcagaccagaaaccgtttcatatattggcggacataccaggatgtcctggaactatcagaggttagtttggacatctccctgcagaggaatcacctgcgtctgcgattcaccgactccgctgtgctgaatgtatcactcacggagcaaggtacatccgtcaccctgctggtggtcacggtcagcagtgtgcatcgctatgtgtttcccttgaaggtcgctgggcaggaaggtggcgcagcttctccagaggatctgctatcccagtccattttctacgacgtcaatgacaagatcaatgatcccagcacttactatgtcacggatggctttggaactatgcccaacgcggctgtatcgtacctcactcaagactcccagtcagcctactttgcggtggcgtatcagagcaaactactgcttcacgttatgaaatgctccaccggccatactatcacccacgaaatcaaggagccgaagctaatgccatggtttctgtcgaatctcaagggtgccctcaccggccgctctgaaacgttggaggcagccacgtccatggctttcagtgaaatcgggggggaaattttcattctggttctgtatcgcaataatgagctgcgtctatggtcagtggataacttgcagactgtagccagcattaactgctccaccgaactgggacaggactcagcagctcaaggaccacaaaacagccagctccgaaaaataagcgatcaaaacttctgtctatttctctcgcacaattcccgagctgagtttatatgcgttagcataatgcccgatgccgacgatgccagcgttatcaatttggtgcagaacatggtgccggcgccgcaaacggatttggtcgacttcgatgccacatcctcgcacatctgggccctttggagcaacgctgaaggcgatttccatgtctcggcagcatattttgcctccaacaacgcaatcaaatgggtttcggctgctctagaaccgccaccggatcggtattgtctcaccatggagcagggagtggatccacgcgaaacttactgcagctatatatttcatcctggtcgatttgaccgaaatgtaattgccaaggctttatatatgttcagacgcgttaacctgcaattcgatgtaaagcaactttccatgtcagtgctcaaggagcaggtatgccaggccgtggaagatgaaatccaaaacgaactgaaagactttgtggtcaccgatgaggagtacttggagatatccactcggctgtgggatcgcttttactcctgctgcgaacagtatcacattaagctttccgagccgacaggactcgccgttcttggtggaatggatgcagtatgtttggttagaaggcaatcattcgcattgctgcgcccctgcgaagtgctcgagcacctgttgctcatcggcgagcataacgatgaagtggcgacatatgtggcgccactatttcgcaacgatcccgaaatggccaagggttttgtggagctcatgaatgtggtgacactgcttgataaactaatttcggaggacattaaaatcgagctagataaacagctttaccagcgggagtcaccggttgaagtaatatctaagctggtggctagaatcagtatgatcgatgataatggtccaatattgccatcaaactgtgtgaggcaaatccaacagaagctgcagaatataccaaatcttgaacccgctttggaaatgctgctcgatgtgctgtgtatgattgatccagatgaaccgccgcatgattactccctttctacgcgcttcttgcagtcgtctggggctctaatgggtagcgaatatggactttctattttgtccgaaacagtgaagcaaatggcaatgatacggttttctgtttgccgaaaccttttggtattgcagtacatggcttatggtcagaacgaaatggaaagcgaaaatgttttaacaaatttaaattatttgaactcatattatacactggtttggattgccgagacacccatttcatcgagtaccccagctggattcgaggcatctattcaacgattgagccgcgcccaacttttcagcggctataatcgaccatactccagccatctgaaacataatgggaacgatcagaccactctgctccgactgttcctggaatcgaaaggtctgttcagcgccttgactatgctgctgaagcatgacagtttgtcgctggactcggagcaattgaatctacgccagtctttgctccaacttgttggatacatcaataagatgctttggccgggatctccgatttacgtatttccggaatggttatttgggacctgtcatcacatcattgttcaggattacgtgcgcattttgtcaaactggtgttccgtacaaaaacatgccagacgctttatgctagccgtatctctattggattgcggtgaggcccacaaggccgtgcatctctttcacgaggcggagtctggcattgtggaggatgacttcctctttgagcatgtactgaaaaatacccctctatacggcaaattacagaatagcgtcagccgtggcgatacaatttcccccgaagacacaaaactggcaattgttcactactatcttaaggttatccagctctttgaacagcattccgcattggactacattattcaactggctgacatggccattagggtgctgcagccagatgatcctcagttgcccatgttccagtcaatagtgttcaataatcatctgcagttgggacactacgtggaggcgtacaccgccttagtcaacaatgcagatatttcaaggcgtaaggattgccttcgccagttggtcataacgctgttccagaataaatgtctgccactgcttatgcagttctcctacatcgggttgcaagacgagttcgagagcattgttgaatcccgggcacgatcaatgagcatcgatcagaacgaagtctacaactttttgtatgcattccatacgaacaagggtaacatgagaaaagcttctacggttatgtatgagcaggccatgcggtttcaagtagacagcgatgcaccaaacgcgctagagaaacgttgctcctcgctgttaatttgcctaaactgtttgcacctagttgacagccgctacagatggattgccaagcctgttcttggtgatgagcaggtgattaccatagatcaggataacgacgatggtgagcccaaatgtgacgaggacaagagaggccaggaggtggttgttctagagctggctgatatccgaagggaactggtgcacgcagaagctttacgtgagctttccttctaccgcaaagatacagctgcctacgagcgggccacacccgaggagctatcatacctgctggctagttccggcctgtacaccgcggcattgaaactttcgcggggacactcgttctctgtgctccccatattcgagagtctgacatccgcttgtgttgctgccactgaggacaagtcgtcggacgcctggaactggctgcaaaacaacgacatggcagatctacctcatcgaagtaatgctgccgatatggcctggactttacttcaaaaactggttgtggataacgaggcaaaagactccaccttgataagaaagagcgtggttcaaaggcttctcgggttaaacgccttcttgccccagtggctgataaactcctacaagttatcccactcccgggaactgctccacttacttgtgaaacacaatcgtctgctggaagccgcagatctgggatgtgaaataatcgccggcatgctgggagcaggtagcgagtatttcgaattcaaacacgcggtgaacatagcaaacccacagctctgcttccccatcagcacgatcgatttgctgctgcacggtttaaagattaatggcaaggatgatcttgattatgaaatggcttactttaaactcgaagaagaagttcaaagatatattgagaccataaagcgcaccaccgatgataagatgagcatggccgttctgcagatgcgaacggatcttcaggaagaacgttaa

SEQ ID NO: 9549 - protein, 1411 aa, DROSOPHILA
MPTSKLQANMSYREVIPRNLSPAEWIEVKINTGTQSTLQDLKTFETSGGYCYKNTKNVQTRNRFIYWRTYQDVLELSEVSLDISLQRNHLRLRFTDSAVLNVSLTEQGTSVTLLVVTVSSVHRYVFPLKVAGQEGGAASPEDLLSQSIFYDVNDKINDPSTYYVTDGFGTMPNAAVSYLTQDSQSAYFAVAYQSKLLLHVMKCSTGHTITHEIKEPKLMPWFLSNLKGALTGRSETLEAATSMAFSEIGGEIFILVLYRNNELRLWSVDNLQTVASINCSTELGQDSAAQGPQNSQLRKISDQNFCLFLSHNSRAEFICVSIMPDADDASVINLVQNMVPAPQTDLVDFDATSSHIWALWSNAEGDFHVSAAYFASNNAIKWVSAALEPPPDRYCLTMEQGVDPRETYCSYIFHPGRFDRNVIAKALYMFRRVNLQFDVKQLSMSVLKEQVCQAVEDEIQNELKDFVVTDEEYLEISTRLWDRFYSCCEQYHIKLSEPTGLAVLGGMDAVCLVRRQSFALLRPCEVLEHLLLIGEHNDEVATYVAPLFRNDPEMAKGFVELMNVVTLLDKLISEDIKIELDKQLYQRESPVEVISKLVARISMIDDNGPILPSNCVRQIQQKLQNIPNLEPALEMLLDVLCMIDPDEPPHDYSLSTRFLQSSGALMGSEYGLSILSETVKQMAMIRFSVCRNLLVLQYMAYGQNEMESENVLTNLNYLNSYYTLVWIAETPISSSTPAGFEASIQRLSRAQLFSGYNRPYSSHLKHNGNDQTTLLRLFLESKGLFSALTMLLKHDSLSLDSEQLNLRQSLLQLVGYINKMLWPGSPIYVFPEWLFGTCHHIIVQDYVRILSNWCSVQKHARRFMLAVSLLDCGEAHKAVHLFHEAESGIVEDDFLFEHVLKNTPLYGKLQNSVSRGDTISPEDTKLAIVHYYLKVIQLFEQHSALDYIIQLADMAIRVLQPDDPQLPMFQSIVFNNHLQLGHYVEAYTALVNNADISRRKDCLRQLVITLFQNKCLPLLMQFSYIGLQDEFESIVESRARSMSIDQNEVYNFLYAFHTNKGNMRKASTVMYEQAMRFQVDSDAPNALEKRCSSLLICLNCLHLVDSRYRWIAKPVLGDEQVITIDQDNDDGEPKCDEDKRGQEVVVLELADIRRELVHAEALRELSFYRKDTAAYERATPEELSYLLASSGLYTAALKLSRGHSFSVLPIFESLTSACVAATEDKSSDAWNWLQNNDMADLPHRSNAADMAWTLLQKLVVDNEAKDSTLIRKSVVQRLLGLNAFLPQWLINSYKLSHSRELLHLLVKHNRLLEAADLGCEIIAGMLGAGSEYFEFKHAVNIANPQLCFPISTIDLLLHGLKINGKDDLDYEMAYFKLEEEVQRYIETIKRTTDDKMSMAVLQMRTDLQEER

SEQ ID NO: 9550 - DNA, 12896 bp, DROSOPHILA
cacaaaaaggcttcatcttgtaatctataatggatgtgttttaatttattatcttattatcgatatgttcgggaataaaatatgtataattttatatatactaactattatagcaactatatcataactataattttcccttggcgaattccagtgtgatggtcctgggatcgaaatcagttttattttaatacaccgagttaaccacaaaagtggcatgcccaactcatctaatgaaagtttttgcccattcgggcagattattttacatttcattaatgtgtcgaaaaagggaaatgctttcaatgaaagctgctcccaggcccagctgcctgtgttccccatcatcatcatcatcatcctcattctcatcgtcgcaaccatcatcatcatcatcatctttgggtcccgggaatctggaatctgtgttattgatcagtgctgcgcaattaacttagcaacttatgattatgattatgctgccgaatgggtggtgagtacgaggcattactcatgtatggcggtaaaaccaacaggttgacaggacctctgtttcgtttccattccgttccaatgcactgagcatattttggaaactgtgaaatcaatatatttgatattaaatattatcttatgaggttatttaatgtataaaatgtggcttttacttagaagtgtgcaactaaaaaattatttatataagtaagtataagttgttggaaattacttatacgtttatataagtatatcgttcaaaatatatataggaaagataatgatattaaaacgttgtttttgcttgcagatttccatcgtttgctgcgtgacaaatgcaccttatttatttctcagtgcaggggttgcttatccaccactgcgtcggtggagtgggcagctgtttcgctgccgccgccgagcgatagtggtggtggtgttggtggtgagttgtgttgcaacttcaacttgttcctgagggccgtggacgtcgatgtcggcgagcagaagcaacctgactctgactcgactcggttattcgctcaccactcgcgcttgaatacggacgtgttttcggttcgaagtcaaagtcaaagtagaaggcgaatcacaacggatcggtcgaaagttcagaaactcgtcaattgacataaattgagtgcaatttgcagtgtgcgaaatgtgtgtctaagtgaagccaatcgaccagccaacaattcgccagcttcgccgcctcttgtcgcgtgtttcgctcaattcaactacttaattagtagacataaacaaatcgtgctttgagtccgacatggccgacgaaagtctgcacaccgtgcccctggagcacaacatagactaccacatcgtgacgctattcgagcgcctggaggcgatgcgtaaggactcgcacggcggtggccacggggtcaacaatcgcctgtccagcaccctgcaggctcccaagcggagcatgcaggctgagattcgcacgctggagttttggaggtaagtcaagcctgccctaggacaaatacttatatagatatacgggattaactatgttatttaatgactgaaattcggaaaaacgtcttttgccaaaaacttgatatttacaagcggcatttttgtcataacttcgctaaaacttctcatattgatgaaagaataactgttttgagcagctatttaccagagctatcgaaccctatcactttttgaaggatttaggaaaattaatttttgggtgaattttcacattttttgtaaggggtaacatcatcaaaatttgaaaaaaaatggcaaaaaaattgaattgtcgtttttaaatacagttcgattaggaatttaattgcgagtttaacgaggtataacattcaatattcagacaactattttaaatgttctgataaaaaaactgataatttttgtgcagaaaattagagtaatgatttgggaaaaatgtcatttttactaagatttttttaagattttaaataaaaccacaatctgttgtgtatgatcaaatacttacaattagagagggtaaaacatgattgtatctcgtatgcatattaactaaccctttttaatctaaactaaatcttcaatctaaatggcggggtttttttcgcgtgtatatcatcttcgaaccttttgtttttgtagtcattatctgcacttgctttcaatttgctcaactttagatggcaattgttggatgtcagctggctttgtctgaacgctaagtaattgaaatccaagtgttctccagacgcacatcatcaagataatcgccaaactaaacacggccaaagtttcgagcactttgtggcccatacaaggaccttttgctcagggaactggcaaataacaaacatttcatcacgagctgatggagtaattaaatcttagccagcagcatgtcgagcgcttaaattccggctaaactgcgggacccttttgtctcaagtcctccgactgaccatttaaaatgaaaaacttgaacttagtggggagcagagaacttaggcagaagttgagatacatatttagttccaattaaagtgaagtgccgctgccaaattaaacagctgaatacatgattttatggaaattcataaagccctcgatttgtttgcattttcgttatcgtgcagcggactctgcgctttttagcttaatgtgaatcaactgaattcggcagcattgcagctgctcatcagaacgcttcccctagagctcccccatccgctccagaacccactcgcagtccctccagctcctcctcagcctgcccacccgccccctgcttaattgtcactccacgacttgagggcaacaaaaaagagctttgtgtgcaacttgatttgtgccgtacagtagataccagctaacttggaaaagtctagggctgcacgacaaaaactttgaaacggatttcatttgatttcagtatgaatcctttggctcaacacgcttagccttactatacttaagcgctgaaatatatgtttatgcaaccaatattcactgtactgtacacattccacatgcagtcggtggagccacatgcaaaccaaacccagttgcggaaccatgctaaccccgggctcgttcgccttcttccattcctcttccattccagatccatcatcagcgagtgtctggcctccttcatgtacgtgttcatcgtctgcggtgccgccgctggcgtcggagtgggggccagtgtgtcgtccgtgcttttggccacggctctggcctccggcctggcgatggctacactgacgcagtgcttcctccacatctcgggtaagtcgaaggagacaataaacaagcgcaaaaacatcaacagaatggggcgacaagtgtctcttttcgggttgcccattggaattgcgtgggaaactgccgttttcaagggagccccatgaccataaccagccagcacacggaaccccctttttttttgtttgctatactttcgagaaggcaatgcactcggtgcggctccacctactccagctccttggaatcttatcgcccccgggccaagttccaccacttctttctttttcccttattcccttgcatttattctggtatttatgtatttgttcatttgcgttgacattcaaggcaattaaatgtctttacaagtaaaaaaagaaaaagagaatgaaaacagaccaaagaccaaagtaatgtagttgggaccccatcgtgaaaagcgtcttgaaacatgtgttcttgattttcctgcaactcccccattttgtgttggcttgcaattccccgccttttcacagccaattggttgtgcattaagttatgatgttgttctatacgaaatgccttccgaagaagtgtcaaattgatattaaatgttgctcccctttgggtggccaccaccagagattgacgtcagtatctaaagatatgctttccccttcataggcgcccacatcaatcccgccgtaaccctggctctatgcgtagtgcgatccatatctccgatccgggctgccatgtacataaccgcacaatgtggcggaggaatcgccggagctgctctgctttatgggtaagttttttcgtatttattaagttacacatatcttaagtagacaaatcattggtttgaaaacaagtaagccaaaatcataaataaacattgcccaataaatggagtttaaagcgatatccttttgaaaagcctcacatgaataatttaaccaattgattgagcaaagccattgatagtcgaggctatctattatgcacatcaaatccccgcattaaaagccttatgttgtcgcatacagcacgccaaactcaattgaacaggaattcattttaaattttcggtgtgcaagagtgtatttaaatctgtgtatatttgcacgcctgaccacagcaattgctgcattatgcgaaggacatcgtgcatcctgcgtgtggaattgcccaaaagcaaactgaagagtctcaaattaaatccaacaggctgtccaaagaacctagtcgtaaatcaaaagattgtgggacaggcacggggagagaggacagagggatactaggataaatcggatagagacagatgaaacgcacttttgggcgatgactgtacaacaaggactcacgacaggaagcgtgaaatgcgtagaaatggggaatcctacaaaagaaatgtgcaggtaacctaggacgaacacacacatacacatgcatatgcacaatcacctgcaggaaaaaggacgcaggtaggctaggattctctatctggcgaagaaacatctgcccctatgctcagatgtttgcgtagtgatttcccgcttcgaaaatgaaatttctttgtgatgcctagataaaggaccctctaggccaaggatctacacgcacaccagctagccaaaaatctgtctgcctgtcacggtttttcctttgtgtaaccaaaaatcgcaggacgaaggacgaacgaaacgggaaagaggagtatatatgtatatatatctgcgcatgcgcaccatttttcaaatgtcgctccagttttttgttgtgcgttgaactccttttggcagcaatgttaatgttaatgcctcttcccgattgtctgctcgacatctgtttcgaccctcgaagagaagcctctttttaagtgcgttggcatctttactttctacagatccgatccaagaatcaggaggcggagaaagggacgaggagaaacatgtttcagctgctgcgatcaggttcggggttttttttctttctttctactcctccgatatggatttcttagggtccaacgagttcatcgagtgttttagttggaacatatgtttacctaaaaaaaaggagattgggggaaccgctcagctccttccccacagctgcctgtgtgtgctgattaattggtttagattcagcccatatagcatatatatgtaggttatagctgcgcctggcgatttctccgaaatcgtcgtgattttatgaagggtgttaaacttaatttatccatgattttcttaagctttgagccagtaacccttacacataaccatataataagcaactttagttgggattagcaagggatttatagcttatatagtaaagataaaagattctatgtagaatgtttggaatgcaggaaaacgattagttccctcgctgccaacaatgtgtgacaaagagcatttttaaaaaatctaggggcaagacacccactctccaaggacctgccacttcagctgctcctccactggcttctccacttttccgctgtcacatgtcacttggcacttaccctaattgcgatgcaaatgccacatgtggccaagtggctaaaaaaaagtaccacagagctaaaaccgagtatgaacttcattatcttatgttaaacaaagagcgattgaagaaacatttgtgtacttggaatgggtaatatgcgggggcgggggaaacgaacctgagtatcgatatccggctcaggaatatttgaatagtctttagctgctcctcgaatttcaatgatttcttcccgttctcaattcatattattattattattatggcctttttttggtggtacgaagaacgcacgccgagcacgttccaaaaatgcgagtagcctttgaaaatgtggaaagataaaaatcaggtagaggccgccgccaaaggcagcggggcagccaagcaatgcaaagaaaccagaaagcagaagaacataattaacatttccctttcggatgggcctttgtgcccaggttctcctggcactgccggctactccaggctactgcgcctgcgcaggatgcgtggtgcggaaacttgaaatcaaacacgtgtccgcttctgcgatctggttggtcattcgaggagcagctggaaaaaaaaagtgatcggtgaacacctgctgcccgaaaacagaaaattactgttgccgaggatgcacgacgaatggaacggagaacaggatttcaaaacgaacaaatttaaatttcaagcagctaactgcaacaaagcgaactggacaactcaacaaaaaaagagagtgagatctgtacctgcactgagagaaaatcaatggtcattacttagggtcaatgatttgccatcatattatttaaagtcgctctaggattaatcacattacatttatgatggctgatttatattctataataatatctgaataagatttttttattttctcaaggcaaaatcagaaaccctaactttctattcttcttgtgtgcctcgtcgatttgcatctagcatggaaatgcacttcctgccgttgaagggatggtttttagaaatcgaaatcgtaatcaattcgtgtcacatgggcaattcaattactaaatccgtttgccagtggattccgttcccctttctttatttgctactactcactactacggcaggcttatcgcacttggcttggaaatagcatcctgccagtgtttccggttgcctgcacttggtggcccccgcatcctcaccaccatcctcatcaacaatgctgcacaggtggtccagttatagagttatgttgccggcattcagaaaaaacacctggaaagcggggtcaaaagtagtgcatttaaaatgaactttttatatgggatgaactcaaggaagcaggatcaatcctcattgtttctacaaatcgaaagttataggtatgatgagttctgattattgtttaatttcagtggttctaaaaatacatctaaagcatgaagagtctctagttaacttagatttaagacaagtgcgaagctactacatgtagtaacttcatttggcggtcgcatcgggaattcaagtgctccattcccagtccctggcaacccaatgagcttggaagccagccacaagccaaaaagaccgaaaagcaaacgcaaccaaaccaggagcattgcaaatggcacatggcaatccgcagctcacagtttgcagttcgcaatccgcaattcgcctttcacccggatacgcggtggccaccagtgcgagaaaatgggcaatgagtcgacttcgcttggggatagggatgaggataacgattccggttcacagttcaagtttgcagttcggctgccacttgtttcttttggcactttttttttgtattccgcaaacaatttgcgcaggaagagcagctgaaagccgcccaacattctgccatttccggctacttagttgcttcctccccagcgctaacagctgagtgtttgtttatccccgtggatgagtgcctgttggccactcgtgccatgtgaaattagcactctatggatttatgagcaaacaagggtcactttctattccaaaccaaccgaacatatcgtttcgaagcgatcaaattttaatcaagacttgggagcaactgtgcccaggaatttcgtaaggcagtcgaggattaagtcctactaatccgttgctgccacagagctggtgaaccttacgcccaccacaactcacctcaatccgcagtgcagccggaacttgcagcaatttcctatttgctgaagtacttttaagtgcattccgaaagcacttatttccggattttcaaagtgggcggattcggtgtggtaaaggattgcggtatgtctatataaatacccactctgctccgcattgcaaaatgttatctcacggagattcctgtgacaacaatcaacttctggaaagccataatatatggtgccctcgaggaactttgcatctgcattcgggaaacaaattatccggcagtttcaaatcgcaaggattcaaactcatctggcccaaaaggtgctcaacaactttggtaattgaaactttgacaagctaaatgatgttgaggcagttgccgggtagcgcagattaatggaattgactttggcggggtgtggatggtttggagggttgattgccgaactgtcaggacgataaataataaattaaacaaattgtcatcggcgtttagctacgaaaactttgtgctccgatatcgaaatggtgcggtttttgtacaagcaacttgcaactataaatatttatatactctatatactatatacttataactcctttcctttcatttattttacagcgtaactgtgcctggttaccaggggaatctgcaggccgccatctcacatagcgctgctctggccgcctgggaaagattcggtgtggaattcatcctcacctttctggtggttctgtgctatttcgtatccacggatcccatgaagaagttcatgggcaattcggccgcctcgattggatgtgcttacagcgcctgctgctttgtgtcggtaagttgacttcccccctctccccaactccaatctcgcaacccaggaatgccggtcagaaatcagaaatcagctaaatgaaaaccagaacccgccaaaaccgaaaacgagccgaaaacaaacaactgaaacgcacctgccgactgtgacgctgtcattttgatgttggtgcaaaatcgcagcatgacaacggacgagctggtatcaactgggtaaactcaggtagagactatcccacaatcgtgggacgctggaaggtcgagctgctgggttgcaggagataattaatttagcaaaggaactccgtggacggagctgcattgctggcataacggacggacagacagacgatggcgacatccaaagaggatgccatcacacggccaagttttcgaatggggaaccgattaaagtcaagttaatatcgacgcaggattgaattacgattaaggaaaatcatggataaagcggagtttaatgtccttagggttccacgagtatgctatacaatgcccactttaaattcctttgaactcctcaaggatcatttaaattaagttatttcatacttaactcttcgacttagaaactgctgcgaacttcttaaactcttcaaattgtttaaacagtttactccccgctttgtttgccaacttctttcacaagtatcctttgatgaagaatattcccagctagaagttgacacaaacgacattgactggctgacttgtgcaggccgtgaagtactttccttgcttggcagatgtctaaccaaatccttcctcctccctcttctccttgcagatgccgtacctgaatccagcccgctccctgggtccttcgtttgtgcttaacaaatgggacagccattgggtgtactggttcggaccactggtgggcggcatggcctctggcctggtgtacgagtacatcttcaactcgcgcaaccgcaacctgcgccacaacaagggcagcatcgacaacgattccagttcgattcactcggaggacgaactgaactacgacatggatatggagaagcccaacaagtatcagcagtcgcagggcacctacccgcgtggccagtccaatggcaatggcggaggacaggcggccggaaatggtcagcaccaagctgccaacatgggccagatgccgggcgtagtggccaatgccggtcagggcaattactgccagaatctgtacactgctccgccgctctcctcgaagtacgatcagcagcaggaacctctgtacggtggaacccgctcactgtactgccgttcgcccactctgaccagaagcaacctgaatcgctcgcaatctgtgtacgccaagagcaacacggccatcaatcgagacattgtgccgcgtccaggtcctctggtgcccgcccagagtctttatcccatgcgcacccagcagcagcagcaacagcaacaacagcaacagcaacaagtggcacccgcacctcaatcttcccatttacagaaccaaaatgtccagaatcagatgcagcagcgcagcgagagcatctacggaatgaggggctccatgcgcggacagcagcagccaatccagcagcaacaacaacagcagcagcagcagcagcttcagcaacaacagcccaacatgggagtgcagcagcaacagatgcagcctccgccacagatgatgtccgatcctcagcagcagccgcagggcttccagccagtctacggcacacgcacaaatccgacgccgatggacggaaatcacaagtatgaccgacgtgacccgcagcaaatgtacggcgtgacgggaccaaggaatcgcggacagtcggcgcagtcggacgacagctcctatggctcatatcacggctcggctgtcacgccgccagctcgtcatcccagcgtggagccatcacctccgccaccgcccatgctgatgtatgccccgcccccacagccgaatgcagcccacccgcaacccattcgcacgcagtcggagcgaaaagttagtgctccagttgtggtatcccagccggcagcgtgcgccgtgacctacacaacctcgcaaggatcagcggtgacagcccaacagcagcaacaacaacagcagcagcagcagcaacaacagcagcagcagcagcaacagatgatgatgcaacaacagcagcaacattatggaatgctgccgctgaggcccaactgaaagcggctgtcatggggtccggtgacaacgccgccgccagggatccacgccctcgccctccagcccggaggcaccatgaccctgcaccgctgcagcctagccaagcagagcagtttgttttagtcgtagtcgtacgtagtagcattcgggcatcgcatccaaaggaaatgtacacaagtctcagccccatatagtctagcatagtcctagtttagatagacgcagcatagccacattgtattaattgagagtcaacgcgacgaggaactcacacctagcagcagacaacgacgatgcgatctagcaaagatcatgtacgcttaaggaactaataagggttatcattcaccgaaggctagactaaacgagtgatctagatgatctagactgaaagacaggtgcatttaactaagctacttcccttaagttttgttcaactcttccaatattaattttgtcaaaagaaacttacctttttttaaaacagccttttgttgcaactcttatttgttttggcaaatcatttggttattcatgtttcttgtaaatgcaaaactagactgaacttacctaaagcattttgtacgttatatttcaaagttcatacatatatgtatatgtactcttcccattttccgcggacattcaaagattttcgtttacttttcgattttaatttgtatatagtccatatagacgtaagctattcatgtaaatcttacaaccctaggatcggaagtcgatacaaatatatgtatatgcttacttattaaaatagttgtattttcttagtgataaacccgtttgctaatagttgttagagcctaagagaacagcgcaaatatattgtgtatcaaaataaagacaagttcatccaaacaaagaaagagttacgttcttatattattttaccaaaaaactgtaaaatgtgtatattttattatacagaggtggtcaaaagtatttacacaacatgctttcttttcatttgtcaactaaatatgcgtttttggttggcatcaacagttgatataattgttatattatcatttaattatgaatactgagaatcctacctactattcaaggccttttttatgaagttgatagtcttatttcaatatgaccttgaatacatttaaatacctattattttgtgtggtttttttgaacacgtgaatttttagaaaaatacaaataacacttaaagcattttacgttgaatagatagtgattaatatcaatcgttggtcaatgaatagcttgaatactatcataatccaaataaccatgcgcttggaagatacagtccatgtgggattaattcacgaatgccgattcaaagcatcatctatggatggcctgttggtcatctgtctccaacgccgaggacatgaaggagaagtacagtcgaagctcggccagaggaaagtggggtagctcctttcgtacctttgcgaagtcggtgccgtattgctcgaaggccttggtaagacggatgagatcctcggccttccagcgatggtagcgacatcctcgagctgtctcagtcttctccagacgtcgatgtgccaggggcaggtcgtatccgtgacgccgcaggatgaacagcgcctgctcctcctcgatatcatagagactggccgcatagtcaaggtattcgcgaacagccttgtcatcttggtcctgcagttgcggcgaccacaggatcgaggctcgatgttgcagctgctgcaaatcctgttcccgcttccacggcggcacaaaatccggcaaggtggctgcctgttttcgccagtaatgtatgtctcgtttctccttgcgtgccgacatccttcgttcaaaacaaaaagaaaaaaataaataatctacatgaagatagcaccg

SEQ ID NO: 9551 - DNA, 3278 bp, DROSOPHILA
agaagcaacctgactctgactcgactcggttattcgctcaccactcgcgcttgaatacggacgtgttttcggttcgaagtcaaagtcaaagtagaaggcgaatcacaacggatcggtcgaaagttcagaaactcgtcaattgacataaattgagtgcaatttgcagtgtgcgaaatgtgtgtctaagtgaagccaatcgaccagccaacaattcgccagcttcgccgcctcttgtcgcgtgtttcgctcaattcaactacttaattagtagacataaacaaatcgtgctttgagtccgacatggccgacgaaagtctgcacaccgtgcccctggagcacaacatagactaccacatcgtgacgctattcgagcgcctggaggcgatgcgtaaggactcgcacggcggtggccacggggtcaacaatcgcctgtccagcaccctgcaggctcccaagcggagcatgcaggctgagattcgcacgctggagttttggagatccatcatcagcgagtgtctggcctccttcatgtacgtgttcatcgtctgcggtgccgccgctggcgtcggagtgggggccagtgtgtcgtccgtgcttttggccacggctctggcctccggcctggcgatggctacactgacgcagtgcttcctccacatctcgggcgcccacatcaatcccgccgtaaccctggctctatgcgtagtgcgatccatatctccgatccgggctgccatgtacataaccgcacaatgtggcggaggaatcgccggagctgctctgctttatggcgtaactgtgcctggttaccaggggaatctgcaggccgccatctcacatagcgctgctctggccgcctgggaaagattcggtgtggaattcatcctcacctttctggtggttctgtgctatttcgtatccacggatcccatgaagaagttcatgggcaattcggccgcctcgattggatgtgcttacagcgcctgctgctttgtgtcgatgccgtacctgaatccagcccgctccctgggtccttcgtttgtgcttaacaaatgggacagccattgggtgtactggttcggaccactggtgggcggcatggcctctggcctggtgtacgagtacatcttcaactcgcgcaaccgcaacctgcgccacaacaagggcagcatcgacaacgattccagttcgattcactcggaggacgaactgaactacgacatggatatggagaagcccaacaagtatcagcagtcgcagggcacctacccgcgtggccagtccaatggcaatggcggaggacaggcggccggaaatggtcagcaccaagctgccaacatgggccagatgccgggcgtagtggccaatgccggtcagggcaattactgccagaatctgtacactgctccgccgctctcctcgaagtacgatcagcagcaggaacctctgtacggtggaacccgctcactgtactgccgttcgcccactctgaccagaagcaacctgaatcgctcgcaatctgtgtacgccaagagcaacacggccatcaatcgagacattgtgccgcgtccaggtcctctggtgcccgcccagagtctttatcccatgcgcacccagcagcagcagcaacagcaacaacagcaacagcaacaagtggcacccgcacctcaatcttcccatttacagaaccaaaatgtccagaatcagatgcagcagcgcagcgagagcatctacggaatgaggggctccatgcgcggacagcagcagccaatccagcagcaacaacaacagcagcagcagcagcagcttcagcaacaacagcccaacatgggagtgcagcagcaacagatgcagcctccgccacagatgatgtccgatcctcagcagcagccgcagggcttccagccagtctacggcacacgcacaaatccgacgccgatggacggaaatcacaagtatgaccgacgtgacccgcagcaaatgtacggcgtgacgggaccaaggaatcgcggacagtcggcgcagtcggacgacagctcctatggctcatatcacggctcggctgtcacgccgccagctcgtcatcccagcgtggagccatcacctccgccaccgcccatgctgatgtatgccccgcccccacagccgaatgcagcccacccgcaacccattcgcacgcagtcggagcgaaaagttagtgctccagttgtggtatcccagccggcagcgtgcgccgtgacctacacaacctcgcaaggatcagcggtgacagcccaacagcagcaacaacaacagcagcagcagcagcaacaacagcagcagcagcagcaacagatgatgatgcaacaacagcagcaacattatggaatgctgccgctgaggcccaactgaaagcggctgtcatggggtccggtgacaacgccgccgccagggatccacgccctcgccctccagcccggaggcaccatgaccctgcaccgctgcagcctagccaagcagagcagtttgttttagtcgtagtcgtacgtagtagcattcgggcatcgcatccaaaggaaatgtacacaagtctcagccccatatagtctagcatagtcctagtttagatagacgcagcatagccacattgtattaattgagagtcaacgcgacgaggaactcacacctagcagcagacaacgacgatgcgatctagcaaagatcatgtacgcttaaggaactaataagggttatcattcaccgaaggctagactaaacgagtgatctagatgatctagactgaaagacaggtgcatttaactaagctacttcccttaagttttgttcaactcttccaatattaattttgtcaaaagaaacttacctttttttaaaacagccttttgttgcaactcttatttgttttggcaaatcatttggttattcatgtttcttgtaaatgcaaaactagactgaacttacctaaagcattttgtacgttatatttcaaagttcatacatatatgtatatgtactcttcccattttccgcggacattcaaagattttcgtttacttttcgattttaatttgtatatagtccatatagacgtaagctattcatgtaaatcttacaaccctaggatcggaagtcgatacaaatatatgtatatgcttacttattaaaatagttgtattttcttagtgataaacccgtttgctaatagttgttagagcctaagagaacagcgcaaatatattgtgtatcaaaataaagacaagttcatccaaacaaagaaa

SEQ ID NO: 9552 - protein, 696 aa, DROSOPHILA
MADESLHTVPLEHNIDYHIVTLFERLEAMRKDSHGGGHGVNNRLSSTLQAPKRSMQAEIRTLEFWRSIISECLASFMYVFIVCGAAAGVGVGASVSSVLLATALASGLAMATLTQCFLHISGAHINPAVTLALCVVRSISPIRAAMYITAQCGGGIAGAALLYGVTVPGYQGNLQAAISHSAALAAWERFGVEFILTFLVVLCYFVSTDPMKKFMGNSAASIGCAYSACCFVSMPYLNPARSLGPSFVLNKWDSHWVYWFGPLVGGMASGLVYEYIFNSRNRNLRHNKGSIDNDSSSIHSEDELNYDMDMEKPNKYQQSQGTYPRGQSNGNGGGQAAGNGQHQAANMGQMPGVVANAGQGNYCQNLYTAPPLSSKYDQQQEPLYGGTRSLYCRSPTLTRSNLNRSQSVYAKSNTAINRDIVPRPGPLVPAQSLYPMRTQQQQQQQQQQQQQVAPAPQSSHLQNQNVQNQMQQRSESIYGMRGSMRGQQQPIQQQQQQQQQQQLQQQQPNMGVQQQQMQPPPQMMSDPQQQPQGFQPVYGTRTNPTPMDGNHKYDRRDPQQMYGVTGPRNRGQSAQSDDSSYGSYHGSAVTPPARHPSVEPSPPPPPMLMYAPPPQPNAAHPQPIRTQSERKVSAPVVVSQPAACAVTYTTSQGSAVTAQQQQQQQQQQQQQQQQQQQQMMMQQQQQHYGMLPLRPN

SEQ ID NO: 9553 - DNA, 2843 bp, DROSOPHILA
tattgctgtagacgaccggactctggtagagttttacaaatcgcatacatatcccttatttcaattctagaatctagggtaataccgttctccaaatctctgaaatcagcatttgggcaaatcgtggccaggagccctatattcctgttcctctcaccagacctgcgccttctgacagcggactccgattcttcctcggatgccatgatcagcatagaagacgattccattgagctgtccattttatcgttaacattctcattgctaccatccgtgagctcatcatcttccgtgctgttactagtgtccttggtagctcgcttgctgatagttttctcgatactgctcttcagattctgctgcttcgatagctcactataatcattatactcggaatccgattcggagtcctcccaaattgggggcaaaggaagtgccgcgctcagcacaatggcggagattaggaacagcaaaacagatcgacgcatcccggtaatctttgtatatcctggtaaactccactattccactagcttgatgggtgggttcttctcgctgagactgattttttcgaactgattctggacagctgcacacgttaccggcgaagcctcaacaaatgtgctatcgcctcctcggcgattatgtgattatagactcaaattcaattgagtcaggcagatagtgggtttcagaaatgactctttataatgcatgtagattgaaacagacgcacttagtcccttaaaacagacacgtaatgcataatttgacttacacaattaaataagctaagtttcaatgttaggtgagctaatttccaaatgcatttcaagtaatgaaaattgtaatagttaaataatatggcaaaattaattattagaagaggaaaatatttcttgttgctgatatttatacgtgttactcgtaaacttgaataaacacaccccataagttaaaaagtaaataatacataggcaatagcctaatctcttgttttgatgactcagtcattataataatagtaaaaatgtaatatggctacgaaaacataagctataatgttatttatgtttattcaaaatcattcggcataggtggcctcgttggcctctttggagctaacctccatgacctcgcatccctgggcgtagtcttcgatgctggtgttgtccttgtccttcaaaagctccgccacagcctgcgccatctgctcgtccagttccttctcagcctgggcatccaggtccggcgcatcgctggatttctgatcggcagcctggcgtcttcgtctagactccctttgcttacaaaagcttacggcccggtcatatgcagattgtagattgaaattcttaatatcgaattctttcagtgactggcaaaaggatcgcaccatcgtatcctccgtgcttctgcgtttcctagcagtgtgctccgtagttgtttcttctaccgcagctggtgttgtcttttcctcggaggaggaatcgccggagctgtccgccttgttcttggccttgtctttggctttgtcattatgctcctcagatgagctgctggcatccttggcagatcgtttgataatatggattccggtgctctcgtccaggtcctgcagttcaccgctgtcttcgctcagcgtcagcatctgctccagccaatcctcctcggatttggttagtcttgagggcagagccactgcagcacagaaaaggatggctgacacggccagtagtaacagtgatcgctgcattgatctagtccttgtggtataaccttttaaggtatgtaaactctcctgtgctcctctaggcacactttgcgccaagaccttattttgcaaactgactacgaccgatggcaaagatttgccaagaaacctcaaaagttcgtttctgtccagattttcagattacgggtgcaaccgtaattaaagcttccatcaaatgcgaatgtataaatacatatatttcatatagattgcacataacactctctcccattttcagtttccgcggcactgcgcaatttccgagtttgcgccaattgcgagtccagaaatccagactcacttgcataattcatgacaacaaattgagaggctgtggaacgcgatgcactatcgagctgccaaagtcaggcctgataagcccacggatcactacagatcatcccgacgcgcaatttgtaattattgatgctacttcaaaacagatgagcaaaaatgtataagtataatccgagtacacagcaagcaaaaaatgtaaatttaccagtcacaggtaatatttttgtattcagaattattttaaaacaaatttaaacactcaaaatcttgttgaatacataatatttttttattagctttacaattttgttttatagataaattccttaattaaatatatatataatatatatgttaactcatctaatcttttaatgcttttcagtgaaatccatatttgtttttaaagaacgacccacataaattgaacttctaatctaaacagcatatatatgtatatataatttctgggaaaaaatataaaattaaatttattaatgaaaaaatgaattccaaagagctccattaaatcaaaaaatccgaaagttaagcgcttgcctatttcttcttttcatataagtaaaagtaagtaaaacgaaaacttttaccataaaattgtttatcattttttaatctgttcgatttgtgtatccaaaagactatcttttcccgcgctgtgtagagaaacactcgtaaattacaattttgccggcgcaacgtgccagcgtaattgaagcgtttcgtggagggaaagtcaagttcaagagttctc

SEQ ID NO: 9554 - DNA, 843 bp, DROSOPHILA
caaaataaggtcttggcgcaaagtgtgcctagaggagcacaggagagtttacataccttaaaaggttataccacaaggactagatcaatgcagcgatcactgttactactggccgtgtcagccatccttttctgtgctgcagtggctctgccctcaagactaaccaaatccgaggaggattggctggagcagatgctgacgctgagcgaagacagcggtgaactgcaggacctggacgagagcaccggaatccatattatcaaacgatctgccaaggatgccagcagctcatctgaggagcataatgacaaagccaaagacaaggccaagaacaaggcggacagctccggcgattcctcctccgaggaaaagacaacaccagctgcggtagaagaaacaactacggagcacactgctaggaaacgcagaagcacggaggatacgatggtgcgatccttttgccagtcactgaaagaattcgatattaagaatttcaatctacaatctgcatatgaccgggccgtaagcttttgtaagcaaagggagtctagacgaagacgccaggctgccgatcagaaatccagcgatgcgccggacctggatgcccaggctgagaaggaactggacgagcagatggcgcaggctgtggcggagcttttgaaggacaaggacaacaccagcatcgaagactacgcccagggatgcgaggtcatggaggttagctccaaagaggccaacgaggccacctatgccgaatgattttgaataaacataaataacattatagcttatgttttcgtagccatattacatttttactattattataatgactgagtcatc

SEQ ID NO: 9555 - protein, 223 aa, DROSOPHILA
MQRSLLLLAVSAILFCAAVALPSRLTKSEEDWLEQMLTLSEDSGELQDLDESTGIHIIKRSAKDASSSSEEHNDKAKDKAKNKADSSGDSSSEEKTTPAAVEETTTEHTARKRRSTEDTMVRSFCQSLKEFDIKNFNLQSAYDRAVSFCKQRESRRRRQAADQKSSDAPDLDAQAEKELDEQMAQAVAELLKDKDNTSIEDYAQGCEVMEVSSKEANEATYAE

SEQ ID NO: 9556 - DNA, 5822 bp, DROSOPHILA
cggatccgccgaattgtttctgagcgcgtggaaggtggcaccgcatcgtcatctggcttttcatttttctcagtggcagccgccgattctggagctccatttccgggtttctcggactcggatcccttggattttgtcttttggggtcgttgcttgctcaccgccgcgtccattagagcgtcgtattcctcctcctcgtggctatactcgtcgctacttagctgcgaattggaggagtcgtagatctcgttggacattaggcctgcaactggacgacggtcaggtatgtacatcttttggcattaaccccctcaaaaactcacgcgctcacgtctgcaaatttttggccaacaaaaaatcgtctgccggttgaatattctaatccgccgacgggctcaccttttcagttgctgaaaaccacttaaaacaatggcccaagtccccaaataggctaattcgggtttataccagttttaaagcgtttactttcagcaaaaatccaatttccaaatgcgaaaaaaaattcgccgttcaattctgcgaataattttgacaggcatttagtatggacgcaaaccaatagggtaaccacttttgggaaagtctttaaataatactgaataaaatatgttcttccaactagttcttagttaggtaaaccaagcaaacaaatttttaatcttattaaattaaagtaatctagtaatcttattaaatattactagtttcggggtattcggtcatttcatatctaaaaaccaaataactatattagaataagttactcactagagtttcattttttgatttatggaaaagttagcgtagatcaaaaatcaatcattaataagctataagttgtagtgcagatcgttagccaaattattcagatttcctttacaacattgcaacctgacagccctggtggcaaatattaaatattgaaaaatactaaaggcaaaagtggcgattttccgtttgttcaccggtgtcatcgtcattgcactcgaacggtcataccgtttggcttacaaaagaaaacaaatcaattcgcacaaaaacattgccaaaaaggtaaatggcgggcacgacgccgccgagtgataaccatatagtagtgaccagtgtttagcaaccgattcccgcccagtgacactcgtaaacaaagggcacgaccgacagtgtctgtatatatatgtgcatatgcgtaacagggaataaccgataagaacggcgcagctgcagatagacatacctttaaataggactttgtttattgatcgtttgtgggtggctattgccttgcagatcgcgaactgataaccataaatgttaaccacgtcacgccaccccacgcctctcccaaacacacacactcgcacacgtgcgccagctgagcacatgcatacgtatatgcatgctcacacgcacacaatcgcatggtcgtgcacaagaactcttttgttgtatgtaaagtggacgatcgaaaaagtaaactaattcaatacaatgggttcagcaatcaacgtcggggtcaccaattgagtgcatcaaaaatacaatcaattcggcccggcgaattttcggttgattcagctaatggcggtgtgcataagaaatggcatgaaaagtactccttttttcattggatttaaatcccattatcataggaagaaataagaaatttaaaaaaagcagtgcttgtcaactgaatgcattcatttctattacaaaaacgtagtgcgttccattgtgcatgtaaatatatgcagtcccagttttatattacgtgtcaaaacaaaagattgacctttatcattggtcgttttacaaccattgtttataactttgtagaaatacaaataaaaacttctttgataaactttatccgctgacatgttttaaatcataatttaagtaaatcatgatcatttaaataataatctcaatatataatacctattactttagtttatttaaaatccgaaaatcgtttcgaaacttatttaaatttgcttaaattgaaatatctaaaatatccgaagccaagtattatttaataagaaatatgaatagctaaacgccttaatgaaatgatttaattagtttaaagttttaaagttgtcgtttttactcataattaaaacggtcgtaaaactttagtacttttttaaaacatctccatgtacaaaatgtaaaaaatgacacctaactgtcatcaattttttgctaaactgtttgcacactttggtccccataaacccactcattctaaagattattgactttcgcgagcttccactgtgaagtgcgagtatctgccccataatgactatccgtcggacaggcggactttgtccacagcggctgtagctatttccaacggagaagtcatcgattggccaaggctgattagattcctcctccggcagcggccttagcaaaagctatagcctatagggctatgggctatagctcccgctgatatctggcgaatatctctgccgtgcggcggttgccccagtccattgccagctggtggtgcaggtggttgccttcccggatttcacgatttcttttaacttggccgcgtgcttttaattgaagaaaacgcagctcttgtgtgagtgcgggaccttgtgtagtggtcataaactaggtgttccaccgttgggaccataaagtgcgggtttacgagcactaccgggagaacaacctacaattaaagtagtgattacgtaaagacagccgttttattggttaaacatcgctatttgcagatcaaaatgggttccctggagaagctgaaacaattgagactgatacacctgtgcatcgcgctcaccttctttaccagcgggctgtgcatcaactttatccagctgctgatgcacgtctttatcaagcccatagacaagcgactcttccgcaagttgatgtactatgcctgctattcgctttactcccgtgagtatatcctgaccagttccgattcgaagtagaaacataatacctccaatcccttagaacttatcttcgtgtccgattggtatgccggcagcaagatgactgtctacatggacaaggaggacttcgagaagcatgccggcaaggaacacgtccttctgatcatgaaccataaatacgagatcgattggctcaacggctggatgatctgcgaaaagttgggcgtgctgggcaactgcaaggcctatgcgaagaaggcaatccgctacgtgcccatcatcggctggggctggtggctggccgagttcgtcttcctcaatcgaaacttcgaccaggacaagaccatcatcaccgaacagctcaaggtggtcttctcctatcccgatcccacctggcttttgctcaacgccgagggcactcgcttcactcccgccaagcacgaggcatccgtaaaattcgcccaggagaggggcatgacggtgctgaagcaccatttgatcccgcgcaccaagggattcaccgccagcttggcacccatccgcggtctctgtccggtaatctacgacattaatctagcgtacaggcccacagataaggtaattataacggcaaacttcaagcacttcatttaagtgctttagttatataatactgtattttattgtgccatacatttaatgcagaattctgcatggcaaagcttctcatgtatatttttgataaggctaatcagcctgttcgacaatacctgtctgattgctttggtctaatcaaatttcttttcgtttaatccgattattttgctcatttacttcactgcctcttttaagagtcacgatttcttaagatcgatgctcttaaagataccgattagaatgagcaaacatttcaaggttaatcaagtggtaatttttataacttattttccttattttggtttattttccttacctttgacgtgtcatcagtattattagcactttagccagcatagcaaccttaattttttaactgagtaatttggcgttctaatgataagtgcatagaatttagcaaattgcaaatttattatggttttaaattaaactcgcagaagtgagttataaaagatgcttataaagatactacagttttagctactaaaaggctatttaccggacttaattaacttgcaattgaactttcagacccccgccacaatgctgagtttgctgcatggaaagagcgtggaaccgcacctgctgatgaggcgtattccactggaacaggttccggaggatgagaaggaggcggccgcctggctgcagaacctgttcgtggagaaggacaagatcatcgatagcttcctggagacgggcagcttctttaagacgtccggcataaaggaggttccggcatatgtgaataaacgccggctgtgctcactcgtgaactttgtctgctgggcggtattctctctgtcctgcattttctactacgtgatcacatccctgctggcggccaactggacggcctttatcaccgcactttccgtcctgggactttgtaagtttggggttcgatctttaaggaggatggcactttagacggcattagccgttcattctttaagttttaagaactttttggagtgttaaatgctaaagttcatatataatgacgtctgcatggttataacaataatataagccgcgttctaatgtgttcctactccctccaaaaccttaacttttgtaaatcttattaatattctttttttcttgttacagtttactggctcatgggtcaggccatcaacaagacgcagatcagcaaggcatctaattatggatcctccaagtcggtcgcaaagtaactttcgaattcgcatttagtttcgattgtcgtcgaactcaattatctacaaatgactttgtaaaaggcagtcctctcacaaatctctctgctaaatggatcaattcgtgattcctatccggacgatttaaagtgttttgcatgtttttcttgtctaagtttatagttacgaagtaactcccgcacactggagccatcaatttgcgtacgtagttggtagttgtacacctaagtggaaatttaattgtttgatcaattgtattttggcgagcattgcaataattaaattaaacagaacgtgagagcgtgagtttgttgttgttgttttttgataaggcgtaaggtaagcagtgcgctgataagggctgctgataagtgtggacatgcaagcagtgcacctaaagagtgaccttaacacaaaataccaacagtatttctaaactggatacttgaaaattacacacatacgtgtgtaaaataaatgtaaaatttcgaatacattgtttttgagattcccagaaatgctttcaaaagttaccttttgaacaggaaggaaatgagcaataagcaaagcatattatccaaatatttgtgtttatcagcattcttcctacacgttcgtttctttatcagttgtaacgatcagaagcagcacacgttccgttagttcgactgcttgcccttggctatatgatcaatacaaccacacgccaagcataaaatcgcctttattcgccgataagcagtgtcgcccattccaattgactgataacaggtgattaaaagtgttagttgtgggtttctgggttgtactatcgacgagatccatatcactaggggctcgggccgcctagaagagtcactttcattcagtcgaattctactggttggtagaacaagttgcaacttcctggtctctaattgttaagattccgcttagataggtgagtgagtgtgtgtgtaaatgagaaagtggactgtcgcaaagtgaaactgaaacg

SEQ ID NO: 9557 - DNA, 1241 bp, DROSOPHILA
ttgcactcgaacggtcataccgtttggcttacaaaagaaaacaaatcaattcgcacaaaaacattgccaaaaagatcaaaatgggttccctggagaagctgaaacaattgagactgatacacctgtgcatcgcgctcaccttctttaccagcgggctgtgcatcaactttatccagctgctgatgcacgtctttatcaagcccatagacaagcgactcttccgcaagttgatgtactatgcctgctattcgctttactcccaacttatcttcgtgtccgattggtatgccggcagcaagatgactgtctacatggacaaggaggacttcgagaagcatgccggcaaggaacacgtccttctgatcatgaaccataaatacgagatcgattggctcaacggctggatgatctgcgaaaagttgggcgtgctgggcaactgcaaggcctatgcgaagaaggcaatccgctacgtgcccatcatcggctggggctggtggctggccgagttcgtcttcctcaatcgaaacttcgaccaggacaagaccatcatcaccgaacagctcaaggtggtcttctcctatcccgatcccacctggcttttgctcaacgccgagggcactcgcttcactcccgccaagcacgaggcatccgtaaaattcgcccaggagaggggcatgacggtgctgaagcaccatttgatcccgcgcaccaagggattcaccgccagcttggcacccatccgcggtctctgtccggtaatctacgacattaatctagcgtacaggcccacagataagacccccgccacaatgctgagtttgctgcatggaaagagcgtggaaccgcacctgctgatgaggcgtattccactggaacaggttccggaggatgagaaggaggcggccgcctggctgcagaacctgttcgtggagaaggacaagatcatcgatagcttcctggagacgggcagcttctttaagacgtccggcataaaggaggttccggcatatgtgaataaacgccggctgtgctcactcgtgaactttgtctgctgggcggtattctctctgtcctgcattttctactacgtgatcacatccctgctggcggccaactggacggcctttatcaccgcactttccgtcctgggacttttttactggctcatgggtcaggccatcaacaagacgcagatcagcaaggcatctaattatggatcctccaagtcggtcgcaaagtaa

SEQ ID NO: 9558 - protein, 386 aa, DROSOPHILA
MGSLEKLKQLRLIHLCIALTFFTSGLCINFIQLLMHVFIKPIDKRLFRKLMYYACYSLYSQLIFVSDWYAGSKMTVYMDKEDFEKHAGKEHVLLIMNHKYEIDWLNGWMICEKLGVLGNCKAYAKKAIRYVPIIGWGWWLAEFVFLNRNFDQDKTIITEQLKVVFSYPDPTWLLLNAEGTRFTPAKHEASVKFAQERGMTVLKHHLIPRTKGFTASLAPIRGLCPVIYDINLAYRPTDKTPATMLSLLHGKSVEPHLLMRRIPLEQVPEDEKEAAAWLQNLFVEKDKIIDSFLETGSFFKTSGIKEVPAYVNKRRLCSLVNFVCWAVFSLSCIFYYVITSLLAANWTAFITALSVLGLFYWLMGQAINKTQISKASNYGSSKSVAK

SEQ ID NO: 9559 - DNA, 5290 bp, DROSOPHILA
ggcgacgggcgctttgatcttgccacatgtccatcaagtacactacatatatgtatgtatacacgatgtacatattattatatggtatataagacgtacggagagggggaaaggcggtaaccgagaacggaggaagttgctcgcttggaactgagagcgctgtcagaaattgccaactggcacattaatccacgcgacatatttatgagtgtaaatgtatctgtgtatccgcgagatgcgagatataaagatatcggccggcaaacgtgggacatggacgagggttgctcgttgctcgctgctctttgctaaatgagtgcacatttcagataaattattgcacacaacttgtacgcgatggcaggccgaaatgtatttaacaaattaaatttacacacagatacacacaccgcggctcgcaagacttcaaagagggcgccgcagcgtaacggccgccaaatggggcgtggcctcgacgggccaatggcaacgcgccgctctcacagatacacaagcaggcaaccccatagatacacccatacgcatgcaggccagagagacagacagagagcgtatttgtttttagtacacgcagaaaaatgaagttctgtttgtgttttttattttaatgttaactagtaattttagtcagaaccttaagtagggaattatattaaatcaaataaccgaactatttcttctttgaaaaatataacatttgtgataagaagaagtggctctttgctacaacaactaagaaagagttactattagaattgtatctataacgtttaaagtgcctagatttttgtcaaagtgcatctggcagatacgacagatacgcggggcctgtggcgagtatctcatcgattttttaagcgtcggaatgcgtggcacgagacagagacccctgtcacgtgacagcaccgacatgtatctgtatctttgtgtgtgcagctgtgtgtatctgagcctgtgagtcccattcatgccactgccaccgagatggcggatttgttagatactggcatggatattgagatacttcgctgcagccgggccaaactgcactttcagcgcttttttttttatctgcccgaagctgtaaatatccgcgagatttacaacgccagccagccgcgacttcggtatcggtatcagtatcgtttggctgacttcgattcgtactcggaatcggcatcggcatcggcagcggcatcaggctgggggtatcgctattgagcgcagcgcatcattcggtcagcaattcgccaatgcagatactgtatctgcgggcagcagctactaaaattgaagagccaaaagctaaaatacccatatacatactcggtacaccgcggtcatcgtcgtcgtcgtgctccacttgtgcccattgttggttctgctgtcaccgtaactcacaattgaattgttcctttgttctgtcccgtccagaaggagacccgctgccgaatttcgcataattggctggcttttaagttggccgccagaccaagtgtcgccggtaaaaagatacatctacagatagatcgttgtacttttggtacttttggagcttggtggaactcgaactgagtaccatgctggtgccgccggacatgatggccgcccagacgcgcatggtctatcagatgaatcgattctgcacggagagggttcaggccaggatgtacaagacggccaccgccatccgggagatctgcaagatcgtccaggacatcctcaaagaggtggaactgcaggagccgcgattcatctccagcctcgtcgagtgcaatggcaggtaaactttttcagtatcttttcattagtatctcagtatcttttctttagtttcttaataaccatatattaataactatattacctaatgttaagccgatgcataagttagctaataaaaacgagagctgctcatccgatcagagatgtctagtgttcccaaccacagagccatcaacaagatatctgggtaattccagtgccctgatgactgtcatcgcggctacttctcactccagtagttccacaccattgcaatcaaatccgatcctcttcactccattgcgatcattacaaccaaagtgcagagtcattgtcagttaactgacaagtcatgctcatcgaggtctcgccaccagaaacggagtagcagtcgccccctattatactcatttcaacacgataaactatcagattaatatatagatttaaaaatatatatatagtattgtaagtaagcggtttcatcgaaatagttaacatcacttttacagattcgagggcgttgaagtgatatccccgaatgaattcgagatagtgctgtatctgaatcaaatgggtgtcttcaatttcgtggacgatggcaccttgccgggatgtgctgttctgaagctgagcgatggaaggaagcggtccatgtccctgtgggtggagttcataacggccagtggttatttgtcctcccggaagatccgtgcccgtttccagactctggtggcccaggcgtgcgataaaagtgtctaccgcgacatggtcaaaatggtgggcgacaccagcgaggtgaagttgcgcattcgggagcgattcgtggtccagattacgccggcatttaagtgctcaggcatctggccaagatcggcggcccactggccggtaccacatctcccgtggccacatcccaacatcgtggcggaggtcaagaccgagggcttcgatcttctgtccaaggagagcgtcatcatgcagaacaagaacaacaatgccgccagcatggagggcgatgcctgggtgctcagcttcttcgaggccgaaaaccgtctgctgcaaggtaaacatcttatggatacacctttacacttacagaaaagatcacacaatttactagcaacttttagtatagtttgggaatttgaaatctggtgtatttaaatctcatattgaattcctttcaggtggctgtcgtcgacgttgtctgagcatgctgaagaccctgagggacaggcatctggatttaccaggcaatcccatcagtgcgtatcacctgaagaacctgctgctctacgagtgcgagaagcatccgcgggactttgagtgggacgagggctgcatcgctgaccgcatcaatgggatattcctgcagctgatatcctgtctgcagtatcgccgttgtccccactacttccttcccgcactggacatgttcaagggtaaatcccccagtgctttggagcaggcggccaagcaggtgtggcgcttgacccgcgagctcctcacaaatgccaacgcctttgagaagttgtaaggtgtcagaggttaaaggtcacgactggtcgataatggcgatgacatttttggcaggaatttataattattaaccgcactcatagagtgaatattgttcttatttttttacccgttagattagattcttttgctccattcacatattgttgatttgactaacttcttcttgcagtcacgcaaatatcgacccatccgaagtcgggggagtgctgatgtgtatgaggtgccaggcaagtcggagatgaaaggtacatatgcgaataaatacatacgcataagcacagctccttggcggccattttgtgccatgtctgtgtatatgtgactgtctgcgtgcgtgcgcgtgtgtgtgtgtgtgtgtgcgaaagtgttaatgcgaagatgcgagataagtccactccccattcgactcgactcgactcgactcaactcgactcgatgcgattcgagatatatatctgcccatccaagcgatccggctaagcctcgaatattgtttttaataactcgcccctcgacgctcacgacacatcctttgtttggccggcgaacaatggactcgccggttcgcaagtccggatggaaaaatcgaaaaatcgagagaatgaaaaaagagcatttgtccaggcggctccttttacacggtggctatacacactcgacgtatacgattgtttcacagttcgcagatcctagatcaaagcaaaacgaacatacaaaaaatatataatatatacatatagcgctagaacagagggagatacagattccattgatcgttccaagtccaacttaacattgttttactacttacatatacatatacacatatttatgtatgtcgatgtctattatgcgatgcctaacatttaccacgattatccgcagtttgttttaagtacaacataatcctagattgctaatgtaaaaaatgcttgaataaattcaaggatagccaaaggcaacactccaggtattgttttcctatcaatagggattgtattttaaatcacttgattgcttagcaaatacttacacaacacttgctgaaagaacatggagagttaaaaaatggatgttcttaactgatattcatatatttaaatgaggctgacaaacggaagatgtaccacaaaaaaaggacaaatctggaaaggatgtgctgggatctcattagttcgatcggcggttgagttaatgttatgattattggcagtggcgaatatttatttgcaaacgacgacatatctggatctggatgtggatcggaatcgtcttgggatctgaggctgggaagatgcagctgctgcagcgacaactgagcatcacttttattacccttatttatggttattttctggcgggggctggatccacgaaaaccgagtggtttgcctgctttgttctgcggttcttttgtcccttcgctttactttattatttttcgtttttttttttctttctttctttttttttggattttttgcggaacgaaaactttcagcgaatgtaatcgatattttcctcgatggacgcgtcgacaaaaggtgtctctaaacggagagcacgggatataatcagcgtcagcacaaagagccagttggtcggagcgattcgagtccaaggatatgccaaggatataataatgcgtgggccaaaataacaaattatgccaaggcacgcagggatcatgttacgcagccctccatcaccagcagtaacccctgtgccactaaccctcgactgggtggctttggctgtggctctagctttggctgtggtcctgttcttggtcctgggaaaagcatcatcaggtgaccgaatcggtatccgagtccgcaggcgaatcctccgcaggatgcgcacttggccgccagcgggaggacacgtgactgcctgttttccttaattttcattcactttgtgggtggagatgcgaccagaaccatgtgccagttgcttc

SEQ ID NO: 9560 - DNA, 2673 bp, DROSOPHILA
ccgagatggcggatttgttagatactggcatggatattgagatacttcgctgcagccgggccaaactgcactttcagcgcttttttttttatctgcccgaagctgtaaatatccgcgagatttacaacgccagccagccgcgacttcggtatcggtatcagtatcgtttggctgacttcgattcgtactcggaatcggcatcggcatcggcagcggcatcaggctgggggtatcgctattgagcgcagcgcatcattcggtcagcaattcgccaatgcagatactgtatctgcgggcagcagctactaaaattgaagagccaaaagctaaaatacccatatacatactcggtacaccgcggtcatcgtcgtcgtcgtgctccacttgtgcccattgttggttctgctgtcaccgtaactcacaattgaattgttcctttgttctgtcccgtccagaaggagacccgctgccgaatttcgcataattggctggcttttaagttggccgccagaccaagtgtcgccggtaaaaagatacatctacagatagatcgttgtacttttggtacttttggagcttggtggaactcgaactgagtaccatgctggtgccgccggacatgatggccgcccagacgcgcatggtctatcagatgaatcgattctgcacggagagggttcaggccaggatgtacaagacggccaccgccatccgggagatctgcaagatcgtccaggacatcctcaaagaggtggaactgcaggagccgcgattcatctccagcctcgtcgagtgcaatggcagattcgagggcgttgaagtgatatccccgaatgaattcgagatagtgctgtatctgaatcaaatgggtgtcttcaatttcgtggacgatggcaccttgccgggatgtgctgttctgaagctgagcgatggaaggaagcggtccatgtccctgtgggtggagttcataacggccagtggttatttgtcctcccggaagatccgtgcccgtttccagactctggtggcccaggcgtgcgataaaagtgtctaccgcgacatggtcaaaatggtgggcgacaccagcgaggtgaagttgcgcattcgggagcgattcgtggtccagattacgccggcatttaagtgctcaggcatctggccaagatcggcggcccactggccggtaccacatctcccgtggccacatcccaacatcgtggcggaggtcaagaccgagggcttcgatcttctgtccaaggagagcgtcatcatgcagaacaagaacaacaatgccgccagcatggagggcgatgcctgggtgctcagcttcttcgaggccgaaaaccgtctgctgcaaggtggctgtcgtcgacgttgtctgagcatgctgaagaccctgagggacaggcatctggatttaccaggcaatcccatcagtgcgtatcacctgaagaacctgctgctctacgagtgcgagaagcatccgcgggactttgagtgggacgagggctgcatcgctgaccgcatcaatgggatattcctgcagctgatatcctgtctgcagtatcgccgttgtccccactacttccttcccgcactggacatgttcaagggtaaatcccccagtgctttggagcaggcggccaagcaggtgtggcgcttgacccgcgagctcctcacaaatgccaacgcctttgagaagttgtaaggtgtcagaggttaaaggtcacgactggtcgataatggcgatgacatttttggcaggaatttataattattaaccgcactcatagagtgaatattgttcttatttttttacccgttagattagattcttttgctccattcacatattgttgatttgactaacttcttcttgcagtcacgcaaatatcgacccatccgaagtcgggggagtgctgatgtgtatgaggtgccaggcaagtcggagatgaaaggtacatatgcgaataaatacatacgcataagcacagctccttggcggccattttgtgccatgtctgtgtatatgtgactgtctgcgtgcgtgcgcgtgtgtgtgtgtgtgtgtgcgaaagtgttaatgcgaagatgcgagataagtccactccccattcgactcgactcgactcgactcaactcgactcgatgcgattcgagatatatatctgcccatccaagcgatccggctaagcctcgaatattgtttttaataactcgcccctcgacgctcacgacacatcctttgtttggccggcgaacaatggactcgccggttcgcaagtccggatggaaaaatcgaaaaatcgagagaatgaaaaaagagcatttgtccaggcggctccttttacacggtggctatacacactcgacgtatacgattgtttcacagttcgcagatcctagatcaaagcaaaacgaacatacaaaaaatatataatatatacatatagcgctagaacagagggagatacagattccattgatcgttccaagtccaacttaacattgttttactacttacatatacatatacacatatttatgtatgtcgatgtctattatgcgatgcctaacatttaccacgattatccgcagtttgttttaagtacaacataatcctagattgctaatgtaaaaaatgcttgaataaattcaaggatagccaaaggc

SEQ ID NO: 9561 - protein, 368 aa, DROSOPHILA
MLVPPDMMAAQTRMVYQMNRFCTERVQARMYKTATAIREICKIVQDILKEVELQEPRFISSLVECNGRFEGVEVISPNEFEIVLYLNQMGVFNFVDDGTLPGCAVLKLSDGRKRSMSLWVEFITASGYLSSRKIRARFQTLVAQACDKSVYRDMVKMVGDTSEVKLRIRERFVVQITPAFKCSGIWPRSAAHWPVPHLPWPHPNIVAEVKTEGFDLLSKESVIMQNKNNNAASMEGDAWVLSFFEAENRLLQGGCRRRCLSMLKTLRDRHLDLPGNPISAYHLKNLLLYECEKHPRDFEWDEGCIADRINGIFLQLISCLQYRRCPHYFLPALDMFKGKSPSALEQAAKQVWRLTRELLTNANAFEKL

SEQ ID NO: 9562 - DNA, 6151 bp, DROSOPHILA
tcccagcaggcacatgaacaccagagccatgaaccggtggctcgtgctcgagggcatgcagcagccgccggacggaaggctcagttcattgtcacgccgaccggcccgactgaccacttggtcctcctccgtcggtcgcgacacctcctcattgtccacgatgcgttcctcgtcctcgcgcgccatctccactcaccgctggcacaatccgcactgaccagttggatgtggagccgaatcccgcagaatgggcgtatgcaaaactatgtgatatgattaatcggctttctgatttcctgccgcagttgttttttcttttgctttcgtttttctcttttcgtatttgccgtttctgcaaaatatttgtatcaatttctgcgaacgagtgagcgagttgaactcttctgctttgtcttggcttatctcgctgcttttgtttttgtttactgtactagtaccctttgtctaacaactattgttgttgttggctgtgtgggctagttagttgtctctgggttcactggttatcagcagtttttccactccacttgcagctgaagttcgcagtgcggtgttgggcaacaaatgttcggtgacgtgtgcaaccgcactttattgctgatcgaataaaactaaattctttcctctgcctaattaacgttaattacgcatatacaatggcggggctgccaactcgctgtagagcagggttgtcgacgcagctacaggtgcattcgaacagctggcaggcgataacgatcacaaatatgaacggtattcctgttttgctctccattataatcgaaagtttactctaattgaaatgcaaattttagtaagccatgattatttatataatagaattatataaataaaaataaaaacgcttgattatattaataaaacaagataatcattaattgagaaactatttaagtacaagagctcaacgacgcagaaatctcttgcatcttgttttgatttaatttagtatagcctgacaaccctaatccagcaacgccgagttgaagcatgttttcatactttttaccgggtaaaatgtatttaattatataattcagcggcccttgcagcaatggatcccatcgacaccaccaagcgaaagcccagacgcacctacggcacgccatcctacacgtatcgcaatcgatttgcctatgccctcttggccgccggaactgtgctcttcggcatttggaggtgagcagatcttcgaacttaacgtataaatgtggttttaatgcttgccaccgcctcgttttcagcctgactcccatccagcgcattgccaacgagaagctgtcccaggcggtggcccaaaccgaacaggagcgcgataggaaaggactctttgagttcggcgcaccaaggacttcgcagttcatcagggacgccatcaaggagagcgaggagcagaggaacaaataatggatcgcaagacgcggcgagccaacttcaaaaacctgcagcctcggtaattttaattgaaataaaggccaataaaatgaatgtcattatctaaccgaacactttgttttcctttcatccgaagtttgacgcgaagcaccaaagcagccgcagatacattatcgttatccaacttctttgccacacccgaaaatgctgaagaagttccgtcatgtctcgccgacattcctgttcagcccgatcctcctgcgccaaaaatcaaaccaatacgcaccagcaatgtgttcgaaaaacctgggcccaagcccaaaaaggcacccaagctcaaggccagcactgtgtcaacgtcgagtggggcgcgtcgtggacgcggaaagagcaaacaacagcccagtatcagcaactttctacgcaacgagcagatcttcgcggaggttaccgcccagcattgcatggcggacaactttagtgcggatgacattgaaatggcgctggcgctgtccaaatcggagagtgagaagcatggacgccttcgtctgcatgacgatgacgatgcggtggttgacctactggatgatgaagagaagtccactgagagaatacgtcataaactgcagaagtatggcttccgcacagccgccaaggaaggtaagtcatcttataaagtgtaaacggtaagattggacttacgttttatccccatttagattataaatctctggcggtcctgcccgtggtggccagcaaaggaggtagacgtggcaagtgggccaataggtttacttccctaactttaagaaatccggatgtgcaacagaagaagctcgaggagaaagtgtctgcattgcttggccaagaaatgcgcggcaaggagcccaacggggaagactgttgtctgacaccatacactgtgatcaccgcagcattgaaggaactcagagctgagggtgaatctcgcatccttcgggaaccaagcgaagggcccatagatgacctagaatcatactacgtaaccgacttgtttgaagttagtcgcacgccggcacaccatcttttgaagaattgggcagcgatacagggaagggatttttcgccagagcgtgagacccaaaaatgccgccaattaaggcaacaacatgagcttgtctacgctgagttggaaaggtactacggtgatccacagaagttagaagaggaggtgatgcaggaactggatgaattggaaaaactggtggcagataacatgatcgaagatgattctgtagtgataaatattgtggaggcagaatcatcgtcgactggtagcagtccatcaaaggagccgccggataagcgtccaaaaatgacaatggaagataaggaaaacctgcagccaacaacatcaaaagccagcttgactgttcccgcccagtcaacccgctgcacctcgccggatctctttgcggactccgaagatgagccggatatagtaacgactgctatatccaatgaacccgaagacgttaggaatctttcaatgaaagtttacaagaatgtcagcattagcgaacgatcatcttcggtcgctgaaatagaaattgtgtccagcaatgatgaaccttctcagataaccacgtatgaagtgttttccagcgacgaaggtgagaatctccattcatatagacagcacaccccttaagagtatttcaatttgctttcagtaaagactgtttccaacgctacgcaggagaagatttcttttgatggtgagtaaacacagaaaagttcgataccaaaatctcattcatattttaatttccagacaaacccatagatgactttatagacctaacacaagagttcgatatggtagaatttaatgaatcaaagcctagaaccccaaacttaattgcatcatcggaaacagattccaatgtagacaacctaaatggtgatacaattctagattttagttcccaggaggtaagttgtcccatctccaaggaattgtacgcaaagtatgccaaggtggaaacattccctgtgtggaatgcagcagcagaagaggaggataaaattgagttttccttaagcatggaaagagatttgaagagttccgagcaatcgtcgcatcagctcggcatattaaccactccaaatgacaccgaacacagttcaagcttcagtgaattgaatttctcgaggaactcgcttcggaggagcgttagtctatcaacggatctcagtttcaaaagtccgcttaactggaaaatgaactcatcagccgagaagagggtctcgccggctgcttctccttacaaacagtcggatgctagtgtggacttaacccagaacagcgatgacgaaaacgacgcaattctgctctccgacgaggaaatcaattactccatttggaagggcaataagaccgtaaaagatttggatatcggggacgatagctcagacagttgctttgcatctccggtgacgaaaaagcgagctatcccacagttccaaactgaggaggatctggatgccttcttgatggacttttccacggatggcaatggatcgcaaggttcacattctcccaacaagagtgctcttagcaaggagcgtgctgaattcggaatactggatgctgctccgtctcaacccttcagtctatctgaacttcagagtcacgccgacaaagagaagtcatcggataacgaaatcaactgggcagaagcttcatttttggatgcaccagcaaagccattgtcacgcaggagcagccacaaatttaatgagctcttggcgaaaataagcaaaccagcgcataactctggcgacgactttgacgaattcgatcagatggttttccaaagcaccaaggaagccgcctccagtgctggcgaaacaagtgacatgcctcagggattggaccttttgttgaagggagagataaaaacgacagcgatcccggagacaagagctccaggcaaccaaactccgattgaaccgcagcaagtagatgttgacggcaatgtctactccgtgcgtgtttgtcacacacctaagccagatttcgccaccctcccggaatcggagatcctccagcagctctacaagtacggcataaagccactaaaacgcaaacaggcagtgaaaatgctcgaattcatctacaatcaaacgcatcccataatgaagacagctgctgttcaggatttaccagccagatctgagccaattgtgcgttccaagtcaactcctgtgattatggagagaccacattcgcaagtagcaaagtcaacctctaaaacattgaaggcaattgggacaaaaaaggatttaacatttaacgatgccacgggcgaggaattgctgcgcttttcccaatcccttgccccgagtctttgcgatgacttcgagacctttgtcatgcaaacgaacgttaccaagaagacaccacagccgctggtgccactgcacatcgcctggcacaatctcatctgcgccaatccccaactgcacgaaagtgtactcacgtacgaacccattgatttgcaggcagtttacttgcacctgaagcacatggggcatcgatacgatccaaaggacctgaagaccttcttcgaccggcgttgcattatctttcgctatgaactgggtgctcccggcaagcaagcagagcgtcatgtgcgaaggcacacaaaaaagccttctaaaaggaagtagattctacaagttatggaatttcattgtacttatacctaactttgaatgcattgaattattttctagtatttaccttatattgtattattgaataagatattgttacttggtattttgcgatctaaatttattgtatgtaaaattgataaaactcaaatacattcaacacttttgtttgaagcattgttaaccattcctatttgccatttcaagctacccactagcatctacgattaaaaaacacaatattattttgggggccgtagatttatttgatgcaacttcaaaatacaatattacaaaactaatggacgaatacaaatgtatagagtttgtagtagatacaagacactgatattttcatacgagtagaatattggacaacattaaatgcagcatctgtagacagactaccctaaatgggtattaaatgtaaaaatacaattcgatcttacggcgctagaaaagacacttggacggtataaatttcttacgagtctctacgtgaaaggcacattgtcagattgcgattaatggaatggaatcggctcgaacaaaactggttgctaatgaaactatttgtactgcatgcaaaactgatatggttggtgggtgcagacgggttagtgggctcttacagtagctaggattagttttggggggagagagatatataagaagcaattcgtagcattgccggcatgtataagtatgtaaattaaaggcagggctgtccaagaaatcaccaacaatacccattggttgaatgggattaatgggacacccctgaacaccccaatattaggcatagctaatctcatgctcatacgtctttccccgcagatcctcgtcatcgggaagcgcatggtggcgcaaaccgcacaaacgcggtccgtagcgcagcatgacaatgataacgcccacgatgaacagggcgacggcggccacggcgggataaaggaagtaaagagccattgctacttagatgtcgctctcgcgc

SEQ ID NO: 9563 - DNA, 3689 bp, DROSOPHILA
acaaccctaatccagcaacgccgagttgaagcatgttttcatactttttaccgggtaaaatgtatttaattatataattcagcggcccttgcagcaatggatcccatcgacaccaccaagcgaaagcccagacgcacctacggcacgccatcctacacgtatcgcaatcgatttgcctatgccctcttggccgccggaactgtgctcttcggcatttggagcctgactcccatccagcgcattgccaacgagaagctgtcccaggcggtggcccaaaccgaacaggagcgcgataggaaaggactctttgagttcggcgcaccaaggacttcgcagttcatcagggacgccatcaaggagagcgaggagcagaggaacaaataatggatcgcaagacgcggcgagccaacttcaaaaacctgcagcctcgtttgacgcgaagcaccaaagcagccgcagatacattatcgttatccaacttctttgccacacccgaaaatgctgaagaagttccgtcatgtctcgccgacattcctgttcagcccgatcctcctgcgccaaaaatcaaaccaatacgcaccagcaatgtgttcgaaaaacctgggcccaagcccaaaaaggcacccaagctcaaggccagcactgtgtcaacgtcgagtggggcgcgtcgtggacgcggaaagagcaaacaacagcccagtatcagcaactttctacgcaacgagcagatcttcgcggaggttaccgcccagcattgcatggcggacaactttagtgcggatgacattgaaatggcgctggcgctgtccaaatcggagagtgagaagcatggacgccttcgtctgcatgacgatgacgatgcggtggttgacctactggatgatgaagagaagtccactgagagaatacgtcataaactgcagaagtatggcttccgcacagccgccaaggaagattataaatctctggcggtcctgcccgtggtggccagcaaaggaggtagacgtggcaagtgggccaataggtttacttccctaactttaagaaatccggatgtgcaacagaagaagctcgaggagaaagtgtctgcattgcttggccaagaaatgcgcggcaaggagcccaacggggaagactgttgtctgacaccatacactgtgatcaccgcagcattgaaggaactcagagctgagggtgaatctcgcatccttcgggaaccaagcgaagggcccatagatgacctagaatcatactacgtaaccgacttgtttgaagttagtcgcacgccggcacaccatcttttgaagaattgggcagcgatacagggaagggatttttcgccagagcgtgagacccaaaaatgccgccaattaaggcaacaacatgagcttgtctacgctgagttggaaaggtactacggtgatccacagaagttagaagaggaggtgatgcaggaactggatgaattggaaaaactggtggcagataacatgatcgaagatgattctgtagtgataaatattgtggaggcagaatcatcgtcgactggtagcagtccatcaaaggagccgccggataagcgtccaaaaatgacaatggaagataaggaaaacctgcagccaacaacatcaaaagccagcttgactgttcccgcccagtcaacccgctgcacctcgccggatctctttgcggactccgaagatgagccggatatagtaacgactgctatatccaatgaacccgaagacgttaggaatctttcaatgaaagtttacaagaatgtcagcattagcgaacgatcatcttcggtcgctgaaatagaaattgtgtccagcaatgatgaaccttctcagataaccacgtatgaagtgttttccagcgacgaagtaaagactgtttccaacgctacgcaggagaagatttcttttgatgattttagttcccaggaggtaagttgtcccatctccaaggaattgtacgcaaagtatgccaaggtggaaacattccctgtgtggaatgcagcagcagaagaggaggataaaattgagttttccttaagcatggaaagagatttgaagagttccgagcaatcgtcgcatcagctcggcatattaaccactccaaatgacaccgaacacagttcaagcttcagtgaattgaatttctcgaggaactcgcttcggaggagcgttagtctatcaacggatctcagtttcaaaagtccgcttaactggaaaatgaactcatcagccgagaagagggtctcgccggctgcttctccttacaaacagtcggatgctagtgtggacttaacccagaacagcgatgacgaaaacgacgcaattctgctctccgacgaggaaatcaattactccatttggaagggcaataagaccgtaaaagatttggatatcggggacgatagctcagacagttgctttgcatctccggtgacgaaaaagcgagctatcccacagttccaaactgaggaggatctggatgccttcttgatggacttttccacggatggcaatggatcgcaaggttcacattctcccaacaagagtgctcttagcaaggagcgtgctgaattcggaatactggatgctgctccgtctcaacccttcagtctatctgaacttcagagtcacgccgacaaagagaagtcatcggataacgaaatcaactgggcagaagcttcatttttggatgcaccagcaaagccattgtcacgcaggagcagccacaaatttaatgagctcttggcgaaaataagcaaaccagcgcataactctggcgacgactttgacgaattcgatcagatggttttccaaagcaccaaggaagccgcctccagtgctggcgaaacaagtgacatgcctcagggattggaccttttgttgaagggagagataaaaacgacagcgatcccggagacaagagctccaggcaaccaaactccgattgaaccgcagcaagtagatgttgacggcaatgtctactccgtgcgtgtttgtcacacacctaagccagatttcgccaccctcccggaatcggagatcctccagcagctctacaagtacggcataaagccactaaaacgcaaacaggcagtgaaaatgctcgaattcatctacaatcaaacgcatcccataatgaagacagctgctgttcaggatttaccagccagatctgagccaattgtgcgttccaagtcaactcctgtgattatggagagaccacattcgcaagtagcaaagtcaacctctaaaacattgaaggcaattgggacaaaaaaggatttaacatttaacgatgccacgggcgaggaattgctgcgcttttcccaatcccttgccccgagtctttgcgatgacttcgagacctttgtcatgcaaacgaacgttaccaagaagacaccacagccgctggtgccactgcacatcgcctggcacaatctcatctgcgccaatccccaactgcacgaaagtgtactcacgtacgaacccattgatttgcaggcagtttacttgcacctgaagcacatggggcatcgatacgatccaaaggacctgaagaccttcttcgaccggcgttgcattatctttcgctatgaactgggtgctcccggcaagcaagcagagcgtcatgtgcgaaggcacacaaaaaagccttctaaaaggaagtag

SEQ ID NO: 9564 - protein, 1101 aa, DROSOPHILA
MDRKTRRANFKNLQPRLTRSTKAAADTLSLSNFFATPENAEEVPSCLADIPVQPDPPAPKIKPIRTSNVFEKPGPKPKKAPKLKASTVSTSSGARRGRGKSKQQPSISNFLRNEQIFAEVTAQHCMADNFSADDIEMALALSKSESEKHGRLRLHDDDDAVVDLLDDEEKSTERIRHKLQKYGFRTAAKEDYKSLAVLPVVASKGGRRGKWANRFTSLTLRNPDVQQKKLEEKVSALLGQEMRGKEPNGEDCCLTPYTVITAALKELRAEGESRILREPSEGPIDDLESYYVTDLFEVSRTPAHHLLKNWAAIQGRDFSPERETQKCRQLRQQHELVYAELERYYGDPQKLEEEVMQELDELEKLVADNMIEDDSVVINIVEAESSSTGSSPSKEPPDKRPKMTMEDKENLQPTTSKASLTVPAQSTRCTSPDLFADSEDEPDIVTTAISNEPEDVRNLSMKVYKNVSISERSSSVAEIEIVSSNDEPSQITTYEVFSSDEVKTVSNATQEKISFDDFSSQEVSCPISKELYAKYAKVETFPVWNAAAEEEDKIEFSLSMERDLKSSEQSSHQLGILTTPNDTEHSSSFSELNFSRNSLRRSVSLSTDLSFKSPLNWKMNSSAEKRVSPAASPYKQSDASVDLTQNSDDENDAILLSDEEINYSIWKGNKTVKDLDIGDDSSDSCFASPVTKKRAIPQFQTEEDLDAFLMDFSTDGNGSQGSHSPNKSALSKERAEFGILDAAPSQPFSLSELQSHADKEKSSDNEINWAEASFLDAPAKPLSRRSSHKFNELLAKISKPAHNSGDDFDEFDQMVFQSTKEAASSAGETSDMPQGLDLLLKGEIKTTAIPETRAPGNQTPIEPQQVDVDGNVYSVRVCHTPKPDFATLPESEILQQLYKYGIKPLKRKQAVKMLEFIYNQTHPIMKTAAVQDLPARSEPIVRSKSTPVIMERPHSQVAKSTSKTLKAIGTKKDLTFNDATGEELLRFSQSLAPSLCDDFETFVMQTNVTKKTPQPLVPLHIAWHNLICANPQLHESVLTYEPIDLQAVYLHLKHMGHRYDPKDLKTFFDRRCIIFRYELGAPGKQAERHVRRHTKKPSKRK

SEQ ID NO: 9565 - DNA, 6169 bp, DROSOPHILA
catttgttttagagattcccccacgggcagcacgatttcgcacctctcatcatgagatcaatctgctgcagatgttttgagtttggcgttaattaggcagccaaatagggaattcacttcgattcattccaaaaactacacagatgcggcaacattttgtaaatatatttatatatttgatacatttgatgggccattgtgtatcgggatcatctcccgaaatttatactaatttcatgcacgcgttttgcatgtttaataaccgctttatatgtccacctgtagacggaattatatcgtgtatatctgactaaggccagaagattatataatgcattcaaatgacttgcaggtagaaagtaacttcatatttaaagtacttcatttcaaagagccccaaaaaccgatcaggattgaattaaaattcggatgagatggctcataagttagccgtttgaatggctgtttctcctccattcgagagtctttcgaaattggctcaaacacgcaaacatgccattgatatgctggccaagtcaaatttatgcgtgggcgcattcgaaaaagccaacttgcccaggacagcaacctcagcggggacacgaacccaaggtatctgaggcatctacgatgcaattgaatgcgaggcacatgaaattgaacgacgggtgtggcgcgtgttgaaccaggcatttgactttgtggtctggatgggggaatatcatcatcgggtttcgggcttgtgacaaaccatttccgaacccccagaaacgaagccaccaagataaagatacgcgccaaacgacaggcaggccaaattactcggcgtttcggcagcggagaacaagatcccaaaactcgggacccaccaccaccacaagtacatacacacgcacaccgacgcgaaacgagaatttcgtttttttttttttgggaacgacgcacaaaatcaaagagtattccagctagccgcttcagttggtgagcaactttcgaggcaatcgcacgtggacttcgatttcggattcgtttcgtttcggttcggtttggtttcgtcgcctgagaatatatctcaatctgtttaaagaagatattagcattcggcagccgcagtaaggcctatatatccccggaagccccaaagatgacggacgaagtgcccgccaaaggcagcatattgggcagtaagttgtggcttggacattcgaagcatctgtttcgagattgcaccactggagtgcatcatgcatcatgcggcggtggtgcagcagtgcaacaagtgggtgggctgaaggcactctggggatacaagatacaagtttgacctccaaaaggtcgttcgtgtgcgtgagttccagaaatcttccttgttcccccagtgcgtacgtgtgtgtgtgtgccacatcctttaggtttttatgttgctgtggctttttttagacgccgcccacgccacgcggcatatttgatttgtttttggcgtttatatgcccgggtactaatgtccggacaaggtcaaatggaagtcatagatataaacaatattggcaggcgaaaatatgaccaatttgtatgcgtatcccaaacaaacgcgacattcttgaaattcgtctacctatcccaacaaaaacggcgaaagtttgccaagcttttgaatcgggtaaataatagtgtttactttaaacaatccacgcgaaaatctcactcggcgttttcaaataagtttctcaaaggggttactttaaaagttgattttaaaatttccaaattccacaatactaaagttacaagaaagtacataattccacaaagttaactattaacaaatgacatttctttactctgcaatgtttatattgcatcatatttgtgaaatattgtttatcgtatttcatgaattatttattgtttatttgaaaatattattgtatgactatcacagtgatgaactgaatcatttctttcccacaaagatctcaaaggaatacattaagaatgctatgaattataaacaggaatatttcttatgaccatgttaaatgaaagcgttgttaggagcgatcttattttagccctatatagattaacccaagcacttgagatttaccaccaccacgcaccacctaatcaaacaatcaaattagtctggaagacttggagaacttatgcatatagaacatctgaaatgtattggtgctctgcagcatttaactcagagcaaataaagattaagaaagcgaagaaagtaccaacgaagtagggatactcttacataaatccattaataaggatggtatataatgtccttcgaaatcaaatcatcttttctgccaccaaatgatagcttagctaacctagctagtttatggaattagttaattattagaatatatcaaacgaaagagtatatcttaaggcattgaggcagtaattacacaatatcgaaggcacaattagcagatataaataatcggtttgccagctcgaaagtcttattgtgacagccatgaaagtgaaattgaaaacacagacgacgaatttatacccctcgttatcgcaaagcaacgcactcataattgctggacatgattgcctcccccaaccgatttcaaaagggggtggactatatcaatgcgcgtgcggcggctcactctactgaccctacccaactgccggtaatcagtggctgctccatgtggaactcgttgctcaccaggtgattgggttcggagcacccgagtggtgtcatgtccctataaataccttaatggtaatgtgtgtaaggactatccccactgtctttagatgtttgctcttccttccttcaattaaaaaaacaaacgagaacgttgtcgtaacgactatttgataccccttactcagatagcgattcaataacacggacaagcagacggacagggtcagtttgtttcgactagtgtttccgatcaagcccatgtcacacatacacacgtttcacacgagtctagtatacccttcagcacttcaagtaaggggtacaattaattccttaacttgctaaatggagtcatttggcgcaccatgtccgatgtgaatatcattggcattaatcaaattgacttgccaagcaaaccaaccgaatgacttatatatcgagttgcattttccatccatccaaaatggacgaatcaagtaaaaataaagatttacaaagaccttaccatctactttccagaactcgtgcccgcccgctatgtgctggccctcctggggtccatcggcatggccattgtgtacggcctgaaggtgaatctcagcgtggccatggtggccatggtgaaccacacagccattaaggcccacggagacggcggtggacatgggggacacggcagcgtcatcctttcgaacgcctcccaagtgtccctggtggaggaatgcaacccgccgggtggtgcctccaatgtgacggctaaggtggaggacggtcccttcgactggagcgagcccctgcagggaaccctgctgagctgctacttctggggctatttggtctcgcagattccgctggcacacgtcgccgagaacttctccgccaagtgggtgatgctcttctcggtggccatcaacgtcgtgtgcacgctgctaacgcccgtctttactgaattgcattacggtggcctgattctgatgcgagtgcttgagggcgtcggcggaggagcctccttcccggccatgcacgtgatgatcgcctcctgggcccctcccacggagcgcatggtcatgtccaccatcatctacgtgggcacatctgcgggtacggctctttccatcctcctggccggcgtgtgctccgcccaatggggctgggagtcggtcttctatgtcatgggcgcacttagctgcatctggatgttgctgtgggtcattctggtccaggacaaccccaacaagcagcgtttcatcagtctggaggagcgccaaatgatcaccagctcgctgggcaccgaacagaagacggagcaccacccggcggttccatggggcaaggtcttcacctccgtgcccttctgggccattctcatcgcccacacctgcagcaacttcggctggtatatgttcctcatcgagattcccttctacatgaagcaggtgctcaagttcaacgtggccagcaatgcagccctcagtgctctgccctacttccccatgatcatcttcagcatctgtctgggcaagctcctcgacagtctgcaggccaagggtaagtcggacacattattggacctttgaagggtgagtggtataaataccttaatgtgctttctaggtaagatcaccaccaccgttgcccgcaagacggccacctccatttgcaccctgatccctggagtttgtctgctggtcctctgctacatcggatgccgtcactatgaggcggtgtctgtcatgtccgtgggcattgtggccatgggctccatgttctccggcttcctgtccaaccacatcgacatcgcaccgaacttcgccggcaccctggtggctctgaccaacacggcggctacgctacctggtattgttgtccccctcttcgtgggcttcgtcaccaagggaaatgtaagagaaatgcatctgaatattctcgaaaatatcttcaaatggctttctcgaatcattcttttagcaaaacattggcgcctggcgcatcattttcggagtgaccatcgtgctgttcgccttggaattcctggtattcgtcttcttgggatcgggcagcgagcagccgtggaacaaggccggaactcccaaggatcccgaggccaaggacgaaaagactccgttgaaggagctgccaactaagccctaagccaacaatctcgccccgaatcttctgcctcaattactcgacgaactgctgcttattcggataactcttggataaagccagttcaaagtggaatggtcaatgctggactgtaaataccaattacaagtgtacaatgcccaccctgaatagcgaattcattgaacatacgttcgctatttagggcgtgcactgtagtttttagatcgctgtaaaccaatagttagtagccgtatccattacggataaacacttcagcccgcctaatgtacttaacactcttgatttcaaaagttgtctacaaataaagcgacgtaatagtggatgcacgggggttcctaaacaaattctggtggggaagggagaatgggtctcagcctcaatttcgatggaaattctgggtgaatgaccccattttcctgtttatatttagcgctagcaataagccattccacagaatctcagaggatttagttacaactctgtacgtataaaaaaatatataaacaggggatctgttctatctgtttggttgaagatatgaacaattgcatgatgtaactaaatggcaaaagatgtaaggctagaggatgatcctaactcaacaatgcaaagattgggttgtgaaattgattgtaacatctaagaaccaactttctttgcatccttatcacaatttaaactccgataacctgcggcgccaaaagacagagtccgttatcgatattccggcagaaacatatgatttcatgtaatcagtttgcctttgccggtttcaacggattgcggaaaatgttgaaagcacggaacgtttgtttgctgtccaggaggtggaagagtggcgccaagaagcgatggaatgtcctgcagaacaagaagaacaactgtgaccgagcgctggagaacttcgatgacttctacggaagtgtctacggcacccggtggaagaacatgcgggcggcgcttctcacgaggcacaagtatgtcgccctggtcaacaatttcggggacacggagcagacgtgcgccatgctggagtcagatggagccatcaacatgaagtcgcttattaacctggcgcaggatcgggtaaaggacagcacggagacggtgccggaacaaggcaaatcacgtcatgaaattgaaagcaaactggatgcactgctgcggaaacagcaggagcgcgaggtggcctccatatacccgagctcgccagaagatggttcatcggcgccactgccgctggaactgaagtttgacaacgtagaggaagatcagccggagcaagtgaataatcccttcaagcagagcctgacgaaggct

SEQ ID NO: 9566 - DNA, 2003 bp, DROSOPHILA
atcgcacgtggacttcgatttcggattcgtttcgtttcggttcggtttggtttcgtcgcctgagaatatatctcaatctgtttaaagaagatattagcattcggcagccgcagtaaggcctatatatccccggaagccccaaagatgacggacgaagtgcccgccaaaggcagcatattgggcaaactcgtgcccgcccgctatgtgctggccctcctggggtccatcggcatggccattgtgtacggcctgaaggtgaatctcagcgtggccatggtggccatggtgaaccacacagccattaaggcccacggagacggcggtggacatgggggacacggcagcgtcatcctttcgaacgcctcccaagtgtccctggtggaggaatgcaacccgccgggtggtgcctccaatgtgacggctaaggtggaggacggtcccttcgactggagcgagcccctgcagggaaccctgctgagctgctacttctggggctatttggtctcgcagattccgctggcacacgtcgccgagaacttctccgccaagtgggtgatgctcttctcggtggccatcaacgtcgtgtgcacgctgctaacgcccgtctttactgaattgcattacggtggcctgattctgatgcgagtgcttgagggcgtcggcggaggagcctccttcccggccatgcacgtgatgatcgcctcctgggcccctcccacggagcgcatggtcatgtccaccatcatctacgtgggcacatctgcgggtacggctctttccatcctcctggccggcgtgtgctccgcccaatggggctgggagtcggtcttctatgtcatgggcgcacttagctgcatctggatgttgctgtgggtcattctggtccaggacaaccccaacaagcagcgtttcatcagtctggaggagcgccaaatgatcaccagctcgctgggcaccgaacagaagacggagcaccacccggcggttccatggggcaaggtcttcacctccgtgcccttctgggccattctcatcgcccacacctgcagcaacttcggctggtatatgttcctcatcgagattcccttctacatgaagcaggtgctcaagttcaacgtggccagcaatgcagccctcagtgctctgccctacttccccatgatcatcttcagcatctgtctgggcaagctcctcgacagtctgcaggccaagggtaagatcaccaccaccgttgcccgcaagacggccacctccatttgcaccctgatccctggagtttgtctgctggtcctctgctacatcggatgccgtcactatgaggcggtgtctgtcatgtccgtgggcattgtggccatgggctccatgttctccggcttcctgtccaaccacatcgacatcgcaccgaacttcgccggcaccctggtggctctgaccaacacggcggctacgctacctggtattgttgtccccctcttcgtgggcttcgtcaccaagggaaatcaaaacattggcgcctggcgcatcattttcggagtgaccatcgtgctgttcgccttggaattcctggtattcgtcttcttgggatcgggcagcgagcagccgtggaacaaggccggaactcccaaggatcccgaggccaaggacgaaaagactccgttgaaggagctgccaactaagccctaagccaacaatctcgccccgaatcttctgcctcaattactcgacgaactgctgcttattcggataactcttggataaagccagttcaaagtggaatggtcaatgctggactgtaaataccaattacaagtgtacaatgcccaccctgaatagcgaattcattgaacatacgttcgctatttagggcgtgcactgtagtttttagatcgctgtaaaccaatagttagtagccgtatccattacggataaacacttcagcccgcctaatgtacttaacactcttgatttcaaaagttgtctacaaataaagcgacgtaatagtg

SEQ ID NO: 9567 - protein, 512 aa, DROSOPHILA
MTDEVPAKGSILGKLVPARYVLALLGSIGMAIVYGLKVNLSVAMVAMVNHTAIKAHGDGGGHGGHGSVILSNASQVSLVEECNPPGGASNVTAKVEDGPFDWSEPLQGTLLSCYFWGYLVSQIPLAHVAENFSAKWVMLFSVAINVVCTLLTPVFTELHYGGLILMRVLEGVGGGASFPAMHVMIASWAPPTERMVMSTIIYVGTSAGTALSILLAGVCSAQWGWESVFYVMGALSCIWMLLWVILVQDNPNKQRFISLEERQMITSSLGTEQKTEHHPAVPWGKVFTSVPFWAILIAHTCSNFGWYMFLIEIPFYMKQVLKFNVASNAALSALPYFPMIIFSICLGKLLDSLQAKGKITTTVARKTATSICTLIPGVCLLVLCYIGCRHYEAVSVMSVGIVAMGSMFSGFLSNHIDIAPNFAGTLVALTNTAATLPGIVVPLFVGFVTKGNQNIGAWRIIFGVTIVLFALEFLVFVFLGSGSEQPWNKAGTPKDPEAKDEKTPLKELPTKP

SEQ ID NO: 9568 - DNA, 3494 bp, DROSOPHILA
ctggataacctcgtggcagtgcacactgattggaacgctggccgtgagctcctcggaggtttcgatgcttatcctggcttttatgtcgctggagcggtttctcttgatcgccgatccctttcgcggccatcgcagcattggaaatcgggtgatgtggctggctttgatttgcatttggattacgggcgtgggcttggctgtggcaccggtgctcctgtggcggaccagtaccctaccctactacggatcctattccggaacctgtgagcacaatgtttatgataaaatgtagtttaccaagtgacgaaattaaacttaacaggctttccattgcacatccacgaggccttcccgatgggctggctttactcggctttcgtgttcctgggcgtcaatctgctgctgctggtgatgattgcgatgctctacacggcactccttatttcgatatggcgaacgaggagcgccactccgctcactctgttggattgcgaattcgctgtgcgattctttttcatcgtgctgaccgacttcctgtgctgggtgcccatcatcgttatgaagatctgggtttttttcaactacaatatctccgatgacatctacgcctggttggtggtctttgtgctgccacttaactcggcggttaatcctctcttgtacaccttcaccacgcccaagtaccgaaatcaaatcttccttcgcggctggaagaagataacttctagaaagcgagcggaggctggcaatggaaatgtggccaccacaacgacgggcacggcaactggatcctctcagcatccggatgacttcacgatctttgccaaagccgcgatgagatgccattaggtcctaacgctgtcgaactgaaggattcttgtggcgcagatcgaacttgtataccaccagatttagcagcatttattttgtctatgatatcgaaaatctatatatgtatgtgaatatctatccctgtccgtgtaagataaccaaatgaaagtgtgaaataaattgaatgtgatatttgtaaggcaattttacggaatttaaaatgggatgcgagttagtgtaagattaagctattatctaagttttggtaatagttttaaatactttttatttagaaatagcagcgctatcatttttggcatggtgtgattctttctggtccgagtaaatctttgccattaccaacttggagcgcacgatgtgaaactttcgcatttcctccaggtcctccatctgcaccaccatgttatgcttacgctccaggtgcatgcgtagtctaaaaaattattaaggagtgttactttcaaataatgtacactttaaacaaaataactaacttgttacgagctggatagctctgatggcagtgggcgcactcaaatggcatggccgtatgcgtgcactcgtgattcctgagagatgaagatgaggtaaaggacttctggcagccgggaaactcgcaaatgaagcgagatccagagtgcttaacctgctggtggacagtcaaatgggatcgctgtgcgaaacgacgatcacagagatcacaggaatagggaaagtctctgttatgatagcgtttatgaatctccagggctttggcaatggcaaaaaccttgccgcatgtgtcgcagtggactccagactgcctgtgcttcgaatcgacgtgaactttcagcgcctgctttgtgaggtaaacccggtcgcactggctgcaacgaaagttgggacgattggccaaatgaatcatctggtgcttggccatgcgggaatggttcctgaactccttgtggcagaacttgcagttggattttcccgtatgccgattgcgtggcacaatgtcctctaagctgtcgataggggtttcctgcttctcctcaatctcttccatcaggaactcttcattcatatccgcctcattctcctcatcctccacgtcgtcttcctgttccgtgttggcttcggttgccacaaatatctccctcaactgctgattggcaatggccattttcttgtggaagtcgtaggcccatttcagttccaccgcacaacgtttgcacaaggttcgtggctcgtttttgggattttgccgcaggtcttccttggtgcagatctcgtagcagtcgtagtaactcagcgccgcctcctggtcatagatgacggtcatgtccagcatttggttgggatacggctcctccaaacacaagcggcagcaattgctcagctccaaagaagtagtactgtctgaaagtgagacttcatgggatacaagcttcacgggagcttctgcagttcgccttgctattgtaaaattaagcgtttggcatacttttgatgtttggggatccatctgtgcaaagcttattttgatcaaattgaaaagattactcagattacctaataaatacttctttgtttacagttgaaaatccccgctcttagccataaatgtgaagaaaaactaaacatagctgtgctagggttgccacctatttcacgagaggtctggcagcacttgggagcgctgaaatttttgagaactttttgcttcgtagttgttgtgatttctttgtacatcccctgaaaacgatgaagttacttgagcctcagacgaccattagtcctgaaccggacatactgcatccggacgacggtcaatacatatggctgccaatttccgtgctcgttggcattttcgttctggctgcactggtgcgttatcgccacagtctgtttgtttaagtggatgtacatttgtttaatttatgcatttgggtgtacacaggtctacgccatgtcacgtagtcgctgtcggaattcctgggattgcctaaagagcaggaaggctccgcgaagtggatacatcaatgtggatgaggaggattccgatgtgcccatggactgcggagatgaactgggagatcaaaggactactgctactctcctcactggtcgcctccacattcaggatgtcagtgagctcgtgacaatgtcccaatacaatcacagccctttttcttccacagggagcgaataacgcctccaatgcctagtgaatctcaaaagtcttccatacactttattgtccacgttgtcttcaaacggtggttgtcatcggtttagttactactgcaaactacgtgcctctactacaagtacaacgaaaataaccctaattttaatgatccgtactggtggcgccaaggattcgcgtcgtcaggtcgtagaagccaaagaagaatgcaccgcccagtgtgatccacagcacacgcggcacaaagccagcaaacagactgaaaagtaacatcgaagtacattaataaatgtaataaatagttttgtaaagttaatttgtgtttaaatattaggaccagcttgagttgcgtctaatatggaaataattacccgctgaagcctcgctccaggtaaatgccatgcaaaattcttcgggcactgcgacgtcggttgagactctccctttcagccag

SEQ ID NO: 9569 - DNA, 1375 bp, DROSOPHILA
tggcaaccctagcacagctatgtttagtttttcttcacatttatggctaagagcggggattttcaactgtaaacaaagaaatggatccccaaacatcaaaagtatgccaaacgcttaattttacaatagcaaggcgaactgcagaagctcccgtgaagcttgtatcccatgaagtctcactttcagacagtactacttctttggagctgagcaattgctgccgcttgtgtttggaggagccgtatcccaaccaaatgctggacatgaccgtcatctatgaccaggaggcggcgctgagttactacgactgctacgagatctgcaccaaggaagacctgcggcaaaatcccaaaaacgagccacgaaccttgtgcaaacgttgtgcggtggaactgaaatgggcctacgacttccacaagaaaatggccattgccaatcagcagttgagggagatatttgtggcaaccgaagccaacacggaacaggaagacgacgtggaggatgaggagaatgaggcggatatgaatgaagagttcctgatggaagagattgaggagaagcaggaaacccctatcgacagcttagaggacattgtgccacgcaatcggcatacgggaaaatccaactgcaagttctgccacaaggagttcaggaaccattcccgcatggccaagcaccagatgattcatttggccaatcgtcccaactttcgttgcagccagtgcgaccgggtttacctcacaaagcaggcgctgaaagttcacgtcgattcgaagcacaggcagtctggagtccactgcgacacatgcggcaaggtttttgccattgccaaagccctggagattcataaacgctatcataacagagactttccctattcctgtgatctctgtgatcgtcgtttcgcacagcgatcccatttgactgtccaccagcaggttaagcactctggatctcgcttcatttgcgagtttcccggctgccagaagtcctttacctcatcttcatctctcaggaatcacgagtgcacgcatacggccatgccatttgagtgcgcccactgccatcagagctatccagctcgtaacaaactacgcatgcacctggagcgtaagcataacatggtggtgcagatggaggacctggaggaaatgcgaaagtttcacatcgtgcgctccaagttggtaatggcaaagatttactcggaccagaaagaatcacaccatgccaaaaatgatagcgctgctatttctaaataaaaagtatttaaaactattaccaaaacttagataatagcttaatcttacactaactcgcatcccattttaaattccgtaaaattgccttacaaatatcacattcaatttatttcaca

SEQ ID NO: 9570 - protein, 392 aa, DROSOPHILA
MDPQTSKVCQTLNFTIARRTAEAPVKLVSHEVSLSDSTTSLELSNCCRLCLEEPYPNQMLDMTVIYDQEAALSYYDCYEICTKEDLRQNPKNEPRTLCKRCAVELKWAYDFHKKMAIANQQLREIFVATEANTEQEDDVEDEENEADMNEEFLMEEIEEKQETPIDSLEDIVPRNRHTGKSNCKFCHKEFRNHSRMAKHQMIHLANRPNFRCSQCDRVYLTKQALKVHVDSKHRQSGVHCDTCGKVFAIAKALEIHKRYHNRDFPYSCDLCDRRFAQRSHLTVHQQVKHSGSRFICEFPGCQKSFTSSSSLRNHECTHTAMPFECAHCHQSYPARNKLRMHLERKHNMVVQMEDLEEMRKFHIVRSKLVMAKIYSDQKESHHAKNDSAAISK

SEQ ID NO: 9571 - DNA, 8242 bp, DROSOPHILA
gatatacataagaacgccgctccgctgctggcgtacccggcagcgcagctacgcggattagcctaagtcaaaatatataaaaaactgtaaaatcggagagactctgtagacgttgagctgacagaaccatttctgcctactctaaaatcaaaagaagaaattgaataaatatatgtcagcccgacggctgccttcaacttaaaacggacttgtgttcttaattggagttcatcattacacgagagcagttgtagaactaaaattgttgtgctatatcgctaaacggtgaacggtaaatattgaagagagttttcctggcttcaattttcctttgcaatcgcccccaccatccttggaattttgggttttttggaagagaaaaacacatgtggtgtgtcgccacagtgttttggtttttctcggccgcccaagtagacggcgcgtagtttttcattttgacgggagttttcctttcggtcgtcgccttacactcatttctaattgtgattcgtaggaagtaagttgtctagtgctatatatatatatattcaagtaaaattgttttaaatcggaacacacaacaataatatatacaagtaaacaccactaaatatcggaaaagaaagaagagcaaataattaaattacaaaagaaaccaagagaatatcaagctaaatcccatcatcccatcatcccatcgtttttggtcttctggttcttgttcatcaccgacgttattgatattgatattgaatactggatattaagatacatatatacaaacgcatcgtatctgggataaacgttcatcacaaggaatattaatgatacgcaaaggctgtaactgtaaactgtgtcccctctcacgtaagacgtaacgtaaggcagcctgtggaaacgacgtagtttggacgcaatcagaaaaatctccaaggaggacgcagctaacggtgagttttcctgatgacagaacaggggattgcttttgggtggggggaggatgaatgtcactcgcagggaaaatgaaaaatgccaggcgaaaattcttggccatgcaactcgtttggccgctctgcctctttcgctcccgcgtacgcttatgtgtgtgtttatgcagcggaaaacgtgtattcttgagaaaaaccagaaaatcgaaacccggaattgggtcagtatgtcacacgccgtcccgctcccaccgattccaattccgattccgattcgagctgctagtctggctaaaaactctggctaaaacgtgtttcgtgcttagtcaatttgttctttttcatctagtcgcagctgcgctgccgcagttggcgtcgctgcacggccacttgactaaaagcggcctaaacagcatcgcctccagaatgcctaaaaaacaaaacaacaacatgtagtgccgctgcacgtgtgcgaaagagagggcggcgaaaggtgggaaaaagacagaatgtctgtcacccgcgcgaccaacttaaataccctgtacttatgtgagggaatattgtagaacagcttattagtatagattctacacaataaaaccgtttaatcatatcacgaaatattgataattagtacatacaaaacatatgtggttttgtcagcataacaaataatattataataatataaggtcaatacatgagatttttaggccctaatataattttcctagaggcagaactgcttttttatttattattaattgctagattcttttatacaaagatagttactttttaacttacacatgtatgtacatatgtatgtgaatgtacatatatgtatatgctgagtatctcctattcgccagcttatcttttgtgatgtaaaatgataaatggctcgctctccgactttcgtagttttgcctctctctagtttttcggccactcgcttcacttgatcttgcactcggatttcggccgagttgcagtcgacagcgctgtcagcgtcgacggcgactgcggcggcggcgcttttaccttgagcacgcctgcacttgtcacagcccctccccccgcccaccgactcacacgccgtttgaatttgaacttctgaaaaagccaacacctttcgaaattgtagccgcttttatttctttttcttttgcctccgagcagcggcatttttatatttctgatgtttgctaataaaattattacgacttggccgacagcggctgctaatgcgttttaaggtcgccgacgctgctcttgttgattttgatccaataaaaaaatgtgatgatgccccgcttagatttctcggtccatttaacatgtgtccattggcccaggatccgatttgatttatttcaaagttatttattatacagtcaggcgaaaagcaaaacaaacatgaatggggaaaattgaaggcaaatggcagacagctggtgctcattttccgggatgcgaaaaagggatagaattgggatagtgcactgagaaaaatcagtgaaagagttcatatcatatcatactgcatatgtttgcatctcaagaatctctttgtatgagtagagatcaaatggataaggaaacagctttcgttcatgagatgtctatctctaaaaactacttataggtggaaatttattctagacaagggtagagagcactgcaaatacgtatccaaaaacaactccccagataattcatcattacatcataaccgttgcgaattcatgactaatggccgatgatttttctctctgtggggaatacgcgacgtcgtgggatagggataacaacacggaagaggctccattataggttgctggtttactagttaactgggctccagccaagggagcgaaagggaaaggtgacgaacgagagggagagagcgagagagctagggggaatctgaattacagagagtgggcgggggtggtgacactgacagtggagcaccttcgtcatcgtcaaacattcgggctgtataagagcaataaataatgcacacgaagagcagtgatgagagccaatgatatgggaaaatatcggacgagaaattcgacagagagagagagagagagagaaagcggagagaaatttggggggcgagcgtaagagattcgccttggggggttgattgtgtttaatttttgcacttaagagcgcaaaaagtggctttgattttccgccggcccttctcacgcagcttggggcatgccaactttgatggccgatttgaccaacccccaggagggaattcccaacttggctcattaaattgataacattaagcaggcgatatttaatttgattttctccagacacaaacacaatctgatacacaaattgtatagattctataagttatagttttctgaagatttaaacttaaaacaaaattactgtactgttttcatagtgtaaaatacctatgctaattttagttttcgtggcacttttaaatattatacataagcatgataatttgtcaaagtttcttgtagtgcatatatttttcgcagagagcatccactcaaaaatatttccgtattcttggcaacattgttgttggcgatgggttagtgggcggaaaagtgggtgttgcgtgggcagtcgccccacatttgcatgttcccaacacggcacacattttctcgcttctctgcgccgctcacgcgtctctctctctctcgctctctcttgccatttttctcgctctctggacggatgcccaagtatatagcccaaagtcccaaattgggatagggatgcgaaggctatagcgctaacctatataattttttgtgttccgcttctaacaacaagcacatcctctggtggtgctccaaccaaaaaaggaaggaaatcaaaacctctggcagttgaaggttcttttttcctacacacttttttaaagcagttgctgattttaatatatatttttccacgtttgtgggggcagagcagcagcgttttttttttttttttgcattgcttctggctttgaatttaatgttaagtatacgcatcagtgaactcaatttaattatcatgattgtttcgtccgctgcctgtctttgctttcgctctgctttgccgttgatgaaattcaaattttccaacttcacaaacagacgcttctcgcaattttccaacgtgttttccgctgttttttttttgtccagcttatgtaagtgaagcgctgagagctgataaaaatgaaatgaaaaaaaattacctagctagcggacggacgggactggctggccataattacgagctttagattcgctcgcccttcgcccattttttatcagtggcgttatttatgcgtcctcccacaatgacaaagtttcacggagtggttgatagtgtgggtgggggggcagtggtggtggtggtggggggtgcgcctttgatagacaacaattgagcatttgaagtgcagcgtagcgcaaagagagctcaaaagtggaaaatatgtggaaaaacaaaactgaactaaactgaactgactgactgctattctcgtcgcagccgaaaacccaaacgaaaagcaattaagttgcctcggatcattgcacaataagtaaagaatcaaaaagctcgaaacataactgtgtttgctgcccgtccagccaaaaccgttgacgtcgctgccaacttcgcagtcgctgccgacgctgcacactgctttcggcccatatgaataacaatagggccagttggctggtcggccagaacccaacgaattcggttaattagtattataactagaagccccccaaaaaataggtgttgctcaccacgcctcattggcctggattttaaacaaaaccagtcagattagcacaaagcagatgcgaacaaaacgcagttttatgaattaaattactttatttaagattttaacgattaattacaagcgtaatttaatttaatttaaggtaaacatggacaagatacgaattttatttcgatttaatttccagatcagttttttttttactaattaatatatattcttttatatgagatatgcttggaaatcaacagaaatgtactttgtttccagttggaattatagccacaggcatttccaattgtcatttgccgaagcaaaggcacagtgccaatcagataatcgcaaccttaaccgttattagatcactgtacagctgcgtcgcagtcgtcgtctctttctagggcgacaacaactctaatcggaacgggagattatgtgattgagagagagagtgggttgttattggcggtgggcggttgtgggcggtgggtggtgtgtttaataaataggccaaatatgtaatattgctaaaatgtgtttattgtaatcttttcacacacacacacacacaactacacaaacttaaaacaacgcacgtgcatcgttgcatcccttggatttcgctcaaagagagcaagcgcgcggcaacaaagagcgccagagagagtggagcgaactgtgctgccgcagtcgctgccgctgtcgacgtcgactgcgcagttgggggcccccaaatcgggaaactatattcgttcgacgctgagtcgttgttctaccgtcgttgagattgcaacacttctcgatttcgggttttcggaattataaaaaataacagaaatccgccgttgccgccgctctccgcttattttcggccaaaatacacaactctcgcgtcgcacgtaaagtaaaaaaaaagagttctacattttataacgctgtgtgcatgtgtgtgtgtgcgtgtgccagtttttcatgcgttttctgccgctgcaacaacaattaacaacaataacgacaacaaacagttaccacatcgcctgtcctctctgtctgccccaactctctccctgtctcgctctcaagcgctttttaaactgctgccatgtatttttaaactgcgtttttttcgccaaaaaaaccataaaaaaatataaaaacaaaacaagagggaaaagtaaaaaagcaagatttttatgtgctggccgctgacaaaagtcaacgactactattttggcccgaaacaaggcaaaaggttgatgtgtgttagccacaataaaagctgtacgtttgtatgtatcaaaaactatgtttgtgtgtgtgtgtgtacgtatgtgagtgtggaaaatcgtgtgagaacgtacttgattttgggctcacaaggcggcagtttggatttttcgccagaaaaacaaattattatggccagaaggagagttttgttggccagaagggagaatgtgttttttttatgcgtgacatataccacttggtttcttgtttattgttgttattgtaactgctgctgtgtttttttatgatatttttagccagcattttttgtgtataccaaaccaatttgcaaaatccgcccacttccgctttttccttgacttccccattcccttactgctcttacttcatatacctactgtccctttataatctccttctttcctgccccttttccctttttgtgccaccttcaaaaaaaaaaaaaaatagtcacaaccatatcaacgaatctctctcgctcgttttctacccccaactataacattcgcctccttccccacattttcctcgtatgttgcctttttcgcacacgttgcgtatacgtaatggccataaacaacaacaacaacaacaaaaacaggagcagcagcagccgcaatagcaatagcagaaaactcgcatagctacaaccctttgcccacatttccaagcccacaccatagctccctcacaatattcccattcaaatgtgagggcagagaaagctagagaatttgtttattcaaatttttcctggttggcctttttaactgccatttgatgagtggctaaacgatataccaaacaacaccagccacccaaatacaaaaaaaaagtaaaataccagtaaacccagatctaaatccccaaatggtatttgccttgcagtagcccagctgaaaaacgagagcatcaaataatcgaaaagtgataaaaacctaattattatgcaaaattattgttgaaattcataaagcgcaaacgttccgcaacaaaagtggtgctaatttttatctttaaagatcccaattgttaagtttgaacaacggcgaaaagcaaaagcaatccagccaataagtgaatcaaagtcaaaaacgtgaaaaatcacatcgagcggaaagttttaaacttgatttttatttcgtctgcctgctgcaaacgaggcaaggaaaacagaaaagaggtaaaatatatatgtgcaatgtatttttagttgcattctgtgatgaaatgctcgggaatcaaaaagtcgcataaagaactgtgaaaaatgccaaccgtttcgaaataacccacgcgacggatttactcgcgagcatctcaagacaaatctaataagtttttgggagcgcggggaaaagcgggaaagcgggaaatgtgacagggaaaacagaaaaccgaaccaatgaaaagtgtcgcctggggatacagattttccctcagacatttagcttagagggtgccccaaccatttcgattgatttgtttcctagcggaaaaacatttcaattaagtatgttaaaggaatttcttgcaacatttaatctgggtaacattttatttgtttgggaattcaatatttaattcaatcttgaacttgaggaaatttgtttaacgtttgaaattcactaacaaatggataaaagttaattaaaacccataaaaccacatgtacaatgtaattgagcgatgatctttagatagatatatttatatttacaacatttctgttccattccagatcattaataaattaaaaatgcaaatatattcaacacttctgctatatcaattttaatacttaggctttccgctgtgtagattttaaataagataccatgccaggcgacattttccgaatagcaagcagcttcattatcctagggttttttcggggtgtatcattccgtgatccagcttttccagctttcaatgccgtaattcttattttggcagtccgcctgccttttcggcttacataaatataaataagtattccccacggctgtcatgctgacgctgggctttataccaacatcctcccagttctccgagtattgcccagttccctgtctgggacaccctgtacataaatctaaaattataatgcgctccgctcttcaatattcattttcacccgagccccgtcaccgtctccttagctctttttctgtcgcctaggccacaagtgaat

SEQ ID NO: 9572 - DNA, 658 bp, DROSOPHILA
atgaatgtcactcgcagggaaaatgaaaaatgccaggcgaaaattcttggccatgcaactcgtttggccgctctgcctctttcgctcccgcgtacgcttatgtgtgtgtttatgcagcggaaaacgtgtattcttgagaaaaaccagaaaatcgaaacccggaattggtttttcggccactcgcttcacttgatcttgcactcggatttcggccgagttgcagtcgacagcgctgtcagcgtcgacggcgactgcggcggcggcgcttttaccttgagcacgcctgcacttagagcaagcgcgcggcaacaaagagcgccagagagagtggagcgaactgtgctgccgcagtcgctgccgctgtcgacgtcgactgcgcagttgggggcccccaaatcgggaaactatattcgttcgacgctgagtcgttgttctaccgtcgttgagattgcaacacttctcgatttcgggttttcggaattataaatcccaattgttaagtttgaacaacggcgaaaagcaaaagcaatccagccaataagtgaatcaaagtcaaaaacgtgaaaaatcacatcgagcggaaagttttaaacttgatttttatttcgtctgcctgctgcaaacgaggcaaggaaaacagaaaagaggtaaaatatat

SEQ ID NO: 9573 - protein, 161 aa, DROSOPHILA
MNVTRRENEKCQAKILGHATRLAALPLSLPRTLMCVFMQRKTCILEKNQKIETRNWFFGHSLHLILHSDFGRVAVDSAVSVDGDCGGGAFTLSTPALRASARQQRAPERVERTVLPQSLPLSTSTAQLGAPKSGNYIRSTLSRCSTVVEIATLLDFGFSEL

SEQ ID NO: 9574 - DNA, 7792 bp, DROSOPHILA
taggtcagtttcgtacgtcaatgtgtattccaagtcaacaaaataacttttatgacgctaattctcaatgagacattttgtaattaagagttatccaaacgaaactttttttaaacgttttttaaataaataaaattttttattttattaaatttattttatttaaaatttattagttggcttagataatattaaaatggttttctaataatcgcagattttgcacttatttcaaaacttcatattttgttttattaaacatccgattacttagtgaaaacttttataagatcacttggtgctaaaattttgaccgctcttgtctatttcttacgcatgcacagtgggatcccacttatttttgacccgtaaaaaatgattcaattaaatcaattgattaattgtttgtttttgcacaagcataaccagatggaatgtcgagatgattcaacgtgacacaataattgttcacgtttttggcgccaaaggtgtgggccattaattaaacccccgatatgataattgcttctggcagttgaatgtctatttttggaacctggttttcaatgggtctgcgaccactgtgcccgccgtgtacgcgtcttacgtatctgctcgatattcctatgccgatccgatgcgatgcttggtccgaatccgtatccgtatattttctttcgtgcggtgcgtctgtgtttcgaatctttcgggatcggcgtctgaaataaacgaaataggaaattttggtattttcctttatataaatagattttgccatacgcagtctacggagaaaacgttgaaaacgctgaaaatgtgaaaagtgaatgaaacgcatgtgaatctcgcagtgccaaaagacgcaacaaagccgggcaaattcaataaaaacccaatttcgatttcaataaattttttaaatgaaaatgtgagcagtgaaaatgtgaatacccaaacagtgaagaagaagaatacacattttccaagatactgaagcaaaatgcaagccaattcgagcaccaccaccacaacaacgaccaccaagaccaagaagcttagcagcggcacggggaccaacatgatcagttcggtggcggtcacgagtgccatcaaaaccaccaccacgacacgtaagccagcgggctctggagtcagttccaaggtgtccaaagcgcagggagcgacgaacagcactccagccagcagcgattcgaatgcggaaatagccgagttgaccaagaagatcaacgatcatgccgacgccatctatcacacgtggaagagccagggcataccaccgacggaactcctgacgatgtacacaagcgccgcagcctccggcgaccttgcggacgtggcctcgcccaccgccgacgccgagggactccagaaaatggtcaccagcttcgtcaacaaggacaaagagcagcgcggcaagagcaacaccctgaagaagtccgacataacaacagccaatggcaaggtgaaaaaggcagcggtctccagcttcagtcccgtgccagatcaggcactgcaatctcccaaaaaagtggccgccgttaccgtcagcaagcccttgcccgatgtcaatctcaactacgacatcagtttagacctggacgtgaacaacctctcctcgcagcaaacccagaatctgctgaagatcagcgagcttattcagcagcagaaggacgtggcggccacagtgggcaaaaagcgccagaacagcaaggccaacagcagcagcagcatcaacagcaaccacatcggcaactcggccagcagtaacaagttaacagcctcggagcaacccaccaaaaaacagagcaaggccaacagcagcggaagcaccaggaccggatcggctgctgttagcctcgatgtcgtcgatgggccatcggctgcgagaattgccaacagcacggcagtgagtgataagggcggcgagccagcggccaccggcagtcgcaagtcgagcaaaaccaaagaaactagtgccgattcgaagccggcaaccaaagaaaagcccacagcggtggccacagtagccaacgcacgcaaatcaacaagtcgcatcgccactgataacgccggcaacatggcggcagcgacagcggcagcagcggcaacatcggcaacatcagcagcaacagcaacttcgatggatgcaacgccagcaacagcggccagcacaacgatgccaacgttgaataaagtcaaaccgaccagcggggcgcgggcggcgctcgccaatggccaggacaaaagtaataccctcgaaatgaatcccatatatagtagtgcgctagctatccagatatcggtctctacttccagtgaatctcctcacccgtggctccgtggccgagcgcgtgctcatgttcgagaagtgtccggatgtgcggcacgccttcctcaacatcaaacggccccagacggatcctccgcccaagagtctcatgaaggtgagttatgaaaaactgggcagaaatctgcattttctgcggccgaagtgctcgtggtgttatctaatagttgaaaatgccagaagacaatgtgcaaatgaaatcgaaccaattgcaatcgcccatttgttttcgttcgactttttgtgggctgctcttatcggtgcgagcgcagtgcatcattgattgatttaaggttaccccaagacgccatgcgggaaacgtttgccaagtggctggcgaagatcggcgtttcggccataggagcgccgagtgaaagaggtccctctgatctagaggggtttaattttgcagacagtcaaataatatgaacaaccgaaaatgaaggaatcttatctaaagcttatctagcttaaagagttttaatttatttcaatgaaaggcttaaattttctcaattttcatacacaaatgtttagtgtttaattaccatataaaccagtcttaaggatatttaacttacataaaataactgcatcataatagaacaaaatcataattaatcagaaagatttagaaacctcaagtcatccattataccattataaaatcaaacaagtttagggtgacaatcgtgttcagactgtgtgctatcccaatagcattcctgttttaatttatttaacattttctcagacgtccaagaacctgttgactactcatctgctccgctgggtttgttaggtattcatagtggtcccgcttgcccagtgttgtgtgcatattttcgtatataaacaatcaaatcaagcatttgcgatcagcacaatcgtgcataagcaaagcaacaaaaataaactaaacaacaaccaaaccgaaatcaatacaaccccagcagcacacgatcatcatcacttttgagcacttcgaagtgcaattcgctttgcttttttcagcctttcagcctttggtgctgattgttgctttggtcgggggtttttgtttccgaattgtttaattgcttaattacatgtgcgggcgggcgcggcatattcggttgttttttctatgaatggcttaccaagccaaaaatctctccagctcaattgaactttgctttactacgattgcctgtgaaattccccacttcttgccaagcgtctgatcaaagcaaaaaaatcgggtaaaaatagcaataatcctgtgagaatacaaaaacaactatttgcaattgagttttaagcaggcggcagacagaagttcgatctgctggtgctttttcgtctctttgctctttgtctacaaattgggcaacagtgcgtatgcgtaatatttgactataaacgatgtgtaaccgggcgtatacgtaatatgcgcacatgccaatgaattgttttctcgatcgcagaggcttctcgacgtggtcgagtgaggagattaatatttatgtcgccgttgacagttttaaaatcatgaatggcctgggcatgaattatattcgatgaataaatagtcctcacacgaataaaagccaaataaagtcatttcatgttgatgtgaaaaacatagaaaaacaatagatttagttgaactgaatttaaaagttaaatctgttttaatcagcatagctcaacaaattgttcgtgttttctttactgcccacataaaatgaaataaaacactatagctcacgataatttgattctcctggttttttgctgccacgatatggaattcaatgcatttattccacgaaaaatcgcaaacataaaaatcccacgtagcaaatatgtttccattatttaccaaatagccgcgaggtaatttaaacaaaaagtatttactcttgcgcctacactcaccgcttaaattagacaacgatttgttgatgtttatttgaatggcaaacatttaataataaattcaaaggtaaagggcgaatctacgtcgatatgggcgtggcagtctgcggcttttggggcgagagtgagaaaaaatttccgcataaacgtaaacaaagccaaatattcgagaataaattgcacattttattgagttgcgctttggcagccaaaacaagggaatgtaaacaattagtgagtgaaattcattttcgcattcatattcgtcggcaggtcaagctacatgccacaccgcccccgccgccccaggagcagaatctgctgcagaaggagatccgctccacaaaaagcgtctacataccgaggtgagcggatccattgttttggattccactgcgtgcattacaccatctattatccgacagattctactttccacacggcaagccccagcccaacatcgccatggagcgcgtggtgcgcggcattctctccgccttcgacagctttcccaacaaccaggtgaccaaggacgagctgccgcgcatcctcaagatttgcggcctgcctttctactggcgcatgccggtgatggtcttctgccaatcggccagcacgggtctcgtcgagcgtcagcggttcgtcgagttctggaaacagtaagtcatccctagatccacaaaggtccttcaatattgcaagcgtcatatcgtgacatatcataccagttctactcatatgattttgattttggttcaaactttaatgtgattctttaatagtaatatttacaaacatttgaataaacattgctaaacatgctggtttatctattcaattttaacaatccaaaaacaccagatattccagttgtaaaaaaggaacataaaaatcttttcatccgaattttggttttaatttgattcttttactatttacaaatattttaccttgatattacaactcaaaataaatataagacacaaattcattcgtgggcgttggaatgtgcgctcgttcacatattttataagccagatgtaatattacatataaagaagataaatggcttaatacacatttgactcacacatcataaacatgttttgtacaaaatttaagaatgttttaattatttctttgttttgaaatgtaatggtgaatggtaatgagaagcttaaaaaatcgaaatatcttattattagttagtggcgaaaaagtaacgaaactctactcactcgtatatcgtttttattgcctatattgtattttgtaaatccttctataccttaccttttagtatatatgcacatatatttaaatgaaaccccgtttaaattgcagaatgaatgtttattgccatgaggcggcctcgagattcgtgtacattctgtcgcgtggccagagattccgttcgtacatcgtgcccgaggacctggtgcccatggtgcaggatgtggtcgacacacaccccggcctggcctttctcaaggaagccaccgagttccattccagatacgtgcacacagtcatcgcgcgcattttctattcggtaaaccgcagttggagcggcaagatcacaatagccgaactaaaacgatccgatctgctggaggtgagaaaagtatatcaatgatatatctgaaaaatataaatataacaatgttgttgtgaaatacataatgtacatttggaaacccgcccacagatgatcagtctgctggaggaagaagaggacatcaatcagataatggccttctttagctacgagcacttctacgtgatttactgcaagttttgggaactggacaaggaccacgacctgctgatcaaccaggaggatctggccaagcacagcgatcatgccctgtcatcgcgcatcgtggagcgaatcttctcgggatgtgtaacgcgcagcgataacaaaaaggcgccggaagatgaagccaagatgtcctacacggactttgtgtggttcatcctctcggaggaggacaaacggacgccgacggccatcgagtactggtttagatgtatggacgtcgacggagatggagtgctgtccatgtacgaactggaatacttctacgaggagcagcagcaaaggatggagggaatcggcattgagtgcctgcctttcgaggactgcctgtgccaggtgaggatcggatattcaattccgattgaaggaagataatctaatttttttatattagatgctagatatgatcaagccagcaaatcgggactgtatcacgctgggcgatttgaaacgatgcaaaatgacgcacgtcttcttcgataccttcttcaatctggagaagtatctagatcacgaacaacgagatccgtttgcctcacagcgtgacgaatatgtaagtggtacttagaataattaattaatataattattaattatgttattatctatttcgcagacctccgattgggatcggtttgcggcacaggaatacgaactgctcatatccgaggaaaacgattaagggtcgccaaaagatatttattaacttacaaatttttatacaaatttatatactacgagatgaaaaggaaacgtaaaaacaaacaaaaagaaggaactaccattagtccattatgtgcaataaattcaaattatttattatgagttctgcagacttagttgaatttgaatgatgaataaaataaaatgaacgaaaactaaaaatttaaatttgccatgttatttacattagtaacccttggcgtacaaaaagcatatcgatttctcaagaaaattagcatccagctttaaattttttcatttttttttatttgttttttgttttaaaaatgtttttttcaacttaaattagttaaaggtagaacgtgcttctcgcttgtcatctttacaacgctacaagaactcatttagaaactcaatttagactatgcaaaaatttgcctaaatatacgtttacgtttgtatatataattgttatatgcaaaagaggttcctagcgccaatggaccacatcattgccaacattgcagatttccgatatttgtgtaatataatgtttaagaaactgtggcatttatttaaatatccctttaggatttgttgttccacttacaattgcttcgggctcaaaagactgcgctgctcgtcgtttatgaatcacagatgcatttggggattgaggacattctttataaatgtatacactcctcagcggttcatattttacagagtgataggttcgaggtagggatctacgacgcaccaatcaatttaccattcaaaccagactaaaaaatatacatgttagagtgggcaaatgaaagtatcataagggttcaacattaaattgtgtttatgcgagaaattagcgctgacgattcgaaattaagcagctggacgagtttaacaagctgaacagtagtggatagaagacaaaagagtttgcaaagaacaagcaattcggaaagcgttgcgaattgaaagttttctcttttgttcaa

SEQ ID NO: 9575 - DNA, 2667 bp, DROSOPHILA
atgcaagccaattcgagcaccaccaccacaacaacgaccaccaagaccaagaagcttagcagcggcacggggaccaacatgatcagttcggtggcggtcacgagtgccatcaaaaccaccaccacgacacgtaagccagcgggctctggagtcagttccaaggtgtccaaagcgcagggagcgacgaacagcactccagccagcagcgattcgaatgcggaaatagccgagttgaccaagaagatcaacgatcatgccgacgccatctatcacacgtggaagagccagggcataccaccgacggaactcctgacgatgtacacaagcgccgcagcctccggcgaccttgcggacgtggcctcgcccaccgccgacgccgagggactccagaaaatggtcaccagcttcgtcaacaaggacaaagagcagcgcggcaagagcaacaccctgaagaagtccgacataacaacagccaatggcaaggtgaaaaaggcagcggtctccagcttcagtcccgtgccagatcaggcactgcaatctcccaaaaaagtggccgccgttaccgtcagcaagcccttgcccgatgtcaatctcaactacgacatcagtttagacctggacgtgaacaacctctcctcgcagcaaacccagaatctgctgaagatcagcgagcttattcagcagcagaaggacgtggcggccacaagcaaggccaacagcagcggaagcaccaggaccggatcggctgctgttagcctcgatgtcgtcgatgggccatcggctgcgagaattgccaacagcacggcagtgagtgataagggcggcgagccagcggccaccggcagtcgcaagtcgagcaaaaccaaagaaactagtgccgattcgaagccggcaaccaaagaaaagcccacagcggtggccacagtagccaacgcacgcaaatcaacaatgaatctcctcacccgtggctccgtggccgagcgcgtgctcatgttcgagaagtgtccggatgtgcggcacgccttcctcaacatcaaacggccccagacggatcctccgcccaagagtctcatgaagcgcagtgcatcattgattgatttaaggttaccccaagacgccatgcgggaaacgtttgccaagtggctggcgaagatcggcgtttcggccataggagcgccgagtgaaagaggtaaagggcgaatctacgtcgatatgggcgtggcagtctgcggcttttggggcgagagtgagaaaaaatttccgcataaacgtaaacaaagccaaatattcgagaataaattgcacattttattgagttgcgctttggcagccaaaacaagggaatgtaaacaattagtgagtgaaattcattttcgcattcatattcgtcggcaggtcaagctacatgccacaccgcccccgccgccccaggagcagaatctgctgcagaaggagatccgctccacaaaaagcgtctacataccgagattctactttccacacggcaagccccagcccaacatcgccatggagcgcgtggtgcgcggcattctctccgccttcgacagctttcccaacaaccaggtgaccaaggacgagctgccgcgcatcctcaagatttgcggcctgcctttctactggcgcatgccggtgatggtcttctgccaatcggccagcacgggtctcgtcgagcgtcagcggttcgtcgagttctggaaacaaatgaatgtttattgccatgaggcggcctcgagattcgtgtacattctgtcgcgtggccagagattccgttcgtacatcgtgcccgaggacctggtgcccatggtgcaggatgtggtcgacacacaccccggcctggcctttctcaaggaagccaccgagttccattccagatacgtgcacacagtcatcgcgcgcattttctattcggtaaaccgcagttggagcggcaagatcacaatagccgaactaaaacgatccgatctgctggagatgatcagtctgctggaggaagaagaggacatcaatcagataatggccttctttagctacgagcacttctacgtgatttactgcaagttttgggaactggacaaggaccacgacctgctgatcaaccaggaggatctggccaagcacagcgatcatgccctgtcatcgcgcatcgtggagcgaatcttctcgggatgtgtaacgcgcagcgataacaaaaaggcgccggaagatgaagccaagatgtcctacacggactttgtgtggttcatcctctcggaggaggacaaacggacgccgacggccatcgagtactggtttagatgtatggacgtcgacggagatggagtgctgtccatgtacgaactggaatacttctacgaggagcagcagcaaaggatggagggaatcggcattgagtgcctgcctttcgaggactgcctgtgccagatgctagatatgatcaagccagcaaatcgggactgtatcacgctgggcgatttgaaacgatgcaaaatgacgcacgtcttcttcgataccttcttcaatctggagaagtatctagatcacgaacaacgagatccgtttgcctcacagcgtgacgaatatacctccgattgggatcggtttgcggcacaggaatacgaactgctcatatccgaggaaaacgattaa

SEQ ID NO: 9576 - protein, 888 aa, DROSOPHILA
MQANSSTTTTTTTTKTKKLSSGTGTNMISSVAVTSAIKTTTTTRKPAGSGVSSKVSKAQGATNSTPASSDSNAEIAELTKKINDHADAIYHTWKSQGIPPTELLTMYTSAAASGDLADVASPTADAEGLQKMVTSFVNKDKEQRGKSNTLKKSDITTANGKVKKAAVSSFSPVPDQALQSPKKVAAVTVSKPLPDVNLNYDISLDLDVNNLSSQQTQNLLKISELIQQQKDVAATSKANSSGSTRTGSAAVSLDVVDGPSAARIANSTAVSDKGGEPAATGSRKSSKTKETSADSKPATKEKPTAVATVANARKSTMNLLTRGSVAERVLMFEKCPDVRHAFLNIKRPQTDPPPKSLMKRSASLIDLRLPQDAMRETFAKWLAKIGVSAIGAPSERGKGRIYVDMGVAVCGFWGESEKKFPHKRKQSQIFENKLHILLSCALAAKTRECKQLVSEIHFRIHIRRQVKLHATPPPPPQEQNLLQKEIRSTKSVYIPRFYFPHGKPQPNIAMERVVRGILSAFDSFPNNQVTKDELPRILKICGLPFYWRMPVMVFCQSASTGLVERQRFVEFWKQMNVYCHEAASRFVYILSRGQRFRSYIVPEDLVPMVQDVVDTHPGLAFLKEATEFHSRYVHTVIARIFYSVNRSWSGKITIAELKRSDLLEMISLLEEEEDINQIMAFFSYEHFYVIYCKFWELDKDHDLLINQEDLAKHSDHALSSRIVERIFSGCVTRSDNKKAPEDEAKMSYTDFVWFILSEEDKRTPTAIEYWFRCMDVDGDGVLSMYELEYFYEEQQQRMEGIGIECLPFEDCLCQMLDMIKPANRDCITLGDLKRCKMTHVFFDTFFNLEKYLDHEQRDPFASQRDEYTSDWDRFAAQEYELLISEEND

SEQ ID NO: 9577 - DNA, 3791 bp, DROSOPHILA
ttttggcttatactttgtacaatgtttaacgtgttataaacggaataatgacggtgaaaatgcgttttccaattgattttccatgcatatttagacaccacaaacagaaacttcattttgtgaatataatccacttgatgaacaatataaacgctacaatgatgctgaaaaaaactattattttaattttactggctgctcttctggacaaatctggtgcaaaaaaagtcgacggctacaaatggtgcacggtggtcaaaaatggagtctgtgtgaattaaaaactttataaatattaaataaaatatgtccctgtgttgagtccctcaaaccaaattgaaccaatccattagttttcatgtactgtgcagtgcagtggaagaattcttttgccttgcagttacaatcttgtaaaaacacatttacattcatcagggcggcacaactgttctttaatctattgcgacactgaacaatcccaagctttgaattaggaactagctggtagccatagacagtcgtttaactaaacaggtttggaggagatcaaaaactttcgggccaattaaaaaaaatagctttcttcgagaaaatggcagatacgaaatcccaagcggaaacatttattgaaaacgtcctgggcattgatgatggaaaagcaagcttaagtgcgggcgaactacctatggccaggagttttttctgtccgctcctgctgcttgttctttggatagtctccttaagtacggatgtgagttgctcttagaccaaatcctcttactttcttattttcccaggcattttgggttgtatatgcgtgtgctgcaagtttgtgaaatcggaatcatttacgagctacgactccgacagctttgagctgcaggaggttcatatcgtagagcccagacttggacatgtcaaaggatgtgcgtgcctggagtgcctgcatcgccaattcgagcaaagtaatggaaagtaaattaagtagtacctgacgattatgtagctgccgtgcattacttttattgtggtttttaacaacttaaggtctacgttgctctaaataacaaaaaacgttaacattcgtctgggcttacgatattcatgttgctaatatcgaaataactaatgatactgctcttctagaacttggaactaaattaccttcatgtttggtatgtttttttttttgagtaagatatgaaatatgaaatactggggcttcttagtaagctcaagcgaacttaacatccggcttagacaatgtcagaacatcctcttggatgggagacaaagttagcttcaggttgtgttccttggccaatttgcaagtcgcgtcgaactgagcgttcgaataagatttacgtgaaaagctcacttgttgatctgaagtgttcttaaaccgcctaatcaaatcttccattttgtcattgaaatcctgttcctttgcctccttctccagctgagcaggcgttttgcggacgtctgactttgagttctttaacgagaaggcacgtgcccatatatcgcgactggcctcctcatacttgctgattctcttgttcatgctgataatctcgtcgctgatctccttgttcgccggctgcttggcctgcgcctgcaggtaagcgttgcgggccaagttgtactcgcccagagcggccagggcgcgtccctcctggaagagcgccttgcaagacggattgcccatggtcaggtgccgtaaggccttcatcatgatgcaggcgcgcttcggcttgttcatcttgttgtaaacgatcatcaggttttgctgagaaaggagacaaggaatcaactgcctggtcgagaacgctgcctctgcaagctattcttgttggccacttacgttcagggtagtaagcagttcagtttgcttgcgctcctcctcgtcattggccattcggcagtagttcagtgagctcactgcccgttcgaaggcagttgctgcactctgatagcgtccgagcttcaccgagtccttgccatgtaggtgcaagtcgacagccttcggatagaccacacaaaacttgtcgcggtcttcttgggggatagcatcgatgcccttcgcatctcctatgagcgagtagtcaattacctccactttaaagagcgcatccgccttgggcttgatccgcggagggcaaccgagttctccgaaaagcagcttgtaggagattataaactcggcctgctcgtaaggacgcatgctgcggacggcgacctccaggccttcaaccaccgttccctggccagtttcaaacacgaatttgctgccccgcagcagggaggagtcgaagggagcggtctcgccctcccagtagccactgtaccgaaccgagaccctagccttgttcggcaccgcctcccgatccacgtgaccggtgcgagtgatccgcttgtaaatgttttcgtcgatctcgctcatcagcgcacgcagttcgtcgaatgaatatgtccacggtgaacgtagctcctcgccgtccacgtccagcgcatcctcgtagtcgctgtcgctgtcgctgtcgagacccagatccctggcatggttctgctgcgaattgtcgacctcgaactcaacgccctttttcacgagatccctgcagaatgagttgcacgtggtcatgagtgcctttaatatgtatcttattactcacgaataggacaagggattcttgagcaactgtggggtgtacggttcgaagttttcttccattatcgcaaaatttacagaatatttacgaaacgaattccggaatgcgctgagttggcgctattcttttggatgcgtttgagaaaagagctttccagcgatggtatcaactggaattcgattgcttgatagctttagcgaatcgattggtcgctgttgtccggaagttatcgaattcaaacaaagaactatatatctttattagggcgcgagcactgcaactcgagatatcttccgaaaatgtataatgtattccaatccagacggggaaacactaggccagatatacttgctttttatatgaatctttatttaaaactgaacacttatcgctctccaactacgagcactccattgagagaattgttttggtgtgtgtaacaataaaaaactaggaaacataatgaggaatgcattcttaatggccttgtgaagtgctcaccgtgcgatatggtatggctaagatttgtatattaagggagggctattctaagcaatgatcaatacaatagtatgcgaatgctcgcttgttcacttcttcagaagcttgctcatgtccttgttctgcttgtgaatcttcaagtcgacatcctcaattttgtagttcatgttatccagcaattcattttgcgactcaatttcgccacccagatcggtggccagcatcttcagcaccgacaggttgctgcacatctcctccagattggaatcgatctgggcctggaagggattggccgcctgtcgctggggctggtaggtgctgctgggatcaccacgcagctggctaaccggatgattgtcgtagcgctccgctggtgatagcggagccgaggggctagcaccgccacaggcaccctggttaatgttgctattggcctcctgggaggactgactgcccgtgggcgaaccagtcgcggtgggtggttggtccctgttgcccgaaaggtagttcttgaggccgccgaagacactcttcagaccagtcagatggcgctggctgaagcgcagcgtggagctgatctcgtccaactgatgtgatgtcttctccagttgctcccgc

SEQ ID NO: 9578 - DNA, 1659 bp, DROSOPHILA
cgccaactcagcgcattccggaattcgtttcgtaaatattctgtaaattttgcgataatggaagaaaacttcgaaccgtacaccccacagttgctcaagaatcccttgtcctattcggatctcgtgaaaaagggcgttgagttcgaggtcgacaattcgcagcagaaccatgccagggatctgggtctcgacagcgacagcgacagcgactacgaggatgcgctggacgtggacggcgaggagctacgttcaccgtggacatattcattcgacgaactgcgtgcgctgatgagcgagatcgacgaaaacatttacaagcggatcactcgcaccggtcacgtggatcgggaggcggtgccgaacaaggctagggtctcggttcggtacagtggctactgggagggcgagaccgctcccttcgactcctccctgctgcggggcagcaaattcgtgtttgaaactggccagggaacggtggttgaaggcctggaggtcgccgtccgcagcatgcgtccttacgagcaggccgagtttataatctcctacaagctgcttttcggagaactcggttgccctccgcggatcaagcccaaggcggatgcgctctttaaagtggaggtaattgactactcgctcataggagatgcgaagggcatcgatgctatcccccaagaagaccgcgacaagttttgtgtggtctatccgaaggctgtcgacttgcacctacatggcaaggactcggtgaagctcggacgctatcagagtgcagcaactgccttcgaacgggcagtgagctcactgaactactgccgaatggccaatgacgaggaggagcgcaagcaaactgaactgcttactaccctgaaccaaaacctgatgatcgtttacaacaagatgaacaagccgaagcgcgcctgcatcatgatgaaggccttacggcacctgaccatgggcaatccgtcttgcaaggcgctcttccaggagggacgcgccctggccgctctgggcgagtacaacttggcccgcaacgcttacctgcaggcgcaggccaagcagccggcgaacaaggagatcagcgacgagattatcagcatgaacaagagaatcagcaagtatgaggaggccagtcgcgatatatgggcacgtgccttctcgttaaagaactcaaagtcagacgtccgcaaaacgcctgctcagctggagaaggaggcaaaggaacaggatttcaatgacaaaatggaagatttgattaggcggtttaagaacacttcagatcaacaagtgagcttttcacgtaaatcttattcgaacgctcagttcgacgcgacttgcaaattggccaaggaacacaacctgaagctaactttgtctcccatccaagaggatgttctgacattgtctaagccggatgttaagttcgcttgagcttactaagaagccccagtatttcatatttcatatcttactcaaaaaaaaaaacataccaaacatgaaggtaatttagttccaagttctagaagagcagtatcattagttatttcgatattagcaacatgaatatcgtaagcccagacgaatgttaacgttttttgttatttagagcaacgtagaccttaagttgttaaaaaccacaataaaagtaatgcacggcagctacat

SEQ ID NO: 9579 - protein, 455 aa, DROSOPHILA
MEENFEPYTPQLLKNPLSYSDLVKKGVEFEVDNSQQNHARDLGLDSDSDSDYEDALDVDGEELRSPWTYSFDELRALMSEIDENIYKRITRTGHVDREAVPNKARVSVRYSGYWEGETAPFDSSLLRGSKFVFETGQGTVVEGLEVAVRSMRPYEQAEFIISYKLLFGELGCPPRIKPKADALFKVEVIDYSLIGDAKGIDAIPQEDRDKFCVVYPKAVDLHLHGKDSVKLGRYQSAATAFERAVSSLNYCRMANDEEERKQTELLTTLNQNLMIVYNKMNKPKRACIMMKALRHLTMGNPSCKALFQEGRALAALGEYNLARNAYLQAQAKQPANKEISDEIISMNKRISKYEEASRDIWARAFSLKNSKSDVRKTPAQLEKEAKEQDFNDKMEDLIRRFKNTSDQQVSFSRKSYSNAQFDATCKLAKEHNLKLTLSPIQEDVLTLSKPDVKFA

SEQ ID NO: 9580 - DNA, 6041 bp, DROSOPHILA
tttatcggaatggtcagatcggaatttaaaaaaaaaaactttaatttctccccaactcaaattgaaacacacaaacaaatgaatgtacttaaaccctttttttttgctagcgagtatgcgatcaaaactagagaaacatatgtacgttttttcccttataattgatggcaatctggtcccaataaatccttctcacccatttcgcgcctgctaattgccaaacaaaatgcaataattcaacccaaaagcacgctttcttttcctagcacaaatacaatacccctttaacggccgcaatttccctttttcacccttttgtttgccaggtcacccgaaaagttttaccgagcagggttgtcgcatgaccccccgcaacccacaaccacagcagcaatcgctttttattctctttttatatgattgtttcatatttatgaggattatatggctgatgctgagtgctgagaatcagagaaaaattgagttggacgtgtggtaatttatttttcggctaaggggacggacttgtagttaactgttagttttccgagctcaagatcgcacagattataaagaatttactgtgcaatactaattaaatttatctttatcattattttacttaaacggaatttgtataagccaaaaaacaaaatttattaataatctccaactaaaaatgtgtatcaatgaaattattttcttatggaattaaatttcaatagtttatgcccgcctttgtatttaacatctaaacattagaattaaataaagtatttaaaaaaaaatttagcgtataaaaagcatggattgattccaagtgcattttacgaatttgcattgaatcacgataataatattcacttgtaatacttaattaaataatttaattcggaacccatattaatttaccgagttcgaggcgggttggcagtccgattgcatgacgtagcaacgccgccactttccagcactggccgattgccagccaaaatggcgcccgcctgctatcgcattgctcgagcagatatcggttcggcagcgcatcacacacacaacgcgaaaaaaaaaagaaaaatacgggtggcctgcaagcgaatatctccgaaattcattgaatcccgacgccgagatttgtgctccgatccgagaaacccattagcttccgtgcaccgtccgcccaagccagcaaaataaccaagttcaacatacgcctggacaacataatgtcgaagaataaaaaactgtcgctgtcgggcggcgatacgacggagaaatttatttacaaacccaaggatctgatatggtaagccgggaccgtggactcatcaatatattcgctgtattctcagctgcgctgcgccgtgaagaaacaagaaaaaaaaaaaaacgagagatgaaaatcaaagcaaacacctaacctcaattgcgcaccgttggcgctcggaaaaaaaaatatgaagaaaaaaagagccagtgaagtgtgcataaaaaagcaattagcgctgcctttttgacagccacgcagcgcagtatccatgtagctccatccgaatgacgaccataattccggagctacgtgcgtggattccgggcgcgcgacgtcgacttcgctgcgttggcgcttttttcgcgcgcgcgcccttttttcttgcttttcctccttgcggccaatatgagttttccctgttctgatagcgcattttctttgcagggccaaaatgaagggcttcactccgtggccaggaatggtaagcattgcagttggcgatcggaatgtttacgccgcgtcgacgtcgcgtcgctgccgccttctctgctgccatgttgttgtgtttgttttcgactgtacttttcgattcaacgctgccggcttcgctgccgccgctctgcccgcagccacgcacttgcacacattgccccattgccgttgtggttgttgttgttgccgctgtgctgttgtcgctgccggcggaggaaatggtctcttccatggagccgctatcgggggccacgagcagcagcttttgatcgtgtgtacagccgctggaaagcagcatgtgcactcggaggagggggagtgacgcgcggcaggcgtggagtttgaacacagacgttgccaaggatatcagttcccagtttcgttattctatgccgttcaaaaggagttttgttaatatattaacttttatttgacattaacattctcatcggtaatcttgtgatataccaatcggttctttagagttttgtgaaatgtgctaatgatagtgaatcacctcagctaaggttttatcaaatcaaattggttttgtgcaagttgctagaaaaatgaggatatatttttaaatccttataattcctagctcaaatgtaaagttaaagagtggttttcgattgaaattggaagtgaaaaagcaacatttgcatatgttttgtttcgtgcgtgataaagtcttgtaaatgggttatcacagaatagattagttcgagggaattcataggcacatccttatagagtaaaatgcattgtctgcttaaaatgtttctgaagactttaaagatatgatgtggtggaagctaatgttgatttctctccttagattgtcgatcctccacttgatctgctcagccagcagcgtcgggcgaataccaaatgcgtgtttttctttggatctaggaatttgtaagtaaaatgcacgccaaccccaaaaagcgcctgtaataacatgggtaatatttaacagtgcctggattgaggagaacaacatcaagcccttcgaaggaccgtggaaggaggaactggccaaggtgagcaagcccgctgctttccgacacgccatgacggatatcgaaaagtacatcgacgaccccgccgaggtggacgagcaggtgaacaaaagctgcggtgcgccgaatcacgcaaccgaggctgattttgacaagatccgggatggcctggacagcgaggagattgtgggagaggaagcaactgccgatggcaacaatggagtggtggcccatgtggtgggcagccccgatgagggcgatggcttggatgtggaaatcaatgcagattcatcagcgtcaccagtcacgtcgccggcggtcacaacgaaggcagctggcaagcggacgccgaaagcaaagtccgtggccgctacatcggtcaagtcgacaaagggatcggcaaaatcagcacagaaacggcgtacctctgcccaacagtcgcccagtgggccatcgaatgccaagcgaggcaagcgtgatgtttccggggaggcattgcaggacgcggatgaagccagctccacgcccactggcagacgtcgggtcgagactgacgcactcttggcctcaatcgctgccaagcgtgcaccgaatgcaattgctctgcttgaccgaccggttgtcacgcggccagaggcccaagtcatcgacatgagctcgcgctccaacacactggccgatcgcgatatcgtgccttcagagcagaccttcggcttcctgggtcttggaatgatgggatccaccatagtcaaggatttgatctacacgggtcacaaggttgtggtctggaaccgcaccattgacaaggtaaagttttacgatagcaagttcacacatgaatcctacaacaatctcgttttgtagtgccaaccgtttgccgaagccggcgctgaggttaaggacactcccatggatgttgtggaagctgccgacgttatcttttgctgtgtgtccgatccaaagggcgccaaggatgtaagtcataaaaggtttcatttatatacatatttaatttgggaaatgcctaaaacacaacgtggttaacaaaacttaaattttggccttggggttcctataaaattcaaatgactcatccgcgcttgttaacttaaaaagtacatatgaatgaaagcacgcagtttaaaatgacgattttctgacgctctctttgcaaagcgatcttccttacactgtataaaattaaaatatattagaatacaaaataattgtgcaactgggagggatggcgtaatttaacattcttcttatttatgcattcgttttattcgatgtttagctcgtatttggcaactgcggcgttctgcagttgaaggacttgaacaataaggcctacgttgaaatgtctacaattgatccggacacatcgttggacattggcgagggcatcaagcagtgcaacggtcgctatcttgaggcacaaattcacggctctcggcaggaggctgccgaaggcatgctcatcattctcgccggtggagatcgttcagtgttcgaggagtgccactcgtgcttcaagaccattgccaagaacaccttcttcttggggagtaagtacagcctgcactgctgaccatttcctttgaaacaatttattaaaatatgtcgtttgttcacatctagcagatatcggtaacgcctgcaaagtaaacctaattttgcaaaccatcttgggagtgagtctggtcgggttggctgaggcgttagcacttggtaggttttattgtatattgttagcagtaagcagccttaactaattgatctttttttttattgcttttgcagctgatcggttctcgatctctctgaacgacatcatagacattttcgatttgacttcaatgaaatcacccatgctgctggctaagggcaaaggtatggatagcaccgtggctatttcctagtgtttatcttatcctattttgaattcctttgcagaaatggccaagggtgacttcaatccccagcagcctttgagccacatgcaacgcgacttgcgcttggtgttaaacatggctgagaacctggaccagtccatgcccgtcaccagcatcaccaacgaggtgttcaagcacaccaagcgcttgggctacagtgaacacgactcgagcgccgtattcgtaagatccagattttaacatttagttaacacgactaacgtttaaactatgttttatcaattagtttaaagcgtacaccgaacagaacgacagaaccgacaaacgactgacttaaaaaaaaaaaactaaacaggacagtaatagaaacgcataaccctcacttattcacccaccaatccaaactgacagaggcgttcgttcacaaggagttctcctgcccttgtgattggcagcgccaccaccccaaccttctgcatcttccccaatcgccccatatgcaaagcgtttaatgcaatatgtctacgattcgccgggaatcgcagaaccgtgtcgtcctgctttcaacgcaggagccactgaagagcgcttgggtgagtgtgttcaacagctggcggatgaagagcacaatctttccgggatcacttcaatcaagtttagagtttttttgtattttattctttgacgggtgaaacgcaatccccagagaggagggaggaggccagggcgccgtgtttccgattttatatgtgtaaggttttgctttccaaatatcatttttacgcatgtccatacataacttgtaagtgtatagaatactgcatccgaataaaatgtacaaagcatacttgtgaaagacaacgccgattttgagaaaccgagcgaagtatggaaccctccaatgtgtgtcgatccaacctcccagcctcccactttttgtgcatttactccagtcctaaaattgtatacatttaaaatcccctttttttctatgagtaaatagtaggctaatcgatcatactgcgtagaatggcaaacatatttggagtgacggtaacgatagattggtttagttttagccatctctccccatcatctgtcactgcaacaaacgagacacaacctaaaacggaaaaaacggtacagaacgcaccacaaccgatacgcaaacgatacgaaaacgtaaactacacaacaaccggaagaaaacaaaatagagtaaactttgatcgaaccctttgcgtgggtcgctattaataataataataagaatatataataaataatatattttacttattatttagtctgtattttgttgtaaaacaaagatta

SEQ ID NO: 9581 - DNA, 2123 bp, DROSOPHILA
ccgcctgctatcgcattgctcgagcagatatcggttcggcagcgcatcacacacacaacgcgaaaaaaaaaagaaaaatacgggtggcctgcaagcgaatatctccgaaattcattgaatcccgacgccgagatttgtgctccgatccgagaaacccattagcttccgtgcaccgtccgcccaagccagcaaaataaccaagttcaacatacgcctggacaacataatgtcgaagaataaaaaactgtcgctgtcgggcggcgatacgacggagaaatttatttacaaacccaaggatctgatatgatgaagggcttcactccgtggccaggaatgattgtcgatcctccacttgatctgctcagccagcagcgtcgggcgaataccaaatgcgtgtttttctttggatctaggaattttgcctggattgaggagaacaacatcaagcccttcgaaggaccgtggaaggaggaactggccaaggtgagcaagcccgctgctttccgacacgccatgacggatatcgaaaagtacatcgacgaccccgccgaggtggacgagcaggtgaacaaaagctgcggtgcgccgaatcacgcaaccgaggctgattttgacaagatccgggatggcctggacagcgaggagattgtgggagaggaagcaactgccgatggcaacaatggagtggtggcccatgtggtgggcagccccgatgagggcgatggcttggatgtggaaatcaatgcagattcatcagcgtcaccagtcacgtcgccggcggtcacaacgaaggcagctggcaagcggacgccgaaagcaaagtccgtggccgctacatcggtcaagtcgacaaagggatcggcaaaatcagcacagaaacggcgtacctctgcccaacagtcgcccagtgggccatcgaatgccaagcgaggcaagcgtgatgtttccggggaggcattgcaggacgcggatgaagccagctccacgcccactggcagacgtcgggtcgagactgacgcactcttggcctcaatcgctgccaagcgtgcaccgaatgcaattgctctgcttgaccgaccggttgtcacgcggccagaggcccaagtcatcgacatgagctcgcgctccaacacactggccgatcgcgatatcgtgccttcagagcagaccttcggcttcctgggtcttggaatgatgggatccaccatagtcaaggatttgatctacacgggtcacaaggttgtggtctggaaccgcaccattgacaagtgccaaccgtttgccgaagccggcgctgaggttaaggacactcccatggatgttgtggaagctgccgacgttatcttttgctgtgtgtccgatccaaagggcgccaaggatctcgtatttggcaactgcggcgttctgcagttgaaggacttgaacaataaggcctacgttgaaatgtctacaattgatccggacacatcgttggacattggcgagggcatcaagcagtgcaacggtcgctatcttgaggcacaaattcacggctctcggcaggaggctgccgaaggcatgctcatcattctcgccggtggagatcgttcagtgttcgaggagtgccactcgtgcttcaagaccattgccaagaacaccttcttcttggggaatatcggtaacgcctgcaaagtaaacctaattttgcaaaccatcttgggagtgagtctggtcgggttggctgaggcgttagcacttgctgatcggttctcgatctctctgaacgacatcatagacattttcgatttgacttcaatgaaatcacccatgctgctggctaagggcaaagaaatggccaagggtgacttcaatccccagcagcctttgagccacatgcaacgcgacttgcgcttggtgttaaacatggctgagaacctggaccagtccatgcccgtcaccagcatcaccaacgaggtgttcaagcacaccaagcgcttgggctacagtgaacacgactcgagcgccgtattcgtaagatccagattttaacatttagttaacacgactaacgtttaaactatgttttatcaattagtttaaagcgtacaccgaacagaacgacagaaccgacaaacgactgactt

SEQ ID NO: 9582 - protein, 574 aa, DROSOPHILA
MMKGFTPWPGMIVDPPLDLLSQQRRANTKCVFFFGSRNFAWIEENNIKPFEGPWKEELAKVSKPAAFRHAMTDIEKYIDDPAEVDEQVNKSCGAPNHATEADFDKIRDGLDSEEIVGEEATADGNNGVVAHVVGSPDEGDGLDVEINADSSASPVTSPAVTTKAAGKRTPKAKSVAATSVKSTKGSAKSAQKRRTSAQQSPSGPSNAKRGKRDVSGEALQDADEASSTPTGRRRVETDALLASIAAKRAPNAIALLDRPVVTRPEAQVIDMSSRSNTLADRDIVPSEQTFGFLGLGMMGSTIVKDLIYTGHKVVVWNRTIDKCQPFAEAGAEVKDTPMDVVEAADVIFCCVSDPKGAKDLVFGNCGVLQLKDLNNKAYVEMSTIDPDTSLDIGEGIKQCNGRYLEAQIHGSRQEAAEGMLIILAGGDRSVFEECHSCFKTIAKNTFFLGNIGNACKVNLILQTILGVSLVGLAEALALADRFSISLNDIIDIFDLTSMKSPMLLAKGKEMAKGDFNPQQPLSHMQRDLRLVLNMAENLDQSMPVTSITNEVFKHTKRLGYSEHDSSAVFVRSRF

SEQ ID NO: 9583 - DNA, 4287 bp, DROSOPHILA
ctggtggctggcacgctggtgggcgggctgttgtaggtgcctagttacagttgctgccagccgcagtcgtatccggatgcggattcgactttgccgccatttaagcgacgtgcaatgagcagctgcagcgtctgcatcgccgcaaatgccattattgcattgcattgctttagccggctccgttcggtttcggtcttcggtcttttggtgtgccgcaagtaaattgctatgaaacgcccaccacacatacacggaaacactctcaagcgcgcacacatacatgcacacagggaaagcagactgcatgcaagacctcctggcagttgcaatcatttcggcatgaatcacgtttgatacgcacgaattaccttttatgcgaaattgaaattataatttgtgcacggccttgtaaatgctacgtatatagccagccccttgcctcctcctcctaccacccactttgcccctcttttactttactttactttacacaaacgcagccaaggaaaatcaaagagcagcagcaacaaaatcgcctgctaaccacacggagcaactttccaacgcaattgttttccacgttccttttcattttttcgttgctgcccaagcactccaaaaaattattattgcactaacatttcaatagtattaataatgaaaaaacattttaatcatttaatagaaataatttcttcctaaatggttaggtgtttaatcttgttcgataggattgcgagtaatttaaggataattgtatttttccaagtgcttgctacttttgttgcttctgccttaacactttctgagctgtttgtttataaattttgggctgggatctttactcaaaaaccaaaagcagtctttgagggcgacttagcagccgccgtaagcggcttaagcggctagacaagcccgcgtaaatggaatgggctcttagctaattgcgctctccatttaatttggctcgttgcaggaggcggaaaccgccatcactgcaatgaatggccaatggctgggctcgcgctcgatacgcacaaattgggccacacgaaagccgccggcaaccaaggcagacagtgagtatcccatcccatcagagacaccaatccaaaccaccaagccatcccgcatctcaatgtcacatctcgctcttccacagtgaacgccaagccgctgacctttgacgaggtctacaaccagagtagccccaccaattgcactgtctactgtggcggcatcaacggagccctctctggcttcctcaacgaggagattctgcagaagaccttttcgccgtatggcacaatacaggagatacgggtcttcaaggacaaaggatacgcattcgtgcggtaagttgacaggaaacgatatttaaatgtatgaaaatttcatatatgaagtaagattaagaaatctactgcataccatgagtaattaacatctaaaagatacttcatttactatttaaaacattttcatttgcttgttaaacatatgtgttattctcattagaatttgatattttgtgtgctcccatatttcttaagaacctcacggtagaatgagcgatcaggcaatcgatctaataatggagcaatcttcccccattttactgtgcccctataagtgtgctacacattaaccctttgtgggccgccattttgatttgccgcctgcatgggtgtgcgtgtgctgcggtctgcggtgtcatcggtgtgtttccattgtcatcgtcaccgatgcgcacacaccacgccatatatatgtgtgcgtggcccccatccaagccgctcgccgttaataaatcaacaacacttttacactcgacaacaataacaaggaatgcaacaacagcaacatcgaggggcaaatttgaagttacaaacagaacaatgaaccgcaataacagcgacgacaacgatggcacggcaaagagtaaaaaccaaaaataaaaaaaaaaagtgggggaataaacccccagccaaggagtcggtggtgcaggaagagcagtggtggctggtggctgggtaccggtggtgctggtggtgttggcggtggagatcgcagctgccgtcacgaatgctgatagggttttaatggcagccgttggcccacgacggactgagttcaccccaccgcaaccaaaagggcagatacggataggattcgcacactgaacaaaaatatgggagacctgaaatagtaatacaaataaattacttttacaaaacagtaatgttttattcaaaatagtttagacgagaaaaattatatgtttcattctgaaaactctttacttttctgcatattagtagccttttttgtcaagtgtatgtgtgaagtgtgatgagggcggaggggtgggcaacaaacgcattgcagttactggccatgtccatgggcgccttttgtgcactgctccaaaactcatttgtgtgttgcaaacgtgatgcaaaaaaaagcgacgaaggggaaaagaaagtcgaggagaaagtgagagaacgggaggtggcaggaggcaggaggcggtgcgcagcggaggcattgtttggcattttgtaacataatgagctcggggactacaagtgcagcagcagctgtggcagagttgctgcatcattataaccaatccagcaacaacggaataattccacagacgcttgtaccacttttgcgctttgttgccgcagcgggttaagcggaaattaaaccaggccaatctgctgcctgctttcaaaaagcaaaaatccagtaatgaaaatgctaaagaaatatttgatggctagttataaattaaatagtttaaatgcttgttttcaaatttaaatttatattattattcggcttatttccaacattttacgacagtaactatacgaatttaaaccagatatattaagaataaatctgtgctctcacccctcagtttctccaccaaggaggcggccacccacgccatcgtcgccgttaacaacacggagatcaaccagcagccggtgaagtgtgcatggggcaaggagagtggtgaccccaaccacatgtcggccattgccggtggagccttggcccagggattccccttcggctcggcggcagcggcggccgcagcggctgcctacggacagcaggtggccggatactggtacccgccggcacccacatatccggcggcagcccccgccagtgcccttcagcccggacagttcctgcagggcatgcagggattcacctacggtcaattcgccggctaccagcaggcgggatacatggggtgagtttgagatccagatcggggcagcaaagttgtgtttaagctgtagcaaataattacatgaatactttttaatcatttgtgttagttatacgctttatttatgccctctatattctttgtcgcttcagaatgggcgtccagctgcccggcacctggcagagtgtaccgccccaacctcagctggccagtgcagcggcagccactgcgccgcagatcacacagagcgtgggcagcgcattgccacaggcggccggagtggtcgcatatccgatgcagcagttccaggtcagtccacaggtgagtgttcgaggaattcgatgatgaggcggtgcctaacgattgtacatcgtttagctggcggaggacgagtggctggcgcccagtctgctcgtgtagctgccatgagggatggccatgtatcccacacagcagcaccagcagcagcaacaacagcagcagcagcagcagatgctgcagcagcaacatgagcagcagacgtccggcgaatatgtcaaggagccgccctaccaaacgcagcagctgcagcagctgcagcatcaccaactgcagcagcagcattcacacaaccagcatcagcagcagcagcactatatccaccaactgtactatccatcgcactgggtgcagcagcaacagcaacagcagcagcaggtagcaaacaacgagcagcagccgcagcaacagcagcaacaaccaccagtggctcaggtttatggcatgtccgaagtgtagaaaggtgcagcattacacgtaaacgaaatcttaccgtagattaagtatacgccatggcgacagcagcaaccacacaggccagaaagtgcaatagtcgaaatccaaagttgatctaatcaatggttcgaggaagtcacctctgtcaaaaaatattaataatgataacacgagaagatctaaatgtattttagtaggtataaacatatagacaagtatgtaggtatgtatataccagagtaagaatagagtgggtg

SEQ ID NO: 9584 - DNA, 627 bp, DROSOPHILA
atgaatggccaatggctgggctcgcgctcgatacgcacaaattgggccacacgaaagccgccggcaaccaaggcagacatgaacgccaagccgctgacctttgacgaggtctacaaccagagtagccccaccaattgcactgtctactgtggcggcatcaacggagccctctctggcttcctcaacgaggagattctgcagaagaccttttcgccgtatggcacaatacaggagatacgggtcttcaaggacaaaggatacgcattcgtgcgtttctccaccaaggaggcggccacccacgccatcgtcgccgttaacaacacggagatcaaccagcagccggtgaagtgtgcatggggcaaggagagtggtgaccccaaccacatgtcggccattgccggtggagccttggcccagggattccccttcggctcggcggcagcggcggccgcagcggctgcctacggacagcaggtggccggatactggtacccgccggcacccacatatccggcggcagcccccgccagtgcccttcagcccggacagttcctgcagggcatgcagggattcacctacggtcaattcgccggctaccagcaggcgggatacatggggtgagtttga

SEQ ID NO: 9585 - protein, 206 aa, DROSOPHILA
MNGQWLGSRSIRTNWATRKPPATKADMNAKPLTFDEVYNQSSPTNCTVYCGGINGALSGFLNEEILQKTFSPYGTIQEIRVFKDKGYAFVRFSTKEAATHAIVAVNNTEINQQPVKCAWGKESGDPNHMSAIAGGALAQGFPFGSAAAAAAAAAYGQQVAGYWYPPAPTYPAAAPASALQPGQFLQGMQGFTYGQFAGYQQAGYMG

SEQ ID NO: 9586 - DNA, 4074 bp, DROSOPHILA
aatattctttttttcttgttacagtttactggctcatgggtcaggccatcaacaagacgcagatcagcaaggcatctaattatggatcctccaagtcggtcgcaaagtaactttcgaattcgcatttagtttcgattgtcgtcgaactcaattatctacaaatgactttgtaaaaggcagtcctctcacaaatctctctgctaaatggatcaattcgtgattcctatccggacgatttaaagtgttttgcatgtttttcttgtctaagtttatagttacgaagtaactcccgcacactggagccatcaatttgcgtacgtagttggtagttgtacacctaagtggaaatttaattgtttgatcaattgtattttggcgagcattgcaataattaaattaaacagaacgtgagagcgtgagtttgttgttgttgttttttgataaggcgtaaggtaagcagtgcgctgataagggctgctgataagtgtggacatgcaagcagtgcacctaaagagtgaccttaacacaaaataccaacagtatttctaaactggatacttgaaaattacacacatacgtgtgtaaaataaatgtaaaatttcgaatacattgtttttgagattcccagaaatgctttcaaaagttaccttttgaacaggaaggaaatgagcaataagcaaagcatattatccaaatatttgtgtttatcagcattcttcctacacgttcgtttctttatcagttgtaacgatcagaagcagcacacgttccgttagttcgactgcttgcccttggctatatgatcaatacaaccacacgccaagcataaaatcgcctttattcgccgataagcagtgtcgcccattccaattgactgataacaggtgattaaaagtgttagttgtgggtttctgggttgtactatcgacgagatccatatcactaggggctcgggccgcctagaagagtcactttcattcagtcgaattctactggttggtagaacaagttgcaacttcctggtctctaattgttaagattccgcttagataggtgagtgagtgtgtgtgtaaatgagaaagtggactgtcgcaaagtgaaactgaaacgtgttgagttcaaaaactagttgtacttatggcattgtcattatcattgcttctaccaaatttgataaaacaaaatgaggattgtacagcttagttcgattttcctcgtcgaactatgcaataaaaaatatcttagttaattatgaaatgcgttgtactgttttcccgatccaacgataagaattcaaattactagtgtctactgtaccaataccgtgtgttgcgcgtgggtgtgtgtgcgtttacggtactataatttaagcatttcaattttcatgacacattgggagcaaagtttgagtactggccatataataaaatgtcgatatcgcgcgctggacatatttatgaactgcattgcagacatgactttcgattacgtaaacgtttctccaacggactgaatttattgagttgcgtctattcttagcctaggatgtcgcatctccggggtttggggcgactgctgatcgccgtgaccttcttcacatgcggattcttcgtcaacattggccagctcctgctgattctcctcgtgaggcccttcgataagaagctatcccgcagtctggcctactacctgcactactccttctattgcagtaagtaaccatcatattaatatagattatcatatcattatgagtataaacgtttcacatttcattcacattaagtatagtgtagttttcagcacacttcctgttttcctgattagattaggtatatgcaaggtcttcttttgtataaatcacttagtttttacatttgatgattaaatgaaataacgtaaaagtggtactttttgataatttaaaaactatcctcacactttagtccttgtctgtgtggcggaatggtatgcgggcagcaagctgagggtgtacatcgatccccaggacgagcagaagttcttcggcaaggagcatggactgctcctgatgaaccacacgtacgagatcgactggctgaccgcctggatgatcaccgacaagctgggcaatctgggaggcaccaaggcgtatgccaagaagatgctgcgctatgttccggtcctgggatgggtctggtggatggccgagttcatcttccttgaccgcaacttcgagaaggacaaggtggtgatcaagacgcagctgaaggaggtcttctcctatccggatcccgtgtggctactgctgaacgcggagggcacccgtttcacacccgccaaacacgagctgtcagtcaagttcgccgaggagcgaggtcttcccctcctcaagcaccatctgattccgcgcactaagggattcacgaccagtctgcccaccatgcgtggcatctgtcctgccatctacgacatcaatctggccttcaagaagaatgccgaggtgagaacttaagatctcatatatatgtatatatattttaaattacattttcgaacttgaattaacttacagccaaagcccaccatgctgtcccagttgaacggagagcccgtggaaccgtacatgtacattcgccgagtgccactggacgtggttcccgatgacgagaaggaggccgccgcctggatgcaggacttctttgcggaaaaggacaagatcatcgacagcttccacgagaccggcagcttctttaagaattccggagtcaaggaggtgcccgagaaaatctacaagccgcgcctgagcacgctcctcaacttcttgggctgggccacctttgccgtcctgtgcattctgcactacttggtcacctcgctggttgccggcaactggtttggcttcatcacggttctttccattttgggaggatgtaagttgagaaattctagtttcgaggatatgtgcttaactttacaacttgtacttccagtctatagcctcatggaatacgctgtgaatgcttcgaagatcagcaaagcctctgcgtatggagcagctgctgccaagaaatagattttcatacctgagttttataaactctgcaacagttttggaatatacgacctatggactaataactcaactgcactgaccatagaaatattatgtacattgaatatgtacgataaaccattgtagttaactgaataaaataacattttatgcgaaattcacttacaggaactaaatgattcttagaggcaaatatttaatatgtgtttgtacatccaatcgaaaaaatttctcacaaattcacttacaagaactaaaagtttctttgaggcaaatatttaatgtgtttgtacattaaatcgaaaagatttctcagtcttctaccacttatataaacgtcgtagttacaaagtttaaacttcttgtacttttgtttttctaattagaacatgtgttgtatattttagccatttatacaataaatgctataaaattaggttatcgaatttcaaatatagatagtgatgtccaaaacgataactgcttatcgcaatcagctgagagcgcctagtgcgacccttcgtgtaagcagtgcagcaagacattcaacgttttcagccagctggattcagtattccgccgctcgtcacctgcggtcatactgattgcaacttcccaaatttcttacaataatccaatgaaaattaaaaaacatattttcgtacctttaatgcaataatatgtgcattttgaaggtgagtcagtgcagcaccagtgccaaaaattgcattaaaccaagtttgtgcgaaatccacgaagcagagtgaaaagtgaaacgtaacgaaaaaaacgttgagagagattttcgtgtagttcattgtttttcctgggggattacttggtttcaaggacctttcactggcctgtggccctacttttcgaaggtgccattccttgggttggcacaacctataggatactgcccgaaattccctttgttcgcgtctcgaaagaaagcggatgcttgatgacgttgaaagcgagttacgtttgtgtcccccataaaggcagttatgcgt

SEQ ID NO: 9587 - DNA, 1215 bp, DROSOPHILA
tagaacaagttgcaacttcctggtctctaattgttaagattccgcttagatagatgtcgcatctccggggtttggggcgactgctgatcgccgtgaccttcttcacatgcggattcttcgtcaacattggccagctcctgctgattctcctcgtgaggcccttcgataagaagctatcccgcagtctggcctactacctgcactactccttctattgcatccttgtctgtgtggcggaatggtatgcgggcagcaagctgagggtgtacatcgatccccaggacgagcagaagttcttcggcaaggagcatggactgctcctgatgaaccacacgtacgagatcgactggctgaccgcctggatgatcaccgacaagctgggcaatctgggaggcaccaaggcgtatgccaagaagatgctgcgctatgttccggtcctgggatgggtctggtggatggccgagttcatcttccttgaccgcaacttcgagaaggacaaggtggtgatcaagacgcagctgaaggaggtcttctcctatccggatcccgtgtggctactgctgaacgcggagggcacccgtttcacacccgccaaacacgagctgtcagtcaagttcgccgaggagcgaggtcttcccctcctcaagcaccatctgattccgcgcactaagggattcacgaccagtctgcccaccatgcgtggcatctgtcctgccatctacgacatcaatctggccttcaagaagaatgccgagccaaagcccaccatgctgtcccagttgaacggagagcccgtggaaccgtacatgtacattcgccgagtgccactggacgtggttcccgatgacgagaaggaggccgccgcctggatgcaggacttctttgcggaaaaggacaagatcatcgacagcttccacgagaccggcagcttctttaagaattccggagtcaaggaggtgcccgagaaaatctacaagccgcgcctgagcacgctcctcaacttcttgggctgggccacctttgccgtcctgtgcattctgcactacttggtcacctcgctggttgccggcaactggtttggcttcatcacggttctttccattttgggaggattctatagcctcatggaatacgctgtgaatgcttcgaagatcagcaaagcctctgcgtatggagcagctgctgccaagaaatagattttcatacctgagtttt

SEQ ID NO: 9588 - protein, 380 aa, DROSOPHILA
MSHLRGLGRLLIAVTFFTCGFFVNIGQLLLILLVRPFDKKLSRSLAYYLHYSFYCILVCVAEWYAGSKLRVYIDPQDEQKFFGKEHGLLLMNHTYEIDWLTAWMITDKLGNLGGTKAYAKKMLRYVPVLGWVWWMAEFIFLDRNFEKDKVVIKTQLKEVFSYPDPVWLLLNAEGTRFTPAKHELSVKFAEERGLPLLKHHLIPRTKGFTTSLPTMRGICPAIYDINLAFKKNAEPKPTMLSQLNGEPVEPYMYIRRVPLDVVPDDEKEAAAWMQDFFAEKDKIIDSFHETGSFFKNSGVKEVPEKIYKPRLSTLLNFLGWATFAVLCILHYLVTSLVAGNWFGFITVLSILGGFYSLMEYAVNASKISKASAYGAAAAKK

SEQ ID NO: 9589 - DNA, 3233 bp, DROSOPHILA
aagaagctcggttcgtcacctaccggcatgaatattcaagccaggctagttgcgcctattaacttgctgcttgctggccgaagttgccgatcgatcgagtcattgaacctcaacggagtgtccattactttgatcttagatctgtcaaaactgggttatgtttgcacactgtttttgagggaactgagagggctgactggctggctatctcattatcatcgccataaacgaagatgacaatcgatagtaacgatgatgatgatgatgatgacgatgacgatgatgtcaaaaagtgaaaagaggtaacaagtactgtagtgtgagtgattgagttgacaagaccccaattagagccaaattgcacaactaaaattgggactcagcttcgataaatgcagttccagctgagttctattcgtagtcgaaagttgtttaaaaagtatatatgccaatcaattgattgccacatttacacatttatctgataaggtaatttaatttgaaataaattggattttgaatgctgacatagttaaaagaaatataattaaagagggcaatggggaaatacctacatcattaacaccaaagaggaaacaataattatctaagttgaaaactcttagaatcaatagcttgatagctgaaaatggaaatgtcacaccattgcaagtttctggacaaagtcatactactcctttgtaagagtatacaaagctcttaagatcaaaatagcctaaatagattgccaagactttttcccactgatagagctattaaaaatatcatttccgtggctaaccaataatagagggactccaattgtttgcgatttcgccgtcagactgcaggtgcccccttgggccagcggagcgataaaaccaatcgatcatgattgttgacactggaacctggacaattgggtgcgataggggtgacaggtgagattgccggcgggccataaaaagccatccactgaccgttgtgacgactcagaacgatgaagaactgcattgcaagcgccctgctcctcctcgcggtcgttgcggccactcaagccgcttcggtggccacgcccacctgcggaggcactacctcctcgaagaacattaacctggtgaacccaacgaatcctccgcgggtttgcgagtaccatatcaaggcaaccagcaagtacgtttgccagctgagaatcgattgggccatgaccttggctcaacccacgctggaaaccgatgattccggcctgacctatgccgagtgcacccgtgattacttcgaggtcgatggactgaaactgtgcggtaccgaggtgtggcagcacatctatgtgcccttcaacgccaccgatggtgagtctctggtggatctggtcatcagtttggccgatcgtgctggagccagtggcttgcccaccgcctactgggacatgaccgtcacgcagctggagtgcccggccggagcatccgttcgctcgttggacctggaggacgatgtcaccattgagagtcgtgccagcaccatcaaggatggcttctttgttgccccgcccggctgtcggcagtacttccccgaggccaagggagctgtgaagtccttcaactacaacgatggcgatggcatctatccatctcgcatgaactacgccatctgcttccgtcgccaaaccgatactaagactctaacgtaagtgatagaatatctgcctctcgcatatacatatattaacttcacttgcacaattctcgaaaagcattcgcgcctatgacttcaacgtgggagatgtggtttccgcttccaccttgatgaccgatgagaactgctacagcagcgatagtaccaacgatctggatgccgattttctgatggtgccacaggcaacctttgaggatacccacaagcacgccacctacttctgtggctccattaagaaggatgtggtcatatcgagtaagtatcatagagctttttatgggacaaaagctcaggttacactagtgagcaaacttctggttaaatcagtttctatctattaaaaccgagattatttttgaaaaatttaattatagataaatctgttgttcgtatataatatttgatatttaaattaatattatttattattacccatttttcaggcaacaatcccggtcctttaatggttctgttcaacagcgacgacatctacaggcagaatgaggctggctttgcattcacctatgttgtgtcctaagctaaacaaagaatttgccaataaaagacgtttaaaagaaagatttgccgagtgtttactcaagcattagcgttgagcaatcaaagagatccgctcggggaacttacttggcaggtacaatcgcttgggaattttggggctttcgttttctattcccaccgcttgccctatcaattagagataattgccgacttatcagacctgacgcgatatcaacatttgtctgtgacaattaccagacaagcgatatattatctcaagaagccagactatctaggtgtgagacaatctatcaagcggttttcaaatttatcagattccaatctcagttatttgtgataatatcgacgtagataaaagttgttctaaggtaaaaggaaattctcaaaagccatgtactgaaatcgaattcatattcatttaatagcttcctgtgcgctaaaaggagtttcaaaagctttattggttgagagctttaataatatccttagccacaacagtacccatcattgtagctttatttaagttttaagcttccgaaaacgtaaatattgtctgactatcaacaagtgtttccaaagtattgttttgaggcctttccccttttcaaaaatatttacgtcgatagtatgaattaaaattagaatttcgatgctattaaagtgatgaatagcgattattaaactttggttttttttaatggcgccagtcatgtttatcaatggcagcatattctcataatctaaattttaattgtgtcgtcttggatcattattccttatcagtctcttcaaagacagcgcaacaagttgctagcaacatgaacagccctgtgcccaatctactgccgttcgtcgcagcgaaaagctctgctaaagctcggaaaactcattcttggaggccagcgcactgtgggtcggaaaccattttaattttgataaaaatgaaacccaataaagaataacatttcagtattctgttgtaagggttttctttctat

SEQ ID NO: 9590 - DNA, 978 bp, DROSOPHILA
atgaagaactgcattgcaagcgccctgctcctcctcgcggtcgttgcggccactcaagccgcttcggtggccacgcccacctgcggaggcactacctcctcgaagaacattaacctggtgaacccaacgaatcctccgcgggtttgcgagtaccatatcaaggcaaccagcaagtacgtttgccagctgagaatcgattgggccatgaccttggctcaacccacgctggaaaccgatgattccggcctgacctatgccgagtgcacccgtgattacttcgaggtcgatggactgaaactgtgcggtaccgaggtgtggcagcacatctatgtgcccttcaacgccaccgatggtgagtctctggtggatctggtcatcagtttggccgatcgtgctggagccagtggcttgcccaccgcctactgggacatgaccgtcacgcagctggagtgcccggccggagcatccgttcgctcgttggacctggaggacgatgtcaccattgagagtcgtgccagcaccatcaaggatggcttctttgttgccccgcccggctgtcggcagtacttccccgaggccaagggagctgtgaagtccttcaactacaacgatggcgatggcatctatccatctcgcatgaactacgccatctgcttccgtcgccaaaccgatactaagactctaaccattcgcgcctatgacttcaacgtgggagatgtggtttccgcttccaccttgatgaccgatgagaactgctacagcagcgatagtaccaacgatctggatgccgattttctgatggtgccacaggcaacctttgaggatacccacaagcacgccacctacttctgtggctccattaagaaggatgtggtcatatcgagcaacaatcccggtcctttaatggttctgttcaacagcgacgacatctacaggcagaatgaggctggctttgcattcacctatgttgtgtcctaa

SEQ ID NO: 9591 - protein, 325 aa, DROSOPHILA
MKNCIASALLLLAVVAATQAASVATPTCGGTTSSKNINLVNPTNPPRVCEYHIKATSKYVCQLRIDWAMTLAQPTLETDDSGLTYAECTRDYFEVDGLKLCGTEVWQHIYVPFNATDGESLVDLVISLADRAGASGLPTAYWDMTVTQLECPAGASVRSLDLEDDVTIESRASTIKDGFFVAPPGCRQYFPEAKGAVKSFNYNDGDGIYPSRMNYAICFRRQTDTKTLTIRAYDFNVGDVVSASTLMTDENCYSSDSTNDLDADFLMVPQATFEDTHKHATYFCGSIKKDVVISSNNPGPLMVLFNSDDIYRQNEAGFAFTYVVS

SEQ ID NO: 9592 - DNA, 3185 bp, DROSOPHILA
ggttgggatacggctcctccaaacacaagcggcagcaattgctcagctccaaagaagtagtactgtctgaaagtgagacttcatgggatacaagcttcacgggagcttctgcagttcgccttgctattgtaaaattaagcgtttggcatacttttgatgtttggggatccatctgtgcaaagcttattttgatcaaattgaaaagattactcagattacctaataaatacttctttgtttacagttgaaaatccccgctcttagccataaatgtgaagaaaaactaaacatagctgtgctagggttgccacctatttcacgagaggtctggcagcacttgggagcgctgaaatttttgagaactttttgcttcgtagttgttgtgatttctttgtacatcccctgaaaacgatgaagttacttgagcctcagacgaccattagtcctgaaccggacatactgcatccggacgacggtcaatacatatggctgccaatttccgtgctcgttggcattttcgttctggctgcactggtgcgttatcgccacagtctgtttgtttaagtggatgtacatttgtttaatttatgcatttgggtgtacacaggtctacgccatgtcacgtagtcgctgtcggaattcctgggattgcctaaagagcaggaaggctccgcgaagtggatacatcaatgtggatgaggaggattccgatgtgcccatggactgcggagatgaactgggagatcaaaggactactgctactctcctcactggtcgcctccacattcaggatgtcagtgagctcgtgacaatgtcccaatacaatcacagccctttttcttccacagggagcgaataacgcctccaatgcctagtgaatctcaaaagtcttccatacactttattgtccacgttgtcttcaaacggtggttgtcatcggtttagttactactgcaaactacgtgcctctactacaagtacaacgaaaataaccctaattttaatgatccgtactggtggcgccaaggattcgcgtcgtcaggtcgtagaagccaaagaagaatgcaccgcccagtgtgatccacagcacacgcggcacaaagccagcaaacagactgaaaagtaacatcgaagtacattaataaatgtaataaatagttttgtaaagttaatttgtgtttaaatattaggaccagcttgagttgcgtctaatatggaaataattacccgctgaagcctcgctccaggtaaatgccatgcaaaattcttcgggcactgcgacgtcggttgagactctccctttcagccagcataattcgggttttgaccacatcgagcggcgtagttaatcccgctgaaatgcctccagcgacagctccacaaagagccaccgaaaaaggagtggaatcgaagccggtcaggggagtccattgcagcttaaagtactcccagagcggaaactgtatcagactaaatggaatctcccgcatgatagtggaaccaaatcccctgtacagaccacgtttcaatccctcagtgcgataggcacgcagtagaatttgcaggccggactgtttgttgccctgcaatgtttgggagcgttgcttggcaatctccacgggaactcggatcaagcatgccaactattggatacagagattcttcagatctaaatacgaggtgctcagttttatatgaaatcctaccacttctgctgctgaagccgctgccatgtgaacatagggtgaatctttggtttgggtgaccgaactaaggaactgctttccgcactcgtaggtgcagaaaaacagggccgccgtgggagcacttcctgcagccgcaggagcgagtcctttgtagatgcccctgaatcctcctgcccgccaaaagcccagctcgctttgcagtcgggtcttcactgtatctatgggaaacagcgctatgtccactaccattccagccactcctcctgcctaaaactaattatttaagaactaacttttcatttaattttcatctacttacaacaagtgcatggaaaaattttaatttattgaccggctcttgcattttgattgccacggaccccgcggccgattccagacccaattccgctgccatgtcctagaaatgatgttggggcatccactttaagtcatcccgtcggagtattaactaaagttgttttagtaaacaaaaacataaaatgtggttgttaacgtaacagtcagctgctttttgctgatctggcaggtctgcagataacagctgcttggtgtagagttgccaagatgctgaaaccataacaaataaatatattctatgtaagatatatattatttggtcaaaagtgttacttaaaaaaaggatggtattgaaatgttagctttttcacaaaaacacataattataatacattttttttacaccaaagtaattattttaaaaccaataccatttacttgacaaccctgaaaagccgtggttctgggcaagagccagcagcaccgttttggccaagtggaataaaattggctgtgatttaactgatagtagaataccaactgcagcggtagaaaacaataatccaaggatcaaatcatggcccttcgcttgacccagagattgctgcagacgcagacgccgttcctcactcgcgtaagttttctcggccggaaaattggcccacaaaggcaaattacataatgcgcgcctgccagatcctattgatcgtacttatcgattcgaattgtagggctatcccttgctggtgaccaaggagaagaccgaggatgtggcccacaccaaatcggcgctgcagaagaaagtcacggtgagtgcaacctctggagctcacccccaattgaggttatagcatccgtatatatcttcgtgaacagggcaccgatattccctcggcacagtacggaggtcgtcatgccgtcaccatgctgccgggcggcggcattggtcctgaactgatgggctatgtgcgcgagatcttccggtattgcggtgcacccatcgatttcgaggtgatcgacatcgatccctccaccgagggcaacgatgatctggactatgccatcacatcgattaagaggaacggagtggcactcaagggcaacatcgagaccaagtcccaatccttgaccgaagtctcccgcaacgtggccatccgtaac

SEQ ID NO: 9593 - DNA, 958 bp, DROSOPHILA
acaactttagttaatactccgacgggatgacttaaagtggatgccccaacatcatttctaggacatggcagcggaattgggtctggaatcggccgcggggtccgtggcaatcaaaatgcaagagccggtcaataaattaaaatttttccatgcacttgttgcaggaggagtggctggaatggtagtggacatagcgctgtttcccatagatacagtgaagacccgactgcaaagcgagctgggcttttggcgggcaggaggattcaggggcatctacaaaggactcgctcctgcggctgcaggaagtgctcccacggcggccctgtttttctgcacctacgagtgcggaaagcagttccttagttcggtcacccaaaccaaagattcaccctatgttcacatggcagcggcttcagcagcagaagtgttggcatgcttgatccgagttcccgtggagattgccaagcaacgctcccaaacattgcagggcaacaaacagtccggcctgcaaattctactgcgtgcctatcgcactgagggattgaaacgtggtctgtacaggggatttggttccactatcatgcgggagattccatttagtctgatacagtttccgctctgggagtactttaagctgcaatggactcccctgaccggcttcgattccactcctttttcggtggctctttgtggagctgtcgctggaggcatttcagcgggattaactacgccgctcgatgtggtcaaaacccgaattatgctggctgaaagggagagtctcaaccgacgtcgcagtgcccgaagaattttgcatggcatttacctggagcgaggcttcagcggtctgtttgctggctttgtgccgcgtgtgctgtggatcacactgggcggtgcattcttctttggcttctacgacctgacgacgcgaatccttggcgccaccagtacggatcattaa

SEQ ID NO: 9594 - protein, 297 aa, DROSOPHILA
MAAELGLESAAGSVAIKMQEPVNKLKFFHALVAGGVAGMVVDIALFPIDTVKTRLQSELGFWRAGGFRGIYKGLAPAAAGSAPTAALFFCTYECGKQFLSSVTQTKDSPYVHMAAASAAEVLACLIRVPVEIAKQRSQTLQGNKQSGLQILLRAYRTEGLKRGLYRGFGSTIMREIPFSLIQFPLWEYFKLQWTPLTGFDSTPFSVALCGAVAGGISAGLTTPLDVVKTRIMLAERESLNRRRSARRILHGIYLERGFSGLFAGFVPRVLWITLGGAFFFGFYDLTTRILGATSTDH

SEQ ID NO: 9595 - DNA, 7803 bp, DROSOPHILA
tcgatgagccagatacggataccaccaccacggattgagatacaagtgacgatatggccaggggatacctacatgcgatatggccaatcgagtctgaatactacttgcatacgaatatggggccaacaaacatgcgacgcccagaacatgcaaacatcatctacaacaagcagtcaccgccccgccccctccccacatctacacacatctcaatgaaatgtttgacgaaggctgcgaatatgtattcaactcgaactcaaataagtgcatgtagaagtttcctcgatcggaattataatgtgcatctgcagctcatagcaacacgtataattttctaactgcacagcgagaaaattgtggtcagctaattgtttgtgaaagtgtgcttcctaactaatctagttggcaaggaaaaaaaaactgtaatatcctatcacggatggtctttttaatctacataatcatagtaaaatcaataacaactgctgtattataatatgtgtatattcctatgtacacttgcctctcgtgtggcccaaaaaaaaaaaaaaaattgttcaaaccgtgttgttgacaaggcaagtttattgttgctgctgcggctgtgatgttgctgctgcggctgctgctgctgttaaaattaaactctctgtgctatttagttgtctcgctgccgcttctgaaggtgaatttatggtgcacacatggtgcccgacgactactacctctagttttcgctgcctgtgtatgggtgcgtatctgtgtgagcagcctgcctgcgctgagttttcctcgtgtgacatatgtcggctgtgccagaaatagattcgtttcgaaatgtagggggcaattctttacgttattcttttttttgttctttttccgagatttaaatgttctctttttcactcgattcgttttgctagccatgtggctgattattttaatggtttattaatgagctcaactaattttacgtttgattatttgccttttttcagctagaagtacatccaacggtatacatgcgtgctacaagtaaatcagtgaaagacatctcaatagccccagccgtcgcataaccgtcatccaatccgatccgatccggtccgatccgattcgatttgagctgatctaaaacaacaacctccgccgtaaccaaaaaggaaacaaatagcaaaacaccggagccgctcgatccagcgaacggcagcgacaagaagtttttttcggccagcgcgcacccccaaactccagaaacagcctcaagattctgcccttcggagcacccaactttcgtctggagacgacacccgcagagatgcacaaaatagcagcagcgccgcctccatcggcaacgcccggcggaggactggagacgcccctggcggcgccaaaatacggcacactaatacccaatcgcatctttgtgggtggcatcaggtgagatatggtctttaaagggctatcctccgattctcggaagccttacaaaggcatgctttagttcaagaaggaaaatctctgagaaatatttccaagaatgtaaatcaaattgctaagagttcaagccatacttaattactaaacaattgtgctcaaattgtgcacaaatgctgaaaaagcgattttccattggttcttaaaactttaaataacttgttagtagacgcaactaatccagatctttcctatttttagcggcgataccaccgaggctgatctaacccgcgtcttcagcgcctatggcacggtaaagagcaccaaaatcatcgtggatcgagcaggtgtgagcaagggctacggattcgtcaccttcgagacggagcaggaggcgcaaagactgcaagcggatgtaagtagtactccattgacctgttgctaatgtcgcctgttgaacgtttaccaaaaaaagaaaaaaaaaaagaaacaacaaataggaaatgccagtattataatttcaatgaagccgaacaaacaaactacgaacgatttaacgaacgaaaaccaaacacttcatatatacatatatattatagagctatttcgattgtcgcgtttcgaaaaggatatgtacgaaaatcacacacaacttaaaaaattgtgctccgatcttttagggcattacctgacccatcacacacaagtactactactactatgagacgtcggttcctcctactactaccgataccactactactactactactactaccaacaacactccccgcgggggggtccccacataagaaataactcatatgattgtcgccactgtgcgatatatgagatatatgatgatcttgattgatgtaccgccttaggtacggacggcactttgttcttttataaatttcttcttattgcgtttttgttgagtttacgtttccgagttacgttacatttccgttgcgttgccattccgttacgttacattcgattccgttgcgttccttatatcgtttcattgccagaaaccaaaaaaaaaaaaaaaaaatattacacatttttacaataccactcacccagttatataaccccacattaccaccttcccaaagcgtaggcagccctacattttcctccaatataattctgtgatcccacacacacacacaccaacacacacacgtattccaatcctattgatataataccgaagtttgcccgttaagctaaaaccaaaaaccaaaaaccaaaatcaaatgcaaatgcaaacaaatgttgagttcgttgcaccgtttttaatgctcattttatgcaatcaattaaacaattagcgaatttttgctcttttggctccgttacactggagcgcggtctccatagactttaatagactagactataatatagacaataccttagtgcgttgccttgttgcctttgattctcgtttgatatccaagtcttgagttccgttttgagttgtattttcgtgtaaagttgcattgttggcacatcttttccgtttctcgcctaatttgctgattacaaatcgattgtgtattgcacatttttttccaattgcggaataattaacgaaccaacagcagcagcagagtaataataataataataataataatccaattccaatccaccagcaaagtaagtgcgcggcgtaaaagttcctagggaataatatatatatctatatatctatcgaacccatacttagcagtccaatcacctgctccccagggcaacctacgctcttgctttcctacactggaagaaatacagagtagggaaagggaaatatcgagcaattatacagaaaatataaaatgtaactttccaaataactttttcttatatctaaacccattaaaatgcatcttttgaacaacaacttctgatttttttcccatgtagctgttgccactagtttcttgactctatataaagtaaagatctgggctaggttcaactagcaccataaaaaaaagttcagcctccagatggctcattacaaaatgaacttgtctgccatattttgttttggcatactaattgattataattattgcataagctgccccgccagggtgagtgatgcaacttttacccatttctgggtaaattcccatttaccttttacccttttctgtgcgatactgtgacgttgctacatacatagttagttatatacactgtgctgttcggaggctgaagcttccgccgtgctctgtggcatattaagtgaaaaacttttgccgctctcgtcattaatatgcattgttgtcgttctggttgttgttccacctcttgttgctgctgccactgctgcccgagactgggacacgagtgtccttgtgaatgcaaaagggagagagcagagaaagcagaaggcataatgcccgcaggcagaacaaggataacaacgaccatactctatgcaaaaggcaaaagctgaaacgggcacacagaggaggcagcgtcaacaacaataaaaacaagtcctggcaacgtttaaccaagttttataatttacacacacacacacacccacgcacatagacggttacatgaacaccagcaccacgcatcccagcgagagagaagacaacacacacattacactaattaaatttcatttagaaaagtttagcatttagttcgagttttttgttcgaccacgaactcatcaaaagccacacagtgttcaacaaaaagggccaaccgggaccacaatcccgaaaaaacacattcccgactagaattatacatacatattatatcatatcagtccaacgaaaccaaagcagcccacactgcgtatactaatttttgtgtatatgttctatgatggcaaactaatcattgtcgttacctcatccgtgcataaatacgcaacacaaatacatacatatagattagagcaaaatttgggtccgtaaaatgaactcgaaacgcacatttcgaatgtatgagatttgcctacctcaactccaggagatgatgagtggactctagactcttcaattttaaatcattttagagtggggagcatgggacggcacagttttgttgtcctttttgtgggccgaaacaaaagaccacaccgccatcaccgccgtaaaaggcagccagcaaagggattcttaattaaattcagccaagacaagaggtggttaagaatggttgggttggggggggtggaggaggtgggcctcttttcagagctcccttgccatacgtttcatctttagtttactttctcaactgttggccctttgttagggtccttattcctttgccgctggccgaggacgatggctcgagggcagccaactcgaacataaatgaaaagaatgtttgcccagcggcggtcagaaaaggatacggcggctcaggtttttccgtgccacatctcgtcccgcctcgcttttcttttcattttccacgttattttttaacgacaaagtagcaggcatctccttggcccgcaaacatttgcttaggttaatggttattaccgctgccaagaggggtcacccactcaaaaccgccactccccggccgactccatttcaaggagtctgggcttatctctttgtggcgtcgtgtccttttcatgcatttcatgcgcaaatcacaagggtatcagccgggactaattggcaattaaagatgaactggctgccagacggccagtcagccaagttagcccgcttcccatctgggttagtagttttttgccggaggaaaaggtattaaatgtaaattggctgatttattgggtcgagagaagctaaatgcatttttaaaaatggaatttttcgaacgaaaatgaacttgtggaaaagttccttataaaaggctttgtaaaagaggcttacgagattttaaacgaacgacctttctccgaaaaaagatatgactttactattattatatataaatatctacacttttaacttggtgttggtgttacattattattggtttaacagttttattgtttgtttttgtattaaattgatttataattattatcattgttattcagtaggaaacacgagacgagagaagaaacgaaacaataagcaagctttatattccaaattgaattttgttcttttaacaatgcttttgtgccttttcagttgttatacttttttaaatgagttcattattctggttaattaatttttatgtttatgtttgttgattaaaataaacatgttgttgaattttgtgccgcgaaaattgaatatgaaaattacgaaacaatgcgagcaataagttggcgattgaatttgcttttgaagccaaatttaaaaccacagcaaaaacagcgcaaatctagttatgcaacatatgtacatgacattttgtaataaaccttacctaatataatcacaccacacacacaagcacacaccgcaacacaactacaccccaccgtataaacatttacacctatatactttatatatatatatataactttggtaatggtattttgccttggcacgtgtttctctctctcttagccatggccgtgccataaaaagcaaaaaatgaacagaagatttaaataataatcaaaaaaaaaaaaaagacacaatataaaaccaaaagcgttgcgcattaatttttaactattttttgagaatttttgatgctgctgcgttcgatttgaatttgaatttcttcgttcggcttgtgtgttgataatgcaatattctgatattaatgctcatccatttatgctttctccctctgtctttttcttccaactctctcacactctggccaaaaaacgattaaaaaaaaaaaaaatagggtgaatgcgtggtactaagagatcggaagctgaacattgcaccggccatcaaaaagcaggtgagtgcttcctgtctgtgcgattgttataaactaatattaaaattctctatcccagcccaatcctctgcagtcaattgtggccacaaacggagccgtctactataccaccacgccgccggcaccgatcagcaatatacccatggatcagttcgcagccgctgtatatccgccaggtgagttatatgcgaaattatattaatatattaatctatgtttgatgggtcttcatcgtttctctgagtttcacttggttttattgacatttgtttttcttttctttgtatttcattacgctctctttcttaactcgaaaatacacttcatcaacacaacaactacaaccaaaacaccaccaccaccaccaaccaaccaaccaaccaacaccaacatcaattgggaaacaattaaccaaacctagttactgactttacagccgctggagtgccagccatctacccaccttcagccatgcaatatcagccattctatcagtactacagtgtgccaatggtgagtgcgattcgatgcgatgcagataaggtcaaaataatagcactctgataatgatacatacatatatttgccacgatttttggcgaacaactttatttagatgtatatttaaaagtaaatgttttataattatatatgtatgtacttaaatttttgtgctcttcctttgaccacaatactgcaatactatgatgtatatataaatatataaaatacttattctcatatcttttcctgcagaatgtacccaccatttggcctcagaactaccaaggtgagtttcgttgagcccagcctcacagtattttgtatctcgctggccattttgtcgtttgtcgtagcctacacatatcggtatttgctttcttttctttcattttttcttggcgcaccaccaccaccaccaccaactacaacaacaacaaccaaaaaccaccaaaaatcaaccaccacaaaataggttaaatccgaaaaaaagaaaaacataaagtaaacaaattttcgtagtcgccaatttttcgttgagagctgccctgaataataaaatcataccaacaactaaactgcaacaacaacaacaacaactgcaacgacaactacaaactacaacaatctgcgacaacaacaacaactacaacaataccacgctatatgctatatatgtatgcccctcaactctgatcgaactgcagcagcagccgcactcttagtttataattttagttgattacgattatgttaatatgcctatggtttaatttaatttatgctaagttcggagctttagtttttggccacacacacactaaaaaatatgtatgtacatgtaatgtaaattagttgaatgccatagcgagggaaaaactaaaatttatattatttaatcttcgatttcttttgattggactcattttattttcggttttgctt

SEQ ID NO: 9596 - DNA, 1356 bp, DROSOPHILA
gctagaagtacatccaacggtatacatgcgtgctacaagtaaatcagtgaaagacatctcaatagccccagccgtcgcataaccgtcatccaatccgatccgatccggtccgatccgattcgatttgagctgatctaaaacaacaacctccgccgtaaccaaaaaggaaacaaatagcaaaacaccggagccgctcgatccagcgaacggcagcgacaagaagtttttttcggccagcgcgcacccccaaactccagaaacagcctcaagattctgcccttcggagcacccaactttcgtctggagacgacacccgcagagatgcacaaaatagcagcagcgccgcctccatcggcaacgcccggcggaggactggagacgcccctggcggcgccaaaatacggcacactaatacccaatcgcatctttgtgggtggcatcagcggcgataccaccgaggctgatctaacccgcgtcttcagcgcctatggcacggtaaagagcaccaaaatcatcgtggatcgagcaggtgtgagcaagggctacggattcgtcaccttcgagacggagcaggaggcgcaaagactgcaagcggatggtgaatgcgtggtactaagagatcggaagctgaacattgcaccggccatcaaaaagcagcccaatcctctgcagtcaattgtggccacaaacggagccgtctactataccaccacgccgccggcaccgatcagcaatatacccatggatcagttcgcagccgctgtatatccgccagccgctggagtgccagccatctacccaccttcagccatgcaatatcagccattctatcagtactacagtgtgccaatgaatgtacccaccatttggcctcagaactaccaaggttaaatccgaaaaaaagaaaaacataaagtaaacaaattttcgtagtcgccaatttttcgttgagagctgccctgaataataaaatcataccaacaactaaactgcaacaacaacaacaacaactgcaacgacaactacaaactacaacaatctgcgacaacaacaacaactacaacaataccacgctatatgctatatatgtatgcccctcaactctgatcgaactgcagcagcagccgcactcttagtttataattttagttgattacgattatgttaatatgcctatggtttaatttaatttatgctaagttcggagctttagtttttggccacacacacactaaaaaatatgtatgtacatgtaatgtaaattagttgaatgccatagcgagggaaaaactaaaatttatattatttaatcttcgatttcttttgattggactcattttattttcggttttgctt

SEQ ID NO: 9597 - protein, 189 aa, DROSOPHILA
MHKIAAAPPPSATPGGGLETPLAAPKYGTLIPNRIFVGGISGDTTEADLTRVFSAYGTVKSTKIIVDRAGVSKGYGFVTFETEQEAQRLQADGECVVLRDRKLNIAPAIKKQPNPLQSIVATNGAVYYTTTPPAPISNIPMDQFAAAVYPPAAGVPAIYPPSAMQYQPFYQYYSVPMNVPTIWPQNYQG

SEQ ID NO: 9598 - DNA, 2713 bp, DROSOPHILA
cacgatatgcaacattttcgcatgtgcgttggtgcaaattaattctgcctcgaaaatgagaacgctgcagtgaaaatgggttttcccatttatccagatggtttagattcgcaatcacgagatctcggaatgtagtgcaattcgactatacgagcaaattcgccggctaaccgaggcagagcaaactggcaatgcaaattaatgaaaacaaacaatgagccctcgaaactccggtaaacattttcgatggctggatatatgtatcagataacacgcaaatataaatgtttcgccgttcaattaccatcgattgcatttgcatacgcgaatttgaatcaaaactggcgcccgttgaatttccgtttcgaacgcgagcgctccgcactttacaccaggcaactttcgcttcacgccaccgaatgcagcactcagatggctagcaattcctcagatacaatttcaaatttcacgcagggatgccagatcgttgggcgattcaaaagtgagcgcgacgcgctgttgagaacgatcaacttaagtgtataatattgaactagaatagttacatagtgcataaggaatatttatgtctttcaattttaatatactttaaagatggtcaattccaaatgggtactttaattgttaggtttcatatttttatgaaaatgtgtattaattgctaatttgtgtggagataaatgtttccgtttcaatgcattattttaatggcttctaaatgtgaattgctgatatgctcttatttaagttaataattttatgtcgtaccaacttgcttttacaagtttttttttaaatctaataaataaatatattttcaagcaatatcgatagcgctgccagatgtttacatatcctaatcaaacgctgccataccgctcgcagatcagccgcttgtgcggtacgttttaggtccacggcatacctgctgccattggtcacactggcagattacgcgattattttttttacggaaagtctgcgttttcccttccggattgaattgcctggatttgctgtgataactcaagcaagctaagatgcacaaggtgatccggcaaatgtcccagctgcgcctgcaggcgccacagggagcagcgctcctccgatcggcggatagcagctcaatatcaccagccatatcaccagtttcaccacctgccctccagtcgaaatccctgcacacggccgcttccgccggaatgctgtgcgccaagtggaacaagtacaactacggaccccgcaaatggctggagtacaacaagaccgtgcatccgccgcaggaaacggacgaggagcccagaaatgctgtaagatacatatttcgaacgcactgctgttacccctccagctgcaatcctctaatccacttgcattgcacagtatgtctgccacatgcgcagcaacatcaaatacagtccggacaagatgtggtacatcgctgcctttgttcgcggaatgtccgtcgacgaggcgctgaagcagctgaactttgtgctcaaaaagggggccaccgatgtgaaggagaccatactggaggcccagcaaatagccgtggagcggcataacgtggagtacaagagcaatctgtggataggtgagccgcaggggcacaaggaatctatgtatccactatgaatgatggattatcattagtttcttcatcactaaccattatattgatgaatctttgtctgttcttacctaccagccgaatccttcgtgggcaagggacgcgtcttcaagggcgtgaggcggcatgctcgcggtcgcttcggcaaagtggagtacaagcactgccactacttcgtgcgcctggaggagggcgagccgccgcagcactactaccaggagccgcagacgccggagcagcagtacgagagctggatggagcagatgcgaagccggaagatcatcaactcgctgtagccacctgaattggcactcgtatgcaatcgatccgcactcctgcagtcctccatcgccatcgcgtccacgcgcattaagcattttttttggttttagaagattgtttaataaaatagaaacagacaaaagaactatgtcagaggttcatattgttcttatttttacttagaggagtttattttatttagttttgcgcgtatatacacaatggatattattggttttctctctggatgcccgagagtttcggaactctagttgaagtcagggaatgtttgcaactgtaagcttaaagtaaataaactaattcgctccaggcgaatactactaataatagcttactaatttatgcaaattaatgcaatttcggatgtttctgaacgcaaatcctaagtatttactgataaattagttgtttctcttttagaagttgtggtttaaattaaagtagtcattcaattgttagcctcttgaccagaccttctcactcccgtccctttgaatggccttttgctctactcctgctccttttcctcttcatcctgcagggtctgtgccagcagctcctcgacggggtcatccttcagcgactgggtgatcttttcgaggaccaaaggctgtcgctcgcgcaccgcctcatcatcttccttgtccaattgcaggcaggccagtttggatagcctcgaatgtttgctgcgtccagcatcgcgtcgtcgcttgcgggatgtggacttagttttgcccccttctccagtcttactct

SEQ ID NO: 9599 - DNA, 640 bp, DROSOPHILA
ctgcgttttcccttccggattgaattgcctggatttgctgtgataactcaagcaagctaagatgcacaaggtgatccggcaaatgtcccagctgcgcctgcaggcgccacagggagcagcgctcctccgatcggcggatagcagctcaatatcaccagccatatcaccagtttcaccacctgccctccagtcgaaatccctgcacacggccgcttccgccggaatgctgtgcgccaagtggaacaagtacaactacggaccccgcaaatggctggagtacaacaagaccgtgcatccgccgcaggaaacggacgaggagcccagaaatgcttatgtctgccacatgcgcagcaacatcaaatacagtccggacaagatgtggtacatcgctgcctttgttcgcggaatgtccgtcgacgaggcgctgaagcagctgaactttgtgctcaaaaagggggccaccgatgtgaaggagaccatactggaggcccagcaaatagccgtggagcggcataacgtggagtacaagagcaatctgtggataggtgagccgcaggggcacaaggaatctatgtatccactatgaatgatggattatcattagtttcttcatcactaaccattatattgatgaatcttt

SEQ ID NO: 9600 - protein, 174 aa, DROSOPHILA
MHKVIRQMSQLRLQAPQGAALLRSADSSSISPAISPVSPPALQSKSLHTAASAGMLCAKWNKYNYGPRKWLEYNKTVHPPQETDEEPRNAYVCHMRSNIKYSPDKMWYIAAFVRGMSVDEALKQLNFVLKKGATDVKETILEAQQIAVERHNVEYKSNLWIGEPQGHKESMYPL

SEQ ID NO: 9601 - DNA, 5560 bp, DROSOPHILA
gatcgggtccttggcattacggagaatctggtggacttcctccactttggcgcgctcttcacgcttggtggtgatcaggttcttgagccgttcgttgctcagcgagttgagaatgttgtccatatcggtggctggcagtcggttggcaaaaccgtgacgcttgcgtattttgtggtgaactcccttattaatgcccaatagtggacgggaggttggcgagattttcgttggttgtttaagcgaattcttggatatggacggccgccttcttgactttgtgaccgcttctccactgtgggaatagaaggccatggtgggaatgctgctgctcagcgtcaccttgcgcatcttgctctgcggcgaaccagagtcggcgtccgctgaaggagcaaccggggtggacgtttctgggtgctgtcgcttttgaggcttatgattggatgcttcttcgtccgattcgggcacttcgacatcaatcttcatactacttcctgggctttctggcctttttgctgtggcaacttcggaagatttcgctgttttattgttggtgtttcctgtgtttcgttttactgcatcgtcatttgacttgaacacttctaccggggacttggatctgcttctgctgttttctagcttaactgctgctgttttttcttcatcatacgacctcatgttctcatgtagatgggcagcagccttcagcgtcttgcagtttatatccgccgacgtgaagggtcttcgcctattcctggtttttggactgatgatttgcgagctccttgtttcacgaacttctgtattcttcctggagttcttactgctagaaggtttctcgtcgtccgactgggactcttcagctgggctcgttttcttcggtttagttgtatgcacttgggcagtggtctttaggctgtggttgtgtttcttctttgatttttctaacattgatcttgaatcctgacccttcattagcatagctgccaccttgcttagcctagtctgaaaagattctggcgaggagaacgcatctggatccttttgcgcactgaaggttcgtggactgcgtctgatgctatttctggctctggaagaaggagttccttcagaggaagaggtgggcgacgacattgaagaatccgctcgctttctttggaccctcgtctgacgggggctgctgttgcgactattgctgctgctgttgctatttagccgcatggtggctgtaaacaattggggcagctgctccgccgtggcagtcatgactccgccacgggtttttttgttctccttgttggtttccgggctgctgttcgcactgctgcttgacttgccggggactgcggcgaagagactcctgcccttcctgttggccgccacatgggtctttaatggcaagacacccagactgtctacgtccgcatcatcctcgtcgtcgttgatttggcgcagcctggatctgggactgccaaacagttgccgcttgcgctccgaaaggcgcggagtggccatgcgactgggacgcccactacccgtcggggtctccatgatcgcgcgcaaatcttttatttcgcattaactttgtccaaattgtgactccttcgcgcttttttgtagctgcctagtgttgggggtggttggatcgttcagggtctcttcggtcgtttgccaacacatgccagatcgtctatgtttttactgcaatgtttatatatattaaatgcattacattgtttttaaattttttttacatcaatgtttataaaaatcaaatacattgcaatgtaaatattttctgttagttataatttttttaccacattttacatttaacatttttcttcgaagcgatcaagtcagcttgcagtttttcgtaaattatttggacttattctacgatttctgtaaaataaataagtaatgttaattatattcttgatccaagacaaagtattcaatatagtaccacttaacgagttacgatcatgatcgctagacattctatgttttctaatcttcatatattttaaagatttccgtattattttaactatccggtatttttacagagctaaggtgatcatataacgggaaaactctatctggtatttccacccaagtcagactcagtcacactcttccagacgtcacacggtcatattgcggacgaagtgcgaatcgatttggaaaaatctgctgctcggcctggaaagtagaaagtataaagctctgcgtttataatttaatttgcagccaaagcccgctgccgatcaggtaagttagctcccccacattatccgtaccgccatttgaaagccacgccaacgagaaccgtgagaaaatgtgaactctagccgccgccatctttttttatgtatgcgttaggccacaacgccaataatgcgatttaaaaccgagtttattaagattactcgcgctccttgtgctgctgccttaatgtttatcctttgctcgtattggttaaaatagaaaacaattgcactgtcttctctcttctcttgaggtatcgcgtttgttcgtcgccgttgtcgtcctccaaccgcggtatatacatacaaacatataggcaaatatatataaatatattttcgacgcagccgccgccgccgccgccgcgtagatatccattttccgggattaccccacccagagtgatataaacgatataaccgtggacgaccacgcagcggaacccgctgccgccatgcccggagccggcacgttcaagttattcatcgggaatcttgacgagaagacacaggccaccgagctgcgtgcactgttcgagaagtacggtaccgtcgtcgagtgcgacgtggtgaagaactatggcttcgttcacatggagacggagcagcagggtcgcgatgccatacagaatctgaacggttatacgctgaacgagttcgccatcaaggtggaggcggccaagagccggcgggcgcccaatacgccgaccacgaaaatcttcgtgggaaatctaacggacaagacgcgggcgccggaggtgcgggaactgtttcagaaatacggcaccgtcgtcgaatgcgacattgtgcgcaactatggttttgtccatctggactgtgtcggtgatgtgcaggacgccattaaggagctgaacggtcgcgttgtcgatggccagccgctcaaggttcaagtgtcgaccagtcgggtccgccccaagccgggcatgggcgatccggagcagtgctatcggtgcggaagatccgggcattggtcgaaagagtgtccgcgactgtacggcagtgccggaggcggacgcgagccgccatcgcccctcagcgccggcggctacagagatcgcatgtacggtcgtgacccgtatccgccgccaccaccgccgccgccgttcctgcgtgaccgcatcatggatggctttagggtaaattcagcatccatttgcccccccgatcaaatcatccattgtgccaagtattattcacattctgtgctgctactaatctaaatcttgttttcccgcccgcaggactatgactactatgaccgccgcttcgaggactcacgcgatctgtatgagcgtcgctatcagacctcgcgaatgcgcgacttcccaccgccgcccatctctcgccgcgaacccatgcctctaccgcccaccttaagcggcagcctgcgctcctgcagcgtttctcgtggatacgacactatgttcagccggcgctcgcctccgccgccgcgtagcagcaatggaatgagtcgctacgggtaggtaaccctgcaagtggatgaaatgtcgcactttcttttccaaatatgtgtgtactaaagttaattcttatcagatgactacgttttccatacttacttacatattaagacctagatagtgctttgcttatatgatgaaattataaaatgaaacgatgaaagataacattcgtatatctccatcgaacctattttgaaatcagtttttaatgaattattttctatctcctcccagctcgcccactccacacggttacgaggactttagtcgcgatgcattcgacgaacgcatgatttcgtcgcgcggaatgcgcggtccatcgccgccgggtcgcagatatgcgccctactgagatgagttttactatcacggcagcagctgagtagcggttgcactacccatgcccctgccaatgggtcacacattctaccacacgaccagcaatcgaagaacggcgcctgtggactgctggctgctctgctggtcgccagcggcggcctactaccatcaccaccaagcacaccagcagcacatgctgatgccgacgacaatttcacaactgtggctgccgccttggtaaaccacatacatgttactaaacccaaactaaccattactcgtacacttaaacaagaagatggaaatacgtgtttaagcatcctccctatatgcaaaacacgccaaaaaaaaaaaagaactagacaacgacgtgcaacctctacacattcaaccgtagtaccaataaacgcataatcagtcgaaactgtgcaaaaataaacactgtattttaaagctagtttaaggggcagtattgcaacgatgtgtcttagatctacggatgctccatagccagccgtcgttacgcatgtgaaatcgagtgctggctgccgtgcttgcccaaaatgggctgatcaggagacagatcttccggtgggctaccattgtgcgtgtccggtgagtggtcgtccagcagcttgctaccattgtgcttgttcagttctttcagctcgacaggtgtggtcttttcgaatgttggcgggattagtaatcgactgaaaagataacatgttatttattgtggggaaccgccttaaaaacgaatagtatttcagcttacttgctgcactgtagccaaaacatggagaccagcatcatggccgaagtaacgccgaaggtccagaacgtacctaggcgcgtgtagatggatcccacgaagactggaccaaggacgcgggacagacaacccgaaccggtcatccagcccatccagacgccctgcggccgaggtcccagaactttggagaatatggtctggatgagagtcaccccaatgggatatcctatcgatgtgaaggcaaatccaatgatgaactgcgttaaggtcaaggccggcagttcgccgcaccatttctgcgttgtggggcagcccaagaagatgggatcgctttcgcttaggttccagctggcattgaatggctgcgccaactttggcggatccggaccccaaggcacgaagagcacgcgaccgagaaacatcagcgagaatccgccccagatgagcacataacgctcggctataatcttgcacatgggctcaatcaaaacgaacgtgaccagggagacaatagctgcggtggtcatcatgatgcccatgtaccatagggcctcgtcgttggaccaagcgaacatatccattgtcagggatgtgcccagactgcaaggcgaggaagcaatagtttaaaaaaaaaaaaacccactctgaggattactcacgtctccaacagc

SEQ ID NO: 9602 - DNA, 2967 bp, DROSOPHILA
gtctgaaaagattctggcgaggagaacgcatctggatccttttgcgcactgaaggttcgtggactgcgtctgatgctatttctggctctggaagaaggagttccttcagaggaagaggtgggcgacgacattgaagaatccgctcgctttctttggaccctcgtctgacgggggctgctgttgcgactattgctgctgctgttgctatttagccgcatggtggctgtaaacaattggggcagctgctccgccgtggcagtcatgactccgccacgggtttttttgttctccttgttggtttccgggctgctgttcgcactgctgcttgacttgccggggactgcggcgaagagactcctgcccttcctgttggccgccacatgggtctttaatggcaagacacccagactgtctacgtccgcatcatcctcgtcgtcgttgatttggcgcagcctggatctgggactgccaaacagttgccgcttgcgctccgaaaggcgcggagtggccatgcgactgggacgcccactacccgtcggggtctccatgatcgcgcgcaaatcttttatttcgcattaactttgtccaaattgtgactccttcgcgcttttttgtagctgcctagtgttgggggtggttggatcgttcagggtctcttcggtcgtttgccaacacatgccagatcgtctatgtttttactgcaatgtttatatatattaaatgcattacattgtttttaaattttttttacatcaatgtttataaaaatcaaatacattgcaatgtaaatattttctgttagttataatttttttaccacattttacatttaacatttttcttcgaagcgatcaagtcagcttgcagtttttcgtaaattatttggacttattctacgatttctgtaaaataaataagtaatgttaattatattcttgatccaagacaaagtattcaatatagtaccacttaacgagttacgatcatgatcgctagacattctatgttttctaatcttcatatattttaaagatttccgtattattttaactatccggtatttttacagagctaaggtgatcatataacgggaaaactctatctggtatttccacccaagtcagactcagtcacactcttccagacgtcacacggtcatattgcggacgaagtgcgaatcgatttggaaaaatctgctgctcggcctggaaagtagaaagtataaagctctgcgtttataatttaatttgcagccaaagcccgctgccgatcaggtatcgcgtttgttcgtcgccgttgtcgtcctccaaccgcggtatatacatacaaacatataggcaaatatatataaatatattttcgacgcagccgccgccgccgccgccgcgtagatatccattttccgggattaccccacccagagtgatataaacgatataaccgtggacgaccacgcagcggaacccgctgccgccatgcccggagccggcacgttcaagttattcatcgggaatcttgacgagaagacacaggccaccgagctgcgtgcactgttcgagaagtacggtaccgtcgtcgagtgcgacgtggtgaagaactatggcttcgttcacatggagacggagcagcagggtcgcgatgccatacagaatctgaacggttatacgctgaacgagttcgccatcaaggtggaggcggccaagagccggcgggcgcccaatacgccgaccacgaaaatcttcgtgggaaatctaacggacaagacgcgggcgccggaggtgcgggaactgtttcagaaatacggcaccgtcgtcgaatgcgacattgtgcgcaactatggttttgtccatctggactgtgtcggtgatgtgcaggacgccattaaggagctgaacggtcgcgttgtcgatggccagccgctcaaggttcaagtgtcgaccagtcgggtccgccccaagccgggcatgggcgatccggagcagtgctatcggtgcggaagatccgggcattggtcgaaagagtgtccgcgactgtacggcagtgccggaggcggacgcgagccgccatcgcccctcagcgccggcggctacagagatcgcatgtacggtcgtgacccgtatccgccgccaccaccgccgccgccgttcctgcgtgaccgcatcatggatggctttagggactatgactactatgaccgccgcttcgaggactcacgcgatctgtatgagcgtcgctatcagacctcgcgaatgcgcgacttcccaccgccgcccatctctcgccgcgaacccatgcctctaccgcccaccttaagcggcagcctgcgctcctgcagcgtttctcgtggatacgacactatgttcagccggcgctcgcctccgccgccgcgtagcagcaatggaatgagtcgctacggctcgcccactccacacggttacgaggactttagtcgcgatgcattcgacgaacgcatgatttcgtcgcgcggaatgcgcggtccatcgccgccgggtcgcagatatgcgccctactgagatgagttttactatcacggcagcagctgagtagcggttgcactacccatgcccctgccaatgggtcacacattctaccacacgaccagcaatcgaagaacggcgcctgtggactgctggctgctctgctggtcgccagcggcggcctactaccatcaccaccaagcacaccagcagcacatgctgatgccgacgacaatttcacaactgtggctgccgccttggtaaaccacatacatgttactaaacccaaactaaccattactcgtacacttaaacaagaagatggaaatacgtgtttaagcatcctccctatatgcaaaacacgccaaaaaaaaaaaagaactagacaacgacgtgcaacctctacacattcaaccgtagtaccaataaacgcataatcagtcgaaactgtgcaaaaataaacactgta

SEQ ID NO: 9603 - protein, 352 aa, DROSOPHILA
MPGAGTFKLFIGNLDEKTQATELRALFEKYGTVVECDVVKNYGFVHMETEQQGRDAIQNLNGYTLNEFAIKVEAAKSRRAPNTPTTKIFVGNLTDKTRAPEVRELFQKYGTVVECDIVRNYGFVHLDCVGDVQDAIKELNGRVVDGQPLKVQVSTSRVRPKPGMGDPEQCYRCGRSGHWSKECPRLYGSAGGGREPPSPLSAGGYRDRMYGRDPYPPPPPPPPFLRDRIMDGFRDYDYYDRRFEDSRDLYERRYQTSRMRDFPPPPISRREPMPLPPTLSGSLRSCSVSRGYDTMFSRRSPPPPRSSNGMSRYGSPTPHGYEDFSRDAFDERMISSRGMRGPSPPGRRYAPY

SEQ ID NO: 9604 - DNA, 2781 bp, DROSOPHILA
atctttttaatttattttaattttgcttattttagccaccgacctcggattgaaataccggattcccgatcggaaagttacgataagctaatcacgggcaaaatctccgaggacatagtttctgctgtcttcgaggcagtgggcaatgatccgggcatggaccgcttactggcggttctggagaggaatcgcaagtgtgaacagaagcagtccaaaaacttctatcaaatccgcaatgacaagaccgagagttatctacatcacacggagaccatgttgcgggacacaatggaggcgattagcagcataattgatgagcaggtgcgacgaagagcatgcattcctttgcgtccggatctccaggacttctatgacctaattctcaagacatccaacgagcaacaaaagtgtcgtgagaagcgacagagcacacttcaaatccttgccgaggatttcagtcaggatgtgcgattgctcgatccgagtaagatcagccaaaagtcgagaattgtcaagaagttactgcgacagtacgaggatctaccgatggaggatcaacaggcggcggttggagtgcgtgatgaattgctcctggatctggtttatctccagaagatggccgaatccgcagagcgcaatcaacgtaacgcccgtttgcaggaggtgctcaaacagaccagcctggacgaggtcctggaaaagagtctaaccaccgagtactcaccgcgttttataaaactgctaaagacggcggagctttataaggaggcgggcgagcagcaggccaaggcatttgtgggtctttagaccgctttaatcaacgttttagatttttgtttcaattcattagttgtttttttcaattaaaaattccctttgtttgagttaagtcatatatttttaacacatttgaaataagcaacaaaattcgtttgaatttatgtcaataaatattttgaataacacttagttattgtaaaatatttttaagaatatagttttatccaaagtagtgcgagagtcccagattggcacccagatcggtctggcccttgaagggtccacttgtccacttggatgccgtgctgcccagatctagccttgtgttgcgatcctgcgactgccaaagattggcacgcccacccagctccaattgcttacccaatccgggaatattggcgtgcgtcagggtagctccatgacctttgatgtgggagtagtccagtgcagcttcatttctatcgaacttgaagccattggcaagctgattctgcgaggcaaatgccttggcatccagattgtgaacaccgttgttgaacaaattggcggtggccgtttgctggaagctatcccgcacaccgggcgtatgggttttggtcagttccaggccgtgtccatgactgctcatgaaaaataagattagtttcgctattgctcagatcgtaatcctttaagagactcacttgttgtagcccagggtggcgccgctggttacgggagtggataccggtttggtctgcgtgttgcccgctgcgaacacttgtccaataacatggtgatcgggagttccaacggccttgcttaggtccaatcgggcatcggcaccgccactcggattggatgtgagtgatccacccaacacctggcgacgtgccctgtagattctgggtggcgtcggtggtggagatcagtggctgggtatacggacgttggggcaaggccaccgcaagggagccaagtacgccaacgatgaccacaattaggagaacaattttgctcatcttgctgtattaatctcttgattttcgatctacttgactaagcggctgactgttgactgacgatgctgggatctggtcaccgtgaattatatagcaatctatctctgagtggggcttcccatcgaaaccgacaatgaataccaatttatagatggaagatttgtgatgccttatctgtaagctgagcaatgtttcgcactgggatccccgaatgaccaggtggttcacaccgtctgataagagattgtgcatccccttgaaactacttgccggtgatttgcaaactctttaagggtttattttgaagacaattttaattaaatatatttatgaatttatatataataaaacaagaattttaaaataaaatcaatttgaattcaatttataataacatatttgccaatgagtaagttcaaattttaatagagttagcttttaaattttttatgacatttcatgacatttaagactgtttaaaaatctagttaattggtattctttgtatacacaattcagaggataagggatcaaattcgattagtacgcgatgcaagtgcccctgctccaccggagcacccagatggtgctgctgaagaagcagatccggcggaaggcgaaggagttgcgtctgcgaaagcgtcacgcccaccgccgccttcaggtgatgagaaggatccgtgaccatctgctcgacaggatgaggaactccatagatcaccggcagcgggatgcggagcagaagaagagggagcagacacggagggcggtgggcggtatgctttccatgtacaagcattggctgcgcagctggtcaaaagctttaaggttacaaagtcagctaattcggcaccaggagcatgtaaaagtgggaatgcgtcgcaaacttcgacacttgaggaggcagttgaagaaagtccgcaatccaaagaacttggtcgacaagtgcttccatcgactgttcaaggcagttaggaagtggcaaaagaaaccggattac

SEQ ID NO: 9605 - DNA, 657 bp, DROSOPHILA
atgagcaaaattgttctcctaattgtggtcatcgttggcgtacttggctcccttgcggtggccttgccccaacgtccggcacgtcgccaggtgttgggtggatcactcacatccaatccgagtggcggtgccgatgcccgattggacctaagcaaggccgttggaactcccgatcaccatgttattggacaagtgttcgcagcgggcaacacgcagaccaaaccggtatccactcccgtaaccagcggcgccaccagtcatggacacggcctggaactgaccaaaacccatacgcccggtgtgcgggatagcttccagcaaacggccaccgccaatttgttcaacaacggtgttcacaatctggatgccaaggcatttgcctcgcagaatcagcttgccaatggcttcaagttcgatagaaatgaagctgcactggactactcccacatcaaaggtcatggagctaccctgacgcacgccaatattcccggattgggtaagcaattggagctgggtgggcgtgccaatctttggcagtcgcaggatcgcaacacaaggctagatctgggcagcacggcatccaagtggacaagtggacccttcaagggccagaccgatctgggtgccaatctgggactctcgcactactttggataa

SEQ ID NO: 9606 - protein, 218 aa, DROSOPHILA
MSKIVLLIVVIVGVLGSLAVALPQRPARRQVLGGSLTSNPSGGADARLDLSKAVGTPDHHVIGQVFAAGNTQTKPVSTPVTSGATSHGHGLELTKTHTPGVRDSFQQTATANLFNNGVHNLDAKAFASQNQLANGFKFDRNEAALDYSHIKGHGATLTHANIPGLGKQLELGGRANLWQSQDRNTRLDLGSTASKWTSGPFKGQTDLGANLGLSHYFG

SEQ ID NO: 9607 - DNA, 3746 bp, DROSOPHILA
gtgtacatttgaatcgcaatcaaataacaatgaaaacatcagcgacctggctgaaaagtgatcggtgacatcgtggtatccagtgcattagacttaaagccacatcctgatggatggcgggatttggctgtttattgtgactgggtcaccccggcgtatacgcaatgtggcgtatctgttgactactactcgaccgaggaacttgttgagggcttaagtggcaaattgacaaggtaatggattatcagcgaccgcctttgaagagcaatagccattttaatagattattttaaaaattcaatttacctcaagctaaatagggatttagctgaaaatgtgggtcatacacaacgagtaattggactatttaaacgaaaacctcattgtctagctgcgggcttaacaaaatatgaggggattgaagactccgtgaactttgacctacagcacaaagctgttaaactgcttgtgcatgtcagcacagcttttccccacctttcccccgcttttcccgctcctcggactcactatctctgcgcggcagctgttgacaatgcaactgccaatatacatgaatgtggctgcaagtagcactggggatgtctgtgtgtgtgtgtgtgtgtgtgtgtgtgtgaggtggtgtggaagggcgattgtgttagttgtgtgtggctaacattgacatttgtgtccgcttaagcgaacgactccttcttatgcaacatgtgaatccaaataatctttacccaggggaagattattataagaggagttaaggttaatggaaagttatgagaaagttacctcataaagatgtttaaaagtatgcagcatcttaagcacttaaattggtcaaataactatttatctatatttattttgagtgagtaacatgatccttaaaactgttaacatctctgtgggcgagtgtattccatccattctcgcattcatatgcacctcatgaattctcatccgccagttgcatctgcattcctcgtcagcactcggccagttcgtggaactggtgcattatcaatccctgcagcatttccctggccaaagtgcatccatggcacgggcagtcgcgcgaattgggaatgtgattcgaccgcagattggtcatctgcagccgtcgctgtgcctccagcctggaacgcctcctcaagcttctcaatttgcagtgcacacagctatagatggtgattcctagtcgggaaaagagatatcatcacttaacttactgttgattccgtataggaatcccatatgaacaaaatatattacagaaccaagttgacttaccaactcccaccacggatacgtgcagcagcagaaccatgaagatgaagcgcccaaagtgcggatggtgtcggaggtcgtcgaatataggttcgcgctggccactgatgctggtatttgcatccgttggatcaacggtggggccttcagtcgccgtggccacgtcgaattccgttgaatttgcgccggtattgttttcgttctcgaaatcagacatttgcagcagctgcgttacatttacgaagtcaaagtcttccccggaatgcaaagatacgcagatacatacttagatacagacagaaatcaaacgagccgcaggtgcctgcccaagtgcacttacccgtaaagttgtcatcagctttggccaggtgagcgcaggaagccgaggtggccagcagcaagatccacctggccatgtttacttggacggaggggctcatggtgctgcgtcaatcgacccaatgcaactgaacaaacctcaaagccctcgattccagttagacttatcaacagaaagctgtttatttgtatcgccacttatgccgaggaaagatgccaagtggctttaaatcccaaacaaaatcacgaatcacggtggcataaacaaaactttagattcattactacaaaaccactggtctagaatctagatcttgaaaagaacgaagttaaatagctagaaaacttattaggcataatgtgtgatgacctcacagttttcgatgcagaacgcgtttctggcgaggcagcagttgcggcacaggcagttcaccttgggggcatgcaggaaggtcatctccagaacgcggcccgcctcctggggcaggggcagagtgggccacacgatgctctgggtgcgcggggcatagacatcgaggccatcggaagtcgattctacagcccgcgagatccggcagaagcagcagatacatcctgcccaaaggaaatcggaaatctccgttcggccaattgatcgaggcaatggaaggcacatgaactcacccacgaagcccagaaggaccagaacgaagagtcccagtagggtcagcgtaaagattctcatctgggactcggccagcagggaatcgtgacttccatggccattcccattcccattccgattcccacccacctggcaatggaattggtttggcagaatggttagtgccaggatgacaaaagtgcatcgagtgcccggcgccaaagacattttgttaatgctttccaccagcgtttcccagcgcacaataaagcactcgaaaatggaaaaacaaaccgtggaaaacagctgcacacagatggcgacatcgccgtggagcaaacacaatcgacttgcaaacttctgggcaaatgaaaattctgcgagtgctaatcggcataaagcttctttgggacagccatcccatgctacactttggaaaatccattttactgaattcaatagctgggaaagtcaaggccattcattattactcatttaataaagcaaatgtagttttaatcacagattttgtagtaagaattaaattgttattccatctgaaaagagtaactttgtggagatatgatttctacgaaagtgcagatgtgatcaagcttgcatttcgcttggcaacacactcgtgaataacaagtatattcacacgaattcaaacccatgccacaaccagccatccacccacctgtctgaaagcattaaatctgcgcgttttgaatgggtgggtggtgtgcatttgtcataaaccaaataaaagtaacccatttgccctgagaaattacatttaaattgcaaatttaaggcagaggaacaaagcggcgcacactcgacactcggctgcactcgaaagcaggaaaatgcgcgccaaggtgcaaatgtggtgcaagtggtgcacggggtgcaaggggaacgaagggggaaattctgcgaaaactactgggtgacaagaaaaaatcatttgcagacataattcacttaactgccatcagtctcgttcctcgtccttcgtccttttgcattcatcacatgtatgcattttttaccactttgccattcgaaatttaatagcgagttgcacacgatgtccttacggcaactgcaaagccaaaacgcgtttagttgtcaatcgatacggtggcaattaacctaaaaataggctaatggagaaattgtgtagcctaaattattaaatcgcctgtcgcgtactaagcggtagcaatttcgatttgatacccattaatcagacgaaattatcctcattggcgattcaaaatcgttgtgtgtgtttgcatagaactgcatttgtgttttcaaaatagaactgcgaagtatgtcgcatcttcagcaattttcaatttaatcaacgaaatgatttgcaatttggaattcataaaaaaaaaagatgcgaatcacttgaaatgccactttacgcgcattttgattgtga

SEQ ID NO: 9608 - DNA, 1353 bp, DROSOPHILA
ctattgaattcagtaaaatggattttccaaagtgtagcatgggatggctgtcccaaagaagctttatgccgattagcactcgcagaattttcatttgcccagaagtttgcaagtcgattgtgtttgctccacggcgatgtcgccatctgtgtgcagctgttttccacggtttgtttttccattttcgagtgctttattgtgcgctgggaaacgctggtggaaagcattaacaaaatgtctttggcgccgggcactcgatgcacttttgtcatcctggcactaaccattctgccaaaccaattccattgccaggtgggtgggaatcggaatgggaatgggaatggccatggaagtcacgattccctgctggccgagtcccagatgagaatctttacgctgaccctactgggactcttcgttctggtccttctgggcttcgtgggtgagttcatgtgccttccattgcctcgatcaattggccgaacggagatttccgatttcctttgggcaggatgtatctgctgcttctgccggatctcgcgggctgtagaatcgacttccgatggcctcgatgtctatgccccgcgcacccagagcatcgtgtggcccactctgcccctgccccaggaggcgggccgcgttctggagatgaccttcctgcatgcccccaaggtgaactgcctgtgccgcaactgctgcctcgccagaaacgcgttctgcatcgaaaactgtgaggtcatcacacattatgcctaataagttttctagctatttaacttcgttcttttcaagatctagattctagaccagtggttttgtagtaatgaatctaaagttttgtttatgccaccgtgattcgtgattttgtttgggatttaaagccacttggcatcttactttgacttcgtaaatgtaacgcagctgctgcaaatgtctgatttcgagaacgaaaacaataccggcgcaaattcaacggaattcgacgtggccacggcgactgaaggccccaccgttgatccaacggatgcaaataccagcatcagtggccagcgcgaacctatattcgacgacctccgacaccatccgcactttgggcgcttcatcttcatggttctgctgctgcacgtatccgtggtgggagttggaatcaccatctatagctgtgtgcactgcaaattgagaagcttgaggaggcgttccaggctggaggcacagcgacggctgcagatgaccaatctgcggtcgaatcacattcccaattcgcgcgactgcccgtgccatggatgcactttggccagggaaatgctgcagggattgataatgcaccagttccacgaactggccgagtgctga

SEQ ID NO: 9609 - protein, 173 aa, DROSOPHILA
MSLAPGTRCTFVILALTILPNQFHCQVGGNRNGNGNGHGSHDSLLAESQMRIFTLTLLGLFVLVLLGFVGEFMCLPLPRSIGRTEISDFLWAGCICCFCRISRAVESTSDGLDVYAPRTQSIVWPTLPLPQEAGRVLEMTFLHAPKVNCLCRNCCLARNAFCIENCEVITHYA

SEQ ID NO: 9610 - DNA, 3544 bp, DROSOPHILA
aaatgcatctgaatattctcgaaaatatcttcaaatggctttctcgaatcattcttttagcaaaacattggcgcctggcgcatcattttcggagtgaccatcgtgctgttcgccttggaattcctggtattcgtcttcttgggatcgggcagcgagcagccgtggaacaaggccggaactcccaaggatcccgaggccaaggacgaaaagactccgttgaaggagctgccaactaagccctaagccaacaatctcgccccgaatcttctgcctcaattactcgacgaactgctgcttattcggataactcttggataaagccagttcaaagtggaatggtcaatgctggactgtaaataccaattacaagtgtacaatgcccaccctgaatagcgaattcattgaacatacgttcgctatttagggcgtgcactgtagtttttagatcgctgtaaaccaatagttagtagccgtatccattacggataaacacttcagcccgcctaatgtacttaacactcttgatttcaaaagttgtctacaaataaagcgacgtaatagtggatgcacgggggttcctaaacaaattctggtggggaagggagaatgggtctcagcctcaatttcgatggaaattctgggtgaatgaccccattttcctgtttatatttagcgctagcaataagccattccacagaatctcagaggatttagttacaactctgtacgtataaaaaaatatataaacaggggatctgttctatctgtttggttgaagatatgaacaattgcatgatgtaactaaatggcaaaagatgtaaggctagaggatgatcctaactcaacaatgcaaagattgggttgtgaaattgattgtaacatctaagaaccaactttctttgcatccttatcacaatttaaactccgataacctgcggcgccaaaagacagagtccgttatcgatattccggcagaaacatatgatttcatgtaatcagtttgcctttgccggtttcaacggattgcggaaaatgttgaaagcacggaacgtttgtttgctgtccaggaggtggaagagtggcgccaagaagcgatggaatgtcctgcagaacaagaagaacaactgtgaccgagcgctggagaacttcgatgacttctacggaagtgtctacggcacccggtggaagaacatgcgggcggcgcttctcacgaggcacaagtatgtcgccctggtcaacaatttcggggacacggagcagacgtgcgccatgctggagtcagatggagccatcaacatgaagtcgcttattaacctggcgcaggatcgggtaaaggacagcacggagacggtgccggaacaaggcaaatcacgtcatgaaattgaaagcaaactggatgcactgctgcggaaacagcaggagcgcgaggtggcctccatatacccgagctcgccagaagatggttcatcggcgccactgccgctggaactgaagtttgacaacgtagaggaagatcagccggagcaagtgaataatcccttcaagcagagcctgacgaaggctttggaggaggatgtgaagctggacgagcatcggttggtggatccccaatttggcacaggcggactgtatgaatacatgcctgcccacagcatcaagggcatggaggactgggtggcagagtcggagcactacaagtactaccaaaccagcgccgacttcccgctcgccattgaaccggagccttcctttcactaccccgagcatctgtccctgtacacatatgaaatgggcaactgctcggacttcaagggacccaagaagtgcatgaccggtgtgctctcccactttatgatggatggtgcctcgactttgccgcctctcttcctgcaggtgaagcctggcgagcgtgtgctcgatgcctgtgcctctcccggcggcaaatcgctgcttatgctgcagacgctgcacttggaccacctggtctgcaatgacatccaagaatcccgcctaaacaagctgcgcaaagtgatgcaggagtacctgttcgactacaaggagcgctgggctggaaagcgcctcatcctcagccagagtgacgcccgcaatctggaccagtacgagcagttcgacaagatcctggtcgacgtgccctgcaccacggatcgccatgtgctcaacgagcaggacaacaatattttcaagccgacgcgcataaaggagcgcctgcggataccagagctccaggcaggcatcctggccaactgcttgcgtctcctgcgaccaggcggcagtttggtctactccacctgctcgctgtcgcccatccagaacgatggtgtcgtccacatggctctgcaaaaggtcttcacggagtacggcatcacaactaccatcaaggatctgagtcgccacacggcgctcttcagcgatgtcttcaagttcgagcacccaaagggactcaagtatggacaaatggtggtgccctacctgccggccaactttggacccatgtactttagtaaaataaccagaaatgtgtgattaaatgaaagttgttggctgattaacaagactatataactgttgccccaataaataataagagttgtaaactaaaaaggtacctttatatttaacatactgcttcctttggtaaccagtattttctactgctggaattacatttgcttgtcggtcttctttttctttttgcccttgatgggcagaggaccgggattcttgaaaatggtgctggaaagtatagtcaggctccttaagttaagttctagttaattgaagtttaaattgtactcactggcaagtggtgcatatgggactgtatttgcagaagaccgagaggcaaaccgagcagacgtagccaatgtcgatcagctcacgatggcagaagcaggaggcgcggtagtccactttgggcggtggcggcaggaccaatttgtgacggatctgcggggcgggcaggaagacccacaggaggtactgcagcaggccgtccagctgggtgaccttgaggaactgtccggaggtaatgtcacagccttgctgtagcaaactgagggtcttgtccagggcgcaggtatcgatcgtgatgcccagtttctgggcggtgaagaagacgttcatgaacgtcatgtactgcgaggcgcactcgttgctgcctgtgacgaccaggatgcgggaatgcatcttgacgccaggagccagattcctctggagctgtacgggagtattttgttttagatttggtttcccaaggcgattcctagctattctctacccttgatatgtagcacagcgccatggacatgctgccggccaggagactctcacaaggagcgctgagccgtggtgcgttcatcaggatgctgcccagctgctgcttcaccgtcttctccaccagattaaacgcctcgtactgcccatccacttggcgcagttccacttgtcttctgggcagcggatacaggaagtttctgtaatggaagagccattaggtggcgtacatgtgtggcagcctctactc

SEQ ID NO: 9611 - DNA, 1544 bp, DROSOPHILA
ttgcctttgccggtttcaacggattgcggaaaatgttgaaagcacggaacgtttgtttgctgtccaggaggtggaagagtggcgccaagaagcgatggaatgtcctgcagaacaagaagaacaactgtgaccgagcgctggagaacttcgatgacttctacggaagtgtctacggcacccggtggaagaacatgcgggcggcgcttctcacgaggcacaagtatgtcgccctggtcaacaatttcggggacacggagcagacgtgcgccatgctggagtcagatggagccatcaacatgaagtcgcttattaacctggcgcaggatcgggtaaaggacagcacggagacggtgccggaacaaggcaaatcacgtcatgaaattgaaagcaaactggatgcactgctgcggaaacagcaggagcgcgaggtggcctccatatacccgagctcgccagaagatggttcatcggcgccactgccgctggaactgaagtttgacaacgtagaggaagatcagccggagcaagtgaataatcccttcaagcagagcctgacgaaggctttggaggaggatgtgaagctggacgagcatcggttggtggatccccaatttggcacaggcggactgtatgaatacatgcctgcccacagcatcaagggcatggaggactgggtggcagagtcggagcactacaagtactaccaaaccagcgccgacttcccgctcgccattgaaccggagccttcctttcactaccccgagcatctgtccctgtacacatatgaaatgggcaactgctcggacttcaagggacccaagaagtgcatgaccggtgtgctctcccactttatgatggatggtgcctcgactttgccgcctctcttcctgcaggtgaagcctggcgagcgtgtgctcgatgcctgtgcctctcccggcggcaaatcgctgcttatgctgcagacgctgcacttggaccacctggtctgcaatgacatccaagaatcccgcctaaacaagctgcgcaaagtgatgcaggagtacctgttcgactacaaggagcgctgggctggaaagcgcctcatcctcagccagagtgacgcccgcaatctggaccagtacgagcagttcgacaagatcctggtcgacgtgccctgcaccacggatcgccatgtgctcaacgagcaggacaacaatattttcaagccgacgcgcataaaggagcgcctgcggataccagagctccaggcaggcatcctggccaactgcttgcgtctcctgcgaccaggcggcagtttggtctactccacctgctcgctgtcgcccatccagaacgatggtgtcgtccacatggctctgcaaaaggtcttcacggagtacggcatcacaactaccatcaaggatctgagtcgccacacggcgctcttcagcgatgtcttcaagttcgagcacccaaagggactcaagtatggacaaatggtggtgccctacctgccggccaactttggacccatgtactttagtaaaataaccagaaatgtgtga

SEQ ID NO: 9612 - protein, 503 aa, DROSOPHILA
MLKARNVCLLSRRWKSGAKKRWNVLQNKKNNCDRALENFDDFYGSVYGTRWKNMRAALLTRHKYVALVNNFGDTEQTCAMLESDGAINMKSLINLAQDRVKDSTETVPEQGKSRHEIESKLDALLRKQQEREVASIYPSSPEDGSSAPLPLELKFDNVEEDQPEQVNNPFKQSLTKALEEDVKLDEHRLVDPQFGTGGLYEYMPAHSIKGMEDWVAESEHYKYYQTSADFPLAIEPEPSFHYPEHLSLYTYEMGNCSDFKGPKKCMTGVLSHFMMDGASTLPPLFLQVKPGERVLDACASPGGKSLLMLQTLHLDHLVCNDIQESRLNKLRKVMQEYLFDYKERWAGKRLILSQSDARNLDQYEQFDKILVDVPCTTDRHVLNEQDNNIFKPTRIKERLRIPELQAGILANCLRLLRPGGSLVYSTCSLSPIQNDGVVHMALQKVFTEYGITTTIKDLSRHTALFSDVFKFEHPKGLKYGQMVVPYLPANFGPMYFSKITRNV

SEQ ID NO: 9613 - DNA, 3905 bp, DROSOPHILA
cctcgttttcccctcctgctgcaagttgcacatagttaacgcttcagttgtaaaaatgcccatcagcgcgttcaaatttttaacagcagcgaactgagtgccacgcccactcccattgaccgcccctgccacacccacccacaacgcccacgggctaaatgcttttattttctttgccgtgcatcttcctcttctcatccttttgccaagcaaaaggcgtggtaaaagttgtgtagccccaacttattgaaactgttttgggccatggccatgctgctggaaaatcaccgttttccgcggaaatgttggcggctttaatgccgatcctagttagaaatgcatccaaggagctattgtttcgctggctagattttggtcgataataaattccacaaagcgtcttaagaacatttttgagccccatgtaaagtatatatttatagtagaatttatttcgctcagaatgcacttgaattggcttgtcatgtagcaaagtaggctggtagactgatatatattgttttattacatatcggggaatttttctgagcttggcaatgaatcttgttcaatgcactttaggtcacgcatttgtaagccattagaaaataatcatttcattttgaagctaacgaagttagtgtgtttctatctattttatagcacttgatgagttatgctttaaaattgcataaatatttattgatcggcattaaactgaatttacattaaagttaaattttaatttttaagagctttaaagctttaacttaaaatgtaaaacaattgaacttttatgcagctgtttcacgcattcctttgtttctatctgaagcgactattcagctgcacaccatagtctcgtataggtatgaatctgaacgcacatcacatcagtttgcaatcgcatctgggtaaagccccaaaagcgatttcagccacaagatttagtataaaaacgacagcggaaacttttacaaatcagtttaaggtagaccggcaagatgctgatgttattcgtagtggaactgctggttctactggccagttcatcggtcctctccatcgaggtggacaccgaactgggacgggtgcgaggagccaatctgacctccagattgggtgtcaactttcatgccttccgaggcattcggtatgcagagccacctctgggagatttgcgatttgtgaatccgcagccagtgaagccctggtccccgaaaatcttcgatgctagcgaggatggaccgatgtgcccgcaaccgtgggacaatatgaccgatgtatctgaggactgtctgagactcaatgtgtatacaaaggatttgaagggccgccgacctgtgatcgtgttcctgcatcccggcggattctatgtcttctctggacagagtaaatatctagcaggaccggagcattttatggatcgtgattgcgtgttggtatcgctaaattatcggctgggtagtttgggattcctggccaccggaagtaaggaagctcctggcaatgctggtctcaaggatcaagtcttggctttgcgctggatccagcagcacatccaacgttttggcggtgatcccgatagtgtaacccttctgggttacagtgcgggaagtataagtgtagctctgcacatgctatcgcccatgtcacgtggtctattccatcgaggcatctgcatgagtgctgctccatacggaccagttaagtacaaagacaatgatctacaactggccaaacgtcaggctggtttattgaagtgtccacaggaatccattggggaaatggtggagtgtatgaggcggaagccctacttggattatgtgagcacttataatggcatgtttgaattcggctggaatcccgtgctcaactggagaatcgttgtggagaaggattttgggcaggagcgttacctcatcgaaagtcctttcaaaacagctcgacgtggcgactttcacaaggtagccctcatcaccggcattacggagtttgagttcctttcgggcgctttctgtaagtatgattttaaacgaggctcttagaaaatagaagaaaaaatattctatgtattccctccctctagttgatctgcgaaatgaaagcattgttaaccgctataatagggattgggaacactatgcttctattgcgttgctcttggaacaaaactcaacgcaatcgcgagctgccagtcgagttttccgggaaaaatatatgccggaaagtttggacaagctggagtacccgaaatcacttaagggtatgggtgaactcttgagcgacgccctgattggagtgtccttccatcgatttcttcaactgatgtccccccacacacccatttacacatatctgttccgttacaagggtagatataccttcttgaaaaatcccgataaccagcaaaccataggtaagcacttataacgtaatttagattgtaaacatatttaactgttattattattattactttaaaaggccccgttcaccatgacgagctaatatatttattccatgttggacttttgattcctttgttgaagcgagaggatccggaaaattttatgatcgagctattgacacgtatgtggattgaatttgctcaaaaggggtaagtgtaataatactagtttttttgaaattctttgaacaatcttttgtctttagtgatcctcacaacaaaaacgatgaatacctgaaaggtctgaattggccgctatacaacgcgcaagataaaggatatctagaaattggaaataaccttacagcaaaatctggcggtttctttttgaatcggtatcaaatttgggaggatttatttccactttcaagctttcactaagcatctttaataaatatcttatcataagtgatgaaataaatcttcaaaccccttactcaatgctaatttaagctatcgcctagctacatattaccatctgctcggagaaacaaaattgacaaacaaaaatgacaaaatggttgagcgcataactatcgtcaggtgaacgagcattgagtatattttcagcaatttgcagcagcagttcggattttctcgacttttcgccagcacaaattgttgtaaaaatacgaaacaaaaaaaaaggcgaaatgcgatgagaaaacccagtgaaccgaccgatttgcttggacaagttaccgattagattcagtcaagaagtgagctgatattttgaaacatttcccagactgcaaattggaattgctgacattgcgtaaataaatggctcagcttgaactgaaaaaccaaattgtgaatatttttcttttttagctgagctgcaatgcaaaaacgttagagctaggcttagtcaaataatcaattctgctattttcgttggcgataatcaacatcgcattaaaaacgtgtcgaaccacaaaacaggacatcattaaacagccccatctccactgaccgaccgctcgggatatttaaagggttctggctcttaagctatgggggtcggcaaatgcagccctaaatcgcatgaaattatccacatttgcatgccaatacaaaacacacagagctaatggcaattccagccacaccacatttatatagctcatgaatttttgattacgcatttggcaatgcggccaaatacggtcaaaagcaccagccgtacccaaatgaaccaaaccaatccaacggaagtgactccgtgcaatttaatattacgcatacgcagcgtatgcaactgattggcagcggttaataaatgcgctcaaaccgtcgttcacgcccagcccacacacatgcaaatatttgaatgcgtattccataattcactggacgccaatcgagcagctttgcgtgtgaccagaaaagcatcgttataatataaatacgcgcatcatacataatatcc

SEQ ID NO: 9614 - DNA, 1711 bp, DROSOPHILA
caagatgctgatgttattcgtagtggaactgctggttctactggccagttcatcggtcctctccatcgaggtggacaccgaactgggacgggtgcgaggagccaatctgacctccagattgggtgtcaactttcatgccttccgaggcattcggtatgcagagccacctctgggagatttgcgatttgtgaatccgcagccagtgaagccctggtccccgaaaatcttcgatgctagcgaggatggaccgatgtgcccgcaaccgtgggacaatatgaccgatgtatctgaggactgtctgagactcaatgtgtatacaaaggatttgaagggccgccgacctgtgatcgtgttcctgcatcccggcggattctatgtcttctctggacagagtaaatatctagcaggaccggagcattttatggatcgtgattgcgtgttggtatcgctaaattatcggctgggtagtttgggattcctggccaccggaagtaaggaagctcctggcaatgctggtctcaaggatcaagtcttggctttgcgctggatccagcagcacatccaacgttttggcggtgatcccgatagtgtaacccttctgggttacagtgcgggaagtataagtgtagctctgcacatgctatcgcccatgtcacgtggtctattccatcgaggcatctgcatgagtgctgctccatacggaccagttaagtacaaagacaatgatctacaactggccaaacgtcaggctggtttattgaagtgtccacaggaatccattggggaaatggtggagtgtatgaggcggaagccctacttggattatgtgagcacttataatggcatgtttgaattcggctggaatcccgtgctcaactggagaatcgttgtggagaaggattttgggcaggagcgttacctcatcgaaagtcctttcaaaacagctcgacgtggcgactttcacaaggtagccctcatcaccggcattacggagtttgagttcctttcgggcgctttctttgatctgcgaaatgaaagcattgttaaccgctataatagggattgggaacactatgcttctattgcgttgctcttggaacaaaactcaacgcaatcgcgagctgccagtcgagttttccgggaaaaatatatgccggaaagtttggacaagctggagtacccgaaatcacttaagggtatgggtgaactcttgagcgacgccctgattggagtgtccttccatcgatttcttcaactgatgtccccccacacacccatttacacatatctgttccgttacaagggtagatataccttcttgaaaaatcccgataaccagcaaaccataggccccgttcaccatgacgagctaatatatttattccatgttggacttttgattcctttgttgaagcgagaggatccggaaaattttatgatcgagctattgacacgtatgtggattgaatttgctcaaaagggtgatcctcacaacaaaaacgatgaatacctgaaaggtctgaattggccgctatacaacgcgcaagataaaggatatctagaaattggaaataaccttacagcaaaatctggcggtttctttttgaatcggtatcaaatttgggaggatttatttccactttcaagctttcactaagcatctttaataaatatcttatcataagtgatgaaataaatcttcaaacccctt

SEQ ID NO: 9615 - protein, 550 aa, DROSOPHILA
MLMLFVVELLVLLASSSVLSIEVDTELGRVRGANLTSRLGVNFHAFRGIRYAEPPLGDLRFVNPQPVKPWSPKIFDASEDGPMCPQPWDNMTDVSEDCLRLNVYTKDLKGRRPVIVFLHPGGFYVFSGQSKYLAGPEHFMDRDCVLVSLNYRLGSLGFLATGSKEAPGNAGLKDQVLALRWIQQHIQRFGGDPDSVTLLGYSAGSISVALHMLSPMSRGLFHRGICMSAAPYGPVKYKDNDLQLAKRQAGLLKCPQESIGEMVECMRRKPYLDYVSTYNGMFEFGWNPVLNWRIVVEKDFGQERYLIESPFKTARRGDFHKVALITGITEFEFLSGAFFDLRNESIVNRYNRDWEHYASIALLLEQNSTQSRAASRVFREKYMPESLDKLEYPKSLKGMGELLSDALIGVSFHRFLQLMSPHTPIYTYLFRYKGRYTFLKNPDNQQTIGPVHHDELIYLFHVGLLIPLLKREDPENFMIELLTRMWIEFAQKGDPHNKNDEYLKGLNWPLYNAQDKGYLEIGNNLTAKSGGFFLNRYQIWEDLFPLSSFH

SEQ ID NO: 9616 - DNA, 9890 bp, DROSOPHILA
ctcctggttgtaaaccggttgcaccttgaccggctggatctgttccttgctgtcctccgtctcctgttctgatttcaccacgccattcttcagtttctggtgcttgacgttctcgtttttgaggtttttggccgaggagaggagcagtttctggacgcccttgctgcgtttaagctttttagattcgcgtcgcttctgctgtcgctccgttgtgggtccctttttctggcgcagcttgttcttgatggaggcaatgcgtgcctctacatcctcgtcgtcggagtcttggtttttcagttttccctgttgtttctttttcttgtttcccgattcctccgtgtccgacagcaggtactcttcgtaggtctcctcatctgtaggaaatacgataaagttaaagatttaaggcttttcattaatggtttcaccttcttgtttggagtagggcactttgtgaatggtcagcagttccaagactcgctgatagaactttttggtgatggcgggcaggtcctccttctccggcttctgatccttgttgtgttcgatttcatactcctcccgcagacatttcacgatctccgcctgggtcattttcgagagtaaaataacaataaaactattatttacgcacgcacacgtgcagctaagcaaggcggtcgagttcagtgtgaccccacagaattcgggtgttttcgacagtggttaccctagcgcaaatgtctggtaccgctacaagtagtaaggggtattcccctattcagcgaatttaagcaatggtttcagattaaaggagattgaaatttaataaacattaattaaccattgcttaaattcataattctagcctaagctctgagaaatctcaacaggcatttatcaaacagtgttaccaaatacgaactttcgaaaaaggcgctctccagccttttgtcatttcccagcgctcccgctgcggtcacacccgcctcacttttccgtaaaacatcgttgaagaatgactaatttgcctgttttaagtatttactcaatgcccagctaattgcacatcgcaaacaaacacacagcagttcagttcaagttggagacgcgagcggcaccagcgaatcagccaagatgaagaggcagtttgccaaaatcaaaatagcagccgaaaatctgtcaaggtaagttcaaaggccagccagtctgtcggtcggatgtctgtgggtgtgtgtttgtgtaagtgcgctccaggtggacagacaggtgtgtgttgcctcatcacgaaagaagcaacagcagcagcagcaacaacaacaaaagcagcagagaagcagccacagagcaactgcatcaataacaaagcgcgatgacagccgtaacaatagtggactgccgatgatgacctaacccgtgctaaacccgtgtcaaaatggtccttttcgcattcgcagatcgagcaagtcggacagcaaggactcggagctggaggcgatcgagcggcaggtggacagataccgggacaccatcgagaagatcgtccgcaagctgccggcgctgagcggcggaggcggaagtggaagcgggagcagcgaggagcaggacaagcggaccaagaagaacagtcactacaagattgcccaggctctggacgagtccgccaaggagctgcccaaggacatgccgctgcagaaggtcctcgccaattgcggttagtaatcgggcaaccgggatttccagtgaggcaggcagttgcgtaggcggtcattcgccagagggggaagttacagaatttgttcttcatcaagtgattatattgatattgctttaggtacctagcttatcatagtttgttagcatgttagcttaaacatccatatgatgtttcttacaatctgaaaatagttcccagctgagagcccctccttgcagcggcaatcagccatgcctacggccctggtgggtgtcatgttgtcgctgctgataaggcgcacagtggttgtcgttcgctccaaatccgataatcgccgccagacatgcacaatggcacacgaacacgagtacgggttcgcagggggcttggagaacacactacagtggatgactgtgtcacgggcttcggtttgtctgtgtgtattggcggcctcgccttgtcgcttggccttgtggcatttacatttctcaactgcaaacggcaacatcaacatcgacatccacatcgacggcgttttttaatcattattataatttttattatgactttttcgccgctttctttcgcagcccgttcgcccgcagtattggtattggttattatttgcggtttcggcattgtctatttatacacctttttgttttgccagccaagttagcccgcccccattggcgcccgtttttattgccctgcttccatacaattcactgcccgattcactatgcatttcatttaaatttgttacacatcgcgcgcgaagtggcataacaaagcccggtaaacggcgataattatgctagctgcttggctagctgtggctagtaaaagtaaaagtctgggccaaattcatacatcatcgtatcgtcatgatctcttcttcgctgttcatttattattatttggtgggcgctccccctaggtcgcattactcattccgagtgttatttttatttgcctgtattatttccattcgctgtttccccctttcaggcactctgcattccacatattcgcagatgcgtgtgcgtcaattgcaattgccagttctgccgcagttgcagcgattcaagagcatctcggtggttgtgtaacggccagggatctggagagccccccccccctttttttttttagttccccacgttcctgattagacacgaacgcttacacatgcaactatcgcagccacagtgaacgtgtgtccgtgggttaagtggaagctccattcgaatgctcgggaaatcataattgggtcaagctgcggaaatcgatcgccaaacgatgcaaacattatttttgaaagggctataaagcctagagcattgtcagacttttctattcaaatgtttggcgaactttacgtctgtttatttgcaaatgtttcggaaaccgagcaatcgaaagtacgtattataaaatcaaactcgatttcattcgcttatcttcattttctaattttaactaaaaaattcgagagacgcttcaactttaacagtagacacctcattatagtgagatatgtcattgtaatttacatttacaacttaatttctttggtaaataatatatcaatgtttaattgcgagcatagcaacttaaatgttaggcaacaagttgtagctgccaagctccagacccacgaaaacacaaaattaccgcaccgaaattagctttttgtcgccagtgttatgtcggtaattgcggtgagatatcatcgcactttaacccactgtgcgccctttgcaactcttattgttagccacgatgcgcttcaattcaagccattcagcaaggggagctagaagcgagcgtatctcgaatgtaacactccagtgccgacgtcgtcttcgctttggactccgtctccgacaccctcttcctctgcaactgcctatgctttctgtggtgcgacctttttgcctccactatgcctccatggcgggttcagctgctgaggcttgagtctcggggcactcaacacaattatcacaattttgcttactcagctcgtcatcctattcgccgggcaattcccccacggattggcccaatctcgccccgcatctaagcggagctactccagcaactgaaaaccaaccagcacgccaacatcttcgcagctaccgccaggcgataaggtcttaaataagcagtgacttcctcacttgcgggtggaatggaatgtaatagttgggaatggcaagaggctgcgtgatacacacagcaaactatttccatttactttatgattgataaagctagcaaataatgatagtagtttctatttcctttagaagttagattcgcttgtacttgtcttagattagagagttttggggcagcaaatttaaaattcgatatccgatgacaaagaaagtggtaataccgctttatgtaaaggatagcgacttatctttttatctattactaatttctgcttatttctacttattttctgtgcatttattgtgggggcagataggtgtaggctttgcagcttcatatacccattactaatgacagtatgtgctttcccattgcaggcgagctggagaagacgatggccgagtgcatcatcgaaagcgagctggagacggaggccaaggtggtgcggcggctgaagaacatcttggacaaggagatacaggagatctccacgctcaagcgcaacgtgtcgcgcaccctgcaggagtatacctcgctgaagcgcagccatgaggtgagtggtgatcgtaaatctagcggggattcgacggtcgtgtatactctactcggtgggtgaatcggtgaacaggccagagagagtaaataatgtgtggtttccgttttggccaaactgcgcacgatgacgagatgggagattgttaaattaattaagaaatctgctcgttggaggtaatgggccgccaaaagttacctcagctggtcaagtgattcgcttttgcccaacgatatccaatcgcgaagttgtctctgattaacgaacaataacaacgattgtcgatcgttggcggtattgttgaactgtatccctcttaaacagagtgcactgtggtttgatttcttgtgcgaaacaccagttcaagttcgttgaaaagtagacaatgtgagaaagcatgcccagaatgaaagcagacgatagataggcccttcccagaatgccacaaatgtcataaagctaccaagcaaaaccgagccttcgctttttaatcaatgtacaaccactgtaccgaggcggatgccaagaagcgccggccaaagaagcaatcaatttttaatttccatttattattattactattgttgttgttgggttttctttcatactggctctgtctttatctcacaccagtttctattgtattgtttgtttgccgtgcgtttcgcttttgtcgtttacgtttttattattcgaatccaatactcgacgctgctgccttatcgccgagtagtgggcacatctggagtgggatgtggcgcgctggaggagatgagatggcatgaacggctctttggtgttccaatttcttgacgaacccgattggttctgtcccctggagtctacagttatggccggcttctggacacaaaaacttacttttcgagttttattgttttcagtcttatcttcataaatacattttttcgctcgttttttccttccgctgtattttgtacaaatcacgacgccgtttgccatatggagacatcggtcggggatgactagccgctgtatttgttgatgtatgttgtctgtttaaggtgtcggaagacgttcattgacttggcgacagtgacatcataattgaaatggacgaccactggccactggcgaatcagaaaattcgaaacccaagttatttacactccccagtaatcttatcgcctattaaccgcccgtcgacttgccataattcgctaatcaaacgctcaccgctgctccggtgctgttctaattgcattccctgacatagatccaattcgaaaacaatacgaacatataagcacacgactgactttggaagtgctaactttggtgcccggcgttgaatgtgtaacttgcggtgccaactgggatgtaggtcgtcgagaggttgcggctcatggaaatgatgtgactcagtcacactccgatccgatttgcaggtggagagggcgcggaaaccgataggtggatgccattgtcttctcggggggcagatagcgtcggctgcacttacagcaatttgtcacgatttgtttatttttagcggtgttatgatacgggaacgggagctatgggatagggcgatgaatgccaccaccagtttgtttgcgcacaaggggtaatgctgtagtaagcaaaacttacatcataagcgggaactttgtttattttttacgctcaacgctggattacttcactcaaagaatctttgttttgtccgttagcggggaaaaactccgcaaaggcagtgtgattataaattatttaaaaaaaaaatacatttttatatcatcgaaacttgccaattgacagtcttgctatatgcttttgtgattaaagtaggaaatacattgtttgttttttgttgttgttattgataaggccctttctctttcactcttgatgaaagtattttacgaagctcaattgcgtttcttatcagcctttgtagagcaggagaattgcatgatctagtcaccgcagtcagtggccccaatgcagcggcgcatgtgtgttctgtatcccgaatgagacctattgtcggaagtgggtgaactcaaaacaaagtccgtgatgagagcggtaacagctggctgggctgcggtagaggtcgatctatttttaaatgagccgcaaaactttcctctacaggcatcttccatgagtcattcggaaaactattttgagataagatactttggcgcttgaactttgctcctttcaaaatgtgacgatgtccgtgacattggttcttatctgacatgggctaatcggtgttttgctttattctcgcaggcggcaatccgtctggaggaaccagcggccaaggttaaccacatcaagagccagcaggaggagtgcgagctgaagctggaaaaggagcgggatgcctgggcggcccagatgctggagctgattgccaaagaggacgagatcgttagctgcatccgcgactatgtactcaaccaaagaaactatcacgagcgcgccctgcagcacgtaaacgcctcgctggcccgcatccaggacactatccagggcacagagaagtcccgctttggcacctcgctcaaggagcatctgacatccacaaaccgcgagatctcctacatagtggagctgtgctgctgctgtctgttagagcacggcctggaggaagagggtctgctgcgagtgggctgcgcgagcacgaaactgcggcgtatgaagcacgccctggaggcgcagcatgtaaagacaccgcttccgctggactaccaggatccacatgtcattggttccatactcaagctgtacttgcgtgagctgcccgagccgctgctcacttacaacctgtacaaggacttcatccggatcgctgagaggcacagcgaggccgagcgcaagacagagattaaggccattctgaccaagctgccaaaggagaactacgcgaacctgcgctacctcacccgcttcctgtccatcgtgcagcagcgctcggcgctcaacaagatgagctcgcagaacctggccatcgtgatgtcaccgaacatgctgtggccacgcatcgacaagagcagcaacgctccggccgactacattggtcaggtgaacagctcctcggcagccaacatcattgttgagctgctaatcagccagtgggactactttttcatcggcgaagtcgagttctacttgaccctgcagaagcaaaagctcttcgtcgagggcaagagcaaatctaactcctcgaacgaaaacctggatagaaacgacagtggtaagcatactacacagtcgggcatctatgaaacgggccactatacagtattcgacctatgacgactttttcctcttatatttttaacaattccacgcttagtattttcctgtgccttatattttttatatttttctaaatgtttctttacgtacctagaagctgttaaagtgcaatattagtggcaatattttgtttaataaaatggattggaaccaaatttagtattgtacttttggaagttcatggtgtcattggaataactattttacattttatttaacttataccaaatcttttgactcgtttgaaattttaaagttcttgtacattggcttattcgattttaaattaaatgcttttaaaaaaaaagtctaataaaagatatatcgttttataacgtattaataataaagctcatatcatatttaacgatccatttccatttatagaagtcatggagagtccacgctatggtacattgcgcagacaaaaagctaatgcaccttcgcctcctaccaccaatggaaatgggataattatgaccacatcacagacttcgcaccgaccacatgcaaaggagctgttcccgcagcagacgccggaaaagcaggaaaagcccgccaagccgccgctgccgaatttgccgcagtttcagtcgccagctgctagtcagccgacgcagacgcagctggaaccactgcctccgccgcctgtaacgccagccaagcctgttccgatgacgcggacacagttcttcgggctggacaacctgccctctccaacggccgatcgcaagagcaccgacagcattggcagcttcaagctgaagccagatgtgccgcagaagcctctgctgcccaagcgacccaccgtgctgggcgtgggagtgcctaaggcagatggaaagagcgatgatgagggcggtaccacgcccactcaggcaacaattgataatggcaatggcagtgtgcgatttaaaacggagcattttctggacaagctgcgtcaggagaacggcgagacaaacggaacgcgagaggtgtcgtcgacgacaaaggaaaacaatcacaaccatgatccgcctgctacggctgcagatcaaaatcagcagcaagctcagccccaagtcacgacacccatctctccgaactcatttcaaacgcccaagaggccaacggtgccagcgccgccaccgcccacaaattggaagtcctcggactagaggggaatgagtagagaggacgcgcaatggaaacgtggtcagagtcattaggtgttactgtttactcgttaagacttgaacgcacagtaatatatatatatatttcgaaatgatccttgcggtaaggagactttgtgcattatagagagaaaagcctctgcgtattatgcatttgtatttttgccttgttcataagcaatctaatttgtacgtgtttagccatatataacaatatcacgcgatatccataacgtatatgtatgcatatatagtctttagtaggccaccataaatcaattgtcgaaattcgatttgttagcccaagccagctctcaattgttaatccttgtttgaaaggttgtgatacttcagaaaggttttgtgtttccttaattttttgcattgctcttgagtacgttttgttaacttctccaacgaaagacattgtgatttccttttattaaaagttatgatttcgattaaattacagaaattacagaaaattccaatgtattattcaactcacgaagtacattttcattgaattatcatttcgctgcgcgatgtactttactttgtatctttgctttattaatttgtaatgcaattattattatttttattttataataaaattatgtatgataaactgttgtgtatataaaatatacataaaaagataaatatgattttgcccgagaggcatttgtctttgtattttattgtttgtgaagttaattttacgaaattggctaaagagtgggtgcgcgtagtgtatgttagaatgtggatctcttatgaaattggtaatacctagctcttaatcacatactgacctccttaaatcaaatgatacttaagatatcttcagctttgtggtatcttcaaaactctacactttgtgccacaaaacgaatacctgaacacaagcgatttgtagacagcacttattataaaccaaatggcataacttccaagtcaaatacctaactactttata

SEQ ID NO: 9617 - DNA, 2339 bp, DROSOPHILA
actaatttgcctgttttaagtatttactcaatgcccagctaattgcacatcgcaaacaaacacacagcagttcagttcaagttggagacgcgagcggcaccagcgaatcagccaagatgaagaggcagtttgccaaaatcaaaatagcagccgaaaatctgtcaagatcgagcaagtcggacagcaaggactcggagctggaggcgatcgagcggcaggtggacagataccgggacaccatcgagaagatcgtccgcaagctgccggcgctgagcggcggaggcggaagtggaagcgggagcagcgaggagcaggacaagcggaccaagaagaacagtcactacaagattgcccaggctctggacgagtccgccaaggagctgcccaaggacatgccgctgcagaaggtcctcgccaattgcggcgagctggagaagacgatggccgagtgcatcatcgaaagcgagctggagacggaggccaaggtggtgcggcggctgaagaacatcttggacaaggagatacaggagatctccacgctcaagcgcaacgtgtcgcgcaccctgcaggagtatacctcgctgaagcgcagccatgaggcggcaatccgtctggaggaaccagcggccaaggttaaccacatcaagagccagcaggaggagtgcgagctgaagctggaaaaggagcgggatgcctgggcggcccagatgctggagctgattgccaaagaggacgagatcgttagctgcatccgcgactatgtactcaaccaaagaaactatcacgagcgcgccctgcagcacgtaaacgcctcgctggcccgcatccaggacactatccagggcacagagaagtcccgctttggcacctcgctcaaggagcatctgacatccacaaaccgcgagatctcctacatagtggagctgtgctgctgctgtctgttagagcacggcctggaggaagagggtctgctgcgagtgggctgcgcgagcacgaaactgcggcgtatgaagcacgccctggaggcgcagcatgtaaagacaccgcttccgctggactaccaggatccacatgtcattggttccatactcaagctgtacttgcgtgagctgcccgagccgctgctcacttacaacctgtacaaggacttcatccggatcgctgagaggcacagcgaggccgagcgcaagacagagattaaggccattctgaccaagctgccaaaggagaactacgcgaacctgcgctacctcacccgcttcctgtccatcgtgcagcagcgctcggcgctcaacaagatgagctcgcagaacctggccatcgtgatgtcaccgaacatgctgtggccacgcatcgacaagagcagcaacgctccggccgactacattggtcaggtgaacagctcctcggcagccaacatcattgttgagctgctaatcagccagtgggactactttttcatcggcgaagtcgagttctacttgaccctgcagaagcaaaagctcttcgtcgagggcaagagcaaatctaactcctcgaacgaaaacctggatagaaacgacagtgaagtcatggagagtccacgctatggtacattgcgcagacaaaaagctaatgcaccttcgcctcctaccaccaatggaaatgggataattatgaccacatcacagacttcgcaccgaccacatgcaaaggagctgttcccgcagcagacgccggaaaagcaggaaaagcccgccaagccgccgctgccgaatttgccgcagtttcagtcgccagctgctagtcagccgacgcagacgcagctggaaccactgcctccgccgcctgtaacgccagccaagcctgttccgatgacgcggacacagttcttcgggctggacaacctgccctctccaacggccgatcgcaagagcaccgacagcattggcagcttcaagctgaagccagatgtgccgcagaagcctctgctgcccaagcgacccaccgtgctgggcgtgggagtgcctaaggcagatggaaagagcgatgatgagggcggtaccacgcccactcaggcaacaattgataatggcaatggcagtgtgcgatttaaaacggagcattttctggacaagctgcgtcaggagaacggcgagacaaacggaacgcgagaggtgtcgtcgacgacaaaggaaaacaatcacaaccatgatccgcctgctacggctgcagatcaaaatcagcagcaagctcagccccaagtcacgacacccatctctccgaactcatttcaaacgcccaagaggccaacggtgccagcgccgccaccgcccacaaattggaagtcctcggactag

SEQ ID NO: 9618 - protein, 740 aa, DROSOPHILA
MKRQFAKIKIAAENLSRSSKSDSKDSELEAIERQVDRYRDTIEKIVRKLPALSGGGGSGSGSSEEQDKRTKKNSHYKIAQALDESAKELPKDMPLQKVLANCGELEKTMAECIIESELETEAKVVRRLKNILDKEIQEISTLKRNVSRTLQEYTSLKRSHEAAIRLEEPAAKVNHIKSQQEECELKLEKERDAWAAQMLELIAKEDEIVSCIRDYVLNQRNYHERALQHVNASLARIQDTIQGTEKSRFGTSLKEHLTSTNREISYIVELCCCCLLEHGLEEEGLLRVGCASTKLRRMKHALEAQHVKTPLPLDYQDPHVIGSILKLYLRELPEPLLTYNLYKDFIRIAERHSEAERKTEIKAILTKLPKENYANLRYLTRFLSIVQQRSALNKMSSQNLAIVMSPNMLWPRIDKSSNAPADYIGQVNSSSAANIIVELLISQWDYFFIGEVEFYLTLQKQKLFVEGKSKSNSSNENLDRNDSEVMESPRYGTLRRQKANAPSPPTTNGNGIIMTTSQTSHRPHAKELFPQQTPEKQEKPAKPPLPNLPQFQSPAASQPTQTQLEPLPPPPVTPAKPVPMTRTQFFGLDNLPSPTADRKSTDSIGSFKLKPDVPQKPLLPKRPTVLGVGVPKADGKSDDEGGTTPTQATIDNGNGSVRFKTEHFLDKLRQENGETNGTREVSSTTKENNHNHDPPATAADQNQQQAQPQVTTPISPNSFQTPKRPTVPAPPPPTNWKSSD

SEQ ID NO: 9619 - DNA, 6727 bp, DROSOPHILA
aaacactagcacagaattattatattcatagagcgatcaccttgtattccgacatgtctgttcctccggcggtttatagaagcactgaaatttacggatcatagacgagccctacttatatatgctcgatccagtcaggccacttgttctccatcgctacatggcgagtattttgaatacttgccggagaaactggtccccgtgcaaaggccggccccctaaaatgcggcgaatgataccagagataaacacctgccccccagttgttgatgcgtgcggattgttttgattttgttaccaactaaatagaaccactggaaagcatacgtgattcgcttagcatagcggttatactggtttaaaaatgggctatacttctttaaatatagccgagcaattttataatagtaagccgtgctgcttagcgtaaataatttttataaatatacttatcctgcagcaaagaatataacacagatgctgtaaactaagtaactagtcgtttaatttattgcggcaaagattcaaagttatagtttatacggtaggcaatacaatacacagtgatgtgtgcgctgtctgtatattaaaatacttaaagtacttttatgcggtaattaaacctaaattagtaagagtacattaaattatacgtttaaggacatacagcgctcgtgaggtgaataaaagcggaaattcactcgtaggactggcgaaatctatacggatgatgattgtttcgattgagatatgcacggcatatcctagttgtaaaaaataatccaaagtatacaaagtacattttttgaaaattcataaacttaagaaaaagaagacgaacattttaaaataattatcccgggatttactgattgggcgattaaaatgaccgactttggtttgctaatggatgcaaacgcggcattacgtatgggaatatatactgttgggaaaatactgcgacttcgattgcgctggcaaggattccgattcagccatcctagtcgtgcgacagattcaagatatcatcgcccatgttgtttttcggcatctttgccggcggtggtgcagccagatccgccaccgaagcgaattccatgcgcttcttgggcactccgccgctgccgagcagcgctcctggcggtgccaactctccgtagaggcggcctatgtccggcgagggtcgtcgatgcgaagaaccgctgctaccatcggagggggccggcgatggtgtgttcgagggcacactcgatatggccaggtccacggcactgaagttgtacttgccaccagagttggagttgctgcctccgccgccgctaccgccactgctagccgatttcgtgggcgtcagacgctccaaagcaggagatgccgatgattcccgggtacgcgccgatgaaggcgttgtggacttcggtggtttcatcatcatggccgacagcgattcctgctgaatcttaaacagcgccgatggagtcatgaacatattattagcggccagtgtggtttttgacaacggatccggtatgccgtatttgccatgttgctgctgaaagaaggcagcgtagtcctgcatcttttcctgcgccaaggcattatagtatgctgcttgattggatagggatgagggtgaagacattccggaaacccctgagttgccggcggagctgcctgacttcatggcattggctgaggacccagctcccactacggctcccgagggcgtggcaaacagggcgtccaagtcggccgcagctttattttggcgataaagcaatgccttaatctccgaatcctgcttctccagctgcagcaactgatttagcatatcgctctgaatgtccttctgcttttgcttagacccacctccgctcgcacctcctccgactccaactcccgatgagagaagagcggatagctcattgtgggctccagccatgtgcttgttggaggacatcgccgctgcaaattgattgttgggatcaaacaacttggtgtaggtctgcaataaagccgtgtagtccgcttgcgcagccgcctgctgttgttgctgctgctgctgctgctgatgttgctgctgctgtaactgttgctgcttcttggacgagctgctgttggaactaccactagaggcggtctgtggaggcggtggtattgaggcagctgccactgccatctgctgctgcaggaacgcgttgaggtcgttgctctgcttactttgctgcatgtaggagtcatagccgagcaattttgatgcctgaataaggttgttgtagtcggcactgagagcagctgctgccgctgctgctggcgaagatttcgaggacttgctggatgatgagtttgaggattgacctccagtcagagcgttagcagcaggcactcccagtccggcacctgtcagatagctgtagtctgatccaaagcccaaggtgcccagggtggtggctccgagggcttccgcctgctggaggagtagtgctgcatattccggagaccggatgagctcgctcatttttaacggatcgttttttagttcatccagctccttcatcaatttcgttttatacgaattggaagttgagctggagttcgaggaggaggatgaggacgaggacttcgatgatcgttccgacttggacttgctactgctatgggcgttgctgtttccgctgcctccgattcccacacccgtgggcagcggcatattgaagctattcgagtaggcagccaccgctgctgccacattggggtcattcaaaccggacgatgcagaggcattgctttgcttagagccacccaccttggctgctgccgccgccaactggtttagagaggagctgccgtaatccttgcgctgctgctggaagagcgcagccaaatcgccttgaaggaagttcggaggaagctgccccgccaactgagccaaactagcagccatcagatcattggccgtgggcagacaagcggcagctggaggcaccaaagctgctgcagctgcctcatatttgttcggcgtaatgctggggctgtttcgagcaatatcgctgacgctaaacttgcccggactgggcgctggcgagttgcgtgtgcgggaggtggatgcgtgtgacgaggtatccgatttggcgggcgacggtgatgccctaactggaacctcaaacttggcgggactggcggagttcgattgtatagttattgggctgtccctgggcgaggcattcaaagcggaggtcagggccgaagtcgtcactgcaggtgtgatggcaggtggcgcagtaactgcgggaacttggggtggtagcagctggctgggcgttgctggcaaaactggagctcctaaattgggcagcactggcggtagactcgtcggattgggcgtggccagaggggatagcatccgcacggggttcatatttagaccggacggcatgcagagctgctcctgaagggacatcaccttaagttcacttgccttttgctccgcctgtgcgttagattcctcctccgcctttcggccactgtcctccaaaccacccatagcttcactgaactgctcctctttaggcggatttatcttgacatccccgcttagatccataaggacaacaggtttgtcttcctccttaacctccaggtcatcattgtcgatgatcttgatagtcttgggtggaatgaagtcgtcttcctgctcacaatccagcactgcacatatccagttccagagcgctttatcgctctgcttggagggaaactttgggtagagtgtgtttttcagcttttcgttgtaggtaacgtcgttgttatagatgttccggaacttgaccatctcgctccggtactgcgagtagtagtccacgcacagctgtatctcagagcgcacctcctcgggtatctccttgtccggcagcaccgaatactgcatcagcattggacggccatactccatggactgtctgttctcgttgggcggaacaatccaaatacacttgaccaccgactccagggtagggttttcatcgtagtaaggggctgtaagataaaatgtattattcgattaaggctgagatgaagtatttgcgcagaatttaaaaggccattggataacacatacatataattagggagacacagggcgtataggtgagatcgctggcaccgcgcattttgatttgatagtccaactgtgcatcgcagtcgcgcaacgtaggttccgcctgaaacttgggatgcgagtgataccatccaaccaacagcaattgatcctgaatcatcatcttttgaatatcacgctccacttcgccggctcgctgtcgatcaaagcgcgtgctgcgacaaggatatgtctttgtgatggatagagctgaaatgaaaaaaacatgtagaaaatgcctatgcagtataaatcgcaagccgagccggactcactgtgtgtgttcatgtcccaggtgccacctagatagccgcacacctcacgcaccgtcaagtggcagtgaaaatccgccagcaagagggcagaggagttcactgtaatgaggaagggctgcaatttccccaccgaagtaaacggcaccgattcaatcaacatgttggcgtcgctgtggataaatagaattggattaaaataccatccagcatatagatttaaactaaaagcaagccagactattcttttaaagaaccaacccccctcaaaattcagtacgcatttggtctactcactgtactacgttgcgattcgaaacggtattatgtgcgaaaacggttcgcttgacgacaatctccggggtgtcagtcttgcgttcagcatctatggattcgatggaattagcaaggattataaagcaagtgagctttacctacccagttcacaatcatctagcggcgtctccttttgcaacgcgcactttcgcaaatacgtgttcttgtaggcgtccagcttctttcccttgtacttgaccgaggcccagccgcagccgctcttcttgtccggattgatgatccgcttgcagtgcattgcccaggcgctgggcgtgaggaatattgtctcagtctcatgggatttgatcttaccgtcggccagtagatcgccaacgaacttctggcccagatattcgatagtcattaagcccaggcccggctgcaggacattggcagccatcagcgtttgcagtgtgacggtgcgtccggtgccattgaagccctcgtagttctccttggtctaaagggtttgaatagaaaatattatacattttcaaaaagcttaaggtatctcgctcacctcatcgtcgttgtcctcgtcgccagcatcgctatccacatccttgtcgcacatgttgtcctccagtatggctacaggtgctgcaccatccgtgggcggtggcccagggtccggagtgacgtccacagctccggtcgtcgctggtgcacgctccccctcctccgcttgcaccccttcgccaacacaatcgtttgttatttgcagtggcggcggcggcggcggctgcagcacctccccctccacttcaccgtcaccatcacagtctccctcgccatcggaactgctcagcacctggttctcgcctgactcgtccacaccatgttccactccgttctccatgcgttcttgtcgcgaattctgtgcaattctacggatattttacttccaagatacttaagttttgcgaaaaaaaactgatggatgcagtaaggtagctgctttttctacccagaataccgaaactcattaaaaccgccaacccacggtcacacttgctagcggtccaattttaaccggtaaaaacggaggaatggcgttgccatacataacatgagaagcattgaatcggttatttattacagaaacacaagaaatgtttttgttttcaaatgtttatttatcataaaagagttcaagtcttttaggcattttcgtaatcatttattttgaaatccattaattttacttgttttatcgttggttttagtcgtggcacgaaaacagtgtaaatgtaataatattactttaaaattaattttaattgtgatctgttaaagtatttaattttttaaatcattcaagccgaaataatcatttgaaaatatgtgcgtggcaaatttaatgaaacctctaaacatcgatatcacagcgtagaaatcgacaataatcatcaaaaacatcgaagcttgcagcattactagaaatagtcagcggaaaaggcgcgcattaaattgttttgttaaattacttttacggtcagaaagtaacttaaaatacatccaattactatcgtattttacatgcgttaacgaaatggcactttgggtggataaataccgtccgcgggagctgtccaaattggacttccacaaggtaaatcagcgaggaaaccggcgcatacatctatatagctggcccatatattaaagtatctctttttaaaaaggttttttattttatgatttttgctaatttcgatgcaggatcaagcggagaacctacgcaacctttgcaagcagagcgattttcctcatctgatgttctacggaccctcgggtgctggcaagaagacacgcatcatgtgcctgctacgggagatgtacggatccggcgttgagcggttgaggagcgagaccatgacattcaccacgccatccaatcggaaggtagaggtgatgacggtcagcagcaactaccacttggaggtgaatccctccgacgctg

SEQ ID NO: 9620 - DNA, 4343 bp, DROSOPHILA
aaaaagcagctaccttactgcatccatcagttttttttcgcaaaacttaagtatcttggaagtaaaatatccgtagaattgcacagaattcgcgacaagaacgcatggagaacggagtggaacatggtgtggacgagtcaggcgagaaccaggtgctgagcagttccgatggcgagggagactgtgatggtgacggtgaagtggagggggaggtgctgcagccgccgccgccgccgccactgcaaataacaaacgattgtgttggcgaaggggtgcaagcggaggagggggagcgtgcaccagcgacgaccggagctgtggacgtcactccggaccctgggccaccgcccacggatggtgcagcacctgtagccatactggaggacaacatgtgcgacaaggatgtggatagcgatgctggcgacgaggacaacgacgatgagaccaaggagaactacgagggcttcaatggcaccggacgcaccgtcacactgcaaacgctgatggctgccaatgtcctgcagccgggcctgggcttaatgactatcgaatatctgggccagaagttcgttggcgatctactggccgacggtaagatcaaatcccatgagactgagacaatattcctcacgcccagcgcctgggcaatgcactgcaagcggatcatcaatccggacaagaagagcggctgcggctgggcctcggtcaagtacaagggaaagaagctggacgcctacaagaacacgtatttgcgaaagtgcgcgttgcaaaaggagacgccgctagatgattgtgaactggatgctgaacgcaagactgacaccccggagattgtcgtcaagcgaaccgttttcgcacataataccgtttcgaatcgcaacgtagtacacgacgccaacatgttgattgaatcggtgccgtttacttcggtggggaaattgcagcccttcctcattacagtgaactcctctgccctcttgctggcggattttcactgccacttgacggtgcgtgaggtgtgcggctatctaggtggcacctgggacatgaacacacacactctatccatcacaaagacatatccttgtcgcagcacgcgctttgatcgacagcgagccggcgaagtggagcgtgatattcaaaagatgatgattcaggatcaattgctgttggttggatggtatcactcgcatcccaagtttcaggcggaacctacgttgcgcgactgcgatgcacagttggactatcaaatcaaaatgcgcggtgccagcgatctcacctatacgccctgtgtctccctaattatatccccttactacgatgaaaaccctaccctggagtcggtggtcaagtgtatttggattgttccgcccaacgagaacagacagtccatggagtatggccgtccaatgctgatgcagtattcggtgctgccggacaaggagatacccgaggaggtgcgctctgagatacagctgtgcgtggactactactcgcagtaccggagcgagatggtcaagttccggaacatctataacaacgacgttacctacaacgaaaagctgaaaaacacactctacccaaagtttccctccaagcagagcgataaagcgctctggaactggatatgtgcagtgctggattgtgagcaggaagacgacttcattccacccaagactatcaagatcatcgacaatgatgacctggaggttaaggaggaagacaaacctgttgtccttatggatctaagcggggatgtcaagataaatccgcctaaagaggagcagttcagtgaagctatgggtggtttggaggacagtggccgaaaggcggaggaggaatctaacgcacaggcggagcaaaaggcaagtgaacttaaggtgatgtcccttcaggagcagctctgcatgccgtccggtctaaatatgaaccccgtgcggatgctatcccctctggccacgcccaatccgacgagtctaccgccagtgctgcccaatttaggagctccagttttgccagcaacgcccagccagctgctaccaccccaagttcccgcagttactgcgccacctgccatcacacctgcagtgacgacttcggccctgacctccgctttgaatgcctcgcccagggacagcccaataactatacaatcgaactccgccagtcccgccaagtttgaggttccagttagggcatcaccgtcgcccgccaaatcggatacctcgtcacacgcatccacctcccgcacacgcaactcgccagcgcccagtccgggcaagtttagcgtcagcgatattgctcgaaacagccccagcattacgccgaacaaatatgaggcagctgcagcagctttggtgcctccagctgccgcttgtctgcccacggccaatgatctgatggctgctagtttggctcagttggcggggcagcttcctccgaacttccttcaaggcgatttggctgcgctcttccagcagcagcgcaaggattacggcagctcctctctaaaccagttggcggcggcagcagccaaggtgggtggctctaagcaaagcaatgcctctgcatcgtccggtttgaatgaccccaatgtggcagcagcggtggctgcctactcgaatagcttcaatatgccgctgcccacgggtgtgggaatcggaggcagcggaaacagcaacgcccatagcagtagcaagtccaagtcggaacgatcatcgaagtcctcgtcctcatcctcctcctcgaactccagctcaacttccaattcgtataaaacgaaattgatgaaggagctggatgaactaaaaaacgatccgttaaaaatgagcgagctcatccggtctccggaatatgcagcactactcctccagcaggcggaagccctcggagccaccaccctgggcaccttgggctttggatcagactacagctatctgacaggtgccggactgggagtgcctgctgctaacgctctgactggaggtcaatcctcaaactcatcatccagcaagtcctcgaaatcttcgccagcagcagcggcagcagctgctctcagtgccgactacaacaaccttattcaggcatcaaaattgctcggctatgactcctacatgcagcaaagtaagcagagcaacgacctcaacgcgttcctgcagcagcagatggcagtggcagctgcctcaataccaccgcctccacagaccgcctctagtggtagttccaacagcagctcgtccaagaagcagcaacagttacagcagcagcaacatcagcagcagcagcagcagcaacaacagcaggcggctgcgcaagcggactacacggctttattgcagacctacaccaagttgtttgatcccaacaatcaatttgcagcggcgatgtcctccaacaagcacatggctggagcccacaatgagctatccgctcttctctcatcgggagttggagtcggaggaggtgcgagcggaggtgggtctaagcaaaagcagaaggacattcagagcgatatgctaaatcagttgctgcagctggagaagcaggattcggagattaaggcattgctttatcgccaaaataaagctgcggccgacttggacgccctgtttgccacgccctcgggagccgtagtgggagctgggtcctcagccaatgccatgaagtcaggcagctccgccggcaactcaggggtttccggaatgtcttcaccctcatccctatccaatcaagcagcatactataatgccttggcgcaggaaaagatgcaggactacgctgccttctttcagcagcaacatggcaaatacggcataccggatccgttgtcaaaaaccacactggccgctaataatatgttcatgactccatcggcgctgtttaagattcagcaggaatcgctgtcggccatgatgatgaaaccaccgaagtccacaacgccttcatcggcgcgtacccgggaatcatcggcatctcctgctttggagcgtctgacgcccacgaaatcggctagcagtggcggtagcggcggcggaggcagcaactccaactctggtggcaagtacaacttcagtgccgtggacctggccatatcgagtgtgccctcgaacacaccatcgccggccccctccgatggtagcagcggttcttcgcatcgacgaccctcgccggacataggccgcctctacggagagttggcaccgccaggagcgctgctcggcagcggcggagtgcccaagaagcgcatggaattcgcttcggtggcggatctggctgcaccaccgccggcaaagatgccgaaaaacaacatgggcgatgatatcttgaatctgtcgcacgactag

SEQ ID NO: 9621 - protein, 1412 aa, DROSOPHILA
MENGVEHGVDESGENQVLSSSDGEGDCDGDGEVEGEVLQPPPPPPLQITNDCVGEGVQAEEGERAPATTGAVDVTPDPGPPPTDGAAPVAILEDNMCDKDVDSDAGDEDNDDETKENYEGFNGTGRTVTLQTLMAANVLQPGLGLMTIEYLGQKFVGDLLADGKIKSHETETIFLTPSAWAMHCKRIINPDKKSGCGWASVKYKGKKLDAYKNTYLRKCALQKETPLDDCELDAERKTDTPEIVVKRTVFAHNTVSNRNVVHDANMLIESVPFTSVGKLQPFLITVNSSALLLADFHCHLTVREVCGYLGGTWDMNTHTLSITKTYPCRSTRFDRQRAGEVERDIQKMMIQDQLLLVGWYHSHPKFQAEPTLRDCDAQLDYQIKMRGASDLTYTPCVSLIISPYYDENPTLESVVKCIWIVPPNENRQSMEYGRPMLMQYSVLPDKEIPEEVRSEIQLCVDYYSQYRSEMVKFRNIYNNDVTYNEKLKNTLYPKFPSKQSDKALWNWICAVLDCEQEDDFIPPKTIKIIDNDDLEVKEEDKPVVLMDLSGDVKINPPKEEQFSEAMGGLEDSGRKAEEESNAQAEQKASELKVMSLQEQLCMPSGLNMNPVRMLSPLATPNPTSLPPVLPNLGAPVLPATPSQLLPPQVPAVTAPPAITPAVTTSALTSALNASPRDSPITIQSNSASPAKFEVPVRASPSPAKSDTSSHASTSRTRNSPAPSPGKFSVSDIARNSPSITPNKYEAAAAALVPPAAACLPTANDLMAASLAQLAGQLPPNFLQGDLAALFQQQRKDYGSSSLNQLAAAAAKVGGSKQSNASASSGLNDPNVAAAVAAYSNSFNMPLPTGVGIGGSGNSNAHSSSKSKSERSSKSSSSSSSSNSSSTSNSYKTKLMKELDELKNDPLKMSELIRSPEYAALLLQQAEALGATTLGTLGFGSDYSYLTGAGLGVPAANALTGGQSSNSSSSKSSKSSPAAAAAAALSADYNNLIQASKLLGYDSYMQQSKQSNDLNAFLQQQMAVAAASIPPPPQTASSGSSNSSSSKKQQQLQQQQHQQQQQQQQQQAAAQADYTALLQTYTKLFDPNNQFAAAMSSNKHMAGAHNELSALLSSGVGVGGGASGGGSKQKQKDIQSDMLNQLLQLEKQDSEIKALLYRQNKAAADLDALFATPSGAVVGAGSSANAMKSGSSAGNSGVSGMSSPSSLSNQAAYYNALAQEKMQDYAAFFQQQHGKYGIPDPLSKTTLAANNMFMTPSALFKIQQESLSAMMMKPPKSTTPSSARTRESSASPALERLTPTKSASSGGSGGGGSNSNSGGKYNFSAVDLAISSVPSNTPSPAPSDGSSGSSHRRPSPDIGRLYGELAPPGALLGSGGVPKKRMEFASVADLAAPPPAKMPKNNMGDDILNLSHD

SEQ ID NO: 9622 - DNA, 6585 bp, DROSOPHILA
cattgttgggggactataaagtgatggtaaaacttttaatcaaaagcgaatgcgctctgtgcccgctaattacattagttctgcctgatgctgcgggttggcttatatatgtatgtatgtatgtacgagttacacatggatacacgtagatggtgctactggatgctgcagttgctcccgctgaatgtttgaatattttcaattatttcgagcggcgcattgtgctgactttggcattgacagcatgcaggataacacacacacacacagacgcagactcacacacacactagaagcgacagaaggaaataggaaatgttattgtcgctgtgcatccccattccatttccctttccacttccattggcaaaagttttggtataaaacaaaaatctgatttacatgggcgagaaaacaatacgcccgttgggaaatcggagtgggcgtggtggatgggtatcatttacccccatatacccatggctgcacatacgtatgtacatatgtagtttgtgggtgggcaacaaaggacatctcatgttaaacagctgtcggaagccgccggcgcagtcgtcgtacgtgtgcgaaaacttgacacaatgaagcagttgccgctggtcgttcaggaggaggagggggggggggtgttgtcgcggggagtgggcggactggtgacattgcgactcttatcgggccacgttgtcaaagttgtgcggcagacacctgttgccagccagcgcgtggaaaactcgcagccccattgaagtccagcctgttgtggtcaggaaaatgaactccatgaacaatgtttacttaaatgaatattaagaataagttagttatatcataaatatagatcacatatcaaaatttatctggaaattaatttataattgcaaacatcacgctcttgtcacaaaccaagtaggtaaaagcatttagttttcagtctagactgcttcacatttgacttattctttacaaaactataactgacagcatgattttcttacaactctggtgggcgctgttggtgttcagtagtcctggctccgcccagcagatctccgtcgaggaggagaaacacccggttgagggcagcgataagttgctcagcttcagccgggcagtggacctggtacgtcccgagttgcaggagcttaaggcttcctacagcggtcgccaggagcaggatgctctcaagcagcgggatcgacggaactcaatcgacaatatgctggccagttttgcccaaggggatgttgggaaatcgaaggatgaatctgatgatgaagatcgaatgctccaggaggcggcggacgcttggttccgtgacattcaggccagcatgtcgaagagcaatccctataagaagcgatctggggacaaacagcagagatccataggcaagaatattatcgaccagcatgccaaggccctggagcgcaccgaggtcgggaaggttaagttgaagtacaagcaaatgggcgatgacaccattgttcgcaagttccaggtgactaagtaccctgagattacgcataacactgggatgacccacctagacgtaaagctgaagcaggtgcagcagatgctgaccgaccaggagagtctggaggccaggcaggtggcgaagaagactgagaggcaggaaaaggttaaggaatcaaaatgggtggacaagttgcccgagttcggtgatagccccattccggatgggatctacgagagtacactaaatcgcctggcctttccctatgccacgtcgcacaagctggaccacgaggccaactacaagctctccaaggtcgagcaggaggcgtccgagaaggactccagcaagcactccaaacctggcaggatcagcgaaggtcttgtgaagcagctcaagcggagctcgtgcagtggcttcaatcccatgaatgagatcaaactgaagaccagcagtcgactgatgctcaagggcctaggtccatcgcttccaagtaacgctctgctggacatccatcgtaaccaaatggtggacagcatgatccggcggagggagctggaggtacaacagcagcggcaccagcagcatcagcagcaactggagtctagcgaggatatcgacgatatggatcagcgaatgggaattaataacttaatggcacagagtgagaacttggagtacctacagcccatcaataccggcatggatgggaatcgaatgatggagctgccacagagctacgactaccgagtgcatcagtacgatcgttttcatcctctgaaccaaaggcaaatgtctaatgtgggcgattacgagaggagtaatcgcatgccgctcgacctggatcgtttcaaaagggaaccgcattcggagtcgtcttttctggaagcccctaatgaattaagtttaggccaattatctgtagaggaaccggtccttaagtccgaggatgaaaatatatccaatcgtgagatggccatgaaaattgcagtattggacattaaggatgacaaagccttacattcaaccggcgatggggaatccaaagaaaaggacacacttgaagaggttaaattagagggcctacatgaggagctaaagttggatgaggaatctttagttaaacccgaaagtaaacttgattcggaggtatcgtgcatcaatggaaaatttgaggatagatcagagatggaagtggaaaacaaaccattgggaccggtaaaacgtgaagccaaggcagagctaatcaaccaaatgggcaataagctgaagaatgatggatccactttggtagctaaatcaagtgcagagtcgcctttaaaagaagatgtaccaccgaatttggccagaagaagcgaactcaatgtaagtactggtacagatttgtccgccgtctccaaaaagcaaaacagtttaaagaaacgtaaaagttctgcaacgtcagatgattccgataagcatgacagtaatcccgattgtgacacggagtgcaagtcggaggatgcggaaaagtcggaaacggatgcagagaaggacgacagcattgtcaaagtcaacatcaagcttaagcttcaggaaccggtcgaagagaaatcagaatgcgaggaaatcagtaaagtggtgggcaaaggggctgctgcatcggctccgaaagtgaatcccgatgctgtggtgaaactgttggcaaatgaattgtccatggacaaggaccgtggaaagcggcaagcaaggcatcgaagatatcgtagacagaacaggagatccaagagatcgctggaggataacgatcagcacgaatcagatgataagcaacatgctgtgtccaaacgtttggctcctctgctggatgacttcgaagaccacaatggcaatcgtgttggtttcgggaatctgggtaatggtatgctcacaccggatgcagagtattcgggtgaaaggtcatatcccagccatgaaatgctggctcactttgatgaactggaaactgctcatgacggcgattccatggtaccgatctacgatcccactaaggtcgtggtacccatggtgaatcagcgaccgaatggcggctttcaggggcagcagcctgtgcagatgcaattttcacagcagcagccgcagcagcagatgcagcagcagatgcagcaacagcatatgcagcagcaaccaccgcagcagccacaacagcagcaacagcagcaacagcagcaacagcagcaacagcagcaacaacagcaacaagtgcaacagccgcaacaacacgatctaagccgtcagcgtcatcaatcaagtaattttcaggcaagttttaatctaacccatttgttcaatgagttagaaaagttgcaaaatatgaagacaccacagccacaacaacagcaacagaagttgcaacagcaattgatgccacaacagccactaatgccacaacaattccagttgccgcaacagcaaatgccggtgcaacgaaatattcaacaattgcccgaaaagcccatttcgccacctattaaatcctttggagcccatcgttactttggacccttcttcaacaagcaggtcaaacacgacccttacatggcggcgataggaaccttgactactttggatcccagatgtgttgccattacggctactgccgccactccagttggaaatataactaacgcctttactttgcctgccaattgcacaactactacggttcccaacagtccagtgtcatccacaccagccccatgtaccaatcaaacgagtcaaacggatttggcttgccgagctccggatgcgatgaaactcaatgtttccataaatgccaatttgtgcggagatcctaaaaccaaacagttctatggcaatggctccataagtctgttgcccggttataaggcgttgcattctgaattgaatctcggctatcagaatgatgaacttcatggaaatgctgcgcaattggagaacgatctaagcgatctgaagatcaaggacgaaaggcgtatacgcgatgtgggcgaagagtccagagatgagtgggaaccaaaaactggaaatgagaagccaagaaagcaggagggtcagataagaaggccaagtattaagtggaatagaaagtttaaaaatcgccaaaaagctgcgaaggcaaagttaaaagaacgtcccaatgatgtctccaaagaagccacacaaggaggtacaaaagatgcatcaaatgtggctacaaatgaagtacaaaaatcgtcgggaaagtggtaagtaataaaatggttaataaattattctattctacatctttttaatttattttaattttgcttattttagccaccgacctcggattgaaataccggattcccgatcggaaagttacgataagctaatcacgggcaaaatctccgaggacatagtttctgctgtcttcgaggcagtgggcaatgatccgggcatggaccgcttactggcggttctggagaggaatcgcaagtgtgaacagaagcagtccaaaaacttctatcaaatccgcaatgacaagaccgagagttatctacatcacacggagaccatgttgcgggacacaatggaggcgattagcagcataattgatgagcaggtgcgacgaagagcatgcattcctttgcgtccggatctccaggacttctatgacctaattctcaagacatccaacgagcaacaaaagtgtcgtgagaagcgacagagcacacttcaaatccttgccgaggatttcagtcaggatgtgcgattgctcgatccgagtaagatcagccaaaagtcgagaattgtcaagaagttactgcgacagtacgaggatctaccgatggaggatcaacaggcggcggttggagtgcgtgatgaattgctcctggatctggtttatctccagaagatggccgaatccgcagagcgcaatcaacgtaacgcccgtttgcaggaggtgctcaaacagaccagcctggacgaggtcctggaaaagagtctaaccaccgagtactcaccgcgttttataaaactgctaaagacggcggagctttataaggaggcgggcgagcagcaggccaaggcatttgtgggtctttagaccgctttaatcaacgttttagatttttgtttcaattcattagttgtttttttcaattaaaaattccctttgtttgagttaagtcatatatttttaacacatttgaaataagcaacaaaattcgtttgaatttatgtcaataaatattttgaataacacttagttattgtaaaatatttttaagaatatagttttatccaaagtagtgcgagagtcccagattggcacccagatcggtctggcccttgaagggtccacttgtccacttggatgccgtgctgcccagatctagccttgtgttgcgatcctgcgactgccaaagattggcacgcccacccagctccaattgcttacccaatccgggaatattggcgtgcgtcagggtagctccatgacctttgatgtgggagtagtccagtgcagcttcatttctatcgaacttgaagccattggcaagctgattctgcgaggcaaatgccttggcatccagattgtgaacaccgttgttgaacaaattggcggtggccgtttgctggaagctatcccgcacaccgggcgtatgggttttggtcagttccaggccgtgtccatgactgctcatgaaaaataagattagtttcgctattgctcagatcgtaatcctttaagagactcacttgttgtagcccagggtggcgccgctggttacgggagtggataccggtttggtctgcgtgttgcccgctgcgaacacttgtccaataacatggtgatcgggagttccaacggccttgcttaggtccaatcgggcatcggcaccgccactcggattggatgtgagtgatccacccaacacctggcgacgtgccctgtagattctgggtggcgtcggtggtggagatcagtggctgggtatacggacgttggggcaaggccaccgcaagggagccaagtacgccaacgatgaccacaattaggagaacaattttgctcatcttgctgtattaatctcttgattttc

SEQ ID NO: 9623 - DNA, 4512 bp, DROSOPHILA
atgattttcttacaactctggtgggcgctgttggtgttcagtagtcctggctccgcccagcagatctccgtcgaggaggagaaacacccggttgagggcagcgataagttgctcagcttcagccgggcagtggacctggtacgtcccgagttgcaggagcttaaggcttcctacagcggtcgccaggagcaggatgctctcaagcagcgggatcgacggaactcaatcgacaatatgctggccagttttgcccaaggggatgttgggaaatcgaaggatgaatctgatgatgaagatcgaatgctccaggaggcggcggacgcttggttccgtgacattcaggccagcatgtcgaagagcaatccctataagaagcgatctggggacaaacagcagagatccataggcaagaatattatcgaccagcatgccaaggccctggagcgcaccgaggtcgggaaggttaagttgaagtacaagcaaatgggcgatgacaccattgttcgcaagttccaggtgactaagtaccctgagattacgcataacactgggatgacccacctagacgtaaagctgaagcaggtgcagcagatgctgaccgaccaggagagtctggaggccaggcaggtggcgaagaagactgagaggcaggaaaaggttaaggaatcaaaatgggtggacaagttgcccgagttcggtgatagccccattccggatgggatctacgagagtacactaaatcgcctggcctttccctatgccacgtcgcacaagctggaccacgaggccaactacaagctctccaaggtcgagcaggaggcgtccgagaaggactccagcaagcactccaaacctggcaggatcagcgaaggtcttgtgaagcagctcaagcggagctcgtgcagtggcttcaatcccatgaatgagatcaaactgaagaccagcagtcgactgatgctcaagggcctaggtccatcgcttccaagtaacgctctgctggacatccatcgtaaccaaatggtggacagcatgatccggcggagggagctggaggtacaacagcagcggcaccagcagcatcagcagcaactggagtctagcgaggatatcgacgatatggatcagcgaatgggaattaataacttaatggcacagagtgagaacttggagtacctacagcccatcaataccggcatggatgggaatcgaatgatggagctgccacagagctacgactaccgagtgcatcagtacgatcgttttcatcctctgaaccaaaggcaaatgtctaatgtgggcgattacgagaggagtaatcgcatgccgctcgacctggatcgtttcaaaagggaaccgcattcggagtcgtcttttctggaagcccctaatgaattaagtttaggccaattatctgtagaggaaccggtccttaagtccgaggatgaaaatatatccaatcgtgagatggccatgaaaattgcagtattggacattaaggatgacaaagccttacattcaaccggcgatggggaatccaaagaaaaggacacacttgaagaggttaaattagagggcctacatgaggagctaaagttggatgaggaatctttagttaaacccgaaagtaaacttgattcggaggtatcgtgcatcaatggaaaatttgaggatagatcagagatggaagtggaaaacaaaccattgggaccggtaaaacgtgaagccaaggcagagctaatcaaccaaatgggcaataagctgaagaatgatggatccactttggtagctaaatcaagtgcagagtcgcctttaaaagaagatgtaccaccgaatttggccagaagaagcgaactcaatgtaagtactggtacagatttgtccgccgtctccaaaaagcaaaacagtttaaagaaacgtaaaagttctgcaacgtcagatgattccgataagcatgacagtaatcccgattgtgacacggagtgcaagtcggaggatgcggaaaagtcggaaacggatgcagagaaggacgacagcattgtcaaagtcaacatcaagcttaagcttcaggaaccggtcgaagagaaatcagaatgcgaggaaatcagtaaagtggtgggcaaaggggctgctgcatcggctccgaaagtgaatcccgatgctgtggtgaaactgttggcaaatgaattgtccatggacaaggaccgtggaaagcggcaagcaaggcatcgaagatatcgtagacagaacaggagatccaagagatcgctggaggataacgatcagcacgaatcagatgataagcaacatgctgtgtccaaacgtttggctcctctgctggatgacttcgaagaccacaatggcaatcgtgttggtttcgggaatctgggtaatggtatgctcacaccggatgcagagtattcgggtgaaaggtcatatcccagccatgaaatgctggctcactttgatgaactggaaactgctcatgacggcgattccatggtaccgatctacgatcccactaaggtcgtggtacccatggtgaatcagcgaccgaatggcggctttcaggggcagcagcctgtgcagatgcaattttcacagcagcagccgcagcagcagatgcagcagcagatgcagcaacagcatatgcagcagcaaccaccgcagcagccacaacagcagcaacagcagcaacagcagcaacagcagcaacagcagcaacaacagcaacaagtgcaacagccgcaacaacacgatctaagccgtcagcgtcatcaatcaagtaattttcaggcaagttttaatctaacccatttgttcaatgagttagaaaagttgcaaaatatgaagacaccacagccacaacaacagcaacagaagttgcaacagcaattgatgccacaacagccactaatgccacaacaattccagttgccgcaacagcaaatgccggtgcaacgaaatattcaacaattgcccgaaaagcccatttcgccacctattaaatcctttggagcccatcgttactttggacccttcttcaacaagcaggtcaaacacgacccttacatggcggcgataggaaccttgactactttggatcccagatgtgttgccattacggctactgccgccactccagttggaaatataactaacgcctttactttgcctgccaattgcacaactactacggttcccaacagtccagtgtcatccacaccagccccatgtaccaatcaaacgagtcaaacggatttggcttgccgagctccggatgcgatgaaactcaatgtttccataaatgccaatttgtgcggagatcctaaaaccaaacagttctatggcaatggctccataagtctgttgcccggttataaggcgttgcattctgaattgaatctcggctatcagaatgatgaacttcatggaaatgctgcgcaattggagaacgatctaagcgatctgaagatcaaggacgaaaggcgtatacgcgatgtgggcgaagagtccagagatgagtgggaaccaaaaactggaaatgagaagccaagaaagcaggagggtcagataagaaggccaagtattaagtggaatagaaagtttaaaaatcgccaaaaagctgcgaaggcaaagttaaaagaacgtcccaatgatgtctccaaagaagccacacaaggaggtacaaaagatgcatcaaatgtggctacaaatgaagtacaaaaatcgtcgggaaagtgccaccgacctcggattgaaataccggattcccgatcggaaagttacgataagctaatcacgggcaaaatctccgaggacatagtttctgctgtcttcgaggcagtgggcaatgatccgggcatggaccgcttactggcggttctggagaggaatcgcaagtgtgaacagaagcagtccaaaaacttctatcaaatccgcaatgacaagaccgagagttatctacatcacacggagaccatgttgcgggacacaatggaggcgattagcagcataattgatgagcaggtgcgacgaagagcatgcattcctttgcgtccggatctccaggacttctatgacctaattctcaagacatccaacgagcaacaaaagtgtcgtgagaagcgacagagcacacttcaaatccttgccgaggatttcagtcaggatgtgcgattgctcgatccgagtaagatcagccaaaagtcgagaattgtcaagaagttactgcgacagtacgaggatctaccgatggaggatcaacaggcggcggttggagtgcgtgatgaattgctcctggatctggtttatctccagaagatggccgaatccgcagagcgcaatcaacgtaacgcccgtttgcaggaggtgctcaaacagaccagcctggacgaggtcctggaaaagagtctaaccaccgagtactcaccgcgttttataaaactgctaaagacggcggagctttataaggaggcgggcgagcagcaggccaaggcatttgtgggtctttag

SEQ ID NO: 9624 - protein, 1503 aa, DROSOPHILA
MIFLQLWWALLVFSSPGSAQQISVEEEKHPVEGSDKLLSFSRAVDLVRPELQELKASYSGRQEQDALKQRDRRNSIDNMLASFAQGDVGKSKDESDDEDRMLQEAADAWFRDIQASMSKSNPYKKRSGDKQQRSIGKNIIDQHAKALERTEVGKVKLKYKQMGDDTIVRKFQVTKYPEITHNTGMTHLDVKLKQVQQMLTDQESLEARQVAKKTERQEKVKESKWVDKLPEFGDSPIPDGIYESTLNRLAFPYATSHKLDHEANYKLSKVEQEASEKDSSKHSKPGRISEGLVKQLKRSSCSGFNPMNEIKLKTSSRLMLKGLGPSLPSNALLDIHRNQMVDSMIRRRELEVQQQRHQQHQQQLESSEDIDDMDQRMGINNLMAQSENLEYLQPINTGMDGNRMMELPQSYDYRVHQYDRFHPLNQRQMSNVGDYERSNRMPLDLDRFKREPHSESSFLEAPNELSLGQLSVEEPVLKSEDENISNREMAMKIAVLDIKDDKALHSTGDGESKEKDTLEEVKLEGLHEELKLDEESLVKPESKLDSEVSCINGKFEDRSEMEVENKPLGPVKREAKAELINQMGNKLKNDGSTLVAKSSAESPLKEDVPPNLARRSELNVSTGTDLSAVSKKQNSLKKRKSSATSDDSDKHDSNPDCDTECKSEDAEKSETDAEKDDSIVKVNIKLKLQEPVEEKSECEEISKVVGKGAAASAPKVNPDAVVKLLANELSMDKDRGKRQARHRRYRRQNRRSKRSLEDNDQHESDDKQHAVSKRLAPLLDDFEDHNGNRVGFGNLGNGMLTPDAEYSGERSYPSHEMLAHFDELETAHDGDSMVPIYDPTKVVVPMVNQRPNGGFQGQQPVQMQFSQQQPQQQMQQQMQQQHMQQQPPQQPQQQQQQQQQQQQQQQQQQQQVQQPQQHDLSRQRHQSSNFQASFNLTHLFNELEKLQNMKTPQPQQQQQKLQQQLMPQQPLMPQQFQLPQQQMPVQRNIQQLPEKPISPPIKSFGAHRYFGPFFNKQVKHDPYMAAIGTLTTLDPRCVAITATAATPVGNITNAFTLPANCTTTTVPNSPVSSTPAPCTNQTSQTDLACRAPDAMKLNVSINANLCGDPKTKQFYGNGSISLLPGYKALHSELNLGYQNDELHGNAAQLENDLSDLKIKDERRIRDVGEESRDEWEPKTGNEKPRKQEGQIRRPSIKWNRKFKNRQKAAKAKLKERPNDVSKEATQGGTKDASNVATNEVQKSSGKCHRPRIEIPDSRSESYDKLITGKISEDIVSAVFEAVGNDPGMDRLLAVLERNRKCEQKQSKNFYQIRNDKTESYLHHTETMLRDTMEAISSIIDEQVRRRACIPLRPDLQDFYDLILKTSNEQQKCREKRQSTLQILAEDFSQDVRLLDPSKISQKSRIVKKLLRQYEDLPMEDQQAAVGVRDELLLDLVYLQKMAESAERNQRNARLQEVLKQTSLDEVLEKSLTTEYSPRFIKLLKTAELYKEAGEQQAKAFVGL

SEQ ID NO: 9625 - DNA, 3316 bp, DROSOPHILA
gtgacacatgctcgattgtcacctataagaggctacttaaaatttgtttatataaattggacttatgtttagcaattgcttcgttgaactattttctattgtatatttgtcctaagtagtgccccagtagaacacactaccacacacattcagtacacacaagtatgtagtattttcgttttgaacgtgtaaccaaattgtccttgtgcagctctaatgaacaaaattattctgttttttctcctctccctgaaaatccaaaaacgctttaccgctccgcaggccacatggaaactattttagccaaatttaggcactatcgcactaccgaattcaaccaactgctaacaaattcagcaagataaaccaaatcgaaccaagtctaatacaaaaaaaaaaaaagtcaaaattttattaaccccacaactaagccaatttgagacatcttgtaccccaaagccaatgcattcagcgttaatgtgatgcccagaaaaatcggtataatcaaatcgaggttgaattattccgctgcttaacccaaacaaaatatgttaccccggctaaatgtccattgtgtgttcattcgatgtccaagtgtgataattcaggtaatacaaactccaaatattttttagcttcatttatccccaggttcgattgataagattctaatccagttttatcttatattccacagattttcttgccggccctatccaatgtttttgcactctgaatctttcttttaaactccctactgaaagctgtatattttcttttattttacttaatttccaaaataccctaaggcaacagttcatgaacaacaagaataacacactttgagctcttcaaaagccaagcaagttccacaagtagtcaatcaaagcgatattaaattgtaaattttccaaaagatttgtaatattgaaaagttgattcaaacaaaatgtattattctgttcgaatatttattagtaaaggaaaaagtaaaaaagacactgtaactattatgttttggattcgggcggttaaggctatggaatttgcactatattttaaaatgatccagaagcgaatttgatattttgccttatattttgaaatttgttgatgacttgggtccaaatacctcttgtacacttcctactcaaagtattctatatactttcatcaccataggcacgtttgtcccacttgcacacttaataagaaggcacaggatccacttcggtcagttttatcagaattacttctttgtttattaaaccttaaaaaagagcgacaaatccagtaaccacaagtagcgaatgggcagcttagaaacgcagcttctggaagaaccacttgttcttgccctccttgtagacggactcgaacttgacgcgggtctggaagcggtgcgtcttgcgctttacgggatccttcaggtccttgggcgacagcttctcaaagctgatgtcgtgcgccgtgtagcgggtgggcatcagatgattgtagttcaggctcttcaggaagggcttgaccttggacttcttcttcagcttgttcttgcccatcttcttggtcaccttgcgcgggtagcgatcgataccggcgacgagggcgtgtccgaagggcttctccggggttccatcgtcgtgggtcttgacgatgatggccttgcgaccggcgtaacgtccgctaaggacgattacgatcttgccctgcttcatgattttcctcatcttggcggtttgctctgtaaattaagggaaaaacgttagtaaaatcgtcagatctcaaaacattatttaataactatttggcggcagagtttataacatcatctgcaagtaaaccaaaataggtttttaaagcaacacgtttttggtcattgtgtgcttggtattgtagtattagtttgccggatgtcttgaattcacttattatctgttaacacacataatatattcaaactggcatacacaaatcatatgcaactcagaagtcatagtcggctaaaccatgtggtaagttataaccagatattgtttttttcatagaagagatgggaggcagagccaccatagaatcttttttttctgctctacgggactaaaaccgtatttttcctccttttaaaatcattatccattttgagggggcatagcctgtacattgcacgccactcgcattcctaccgcagcgtagaaatttatattttggctaaaatttaacaaaatttacacgcggaacacaccactcaccggaaacgggcgaaaagaaaagaaggggagattttagagatggcaaaacgtcgtctttttatcgatacttagtggcaacatttccggtatttttgaggcggtcactctaccatatggctgtgtttcctactatctggtcacactggcacaagtatttttttttatcacaattttaaattttccctttgtaaattcataacatcatataattgtggaaaaacacttaaaatttattaacaaaatagatttttttaaatttaatatgttaatcatttagaaaacatggtacatactaatcattgcttaaggagagatactactccttcatagtactcagatatttagcggaaatgcccggccctacgtctttttttggataatcttaaaggtattatgccgattcatgacgtagctgagggcagtggcagccgtagtcaggccagtcagataccaaagtccctgcaaagctgggtgatctggaatgggatgatacagaattgattaatccatcagtagtgataaaagtgtttgctgtatctcacccaaatagttccaaatgggagctcccaggctcagtccaatggtggccaactggacgcccgtgttgatcttgctgagcagcgtgggctccagttgggcagtaacatgggtggcgtcgaagtagcgcgaaaaggttttctgccgaggaaaggtaaatgattataaacaaatgccacaaaaatgtaggtaaatccttcacttaccggcggtggcagacttatgtagcgtataacaaatccagctcctagaagaaagacatcccggaacaccacgatgcccatgagccacatgggcagcaggtccgtgtagcacagcgagatgaccagcgagcccatcagcaacttatcagccatggggtccaggaaggaaccgaacttgctcgcctgcgaaggccaccgtcgtgcgatctgtccatccaactaaagaaacaggaaaaaacaaatgtcattaccaagaaagtttcaatgtttcaaatttatctaagtatcttacaggaattaaacgtgtgtgtgttatttagatacacg

SEQ ID NO: 9626 - DNA, 808 bp, DROSOPHILA
tatcgataaaaagacgacgttttgccatctctaaaatctccccttcttttcttttcgcccgtttccgagcaaaccgccaagatgaggaaaatcatgaagcagggcaagatcgtaatcgtccttagcggacgttacgccggtcgcaaggccatcatcgtcaagacccacgacgatggaaccccggagaagcccttcggacacgccctcgtcgccggtatcgatcgctacccgcgcaaggtgaccaagaagatgggcaagaacaagctgaagaagaagtccaaggtcaagcccttcctgaagagcctgaactacaatcatctgatgcccacccgctacacggcgcacgacatcagctttgagaagctgtcgcccaaggacctgaaggatcccgtaaagcgcaagacgcaccgcttccagacccgcgtcaagttcgagtccgtctacaaggagggcaagaacaagtggttcttccagaagctgcgtttctaagctgcccattcgctacttgtggttactggatttgtcgctcttttttaaggtttaataaacaaagaagtaattctgataaaactgaccgaagtggatcctgtgccttcttattaagtgtgcaagtgggacaaacgtgcctatggtgatgaaagtatatagaatactttgagtaggaagtgtacaagaggtatttggacccaagtcatcaacaaatttcaaaatataaggcaaaatatcaaattcgcttctggatcattttaaaatatagtgcaaattccatagccttaaccgcccgaatccaaaacataatagttacagt

SEQ ID NO: 9627 - protein, 135 aa, DROSOPHILA
MRKIMKQGKIVIVLSGRYAGRKAIIVKTHDDGTPEKPFGHALVAGIDRYPRKVTKKMGKNKLKKKSKVKPFLKSLNYNHLMPTRYTAHDISFEKLSPKDLKDPVKRKTHRFQTRVKFESVYKEGKNKWFFQKLRF

SEQ ID NO: 9628 - DNA, 2931 bp, DROSOPHILA
atctccgaaatattgcaatctcttttttttttgtgttttaggttaccgcgacatccgcaaatgtcgtggaattatttggccacactcgtgtacgtggaaatagccaaggacttaaggttgaagagattgattttatttcaatttggtgtagcaaatctataacttataggtttcttttaatttggtgtagaaaatcgatgatgtccctggtaagcgtttatgatttcgtttttggagagatggtagattttttggtatttttccagggctggaaattgctgcctagcagtgttgtactgcaacaactgaataagatgtacgatacgttatcgaaaacgttacattggtcacattattattcatttattcaaaatataattgtcacatacgttatagctaagattttttttaatgtgcctgggaaaagtttgcagtaaccccgttgtttatttgcagaaaattctgcgtattccttttcccagtctttttgaatgattctgtttaattctccaactcactacggtgaaaattccttgcgtcgatgcatttaacaaatatatgcttgttagtcccccgtctcagaaactacaatcaagaattggtctgaagacgagtataataatattctatatagacaagcagtcagatacgcctgagaaaaaggaaattcaaatttcattgcactaacgtgagctagtgatgacaaaaacggtaattggctcaactatcgtaccggtgtgcggtacctatcggaattggaatcaatgctggaaaaggtaactatattttggtacacggtatttttaaatttaagtactgaaattaactaatatttatttaattaatattttgtgcgattattaataccaattaaaaaatattgatcgataatctggaaaaaaatgcacttgatatttaagatatttgagaaactgcaaacagtttcaaattgtccgctcttgccagctgcggaggaatttccccatttcccagtttggtcacatcgcgctgtcgaaagaaaatttttttcttgcaaagagaaacaaagcaaagcaatagtcgaaagtgagaaagacgaaagaggagacaaaggagcgaaacggagaaaatcagagaagcagcaagcagagcaggaagggggattggataggaactcgaaagcaatcggccaggatcgggaacaggatgaacaacggattcagcaccggcgaggaggacagtcgcgggcacacggaccaaacgtgctgcctaatcgacgacatggagcggtgtcgcaaccaggctggctacgccagctactccaagcgcatccagaagacggtggcccaaaagcggctcaagctcagcagcgatccggccgcgcagcacatttacatctgtgaccaccacaaggagcgcatccagtcggtgcgcaccaagcgtcggcgcaaggacagcgaggacgacagcaacgagacggacacggacctgcacgagttccccgatctctaccagctgggcgtgagcacgctgcgacgctacaagcgccacttcaaggtccaaacgaggcagggcatgaagcgggcgcagctggcggatgtaagtttgacctagttaacgaattgagcaggctatgtccactttctgttgccggatttcagtggggtaacacgctggtctaatgtgctccgtgatgctccatagttggccctcttgtagtagcctccactctaaagaaaaggcagaaaaatgtgccatgccctttataaggttttctaaaccctgttttaatcaagttgcaaacctctactcttctcccgcagacaattatgaaacacttcaagacaatacccatcaaggagaaggagatcatcacattcttcgtgtacatggtgaagatgggctcgaataagctggaccagaagaacggccttggcaacgacaccacctgaaggcgcgtcggcgggcggagggaggaggaggacgccgacgacgtctactccttttaacgctggccaactgccgatcaaaagaaattaacaaccaaacttctcacattgttgctgcatttgctggacgtcggcattgttgaccagaatagggatgaacgagaatattgatagtgcaatggctcatcctcatccgtgtgacccccaagaaacccaatcctatacccataagccaccactgcccaaacccttaagcctttcccccgactccccggaacacaagtaatatgcgaaaagtaaaacagcaatgaaagaacgtaaggaagaaggcaactggtgctcccacgaaaaacaaaacaaacaaaaattaaaaataaataaactagtatgttgcgaaagtgagtctaatattaaaaaagaaatttacaaaaactatttgtagccttggtccgttgttaatagctctttatacacgcactacattaaataaactatgtaaatttacaagagaattaacagaaaacacaacacactcaatcaaatagcaattcgtattcttaggcttaaagacatgtttatttgatcgtttgtattatacatcatgttaagtgaagtggggctctggctagacatcagttagtagtaaccagatactttaagcgaatcaaaacacaattagacttcaatgtgaaagcaaattgaatccggaagccaataccaattatcgctacaaacagagaaataacgaacgaaataatttgcaatatttaaactaaaacatcgtgtcgtttgccccggcggtttggagatatatttagagctctagtttaagcctaacttagacgaacatcggttccacaaatcaattggaattacgcattaaacgatttatgttaaagcctagactgattttagccatacatataagcctaaataaaacttaatagaaagcattttctcttaactacacgactatcacaacggctagatgtatcgcttggct

SEQ ID NO: 9629 - DNA, 707 bp, DROSOPHILA
acatcgcgctgtcgaaagaaaatttttttcttgcaaagagaaacaaagcaaagcaatagtcgaaagtgagaaagacgaaagaggagacaaaggagcgaaacggagaaaatcagagaagcagcaagcagagcaggaagggggattggataggaactcgaaagcaatcggccaggatcgggaacaggatgaacaacggattcagcaccggcgaggaggacagtcgcgggcacacggaccaaacgtgctgcctaatcgacgacatggagcggtgtcgcaaccaggctggctacgccagctactccaagcgcatccagaagacggtggcccaaaagcggctcaagctcagcagcgatccggccgcgcagcacatttacatctgtgaccaccacaaggagcgcatccagtcggtgcgcaccaagcgtcggcgcaaggacagcgaggacgacagcaacgagacggacacggacctgcacgagttccccgatctctaccagctgggcgtgagcacgctgcgacgctacaagcgccacttcaaggtccaaacgaggcagggcatgaagcgggcgcagctggcggatacaattatgaaacacttcaagacaatacccatcaaggagaaggagatcatcacattcttcgtgtacatggtgaagatgggctcgaataagctggaccagaagaacggccttggcaacgacaccacctga

SEQ ID NO: 9630 - protein, 173 aa, DROSOPHILA
MNNGFSTGEEDSRGHTDQTCCLIDDMERCRNQAGYASYSKRIQKTVAQKRLKLSSDPAAQHIYICDHHKERIQSVRTKRRRKDSEDDSNETDTDLHEFPDLYQLGVSTLRRYKRHFKVQTRQGMKRAQLADTIMKHFKTIPIKEKEIITFFVYMVKMGSNKLDQKNGLGNDTT

SEQ ID NO: 9631 - DNA, 6977 bp, DROSOPHILA
tttacagcgtttattacaaaagaaaccaaacaacgagttgccactgaagtcattagcggcgcttgccctttcccttcttgccgccaccaccacccccagatccggatgcattcgactgtggctgcgactgctggtggtacgagtcgccggatttgttctgtcgcgtcttcagctgcggtatcttgctggcgatatgcagcatgatggactcgcgcgtgggaaagtcattattgtacaaagtgccatcgacattacgcagctggacgcgcacacgaccacggaactccatctcgctgctgttctcgcgacagtacttcttgttctccatgaggaactgcaagttggaaacggacagcacatcgcgaatctcaatatagctgggattgtctacacagttctccttgggcagccgtcgaccctcctggcgtgtctttttcctattgatgtaggcgggatatatgcaaatccatctgtgttaacaacaataagagttacatgcgaaatcgaactttgtgttttgttggccagtgcctggttcctaccgctccatatcgttgtgtttcatgctggggctccagttttttttcatgggaactgctgtcgccattctttcagtgaattcttggttggtttattgcaattcctgtgtaattaacaaaaaatgagctagaaagctattttccacgcaagcaacccaattgaaatagggatggcacgtgcagctggccgagtaatcgatatttagcgaggaagccaataattatatggctttttctggctactacgtaagaggttatttataagcgacttaaattaaaagagtacatgaaataaattattttaggtaattttaatttttggcttatctggtttaatagaagttggcggaaaatagccaacatctattaagccacatttcccatctcttgtcatatcgatgatacctctacaaaaagccctcctaaccctatcgatagaaacatcgacttgcgatcatctccaatatgcaggccgcggaagaacttcaataacagtctgtttttggtctttccgtggtgtaattgatttgagttgtgcggataacgcgaaaaaccaatcgacgagcgtcggccagcaattctagtcacgcgtgtcgcgaagccaagcggtaaacaaaaagcacgccccacaccgcagtgacccccctccatcaacaccaacaccaccaccccccgcgctctatcaaaacaacaaaagcacacacgcaaggccacggcggagcagcaacaagaaaaacaacaacaacggcgacaacaatggaagaactgaacatcatattacagaagaccaaagataaatcaacgcaaaaggagcaggatgaggtacttatcccacggcttaatccttccggaccccgtgaactttgacattcgaaagtggcaagcgaacgagagacacaacagcaaactaaccagctattttggccttccttccgttctccttctttttcgacccacttcattttgggctttatttacatgtggcccacgcacgcaaaacgctatccagattctgctgcagccctttacatacatacaacagattcctggcaagcaattccgctctgagttggccttggccttcaatcactggttgctcataccgggcgaaaagttggcgcagatcggagacattgtgcagatgctgcacaattccagtttgctgtgagtatatatcaattatctgattaatagccctatatcagattaatagcacgccaataaatcagcatgaaactacagacaatgcagtgtttttggcccaaaagtgtatatactgcgtatatactctattaaaaagtttagcaaagttaacttaagcgataaatattatcataacaaagtactgactaactggcatatcaatattaaaacaaaatattttactaaaatatcacaatacatacttttgtactcactaaaaatatgtctgtaagaaaccatataaaatcagcgctagtttaaatacctgtcgatttattgccagccaactaatcatgctagtcgtgctttactttttagttttgacctttgccttccttcgtttttctgctccccattatttggctttgtttacgctttgtttgtgcccccccccccccttcaaacacaaaacacccgaacgtttgacccccaccccgttttggccacttctcctgcatgttttatctcaattcacacttgcagagtctgtatttgtatacatttggcttatttgctttcgttcagatggattccagttaaatgcctaatcgagtgtaaagttcttttgggcaagtgatgaaaacagtagagactccacgctccaaaaatgtgaaaatgctgccatatgctcgttgaagaaactcttatcatcatcagctcagttcgtttccacaacgcgcatatgttatatagaactttgctttatcatttcgttgactcactcgcactcttttcccaattggatttgaccatatacacagtctcgcacatttgtggattatttggccagagcgttgtacgctggcctcaaatcaattttcaaatttcatcatgagcccgcaggtttctctgtttacaattgaatttctttgcaatccaatgtggattcggaaattgcataaattatttagatttttcccccagggcggcctacggaggaaaagcgatgaataagatgatgttggcttgccaacaaaacagtcgcaattaaactttgaactcagccaattgaagtgtctgcgccgcttttcaattgaaggcagtaaagtgagtcgaagtgaccagggattttcgcctatcttcaggcagcagctatggaagtattcatctcgctttcaagctaatcccgtcctgcctccggccacctgtcgccattaaccattcggaggcaaacactcaggaatggccttaattctgcttaaaatccccagcattgttcctcgagacagcaggcagtctcattcctccgccaagtggcctgcatgttcttggtgttccctacttttttttttttttttacgtttttagtaatgcattttcatattggcaaaaaacttagtttttacaacgacgccagcagttgcagccatagtgcctcctcgtacgaccctcgtccgtccgttcgtcattcatgcacttatgcccattgtcagttagtcaggccgtcgccagtcgacaggcattgtcacaactcttgccacgcagcccattttcctcattttccccaacaccaaccagcctcctttgcacccaatccccatcccataccataccattcctcatcccatcctttccatatcccggcccctttgtgcgttgtcgcttcaacgcccacgccttcgtgccaagccatccaatcccgtcccgtccccataccatccatattccctaccaatgactttgccagctttggcggagcgcaaacattttttaattacgcaaatgttgggctgcccagctcgttttacccgccgggcatcgtagttattgaagcgatggcggcctttaagcgaggcttaaatttacacatccattattttggtggaatgaggagcgccaacgtatgtttataaatatgaatgtggatggtggacacatggaatccgcggctcccttcgctcgaattgtgaaattctatttaaaaacccatacttttctatgcagtacgtgttcatatagtgcaattctgaattaattgctatacaaaaacatctgctgataagtaaactattgaatcttaaaaccaagaacatattttcacatttattctaatttcaaaacattactggctcgaattctttctttgctaagttgattgtaaggtagtaaaattgtagtatctaatgcttgaaagtatattaagcttgaatacaagtacacaattaactcacggcaaattatatacatgtatgttcttgatactaacttacagcattgatgatattgaagacaattcgatccttcgcagaggtgtgcccgtggcgcattccatctacggcgtggccagcaccataaatgcggccaactatgcactctttctggcgctggagaaggtgcagcagctggatcatccggaggtacgcaaatccacctctactatgaagctcaaagtaatccgcgtttcttgcaggctaccaaggtgtacaccgaacaattgctggagctgcaccgtggacagggcatggagatctattggcgcgacagcttcacgtgtccatccgagtcggattacaagctgatgactgtgcgcaaaactggcggcctctttatgctggccattcgccttatgcagctgttcagctccaacaaggaggactattcgaagttgacggctatattgggcctgtactttcagatacgcgacgactattgcaatctgagtctgaaagaggtgagtgtatagattggttggcaatatgcataagtcattgttaatctgtgataacattccgatgtagtacacggagaacaagagcttcgccgaggacttgacggagggcaagttcggcttcccggtaatccatgcggttcgcacccaaaagcaggataaacaggttctacgtaagtccaacgtcttgacctcaaccaaaggcttttcactcattaagctgatggcttatggttatatccacagacatattacgccagcgcacgcacgacattgaggtcaagaagtactgcatcaccttgttggaaaagctgggcagctttcagtatacacgcaaggttctggagtcgctcgacgcagaggctcggtcggaggttagtacttgaagacaagcaatgggaagtggaagttgcttggaagtcttgatgatgttaaaagtagaaattcgcacacatcccatcgttgctacgtgttttgtgctaaactaaagtaatctctcaacccacacaggtggctcgtttgggtagcaatccgtacatggaccgcctgctcaacaagctgctgtcgtggaagacgagcgatagcgccagcatcacgcagtcgaaccagatcaatcacaacaacgtctcacgcagcagccccaaccagaacacgctcaattgcaattagcagccaaagaggcaaaagagggagcagtcgtgaattgcgaacggcagagcctcttttgccgccaatccgggacagcagcaggccagcagccagccgacgcctgcgtgcctcagtgcgcccctgttgcgtttcctgcagaagctgaagatattctgagatttatgttaccctttgccaaaccgaaaagcccacagagaacccctaccttactgtcaaccgaaaccagagcgatgagaacggaaataggaggaggataggatttggatttgatagtgaatcggatgaaatgggatggataacaaaaccaacagcagccttacagaaaattgttaagccaaaagtaaattgatataagccaagcttatcgttgagctagcaaagagccatattacagctttccaagaatttgtttttttacttttacattttactttatacttttaatttagttttgcttcaaagttacgtagttagttagctcgtttagtttccccagttttagtttcgcccaacgaatgggagaggggggggggggtggggatcaagcaaatctcgcagagcattactgaattatagaatatgcaattttttagctcttgtatttctaagtgtgtttcgtattcgtaactcaattctgcaagcaattttcaatttctaagtgtcattttatcaaatctaactcactcggaactcaatgtgcacttcctttatcgacgttgttccattttaattgttatacaaatgcgattcgtatacatacatacatatgtactattaacgacaaattgttaatgttttatgcagacactataaaatcaacacaaatgaacgcaactatatatattgaaataatgataatgatgcactgcacggcaggtttttgcacattgcaccacctaaaaaatatatacatatattatatataaaaatatatatatttttattgtagttatacacatgaaagaaacaaaaagaaataaacggcaagagaaaccggaaaaataacaagaaaattaaccagattgctgaagtggaaatggaaaactataaactatgcgaacattttacggtagaaacgacaactaatagccgagaatttacagtgcacgcccagatgcagctaaacgcaaacgcacctaacattttgcccatatactatatactactaatgaaaacattgaaatatatgtaaatgtatttaaataaatatttatgccaagttgtcaactaaagtttaagtgtcggggatcatttacaaatagtcgccatatcggcatgttaactgcttatccagaattatacattcatttagaaagaatacatttttaatatccatttcttaacctagtaaaaataggtttcctaactgttttaaatgtgtatttaaatagaaaacaatgtaacgtagaaatacgttattgtatgcttggtatgtacataagttagtcataattacttatccattagcttttgttttcaggagactaagagtcctgctcaatcatatccatcagctgcagaaactcctgggaagcgccatcgacctcgttttccccatcgccatactcctcataatcatcgtcgtcctgcatgaaaaccaaatttttgagtaatggaacaaatgccagctaaagtttttgcaactaacctcgaaaccaaagcagtttttggcactgatcttggagttggcgctcggttcgtgcttgaccaacacctcctcgtcgccattaaccagctctacgaccattacctcgccatcatccccttgccattccacggtgaagtccgagttgtccggctcctccttgatgtggaacgtcttggtgccccgttgacttcggaggcgttgattgatgatcatcggctgcttttcggaggcggcaagcctggcctgtttg

SEQ ID NO: 9632 - DNA, 2210 bp, DROSOPHILA
caatatgcaggccgcggaagaacttcaataacagtctgtttttggtctttccgtggtgtaattgatttgagttgtgcggataacgcgaaaaaccaatcgacgagcgtcggccagcaattctagtcacgcgtgtcgcgaagccaagcggtaaacaaaaagcacgccccacaccgcagtgacccccctccatcaacaccaacaccaccaccccccgcgctctatcaaaacaacaaaagcacacacgcaaggccacggcggagcagcaacaagaaaaacaacaacaacggcgacaacaatggaagaactgaacatcatattacagaagaccaaagataaatcaacgcaaaaggagcaggatgagattctgctgcagccctttacatacatacaacagattcctggcaagcaattccgctctgagttggccttggccttcaatcactggttgctcataccgggcgaaaagttggcgcagatcggagacattgtgcagatgctgcacaattccagtttgctcattgatgatattgaagacaattcgatccttcgcagaggtgtgcccgtggcgcattccatctacggcgtggccagcaccataaatgcggccaactatgcactctttctggcgctggagaaggtgcagcagctggatcatccggaggctaccaaggtgtacaccgaacaattgctggagctgcaccgtggacagggcatggagatctattggcgcgacagcttcacgtgtccatccgagtcggattacaagctgatgactgtgcgcaaaactggcggcctctttatgctggccattcgccttatgcagctgttcagctccaacaaggaggactattcgaagttgacggctatattgggcctgtactttcagatacgcgacgactattgcaatctgagtctgaaagagtacacggagaacaagagcttcgccgaggacttgacggagggcaagttcggcttcccggtaatccatgcggttcgcacccaaaagcaggataaacaggttctacacatattacgccagcgcacgcacgacattgaggtcaagaagtactgcatcaccttgttggaaaagctgggcagctttcagtatacacgcaaggttctggagtcgctcgacgcagaggctcggtcggaggtggctcgtttgggtagcaatccgtacatggaccgcctgctcaacaagctgctgtcgtggaagacgagcgatagcgccagcatcacgcagtcgaaccagatcaatcacaacaacgtctcacgcagcagccccaaccagaacacgctcaattgcaattagcagccaaagaggcaaaagagggagcagtcgtgaattgcgaacggcagagcctcttttgccgccaatccgggacagcagcaggccagcagccagccgacgcctgcgtgcctcagtgcgcccctgttgcgtttcctgcagaagctgaagatattctgagatttatgttaccctttgccaaaccgaaaagcccacagagaacccctaccttactgtcaaccgaaaccagagcgatgagaacggaaataggaggaggataggatttggatttgatagtgaatcggatgaaatgggatggataacaaaaccaacagcagccttacagaaaattgttaagccaaaagtaaattgatataagccaagcttatcgttgagctagcaaagagccatattacagctttccaagaatttgtttttttacttttacattttactttatacttttaatttagttttgcttcaaagttacgtagttagttagctcgtttagtttccccagttttagtttcgcccaacgaatgggagaggggggggggggtggggatcaagcaaatctcgcagagcattactgaattatagaatatgcaattttttagctcttgtatttctaagtgtgtttcgtattcgtaactcaattctgcaagcaattttcaatttctaagtgtcattttatcaaatctaactcactcggaactcaatgtgcacttcctttatcgacgttgttccattttaattgttatacaaatgcgattcgtatacatacatacatatgtactattaacgacaaattgttaatgttttatgcagacactataaaatcaacacaaatgaacgcaactatatatattgaaataatgataatgatgcactgcacggcaggtttttgcacattgcaccacct

SEQ ID NO: 9633 - protein, 338 aa, DROSOPHILA
MEELNIILQKTKDKSTQKEQDEILLQPFTYIQQIPGKQFRSELALAFNHWLLIPGEKLAQIGDIVQMLHNSSLLIDDIEDNSILRRGVPVAHSIYGVASTINAANYALFLALEKVQQLDHPEATKVYTEQLLELHRGQGMEIYWRDSFTCPSESDYKLMTVRKTGGLFMLAIRLMQLFSSNKEDYSKLTAILGLYFQIRDDYCNLSLKEYTENKSFAEDLTEGKFGFPVIHAVRTQKQDKQVLHILRQRTHDIEVKKYCITLLEKLGSFQYTRKVLESLDAEARSEVARLGSNPYMDRLLNKLLSWKTSDSASITQSNQINHNNVSRSSPNQNTLNCN

SEQ ID NO: 9634 - DNA, 5783 bp, DROSOPHILA
gattttgagaaaccgagcgaagtatggaaccctccaatgtgtgtcgatccaacctcccagcctcccactttttgtgcatttactccagtcctaaaattgtatacatttaaaatcccctttttttctatgagtaaatagtaggctaatcgatcatactgcgtagaatggcaaacatatttggagtgacggtaacgatagattggtttagttttagccatctctccccatcatctgtcactgcaacaaacgagacacaacctaaaacggaaaaaacggtacagaacgcaccacaaccgatacgcaaacgatacgaaaacgtaaactacacaacaaccggaagaaaacaaaatagagtaaactttgatcgaaccctttgcgtgggtcgctattaataataataataagaatatataataaataatatattttacttattatttagtctgtattttgttgtaaaacaaagattaataaaaagataattttaatagaggatgtaaggaaattaaattgagttcgcattgcaatattcacgttttgcttgatatggttcatatatattttggataatacagtattaaaatgtaagtgcaatttaaactttatttaaattgacatacattaaagaaatgtgtgttttgggagaatttcataatattaaagttatatacaacttggttaaccttttcgattagtatgaaaggtatatttttacttattttgtattgttttttattaccgtaaaggaaatgggaggttttcttcgcgacacaattttattatttgtataatcataaaattagttaagaaaattcaataccttctaaaaatattgatttcatatttttttgttgctaaatgatccttttaacctatgaatatgaaacattaaaataattcaaaaacaactagttcccatttttagtggttccagcgataggaaataatcgcttcacggagttgctggaaacatcgatagcatcgcgtgaacatcgacttttgttccatccctatcgtggatgtttatgtggtgcgtgtgtggcagaattattatcaaaattattgaaagaatcaattttgagcccgcagatcgtcacacttgctagaaaatgtcggaaaagaagcgagcccgtcgccgcaaggatgtaagtgctaactgtttccaattagatccttctaaaggggctgcgcgtgtgtgggtgccacagtccaattgacatgccgaaagtgtttgttttttgttttgataaaaaaggagaaaaaaaacgtgtgcatgcagaaaaaaagtaaaattgactcgaaaagaaacaaaacgctgaattgcgagttcagatgggtcattcaatattttaatattatttgtggggggcaagttcagtgcaggttgcgctgctctttggagaaacccccgtgggatgccccccgcccgcaaaaggtctataattagctttatggaaaatgtcttcgctgcgtatttagctgtatctggaatttgagttctaccttttcttttttatttttcagtcaattaagttttggggtctacaatacaaacagctgagcttacaagcttttgcctatctggcaacgccgtaagtccgtcttgtaagccgatctcgctcattcgctggctcgctctctccagctctccctctcgctcattacccacacatgtcaggtgcaggcccacttatcagctgctctggttgttgttattgtggttattcgtgttgttgttggggaaagtttgagtacgcgtgtaagttgggcagaggcggcgcttaagagggttttgttaatcattggctccacacatacatgggaaattatcactaatatcatttcaatcgttaaacagctatgagtatcaatacagcttcaaacccccttgcatattttccaactgctcccctgtttagtatccatgtgtttgtttgttgtggtgatcaccagctcgtttgattcaatactttctagactctcagagcgaatgcaacacgtcacggctaagaaaaactacaaccgcttctggaatagttgtttctatttatatagttcgcagtttttaagttacgcatattaattctcgtaatgagtggagaggaggagtacttccaggaggaggaagaagaggagcaggagcaggatatttacgacgatggcacggtacttaggaaaaaataaaacccacgtataataaagccatctcaacggcttgagggtgacgaatacaaaattggtgtcgtggcctatattcgcttgtagtccccccatttaaccaatcgatcgtgaaagtgagtttctgacctggttttcggacctttttctcttttttcctcttataggaatacaccgaaccgggtgcccagaaggtagacaagccgtcaaaggacgagaagaacgtggccaagtggctgaagaagaacgttaagacgaagaagaccaaattcctgagccacatcgtcgaatacttcacctccagcaaggccatcgatgctctgctaaagtccaaattcaccgaaggcagcaatccgcttttcaccacccgggagcaggtaatcgagtttctagacgtgatgctggagcacaagttcttccatcgcgccaagaaggtgcccgtcactctggaggagatcagaggaaagtctggaggcgacaagaaggcggacaaggagaagacccaagataaggaaaaggacaaggcaaaggatgagaagaaggataccgatccggaaggcgataatggccaaggagacggaggtgcgtctggcaacgaaaaagagaaggagaaaaaggagaagaaaaagcgcaagatccgcctggacatgcatcctgagcagatcttcgtggacggctccgaggcatacgtctggatctacgatcccataccgctccactactggatattcggcttcatcctgctacttggcgccgttggcatttgcctattccctctgtggcctccactgctacgcaagggtgtctactacttgtccattgcggctgccggcttccttgttttcatcctggctctgacaattgtacgtctaattgtgttcatcatcgtgtgggcattaaccggcggcaagttgcacttctggatcttccccaacctgactgaggatgtgagcttcttcgcctccttctggccactatatgaggtttgtttcgaattatccatttatgttagtttactaaattaccttcatctctagagcaactataacagtgacccaaataattcgtccgccaagaccgacaagaaatcgaaatcgaaggacaagaagaaggaaaaagaaagcgatgccgaggacacagccgtggatgcggatggagacgctgacggtgatgtggatgctgaggtttccacgcttgaaccagagaaaatcgagctcatcaaagaacatgacaccgacatggagatccgcaaacgtcgcaaagtgggtgccgatgactacgaggaagacgatgtggatgaagaagaaacgaaggcgcagcccaaggattccaaagctgggtaagacggaaccgctcagtaatgaccaggattcctgctttattgctcgaatttgtatttataatttcttttatttccgtcgaacttttggttgtatgtttttcatacactaaatcatattgaatagcgcaaaagacatacattaactttagcttttaattgtaaatcctttgttccttaataaatattattgtataattaaaatgcattaatccgattcttggtttgcgtttcataacatttttatttcgtttacgaagcatgttatttgtaaatacatttgtttcgtgatttgtggtggctcattttattggttgctggtttttgttttctggtgatacttgaggtattccaaagttatcgcaagttatcgcatcaaagcagagtaagttttgcatcccattcatttgatattcattgtacttacagtcctacatttacttttgatgaatgcattttagtaatttccgacttatttgctttgctttcagaacgccacgcaactcgggatcggattcggagagctcgagtaaagattacgagataatcagttcaagtgaagtccaaaacgttgctggcaactaatatgaagaaaccacaatatatatatatattattatttaatgatccacatctagctaattgataagacatagaacaagaatcacacatcaagtacatcagcaaacacacacgattccaagtacagcgaattattgtcccacaagaaatgcgatcggtgtcgttattctttattgaagatttcctaatctgctttaaattgagcttaggtttgaggttttgcaatattttttattgttggatgtaggcttgcatatgaaacacaatatttttaaacggaatattatgtgagacaaagacatttggttatgcaccatgcagttggacatctttttttcgcaaaagttcttaagccgttaaacaaactacctatattttacctatttgtattcctatgtttgtaaatgtatacagtggaacgcactaggcaggtgcaagaaacgattgcaattgataataatcatagcgagtacgtacgtagatgtgagcgcatacgtttctatgtgcatgaatatttactctacatgtaattaaagcaaactaacaacttaatgaaattagtagtgtaacacgcaattaactattatataaataaagctaggcaattctgatctgatgtgagagatatttgagcgttttttagttcttgctcgaacgttttattaaaaaatatacaacatacaatttgtctttaaaattaaactcgtggtatcaaagggattaaaaatgaaaatttacgtctatagattttagttttaagtaaatagatatcctttataactaagtttgcggttcatctatgaccacagttatttgaaaagtcctttgcttatgtggaacgctgataagcaaatgatctttcgaattgactacaaattcttgaggatcttggttctcagataaatcacgtggtcttatgatcatactccgtccaatttgatcgaatggatcgtagactgtgagcttggcaagaagtttggcacgcgatggacaaccgaccagccagaagaaaacaccggctaatgcatcatcctttgccatttttggagcagctagcaaggtcagcggatgattccgcattggatgtgatctaagggttagaattagtaaatagatatatcatttttgttttcagtagctaacctttccttcgctaagctggtgtacaagagaagggccacaaaagtgtttcctttcgtgaggagatcgccatcgaagcagaactgctttggtaaaccttccactacttgatggtaatcttcctgcggtggagcatctttggttttccaaactcgatgatcttgcaggatatgcgaagaaaatgtgttcgactttataaggcttccgcacatgtgaatgggacagtaatactcttctaccagagatgactccaaatcatcctgcataatattttttggatgagctgagcccattgtgattacttgccagttcagaggaggcaatcctgcatactcggtggttcgacaggtcagcatcggttccgatgctccatcagaatcagtttctaccttagattcttcaattagacactttggttcggagtcacttgaggagtgcaggttggctataagacgtaatggcttttgacttgaacttaattccgtgaaggaatttgaaagagatatatcctcttcttcattcaaaatgacatttggttcaagtt

SEQ ID NO: 9635 - DNA, 2038 bp, DROSOPHILA
tgttccatccctatcgtggatgtttatgtggtgcgtgtgtggcagaattattatcaaaattattgaaagaatcaattttgagcccgcagatcgtcacacttgctagaaaatgtcggaaaagaagcgagcccgtcgccgcaaggatgaatacaccgaaccgggtgcccagaaggtagacaagccgtcaaaggacgagaagaacgtggccaagtggctgaagaagaacgttaagacgaagaagaccaaattcctgagccacatcgtcgaatacttcacctccagcaaggccatcgatgctctgctaaagtccaaattcaccgaaggcagcaatccgcttttcaccacccgggagcaggtaatcgagtttctagacgtgatgctggagcacaagttcttccatcgcgccaagaaggtgcccgtcactctggaggagatcagaggaaagtctggaggcgacaagaaggcggacaaggagaagacccaagataaggaaaaggacaaggcaaaggatgagaagaaggataccgatccggaaggcgataatggccaaggagacggaggtgcgtctggcaacgaaaaagagaaggagaaaaaggagaagaaaaagcgcaagatccgcctggacatgcatcctgagcagatcttcgtggacggctccgaggcatacgtctggatctacgatcccataccgctccactactggatattcggcttcatcctgctacttggcgccgttggcatttgcctattccctctgtggcctccactgctacgcaagggtgtctactacttgtccattgcggctgccggcttccttgttttcatcctggctctgacaattgtacgtctaattgtgttcatcatcgtgtgggcattaaccggcggcaagttgcacttctggatcttccccaacctgactgaggatgtgagcttcttcgcctccttctggccactatatgagagcaactataacagtgacccaaataattcgtccgccaagaccgacaagaaatcgaaatcgaaggacaagaagaaggaaaaagaaagcgatgccgaggacacagccgtggatgcggatggagacgctgacggtgatgtggatgctgaggtttccacgcttgaaccagagaaaatcgagctcatcaaagaacatgacaccgacatggagatccgcaaacgtcgcaaagtgggtgccgatgactacgaggaagacgatgtggatgaagaagaaacgaaggcgcagcccaaggattccaaagctggaacgccacgcaactcgggatcggattcggagagctcgagtaaagattacgagataatcagttcaagtgaagtccaaaacgttgctggcaactaatatgaagaaaccacaatatatatatatattattatttaatgatccacatctagctaattgataagacatagaacaagaatcacacatcaagtacatcagcaaacacacacgattccaagtacagcgaattattgtcccacaagaaatgcgatcggtgtcgttattctttattgaagatttcctaatctgctttaaattgagcttaggtttgaggttttgcaatattttttattgttggatgtaggcttgcatatgaaacacaatatttttaaacggaatattatgtgagacaaagacatttggttatgcaccatgcagttggacatctttttttcgcaaaagttcttaagccgttaaacaaactacctatattttacctatttgtattcctatgtttgtaaatgtatacagtggaacgcactaggcaggtgcaagaaacgattgcaattgataataatcatagcgagtacgtacgtagatgtgagcgcatacgtttctatgtgcatgaatatttactctacatgtaattaaagcaaactaacaacttaatgaaattagtagtgtaacacgcaattaactattatataaataaagctaggcaattctgatctgatgtgagagatatttgagcgttttttagttcttgctcgaacgttttattaaaaaatatacaacatacaa

SEQ ID NO: 9636 - protein, 415 aa, DROSOPHILA
MSEKKRARRRKDEYTEPGAQKVDKPSKDEKNVAKWLKKNVKTKKTKFLSHIVEYFTSSKAIDALLKSKFTEGSNPLFTTREQVIEFLDVMLEHKFFHRAKKVPVTLEEIRGKSGGDKKADKEKTQDKEKDKAKDEKKDTDPEGDNGQGDGGASGNEKEKEKKEKKKRKIRLDMHPEQIFVDGSEAYVWIYDPIPLHYWIFGFILLLGAVGICLFPLWPPLLRKGVYYLSIAAAGFLVFILALTIVRLIVFIIVWALTGGKLHFWIFPNLTEDVSFFASFWPLYESNYNSDPNNSSAKTDKKSKSKDKKKEKESDAEDTAVDADGDADGDVDAEVSTLEPEKIELIKEHDTDMEIRKRRKVGADDYEEDDVDEEETKAQPKDSKAGTPRNSGSDSESSSKDYEIISSSEVQNVAGN

SEQ ID NO: 9637 - DNA, 4048 bp, DROSOPHILA
gcaggagtggtgggtcagaaggtacgaaagaaggtttattccatcatatatataatatatctaaagtacatcttatacccaaatcagatgcccagatactgcctattcggagacacggtgaacacagcaagtcggatggagagcaccggtgactcgatgagaattcatatatccgaagccacctaccagctgctccaggtgatcggtagctatgtgtgcattgaaaggggtctgaccagcataaaggtatgtttaattacaagacattctttcgttataatcaaataactatataactatagggcaagggcgacatgcgaacctattggctgaccaaacgtcagcaacccgagttaacgccggatctgattagcaccgtggatactttggacacctactgctccgggccacgtgagagcatggaggtctcagtccaccaatattgtagtccggcctcgaataactacagattgggatcctgcaactgtgacaccaagtgtttatatagccgtcgttcggacgacaatgtaactaattcccatggaacatccgagtttccaaaggtcagtgaacccgcgcaggtcaactgcaatcaattatgtgtttgccgattgaacagcagccaaatgtttaataatcgaggtcctcgatcagcgcctagtatcacatttagactataaggactcaattctatatttaacgttaagctccttgatcgatgtaaattactggcgtccattgcggtttatgtgttgccaaattagcaatatctctttaacaatattttacattattattatacaaattccagaaaaatattccatcattttgctgttcaatttgtccgtccagttaaaaagctgagttattcaattatttatattttacatcaaatgaaataggtactcagtttgccgaatggatttttcccaaataacaacatttactaataaaattaattgtaattttatcataacgtgttttgcttcagttaaatatgctaatttttagttatttgaaagttgttcttcagcgcctgccagcattcgtaatatgcggcatccagtttttggcaggtctcctcgccccacttggtaacggccaaacttagagaggattcgaacatgaaggccttcaaggaagtatataactaggttactaagccccattccagactatcaataatccaacccacctgagttccctcggccacgcgttccggcaccagtttggcattcgaggcaccttcaaagcacttgacatctggaccatgtggcgtcatcatggaatggagggtcgctcctcctgccgcaaagccatcctccttggcctcatacttgcccagaattaggcccatgaactcgctcatgcagttccctaaaaataaagatgaccatcagatggaaatgatagtaacttaatatgcacatactgtggtaatagggtggcctgaaggtgtgctcctgcactgaccaacggggtggaaagatcacaaagtctgctatggccgttccagctcgtaagctgggacaagtgagcacggtaaaaatgctggggtcacaatggtcaaagctaaccgagttaatcaccatgaacttggacagatcgtacttgaagggcacatagttaccatgccaagccaccacatcgaagacggtgtgattttgcttggccacgaagaggcgaccttggaatttcgaaattacctggaagtctttttaaaagagtttatttctcaatcaattttcaatttattattaaatgtgcgctggtatttaccctttacatcccgatcatcgaaccacgccacaggagtctcgaaatctctgggattggccaaaccattagcaccaatgggacccaagtccggcaaaacgaagtgatcatcatagacctccaggatataacccctaaaaaccgtaatggattaattttggtgatcattatgtaaacttcttccttacctagaaggagaatccacatttacagcaaatcgtattccctgtggtataacgcagatctcatttggggctacagacatccttccaaactctgtggttatatctaagactccttgctggggcactaaatcaatgattaaaaatgtgagttaccttccaacactcaaggataacaactgatcatcttaccaatcaaaaaatcaccatcgctgttatagaaagctgagttatccatcgagccattgcaggagtaaatgtgtatggcaagaccatgacgagatctgggatctcccgctccacaaaccgtgtgcaagccttccacaaagttcacattttttccatcctttggaggcaagtcaaagggtttccaacgaagctaagtcatgcataaaataatatatatatgtatataagtttttattgatatcgaactattataatcacctggtttggattcggtggctgctcatcccagttttgactaaagtactcagctcccttgaagggctggaatggaaggtgcgcggcagagggcaacttcctgtagagccacgtgcgcatattctccgtcctgggcgcagtgaaggcacttccggatagctgctccgcatagagtttgtatgggcacacttgaggtgagttctgtcccactggcaaggagttgggataccgctcatcctcagatgagaagtgagacccaaaacccgagaggtactataatgtaaaataaatacatttgagtaacattcctcttcaagtttaaaatgcacgccatatcaatatcaattttatcaccaaacaccaacaaaataaactagaggtaataaactaattcaagacgataacttgttttttttacaacttataacttattaacatgtacatatttatatatttgccacgcaatgcattagtttagaaaactaactcaaatctcacaatatgatatgacaatagatacactgttctaatatcttatctgcacaatctgtctaactttcaaaaacagaaagttacgtttatctcgattttaaacactagcacagaattattatattcatagagcgatcaccttgtattccgacatgtctgttcctccggcggtttatagaagcactgaaatttacggatcatagacgagccctacttatatatgctcgatccagtcaggccacttgttctccatcgctacatggcgagtattttgaatacttgccggagaaactggtccccgtgcaaaggccggccccctaaaatgcggcgaatgataccagagataaacacctgccccccagttgttgatgcgtgcggattgttttgattttgttaccaactaaatagaaccactggaaagcatacgtgattcgcttagcatagcggttatactggtttaaaaatgggctatacttctttaaatatagccgagcaattttataatagtaagccgtgctgcttagcgtaaataatttttataaatatacttatcctgcagcaaagaatataacacagatgctgtaaactaagtaactagtcgtttaatttattgcggcaaagattcaaagttatagtttatacggtaggcaatacaatacacagtgatgtgtgcgctgtctgtatattaaaatacttaaagtacttttatgcggtaattaaacctaaattagtaagagtacattaaattatacgtttaaggacatacagcgctcgtgaggtgaataaaagcggaaattcactcgtaggactggcgaaatctatacggatgatgattgtttcgattgagatatgcacggcatatcctagttgtaaaaaataatccaaagtatacaaagtacattttttgaaaattcataaacttaagaaaaagaagacgaacattttaaaataattatcccgggatttactgattgggcgattaaaatgaccgactttggtttgctaatggatgcaaacgcggcattacgtatgggaatatatactgttgggaaaatactgcgacttcgattgcgctggcaaggattccgattcagccatcctagtcgtgcgacagattcaagatatcatcgcccatgttgtttttcggcatcttt

SEQ ID NO: 9638 - DNA, 1272 bp, DROSOPHILA
atgtcggaatacaagtacctctcgggttttgggtctcacttctcatctgaggatgagcggtatcccaactccttgccagtgggacagaactcacctcaagtgtgcccatacaaactctatgcggagcagctatccggaagtgccttcactgcgcccaggacggagaatatgcgcacgtggctctacaggaagttgccctctgccgcgcaccttccattccagcccttcaagggagctgagtactttagtcaaaactgggatgagcagccaccgaatccaaaccaggatggaaaaaatgtgaactttgtggaaggcttgcacacggtttgtggagcgggagatcccagatctcgtcatggtcttgccatacacatttactcctgcaatggctcgatggataactcagctttctataacagcgatggtgattttttgattgtgccccagcaaggagtcttagatataaccacagagtttggaaggatgtctgtagccccaaatgagatctgcgttataccacagggaatacgatttgctgtaaatgtggattctccttctaggggttatatcctggaggtctatgatgatcacttcgttttgccggacttgggtcccattggtgctaatggtttggccaatcccagagatttcgagactcctgtggcgtggttcgatgatcgggatgtaatttcgaaattccaaggtcgcctcttcgtggccaagcaaaatcacaccgtcttcgatgtggtggcttggcatggtaactatgtgcccttcaagtacgatctgtccaagttcatggtgattaactcggttagctttgaccattgtgaccccagcatttttaccgtgctcacttgtcccagcttacgagctggaacggccatagcagactttgtgatctttccaccccgttggtcagtgcaggagcacaccttcaggccaccctattaccacaggaactgcatgagcgagttcatgggcctaattctgggcaagtatgaggccaaggaggatggctttgcggcaggaggagcgaccctccattccatgatgacgccacatggtccagatgtcaagtgctttgaaggtgcctcgaatgccaaactggtgccggaacgcgtggccgagggaactcaggccttcatgttcgaatcctctctaagtttggccgttaccaagtggggcgaggagacctgccaaaaactggatgccgcatattacgaatgctggcaggcgctgaagaacaactttcaaataactaaaaattag

SEQ ID NO: 9639 - protein, 423 aa, DROSOPHILA
MSEYKYLSGFGSHFSSEDERYPNSLPVGQNSPQVCPYKLYAEQLSGSAFTAPRTENMRTWLYRKLPSAAHLPFQPFKGAEYFSQNWDEQPPNPNQDGKNVNFVEGLHTVCGAGDPRSRHGLAIHIYSCNGSMDNSAFYNSDGDFLIVPQQGVLDITTEFGRMSVAPNEICVIPQGIRFAVNVDSPSRGYILEVYDDHFVLPDLGPIGANGLANPRDFETPVAWFDDRDVISKFQGRLFVAKQNHTVFDVVAWHGNYVPFKYDLSKFMVINSVSFDHCDPSIFTVLTCPSLRAGTAIADFVIFPPRWSVQEHTFRPPYYHRNCMSEFMGLILGKYEAKEDGFAAGGATLHSMMTPHGPDVKCFEGASNAKLVPERVAEGTQAFMFESSLSLAVTKWGEETCQKLDAAYYECWQALKNNFQITKN

SEQ ID NO: 9640 - DNA, 2650 bp, DROSOPHILA
accaatttgtgacggatctgcggggcgggcaggaagacccacaggaggtactgcagcaggccgtccagctgggtgaccttgaggaactgtccggaggtaatgtcacagccttgctgtagcaaactgagggtcttgtccagggcgcaggtatcgatcgtgatgcccagtttctgggcggtgaagaagacgttcatgaacgtcatgtactgcgaggcgcactcgttgctgcctgtgacgaccaggatgcgggaatgcatcttgacgccaggagccagattcctctggagctgtacgggagtattttgttttagatttggtttcccaaggcgattcctagctattctctacccttgatatgtagcacagcgccatggacatgctgccggccaggagactctcacaaggagcgctgagccgtggtgcgttcatcaggatgctgcccagctgctgcttcaccgtcttctccaccagattaaacgcctcgtactgcccatccacttggcgcagttccacttgtcttctgggcagcggatacaggaagtttctgtaatggaagagccattaggtggcgtacatgtgtggcagcctctactcacgtggcatggtgggagcaggataccacagccagtttgttctgggccttctgcatcaggtgagcattcccaaaggcaatcaccgcctccaggatttgcgtgaggttctgtgggttctggcgcacgaagtgctgggaggggttcgtgtccaggacgatcaccaagaggtcgatgcatgattcggctgaaaattgcgttcataaatcattgttttcattccattcttgtttaaaacaaataccttccttgcttgctgcttgatctgcttccattttcgccggcaatgttatcgctagagatgcgaaccaatcgatatttgcagtagggtagcgcaataaacttacgttttatttattgaaaacaaatcggtgtcaccaccagccgccttcgatagagctgttatcgttatcgcagccacctatcgtttaattcgctgggcgtttcacaatttttttgggaaacacaacaaagcttcacaaaggacacgatgctcgttctggtactcggcgacctgcacatcccgcaccggtgcagcagcctgccggctaaatttaagaagctgctggtgccgggccgcatacatcacatcctggccaccggaaacatctgcaccaaggagtcctacgactacctgaagtccctggccaatgatgtgcacatagtgcgcggcgacttcgacgagaacctgacgtatccggagcagaaggtggtcacggtaggccagttccggatcggtctgtgccacggccaccaggtggttccccgcggagacccggaggcgctggccctcatccagcggcaactggacgtggacatcctgatcacggggcacacgtacaagttcgaggcctacgagcacggcaacaaattctacatcaatccgggatcggccacgggtgccttcaacccactggacaccaatgtggtgccttcgttcgtgctgatggacattcagagcaccacggtggtcacgtacgtgtaccaactgatcggcgacgaggtcaaagtggagcgcatcgagtacaagaagatctagggtcctagtattagccaccagccattcccctccaatccaacccttgacccctgcattctgagctcggcttcattaaagaaattgtaaatgtacgtagcaataaatcaagttctcatttttttatctgataaaaaatgctagcaccttgtttaaatagagaataaaagtacgaacggacgaaagtgaagttttagatttaatgcaataataaacgattacaaagtaaggaaaaacacccccagaaattgtgatactcccacaataatctgataaaaaagtttaaattttattaaatagaatataaaaaggagttacatctgatgatcgagtaaagagtctgctcaaaagttcggatttcatgctcagtttctcattgcaacacactctcgatataaatacattgggttcggtttgtggccatcgcttttccatcgaaataaattatataaatactttccacgagccaggacagcaatgtttggcaacatcatcaatacgaaatgtttgatctaaaaatctttgaattacgaaaactttgcacttagattaaatacaattatgattgctgctgacgacagttggaaaagcaacgaacaggatccccgaggaggagaaccgccttagccgaggctgtccacgcacacagtcttcagggtcttgccggcaatcgtggtcttatactgctccggtaaagccaactcggtctggaaatcacaaaaaaaataaataaatgactgaagacaagagacaaatttttgaactcacataatcgccgctgtcgtcgggcaacaggatgttcatctccgaggacttggagttgacgatctccacgcccagcgagtccttggacagatacatctggcagccgtcggtcttgtcgatcgataccgtcggcaccgagccgagcacctgcatctgcacgctctggcagttgacgaactccacggaggccaccacggaatcgaacagcagggagcacttcttgcaggagtcgaagacgatgttgttcaccttgcccttg

SEQ ID NO: 9641 - DNA, 650 bp, DROSOPHILA
atcgcagccacctatcgtttaattcgctgggcgtttcacaatttttttgggaaacacaacaaagcttcacaaaggacacgatgctcgttctggtactcggcgacctgcacatcccgcaccggtgcagcagcctgccggctaaatttaagaagctgctggtgccgggccgcatacatcacatcctggccaccggaaacatctgcaccaaggagtcctacgactacctgaagtccctggccaatgatgtgcacatagtgcgcggcgacttcgacgagaacctgacgtatccggagcagaaggtggtcacggtaggccagttccggatcggtctgtgccacggccaccaggtggttccccgcggagacccggaggcgctggccctcatccagcggcaactggacgtggacatcctgatcacggggcacacgtacaagttcgaggcctacgagcacggcaacaaattctacatcaatccgggatcggccacgggtgccttcaacccactggacaccaatgtggtgccttcgttcgtgctgatggacattcagagcaccacggtggtcacgtacgtgtaccaactgatcggcgacgaggtcaaagtggagcgcatcgagtacaagaagatctagggtcctagtattagccaccag

SEQ ID NO: 9642 - protein, 182 aa, DROSOPHILA
MLVLVLGDLHIPHRCSSLPAKFKKLLVPGRIHHILATGNICTKESYDYLKSLANDVHIVRGDFDENLTYPEQKVVTVGQFRIGLCHGHQVVPRGDPEALALIQRQLDVDILITGHTYKFEAYEHGNKFYINPGSATGAFNPLDTNVVPSFVLMDIQSTTVVTYVYQLIGDEVKVERIEYKKI

SEQ ID NO: 9643 - DNA, 3728 bp, DROSOPHILA
gtccgaagggcttctccggggttccatcgtcgtgggtcttgacgatgatggccttgcgaccggcgtaacgtccgctaaggacgattacgatcttgccctgcttcatgattttcctcatcttggcggtttgctctgtaaattaagggaaaaacgttagtaaaatcgtcagatctcaaaacattatttaataactatttggcggcagagtttataacatcatctgcaagtaaaccaaaataggtttttaaagcaacacgtttttggtcattgtgtgcttggtattgtagtattagtttgccggatgtcttgaattcacttattatctgttaacacacataatatattcaaactggcatacacaaatcatatgcaactcagaagtcatagtcggctaaaccatgtggtaagttataaccagatattgtttttttcatagaagagatgggaggcagagccaccatagaatcttttttttctgctctacgggactaaaaccgtatttttcctccttttaaaatcattatccattttgagggggcatagcctgtacattgcacgccactcgcattcctaccgcagcgtagaaatttatattttggctaaaatttaacaaaatttacacgcggaacacaccactcaccggaaacgggcgaaaagaaaagaaggggagattttagagatggcaaaacgtcgtctttttatcgatacttagtggcaacatttccggtatttttgaggcggtcactctaccatatggctgtgtttcctactatctggtcacactggcacaagtatttttttttatcacaattttaaattttccctttgtaaattcataacatcatataattgtggaaaaacacttaaaatttattaacaaaatagatttttttaaatttaatatgttaatcatttagaaaacatggtacatactaatcattgcttaaggagagatactactccttcatagtactcagatatttagcggaaatgcccggccctacgtctttttttggataatcttaaaggtattatgccgattcatgacgtagctgagggcagtggcagccgtagtcaggccagtcagataccaaagtccctgcaaagctgggtgatctggaatgggatgatacagaattgattaatccatcagtagtgataaaagtgtttgctgtatctcacccaaatagttccaaatgggagctcccaggctcagtccaatggtggccaactggacgcccgtgttgatcttgctgagcagcgtgggctccagttgggcagtaacatgggtggcgtcgaagtagcgcgaaaaggttttctgccgaggaaaggtaaatgattataaacaaatgccacaaaaatgtaggtaaatccttcacttaccggcggtggcagacttatgtagcgtataacaaatccagctcctagaagaaagacatcccggaacaccacgatgcccatgagccacatgggcagcaggtccgtgtagcacagcgagatgaccagcgagcccatcagcaacttatcagccatggggtccaggaaggaaccgaacttgctcgcctgcgaaggccaccgtcgtgcgatctgtccatccaactaaagaaacaggaaaaaacaaatgtcattaccaagaaagtttcaatgtttcaaatttatctaagtatcttacaggaattaaacgtgtgtgtgttatttagatacacgaactatttttggtttcgtctgggcaattcgggtaaaaaattcaagagtatgtatagatattttggttctaaaaagtactataaatgtagaggaaaacaaaacacagaccgggcagaaaacaagacaataaataatgcattagatcacaccacatcatgttttcagcatttcttaaatactagaggatctattccgttgaaaatggtggtcctgggaaactcaccagatctgtgatgccggcgaacgctagaaggctcatgcccagggtgaaatcgccctggactataacatatccgatgtagggtgagaggacggcacgactgatggtcagcatgttgggtatggtcataatgttctctcgctcttcgcgtatctcgtcgatcttctcgcgcacccgctcctggactttgtgcctggcctcccggatgtcatccaccaggaagttcttcctttcgatgacaccctgcaggagatggcgtccctgcaaggtgcgcaaatggagcgactgcttcttctcatcggcatagaggcgaagtctggctaactcgtagttcctgcgccgcttaatgtccagaaacgagatccgaatgaatcccgtggcggccgcatagcgattcaggcagttcacgaagctgcttccgccgactcccaaaacgtgctccaatgtggcggctccatggtgcagtgggcgctgcacctgccggaaaatgatggcgggcagcataggttaattgacgttcgatccctgtctcaagtccagactctttcgcgagcactgtaatcacacaaaatgcccaatcagtttcaatttattgagattcgtaaccttggttccaaattgatcgaccaccgacccttggccatctgttatcaccagctcaaacacgcaccattggtcggaaatccttgttcactgatggcacctgagtgcagtacgaaatctgaattcttattcgattacaagttactgccctgcatttacggaaatttttaattcaatttttgtttttattacacaagccgtctccgataacactgttgatacggcgacagcactatcgatttcagcgattgcaatagacaaaatgtgccaaaatatgctaactaaatataccaaaactaccaaaccaacatagagcggtttttttgaaatgcttaccttatataagaaagtgtatactattcaattgtgattgcaaaatgaaatgacgtttcttttattcaaatgtttataaaattatatgcaatactgaggtcataggaatgagagataaaaaacttataattcaaaagtaattgtgcgtcaatgagatttatcgccaacataaaacacaaaggaccctatattctattgtatatgagtttctcggacgagaaaaactttatagttaacatatcctgtttatgctggatagttcttaataatggaaaatacgaaactttttcttgtttaagttttgattggaatagcttgtcaaaatagcttaggtgcacggtaagtcttttcgaaatttcttgtattataatttaaattatcatctttaaaggacaaaccaggtagagataagagcgacatcagaaacgaacatgcagagcttttttggtcggaactggcattcaagctaactgaagagctgatccccaaacgaattcctaatttcttgtaaatgtgaataacttttagtcaaaaattttaaaagtacatatttagaaaaaaaaagtattttcagagttactgtttaaaaatttgttactggttatattactgaaaagaaaagagttgagaacaattggaaaaatcttcaggaatctataaagaattttaataccaaatacggcggttcgcaggagaggctcttctctgtacagaaaaagatcaaaacagatcaggcacctttgagagaacttttacatatgcgaagccaacaaaataactgagccaataagcgataattaatagtaaagataatctgtaaatacaataaaaaatgtatatccattcaccatctatttatttgctt

SEQ ID NO: 9644 - DNA, 1150 bp, DROSOPHILA
gcttgtgtaataaaaacaaaaattgaattaaaaatttccgtaaatgcagggcagtaacttgtaatcgaataagaattcagatttcgtactgcactcaggtgccatcagtgaacaaggatttccgaccaatgtgctcgcgaaagagtctggacttgagacagggatcgaacgtcaattaacctatgctgcccgccatcattttccggcaggtgcagcgcccactgcaccatggagccgccacattggagcacgttttgggagtcggcggaagcagcttcgtgaactgcctgaatcgctatgcggccgccacgggattcattcggatctcgtttctggacattaagcggcgcaggaactacgagttagccagacttcgcctctatgccgatgagaagaagcagtcgctccatttgcgcaccttgcagggacgccatctcctgcagggtgtcatcgaaaggaagaacttcctggtggatgacatccgggaggccaggcacaaagtccaggagcgggtgcgcgagaagatcgacgagatacgcgaagagcgagagaacattatgaccatacccaacatgctgaccatcagtcgtgccgtcctctcaccctacatcggatatgttatagtccagggcgatttcaccctgggcatgagccttctagcgttcgccggcatcacagatctgttggatggacagatcgcacgacggtggccttcgcaggcgagcaagttcggttccttcctggaccccatggctgataagttgctgatgggctcgctggtcatctcgctgtgctacacggacctgctgcccatgtggctcatgggcatcgtggtgttccgggatgtctttcttctaggagctggatttgttatacgctacataagtctgccaccgccgaaaccttttcgcgctacttcgacgccacccatgttactgcccaactggagcccacgctgctcagcaagatcaacacgggcgtccagttggccaccattggactgagcctgggagctcccatttggaactatttggatcacccagctttgcagggactttggtatctgactggcctgactacggctgccactgccctcagctacgtcatgaatcggcataatacctttaagattatccaaaaaaagacgtag

SEQ ID NO: 9645 - protein, 273 aa, DROSOPHILA
MLPAIIFRQVQRPLHHGAATLEHVLGVGGSSFVNCLNRYAAATGFIRISFLDIKRRRNYELARLRLYADEKKQSLHLRTLQGRHLLQGVIERKNFLVDDIREARHKVQERVREKIDEIREERENIMTIPNMLTISRAVLSPYIGYVIVQGDFTLGMSLLAFAGITDLLDGQIARRWPSQASKFGSFLDPMADKLLMGSLVISLCYTDLLPMWLMGIVVFRDVFLLGAGFVIRYISLPPPKPFRATSTPPMLLPNWSPRCSARSTRASSWPPLD

SEQ ID NO: 9646 - DNA, 4568 bp, DROSOPHILA
acgccccgatagaactatagctaatgtcaggacagactcggcatatttgggaatacagtcaagcatccacaactcggattgcctaaaaagagatatttgagttacatctcgaaccgatcattagccatagttcagtcggagttccttttcagctccttcaaccgccatgagttatgggcacaatttcgatttcgtcggacaccgcatatgtgacattttgagctgcaagttccggaaatcggatgaaatgaggcggtagaggcggctttaagtagcatatacaaggagtgtatatatataaatatgtaacattatatttctgcttcggatttctgggggtgtctcttattttgttgttatttacacagcttcatttgtcgtttgcataatgcaaaaaaaaaatatatatatatatgtatactatattggggttatgcattttacaataccattcactattactgcttcgcttaatcgtaatcgtaaatcagacgcacagctggcatataacagatatcgtactcctaagcttttcactccgttcgcattaatgcatgatgacaatgattaacagtttgtgcccaccatcggcattatccttataacataaacatcttctggtgtcattacaatcgacatgacttttttcttaagtgctatcaactaaaacataacttaaccctattcatgcgtgtgatttttgtgtgttttacgtacatttgctgcatgtatgtgcacaaagtgggtggctaaaagtgggttgattttataaaaaaaaaaatacggtaggcaattcttaaactgaaaatcttaacataaagttactacttatgttctcgttctcgcaagccttcgacacaattcgctcgcagtggcctttatatttttccttttcatttccattttcatttttaatcagacgaggtggagtagctagatggtgtcctagtgaccgggagcttggctttgggctgggatcgcaattgcaattgcttgtggattacatgaagcgctggcgtttactactgtagtggcaaatgtccattttgtcgtcaatgggactcccgggacgcttgcaatgtcgcgcgatttcgttggcgacaaatgccaatagttccgggccactaaaatatataggttattgatgagttatctttgatttgatttgatttgggatcgtttgcttataaaaacaagttcataaagcttccgctaataacataactttctgaatgttttcgacagtctttaaattttttaaaaagatcacaaaaactgtgtgtgcaattcaggatgtattccttttgcgcttcttgttcagaaatttcttttgttattagctaaacttgcagtagctgagaacttgataatctcaaatgtctgattaatactaaccgtggccgcaaaaccaaggcctccttgaacgtgtgcaagtcatcgccgattccgccgccgggggcaccgcccgttccctcctgacggccaccggctgctccggcggacagcaagtgcccacccccggcagccgtgagcggaccaccggtcaggcccaatccggagccgtggaatcccaggccagagccaccactgccactctggtggtgatgctccggcttcggcgaactgcaagaaaccgaaaaaagtgagcagttttaattgtgcaaatggcaacggcgactcaccgacgattggcatgtggatttgagttgcatggcggtagtggctttccggccaaataggccaacagatcctcgcggcgaatcatgcggcgttttttgcttcgcgcccaatcggccaattcgcgagtgcgtctttggtagccgcattgaatggcagcgtcgctggtgcgtttgagaccatcacatgattctggaggagatcgggagacacggatcggattagtcaagccggaactatttggagaagcgacatggactcacctttgtagagtgttgtcacagtgccagctgcggtctggaagggcagccaaagggcgcctgtgtctgaggaaaatgtgttcgatgagcgttctgtggaatatggagaaatatgttatttatcatatactatcgtacttctgagggttataaatttgaaatctattcgttgcttgtggatctcttctttttagtgtatggatttatccctttaatatgaataagtcattatttccccccttttttttgcgttttaatcataaatttcataggttggtgtagaactgctgatcctaaagtatgtgatcgatttaagaatccagtttcaactacctaatccctactatggaatataaaagagcaatagtcgacaaaatataatgtggttattatgtttatatcagatgctttatgcgaactactggtatttattagttatttccctcatggaaagaaaattgatacgtaaacaaaatttaacttgagtcattgcttgataattctaggaaacaaataaaaaatgattttgttatctttatgtttctgaaatattaaattatatatacaggatgtacggacatagtggaatgaaatggcgaacacgaaatccctgcaaaccgtttttccttgtggaaagtgaacaatagcaacaaacacctacgacctgtcgatcgtcttcttccctctctcattctctcatttcacggttgacccctgctccttgcacacctgctgcacgaaaggacgaaaaaggacgagagggagacagaaggcaagagaagagccgttatcgacccggagtaagaggaagaatgcggtgcaagagggatggcaataggcactcgaagttatttgcaagcaaaataaaaaaaaaaacaagaatttgaaagcaaagagcatgggaaattaatcttccagcgattttcccaacttcattttgttttgtatttcgctagccgaaaacaatgacgaaagcaaaacagctgttcgactctctcacacacacacgcatgcaagcaaacagatgagcctgtacgcacatgttgattaatgatatcaacaataacagcaacaacaccacagtcggcagcaacaacaaatggggggcaaaaaaattctaaacggtgacgcctctgcccttttcttcctcgtgctctccctatttttgattgctattgcacttgccatctctcttttcgcaccgtctcgttctctcattcttttgctccctgttctattgcatccctcttacccccccccccccccattatcaacaatattgcccataaaccataacaaaaacaacaaaagcaacatgagccctttctgcattttgataatgcgtagtattgaggagcgaccgaaaagggaagttgcattttcatcatgaaagccgggctgctgctaccccctacttttcttcttcttcttctcctggctgttctattaatacctcgcccaaaactatttttgaagagagaccacacaacacacacacgaacacacacatggacgcagatagtcagacggaatggaaacacaaagaatagcaacaaaaaataagcatggaagcctacgcccttggaaggaataacgggatctatatcccccccaaccatcaaatcctctcaatagcaatcaactcacctctgtacagctgtgcaacggcggtggccgaatcttggaatgctccccaaacagtgcccagattgttatcccgctgacgcacaaactcccgttcgtattcatcgtgctgaccgtggatttctcggtgacactgctcctccagccagctctcctcgcctccggactccggttgttgttgcatttctctctcctctaactcgctctctcgccttgtgtcccttccaagttacgggttccttcccgttccggcaaatgtgcctggacaatcttcttcttgcgctgctccttttctgctgctgcttcttcttcctccactggcgctgctgctacgacgacacacgcacacacacactcgcacgcgaaatgaaacgcaccaacacactcgcacgcactttggaccaaactcttggtttcgatatcggatttagccaggaaatcggatggcaatccttcgtttcgaccgtctgcccaagaaggagctactctggacgaccggttgggaatgatactaatttatttatcgcacgaacgtaaagcgagcaacacttttacgtagtaaaccagcacaaaaaagaacgacactcagcgacggcgttgctagatctggaaaaactgtcgagccaccgctgctggcattctagttcgattttcaatccggtagcaggttctgatcctggtgaaccagtcacttattttttactttttaaaattaaagataatacaaataaaaattccaactaatgcctggtgtaaaattattgaattaaatatgaagtgttgcattttattttggaactaatttatctataggctcctaggcttacaaaattgttttgatgtggcgaaccagtcacgaatcactatgttcctaaaatattttagattgttatttaaaaataatagaaatcattattacaaactatattttgtgcttgaaactgtaattttatgatactaaaatactcttctttatatgttgcgttt

SEQ ID NO: 9647 - DNA, 1225 bp, DROSOPHILA
aacgccgtcgctgagtgtcgttcttttttgtgctggtttactacgtaaaagtgttgctcgctttacgttcgtgcgataaataaattagtatcattcccaaccggtcgtccagagtagctccttcttgggcagacggtcgaaacgaaggattgccatccgatttcctggctaaatccgatatcgaaaccaagagtttggtccaaagtgcgtgcgagtgtgttggtgcgtttcatttcgcgtgcgagtgtgtgtgtgcgtgtgtcgtcgtagcagcagcgccagtggaggaagaagaagcagcagcagaaaaggagcagcgcaagaagaagattgtccaggcacatttgccggaacgggaaggaacccgtaacttggaagggacacaaggcgagagagcgagttagaggagagagaaatgcaacaacaaccggagtccggaggcgaggagagctggctggaggagcagtgtcaccgagaaatccacggtcagcacgatgaatacgaacgggagtttgtgcgtcagcgggataacaatctgggcactgtttggggagcattccaagattcggccaccgccgttgcacagctgtacagagaacgctcatcgaacacattttcctcagacacaggcgccctttggctgcccttccagaccgcagctggcactgtgacaacactctacaaagaatcatgtgatggtctcaaacgcaccagcgacgctgccattcaatgcggctaccaaagacgcactcgcgaattggccgattgggcgcgaagcaaaaaacgccgcatgattcgccgcgaggatctgttggcctatttggccggaaagccactaccgccatgcaactcaaatccacatgccaatcgtcgttcgccgaagccggagcatcaccaccagagtggcagtggtggctctggcctgggattccacggctccggattgggcctgaccggtggtccgctcacggctgccgggggtgggcacttgctgtccgccggagcagccggtggccgtcaggagggaacgggcggtgcccccggcggcggaatcggcgatgacttgcacacgttcaaggaggccttggttttgcggccacgtggcccggaactattggcatttgtcgccaacgaaatcgcgcgacattgcaagcgtcccgggagtcccattgacgacaaaatggacatttgccactacagtagtaaacgccagcgcttcatgtaa

SEQ ID NO: 9648 - protein, 269 aa, DROSOPHILA
MQQQPESGGEESWLEEQCHREIHGQHDEYEREFVRQRDNNLGTVWGAFQDSATAVAQLYRERSSNTFSSDTGALWLPFQTAAGTVTTLYKESCDGLKRTSDAAIQCGYQRRTRELADWARSKKRRMIRREDLLAYLAGKPLPPCNSNPHANRRSPKPEHHHQSGSGGSGLGFHGSGLGLTGGPLTAAGGGHLLSAGAAGGRQEGTGGAPGGGIGDDLHTFKEALVLRPRGPELLAFVANEIARHCKRPGSPIDDKMDICHYSSKRQRFM

SEQ ID NO: 9649 - DNA, 3997 bp, DROSOPHILA
gacaatactcgggtagagaagacgctggagttgcgaaaccatgccgatttgatgctaaccgccattcgcgaaaccaaaatcaatgaggaagtgcagcgcttcaaggctcgcatcgatatcaaggatcgcgatcatgtgttcgtcctggatggcgggattatgctgctgatgcgacacctagtgtgcaacaattttgtgggcaacttcgagtactacacaatgaatttgtatggccgggtccttcgctgcaatctggttgtttccaaggagcgcaaggaggtgcgaattttctatcgcacatacaagaatgtcgtgcacatcttcacccagcaatgtttcaacgatgagctccaggatgtggccgagaccttcatgactcctgagggccggattgttctgcattattggcgtggctataactaccttttgcatgccgcctgcatgccaccgaagagaaaggaacctatcctacccaaattggaactaatgtggcgccaaaacgaacagctttctcgcaagttccgggagctcaaagccctcaattacgagaacgccaccagctatctgagcagcaattcacagctggccgattttatgcaggattatgtgctcaatctgttgcggtacaagcccagcaatgtcctagagttctccattatgtttttccagaatatgtcaaagggatagcttaattcttaattaggtaatgagtgttttcaaaatttcaagtgatctttggccagataatcctataaatacattcgggatgggcctatttagtatatagtttattttagtttgcattagagtgttaattgaattgaataaaataaaaacaatgtactgaaaatttaaatggcacgccattaatttttcgaaaattcaatatagtaaccgttgccaataagctgaactcaacaatcaggcaccccagcaacccatttctttgtttgcgcccttcaaacaatcgtccaaaattttcaattttagtctgtgcccaacaccaaacgaaagtcattcgtatactttacaatccacgtgatattttgatattttcacaagttagtcgtaagttgagcaataatgaattgtttggagaagaaatcgccggaggcaaatccagagtgtaagggcaggacgattgagttaaatccgggatctgcttgcccggctccgctaatctgtcccctgccgacggaaccaccctcccaccgactgaaaaagccaccgcagcccgccctggtagccttgacacctcatcccgatgaggccgcccaacagcacctggtccaaaatattatgggttctgcccaagagcatcagaagctacaggcggatctccaagcgggagttgaccaacagcagatgcaattggccgatatgcgagctgaacagtacaagcaatcgaacaagccactcagaatggaggaagtgcagtttgcggtgagatgagttaattgatactttttcgtatatatggtaaacttttatgttaattacatacgtttacattatttgctttctttctgcacagcgttccatggaccccgaagcagatgacttgcggaatccaccgtgctacttgccccaacagggcgatgagttgcctcacaaggaccagctgatgcccatgggtccgattggtccatgggcatcgggcaaggtggattggagccccatggccggcataacgggaacgagacccgttgtggaccgctactcgatcacccggtacagcccaaatgaatggcggaccaggaaccacgagactgtacaggtcgtcaacgcaagcttgggcagggcggataagtaagaataaagaatatcaggaactccagttactgaaccgctaaactctgaaatccaatccacagaaaccgcttcagttcgaccaccgaattcctaaggctctccgccctggtggacaagtcgcaaaaggaaaccaccgacaaacttaggatccgttcgcagttgattggcaaatggaagaatactttggagaacgccattaaggcgatggccgatgagatatccactatggaagtggagcgtattaagctgcggaaatccatggtggttttgggcgtaccggaatccatagccaaggagtgcattgagaagagggccacacgaccagataccgagttggttcgcgaccaggtggaagaggagctggtcaacgagttggcccttatagctgaaatccgaaggttattgatgaaaacactggatgacttcaattcgcagcaggttgagaatcgaacggctaggcagcgactcgaatacgattggagtgacaagaaggagtcctacgagattgatacaataaataccggtttaaataactgctctaggacgatcatgttccgaccgggagcagttcgccagccaccggaacaagcttctgaaaagtactgggaacacttcagcatggagaccctggacgagtgcgaaaagtgtcgcctcaagtcggtggccctgcgaaacactttgaactcgacactaatgaacgcggccagagatattcgcacacaggccgatgtcgttgaaaaggctctgacctccaggatcaactgcacccaagaggcggtgcaacggttcgagaatgatctcaagaatatcctgcagggcacggccgatgtggagaaccgtattgagcagatgaaacgtcgcattaactccttcgattcatccatgaaggttgcccaaacgcgaatggacaaccgcagctatcgtccaaatgtggagaactgccgcgatttggcccagcaggagcttatcgatggggtgcacaccatccaaagtagtgtatcagcccttcttcatgaactagaggaggcggagcgggtcaagacggatctggtcaattcacgtgctcgtctcgagcgagagattatgctgaagaggcgcagtctcttcatcgatcgggagcgttgcatgctcatgcgatcttattatccttcggctaataccctgagtggtgctgccacctcttagagggggttgaccacattttatgttgtctaaattttctgagtgtaaacacacaatttgcaaagagatctaaattacccagtgctcctttaaaggggaaagcttttacgattattcacattcaaaatttgcaagtgaataaatttttgaataaatgaaaagctgttcagtatacgtaaaattatttatatagatggttatagttgaattggcccataatcagttttaaatattgactgctatggctaatttaacagaaatgtgcgatttattagaataacgataagcaaaccttaacgataattttctttttaaaagccttatttttattgtttattactgttgctaatgtaatgggatccccttaggtatttaaggctttacaagcaagaccacttaagcatctaattgcctgattttggtattagccttaagttctttttaataaatgcaataaaatgccattagagggcaatcagacacgtttggaaaaccatataactgaaagaaatatgttgccaacttcccggccccctacacacacatgcacatccaaccgaacacactcactcacacacgtgttggcccaagtacttaccgaaacacgttcaacagctagaacaacacgtactcaatttagagatacacgaacgggatggaaaagggggcgtggcagcggactgatattgatacggaggtgcttgaacattcgttaatgtttgccttccttggagcggcaaatatagggacagtttggccaaataccctcgctcgaggtgttcggaaacaattttgcagggaagccaataaattacgaagcaaacagagaacggcgtgctggaatttccaattgaaaatggaaaacgttttggctcattcaggatagtttctctattccaaatttggttgccataattgtcttatatttccaagggtcacagcgatactattcttttaaatgcacatgaataaaatagatacccagaatgcgacgcgtctcctg

SEQ ID NO: 9650 - DNA, 1841 bp, DROSOPHILA
acaccaaacgaaagtcattcgtatactttacaatccacgtgatattttgatattttcacaagttagtcgtaagttgagcaataatgaattgtttggagaagaaatcgccggaggcaaatccagagtgtaagggcaggacgattgagttaaatccgggatctgcttgcccggctccgctaatctgtcccctgccgacggaaccaccctcccaccgactgaaaaagccaccgcagcccgccctggtagccttgacacctcatcccgatgaggccgcccaacagcacctggtccaaaatattatgggttctgcccaagagcatcagaagctacaggcggatctccaagcgggagttgaccaacagcagatgcaattggccgatatgcgagctgaacagtacaagcaatcgaacaagccactcagaatggaggaagtgcagtttgcgcgttccatggaccccgaagcagatgacttgcggaatccaccgtgctacttgccccaacagggcgatgagttgcctcacaaggaccagctgatgcccatgggtccgattggtccatgggcatcgggcaaggtggattggagccccatggccggcataacgggaacgagacccgttgtggaccgctactcgatcacccggtacagcccaaatgaatggcggaccaggaaccacgagactgtacaggtcgtcaacgcaagcttgggcagggcggataaaaaccgcttcagttcgaccaccgaattcctaaggctctccgccctggtggacaagtcgcaaaaggaaaccaccgacaaacttaggatccgttcgcagttgattggcaaatggaagaatactttggagaacgccattaaggcgatggccgatgagatatccactatggaagtggagcgtattaagctgcggaaatccatggtggttttgggcgtaccggaatccatagccaaggagtgcattgagaagagggccacacgaccagataccgagttggttcgcgaccaggtggaagaggagctggtcaacgagttggcccttatagctgaaatccgaaggttattgatgaaaacactggatgacttcaattcgcagcaggttgagaatcgaacggctaggcagcgactcgaatacgattggagtgacaagaaggagtcctacgagattgatacaataaataccggtttaaataactgctctaggacgatcatgttccgaccgggagcagttcgccagccaccggaacaagcttctgaaaagtactgggaacacttcagcatggagaccctggacgagtgcgaaaagtgtcgcctcaagtcggtggccctgcgaaacactttgaactcgacactaatgaacgcggccagagatattcgcacacaggccgatgtcgttgaaaaggctctgacctccaggatcaactgcacccaagaggcggtgcaacggttcgagaatgatctcaagaatatcctgcagggcacggccgatgtggagaaccgtattgagcagatgaaacgtcgcattaactccttcgattcatccatgaaggttgcccaaacgcgaatggacaaccgcagctatcgtccaaatgtggagaactgccgcgatttggcccagcaggagcttatcgatggggtgcacaccatccaaagtagtgtatcagcccttcttcatgaactagaggaggcggagcgggtcaagacggatctggtcaattcacgtgctcgtctcgagcgagagattatgctgaagaggcgcagtctcttcatcgatcgggagcgttgcatgctcatgcgatcttattatccttcggctaataccctgagtggtgctgccacctcttag

SEQ ID NO: 9651 - protein, 585 aa, DROSOPHILA
MNCLEKKSPEANPECKGRTIELNPGSACPAPLICPLPTEPPSHRLKKPPQPALVALTPHPDEAAQQHLVQNIMGSAQEHQKLQADLQAGVDQQQMQLADMRAEQYKQSNKPLRMEEVQFARSMDPEADDLRNPPCYLPQQGDELPHKDQLMPMGPIGPWASGKVDWSPMAGITGTRPVVDRYSITRYSPNEWRTRNHETVQVVNASLGRADKNRFSSTTEFLRLSALVDKSQKETTDKLRIRSQLIGKWKNTLENAIKAMADEISTMEVERIKLRKSMVVLGVPESIAKECIEKRATRPDTELVRDQVEEELVNELALIAEIRRLLMKTLDDFNSQQVENRTARQRLEYDWSDKKESYEIDTINTGLNNCSRTIMFRPGAVRQPPEQASEKYWEHFSMETLDECEKCRLKSVALRNTLNSTLMNAARDIRTQADVVEKALTSRINCTQEAVQRFENDLKNILQGTADVENRIEQMKRRINSFDSSMKVAQTRMDNRSYRPNVENCRDLAQQELIDGVHTIQSSVSALLHELEEAERVKTDLVNSRARLEREIMLKRRSLFIDRERCMLMRSYYPSANTLSGAATS

SEQ ID NO: 9652 - DNA, 8934 bp, DROSOPHILA
gcaggagtaggaaaaggaggagtacgagtgggagcaggacgagccagccacctgcatgggcaaacgtgtccgaaattttgtcatattttttggttaatttcaaaaatgcaaatcatcgatgtcctggccgacatcggagcacgtcctgtcgccttttttgacaaatttgccagcactgctcgtgcggcaatgtgctcgttacaaactttctgtggtgtagaatatcatggatccggtgggctttgcactttgccatcctgcaaaacccgtgccagccgatgtcgatcgttatgttttccatggacatggaggaggccgctcatttgtttgcagcttattcgcatagttgatgttggtttgctgcatggttcagagggccatggcttcactgggccatgttatgcaaagttagcatttccatttcctgcctttgtttgcgcatcccttggttagtttaggccacagttgtccttcctacgcaactaaaaatttgattatttttactaactaattaggactgtgcgggctaagcagtttatttacctttcattaaagttctgagtgccttttgtgttgtattgattaagatgctgcttctttaaacaagatagttacatatttaaactatctttttttatttcatatacaatgattttgttagtttttgagtacttaagattattagggtttcctcaagctgctcttagttacattttcatagtttttaaattgttaaaaagttgattggttcttgaaacctcacattggaaaacaatttcgatgaccaatcgcgttcgattgtctttaaccatcgtctttaaccatctgacattaagagtctgaagcttttgaaaaaagctcggaccggtttctctccaaactgcgcatgcgcagccatctaactgcagttccaatggagcagagcgaaagcagacaaggtgatggagacttctgggcgttaaaactcattgcccgagcgatccgatcgcacagttgagagcgagacgtagacgcgtgcgcacgtacgagtttggtgagttccgatttctgcgagtgtagtacgatgaatggtgaatcaagtgaatgtggaatgcggaatgctgctcttgaatgccgtttaatgtgccgccggaaagcatatcaatttaaaatatttaaataataatctatctgttcgtgcaggtttatgtcggctaacgaaatggcgcttgtgaaaatctgcatatttgctttggctttggccgtgggtaagtgtggaaaaagctcttaattgcatttgccaattaatgatacgtcaataccatggcgtgcaaaatgtccctgtgcaaactctatttgaataatgtgccgtgactttaatgctcttctgctttcggcgaaaacaatcgcctctaattgttggccgcacccaaacaaacgggaacaaacccacaggccaacctaactacaaacaacgcaacaaacaaacgaacgaacaaataaacgaaccaaccaggataatagcgacaaacaaccatatgcaaatgcagaatgcacagtgctgcagcaactaagctgaaaaatattgttgttaacattattggcgcccatgtttatgcatatctgcagtgtttgcaatcctggccctcttttcatcatgtcaactgttgtccgatgattcgatggcatagaacacgtgtaaatgccacatgtagcatatatggcatatagcacttgctgttgttgttgctgccaatttgcatgacttttgtttttcggttttcataccctcatacgctactcattgagtaaaaagggtataccagattcgatgctctcgggaaatataaaagttatgttaagttatacagaatacagtggagacttacgggagcgattatgttactaccgctaggtggagctcgtgtgagctcgaacgctaggtatctgatagtcgagatactcacctatagcgttctctcgtgattggatcggaattacagctgcaaacccattggcattccaattgcaattggaaattcggcaatttaatttgctggcaaattttctgctcatttattgtgtgaaagctcattaaaaatttgtttgtctccaatgtgcgggggcattaaaaatgcacattgttaactcgccggcataaaaacatacatattaaacaaattgataggcgagcaactgttgcactcggggggcgtaagctgaatttggtaattatattaaaatgtctatggcaaaaatatggcaacagctcataattaaatgtattgcaattcggtgccgccggggttgaaagcaaattaaattgccagttaattgaggaaaaactcaccgcgttgagacaaaggaaaagttttaatttgatggtaaacatgtttgtacgaaaagtttataatgtgtgtgtttgcctatcgagacgaacacctttttaccccctattttataaaaatctcttacatctaatttaacaaaccggtcggttctattgtcaatctcgcatcagttcagtgaatgacatgaaaaagtgcttacaatctgtttatttttaatctatttaatgttcattgaacctaacacgctgcctgcacgcacttttccaagatgacagccacgacacccacgacgtgtgtgactggaatcgaaaatccaaagattcaaagctcccaaaaaaaaaccgtattgtagccacgactcactcctccgtctgctttgcaatcggcagtcaattaatctagtctaaccggactgggaatcgagtcaaacggtccaggaccgggttgaaccgggtctgttgacaacggttgactccaactccaattccaacaccaattccaattccaattcctactgcgactgcaaactccatggcaaacttgttgacagactgtcagagcgacgcgacggcccccaaccaagtcgaccaagttgacgagtcgaaaaaagccaggcccaaaccgcataggccacgcttcgcttgactcgttcgccgggctgcgaaataaaaaaaaaaaaaacggagggtcataaaaatgaaaggaaaatacctattcaggagcaggtcgtaagggaaatgcccttgggggaaaagccatttcaggcaattattaaagaatggctgggaaaaagtgaatatttgaaaggataaatattattcattgtttcatatcgaacaaatattgtggcacattttattcgaaactaaatttagtctgctttgctttgctatttaaaggctgcaagtggtccatagtttaaatttaagccattgaatagtttgaatgttcatttagttgaaatttaacgcaactaaccgaatcagctaacaataatgtctgttaaaatctacaattatttaattaattaggacttcgattttcatttaaagtgctaaaattaagccgaatagccagctcgaaaaaaaagttttacaataatgcaattatgcatttggtttggtttaactttagtcggtgaaaaaacgatgctttcaatttgatagctctcgaataggtgtgaatttataaaattaaaaatcaattaataatattagaggcatgttcatacagttgtttatgcaatttctttgttttgagagtgtctttcattgaactcctcctgcgcaagagtatttgccaactgaactatgaagctttcgtgactttttcttttccagcttcttgtttgggttgggtatatatattttcttttttttggtttttcaccagatcccggttcgtgtacgaaacatgtttcaatgacaagcgacagctgcaacacccaacacttgcagcagcagcagcagcagcaacttggtgttgttggcttaaatgttggccgacacttcacgcactaattgctgtgtggaattgtttctttattaacgtttaatcgaatgtcagccgagcgacgtcagcatcagcaacttgctggcggcattgttgatgttcactgcggctgccaaacgaaaattgaaatcgtcttttcttgtttctcttgtatcgcttggctttttacgtatctacatatataaagtatatatatgtatatatatattttttttgcaattttgctcggtctgattgaagtggtttaccttgaggagagctccaccatgttaactggatgcatttgctgcatgtcgcatatcttgaaaaatttcttgcaacttgcaggaaatgctaattgatactgagttttcaaggctgtgctttggcatcagctgctcggcggcttagatcagctgtttgtggatccaaaaccgggctttgtaatacccgagagactttcacttttaaggtcgctccaatccagtggcctgtgtcgcaatcgcaaagcgacaactcatatacatatcggttgctatttgttgagttgccgcaaacgggttttcacgcaaacatagtggaaacgttgggcaaaaaacaaaaggcaaaaacgtgcaagatacacttggaaaaaaaatgctgagaagttattacaatcactttagagtaggtaaattgcaggaaccatggatcagtggtttgggaatttctaatcctaatctaatcttacaatatcctagtcatgaaatcaaaatatatcttgagtttcaaaagtttaccgccattacattgcttaatatgcgaaagcaatctaaaaatcaattactctttctaaaacaatcaacagagtagcattgtcaaaagcttcaactagattagatcctgcaaataaattcacaagcttagcaaagtgtttgcacttgtgacaaatgaacatgagaaatgttgttaaaattcacactcgattaggcgcattttgtttaatagattagcttagcattttattgccgaatggtataagaataattgtgcgaaactgtggggctttgctgcaatttaataacgaaactatcgaattaaatgtagaaaaaggttaaacacagtttaaagtttgatttatatttaagttgataacagcaatgtgtgctatttcataaactggccattgcagagagtttccatcagcaaagtagattaaaactgcaagcaaggacattttgtgtgtgtgtgtgttatttatgtatggactgagttaacatgtgtatatctcaactatcttctggtctgcaggtctgaccgcaaccaaggcgcaggagtcgagaggcggtttccgtggcagtaacagccagtttcgcgtgggtcctggccatccgccctcgcagcgccacctgccgccccgaaaccgtgatcccgtccaggaggcatcggtggtgccaaagagcaaacagacggcggcggagaaggagtacgagcccaccgaggagtgcccggagcccaatggcttctatccggacagcaagcagtgcgacaagtactacgcctgcctgtaagtgaccaaaaggagtagacacacccggccacggggcgtatgagtaatggccgttgcttaatgccacattgaccacatttgcagggatggtgtgcccacggagcgactgtgcgccgatggcatggtcttcaatgactactcacccatcgaggagaagtgcgatctgccctacaacattgactgcatgaagcggagcaagctacgtgagtataagtccttaatttgcaagaaccgctttacgtatgcaccgcacaaatcccaagaccccacctatatatatatatatagtatacatatatatgctcctccatcttctgggccaagaatcgggcaataaacgcgcttcgtgctcgcacttatttgctcgttacttcttggctgcgctttttgttaacttatttattatgcaaacggcatgcgcagcggttaacccaaattgttgtcgtcaataggtctttggtcttggcggtgctttgttttcatttttcgcctcctgagtagactcagttttattcgtgattttattatttccccaacgccagagtcgcgccaccaaaaaattttaagcccaatgccatggcaattggcttcccgcggttttaaacttgccacgaatttggtctgccacgtgtgtgtgtgtgggagtagagcatccttcaaacttctcgacaaaggacttttattaaagttctcacgttgagagtttcttgcactagcgctagttcaagtggatttaagaaaatttcttattcacttaaaaagtcgcacacattttgtgtgaccatttttaatatgaaatattgctgcacgttttagtttttaaataaattatttgccacccatcaaggcaattagtacacattgtgcaggcccattagcaatttcaattacctttgtctcctgttgacatacatacatacatacatataacgttgccatggcatatatgcatatagttcgcaaagcatacagcacctgaataaatgtgtgtctagtacattgtgctggcgcagtaatgtatttacggatgtgcaaaaagggttttacgagcatacagatagatagataccttttgcgagggaaactcaaggatgcacagagggaatattccatttgtaatttccctattgttcaatcgcagaaacacctcagccatcgcttcactgtccccggaagaatggatactttggccacgagaagccaggcatctgcgataagttctacttttgcgtggatggtcagttcaatatgattacctgcccggctggactggtcttcaatcccaagacgggcatatgtggctggcctgaccaagtgggcgtcactggctgcaagtcggaggatgtcttcgactttgagtgccccaaggtgaacgagagcatcgcagtgacacatccccgctacgccgatcccaacgattgccagttcttctacgtctgcgtcaacggagatctgcccaggcgaaacggatgcaaactgggccaggtcttcgacgaggagaaggagacctgcgactgggcacgcaaggtgccagattggtaagctatagttatccctaatataaagtactattgggaattttattcttggattctaataactacatcccatttcagtgccgactggtacaaggatcgtctgaccgacaaggagctggatgagctggagaacccgaagcccaagaccacgaccaccaagaggccgccacgtgtccgcggtcagtcgaggcgcaagccccagccgaagcgagtggaaccggagcaggttaaggaggaggaggaggaggaggaggagtaggcctgatccccccgactgtgttagtcttaagtgaaccccccgctgattgtcgccattaaaaagcgtgcagaaggtgtacctaaccattgatcggttttgctcaaactggatggtgacatgggccaacccatctgtatcacttgatactgatgggcaatccgcggatgccaggggaattagctccatcctcgtagctccgttctcgattcccaaagccccggcgaatgtaatatgcatgggaatttgtgtgaggagcagttgatgtggtgccaaaacgacaggattttatgcgcatccagtgtgcacaatccgtgcactctgcgatgtcctcatgccctgtcccctcgtcctgttactcgtccccgccctcgtcctcgtcgtcaccgtgacatgacgaaatcaatgcagctgcctgcccaactctttgcgagagttttacccattgcctgcagcgcataaattcaatttgccgatgagcgtgcacaaaagtatgcaacaaaatggcaacaactcgatacagaacacactcacactcacacacacgggggaacaaggatattgtgtgtgtttgtggggggaaaggatgatagagcgagggactcggaggatggggcaacatgtgtatgacgtttggcagacaagaagcattcgataaaacgcattgaaattgcattgtggaaattgtgagcagttgaatggtgagatttacagtggccattgccaatggagggaatgaaaacttctggggtggagaaaaaaaaaaaaaacccagcaagtggttggggaaaatgccgttgagggcatcaattcttattgtttaagcactgacgtaaaatctgagcaaacgatgacatttctacttggcattgctcgaacgtttgcttaaatttatttattcattcgaattggggtagttataaatggattttctattcaacttggtaaaagaacaatgaaatgatgacgtgtctggttggctgatatccatggaatagaggttaattgaccaactctagacgagcaggaatatgatttgcccacattttttggtatatttaagtggtgattacttgaaattcatatgaatattcagagcaaaacaaaatattttaaatacacattttatttacagaataagtcatgacaaaatcacaacaaacctttgaaaatgttagttatcttaaagaagaataagctttatacttgctattaagggttagtcttttaattcctagtaatttagcaatatgtgggttaaaataccttcgattcaatctctttgggaacttagatagctatggaccagctattttggtgttaattagccacagctacgggtcatctaccctggacttatggcggctggcaaaggacatggggacaatcgcctgtcgagcagctgcctctaattaatcaacaaacacatgcacgcgcgcacaaggaccaaggtacacacacacacacacacacttgtaaagcaactcggaggagaagcgccttctactgccctgctgtcaataatttggcacgtcctgtgaccccgggcgccacctgctcgtccttgtccttgtgccatccatcgtgtcaactcgacaatgaaccgcagccagaacccaccctcaacccatctacatgccattcccttgctatccattctcacctttccggttcagaggaggtccatctaaaaagcatttcgtcgaactcagcgcctacttaatcaagtgtaacatggacatgtcctggctcacctgccttttgacatat

SEQ ID NO: 9653 - DNA, 1181 bp, DROSOPHILA
cgagacgtagacgcgtgcgcacgtacgagtttggtttatgtcggctaacgaaatggcgcttgtgaaaatctgcatatttgctttggctttggccgtgggtctgaccgcaaccaaggcgcaggagtcgagaggcggtttccgtggcagtaacagccagtttcgcgtgggtcctggccatccgccctcgcagcgccacctgccgccccgaaaccgtgatcccgtccaggaggcatcggtggtgccaaagagcaaacagacggcggcggagaaggagtacgagcccaccgaggagtgcccggagcccaatggcttctatccggacagcaagcagtgcgacaagtactacgcctgcctggatggtgtgcccacggagcgactgtgcgccgatggcatggtcttcaatgactactcacccatcgaggagaagtgcgatctgccctacaacattgactgcatgaagcggagcaagctacaaacacctcagccatcgcttcactgtccccggaagaatggatactttggccacgagaagccaggcatctgcgataagttctacttttgcgtggatggtcagttcaatatgattacctgcccggctggactggtcttcaatcccaagacgggcatatgtggctggcctgaccaagtgggcgtcactggctgcaagtcggaggatgtcttcgactttgagtgccccaaggtgaacgagagcatcgcagtgacacatccccgctacgccgatcccaacgattgccagttcttctacgtctgcgtcaacggagatctgcccaggcgaaacggatgcaaactgggccaggtcttcgacgaggagaaggagacctgcgactgggcacgcaaggtgccagattgtgccgactggtacaaggatcgtctgaccgacaaggagctggatgagctggagaacccgaagcccaagaccacgaccaccaagaggccgccacgtgtccgcggtcagtcgaggcgcaagccccagccgaagcgagtggaaccggagcaggttaaggaggaggaggaggaggaggaggagtaggcctgatccccccgactgtgttagtcttaagtgaaccccccgctgattgtcgccattaaaaagcgtgcagaaggtgtacctaaccattgatcggttttgctcaaactggatggtgaaaaaaaaaaaaaaa

SEQ ID NO: 9654 - protein, 337 aa, DROSOPHILA
MSANEMALVKICIFALALAVGLTATKAQESRGGFRGSNSQFRVGPGHPPSQRHLPPRNRDPVQEASVVPKSKQTAAEKEYEPTEECPEPNGFYPDSKQCDKYYACLDGVPTERLCADGMVFNDYSPIEEKCDLPYNIDCMKRSKLQTPQPSLHCPRKNGYFGHEKPGICDKFYFCVDGQFNMITCPAGLVFNPKTGICGWPDQVGVTGCKSEDVFDFECPKVNESIAVTHPRYADPNDCQFFYVCVNGDLPRRNGCKLGQVFDEEKETCDWARKVPDCADWYKDRLTDKELDELENPKPKTTTTKRPPRVRGQSRRKPQPKRVEPEQVKEEEEEEEE

SEQ ID NO: 9655 - DNA, 3986 bp, DROSOPHILA
agagaaataggatgagcagggagcgcagttgccagggcccaaagttccccatgatgtgtgtgatgacatcgtcatcgttgtcatctgctagattatttgctttcgggtgtggagtttgaggagatacctcgttggccttcggatcggtgcaggtgaagctatgcgccatgtggcccaagtccaaaggagcaggtgagtttcggcgtatattgggcatccagcctcgataaagattatccttcttcattcttagttagctgccaaatttagttaccacgtcttgggagtgccgaccctccagcatgactgcgacttcgcttagcacctcacctgggcaggtaaactcgagggctccggtttgcggtgcctgcctacgacgtcgtcgctaatcaaatcattccaaataagcggagcaacgttcctaaccgattgtgcaaacattttggccgacaagttgcgatctattttcgcggcgatcttacggatttatgggaggatctagccggggaatccgatcgcggtggcgggcaattgacatgattgaagctaatgaattggacaggtaaacaacatcggaattcgaactgattggaaagcttcgcagctgtggatacatttaatttaatggtatcgccatattttatataatagatataatacttatctactccggagttttcaagttcatggcttttgaattattgaaaatggcctagaactcttagccaatggtatggactcccacttcatgacttcttcaatgatcattaacgaaggtctagtgttgtccacatccccatcgaaatatgatgtaatatgtttgtgctcaaatgttacgtctgagttgctattttcgttggccaattgcatgttccacttgcattttcacgaaaaacttgtttcgggaggaccaaggcatttcttttgccaagccagttaggcgttgaaagtgagtagctcaccggatcagtagctatcgtggcttcaaagtggccacaccatggacaacgccgaagtgagtactgtggagcaccagacggatatttaccaagatgctgtggtcttcataacgggtaatacagacgcgatctccaaaagagactgttcaaagatggttaactttaataggagcaactggctttgtgggcaagtcgctgctggagaagctgctctggagttttccgcagatcaagcggatctacatgctcatccgacctaagggcggagtcacagtagaggaacgatttcgcggattccttcagaatcccattttcgaacgcataaaatcggagcatccaacgcagctgaagaaaatctttcacttctctggcaacattgaggacgacaacttaggtatggcttttcagagaaactttaaatgaaaactcatgacttcaccagacttttccaccaacaggtttaaatgagtccgacagatcggtgttgtgtgccgaggtcaacattattttccacagtgcagcaacagtgagtccgagggggattccccaagatttttcacactgattgtttgattcatcaaattccaggtacgattcaatgagtgtctaaaagtgtcggctcgcgtaaattcacaggccacctacaatcttctagagctctgcaggcagatgccttatctaagggtaaggagctccagtccgtagagtttatctttactgctaagtaatgggtaaaatctctagagttttctgtacgtctcgacggcctactgcaatccgggtcgcaagtatgttgatgagcaagtgtaccccaccatgccgccggtagattggcgacagtttctttctgccacccagaaaatacccgacgactatctgaatcgcctggccgattatataaagggtccgcatgtcaacacctacaccttcaccaaatccattgccgagcagattgttaatgcatacaaggatgtgattcccatagtgatagtgaggccttcgatagtcactgctgcgtacagggagccctatcccggatggattgacaatatccaggccatcagcggtattatgatggaaattggcaagggcggcatcagcagcatcctagggaacaaggatcttatatgtgacatcatcccagtggactttgtggtcaatgccatgatcatgatggtcggcaaggcgaaattgggaaggtaagtggataataaatactccttatacttatcatgttagttctcatgctgatattccaaagcttgagcatctgtaacgccacttccggagtgaccaatcccatcacctggcagcatcttggcgagctaacaatgaagtggtctcgtatctatcccacccggcggatgattatgtttcccaacttcaagtataggtgcagtgcttttaaccacgagttggctgtatgggttcttcactttgtgcccgccttgctaatggatctgcaaaccctgctgttggcccaaaagaagcgactggtgacaccaattgccaagaaattccgacaggcttgcctagcaggtatctttatgaaacatctttagcaaatgcaatcgttcattgaactgcccacaggtagctttttttcgctgaacgagtggatcttcaagaacaagagccgtttctatttcaaggaaatgattgagaatggtacatatcccactctctactggaatctggaggagatggactatgacgagtatgtgcggcgtcacatgattgggatcaacaagtacctgcaccgcgagaagttcaccgttgactcaaacaagtttatggtgaccaggtgagtcgttcgtttattatttccgtcttagtatccagctcagaataggattgttgttcaaattttccttttatggggataaggagagtcccgttccatattgtaaagcatctttggactcaaaaaaattacattaaagtatttaatttcttacaggatttattggttctggatatttctgcatttgatgttctacatgatgcttgtctatatttcattttagtcaagtagattttgagtgtttagcgataagcaggtaaattaataatgagtgtaaaaggagttgttttaaatatttatttataatataagttccagtctcactagttctcttttatgcgcttagattttgagtataactttctttttaatggtcaaatgccatccataagagcggaatcactatttaagatcttgcccatctcattgtataaatcgttccctgactggtggcttctccgacacccgctaacacaaagtatacaccataggcagtgtataatctgttctagcgggagtcggtgaaggcacctgtcagggaaacgatttatacaatgaggtgatcaaggattgtgttctcgtaatggggtcaaagtttctcgccattggttagcaatgaacttctttggtcactcagcagcataccgccaccttaagggaatccatttcatcatatgttccgtgatgattcgaattatgtatattcttgctcattgggatgctgcaggatgccgtccattcgcctggggttgtcgatgtcttcccatagttctcattggttccaatattcctaaactaaaatttttataagctcgggatcaaaatcatcaaggaattcttacaaacttgaattactacgtcttggaaaggacctcattaattcgaagcttactcttgtaatctcgtagtccagaagatagccatcaaggaattcttacaaatgttgatccaccaaatcgaaaaggcaaaataaaatttcatccacgttttagcattgtcactgtcaatttagagatgcattgccttaaatgtcacttgccacctatcgtatagtactatttgttagttagtattccggaaaagcaaaacacggctatggaacagccgaaggatcttgacaacgaaaagaaggaaaaggagagcctagattggagggatacaatgagtcagatggaaataatgcgtctccttagtctgcaatcgaattctgagaaaaccgcgag

SEQ ID NO: 9656 - DNA, 1473 bp, DROSOPHILA
atggacaacgccgaagtgagtactgtggagcaccagacggatatttaccaagatgctgtggtcttcataacgggagcaactggctttgtgggcaagtcgctgctggagaagctgctctggagttttccgcagatcaagcggatctacatgctcatccgacctaagggcggagtcacagtagaggaacgatttcgcggattccttcagaatcccattttcgaacgcataaaatcggagcatccaacgcagctgaagaaaatctttcacttctctggcaacattgaggacgacaacttaggtttaaatgagtccgacagatcggtgttgtgtgccgaggtcaacattattttccacagtgcagcaacagtacgattcaatgagtgtctaaaagtgtcggctcgcgtaaattcacaggccacctacaatcttctagagctctgcaggcagatgccttatctaaggagttttctgtacgtctcgacggcctactgcaatccgggtcgcaagtatgttgatgagcaagtgtaccccaccatgccgccggtagattggcgacagtttctttctgccacccagaaaatacccgacgactatctgaatcgcctggccgattatataaagggtccgcatgtcaacacctacaccttcaccaaatccattgccgagcagattgttaatgcatacaaggatgtgattcccatagtgatagtgaggccttcgatagtcactgctgcgtacagggagccctatcccggatggattgacaatatccaggccatcagcggtattatgatggaaattggcaagggcggcatcagcagcatcctagggaacaaggatcttatatgtgacatcatcccagtggactttgtggtcaatgccatgatcatgatggtcggcaaggcgaaattgggaagcttgagcatctgtaacgccacttccggagtgaccaatcccatcacctggcagcatcttggcgagctaacaatgaagtggtctcgtatctatcccacccggcggatgattatgtttcccaacttcaagtataggtgcagtgcttttaaccacgagttggctgtatgggttcttcactttgtgcccgccttgctaatggatctgcaaaccctgctgttggcccaaaagaagcgactggtgacaccaattgccaagaaattccgacaggcttgcctagcaggtagctttttttcgctgaacgagtggatcttcaagaacaagagccgtttctatttcaaggaaatgattgagaatggtacatatcccactctctactggaatctggaggagatggactatgacgagtatgtgcggcgtcacatgattgggatcaacaagtacctgcaccgcgagaagttcaccgttgactcaaacaagtttatggtgaccaggatttattggttctggatatttctgcatttgatgttctacatgatgcttgtctatatttcattttag

SEQ ID NO: 9657 - protein, 490 aa, DROSOPHILA
MDNAEVSTVEHQTDIYQDAVVFITGATGFVGKSLLEKLLWSFPQIKRIYMLIRPKGGVTVEERFRGFLQNPIFERIKSEHPTQLKKIFHFSGNIEDDNLGLNESDRSVLCAEVNIIFHSAATVRFNECLKVSARVNSQATYNLLELCRQMPYLRSFLYVSTAYCNPGRKYVDEQVYPTMPPVDWRQFLSATQKIPDDYLNRLADYIKGPHVNTYTFTKSIAEQIVNAYKDVIPIVIVRPSIVTAAYREPYPGWIDNIQAISGIMMEIGKGGISSILGNKDLICDIIPVDFVVNAMIMMVGKAKLGSLSICNATSGVTNPITWQHLGELTMKWSRIYPTRRMIMFPNFKYRCSAFNHELAVWVLHFVPALLMDLQTLLLAQKKRLVTPIAKKFRQACLAGSFFSLNEWIFKNKSRFYFKEMIENGTYPTLYWNLEEMDYDEYVRRHMIGINKYLHREKFTVDSNKFMVTRIYWFWIFLHLMFYMMLVYISF

SEQ ID NO: 9658 - DNA, 4424 bp, DROSOPHILA
aaagttcattcacttctttcgctccggccagttgggtcacatgaatctggacgaacccagtggtttcagatagctatacatatgtatgaattaaacttaggggcttagattaaagactgaacagtcgattctgctcgcgtccttattgattttccgccatgggcacatcgatggcaatgtcgccaacgccgggcacgggaatcgagtacgaaacactagccaaatcgtcggtatcattggctagatccatgggtgcatggtgctgcggcgcctggtccacctgtggcgcgattccaccaagatgtccagccaactcagcggactgatccacctccggcggcacttcgacgggcgcactgctaatgtgcggataactggtgcgcgaggccgccaaacgcagctcctccggcacgcccttcattcgcatcgcaatgtgacgggagtaaggtgccatcttctggaaatagtcaatcagcatttgcggatccttctccacgatctgtgccgatggcaccaagtcgaactcgtcgcagaactgccagcgcaccagatacttgatgtcgcccgtcacatccgttgcgcccacgatctcggccagctccaagccgcgctcgtagccgcgcagcttctggatctcttcgcacttgggtttcttctcgccgcgcttcttggacttggcgcgcgactcctcgaatttctggatgagattcgggcaatcgcagttctcctcgggctcccaggtgttgtccgccgacgtgtagccacgccacttgatgtagtactcaaccttgccttcgctggtaatgcgcttgtccatgatgcgctccaccacgaagttgggctcgtttttaaccattttttattgtgtttttacaagattgtttacaatatttaaaatcggcttggtttttttcactagtgccagtgtgaccgtttgctgacttcaacaacagttacaatagcaacatacttctgacagcatagaaaacggtcacactcgcacgcgcttgcaattcgaattcaggtgaaattttaaagctcaggtgcaatggaatccgaatcctcgcaggatgattggtccgcattcgatccaatgtccagggaatactatgaccaagtgggcaaccgttacactaacgagtctggccagaaactaatcatggaagccccgctgccgccaaaggacgaaaaggagcaacgtgccaccaggcaggcgaagtatccatacttggtggttccaaaaagcagtccctatgtgaccgaaaagatgctaatcaacttcttcggtcgggcgctcatcaaggagatggagttccgccgcttgtcacgcgtatactttgtctactttgaaaatatcgcgtgagtttcttcaagcactttcgcaggtcattcaatatttcgagcgtataatcctttttccagatccctggagacagcgcaacagcgggtgcagcgttacccgaacctgatcaagtgcatcactggtcgcccgcaaaaggagcgggaaatcaccagcgatccggtgacttccactgagccaatgccaacaccaggcccagcaatttcggccactgaacgtacgccagtgaatcacaacagagaggttccgatctcgaccggaggacaaaatcatccggagttcttccggccaccgctggtcaccaaagatgattacaaaagaggttcattgttggccaccaacgaccccattcaacgctatctcaatgtaaagtacgaattcgcactggagcgccatgatatctacaagcttaaggatgagaccagaatcccgcaggtcgttctgcactttcgttcgggcagaacgattcctttgttagtatagccacctggtcacgtgcccttgattagctaacgagtatagtttctgcatcactcaggtcaacggttgctgtcaccgaagaggataaaactaaaagcctgctggaagacggcgtcagcaagtgcgtggtttgtcaaaactggacagacactttctgcaagctgtgcaaaatgcccttctgcaatgcctcctgtttcgccgatgtggcagagcagcataagcaagcttgcggcaagggtgagatacttaaccttgacgaaaaggtgggccggaagtaccccaaacccggcttgccgccgtctggatctaaagtgagaattactgcattcgagcagactaacgtggtctatgtgcgctcggcggacattcagattgacatcgcctattatacagttctcacggaggtaatgatgctgggcaaagatgcctccaaactgcagagtacgccagtctgcggacaaattgtgctctacaagttcgagggacatatgtcgcgcgccatggtgctaaacgtggataatatcaaggaaatctatgtagtgttcattgatttcggaagtgttgaagtcacgcagctggaaagactgtatgaatgcagttcgtatttagctggtttgacctgctatcccgtagccgttaaattacgcggagttcccaggcgctttgtgggtcccaacataagggaagtcatgtacgaactcgaccagtccctagtttttaatatcaagtactcgtcacgtgagtacgataccagcaagggcatgcaggtcgtggtgatgaccgagatcgatattaataggagcctcaaccgccttttcaagaccatcctaactcctgttgagccgtctgtctcggacttgggatacaaagaggacgtaagccagaacttaaaaaaacatcaagtacacagttgtcatttgcatttattcggtttcagtgtcttccatacattcccttgcactgcggaaagaacataaatgtagtggtaatggacaacacattcatccagtgcggctttatctactgcacctccatagatctggcttacgaagtcaccaaaatgcagcgagacatacaggagtatggtgaaaagattgccaagtgcgcaacctacgcaccgccgtaaagttactcgccgttttcttttgtccatttaactaaagcgctctttcatttaggataaatgagctttgcatagctaagtacgaaggcaaatggcgtcgaggtctctctgtggagttagtaggagatggttatcccagcattttgttcattgactacggaaacatagtgccaacacatgtcaccgacatacgtccctatccgccgcagtttatcttccctataatgaccacacagttggatttaattggtaattaggctctccaaagataattatattatttatatgactcgattttcgtaggagtgcctgagaagcccaccgatgagcagatcaaatggctggataaaaattatcccattgggtccgttatcacctgcagcgaaatcactttcgacgaggaaacaaatagctactccactcgcattgaaaaactgcaggagttcttaagtttggactaagttctcaaaaggttgattccgcgaaatagttcagaactaattatggccaaaaaaaagcacaaatcttccaggttaactcaactgctaagcatttagttcaacaaaataattttgtttacatttatattcttgaagttaacgttttgtttgtttaagtttttactctcacttttcttgaataaaccagttgaatacaatccagactatccgatatagcagtttcctgtaaggtcacattgatttacgcaatttaagttagtaaaatgtaatacaaatctcacctcaaagaaaacacggtcaaaaggtggctcacttttggtccagtccgctagattctataggttatcaatgcaataggtgatttattaatatgataagaattcgaagtactcacattagatgcggtcggtataagctggctgcggcaattctgaagatcttctatagaatcatcacccatatgcccatagaactgcaactcctccggagaacctccggctgtgatgagagtatatattttggtatccattgctccaacggccagcagttggttggcttgctgcctggaattgtgattataaataattaggtgtttgcagcgaagagctcgaagcgccgacaagtcactggtcaaaatcaagccaatcattggttctccatcggcaagagaattaaataagttcactttttggggaccatctagctgcgcatggtccaaactataactctgacagtatcccctgaccagggtgaggcaatcctcactgtttgccaagatgcagcacttctcgcctcgctccgccactaagtgatccagcattacgtgtagaaactcgaacttggcggagtcgtaaagtcccatgcttggccaaggcggcagtatggcgtccagtacctccattatttccttaaacactggattcgtacccaaagtttttaggagcacaggatgatcacatacaatttggaagatttccttcaacgtagacgattcctgaaa

SEQ ID NO: 9659 - DNA, 2124 bp, DROSOPHILA
cacgcgcttgcaattcgaattcaggtgaaattttaaagctcaggtgcaatggaatccgaatcctcgcaggatgattggtccgcattcgatccaatgtccagggaatactatgaccaagtgggcaaccgttacactaacgagtctggccagaaactaatcatggaagccccgctgccgccaaaggacgaaaaggagcaacgtgccaccaggcaggcgaagtatccatacttggtggttccaaaaagcagtccctatgtgaccgaaaagatgctaatcaacttcttcggtcgggcgctcatcaaggagatggagttccgccgcttgtcacgcgtatactttgtctactttgaaaatatcgcatccctggagacagcgcaacagcgggtgcagcgttacccgaacctgatcaagtgcatcactggtcgcccgcaaaaggagcgggaaatcaccagcgatccggtgacttccactgagccaatgccaacaccaggcccagcaatttcggccactgaacgtacgccagtgaatcacaacagagaggttccgatctcgaccggaggacaaaatcatccggagttcttccggccaccgctggtcaccaaagatgattacaaaagaggttcattgttggccaccaacgaccccattcaacgctatctcaatgtaaagtacgaattcgcactggagcgccatgatatctacaagcttaaggatgagaccagaatcccgcaggtcgttctgcactttcgttcgggcagaacgattcctttgtcaacggttgctgtcaccgaagaggataaaactaaaagcctgctggaagacggcgtcagcaagtgcgtggtttgtcaaaactggacagacactttctgcaagctgtgcaaaatgcccttctgcaatgcctcctgtttcgccgatgtggcagagcagcataagcaagcttgcggcaagggtgagatacttaaccttgacgaaaaggtgggccggaagtaccccaaacccggcttgccgccgtctggatctaaagtgagaattactgcattcgagcagactaacgtggtctatgtgcgctcggcggacattcagattgacatcgcctattatacagttctcacggaggtaatgatgctgggcaaagatgcctccaaactgcagagtacgccagtctgcggacaaattgtgctctacaagttcgagggacatatgtcgcgcgccatggtgctaaacgtggataatatcaaggaaatctatgtagtgttcattgatttcggaagtgttgaagtcacgcagctggaaagactgtatgaatgcagttcgtatttagctggtttgacctgctatcccgtagccgttaaattacgcggagttcccaggcgctttgtgggtcccaacataagggaagtcatgtacgaactcgaccagtccctagtttttaatatcaagtactcgtcacgtgagtacgataccagcaagggcatgcaggtcgtggtgatgaccgagatcgatattaataggagcctcaaccgccttttcaagaccatcctaactcctgttgagccgtctgtctcggacttgggatacaaagaggactgtcttccatacattcccttgcactgcggaaagaacataaatgtagtggtaatggacaacacattcatccagtgcggctttatctactgcacctccatagatctggcttacgaagtcaccaaaatgcagcgagacatacaggagtatggtgaaaagattgccaagtgcgcaacctacgcaccgccgataaatgagctttgcatagctaagtacgaaggcaaatggcgtcgaggtctctctgtggagttagtaggagatggttatcccagcattttgttcattgactacggaaacatagtgccaacacatgtcaccgacatacgtccctatccgccgcagtttatcttccctataatgaccacacagttggatttaattggagtgcctgagaagcccaccgatgagcagatcaaatggctggataaaaattatcccattgggtccgttatcacctgcagcgaaatcactttcgacgaggaaacaaatagctactccactcgcattgaaaaactgcaggagttcttaagtttggactaa

SEQ ID NO: 9660 - protein, 691 aa, DROSOPHILA
MESESSQDDWSAFDPMSREYYDQVGNRYTNESGQKLIMEAPLPPKDEKEQRATRQAKYPYLVVPKSSPYVTEKMLINFFGRALIKEMEFRRLSRVYFVYFENIASLETAQQRVQRYPNLIKCITGRPQKEREITSDPVTSTEPMPTPGPAISATERTPVNHNREVPISTGGQNHPEFFRPPLVTKDDYKRGSLLATNDPIQRYLNVKYEFALERHDIYKLKDETRIPQVVLHFRSGRTIPLSTVAVTEEDKTKSLLEDGVSKCVVCQNWTDTFCKLCKMPFCNASCFADVAEQHKQACGKGEILNLDEKVGRKYPKPGLPPSGSKVRITAFEQTNVVYVRSADIQIDIAYYTVLTEVMMLGKDASKLQSTPVCGQIVLYKFEGHMSRAMVLNVDNIKEIYVVFIDFGSVEVTQLERLYECSSYLAGLTCYPVAVKLRGVPRRFVGPNIREVMYELDQSLVFNIKYSSREYDTSKGMQVVVMTEIDINRSLNRLFKTILTPVEPSVSDLGYKEDCLPYIPLHCGKNINVVVMDNTFIQCGFIYCTSIDLAYEVTKMQRDIQEYGEKIAKCATYAPPINELCIAKYEGKWRRGLSVELVGDGYPSILFIDYGNIVPTHVTDIRPYPPQFIFPIMTTQLDLIGVPEKPTDEQIKWLDKNYPIGSVITCSEITFDEETNSYSTRIEKLQEFLSLD

SEQ ID NO: 9661 - DNA, 4586 bp, DROSOPHILA
cccagtaagagccggaaaacgaaccaccatcatcagtccaaaagtccaagaccaaggtggccacacgtgcgtggaattaaaaagagattgtgtggcggctgctccgccgagttgccatcggtggcagcgtatgcttattaatgaacgtaataaagatcgagtgcggttattgtggcaagaacaacaaccaaatgcaagctatatactataagtaaagggaacagcagcgaaaaatgcgataggagcgtcactatgaagaggtcgtcgtcgtcccttccgtcatgaactatgtcatcgtgtttggttaccttactcttcttactacttcaacttcagtccccaaacaaaacgaaacgaaaatatgagaacttcttttgaataagaaataaaacagcagcaaaagaaacaagttaaatgcctgaatgtttcagattcaaaacttcaaatcgaaaattcgtaaactaatcgaacagaaaagtaatgcataacaatgataacgattaatcaagatcacagcgtgagatccgagcgtaattattgtttttttttgcctaaactaaaaatttattaattatatacataaagcaaaatatatattaatttaaataaaaccaacatgtcgaacacaatttttgtagacggcgccagtacgaacgttttttttttttgtttatcattgatgaagcgattttgtagttgattttatattctattctttcgaaaatcttcctcccgaatcgcttgggacgagggacgcgatttataatcattgaattgtggaaattatagatatatatatatatatatagaaacacacacacactaagccgatgagcaaatcgagcggacagaacgatgaacgatgattaaaataatactttaatttaagcttctaaataaaacaattaatccaataaaacgtagtgtatccatgtaatctagtggggttacttaaaaacttataaacaaaacaaaatcaagtaacaaattgaaacattttgatgtcccgcctagaaatgattttccaaccaaccatcatttccgtttatttgtcaattgtttattgttttaaatacataattgatttatcgattctatacacaatcaatgtcacattatccatcaatcatttcgctaggctcctgtagtctttgtagcctcaatcccccgctcattgaatcttccgatccgatctttgtttggttaccatcagtaggttaccaaggatgttttagatttagctatttagttttattttgaatcgtttggttggctggctctcgcatattgggatagtatttgtgtttatatttttcagcggagagaacattgacttggtggttgcggatgttgcttgttcacttgtgtgtggttttggtttttgcttaaaattgatttatctttattagtcggtaaagccgcgataacactgcatttcttcacaccatcaaaatcaaattcaaacattctacttctccttgggcacgaacacaatcttccgcgacttgagcgacgaccacttgtgccgcttaatgtaatacgagatgacggtcaggaagccaaggatgccaatcaccttgatcagcagctgcttgcgatcgtcgtgctccggctcggaagtccacttcaggaaagtggccacgtccttggccagctggctctgcgtcggcggtgtgccgtcctcgtactcgatgacctggaaaggggataatcattaaagattgcaatcgtgttctcttatatcgttttcaaatcattagtttctttctgagaaggaaaatatagaactagtatttgatcagccacccacctcgttgtacaaaacctgcgccatggaaatggcaccgcccgggaagtacgggttgaagtactgaccctcgcgcagcaccactccggcaggagcatcatggtagcccgtgagcagcgagaagatgtaatcctctccgcccttgcgggccgacacgatgtagctcagatccggaggataagcaccgttgttggcagcacgggccgcctcctcgttgggatacggcgatgggaagtagtccgacagcttgccaggacgagtgtagtagttgccggtatcatcgggaccgtccttgacctgtaacggggacattcaaatcaattaggaaacatttagatctagaaatctaaaaattcgaatacccaccgtgatctgctcggcttcagccttagcctcggcttcggtgtgggtgacaccaaccagattgcggtaggcaatgtattgcatcgagtggcaggcggagcacacctgcttgtacacctcgtagccgcgacgaacgctgaaagtaggaattgagatgatgttactaactggatagcagggtcagtgggcaaatgccatcttatatgcagatactacaaaacattctttaatatctttaattttaactaaaatccccatttaacaatccattaatcttctatgttctgctagttgctgttctgattagcttttatgagcaaagtattgttgttaatctatagttgttatcagtttttaaagattacagaagatttgccgggaaaattggctacgttttctaaattgaatatgatatttgtattggcgagtttgagataaaataaaatacttcaaacaaaatctctctaatcattaaagaactctttttgaaatttgacagcaatctaaaccaattcactagaaatgcacttagttagctccaccacagatggaaatgcccagttcccgaccactgatcagtttaaccgccgttttttggattacctctggtggtccaaagcgtcgaagaggcccttgtggttccagagttgcgcgggggagtgcacctcgccgccagatgcctgcacggactgctccagggcgtagataagggcgcccactccgccggtgattgctcccaaggcgccgatcagctgttcgtgatgcacacacacgcacatacagccgcacacagtcaccgagaagcaaacgcgttttgaggttaggtccgatcgggtattatgaaatgcgaagtgggggaatatgtgagattcctgactagctgacttaccttcttgttgccactggcccagctgccggcggaggagaggttcttcgcctgcaaaaagaacggatgtcatttagtttggatgttcggccaaggagagtaagaatttttgcacggagttacataattggattgttcggttcgtatccgagttcatttaatcccattggaattgcggataccactcactgtgccacctagagtgcaccattggtccttgtattttatgttttacggtattatttcatgtttttctccatcggacacacgactccttcaaggtgctgcggtggctgttgaaaaacttgcatccgccgttcacgatctttacctgctgcaggctgagtgctggcgcggatttcagcaatctcaagccatggaatcttcgcaatgtcgctgccatggtggccggagttttaatttctgcgtcgtctggtcgtttaaggaaactctgcgggcagccaatcgccaatcgaatcaatctttcagtaccactgccacaacgtcttcctcttcttcgctgctctctcgcggaggtggtggtgggcaactcgctcgtttgccagcgaatcggaatcggcgggggcgatattttggtatttttaaacagatattttaattttattttattattatttttttatttactgtatgatatttatttataatatgatattaatgtatgtataatttaaataatacatttaaaatatcactttttatttttttcttttttaataaatatttgttacacagtgtaccttaattgcttttagtgttttttttttctttcatgttctttattatatcttcgaatttacggttttccaacttgttgattcaaaatacttcataatctaattggaactacttgttgacattaagttggattttttgattttttagaaaccacttgatgatttcataagataagttgacagaacagctctaaaaacagctgccttagccttagccaaatttttggttgctgttatgtaatttttcatgtttcactgcgctgttatcacaaaaaaagattttaatttttattattgaattcttttcgaaatatctataaaattcttaaaagccttgaaaaaggattttcaaaaagtaaaaataagtacaattatcgcagttcacaaaataaccttcgattgcttatatcacaggtcaatattataattttatttttatttttgctaattgtttttatatatatattatttaaaaaaaaatatataaaattattttgtctcactgatgaatagatttttccgctggtctggcatccttctcgcccgtttttcgcacacttatcgataacagctgaccacccgttaatgattcgccaacaaaaaaaacctagcaacgcataaacaaatgcgagaaaaaaccccctttattgatttccactaagtgcggtcagcgcaaatagtggttaatagctttcactagacgaggaataaagccaggacgtagatcgccatgccgcaggaggaggcaaatgcgggaacaacggcccaactc

SEQ ID NO: 9662 - DNA, 1519 bp, DROSOPHILA
gagagagcagcgaagaagaggaagacgttgtggcagtggtactgaaagattgattcgattggcgattggctgcccgcagagtttccttaaacgaccagacgacgcagaaattaaaactccggccaccatggcagcgacattgcgaagattccatggcttgagattgctgaaatccgcgccagcactcagcctgcagcaggcgaagaacctctcctccgccggcagctgggccagtggcaacaagaagctgatcggcgccttgggagcaatcaccggcggagtgggcgcccttatctacgccctggagcagtccgtgcaggcatctggcggcgaggtgcactcccccgcgcaactctggaaccacaagggcctcttcgacgctttggaccaccagagcgttcgtcgcggctacgaggtgtacaagcaggtgtgctccgcctgccactcgatgcaatacattgcctaccgcaatctggttggtgtcacccacaccgaagccgaggctaaggctgaagccgagcagatcacggtcaaggacggtcccgatgataccggcaactactacactcgtcctggcaagctgtcggactacttcccatcgccgtatcccaacgaggaggcggcccgtgctgccaacaacggtgcttatcctccggatctgagctacatcgtgtcggcccgcaagggcggagaggattacatcttctcgctgctcacgggctaccatgatgctcctgccggagtggtgctgcgcgagggtcagtacttcaacccgtacttcccgggcggtgccatttccatggcgcaggttttgtacaacgaggtcatcgagtacgaggacggcacaccgccgacgcagagccagctggccaaggacgtggccactttcctgaagtggacttccgagccggagcacgacgatcgcaagcagctgctgatcaaggtgattggcatccttggcttcctgaccgtcatctcgtattacattaagcggcacaagtggtcgtcgctcaagtcgcggaagattgtgttcgtgcccaaggagaagtagaatgtttgaatttgattttgatggtgtgaagaaatgcagtgttatcgcggctttaccgactaataaagataaatcaattttaagcaaaaaccaaaaccacacacaagtgaacaagcaacatccgcaaccaccaagtcaatgttctctccgctgaaaaatataaacacaaatactatcccaatatgcgagagccagccaaccaaacgattcaaaataaaactaaatagctaaatctaaaacatccttggtaacctactgatggtaaccaaacaaagatcggatcggaagattcaatgagcgggggattgaggctacaaagactacaggagcctagcgaaatgattgatggataatgtgacattgattgtgtatagaatcgataaatcaattatgtatttaaaacaataaacaattgacaaataaacggaaatgatggttggttggaaaatcatttctaggcgggacatc

SEQ ID NO: 9663 - protein, 307 aa, DROSOPHILA
MAATLRRFHGLRLLKSAPALSLQQAKNLSSAGSWASGNKKLIGALGAITGGVGALIYALEQSVQASGGEVHSPAQLWNHKGLFDALDHQSVRRGYEVYKQVCSACHSMQYIAYRNLVGVTHTEAEAKAEAEQITVKDGPDDTGNYYTRPGKLSDYFPSPYPNEEAARAANNGAYPPDLSYIVSARKGGEDYIFSLLTGYHDAPAGVVLREGQYFNPYFPGGAISMAQVLYNEVIEYEDGTPPTQSQLAKDVATFLKWTSEPEHDDRKQLLIKVIGILGFLTVISYYIKRHKWSSLKSRKIVFVPKEK

SEQ ID NO: 9664 - DNA, 3795 bp, DROSOPHILA
cgaccacgtagcgtgcaacaacaacggggtaagtggtatatacgtatacgtacgaattcctatacggatcctcataaaataacaaatgccttatacgatccagacgtttggcctcgattgcggaagggaggccaggctaatcccgctcagcaatcagttgcaggcgttcattgtgcaccaggtaaacttctatcgcaaccaggtggcttcgggcggactctccgccttcggacccgcccgccgaatggctagtgtccgctgggatcccgagctggcacagctggctgagctggcggcaaagaggtgcagtttgtccggcgatggatgccgcaacaccaggcgattcaagcacgtgggccagctgacgggccacgtaatcttcagtgcgggaaagcacagcgacttggagctgctgcgccacaagatctcgaattggtttggccagtacatgagagccagcaaggatctgcaagccgccgatccatcaagcaacatcagcagcttccggcagttgatacaggaaagctccacccacatgggatgcggcgtgctccgccagaggagccacatgctgtggcaccagcagttcatcgtctgtaactttgcccgtaggaatatgccccgcgagcaggtctaccaggtgggcgtggctgccacaggatgcaggtcgggaaggaatcctcgctatcccaatctctgcgctctgcaggaagaatacgatgtgaacgccgtcgaccgttttcactcaaagcggccacttaggataaggttcaagtacagcgcatcccatccatcgaaagttttgggtgctgatcgtgatgtagccttccatcccaatatcaagttgggacgtctttaatatatctggagctgagtgggtactttcttaaatatatttcaaatgtaacttccactagattaaaatgctttacattttctgtttggcgattttacaagattgactacaagaacttagacggtactaggtactgggcgacacctagtggggattctcctggcgattgggctcgatggtgacgcgggcgtagggactgccggcaccgaccttgcgccgcatggtgactccccgatggggtctcagtcccatgacgatcaggtagatccccgcggcgctgagggcgatcagtgagagcaccaccaggccgtaggcccatctcggccaggtgtcgcagctgaaggcgtcgccgcgggctgaggtgaccagcatgccacggatgcgggccggcttgtagcagcgcccgttggtttggaccggcagctgcttcagccagacgagctcgcagtcacactgcagcggcagaccgttgagatccagttcggcaagctgagtaaaaatcggcgccagcgtggaattaaaggtgcgcagcatagtgccgcgaaagctcagcgaccgcagagctctttttttggtgggggtggtcatgatgggtccaaaggcctccgcgtccaagtggctaagctgacggctgttctggaagctcaatgtctcgaggacatctacgtgggtcagggaattggccaccaccctctggagcaccggcatgtcctcgataaaaagttggcgcacctgggtgagattagccgtgtcctccggcagcagctcctccagcagattgtcgctaatgtctaggcggagtaaagtctccggcagctgtgtgggaatccgcttcaactggtttcgacggagggaaagctctttcagaggtgcatttacgggcaggtgaagatcatttaggctacaagcgtccagtcttaaggtggagagtttccagttcaccccgagtccggtgtatagatccccgccagactcgttgaagcgtcgattccaagagatgtccaaggtgcccaggaccaaaagcggggcaaaaagatgaccgggcagcaagtgcagattgttgtgggctaggtcaaggacctgcagatgtggcaatccgtcaaaagatccggactctagtttgccaatgctgttccagcccagatacagctccctcaaactggtcagttgcttgaagtttccggacaccaactgcgaaatgttgttgtgcctcaggttcagctggtgcagactgtcgctagtgaagatcggtactgagtccagggcgttccaggacaggtccagggagtcgatgtacagtggcagcagcagggagagatccgccaccttgtagtccttgtagctgcagtcgatgcgcagggctcggtttccccagggagaagcactcacgttgctgcactcacaggaccgccgggagttcttcgaggactccgggtagcagaagcgatccgtctcctccgcatcgatgacctccgcccgggcgacgtgggctgccagcaactgcgtcagcagcagggcaaaggtcagccctcttataacttccaacctcgccatcgtaaaggttctcggtatactaaatgagtgggtgaatggctcgcagctagtgccactttcatatcttatcgagtggcggaaaagctcacacacattctgagtcgatttttccaataaatttatcagcaaaatgctttggttgggttagtcattgaaatacatttggccagcgagcttgagtggagggtccgaagccccggggatttgaattgttgataagatagcacggcgaagctttacctttttatctttccctctctcagcaaatagctccccgcccacgcttatcgcctttgcagcttttcttatcacccgatatctttcattaatcatttcccacactacgagactgcgagttaagtcagattcgccgtattgatggatctatgaagccgcaatttcacacttcgaggagtcgagacttagtttcgattcaaaagtcatgtctaatcccatcgggatggagacttatctagctcattgcatccaaaagtcgggacttgagcccaattcgtaattacgcctaatgcttttcgctggggctttatgctgattgctggatgtgtcgagatgatgttctccaactcctgggattaaatgtgcggttcccatgccgcctaattgctgaggtcgcgaaaggaacttccgtaggtaaagagtgtgccttttaaagtctactattttaaaggtgtttcttatacttgaaaaatcagaatggtttcgaaaggagcaaaataattcaactgcagacacatttaattgggtgactaaagtaaatcatttcagaaaagtatctactcgtcgagcttcactcttaaggagctgccctaacgaactttatggtgccctatttacattcgcaattgctgtggaactcttctttgtgtcaatggaaaattgatgaggcttacataagtgcacaggctcaccagagcagccacagtcgcccactgtggcataggcatttgcataaattaggggcttccagcacccatccctctagcagtgactttccatcttgacttttctacaatttgagcttgggtttgggggaaagccaacacatgtaaagcatttaatgagctgtgtgtgcttaaatttattgaaaatgccaggcacatgctggtgctgtacgtacgtattcgtatttgaatttgcctccatgtcattattacaagcaaaaatgtatttttaactaaaatcccattaattacgggtaatgtgggctcagagtacgtgtgtgtgtgtgtgtgaaataattacggcattacgagcaatttaattaaagcccaattttcgcacatctgcaataatggaattgttaattaatagcccgaatcaaaaacggtcatcaattggggcagctgtcgagttagaaggcactg

SEQ ID NO: 9665 - DNA, 1795 bp, DROSOPHILA
gatccatcaatacggcgaatctgacttaactcgcagtctcgtagtgtgggaaatgattaatgaaagatatcgggtgataagaaaagctgcaaaggcgataagcgtgggcggggagctatttgctgagagagggaaagataaaaaggtaaagcttcgccgtgctatcttatcaacaattcaaatccccggggcttcggaccctccactcaagctcgctggccaaatgtatttcaatgactaacccaaccaaagcattttgctgataaatttattggaaaaatcgactcagaatgtgtgtgagcttttccgccactcgataagatatgaaagtggcactagctgcgagccattcacccactcatttagtataccgagaacctttacgatggcgaggttggaagttataagagggctgacctttgccctgctgctgacgcagttgctggcagcccacgtcgcccgggcggaggtcatcgatgcggaggagacggatcgcttctgctacccggagtcctcgaagaactcccggcggtcctgtgagtgcagcaacgtgagtgcttctccctggggaaaccgagccctgcgcatcgactgcagctacaaggactacaaggtggcggatctctccctgctgctgccactgtacatcgactccctggacctgtcctggaacgccctggactcagtaccgatcttcactagcgacagtctgcaccagctgaacctgaggcacaacaacatttcgcagttggtgtccggaaacttcaagcaactgaccagtttgagggagctgtatctgggctggaacagcattggcaaactagagtccggatcttttgacggattgccacatctgcaggtccttgacctagcccacaacaatctgcacttgctgcccggtcatctttttgccccgcttttggtcctgggcaccttggacatctcttggaatcgacgcttcaacgagtctggcggggatctatacaccggactcggggtgaactggaaactctccaccttaagactggacgcttgtagcctaaatgatcttcacctgcccgtaaatgcacctctgaaagagctttccctccgtcgaaaccagttgaagcggattcccacacagctgccggagactttactccgcctagacattagcgacaatctgctggaggagctgctgccggaggacacggctaatctcacccaggtgcgccaactttttatcgaggacatgccggtgctccagagggtggtggccaattccctgacccacgtagatgtcctcgagacattgagcttccagaacagccgtcagcttagccacttggacgcggaggcctttggacccatcatgaccacccccaccaaaaaaagagctctgcggtcgctgagctttcgcggcactatgctgcgcacctttaattccacgctggcgccgatttttactcagcttgccgaactggatctcaacggtctgccgctgcagtgtgactgcgagctcgtctggctgaagcagctgccggtccaaaccaacgggcgctgctacaagccggcccgcatccgtggcatgctggtcacctcagcccgcggcgacgccttcagctgcgacacctggccgagatgggcctacggcctggtggtgctctcactgatcgccctcagcgccgcggggatctacctgatcgtcatgggactgagaccccatcggggagtcaccatgcggcgcaaggtcggtgccggcagtccctacgcccgcgtcaccatcgagcccaatcgccaggagaatccccactag

SEQ ID NO: 9666 - protein, 469 aa, DROSOPHILA
MARLEVIRGLTFALLLTQLLAAHVARAEVIDAEETDRFCYPESSKNSRRSCECSNVSASPWGNRALRIDCSYKDYKVADLSLLLPLYIDSLDLSWNALDSVPIFTSDSLHQLNLRHNNISQLVSGNFKQLTSLRELYLGWNSIGKLESGSFDGLPHLQVLDLAHNNLHLLPGHLFAPLLVLGTLDISWNRRFNESGGDLYTGLGVNWKLSTLRLDACSLNDLHLPVNAPLKELSLRRNQLKRIPTQLPETLLRLDISDNLLEELLPEDTANLTQVRQLFIEDMPVLQRVVANSLTHVDVLETLSFQNSRQLSHLDAEAFGPIMTTPTKKRALRSLSFRGTMLRTFNSTLAPIFTQLAELDLNGLPLQCDCELVWLKQLPVQTNGRCYKPARIRGMLVTSARGDAFSCDTWPRWAYGLVVLSLIALSAAGIYLIVMGLRPHRGVTMRRKVGAGSPYARVTIEPNRQENPH

SEQ ID NO: 9667 - DNA, 4130 bp, DROSOPHILA
tcggagatggcgggtcaaaagtttcagtatgatgagagcggcggaacgttctactactttgtgttatcgttcttggcgctaatattgataccgaccaccatttactattggccacgtaaaaagaaacaaggtaagtgccgcttgccagccgatttaaatcgcactctctccgctcttgttttttaattttccacctgcagctgtgcgcgtgtgtatgtgtgtaagtgagtgccagtaaggcgaaggcatagacatacatgtgattaccacgctctcctgctctaaccctcccgccgccaccaacaaactaaatggacacgttccaataagttattctaacaacgtcagctcatcgtcttcgtatgggtgaaagctgcgctgcgattaccgcaagtcgagctctcttcgttttccaattgggacagcgcactcaacgctccacaagcgtccatgcgtcgctaatatcgtgataacttacctatcatcgtgatcggtggaggaggagtgattatgagcaagttacctttgacttatcgcgatcatgctgtgcttgtgcactttgcacacacgctcactgaccaatcggctgctctctcacgattttcctctcgcgagattttcatttctgtagcgctggcattcccggtaaaaaaaaaaatgcaatatgcgtagacagacctcaactaattttaatcgtaatcaggttagcaggtacctgtaaagatcgttttttttttaaatcattttattagccatcttaagtgaaaatgataaatttcaaatattttaaaatagcctatataatccccgtactgacccaattttcgtacacatacttgcagataacagcaaacttaaagaggaatgtcagtgcgccgactgccagaaaaagaagaccatcttggccaatgccgagccgtacagagctctcacgtcatggaccatcaagctgaccatagtgctggggtgggccctactgctcttcctcacgtaccgcgtctcgcagttcgactacgagatggccagcttcgatcccttcgagatcctgaatgtgccgccgacgtcgtcgcaggccgagatcaagaaggcctactaccggctgtccaaggtgctccatcccgacaaggagacgggtgacgagaagtccttcatgatgctgagcaaagcgtaccaggcgctgaccgacgatgtggcaaaggagaactacgagaagtatggtaatccggatggaccgggtgccatgtcctttggcatcgccctgccctcgtggattgtggagaaggagaatagcgtttgggttttgggtctgtacggcctggtcttcatggtggccatgccctcggcagtgggtgtttggtggtaccgctccatccgcttcagtggcgacaaagtgctgctcgataccactcagatgtacttttacttcatccacaagacaccgcacatgctgctcaagcgggcacttatggttctggcagccagtttggagtttgacaagcgacacaactcgcaggtccaggagcggcagtcggacaatgacgaggtgccggcggtgagtgcattttattggaatttccattcgttgttcgctcactaataacacttccttttcgaatacagctgattagacagctgcccaatctgaatgagaagtgcaaggagcatccgctgtgccgcatgtactccatcaaggctcgcgccatcctgcatgcccatctcagtcgcatgcccctcaatccggaaactctggagcgcgatcgccagtttgtggtgaagaagtgcccgtatttggtgcaagaaatggtctcctgcgttcaccagctggtcatgatggcctatgcccgacgtgtgccccgcctgcccagcatcgaaacgattgagaactgcatgaaaatgtcgccgatgattatccaaggcctgtgggagttcaaatcgccactgctgcagctgccccatctcaccgaggaccatctgtactttatgaacaagaagaggcacgtcaagaacctgcagcaattcgcccagctcaagccggaggagagccgtcagcttctgaagaacctatctgactttgagtacgagaacacgatgaaagtgctgggcaagatgccgctgattgacttctccattcgctgcgaggttatcgacgatgagaacaccaatgtggtgaccgccggggccatagttacggtcacggttacgctggagcgcaaggacatgaagacgctattcggtgacacaaaggcgcctgagaagcagggcatcaaggatgagaccaatgaggaggctgccggtgatgaggatgaggctgctgccgctgcgccggtcaagaaggcttctgcctgggccaagccacgtaagggtggcaagggaaagggtggtaagaaaccagcccagaaccaaaagaaccagaagaaggtgccggccaaggctgcgacaacagctacgatcacggcatccgaggatcaagcggcggcgggtaactccgatgccgaatcggaggctggaaatgcggatggcagcgatgtggaatcggctgccggcagtggcagcgaggatgaggagaagggcaagaacaactcctcgctggacgacgacgatgacgaggagtgggagcgactgcaagctaagcttaacaagagggagcgtctcgagggcaagtctcggctgtcgcacaccgtccactgcccctacttccccgaggagaagcaggagtactggtggacctacatatgcgatcgcaagtcgcgcaccctgctcacagcgccctatcatgtgaccaatctggtcgagaaggaggagatccagctgaagtttaccgcgccgcgctggccgggcgtctacacgttcaccgtttgcctgagatcgggtgagtttctaaaagagtttggattgcatagtacattggcattcgaaggggggattctcacacaatgtttcctctgtttcagactcgtatttgggtatggatcagcagcaggagctgaagttggatgtacagaaggctcccgcaccaccgacggatcatcctcagtgggatctgagcgaatcggaaccggagcacaccgatcagcaggagaacctgagcgactatacaacagatacgtccgatgaggaggacggcgaataaatccactgtctacatggacagtgcgacggacggacggacggatggatagacgtcctgaaccccaatcaacctcaacctcctctctaattcactgggacggaagagaagcctctttgttttccttttagtaaatgagtttcgcgtggcgcgtggcggaggcacaccaatgcgaacccttccttcgcatttttactagttttgtaatggaaaagaccccgaactagtgcgtaaataactataacttcattttaccgtgtactgtactaaacataattataatgtactgtatatttaattatttggatacaagaactaaaagtgagacacgtaaatacaaaagtctattgatattactactcttttgttgtgttataaactgagaaagaaaaacccacgggcttgttgctactttcgctcactttaatgctgaattaacataaatttactgcacaatttgctgaatttctagattaacattttattcaattaaataaatagcatcacaattactttaatttaaaccattcaagttattgaccacgcctaaaccttagcaatttttaagtttttttttttattacatttttgctaagcctttggataaactaattgcttacagcttttagaatttgaatatattttagcgcaaaagtaaattaattttgtaataaataaaaaacggttgtatcattgttagagtatcgacacataaaataataaatcagcaaaaacaagtgagaattgcaacaagcccgaatagtttgtggaaatcataaaaataatttaaatcaaagttggcgctgcctctgtctgcgctgacgtcgacgcctactgcgcagccgctgcccgctcgctgtccaataagagatccgattgggaatctgaagtcttcttagctgatgctgctgttgttgttgtggtcgctggtaacttctttcattgttgttgtagacagcagcgagttttttgttgtttgttttgggaaaggagtaaaaattgt

SEQ ID NO: 9668 - DNA, 2262 bp, DROSOPHILA
atggcgggtcaaaagtttcagtatgatgagagcggcggaacgttctactactttgtgttatcgttcttggcgctaatattgataccgaccaccatttactattggccacgtaaaaagaaacaagataacagcaaacttaaagaggaatgtcagtgcgccgactgccagaaaaagaagaccatcttggccaatgccgagccgtacagagctctcacgtcatggaccatcaagctgaccatagtgctggggtgggccctactgctcttcctcacgtaccgcgtctcgcagttcgactacgagatggccagcttcgatcccttcgagatcctgaatgtgccgccgacgtcgtcgcaggccgagatcaagaaggcctactaccggctgtccaaggtgctccatcccgacaaggagacgggtgacgagaagtccttcatgatgctgagcaaagcgtaccaggcgctgaccgacgatgtggcaaaggagaactacgagaagtatggtaatccggatggaccgggtgccatgtcctttggcatcgccctgccctcgtggattgtggagaaggagaatagcgtttgggttttgggtctgtacggcctggtcttcatggtggccatgccctcggcagtgggtgtttggtggtaccgctccatccgcttcagtggcgacaaagtgctgctcgataccactcagatgtacttttacttcatccacaagacaccgcacatgctgctcaagcgggcacttatggttctggcagccagtttggagtttgacaagcgacacaactcgcaggtccaggagcggcagtcggacaatgacgaggtgccggcgctgattagacagctgcccaatctgaatgagaagtgcaaggagcatccgctgtgccgcatgtactccatcaaggctcgcgccatcctgcatgcccatctcagtcgcatgcccctcaatccggaaactctggagcgcgatcgccagtttgtggtgaagaagtgcccgtatttggtgcaagaaatggtctcctgcgttcaccagctggtcatgatggcctatgcccgacgtgtgccccgcctgcccagcatcgaaacgattgagaactgcatgaaaatgtcgccgatgattatccaaggcctgtgggagttcaaatcgccactgctgcagctgccccatctcaccgaggaccatctgtactttatgaacaagaagaggcacgtcaagaacctgcagcaattcgcccagctcaagccggaggagagccgtcagcttctgaagaacctatctgactttgagtacgagaacacgatgaaagtgctgggcaagatgccgctgattgacttctccattcgctgcgaggttatcgacgatgagaacaccaatgtggtgaccgccggggccatagttacggtcacggttacgctggagcgcaaggacatgaagacgctattcggtgacacaaaggcgcctgagaagcagggcatcaaggatgagaccaatgaggaggctgccggtgatgaggatgaggctgctgccgctgcgccggtcaagaaggcttctgcctgggccaagccacgtaagggtggcaagggaaagggtggtaagaaaccagcccagaaccaaaagaaccagaagaaggtgccggccaaggctgcgacaacagctacgatcacggcatccgaggatcaagcggcggcgggtaactccgatgccgaatcggaggctggaaatgcggatggcagcgatgtggaatcggctgccggcagtggcagcgaggatgaggagaagggcaagaacaactcctcgctggacgacgacgatgacgaggagtgggagcgactgcaagctaagcttaacaagagggagcgtctcgagggcaagtctcggctgtcgcacaccgtccactgcccctacttccccgaggagaagcaggagtactggtggacctacatatgcgatcgcaagtcgcgcaccctgctcacagcgccctatcatgtgaccaatctggtcgagaaggaggagatccagctgaagtttaccgcgccgcgctggccgggcgtctacacgttcaccgtttgcctgagatcggactcgtatttgggtatggatcagcagcaggagctgaagttggatgtacagaaggctcccgcaccaccgacggatcatcctcagtgggatctgagcgaatcggaaccggagcacaccgatcagcaggagaacctgagcgactatacaacagatacgtccgatgaggaggacggcgaataa

SEQ ID NO: 9669 - protein, 753 aa, DROSOPHILA
MAGQKFQYDESGGTFYYFVLSFLALILIPTTIYYWPRKKKQDNSKLKEECQCADCQKKKTILANAEPYRALTSWTIKLTIVLGWALLLFLTYRVSQFDYEMASFDPFEILNVPPTSSQAEIKKAYYRLSKVLHPDKETGDEKSFMMLSKAYQALTDDVAKENYEKYGNPDGPGAMSFGIALPSWIVEKENSVWVLGLYGLVFMVAMPSAVGVWWYRSIRFSGDKVLLDTTQMYFYFIHKTPHMLLKRALMVLAASLEFDKRHNSQVQERQSDNDEVPALIRQLPNLNEKCKEHPLCRMYSIKARAILHAHLSRMPLNPETLERDRQFVVKKCPYLVQEMVSCVHQLVMMAYARRVPRLPSIETIENCMKMSPMIIQGLWEFKSPLLQLPHLTEDHLYFMNKKRHVKNLQQFAQLKPEESRQLLKNLSDFEYENTMKVLGKMPLIDFSIRCEVIDDENTNVVTAGAIVTVTVTLERKDMKTLFGDTKAPEKQGIKDETNEEAAGDEDEAAAAAPVKKASAWAKPRKGGKGKGGKKPAQNQKNQKKVPAKAATTATITASEDQAAAGNSDAESEAGNADGSDVESAAGSGSEDEEKGKNNSSLDDDDDEEWERLQAKLNKRERLEGKSRLSHTVHCPYFPEEKQEYWWTYICDRKSRTLLTAPYHVTNLVEKEEIQLKFTAPRWPGVYTFTVCLRSDSYLGMDQQQELKLDVQKAPAPPTDHPQWDLSESEPEHTDQQENLSDYTTDTSDEEDGE

SEQ ID NO: 9670 - DNA, 4386 bp, DROSOPHILA
cgatcccaaacgtttttcacatactttgcacgaaatggcattatgggctctgtcaaagtggatgttgaaaaacccaccaggttatttatattccaatctgctacgcaggtgcaaattccgatcagttgggcgctgaaatgggctgccatgccatagagcacgtcactatatccagcttccaggaccaccgcgtcaaatgttattcttgacttcattaatgctcgaacttccacattattgaggacattaagcgtagcatttgccataagactcgacatagaactaatttcctcccacttattgttcgctgaagcgattccaacggattcctcaaactctgcagtaaatatgagacaaaagcatatatattagagatttctgttctttaatctaaagaatctaagaatctaatctaaaagaaactacacttcgcttgattgattcttattttggcagttgataaaattgcaattagaataaatttacactcttgcgtctgacataagtacatacacactaccttatctgagataatgattcaatgggcaattaagattttgatacttacctaaaaaaacattattattataccatattcgtataaaggtgacatcctcaattttgtgcatgcagtgcttgtatgcatgtatcaccgtcagctggtgaccccgatcttttagagcctggatatagggtgtcacaagcatgcattgcgagtgggattcaaagggggcgatgacgaggatgcgggaactacgtatccaacatatcgagttcgaaatcagccagaacatcgggagaagccatcgccccggaggaaacatatcgattgagcgaccgctttcaaactgactgactgaagagatttccagccgatttcttgtgcattttcgctcattgtatttgttcgctgattagattacaccgaagagaatttattttgaccaaaaccaaaatagtatcatttcgtctatcggcatgtgcggtcgaattacgtgaaatgttcagcggcccgggtattgctggtctactgctcacggttttgctttttggccttttgtgtccgaaactgaccaatgcggaaaatatcttggccgtattctcgtacacctttggctcgtcctacttgctgattactccgttcttaaggaatcttgtccagcggggccaccagctaactttgatatcggccgtaacgattatgccccacatagagggtgtccatcacattcgagtgcccaaattggatatgctgatgaaaagtaatgaacctcaacgcttctatatagctctatacctataaatatgtagaaccgaacaaaagtgccctactgaattattgaaaataatctacgcttatcaaaacggcaccagagaattgttatcgcaatggtttgaataatcaacccaatcattttacactttttgcttgccattaccaaatataaaatttgttagcctagttcagcctaattaagtttgaaaaacgaggtaaggtaatttaatttaggtccactgcggccatgtctccaatagcttagttttaattaaaattttaaaattaagtttagaacaaccttgaaatatgtatttcaattaattttgatttcagttctcttggattttgaatatgacaccgatttaaccaaatggacggaggctcaattcttgtccgagtacttttacaactgttcaaagtttgtccttgaagatcctggggtgcaggagttgctccgcaacgccagtgccaagtattcgctgattattttggaggcgtcacacaacgatgccctctacggattttcgcagcactttaatgcaccgctgttgggggttgccgcctacggatcgtcctggaacattgactttctggtggggaactcggcgccaagtgtctacgaaccgatgtccgccttgggctacacatctggacttaatctgattgagaagtggcacaacctgatctacattaccgaggagcgtttggtggagcgattcatctacctgccgcgccaaatagatctatacaagcaacatttccctggtgccaccaccagtattcatgaccttcgtcggagattctcactggtcctgatcaatcagcattttaccatgggccgagtgcgcagcaatgtgcccaatattgtggaagtggcgggtatgcatctggacgaaaaaccatatcctttggatgcggaactgaaaaagattttggatgaagccgaacatggagttatctatttttctatgggactgcaactactggaccattggttgccccccggaatgcgagcttctatgtcggacgcctttgcgcagttgaaacaacaagtgatttggaagactgactatccagagatggtcaaccaatcaaggaatgtctttgctagaacatggtttccccaaagggcgattcttaatcatcctaatgttaagctctttataacccatgccggtcttttgagccttattgaatccgttcactatgcagtccccctgctctgtatacctctattttacgatcagtttcaaaacaccaagcgaatggagaagttgggcgtggccaggaagctggattttaagaaccttttccgggacgaaattgttctggccattgaggatcttgtgtacaatgctagttataaacgaaatgcgagggatttatctcaacgatttcatgaccaaccaatgtctgccatggataccgcgatctggtggacagaatatatcctgcggcacaaaggagccgaccacatgagaatcgccgagcaggaaatgtccttgatgcaatactataacgtagatgtagtttctgttctcttcggacgaatcggactaagtgctattattgttatcttcctcggctggaaactagtctcattggcaacaagacaccttgagtatcgattgaatgtcccaatggtaagataaaattaaattattcctgtcaacagcacatccaagacatggccaatcggctaccttttgttttaaaaagtgtgttaggcaaaggtgttatgtgtcattatattgtagcattgtaaacctagataggtttaaataaaaagcattgtaaaagcgatctgatcatgtacagccatgcgaatgttctaccaaactttacttcatgattcgcctatcagcattacagtttataattttacgtcaatctataaggttaatctataatatttgatggtatgtgtatgctgatatgagggaaatttaatcgccagtatcgtaaaataggcgtatttattgtaaatgtttatttcgcattgatagcgagttatctaatcagtcagttaaatgaccgtggcggcgccaaacaagtctttcaacttgaatttacacctaaaagattaaaatataagttaaaattgttaaataattttcgtgtttatttattaggattaaatttatagaatttatagaatagcagggggaaaaaaagattccttctatattataattagaaaacttttcctccatcagtcgttatatatccaaacctttttccatttttttcttgcccataaacataaccgcgctcattacgcactttacatcaatcagcacgtgcccagcatgttttcaactctttttcgcaaataaaaaaataaataaaaataaaaaaggggataaaaagggaagtactggaagaaaaagggacattaaaatgcaaaggacaggctggtgagaaaagtgcgcacaattgctcccccaattgctggatggaaataccccagaaacatgaacccaacgaagtcgatgtcaaatagtccacagatgttgaaggtgaaccccaaagtgtatagccttcccatcataaccattggtgcgtaaggtctgtgaccgtccgtcgataaccaaggtaacgaaacgcaccgcgcataaaaacagaccgagctacggtgatccatcagtaaagtggataaattaatgcaagcactttgttactgcgttatgcatttgtttgttttgtcaacagattagataggttgattgctgtttgtacgtatcaatatttagttagctccctttgataagcgagctttggaaagttgcgggtaaaaaattgaatcgatttgcaccgcctactcaaaaaagtagcaaagtttgattgtcaacaattgttgcgtactattttcattaaaaagtaattaattttaatcatttttaaaagtgtaattagtgaatggccaccgtattttccagctcatcaaatttattcggatgccgatgctagtaattgaaaacaaaaatctataaaaagcggtttgcagccacaagaatgtctatttatttataccgaaatgaaacctaaaaggaaatataaaatgtgtgccaaacgttggcatgttaataagttgggcggaaaggacc

SEQ ID NO: 9671 - DNA, 2036 bp, DROSOPHILA
atgttcagcggcccgggtattgctggtctactgctcacggttttgctttttggccttttgtgtccgaaactgaccaatgcggaaaatatcttggccgtattctcgtacacctttggctcgtcctacttgctgattactccgttcttaaggaatcttgtccagcggggccaccagctaactttgatatcggccgtaacgattatgccccacatagagggtgtccatcacattcgagtgcccaaattggatatgctgatgaaaattctcttggattttgaatatgacaccgatttaaccaaatggacggaggctcaattcttgtccgagtacttttacaactgttcaaagtttgtccttgaagatcctggggtgcaggagttgctccgcaacgccagtgccaagtattcgctgattattttggaggcgtcacacaacgatgccctctacggattttcgcagcactttaatgcaccgctgttgggggttgccgcctacggatcgtcctggaacattgactttctggtggggaactcggcgccaagtgtctacgaaccgatgtccgccttgggctacacatctggacttaatctgattgagaagtggcacaacctgatctacattaccgaggagcgtttggtggagcgattcatctacctgccgcgccaaatagatctatacaagcaacatttccctggtgccaccaccagtattcatgaccttcgtcggagattctcactggtcctgatcaatcagcattttaccatgggccgagtgcgcagcaatgtgcccaatattgtggaagtggcgggtatgcatctggacgaaaaaccatatcctttggatgcggaactgaaaaagattttggatgaagccgaacatggagttatctatttttctatgggactgcaactactggaccattggttgccccccggaatgcgagcttctatgtcggacgcctttgcgcagttgaaacaacaagtgatttggaagactgactatccagagatggtcaaccaatcaaggaatgtctttgctagaacatggtttccccaaagggcgattcttaatcatcctaatgttaagctctttataacccatgccggtcttttgagccttattgaatccgttcactatgcagtccccctgctctgtatacctctattttacgatcagtttcaaaacaccaagcgaatggagaagttgggcgtggccaggaagctggattttaagaaccttttccgggacgaaattgttctggccattgaggatcttgtgtacaatgctagttataaacgaaatgcgagggatttatctcaacgatttcatgaccaaccaatgtctgccatggataccgcgatctggtggacagaatatatcctgcggcacaaaggagccgaccacatgagaatcgccgagcaggaaatgtccttgatgcaatactataacgtagatgtagtttctgttctcttcggacgaatcggactaagtgctattattgttatcttcctcggctggaaactagtctcattggcaacaagacaccttgagtatcgattgaatgtcccaatggtaagataaaattaaattattcctgtcaacagcacatccaagacatggccaatcggctaccttttgttttaaaaagtgtgttaggcaaaggtgttatgtgtcattatattgtagcattgtaaacctagataggtttaaataaaaagcattgtaaaagcgatctgatcatgtacagccatgcgaatgttctaccaaactttacttcatgattcgcctatcagcattacagtttataattttacgtcaatctataaggttaatctataatatttgatggtatgtgtatgctgatatgagggaaatttaatcgccagtatcgtaaaataggcgtatttattgtaaatgtttatttcgcattgatagcgagttatctaatcagtcagttaaatgaccgtggcggcgccaaacaagtctttcaacttgaatttacacctaaaagattaaaatataagttaaaattgtta

SEQ ID NO: 9672 - protein, 526 aa, DROSOPHILA
MFSGPGIAGLLLTVLLFGLLCPKLTNAENILAVFSYTFGSSYLLITPFLRNLVQRGHQLTLISAVTIMPHIEGVHHIRVPKLDMLMKILLDFEYDTDLTKWTEAQFLSEYFYNCSKFVLEDPGVQELLRNASAKYSLIILEASHNDALYGFSQHFNAPLLGVAAYGSSWNIDFLVGNSAPSVYEPMSALGYTSGLNLIEKWHNLIYITEERLVERFIYLPRQIDLYKQHFPGATTSIHDLRRRFSLVLINQHFTMGRVRSNVPNIVEVAGMHLDEKPYPLDAELKKILDEAEHGVIYFSMGLQLLDHWLPPGMRASMSDAFAQLKQQVIWKTDYPEMVNQSRNVFARTWFPQRAILNHPNVKLFITHAGLLSLIESVHYAVPLLCIPLFYDQFQNTKRMEKLGVARKLDFKNLFRDEIVLAIEDLVYNASYKRNARDLSQRFHDQPMSAMDTAIWWTEYILRHKGADHMRIAEQEMSLMQYYNVDVVSVLFGRIGLSAIIVIFLGWKLVSLATRHLEYRLNVPMVR

SEQ ID NO: 9673 - DNA, 3280 bp, DROSOPHILA
atcacacaaaaatagccatcacacagctgtctcttgtctttttggctctcttcgctgttgttgttgttgtgtgtgtacaaacacccacagcctgcatcacacacacacgctcaaattcgtgacagcaccacccacccctcaccaataaccgttaattccgcagacactttcagccggcgaacgggagaagagaatttgcgaataatagcaaagccccgtttaaatgaacgtttttagcaacaatcaggcgttactcaccttcttttgctgctgatgaatttgcaaggatctgcagttgtattccaattagaactgacgagaagctgcgtagcgaacaccggcgaaatggcgaaaataataacttggcgtggcctttggtgggaccaggcgtacattcgtggaaatagtcaagcgagttaacccttatgtgggtggcagaatactaaaaatatatgatacaacaaattttagacttaagaaaacggatgtttaaatgtataaaatatgatggaagtgcaatagccaagcttataaactaattcttaaattatttgcaatgcatttaggacttttcgatatacacgtaaataaactatattttgattgaacacggtacatttctactagagttcaccttcagatattgacgctatttcttgtcctgtaaattattttgttaaatcgttcacattgtatgtctaataaagatgttttccaataaaatgttattcccttttcacttagtctaacatattcattaaataatcaatgttttattttttatttagttattttaattagttcttaattataaaactgctctagattctcgatattttgcggaatccggcgcatggtcacactgacgaacacgtattttcattattcttgcgaagcgcatcgcttaaaacttgattacgctcggataacaagatgcacccgcgtctcaagtgactgaacaggtagcgaagtgaccctggatgagcgtgggtaggcagccggcacctctggaaagccctaatcccaggtccgccagccgtttgcaggttatgtccgcttgtgtacactgtgacggggaaccgaagaagcaacaggagcggattcctggcagaagagacaaccgctgtacgagataccgcccctgacctgcgcaacatgatcgaggtgctgtgcctgctgctgggcaggatcctgctgctcctggtcggcggctacgaactgatgtggcggctccgagagcgactgaatgcactggccgtccggtcatatgacctttggcgcagcaaagcggcacgtgaggcgcacgagcggcgcgtgctcgctgactgccgctcccagttgacgaagacgccgcagcatctggtcctggttatctcccccgtagatgccggcgtggatgcggtgctcctcagcaggatcttcgactttgccctggacgtgggcatcaaacacgtcagcctgtacgacaggcggacgaaaggcaggggatacgtggacatggccgatctctgtcgatccaccaacgcggacacgggcagctgcttaaagtggccacccgtagccagtcccagcaaactggagaaccagcccaaaaacggacaaaagacaaatggttatgtgaacggttcacattcccctcaactgcaggtgagtggcggcgtctgataagccgtgattagtaatggactttagaacgatgtcggaaaatgtcttacaagtattacactttttgtttcaattgttaaataaaagaagtaatgagctggagatttaatttagttcatcattcacatgagatacaaaaaattcttcgtgctgagaaccagttttacctttgtatccattaaaacctatgtatagcaacgtaatcgattcccggaactagtcgttgccttatcagtttctaattgacttttcggcttcggcgtctttcagctccatcaaatcagcgcctccgacggccatgccctgatcgccgacgtctgccgcgagttgtacgaagacagtaagacggagttggtgcagagcctacttaagcagaagcgcgaagcgctgacggagcagatcagcgacatgctgagcaagcgactcgggttcgaggccccggagccggagctgggcatcgtgttcgcccggcagacgtgcacctacggcctgcttccctggcacgcgcgcttcaccgagttccacacgcatcccagcggacgccacttcgacgtggagacgttcgccagcatcctgtgcaagtactcgcggtgcgagcagcggtggggcacgtaggcacatcgttcgcgtgggtagcgacacccttatattaactagttaccttaacattatgtaaattatcgccaggaattccttttagttcgtaagagtaaactgcaaaagtgtattgttcacatgaaagtgtcttttgctggagaggatcgcgcgtttctaatggcggtgcaacgcagcagctcgtatcttgtacataatattcgatctttattgagtgacgttttgctgtgcttaagcttaaggcgcaactagatgagtatatgtaagtgggcagacttaagcgctatggttaaaagtattgtattgcttttcgttcaagtgtcatctccggcgctcagccgctctactcccgaccgggctcagcgtggcgcttggacaggagattgacgtcggtcagatacgtgttcttgtcgatgttgtgcggaccgggacccgtgggcatccgctcgtggaggccgtggaaggagttgcgcagatcctcgagggagtcggccaggcccttcttgatgctggcgaactcggtggacatgagcgacagcttgcccagcagatagttgaggttctcgtccatgtcgatcatgtgtttcttggtctcctccacgcggctgccgagacccatcatggtgatgagagtgctgttgttgtagccatcggaagcggactggatatctccgagcatcagccggctctggctgatctcgccggccatgatctcgatgcggtgccacacctggttcagctccgtttccagcagtccgctgatgttcttgttcgcctcctgctggatgctcaccaccgctccgtccagcgacgagaagcgctccttcagcagtccgctcagcgtggccatttcctccgccagcagcttgccaacccgctgcaccacgttcagtgtgccgaagtccaccttgcgctgcgtgtccagcacgacctccgagttggtcatcatgatgttgttgaacttaccgagcgcttcgagtccctcgttcagcttggcatt

SEQ ID NO: 9674 - DNA, 992 bp, DROSOPHILA
ggcacctctggaaagccctaatcccaggtccgccagccgtttgcaggttatgtccgcttgtgtacactgtgacggggaaccgaagaagcaacaggagcggattcctggcagaagagacaaccgctgtacgagataccgcccctgacctgcgcaacatgatcgaggtgctgtgcctgctgctgggcaggatcctgctgctcctggtcggcggctacgaactgatgtggcggctccgagagcgactgaatgcactggccgtccggtcatatgacctttggcgcagcaaagcggcacgtgaggcgcacgagcggcgcgtgctcgctgactgccgctcccagttgacgaagacgccgcagcatctggtcctggttatctcccccgtagatgccggcgtggatgcggtgctcctcagcaggatcttcgactttgccctggacgtgggcatcaaacacgtcagcctgtacgacaggcggacgaaaggcaggggatacgtggacatggccgatctctgtcgatccaccaacgcggacacgggcagctgcttaaagtggccacccgtagccagtcccagcaaactggagaaccagcccaaaaacggacaaaagacaaatggttatgtgaacggttcacattcccctcaactgcagctccatcaaatcagcgcctccgacggccatgccctgatcgccgacgtctgccgcgagttgtacgaagacagtaagacggagttggtgcagagcctacttaagcagaagcgcgaagcgctgacggagcagatcagcgacatgctgagcaagcgactcgggttcgaggccccggagccggagctgggcatcgtgttcgcccggcagacgtgcacctacggcctgcttccctggcacgcgcgcttcaccgagttccacacgcatcccagcggacgccacttcgacgtggagacgttcgccagcatcctgtgcaagtactcgcggtgcgagcagcggtggggcacgtag

SEQ ID NO: 9675 - protein, 278 aa, DROSOPHILA
MIEVLCLLLGRILLLLVGGYELMWRLRERLNALAVRSYDLWRSKAAREAHERRVLADCRSQLTKTPQHLVLVISPVDAGVDAVLLSRIFDFALDVGIKHVSLYDRRTKGRGYVDMADLCRSTNADTGSCLKWPPVASPSKLENQPKNGQKTNGYVNGSHSPQLQLHQISASDGHALIADVCRELYEDSKTELVQSLLKQKREALTEQISDMLSKRLGFEAPEPELGIVFARQTCTYGLLPWHARFTEFHTHPSGRHFDVETFASILCKYSRCEQRWGT

SEQ ID NO: 9676 - DNA, 2720 bp, DROSOPHILA
ctccactgtaagattacacaaaatcattttttttacacgttacttacactgttaagtgacaaaattaaaggtagcaaatatctaaattattaaccctacttattaaatattttatatattttatattcaacatagtcataaaaaattaaacataactatttaaataaatataagtgctgaagatataacaataaattgctaaagcggaatcacttctgtaaaatagcctaacgcctcgttctctctgttaactgctctccgtttgtcaacactaaaatgttaaacaaataaaattttttgcgaagcaccgaaaacagcaactgtttgtaaaatatcataaattatttattaaattaattaaaaccaacgggaaaatggcagcaaaagtagcgagcggcacgaacaaagtgttccagaacgtgagtatgggtgaatcatcaaaggacagctgactaagatgaaaagtaacctcactttgtcatggttttttctgtgcatctgctcaattgaaatttatgatatatattttaaatcgcattttcagcacgatgacgtgcacatctccttcgaggatcagcagcggatcaaccgctttgcgaagcacaacgcccgcatggatgacttcaaagcggagctggaaacgaagcgcaatgagctgaagagcttggaggaggcgctggaggagattgagctgttcgacgaggacgaggacataccgttcctggttggcgaggtgttcctctcgcacaagctggagaaaacacaggacatgctgaaggagaccaaggagcaggtgctcaaggagatcgccggcgtggaggccaaggcgaaggttatcaaggcggaaatggacgagctgaaggctcatctgtaccagcggttcggcagcaatatctcactggaggccgaggattaatccacaattgatcaattgttaatttaacattttacaaaatagagtacatttaatttaaactcaactaaacgcgatgtcttcagattagagcactaggaaatagatgatcagggcgatgataagcaaggtgaccaccactcctccgatgaatatccgacgatcctcgaccagccggcgttcaataagtttcatcgtgtgattggacagacccagtgtgctgcctatcgcctggattctcttgtgcgctccgcccagcgtcattctctgcgagatcaggctctcgagaatgccgctgcccgaggcaatcatgtcgtccacaccccgatgggcgttacccagctgcgtatgatgctgcagttcgtagtccaattgcaggcgcgtttcctccggctgcgcgctgtttgccgtgaatctgtgattcagcagctgttccctctcggagatctcctgcatccgtcgctgtcttcgttcccgcgccgtctgcagtgatgtctgcaggtgtctcaggtcatatttcagctgatccacacgaagtttggagctttgtcgctgcgaaggtggcaccttatacaacagcacatccaaccgatcgcagtttctaaacacaaaagatttatttaataatacaaactcctcttgggataatatatatcattgtagaactcacgcgttcgcctgggtaatcttcaattgaatgccgttttccacgtcaagcgattcctgggcactgagctgactcagtcgctggaaatcgcgctcgatgtcctttaccacattgttggtttggtggtacaagctctccatgtcgttacacctattgattccgcattaatttatgggcccgagaatattcgcaaattaatatttaatcggttgcaattggtttgtttttaaaaaagctgacgcgttaacattggacagagtgtcatgttagttaacagcactgatagcagagcagctggctgccgtttttggtatgaccatatattatgacaaacttatcagctaatgcaactattaaatttcctttttattttcagagaatatgctatatattgttaaataatgatttttaattagtgaccaaatattgcacttgacggcgctgttaagtgttaccactgttaacggtgtaaaaatcagagttgttaagcaagccaagcaaaacctaaaccgcactggtcacatcgcactggaaacgcgttagcacacttttacggtattttagcacttagcattaaccacaatggcgaatacatcaagtaccggcgttggtaagaaataaaattgataaattagcaatttggcagcttaaaaatgcgatccccgcacgcccggagttgttggccatccgttttctgcatttcccgctgaccggcggcgatttttccgccgctacggacccgacaagcggaccgcaatgtgattgtgtgtgtggtgcaaaacgggcaaaaagaagacgaaagcaagggcgaaagacgaaagccgataaaagcgaaatgggcgaatggaaatttattttcgccagcggaccacgctgctcttgcaattttccttggccgcgtttggcgttggaaaaactccgttgcaattgggcttcgtgacttgacattttccgaaatatcatccccgctccttcctcactatgtggctctcgctcgctcgctcgcgcacgctcttcttcttgccttcatacttaaagttttttctttattttccttattttttgcacacttgcgtttttgcaagctgccttgtcttttctaattaaattagctgccatttacatttgcctggattgttt

SEQ ID NO: 9677 - DNA, 651 bp, DROSOPHILA
atggagagcttgtaccaccaaaccaacaatgtggtaaaggacatcgagcgcgatttccagcgactgagtcagctcagtgcccaggaatcgcttgacgtggaaaacggcattcaattgaagattacccaggcgaacgcaaactgcgatcggttggatgtgctgttgtataaggtgccaccttcgcagcgacaaagctccaaacttcgtgtggatcagctgaaatatgacctgagacacctgcagacatcactgcagacggcgcgggaacgaagacagcgacggatgcaggagatctccgagagggaacagctgctgaatcacagattcacggcaaacagcgcgcagccggaggaaacgcgcctgcaattggactacgaactgcagcatcatacgcagctgggtaacgcccatcggggtgtggacgacatgattgcctcgggcagcggcattctcgagagcctgatctcgcagagaatgacgctgggcggagcgcacaagagaatccaggcgataggcagcacactgggtctgtccaatcacacgatgaaacttattgaacgccggctggtcgaggatcgtcggatattcatcggaggagtggtggtcaccttgcttatcatcgccctgatcatctatttcctagtgctctaa

SEQ ID NO: 9678 - protein, 216 aa, DROSOPHILA
MESLYHQTNNVVKDIERDFQRLSQLSAQESLDVENGIQLKITQANANCDRLDVLLYKVPPSQRQSSKLRVDQLKYDLRHLQTSLQTARERRQRRMQEISEREQLLNHRFTANSAQPEETRLQLDYELQHHTQLGNAHRGVDDMIASGSGILESLISQRMTLGGAHKRIQAIGSTLGLSNHTMKLIERRLVEDRRIFIGGVVVTLLIIALIIYFLVL

SEQ ID NO: 9679 - DNA, 4742 bp, DROSOPHILA
acatgacactatttcggttttaagcccgccacgcccacaaactcacctccttattgccggacatgccgctgacgtagactttcaagaccattttcgcagattactgtgtcctcgcaccgcaaatgaaataatattttgcaactaaaatctgctggctactttcacggcgattaaaaatatttatagatcttttcttttcctgctttcttccgtcctgcgcccctacgtaatgtttttccactggtgacgaaggcacacgcactgggcaaggtcgttggttttattggctgtaaaaacggcaaagacgcggataaaaaaattgcctggcgacgcttataaaagtgcaaaaatatttgatatcaggagtggaaaatatttcctactttgtcgttgaattgaatggtgggaccgcgcattgacggctatagaaaaccttccggcttatcaaatatactaaatatgatgcttgattaaaatactaaaaactttgaacttaagtgatatttcaaaattaaatatttttaagacaacttaaattttattatgctcccatgtaaggttttcattttttaaacgttcttcgattaataatcgtaataataaaataataatttataaaaagcataagataggctttttaaggttttttaaaagatagaagaaaaggattcttattatagaacaaattatttttaatttggcgtcgatgagttagcggcttcaaggaacggtggaatttagaacatgagggtgttttttatttattaattttttgttacttggagttgaattccataaaaataaaaatgcaataatgctaactttctacaaacgacttaaggttataggactcaagaaagtacatagaatatgcaattgaaaaatgttctccccagacttttcggttatttgaagtttttgctatatttggtagaaccataaagtattttttggtatagatccgttagcagggcaaccaatattagcggtcgccatgcggtcactctgttcacgtcccgtcacgcaagcatcgtcgtccatttttgctaagaagcgagacgaaaatttgtaaattatatctagcgagtcgccgaggacgaacaactattgacagtgcatttcagtggcctttggaatactgctcaaacaaccagcaagcaataacattacttatatctaaccgaaaacctaaattaatcacccaaactgaagtacggacgtgaatgtaagtgggtatgtgccagcggactagtggcacaataaaaaagtaaataaagcgcgtgtgaagtggtgcagaaagcaaaaaagcagtcggaaggaaaaatcaaaatacgcattaatgtaagtgcgattgttggaaaagctgtttaactttttgttcctctgaaaagctgataatgatatgcgatgcgaccatttttaaaatttcatgaaatcaacattccaactcacaacggtgtgcgtgtgcgtttctttgtgtgcgtgcgtgtgcaggctagagtgggacaaccagtgtgatcgctttggctgctgccatttcgtttgcttttttttaaactaatctctggcatttgtcacgtaaaagagtataacgttaaacccaaaaacgttttgtatatggctttaaatatttaataattgtgggcagagacagcaacaccagcagcagacgcatacacacgtgttgcggtttatcgagagggcagtgtgcgtgtgttagtgcggaaaacagctggtacagctgccgctgcagcgacgaagaagaagaaaagaaagaaaggggaagagtgagaagaacacgcattattatcctgcgtagttttcttttatcggtggttgttctgctattgggttacagtttacacttttctctgttttctttattttccctctgcattgctatgcattttgcctttgcgtggtggttttttttattttcattgtcggtcgtcctttaattgcgctgcgccacttcgtttcgtcgctttctttggctggtttctccttctcttcggagtttctggattcgtattccgattcggtatcgcccttttcctgcgacaacagcagctgggtgcacggtatcggagctgtcggcgatagccgaaagaagctagaaaccccaaggaagccaacatccttttaattgtcgtggaaactataatagtctcataaaaattaggtttttaaaatggttttgtcattctattctagaaaaagctatgaatataagaatataacaatatgtttaattgcttactaattttattgaacaatataatttaatcgtgacgaaatgggggaaaaaaaacatttttttgttgtcttgaattttttttcctctcttgtcatgattatttaggtaaaacggacgtcatcaaagtcattaaacttacgcgaacttcgcatttaaaagttttttactggcatttctatttttaatagctttctggggaaaatatcggataatagcttttcaaattatgcattgctagcaactttgactagcgaaaagtatttactaaaaatttttgtaccttcctattttcggcgctctttttaagcaaaggcccttgttttgtagcgttgaagcctcaaattatttccaaaatcacgccccataagcgataagataagagagcgtacaattgttgcccacgatacatacaaggcgagaaaaagtccaaattgccagcattggcggccataaatcgctgcaccattttcttttatcggctgcgtgtgcgtgagtgcacgcctgtgaatcctgttttttccttgaaaccagtttgcgtccgtcttttctttgccagcaaggtgttcacttcaccttactcattcattgtttgtttgcccattgcagccgacgcttgatcttccatctgcagcatccatcatttggaatcgaggcaataatcagcatctaccgacaatcaagcaagccatctatctatcagaagaccaccgggtagtagaacctcaatcatagcgatggcctgtgcaaccctgaaacgagccctagactgggagtcgatgaaccagcggcctccgaagcgccggcgttgcaatccctttggccaggctgggagcaatgcaggtccagcgtcgccatcccgcgacggtcccagcacctcggctggtctgccccacacgcccagcaaccgattcgccaaggatagcaccgaacctagtccgttcagtgagtcgtcgctggccaaaatgtcaccaggttagtaaatcaggtcgatgctggaaaagggacgtcggattccttttatgcatattaccttaatacacctttcttcttttcgaaacacagacaaaatggccgagagcttgtgcaatgagatcaagagactgcacaagcgcaaacagctgccgatcacttcgtcggccttggaacgcatgcaggattcggagtccagcggatcggagatgggtccagagagtccgcgccgcccggacagtccacagaacctgatgcgccacggcgaaaaggccctgttcacgttcaagcaggtgcagctcatttgcgagagcatgatcaaggagcgcgagaatcagctaagggagcgctacgagtccgtgctgaccaccaagctggccgagcagtacgatgcctttgtcaagttcacatatgatcagatacagcgtcgctacgaggcagcgcctagctgtgagttcaagttaccatcggtcatggttatagtgctaattacattatatttttatttcagacctgtcgtaaagctgtgtacacagctgtagcctcagaaagaagaaattaataattgcactacgatcttatgtgacggtagatctaccgcgacaacaacagccctcataaactataacaaacaacaaataaggaaactaaagcaaacgcaaaacaaaccaacaaaaaaaaaaaacctaaaaagcaaaaaacctaaaaacaaacaaaaaaaaaaaaacaaactacaacatacatcgtgtttaatatattttgaaatacacgcgaagaaaacggttatagtttatgcctagatttacatatatatattgtatcggttagcagcaaagggatgaattatttaaaagcaagcaaaaaccacaaaagagagaaaccaacaaaccaacttgttaaatttatgtttttcacataacgcaaattctaaataaaatgacaaatatcaaattatgaactatatgaactataagcacaccgccactgcagacatatacatatgggtgcatccgtagagagaacgattcaatgaaacctcaaacgtagcttcgtacataacagaccgacagaattggcaaatatataatgttaggcacatgatgtagcatataaggtatgatgtaaaacctatcaaactacatatattgtttttttggaaattgtaatttatgaagcgaagcaacaaagataactcacaactcatgaagaacacttttcatagtttatttttgcatattagttgtaacactaaggcgagaaacgaacgcttgaatttgcctattttctcgagtatcgtttgttaattgtttcttcctttgatgcgaattattgcaaagtaatgtaaacacacaaaacaattgaaatgtttcgatttgctttacaccatacaaaaatgaataacgaaaagaaaaggcaaacaacaaaaaaggtataaaagttattcattaagttaaattgaacgctttcttataaaatacgcttgacagaagatgtttcatgttcattgcaatatttt

SEQ ID NO: 9680 - DNA, 1075 bp, DROSOPHILA
tcactctgttcacgtcccgtcacgcaagcatcgtcgtccatttttgctaagaagcgagacgaaaatttgtaaattatatctagcgagtcgccgaggacgaacaactattgacagtgcatttcagtggcctttggaatactgctcaaacaaccagcaagcaataacattacttatatctaaccgaaaacctaaattaatcacccaaactgaagtacggacgtgaatgtaagtgggtatgtgccagcggactagtggcacaataaaaaagtaaataaagcgcgtgtgaagtggtgcagaaagcaaaaaagcagtcggaaggaaaaatcaaaatacgcattaatccgacgcttgatcttccatctgcagcatccatcatttggaatcgaggcaataatcagcatctaccgacaatcaagcaagccatctatctatcagaagaccaccgggtagtagaacctcaatcatagcgatggcctgtgcaaccctgaaacgagccctagactgggagtcgatgaaccagcggcctccgaagcgccggcgttgcaatccctttggccaggctgggagcaatgcaggtccagcgtcgccatcccgcgacggtcccagcacctcggctggtctgccccacacgcccagcaaccgattcgccaaggatagcaccgaacctagtccgttcagtgagtcgtcgctggccaaaatgtcaccagacaaaatggccgagagcttgtgcaatgagatcaagagactgcacaagcgcaaacagctgccgatcacttcgtcggccttggaacgcatgcaggattcggagtccagcggatcggagatgggtccagagagtccgcgccgcccggacagtccacagaacctgatgcgccacggcgaaaaggccctgttcacgttcaagcaggtgcagctcatttgcgagagcatgatcaaggagcgcgagaatcagctaagggagcgctacgagtccgtgctgaccaccaagctggccgagcagtacgatgcctttgtcaagttcacatatgatcagatacagcgtcgctacgaggcagcgcctagctacctgtcgtaa

SEQ ID NO: 9681 - protein, 201 aa, DROSOPHILA
MACATLKRALDWESMNQRPPKRRRCNPFGQAGSNAGPASPSRDGPSTSAGLPHTPSNRFAKDSTEPSPFSESSLAKMSPDKMAESLCNEIKRLHKRKQLPITSSALERMQDSESSGSEMGPESPRRPDSPQNLMRHGEKALFTFKQVQLICESMIKERENQLRERYESVLTTKLAEQYDAFVKFTYDQIQRRYEAAPSYLS

SEQ ID NO: 9682 - DNA, 7862 bp, DROSOPHILA
taacatgtcaatgctgcgatcaatcagattttgggcaaagtaaatatttcagcgggtgttcccaacggatgcccccaaatcctgaccccgagggcgatgacatgaataccgttttcctcttgtacacctattaatacatatttatatgtgccttaaatccgatttaactgcaagtacaaatgtggccaccttttaggttaaagctgcggatttatgggtgacttggtaaggcccattccgcccccaaaatatttcacatacatatgtatgtatgtgcatacatacgtacatataaatttatttttatgcgattccctcttccgtgttaaatgctctcttcctttctatctttttttttttggtggctcgaggtttaatgtctttaatgacctcgactaatgatcgaagctgattgattcagcagaaacgtcgaaggcactctccaagtttgtctgccttatttttagatccccagccttatatgccccattccccactgcccaaccccgtacgaaaaatttaattcccagtccaaggtgtcactgctgcaggcggagaaagcaggacggagagacgcggattgactgacgagtgccgagaaaatcggggaaaactaatgcgacacatgggaaaaatgctcgttgagcgcacaaatgaaagcactttccgttgcctacattcaggctgagaactcaaatcggaaaaccaggaactacaaaaatatacatatttcactctacatatagtaactctgtttattccactgtaacggaataacaacaactgttcgatgagtttttgtctttcgcgcgctttccgtcactcacagtatttcttttcattttacagttatactagagctctctcacgaagtataaattggtttacagttacgaacaagagaaatggcacaccaaaagtaatgtgccatgtgaatggattgaatatatcattgtagtttagtatcactagatacaacagtccctgcaatccttgcgaaatgatttcgccaagcgtgtgtgcagcattatttagtgtgttagtgttaaatagctatatcgcccaagtacaaagtgaattatcagcagcagaagtcgctggagatccgagtgctgcccagctgctgcccagttcctgtcgcaatgggttgaatggcagtagctctggcccggaaatccgtctgccctttgtggacatgatggtgcgccatgagaagccactctttgtgctccgcgaaccggaagaggatctacttttactgctccatggacacgagatttttcagctgcacgtggccactggggagaggcgtctagtgccgcttggttacttggcgggccaggtcagtggtcgcagagctctcggagcagaggttgtggcctggcgggagttcctgctccttgccatcgttctggatgattccatggaggtttaccagttgcccaaggaactgctcctatccgaagatccagccacacaggtgagctttgagcccctccaggagttctcgctgccaggtgcttttctacagctgcaccttttgaaacccagtggagatcaggtgctcctcctagtggcctccaatcacaccagatcacacagcaaatgcaggttgggattggcatacattttcaattaaaaattgattcattattcattcataatattgacgacttcctcacagaacctttgagtggctggacacctactttaatccactcgaggagatcactctacccgccattcgcgttctccaagtggttggtcgtcagccactttatatcatttttggtcgttctttaaagggttcccagtcaaaggtgatataacttttaataatttagatggttcttaattcatttatgtttccctctagctggtgctcacaatctacgagctggatagaaacagccgaatcctgcaacaacgccaggctttgacagttcaggcgcaaagtgtccaagctgttagatttcacgggaggaactgcctcatcgcctgtacttcctctgcatctgcctcgtgtattttcttccgaatggtggatggacaatttgtggtgtaccgaaagcatgctcgaaaagatttgagtttccgtcgattgagtgccaccaaaaagggtcaccttttgattggtgcccgtgccaatggcgaggtgatcgtcttcagctccactcgcctggattgctatagtggatttcaggtggctggagaagcggatccaagtggattacttattcataaaaacttgcacaatgagacctttcttttgctggcctatcgaagatcctcgagtgatctgatccgaactgtgcaattgggtggcgtggaagaaatctccaaccaagtgggcgctgctccagatgaaggtacatttaatataactctgtagtggaaatttgaaactagtgattttacagatctaagtgttgtccaattgcatcgtcacgagtttgaggagtccatcaatgccttacgtggcctcctgctgcgccgtcgttcctctacagaaaacctgagaaacattgtggacatcttaaaacgcaaatcggccatccacctcgacacgccactgcatctagtgcagcaaggacaaataggaagacttcagttggtggacgaacatctgcgcacgcccacccaattaaagcaacgcttggaggaacttcgtcaacgatttaaagcgatccagaccaggcgaaccacacgctcttttgggacaggaaacgagaacgatgagccggagacactcaaagcgcgacgattgcgcgtgggcaatcttatctacaagggacagctaatttcaggcaagtatgggaattcaggaatagaatatgatataaatcttttttttcttcctaatttacaggccacattttggataactcaaaaccacctatgttgaccatcagaaacagtcctttgcagacgaaaaagcttagggtaaatcaattggttactccccaagatttccgcaactccagtggtgcccagattgcgcctgaggaaaccagtggcagtgaatgtgtagttcgtcatctccgagtggaacagataaacggagtgcagtggaacgactttttggactcgctcttcctgcgcagtcgtgacacttcgatagaaggacgcttggttatgcaatcgcgagtccgggtgaacagtctaaagacacctctgctcaacggactcgtggtggatcgtctctttaatctgcggcgtgcccaggtgatcagttcgaatatctacatgtccgccttctttgctccgcgtttggaggctcagcaagtaaatggacttgactttgcccacgatgtacttcatcgcggtagcaatgatacatggataaaaagttagtgtcctccttgatatattccattaaatcatttaacaaatccatatttttcagctcctgttcgcatcaatcagatgagtgtttcgggtgacatttttgtgggcaatacgagcaagtggcagccacagcccagacaactcgacgatccaatggaacaacgtcttcaacagtactacacgggcagggtaaccatccgcggatccctgacggtcacaaatgtcctgcgagacacggcaaactcacttatagtgctcggaaaccaatctctcgccagaaaagatatacaatctacgtaccttcttgatcagacgccacaggttgagattcaacttcatttaattcactttaatgacaatagtctttccgcagaacctcactaacttgacctttggacatgccagagttagtgttccctcaatgaccaccagttatgttgacggtcatcctgtgagggatcatctcctaagcggaggacagcagaaccaacatactcacccaaataacactctacacattatctttatgaatgcaaccatactgggcgatgttatttgcagggattacagttcccgtttggcggagatcgcaaaagatgcagtgagtcatggagacgctgttaatatcacggggcacaaacacttccaggcacctttgactgttcaagcacttcaagccaatgaaataaacggagtacctgttagtgaaatagtggtgaaatcaaacaccacccaaaactttacgggtacaaagacctttgcccgtgtggtggtggcgaatgatatcaacgttcatgatcatttgaatgtgagtcatcttaatggattgccattgcaacagctgcttggtcacgatatcagcctgcaacgcctcgaactaaccgaaaccccacatctggagaatcttcattttcggcgacttaatggattgcccttcgatgaactgctgtccaaaatttcggaagatggtgaacagcccctacttcttcacaagcaactattgatcgaaggaaatgtacgatttgacaaggctgtccaagtgcagaacattaatggaatccaatgggacgagtacctagatcgcctggtgagatctgattctaacgcggaaatacggggtaaaaagacattcatggccgatgtccaaataaatgatgccctgcaaagtcctcacatcaataatttggatctaagttccctgctcgacaacaccttactgcgaatgacaccccagcaaatcagtggtgcttacactttcgaccgcatgatggccaccaatgtggatgtaaatcgaataaatggggtacccaaggaggaatttatagacacacgcaaagacttagaactaaaaggagatctttacctaaagcaactgaacatcaatggcagcctaaagtgtccctttgtcaatgaggcagttttaaatgatctcaagcaacgagtggagcaagtgcagcaacttccctggcggaatttgatagtcaccggcgatgctctatgggatggtgaagagcagtcccaatcccagctagactacctacgccagcatgcagtcaggagagtgggcaaccagaccattgccggacacgttctactgaaggaaccctacttaaaggatatccaaagtaagcattccctgccaattgatcttaacttcactcaattggccgaagatgccctacttcgccggagccccacaaacgaaacccaggtgataacagctccgcaagagctacagggattagttagagctaatactctacacttggagcaggatgcacactttgagctggtaaacggaatcgatatacgacgattcaatgcctcactgtaccgcctctccagtggagaagccattgcagcggatcttcactttcatcaggctccaaaaataggcaaacttcaactggagtatccagaagtgaatggagctccgatacaaagtatataccagcagggcaaggggcaatcctggccacccgtaacgttcaagaacctctttgtcgaacaggacctgaatctgaaaaccgtaaacaacatgaatctggactactttctacaacatcgcattcccttaaagggagacgcattggaggtattcggttcactgacttttgagcaccttcagctgagtggaaagcctcttctacgttctatcaatggcattcaattggataacttggtgtttcggcatagcaatcggacgcagagcatcacgggtgccaagacttttcgtggaggagtggagttcactggacccggtcatgtgatgaatctgaatggacgtgagcttagcgaaagtttcaggggcagcatctttcgaaataaggactacaacatcgatagtctagttctggacaaagctctcttcccaggtggactagttttagcaggacttcaaagtcaaattcccaatcgaatgcgagcgacggaagtgcaaagcaatccgttagaggagtttcaagaacttctagcattgggtaatcaaacttcgcctaggaggctactttacctggatcacgacaccgaaagtctggagtctacttgggtaaaaggcccttttaggggatcttcggaactgcaggtgagcctgcccttgggttattctgctccatgtcagcgtaggactttacaagccaagctcctgatccacgaacgtcgcgtcctcctggccaactcgagtgtgtccaatcaactgatgagacttcactccggagatatccgggtgaaggtgcagaaccactgtcatcgcccagcacgaagattgcgcagcaggatcagaattagttgccgtaatgaaacgcatacgctgggaatgcgtcaatcagtggaagccatggaactgctggaaatgggggaaatggtgctgctgctcttgggcaccgaggaggaagttcgtgtcctgcgtctgaagaggagcaactgtagtctcaccgattggcaatccgtgctaccagcagatgggcgccttatgaagttggttcgaatgggggtagagtcccgacaggatctaatactcaccagtggcatgagtaatcatcgtcctgtcctggccatccattatagggatcccttaaatcataacttcaaaatgcttcagctgatccagggctcatatgacctggcagagatgcagggaaaccaacttctggtcagctgtttgggttgtcgacacatagctatctttaaacggtactctcattccgcggaaattctgtttgagcccatccagcagttgagcttccaggagcgcattcaacaactaactccattcaaagttggaaatgagcaatatctattggtagtaacgcagccggaggaagaacacttttacctcttcagctataatgaagtaggcggttggcaacagcgtacgtttggcattaagaaacaggaccagtgggcgtggtcactggtgaaatctggtcaaatgcttgaagccgccgagacccctattctgctgctctgcggaaagaaacgggaatgtagtctagtgaaagccctactgggctaaaatctgtatcatattgtaatctatgtgtatttgtactgtacataattatgtttattctatgtatcttaataaattgtttatttttgttgaatcaaaattgtattatttctttgggaacgcaaagttaacatatatcattggacttatatcttactagcacatctttacagcatagtttaaaaatgtcaggtgctaatatggcttaagaagattattccactcattggatcggatcgagattatcacactcctcggcattacactactgaaaggccttggatatcttacttggctagtttcccccatgtttcagatctcaaggcatcttaggttgaaaagctctttctgctgatggtgatcacgtagccggtgaataccaagaatcccaagatgccccagatggagctattttgattgccaccgtccccaatcttggccagtatccactccacatggctagccacgtcctcgaaggctccgtcgatgcttcttaggcccaacaaacgatcccgttccgtcagcgtggcaccggcatccatgtaaagccggccacgaatgtagttgctggttttcggctggacacaaatccttggcgatttactctgatgctgatggcaggatgtgtgagtggcattcaatgtgaccagatcgtgcagctcgcgaatatcgccatcatagccccaggtgttaatctgtagaagattatgatgatccgagtccaggatggaagtggctccaggagtaggtagaccaattgcttgaatatatggaagattctcaggcacatccttgtccagcataagaatggcaagagccaggtcctttggaggctggtggatgtgggtcactccgaatacgagtgcctgctcattgggcgcaaatctctgggggcttccgagcacaactcgcagttctgacggatggtagtatgactttttcacttggctgttaaggtgaattaaattgtgagatagcagctcgagaataaaaagatacaaat

SEQ ID NO: 9683 - DNA, 5382 bp, DROSOPHILA
atgatttcgccaagcgtgtgtgcagcattatttagtgtgttagtgttaaatagctatatcgcccaagtacaaagtgaattatcagcagcagaagtcgctggagatccgagtgctgcccagctgctgcccagttcctgtcgcaatgggttgaatggcagtagctctggcccggaaatccgtctgccctttgtggacatgatggtgcgccatgagaagccactctttgtgctccgcgaaccggaagaggatctacttttactgctccatggacacgagatttttcagctgcacgtggccactggggagaggcgtctagtgccgcttggttacttggcgggccaggtcagtggtcgcagagctctcggagcagaggttgtggcctggcgggagttcctgctccttgccatcgttctggatgattccatggaggtttaccagttgcccaaggaactgctcctatccgaagatccagccacacaggtgagctttgagcccctccaggagttctcgctgccaggtgcttttctacagctgcaccttttgaaacccagtggagatcaggtgctcctcctagtggcctccaatcacaccagatcacacagcaaatgcagaacctttgagtggctggacacctactttaatccactcgaggagatcactctacccgccattcgcgttctccaagtggttggtcgtcagccactttatatcatttttggtcgttctttaaagggttcccagtcaaagctggtgctcacaatctacgagctggatagaaacagccgaatcctgcaacaacgccaggctttgacagttcaggcgcaaagtgtccaagctgttagatttcacgggaggaactgcctcatcgcctgtacttcctctgcatctgcctcgtgtattttcttccgaatggtggatggacaatttgtggtgtaccgaaagcatgctcgaaaagatttgagtttccgtcgattgagtgccaccaaaaagggtcaccttttgattggtgcccgtgccaatggcgaggtgatcgtcttcagctccactcgcctggattgctatagtggatttcaggtggctggagaagcggatccaagtggattacttattcataaaaacttgcacaatgagacctttcttttgctggcctatcgaagatcctcgagtgatctgatccgaactgtgcaattgggtggcgtggaagaaatctccaaccaagtgggcgctgctccagatgaagaaaacctgagaaacattgtggacatcttaaaacgcaaatcggccatccacctcgacacgccactgcatctagtgcagcaaggacaaataggaagacttcagttggtggacgaacatctgcgcacgcccacccaattaaagcaacgcttggaggaacttcgtcaacgatttaaagcgatccagaccaggcgaaccacacgctcttttgggacaggaaacgagaacgatgagccggagacactcaaagcgcgacgattgcgcgtgggcaatcttatctacaagggacagctaatttcaggcaaaaacagtcctttgcagacgaaaaagcttagggtaaatcaattggttactccccaagatttccgcaactccagtggtgcccagattgcgcctgaggaaaccagtggcagtgaatgtgtagttcgtcatctccgagtggaacagataaacggagtgcagtggaacgactttttggactcgctcttcctgcgcagtcgtgacacttcgatagaaggacgcttggttatgcaatcgcgagtccgggtgaacagtctaaagacacctctgctcaacggactcgtggtggatcgtctctttaatctgcggcgtgcccaggtgatcagttcgaatatctacatgtccgccttctttgctccgcgtttggaggctcagcaagtaaatggacttgactttgcccacgatgtacttcatcgcggtagcaatgatacatggataaaaactcctgttcgcatcaatcagatgagtgtttcgggtgacatttttgtgggcaatacgagcaagtggcagccacagcccagacaactcgacgatccaatggaacaacgtcttcaacagtactacacgggcagggtaaccatccgcggatccctgacggtcacaaatgtcctgcgagacacggcaaactcacttatagtgctcggaaaccaatctctcgccagaaaagatatacaatctacgtaccttcttgatcagacgccacagaacctcactaacttgacctttggacatgccagagttagtgttccctcaatgaccaccagttatgttgacggtcatcctgtgagggatcatctcctaagcggaggacagcagaaccaacatactcacccaaataacactctacacattatctttatgaatgcaaccatactgggcgatgttatttgcagggattacagttcccgtttggcggagatcgcaaaagatgcagtgagtcatggagacgctgttaatatcacggggcacaaacacttccaggcacctttgactgttcaagcacttcaagccaatgaaataaacggagtacctgttagtgaaatagtggtgaaatcaaacaccacccaaaactttacgggtacaaagacctttgcccgtgtggtggtggcgaatgatatcaacgttcatgatcatttgaatgtgagtcatcttaatggattgccattgcaacagctgcttggtcacgatatcagcctgcaacgcctcgaactaaccgaaaccccacatctggagaatcttcattttcggcgacttaatggattgcccttcgatgaactgctgtccaaaatttcggaagatggtgaacagcccctacttcttcacaagcaactattgatcgaaggaaatgtacgatttgacaaggctgtccaagtgcagaacattaatggaatccaatgggacgagtacctagatcgcctggtgagatctgattctaacgcggaaatacggggtaaaaagacattcatggccgatgtccaaataaatgatgccctgcaaagtcctcacatcaataatttggatctaagttccctgctcgacaacaccttactgcgaatgacaccccagcaaatcagtggtgcttacactttcgaccgcatgatggccaccaatgtggatgtaaatcgaataaatggggtacccaaggaggaatttatagacacacgcaaagacttagaactaaaaggagatctttacctaaagcaactgaacatcaatggcagcctaaagtgtccctttgtcaatgaggcagttttaaatgatctcaagcaacgagtggagcaagtgcagcaacttccctggcggaatttgatagtcaccggcgatgctctatgggatggtgaagagcagtcccaatcccagctagactacctacgccagcatgcagtcaggagagtgggcaaccagaccattgccggacacgttctactgaaggaaccctacttaaaggatatccaaagtaagcattccctgccaattgatcttaacttcactcaattggccgaagatgccctacttcgccggagccccacaaacgaaacccaggtgataacagctccgcaagagctacagggattagttagagctaatactctacacttggagcaggatgcacactttgagctggtaaacggaatcgatatacgacgattcaatgcctcactgtaccgcctctccagtggagaagccattgcagcggatcttcactttcatcaggctccaaaaataggcaaacttcaactggagtatccagaagtgaatggagctccgatacaaagtatataccagcagggcaaggggcaatcctggccacccgtaacgttcaagaacctctttgtcgaacaggacctgaatctgaaaaccgtaaacaacatgaatctggactactttctacaacatcgcattcccttaaagggagacgcattggaggtattcggttcactgacttttgagcaccttcagctgagtggaaagcctcttctacgttctatcaatggcattcaattggataacttggtgtttcggcatagcaatcggacgcagagcatcacgggtgccaagacttttcgtggaggagtggagttcactggacccggtcatgtgatgaatctgaatggacgtgagcttagcgaaagtttcaggggcagcatctttcgaaataaggactacaacatcgatagtctagttctggacaaagctctcttcccaggtggactagttttagcaggacttcaaagtcaaattcccaatcgaatgcgagcgacggaagtgcaaagcaatccgttagaggagtttcaagaacttctagcattgggtaatcaaacttcgcctaggaggctactttacctggatcacgacaccgaaagtctggagtctacttgggtaaaaggcccttttaggggatcttcggaactgcaggtgagcctgcccttgggttattctgctccatgtcagcgtaggactttacaagccaagctcctgatccacgaacgtcgcgtcctcctggccaactcgagtgtgtccaatcaactgatgagacttcactccggagatatccgggtgaaggtgcagaaccactgtcatcgcccagcacgaagattgcgcagcaggatcagaattagttgccgtaatgaaacgcatacgctgggaatgcgtcaatcagtggaagccatggaactgctggaaatgggggaaatggtgctgctgctcttgggcaccgaggaggaagttcgtgtcctgcgtctgaagaggagcaactgtagtctcaccgattggcaatccgtgctaccagcagatgggcgccttatgaagttggttcgaatgggggtagagtcccgacaggatctaatactcaccagtggcatgagtaatcatcgtcctgtcctggccatccattatagggatcccttaaatcataacttcaaaatgcttcagctgatccagggctcatatgacctggcagagatgcagggaaaccaacttctggtcagctgtttgggttgtcgacacatagctatctttaaacggtactctcattccgcggaaattctgtttgagcccatccagcagttgagcttccaggagcgcattcaacaactaactccattcaaagttggaaatgagcaatatctattggtagtaacgcagccggaggaagaacacttttacctcttcagctataatgaagtaggcggttggcaacagcgtacgtttggcattaagaaacaggaccagtgggcgtggtcactggtgaaatctggtcaaatgcttgaagccgccgagacccctattctgctgctctgcggaaagaaacgggaatgtagtctagtgaaagccctactgggctaa

SEQ ID NO: 9684 - protein, 1793 aa, DROSOPHILA
MISPSVCAALFSVLVLNSYIAQVQSELSAAEVAGDPSAAQLLPSSCRNGLNGSSSGPEIRLPFVDMMVRHEKPLFVLREPEEDLLLLLHGHEIFQLHVATGERRLVPLGYLAGQVSGRRALGAEVVAWREFLLLAIVLDDSMEVYQLPKELLLSEDPATQVSFEPLQEFSLPGAFLQLHLLKPSGDQVLLLVASNHTRSHSKCRTFEWLDTYFNPLEEITLPAIRVLQVVGRQPLYIIFGRSLKGSQSKLVLTIYELDRNSRILQQRQALTVQAQSVQAVRFHGRNCLIACTSSASASCIFFRMVDGQFVVYRKHARKDLSFRRLSATKKGHLLIGARANGEVIVFSSTRLDCYSGFQVAGEADPSGLLIHKNLHNETFLLLAYRRSSSDLIRTVQLGGVEEISNQVGAAPDEENLRNIVDILKRKSAIHLDTPLHLVQQGQIGRLQLVDEHLRTPTQLKQRLEELRQRFKAIQTRRTTRSFGTGNENDEPETLKARRLRVGNLIYKGQLISGKNSPLQTKKLRVNQLVTPQDFRNSSGAQIAPEETSGSECVVRHLRVEQINGVQWNDFLDSLFLRSRDTSIEGRLVMQSRVRVNSLKTPLLNGLVVDRLFNLRRAQVISSNIYMSAFFAPRLEAQQVNGLDFAHDVLHRGSNDTWIKTPVRINQMSVSGDIFVGNTSKWQPQPRQLDDPMEQRLQQYYTGRVTIRGSLTVTNVLRDTANSLIVLGNQSLARKDIQSTYLLDQTPQNLTNLTFGHARVSVPSMTTSYVDGHPVRDHLLSGGQQNQHTHPNNTLHIIFMNATILGDVICRDYSSRLAEIAKDAVSHGDAVNITGHKHFQAPLTVQALQANEINGVPVSEIVVKSNTTQNFTGTKTFARVVVANDINVHDHLNVSHLNGLPLQQLLGHDISLQRLELTETPHLENLHFRRLNGLPFDELLSKISEDGEQPLLLHKQLLIEGNVRFDKAVQVQNINGIQWDEYLDRLVRSDSNAEIRGKKTFMADVQINDALQSPHINNLDLSSLLDNTLLRMTPQQISGAYTFDRMMATNVDVNRINGVPKEEFIDTRKDLELKGDLYLKQLNINGSLKCPFVNEAVLNDLKQRVEQVQQLPWRNLIVTGDALWDGEEQSQSQLDYLRQHAVRRVGNQTIAGHVLLKEPYLKDIQSKHSLPIDLNFTQLAEDALLRRSPTNETQVITAPQELQGLVRANTLHLEQDAHFELVNGIDIRRFNASLYRLSSGEAIAADLHFHQAPKIGKLQLEYPEVNGAPIQSIYQQGKGQSWPPVTFKNLFVEQDLNLKTVNNMNLDYFLQHRIPLKGDALEVFGSLTFEHLQLSGKPLLRSINGIQLDNLVFRHSNRTQSITGAKTFRGGVEFTGPGHVMNLNGRELSESFRGSIFRNKDYNIDSLVLDKALFPGGLVLAGLQSQIPNRMRATEVQSNPLEEFQELLALGNQTSPRRLLYLDHDTESLESTWVKGPFRGSSELQVSLPLGYSAPCQRRTLQAKLLIHERRVLLANSSVSNQLMRLHSGDIRVKVQNHCHRPARRLRSRIRISCRNETHTLGMRQSVEAMELLEMGEMVLLLLGTEEEVRVLRLKRSNCSLTDWQSVLPADGRLMKLVRMGVESRQDLILTSGMSNHRPVLAIHYRDPLNHNFKMLQLIQGSYDLAEMQGNQLLVSCLGCRHIAIFKRYSHSAEILFEPIQQLSFQERIQQLTPFKVGNEQYLLVVTQPEEEHFYLFSYNEVGGWQQRTFGIKKQDQWAWSLVKSGQMLEAAETPILLLCGKKRECSLVKALLG

SEQ ID NO: 9685 - DNA, 3433 bp, DROSOPHILA
tccgttctcagctctatctgagctttttggtcttcgatgctctcgcagagaatattatgtttatttaatataactgcataagcttggcaagtgatgagaatacaacttttaattggttaaatattctattttattattatattaatattttaccatattcatgctttgggcacatcctatctgaggtcctctaataatcaagatggaagttcattaaattttataatatttaagaaatgctggttttgcctatgctatatgcctttaagcatcagcactaatcagagctgctaataaatatgtatgtatgtgtaatgataacactttagataactgcgcattttctgcgagtttccatcgaacttagtttatatatcaatgttataatatacattaaagataaaattggtaacaattcctctaaaaatgccgtttaagccataaaactattgataacattttgactatataaggtagacataaaacgcatttaatcgttatatgattattttattcgattcctatcaaaagctctttgatattaaagcattcttcgaatagatttggagtaaagagcttagttatcaatccactttacatacatatatgtatatgtgtcagccacttaaacggtagtcaccgtctagtaatcgaatatggatgtttatcccattaagcaaaacaaagagacttcccccattagttttccgcctgaatccaggttgcgcttgccacatccgcggagacacagatctcagctggtagtgccgcccaattgcgcaaccaatggatccgtgtctcaatattaagttcactattgcaacatccgtgcggtagcgaaccagaggccccagaagcaatcgacaccaatcggatcgcggcggatcgacttgcgcatttcgaggtcattgtgcagaccgggtggtgggtggcgcctcgagttacccgcaggtggtataaaacacccaacgaggagtcactgcagcatcagttccacaagagcaatcaaaagaagaggatgcactgcttcacctggacgattctgggcggcctgttggcccttacctcagctgcaggattgccccaaaggccgagcagtggttaccaggagcaagatacggccagagccttctactcttatggctaccgggatgagaatgcggccagggctgagtactcctccagagatggcacgtcccgaggattctactcttatgtggatgccgatggaaaactacaaacggttcgctatgaggccaatggcgttcagggtttcaaggccgaggcgagtaaccagccccaagcacccgtggacaagggaaaggctccattgccggtaaccgatacggaggaggtgcagcaggctcgtctaaatcacctgaatgctttgagggaagccagggagaaagctttagccaccagtttgcgtgaggaggcggacagaaggcagcaggagcagatcagaaacaacaatgaggatcagcagtcgggggagcagagtctgaccgatgaggatgcggcgatcttggagagagtacgagccgagctatcagccatgttggccgatcgtcagcgagagcttaatctgcctaggaacagggatgaccgggagcagcgagagaagcaggaaatccgacaggatcagaggaaggaactgagacaagatctgagacaggagcagaggcaggatcagcgagaagatcgacgacaagatcagcgagaagatcgacgacaaaatcagcgagaagatcgacgacaagatcagcgagaagagaggcgagaggatcagcgagaagagaggggagaggatcagcgagaagagaggcgagaggatcgtcgtgaagatcgtcgagaagatcgccgtcaggacctaagaattgaccaagaatcccgtcaagatctgctccaagacctgcgtcaagatctgcgccaagatctgcgtcaagaactgcgccaggacctgcgccaagatcagtcccgaaaccaagaatctttgcgagactcgagtcaaatccgggagaatgctcgtcagatctcatctgatcgcgatggcgatgatctgcgcctgcgcaccgtctactccttggctgatctaagctccagcagttacctgaaactcggcgacttggccagtgccgagaaactgctcgaggatcgtttggacaacagtgatctccgtgtgccaataggtgcctactacaccctggtttctcccaacaccaagtacagtgttaccacgcccacggaactgcgaaccctgcgcccagtggcccttagtcgcagtttgttggtaagcaaacgcaattaatggcctgatgatgcggatcgtggtgatggatcaaagccggctaatgatcgtggaacaaagtgaggagtgactatgacgtgtttcctaagaataaatgcaagacagagcaccattgtgccaaaagtaaatttttttccattttttctttggtggcttatactgtgaaaagtgtgaatatctttatcttatctgaaaatttaaatattagaaatgtgattgatggcttaagtgatttctaagccatatacttgtgtctttttcaaggattttctataataatgaatctgagatataatttaaatttccgatttgcatcatttattgctcaacaattaacatattttttgcgaagacgaccaatccaaagattagactactggcaggtagttcctcgatggaacttgggcctgcgtcttggtgtggtagttgtacacgaatcctgtggtggtgggctggtagacatatatcggctgtgaacgaacagcgatgggagttggattcggtatcaccagaactttcttctcggcgagcaacttgttgcgcagcttctcggcttcgaaacgcttgaagaatgcaaccttagcggcggccacctcgggagtgtcccgaacaggctgtggacccacggagtagtctccggccaacctcaatttggcctggttatgggcctccagatgctgtgttcgcagtgcagccacttcaggggtttcctgattggcctgctgattgggcagattggaggttacatggaagccctcggcatcggccacatagtccacggtctgggtttcgccatttgcatcgatgtgggagaaggtaccccggatcacaccatccacggtgcgggtctcgtgcttggaatacagtggtgccatgtaaccataggcgtactggccatgctcatcctggtggtgatactgactgatcgtatccgaagttggtgggggaccgtactccaaggttggtgaaccgacggccaaaccgatggtggtacaaatcaggcaaagattaaggaagtacatcttctcaagcgtggctgtttaagataattgagggttttttttaaatttttttaaggcgctgctagtgtggtgaactagtactcgctctagagaactctgtgct

SEQ ID NO: 9686 - DNA, 1433 bp, DROSOPHILA
agcaatcaaaagaagaggatgcactgcttcacctggacgattctgggcggcctgttggcccttacctcagctgcaggattgccccaaaggccgagcagtggttaccaggagcaagatacggccagagccttctactcttatggctaccgggatgagaatgcggccagggctgagtactcctccagagatggcacgtcccgaggattctactcttatgtggatgccgatggaaaactacaaacggttcgctatgaggccaatggcgttcagggtttcaaggccgaggcgagtaaccagccccaagcacccgtggacaagggaaaggctccattgccggtaaccgatacggaggaggtgcagcaggctcgtctaaatcacctgaatgctttgagggaagccagggagaaagctttagccaccagtttgcgtgaggaggcggacagaaggcagcaggagcagatcagaaacaacaatgaggatcagcagtcgggggagcagagtctgaccgatgaggatgcggcgatcttggagagagtacgagccgagctatcagccatgttggccgatcgtcagcgagagcttaatctgcctaggaacagggatgaccgggagcagcgagagaagcaggaaatccgacaggatcagaggaaggaactgagacaagatctgagacaggagcagaggcaggatcagcgagaagatcgacgacaagatcagcgagaagatcgacgacaaaatcagcgagaagatcgacgacaagatcagcgagaagagaggcgagaggatcagcgagaagagaggggagaggatcagcgagaagagaggcgagaggatcgtcgtgaagatcgtcgagaagatcgccgtcaggacctaagaattgaccaagaatcccgtcaagatctgctccaagacctgcgtcaagatctgcgccaagatctgcgtcaagaactgcgccaggacctgcgccaagatcagtcccgaaaccaagaatctttgcgagactcgagtcaaatccgggagaatgctcgtcagatctcatctgatcgcgatggcgatgatctgcgcctgcgcaccgtctactccttggctgatctaagctccagcagttacctgaaactcggcgacttggccagtgccgagaaactgctcgaggatcgtttggacaacagtgatctccgtgtgccaataggtgcctactacaccctggtttctcccaacaccaagtacagtgttaccacgcccacggaactgcgaaccctgcgcccagtggcccttagtcgcagtttgttggtaagcaaacgcaattaatggcctgatgatgcggatcgtggtgatggatcaaagccggctaatgatcgtggaacaaagtgaggagtgactatgacgtgtttcctaagaataaatgcaagacagagcaccattgtgccaaaagt

SEQ ID NO: 9687 - protein, 429 aa, DROSOPHILA
MHCFTWTILGGLLALTSAAGLPQRPSSGYQEQDTARAFYSYGYRDENAARAEYSSRDGTSRGFYSYVDADGKLQTVRYEANGVQGFKAEASNQPQAPVDKGKAPLPVTDTEEVQQARLNHLNALREAREKALATSLREEADRRQQEQIRNNNEDQQSGEQSLTDEDAAILERVRAELSAMLADRQRELNLPRNRDDREQREKQEIRQDQRKELRQDLRQEQRQDQREDRRQDQREDRRQNQREDRRQDQREERREDQREERGEDQREERREDRREDRREDRRQDLRIDQESRQDLLQDLRQDLRQDLRQELRQDLRQDQSRNQESLRDSSQIRENARQISSDRDGDDLRLRTVYSLADLSSSSYLKLGDLASAEKLLEDRLDNSDLRVPIGAYYTLVSPNTKYSVTTPTELRTLRPVALSRSLLVSKRN

SEQ ID NO: 9688 - DNA, 2758 bp, DROSOPHILA
gtattgcggaaatgaatggaagtcgttgttttcattcaattggcttttagtttattagccaaatgaattgcaatcaaattgctcttgaattaatgcaaatcatgaaagtgcataataatttattagctacaaattagcattggaggctcttgcctttcctctctttcggtttcgattgcaattgaggaggagggaacaaactgaggcgtaaaattaattatgtttgtgtggaagtcgattgtcaggcagctgacatagagcgtaattaatcaatcgcagctgattgaaaagtgttctttatttacctgtaattgattgagtctatagaatacggaattcctgtgtggcattttcaccaagaaaccaaaaaacacgttgacaattgattagaaattattgttcaagctcaagactaagtacttcctttaattatcatgttttgtaaacacaatttttgagatatattgcaattatttcaaactcgtaaccttaagcagcagaaagttcgagtggagtcttgattgttatgatttcgaagtaataacaacgcttgttgttctgataccgatgctgattctgattctgaatcatcgggtcaagtttaaagtcacgtcaagatgaaagtattattgggcattgagctgctgctgctgactgacttttggacaatcgaaatcaaatctctattttgctaataacaaatttgacattttggaaagtaatcaaacaaaatgtggtttgcctttaaacgaaaccgaacgagagcggcaatttcaatttcatgccgtttattaaacctatgtctgaatgactgaatacctgaacagcggcaatctgtctgctcttttaatgagaaactacagagagagcgatccgatcagggaactgagcaactggcagttggcacttgattgcctcgatctcgactagagtcggccagaagatataaataaggaaaggcaacgcacgcgcgtattaattgttggctgttctaaacggccagaagtgcatcgcatattacgcatacgcagcgtggccagtgataagtgactaaaactggctcaaaggtagcagttaaaagtgacaatggatcaaaaaacaacgggactacgcgaaaactatggccatcgacgtcagcccgccttgggcaaggccatgccagtgacagctcttttgctgaatttggagtcaaatcctttggattacagtaggaatgacattggagctgagctcctcgaagatgatgacaagccaccgcaattgtttagcgttacggatgagccaccctcgcccaacgaagaggattacaagccacccaatcaccatgaggatgatggaaaactggctggtgaacggcacagggagataccctgttcgaattgcctgaaaacggcacctggccatctgatcgatcgccagtcggccatcaatgagatgtgccagcgcctgtgtggtcccgaatgcagacgtccacaaggtctcacattggatggtgtgcgtcaggatttcctcaggcagtacgaaatcgcggaagctgtggccaagacctcggccatgacctccaccgttcagatgaaacagcgcctggcggcgcgaaaactggaattcgaaaaggaaatggaaatggacgaacagctgggcgtggccagcccccgtaacgatatcaatctcggccagagcagtaccgtcgctgcaactggaatgggagagtttgagttcgagccgcctcgcgatttgctcttgtatctggtgaggtgagatacttgtttcttacaggggccatgccatatataccagataccataaccataggctgtagcgcggctgtcgcgcttataaatcaagttcatggctggcagcgtgtcaagtgttcttagccattggccaggcctcaaagccacttagcggcaatcaacaataacgacaaaaacaacaacgacaacaacaacaacagcaccaacaagcgatccccgagagcaacaaaaactaaccttgcacaatttgcgcgaaagtgatcatgacaaaactgacagtataaaaactgagagtatataggtagtcaagtatatatgtatgtagctgtgtcccaggaaaggcggaaaaacgacagattcaataaaaatatatagtctagcagcggcactatcagaatatttgtgatcaacttatttattgcaattctaatgagttagttcctagtaccaatcatgggctatccatgggctttagtatcgatattattggcttatctaacgcaaagctgaaaacttaatgcctttccattaagtgataagtcatgagtgacaactaaattgccattatatcagtgtaaatgaactaaaaagattttatcaatgaacgcaataattgcgtttgggtcacgaaagtgtttcggcacgtgcctaatttgattaaatcaagttcaaaattccgcaacgagattggtaggcattttgcaagtgacgttcagcgaagagaatgcaaatttaattatttactaaacattaacctcgtaatcattctacctttctaggaaacacagatggggccgcgtctctttgacattgccatactgacactaaatataaaacatttcaagttatcctaatatctaaacaagaaaccaagaatcccagttcaaaagtcagcagccgaaagatagcaaactgaaagtgatattcgagttgggacaagcgttaagtttgcacaaaaagttcaaaatggagtttctaatgaaaacgtcgcgtttgatcgtcac

SEQ ID NO: 9689 - DNA, 758 bp, DROSOPHILA
cagaagtgcatcgcatattacgcatacgcagcgtggccagtgataagtgactaaaactggctcaaaggtagcagttaaaagtgacaatggatcaaaaaacaacgggactacgcgaaaactatggccatcgacgtcagcccgccttgggcaaggccatgccagtgacagctcttttgctgaatttggagtcaaatcctttggattacagtaggaatgacattggagctgagctcctcgaagatgatgacaagccaccgcaattgtttagcgttacggatgagccaccctcgcccaacgaagaggattacaagccacccaatcaccatgaggatgatggaaaactggctggtgaacggcacagggagataccctgttcgaattgcctgaaaacggcacctggccatctgatcgatcgccagtcggccatcaatgagatgtgccagcgcctgtgtggtcccgaatgcagacgtccacaaggtctcacattggatggtgtgcgtcaggatttcctcaggcagtacgaaatcgcggaagctgtggccaagacctcggccatgacctccaccgttcagatgaaacagcgcctggcggcgcgaaaactggaattcgaaaaggaaatggaaatggacgaacagctgggcgtggccagcccccgtaacgatatcaatctcggccagagcagtaccgtcgctgcaactggaatgggagagtttgagttcgagccgcctcgcgatttgctcttgtatctggtgaggtga

SEQ ID NO: 9690 - protein, 223 aa, DROSOPHILA
MDQKTTGLRENYGHRRQPALGKAMPVTALLLNLESNPLDYSRNDIGAELLEDDDKPPQLFSVTDEPPSPNEEDYKPPNHHEDDGKLAGERHREIPCSNCLKTAPGHLIDRQSAINEMCQRLCGPECRRPQGLTLDGVRQDFLRQYEIAEAVAKTSAMTSTVQMKQRLAARKLEFEKEMEMDEQLGVASPRNDINLGQSSTVAATGMGEFEFEPPRDLLLYLVR

SEQ ID NO: 9691 - DNA, 2447 bp, DROSOPHILA
tgagtgttgactgccgcccaagcaggataaattgtgggcgacggggtggagctgagctgttcgcttggcttattatgctattgcatgcaaggccgcaccaaatcatgacgaatgacaatccattgtcccagaaagtaaaccatcgctttgaaacaaaagtaatagcagtgaaaataccttgaaaagaaataaaaactttactgcaaataataaaccgtagggagaactacatcacttgacttttttttatggccagatactatacttttgtgggcgtgagtgttggacagataaatattcacatatttgcttgcacaaaaatttgcaaaacgtgccatcgtgtacaattgtatttgatgttattgtaggggtcttgttgggtttggctcaattgtttgcccattcatataccacacaaagaatatctagattctatagacgatgtcttttcctggccattatttgacttgctcccatttctcgttttgtttatttagttgcccgattccggacaaaaagaggaaaagacaacacccctttgtaggcgtcctacgctcataatgtgtttattcgtagtgtttatacaataaattttacctttttggctaacaaaaagggtaacaggtgccttggtattgctcatgcgcaccgttggccgacacgaatgcataatagcctgcaaacaaaaaatacgtaaaataaaaagcacttaaaatggtatttgctttgtttttgcttgcagaatttatccttcacttttggccacaacatgctggcaggcaattcggaggtgagctctaattcatttctattccgttttggcttggcattgcatgcaactttcggttttttgtatacatttttttatttttttgtagcgctgttccgacttcatactaaccttatcgcactcaacaggcaacagggagacgataacctcgagtggctcgtaaataatagcaggtgagaacacaaataactcacattcgcaatcagtcagtccgacacctacgacatgaactgggctaccataataattgcaattatcctcctgctgccagccagccagcaaaggtaactctttagtttaattacaaattacaattacctacaataaatacgttcgaagctttattagatccgaaagtgtggaggtcaaagtgctgtcttacaatcccacatacgatttctggtttttcatgccaactggcagacccaaggtggttactcagaatgtacagaatgcatattggtctgctcggacaaaaggaggtgtttgcttcacagatctgtggttctactgcgcaactggcatcgaaatagaggagtaaatatcttggcaacaaaggaacacaaactatgtatatttgaagatttgttacacccattcattaaaacaagaaaataaataatctgcgtaacgtttacacgaaaacctaaatcataactatgtgctttatcgggaatgttaaagtcgtaaaaatgtaaaacatttgtgttatcttaattacgttgaaaagtaaactttttcgtaagaaccaaattctgcttccatttatcttaaggaatcggaaaagcaccaaaacatgttacgacttttagcaagttctttgacaattagatacctgttactcaactaatggaagtccgaggtagatgccttatcagctactagtgcctcctaatggacttactttgaccataattccatcaccagattgaaaaatcagctaccacgaaaaagtctccacaaggttttgttatttggtgacgccaagatgtttccgcataccgatcgaaatacgatagacatttaaaccgtaatttaaaattataggaaaattcgcttgttacctaagtatgtgtagttcattaaaatgattactaaattgatatcagattggcagataatagcaaattgaataaaaattactcattttaaatatttgcacttgaacctagtattacaagtattacacattagtagtattacgaatctactagcttacacgctacattcacgttttgcttggatttattacatgctgataaagatgttagattgcagttcatcatttaagtttattagatagcttttcttgatagcacaagttacttttcgcgcattattttatcagttttctctgctcgccctcgttttatcactttccatttttttcattctttctatggacacattaaagtattcctaagaagaaaattgaagttgcagttggaattattattattattatgtttactttggctgtgcttggacaagaaccgaacgaaatcagcagaagcagacattttattgcatcgccgtggggcagagactgaaatatagtcctttttggagaggagaactgtgattctgtgtatatttgcttgtatactgtttcccagtagccaagccagtgtgcacttatttttttttattattactt

SEQ ID NO: 9692 - DNA, 392 bp, DROSOPHILA
tccgacacctacgacatgaactgggctaccataataattgcaattatcctcctgctgccagccagccagcaaagctttattagatccgaaagtgtggaggtcaaagtgctgtcttacaatcccacatacgatttctggtttttcatgccaactggcagacccaaggtggttactcagaatgtacagaatgcatattggtctgctcggacaaaaggaggtgtttgcttcacagatctgtggttctactgcgcaactggcatcgaaatagaggagtaaatatcttggcaacaaaggaacacaaactatgtatatttgaagatttgttacacccattcattaaaacaagaaaataaataatctgcgtaacgtttacacgaaaacctaaatcataa

SEQ ID NO: 9693 - protein, 86 aa, DROSOPHILA
MNWATIIIAIILLLPASQQSFIRSESVEVKVLSYNPTYDFWFFMPTGRPKVVTQNVQNAYWSARTKGGVCFTDLWFYCATGIEIEE

SEQ ID NO: 9694 - DNA, 8390 bp, DROSOPHILA
aaaattgcggtcgtcttgtcgttccgagattgagtgaatcactgcaaggagtaaggttagtttgttccccgaagcaatcaaatttgggattagacggcgctgcgatttaaagggaatatcagatttgcattaatgccttccagcggagtaacacagctgtgttaaatcgtcagtttagcaaaggaaagtcacgaaaaatagtgcgaaatttttgttatttattttgcataccttataattgagctatgtatgttattgtggctttcattagaattgtgtaccacctccccaatttccccgcatccacccactcaagttcagcggccgccggcgcatattttgattttagcttcaacgccgaattttgatggattaatggggctgggcggcatttgttgtcagtggtcggcatcttggcgtcaaacaaaggcgtggtcatagccaatggccagggaaaggggtttgggggggggggcgtgtacgcggatgacggcgatttgcttcgggtcgtttgtcttatccgccgggttgcatggctggcaattacgtatacgccccgtgtgcgcagcaatgtgtgcgtactccattcacagaatgcggaaaggtgattattcgctcggggttctctaatgtttgatcgataggtcagcgcaaatattaacgccaattttgcgaacaattcgcatggagttcctgttcgcaaaataaaggcaacaatgccataacagcaatttatagtagaataagaaagatttaaacattaaactgtaaatacactaaaattatatacaagataatataaacgtttgtccagatattcgtttaatgtactgtattcatgataagcagctttaatcaattcataaacgattatcaagatcacgatttcagcacggacaaacaaaaatctagaatgtagatttgctagagaccgagaatgaatagaagcggtacctaagaatacctagtcattgtagacttcgcaatttcacagtggccattacagagcttatcgcaagtacactatagtataattaatagtctctccgataagacagcatttcgtcataatataaccatgagcaaacacatggttatgtgtcagaagtccgaggaaacgcacgacgtcaacaatgctacccacctggctaaccgcggcgtatttgcagcccagactaagggcatactgccaggatgaccggctgcaggtccttagaatctgggccaagccagcgacggggaaaggagagaactttgttggcgtgatgacccgcatctatgtggactatcagctgggcgatggatcggttgtgaataagacctacatagtgaaacaggctctgtccgccgaagttccccaggcggaggtctttttcgaatatgagctgtacactcgtgaaatggacatgtacgagttcattctgcccaagttgaaggaactgctgcaagaagctgggctggaccaaaaactaactgcagatgccatcaccgtggaccgcgagtacaacaccatgattctggaggatttggcaccgtacaagttcgtcaatgcggatcgcgtgaagcagctggacatggcacacaccgagctgacactggaaatgctggccaaattccatgccgcctccatagttctgcaggaacgccatccaaacctgctaaccaagtgcttctacacccacttcttttcgcgtgacaagaaggcgtattcggtggtcttcgccggtttgttcaaggcgttcctcagattcatagatggctagccgaatctgaaggaagcctatggcgacaaactgcacaagctgcgtacccacatcatggagtatggtgcccgggcctacgatgtgggcgaaagtgatttgaagacattgaaccatggtgattgctggaccaccaacattatgttccagtacgatgatgcgggtgaacctcgttcagttgttgccatcgattttcagttcagcaattgcacatcgcccaccatcgatttgcactacttcttcacaacttctctgagggaagaggttggggacaaggaatcggagctcgttgagcatcactataaggctttaaaagcgaacctggagaagttctcctacaagggttcacttcccacacttcaggaatataggcttcaatttgaacgacgccgtttcatgagtaagtaccatgaagctaaacaatgcatcgaattgcttttaagacttaacatttaacaggtcttttggctcacatgtttaagccttgtatgatttataatggatctgaagagacgtcagatttctcaagtctgtatgcggagagtcctgaaggacttcgctaccagaagtcggtttatgccagtgaagctgtgatcaggagtgcaaccaaactgctggccattcttgatgccaagggtcttttggaactccagtaggttgttttaacgttcacaacttatatttaaaaaaaaataaattaagatttaaagtcgtaaacgataatatgattagggaaaagagtatctgatagtcaaggaactcgatcgactttagatttcccccttgttttgttatagttcagtgcaaatagatagacaatgtttgtataccaaatcactttttatagatcacttaaatagataagctatcagcaaaaacttaattgctttaaagtatcacatatgtatatactttcgtttcgtcattttcgcgtcactttcggtgggaaatgattaagtaaaatgacctttagtctgaactgactaaaatctatttcatttcattatatttaactattttttaaatctgaaattttccaatttaataagaaattttttgaaaattttttgacatttatacagtccgtactgcaagtacacctctaatatctgatttccttcctctgtagctgccaaaaagtgcgccaacttggatcttaaatacgggtgggacaacgtttgcacctggacgagctttccgtgcgaatggtttgctcaatgaccaaagcttcagcctcgaacaaaatgtttacgtactcgtatttgtgtgattcttgtgtaaattgtctgtgaaaacggccatggagtgcctgggctcagactgagactcagttcagatacaggattcagattcagattcagattcagattcaggttcggcttttgcatttgcatttgtctgttttcaattcctttccattttcccactagctgtgatttcgttttgcatacgtacatcttccgcttccgccgcatcctccgcatcctgacgcaccccatccagcactatccccttcacatcgtatgctatcctatatcctttttgccgcacccacacccacacccttttttccgggcagcacacaccgatgctcatttcgccagcgtcaactaaaaatgcatttcctgtcaagtgtaaaaaggaaatgatgtgatgctcttcggctttaacgtgcaatcaatcattgccgtgcccgtttccacccaaaaggactctccgtgtcctttcacacgccacacaccccttctactttcatatccttttgcggctgcaaagtcaacgaaggcgggtttattaagtcgggcaaatagtgttaagtatttgtcaaatgtcaaatgccaaatgccaaatgccacatgccagacgctcccttttgccgggcttaatggatcccctcgcatcctggccagccacacactggcttttaattgccacgccgataggcaagtgattctcctgtccctgacccaactggcccaccacctggcattgagctgcagcttccgcctcctcaattagagggtcgttgccagaagtgttgactattaacccccaccgacagtcgacgtacctgtctaaattaattaaaaagccgagtgcggatagtgttctcagcgagctgcaaaaatgtaattaatttagaagcaattaaataaaatgctattatgtaagtaatcaataaatttggtattttatatttatctttagtttctgtgtgccgcaaagggatttatttatttatataaaatcaagatcaatcaagccttatttttcgaggtaaatgtatcatagaaatatataaaaaaaaaatcaactgaaaagaatccactgaacaacatcgatttcccggtactttctattcagccggtctgccatttgtacgagtatatattctataatagatacatatatgcaaacacataagggggcaaaaagcgaagtaaaggattcactcaatggaaatccgatctcctttgaagcgtgtccttaggcactttgctgtgtgttttttggtggctaaggcaggtggcatgtatctctctatccagcgtaagccattcacttgacttttcaagttcaagtatgtgatatatgcatacatatgtatatatttatatatatatatttagattccctactgggacgataagtgtgccctggctgtccacgcatcttgatggcttggggctacgtgtttggacgctgtaatcgaatgtttatgtcccacagaatgctcacggacgcttcacgcactttcaatttttgtgtgtgccttcgccaagggggaggggggtgggggagagtcattgaacggggatctctcgatgcctcattgttcacagccatccggagacaattgtgaccataatggagagcggctggttccttgaagccgcttaattacagcgctcaaatgagttgacacattttttcgttgggctgcgcgggaagcggcgaatttcatagaaaagccttttggggcaaccttcggttctgggttattattatcaattaagacccattttcggtgacccaaagcgtattttgttcctggttggcaacctttgatggtaaccaactcattcatggtaaataaatgaaaaaaaaagtaaataaaggtagatgcctgtaattagtaatccgatttggcaatttccaagcctctgttccgaagtgcaaaactatgtgaaactgtgccaatgtctgcaagtgtggacaccaaataaacaccaaatggagcaataataaattttctaaaagaccaaaataaacaaaaaaaaaaaaaactgaaaatcatgcgcccaatgaagcaaacgccactgacacacaaaagccaccaagtcgaaatataaatatatatatttatatacgtatgtatagtggcggatattgaggtgttgacaagacacctgtattttcgtgggaggtggagaaatagttggctttagggacaacttgacagcaaatttggcgctccattggcgtgcgcatgtcgccaagaaaaaaaaaaaaaaaacacggccaagtgcgttgtgctccgacagagggcgctgcaaggtggcaaacggacaattgaaaagttaattgaacggcacttaaaacgcaattaattaccaaatcgctgacacgctgagtaggcctacaaggaagcgctgaacttgacaacgaaaatggagagcggaaagccaaaaaacgaaactgaaactgaaaccgaaaccgaaactcaatcggatagcagtatcgaaaccgtggacaaaaagacaaattacccgaaaccagttttggcccaagacaattgtcaaattgtcaaccaagatgccgagacacttttgtacttgttaccggtttgctcttcggatttttttttttctttttatttttttttttttgtcttttcttgagggcgccacttcttttttggggcggctaattctgacgccccatataaagtggtgcgcgtcgggagtggtcgacatcattaagtcgacgtctctgccagagtcggacggatatatacagtcgtcagtctgaaagtcatcgcaacctgtgcggcacgtgccacttcatcctcgagcaaaccgagtagtccagtgcaaaggaagtgattccacaatggcaggcaaagtgagtttaataaagtggaactctaagcagctcgatttaaaaggcatttcaatggcgtacaaaatggccaactttcaaggcaattgctaaactcgtgtgttactatatcctttctcgaaaaaaaaaatatccagccaacttgtatttttctataaatccgcaaaaattccatatcgattaaatgtttaaattcggtgttggccaaaaaataggaagcaaattcaatttcagtgcaactgaattcataacttgtgatttgcataatcacgaaaataaaaccaatccaattggcattgcttcgattttaaattaatattggatttgaaaaattgtataatgcaattggatttttgtattgcatttgcacgtatgaaaacatagtttttggctaaaatataaagtagcgcacttcttttagcaaaattaacttaaattattaacaaaatgaagtgaatgaaaaatgttgaaataatttaaaccctttttccgtgcagctcctgactgttttctcccttctggccatcgccgcatcctgtcgcgcaggattcgccgccacctatgccggctatcatcccgcctatgccacctaccaggcaccggctgccgtctaccatgcggcaccagtggcccaggctgctgtctaccagcaggcggctccagtttacgccaagacctttgtgccagctgctcctgtatacaccagatcctatgccctgcccactccagttgtcaaggcggtggctcctgctcctctcgctctgcccgttgctgcgccggtggtgaagaccctggctgctgctcccgtggtcgctgctccagtggtcaagactgtggctgctgctcccgctgtactgaaacaggtagagttggaatcttcgccgcgctacgacttctcctacggcgttcacgacagcatcaccggcgatatcaaaagccaggtggagacccgtgacggtggcaatgttgtgggatcctattccgtcctggatgccgatggtttcaagcgcacagtgacctacaccgccgacgacatcaacggattcaatgcggtggtccagcgggaaccggttgtcgctgcccgcgcagttgctgctccagtggtttccgtctccgctccagctccagttcccgtccatatttcctccgctcccgttgcctcgctgcccgctcccatctactatccacaccagcaggtgttcgccccacagcagattcaacaggttgccgagcagcagggtgaggtggtggagtctcctgtggcccaacagcccgagctggaacccactcccattgactacaacgagggtcagcagcagcagcaggagcagcagcagcaaacctatccccaggatcagcagttcccaccctactcgccagctggtcaatcctccccagctcctgacagcgatgattccgacgtggtggaggcacgatctgccccggaggccagcagcaccaccaccaccgctgctccagttacggaggagaacaagaagacggcctagattggattatgaacggaaatattgttgaaattaataaggaaatgaataaaatacttcgagaatacataaaaaattgtctactaattcaaattaaatgtagtttagttacatttataagctgataattcaaaagcttaaatgcggcgattttaataattaatttaccacattaatttagcggattacttctcaaagaatcgaaaaacaaacaattgaaaaagggactaaatcgattggcagcaatcatctctaaaaaaaattttgtttatttctgacaaccgcatataaacaaaatgaaaagagcattaaccggaaatatctgcgcatttattgcattattactgataatcgagagattaaatggtattagtgcaatgataacatatttgcaagcaaaaaaaaagagacaatcaaattttatatttaaaggtagacagataaaatcagtaccttttattatccaattaaatattgatttaggtggctattttttgtcttattaaatatggatagagctttacattttaacacatattcgttgaataaattaacaacaaagattgaacataaatatttatggaaattgtaattgaagcttttaaacgtatagccttaatattaaacattattaatattatattattttaagatgaaggttttccttacaaaagtaaagacgagaaagtaaaacataaacatttgtcataaacatttaaatgagcccgcgtggtgtgcagattcagccgacttctattcagctgttggctgaatttggcttgcatgcgcacacgttccacgttccacaacaacatattgaaatccaaaagctgcttcaccacttggcaagcgatcgttaacaagttacaccagaaatttatatatactaaaaaaataataagttacttaaaaatttagtaataattatgtggatataaaaaatgtacattatttttctctacgcgccgttgtccgaagttaacagcaagataacatgcgatat

SEQ ID NO: 9695 - DNA, 2599 bp, DROSOPHILA
ttacagagcttatcgcaagtacactatagtataattaatagtctctccgataagacagcatttcgtcataatataaccatgagcaaacacatggttatgtgtcagaagtccgaggaaacgcacgacgtcaacaatgctacccacctggctaaccgcggcgtatttgcagcccagactaagggcatactgccaggatgaccggctgcaggtccttagaatctgggccaagccagcgacggggaaaggagagaactttgttggcgtgatgacccgcatctatgtggactatcagctgggcgatggatcggttgtgaataagacctacatagtgaaacaggctctgtccgccgaagttccccaggcggaggtctttttcgaatatgagctgtacactcgtgaaatggacatgtacgagttcattctgcccaagttgaaggaactgctgcaagaagctgggctggaccaaaaactaactgcagatgccatcaccgtggaccgcgagtacaacaccatgattctggaggatttggcaccgtacaagttcgtcaatgcggatcgcgtgaagcagctggacatggcacacaccgagctgacactggaaatgctggccaaattccatgccgcctccatagttctgcaggaacgccatccaaacctgctaaccaagtgcttctacacccacttcttttcgcgtgacaagaaggcgtattcggaagcctatggcgacaaactgcacaagctgcgtacccacatcatggagtatggtgcccgggcctacgatgtgggcgaaagtgatttgaagacattgaaccatggtgattgctggaccaccaacattatgttccagtacgatgatgcgggtgaacctcgttcagttgttgccatcgattttcagttcagcaattgcacatcgcccaccatcgatttgcactacttcttcacaacttctctgagggaagaggttggggacaaggaatcggagctcgttgagcatcactataaggctttaaaagcgaacctggagaagttctcctacaagggttcacttcccacacttcaggaatataggcttcaatttgaacgacgccgtttcatgagtcttttggctcacatgtttaagccttgtatgatttataatggatctgaagagacgtcagatttctcaagtctgtatgcggagagtcctgaaggacttcgctaccagaagtcggtttatgccagtgaagctgtgatcaggagtgcaaccaaactgctggccattcttgatgccaagggtcttttggaactccactgtgatttcgttttgcatacgtacatcttccgcttccgccgcatcctccgcatcctgacgcaccccatccagcactatccccttcacatcgcctacaaggaagcgctgaacttgacaacgaaaatggagagcggaaagccaaaaaacgaaactgaaactgaaaccgaaaccgaaactcaatcggatagcagtatcgaaaccgtggacaaaaagacaaattacccgaaaccagttttggcccaagacaattgtcaaattgtcaaccaagatgccgagacacttttgtacttgttaccgctcctgactgttttctcccttctggccatcgccgcatcctgtcgcgcaggattcgccgccacctatgccggctatcatcccgcctatgccacctaccaggcaccggctgccgtctaccatgcggcaccagtggcccaggctgctgtctaccagcaggcggctccagtttacgccaagacctttgtgccagctgctcctgtatacaccagatcctatgccctgcccactccagttgtcaaggcggtggctcctgctcctctcgctctgcccgttgctgcgccggtggtgaagaccctggctgctgctcccgtggtcgctgctccagtggtcaagactgtggctgctgctcccgctgtactgaaacaggtagagttggaatcttcgccgcgctacgacttctcctacggcgttcacgacagcatcaccggcgatatcaaaagccaggtggagacccgtgacggtggcaatgttgtgggatcctattccgtcctggatgccgatggtttcaagcgcacagtgacctacaccgccgacgacatcaacggattcaatgcggtggtccagcgggaaccggttgtcgctgcccgcgcagttgctgctccagtggtttccgtctccgctccagctccagttcccgtccatatttcctccgctcccgttgcctcgctgcccgctcccatctactatccacaccagcaggtgttcgccccacagcagattcaacaggttgccgagcagcagggtgaggtggtggagtctcctgtggcccaacagcccgagctggaacccactcccattgactacaacgagggtcagcagcagcagcaggagcagcagcagcaaacctatccccaggatcagcagttcccaccctactcgccagctggtcaatcctccccagctcctgacagcgatgattccgacgtggtggaggcacgatctgccccggaggccagcagcaccaccaccaccgctgctccagttacggaggagaacaagaagacggcctag

SEQ ID NO: 9696 - protein, 821 aa, DROSOPHILA
MLPTWLTAAYLQPRLRAYCQDDRLQVLRIWAKPATGKGENFVGVMTRIYVDYQLGDGSVVNKTYIVKQALSAEVPQAEVFFEYELYTREMDMYEFILPKLKELLQEAGLDQKLTADAITVDREYNTMILEDLAPYKFVNADRVKQLDMAHTELTLEMLAKFHAASIVLQERHPNLLTKCFYTHFFSRDKKAYSEAYGDKLHKLRTHIMEYGARAYDVGESDLKTLNHGDCWTTNIMFQYDDAGEPRSVVAIDFQFSNCTSPTIDLHYFFTTSLREEVGDKESELVEHHYKALKANLEKFSYKGSLPTLQEYRLQFERRRFMSLLAHMFKPCMIYNGSEETSDFSSLYAESPEGLRYQKSVYASEAVIRSATKLLAILDAKGLLELHCDFVLHTYIFRFRRILRILTHPIQHYPLHIAYKEALNLTTKMESGKPKNETETETETETQSDSSIETVDKKTNYPKPVLAQDNCQIVNQDAETLLYLLPLLTVFSLLAIAASCRAGFAATYAGYHPAYATYQAPAAVYHAAPVAQAAVYQQAAPVYAKTFVPAAPVYTRSYALPTPVVKAVAPAPLALPVAAPVVKTLAAAPVVAAPVVKTVAAAPAVLKQVELESSPRYDFSYGVHDSITGDIKSQVETRDGGNVVGSYSVLDADGFKRTVTYTADDINGFNAVVQREPVVAARAVAAPVVSVSAPAPVPVHISSAPVASLPAPIYYPHQQVFAPQQIQQVAEQQGEVVESPVAQQPELEPTPIDYNEGQQQQQEQQQQTYPQDQQFPPYSPAGQSSPAPDSDDSDVVEARSAPEASSTTTTAAPVTEENKKTA

SEQ ID NO: 9697 - DNA, 3963 bp, DROSOPHILA
cgctggacactgcatgtgccagattcattctcctccgcgggaagatatggaggaagtgatgcattcgggaaattgggtcagaaataagcgagtgaaattcgcgagggcgaatcgaaattacaataagaccagttgccatcgcaatttccccggagatttctgctgtaggttggacatattcgcggcgataaggattgggttagaggttgacgaattgagaggggtgtacgaaaagttttggcctcgttcactaatcgcacattgcaccaggtagatagggaaaaactcacccttgggggaaattgaatggctcaagttcgaagagtagcctctgttttgcacacacacttggatcacttggctcgaaaacttggagctggacgtcctaacagctcgagttgcgaacgaggaatgatgctggaccagccgacttttccgtaccagctgtggatccgtgctgctccccgatagtggatcctctctctccgctctcagccgctcatgcgttcagtaattaaaatgggagatgtttagtggggatgagttcccgcatggaggcaagtcggggtgccgacgaatcaaaattcaatttattctaatacaaaatcatcgagcgcaatgcagacaaatgatttgggcggcgaaatccaagccaattaaaagctggcatcccaaatcgtttgggttgagttatttatttacatttatttgttccaatataatcgaattctgctggaggcgattccgggaaattggattcgaaaatgggtaaataagtttattaggcatatttcgtttacttgtggagaaggcagttatgtaagctcactcaataagtaataaccattaggattgtattttatcaagattgtaaattcagcactttatgtatttgaatttctatttggcgccaagctatggacaaaaatcattcacttggaactagaaaccgttattcgctgcgctgcgaatggcacttcagctggagcagaagaagaagaagatgcataaataacaaaaattggagaaaacataaataaagcgctgaataaatttaattaagctacgaaatgcccaccttaatagcgctggatgcatcgctatcgatgctgcgcccggtgccgggaagaaatgagcacacctaccagtcgctggccaccaagggcatccagcatctgctggacaatctcacggcggccggcaaattggagcacgttgctctgctctcctattcgacgacggcggaactgaaggtggacttcacgcgggactacgaccaggtgcggcaggcggtcaagaaggtggagcccgtggacaaggcctgcctgatgagcatgctcaaggcggtggtgtccataatgtcgccgtggggcaaccagaacatcctgcaggtggttgtctttacggactgcggcctcggctttggcaacacctcgatcacgggcttcctggaggcctacgccgaaaaggagtcggagccggagttcggcttcctgaagactctggccaactacaacctgaatttcatctgcctgggcctgcacggcgattactacttcaccaggggattggcggtgtaccagcagctgctggacaaggtctcactgaagggtgagctgcactctattcaaagatattcatgtaactaatggtgtacctacgtttccaggccagctcttcatgacaaagcccgccaagagcagcgatgcagtcgagggaaatcccaatcccaacccgaaccccagccacaaaagcgaactgggccgcactacggtcttcgaactaattgaacgtctctgcgaggccagctacaagagttcggaggtgaccctgaaatgcggcagctacttccgcatggaggcatctgttctgctctggccaccgacggctccgtatgagcaaaagtcccacatattcggccgagaacccaccattcgccacacagaccagaagattgaggtgtgtggcttcctgtccctttcggacattggatcaccggccaccctgagtcgacactgggtgctgcccaaagtggagcgggagaagagcggcagcagtcggaggtctggaaacctgagcgcagcagccaagccaccgaagctcaatctagataccagcaatcccaactacgagctggagaagctggaagccgatatcaaagagttttacgccaaggattcaaaagacacggaggaaagtggcgacgacgatgtgaccattgtcttgaaacccggcccccagacagagcaacaaaaagaaaacttgtgcgtcctccttcacggagccctcaaaatggagaacatggcagctctggttcgagtgggtgacaagtggtacggattcatatatgcattcaccgacagcaagaagaagtcaaacctgatgctgaacatacttccacccggcacgaacgtgattccctggctaggagacctggaatcgctgggcttccccgaggatttggcgcccggagagacggccagttttccggtgcgtgccgaccgcagatcttattcgcagagcagtgtggtgtggatacgacaggctagcctgcagtccgacgtccagaaggtactgcgacacgccaagaagatgcccgacaagacgcagcacttctacaaggagctcaatcgcatccgccgcgctgccctggcgctgggattcgtcgagttgctggaggctttggccatgctgctggagaaggagtgcgcccatctcagcctgaacggagccagcaacgactgcaccctgcagctgcagcacgcggctacggagttgcggaagacctcgaacagagacatgaagtccatgattgttccgctccagaaagttggtgcatcggatgcgggcagcacggctgccacggctcctgctcctgcatacatgtattgaaaattttttatgtccttactttaagactgtgtttactttgtaatacaaataatcgtaaaaatttaaatcttaaaagttcgggctttaatgaaagcgtaacggtatttttcatctctgcacttcacagcactggccgcttggcgttatcgttatcgatgaccaaataatatagtaacaataaaagtcgtaaaaataataatgggaagtccagaattgccctcagatcccggtcaagagggacttccaaccccaccggttgaccatccacggggaggggtggagagcgaggatgacgatgattcggatgcatacgacggctaccaaccactcgctttggatgaggagaacgatgcagcggatcccgaggagatgtccagggagcaggagaccccgtccgcggataatgacgaagatgttgacctgatgactgccccagtcacccacggagaccccaacatgcctgccattgagcccgctgacgtggaaatcgagagacaagtctggagtgaaccaagacccagggaactccaaatggatcttgacaaaactcgaacggaacaggtaagacattccgatttacaattgcgagacatgccagcaactttcatcccgacactccagatactcaaagcgatgtccactataacgttacccaacatcacagtgccggattgggccagaggagtgcccgaggagcattggaagcatgagctgctggaccggattaacaaccggcaccatccacccgaaccctcaacgtcgtcgtcgcgcgagagtcatcagcattccaagaaagaatagcgtttgtgtgtatttagaaaaaaagttctccaatatatgtataatttagaatgatcataagaagttgcttggcggagatcttagaacacagccagcagggcctggcccacagaattcaccttgctgaagttcttgtcctgcggagtaatggtaagttccctcaacttgtccatcacatagtccacggacaccacctgcgcaatggtctcttggccgcacgaagtggtggtcaggttgccgatggcctgcatggaacggtagcacgcttcc

SEQ ID NO: 9698 - DNA, 1905 bp, DROSOPHILA
aagatgcataaataacaaaaattggagaaaacataaataaagcgctgaataaatttaattaagctacgaaatgcccaccttaatagcgctggatgcatcgctatcgatgctgcgcccggtgccgggaagaaatgagcacacctaccagtcgctggccaccaagggcatccagcatctgctggacaatctcacggcggccggcaaattggagcacgttgctctgctctcctattcgacgacggcggaactgaaggtggacttcacgcgggactacgaccaggtgcggcaggcggtcaagaaggtggagcccgtggacaaggcctgcctgatgagcatgctcaaggcggtggtgtccataatgtcgccgtggggcaaccagaacatcctgcaggtggttgtctttacggactgcggcctcggctttggcaacacctcgatcacgggcttcctggaggcctacgccgaaaaggagtcggagccggagttcggcttcctgaagactctggccaactacaacctgaatttcatctgcctgggcctgcacggcgattactacttcaccaggggattggcggtgtaccagcagctgctggacaaggtctcactgaagggccagctcttcatgacaaagcccgccaagagcagcgatgcagtcgagggaaatcccaatcccaacccgaaccccagccacaaaagcgaactgggccgcactacggtcttcgaactaattgaacgtctctgcgaggccagctacaagagttcggaggtgaccctgaaatgcggcagctacttccgcatggaggcatctgttctgctctggccaccgacggctccgtatgagcaaaagtcccacatattcggccgagaacccaccattcgccacacagaccagaagattgaggtgtgtggcttcctgtccctttcggacattggatcaccggccaccctgagtcgacactgggtgctgcccaaagtggagcgggagaagagcggcagcagtcggaggtctggaaacctgagcgcagcagccaagccaccgaagctcaatctagataccagcaatcccaactacgagctggagaagctggaagccgatatcaaagagttttacgccaaggattcaaaagacacggaggaaagtggcgacgacgatgtgaccattgtcttgaaacccggcccccagacagagcaacaaaaagaaaacttgtgcgtcctccttcacggagccctcaaaatggagaacatggcagctctggttcgagtgggtgacaagtggtacggattcatatatgcattcaccgacagcaagaagaagtcaaacctgatgctgaacatacttccacccggcacgaacgtgattccctggctaggagacctggaatcgctgggcttccccgaggatttggcgcccggagagacggccagttttccggtgcgtgccgaccgcagatcttattcgcagagcagtgtggtgtggatacgacaggctagcctgcagtccgacgtccagaaggtactgcgacacgccaagaagatgcccgacaagacgcagcacttctacaaggagctcaatcgcatccgccgcgctgccctggcgctgggattcgtcgagttgctggaggctttggccatgctgctggagaaggagtgcgcccatctcagcctgaacggagccagcaacgactgcaccctgcagctgcagcacgcggctacggagttgcggaagacctcgaacagagacatgaagtccatgattgttccgctccagaaagttggtgcatcggatgcgggcagcacggctgccacggctcctgctcctgcatacatgtattgaaaattttttatgtccttactttaagactgtgtttactttgtaatacaaataatcgtaaaaatttaaatctt

SEQ ID NO: 9699 - protein, 587 aa, DROSOPHILA
MPTLIALDASLSMLRPVPGRNEHTYQSLATKGIQHLLDNLTAAGKLEHVALLSYSTTAELKVDFTRDYDQVRQAVKKVEPVDKACLMSMLKAVVSIMSPWGNQNILQVVVFTDCGLGFGNTSITGFLEAYAEKESEPEFGFLKTLANYNLNFICLGLHGDYYFTRGLAVYQQLLDKVSLKGQLFMTKPAKSSDAVEGNPNPNPNPSHKSELGRTTVFELIERLCEASYKSSEVTLKCGSYFRMEASVLLWPPTAPYEQKSHIFGREPTIRHTDQKIEVCGFLSLSDIGSPATLSRHWVLPKVEREKSGSSRRSGNLSAAAKPPKLNLDTSNPNYELEKLEADIKEFYAKDSKDTEESGDDDVTIVLKPGPQTEQQKENLCVLLHGALKMENMAALVRVGDKWYGFIYAFTDSKKKSNLMLNILPPGTNVIPWLGDLESLGFPEDLAPGETASFPVRADRRSYSQSSVVWIRQASLQSDVQKVLRHAKKMPDKTQHFYKELNRIRRAALALGFVELLEALAMLLEKECAHLSLNGASNDCTLQLQHAATELRKTSNRDMKSMIVPLQKVGASDAGSTAATAPAPAYMY

SEQ ID NO: 9700 - DNA, 3048 bp, DROSOPHILA
atgtggttcttgtggattaattcgcttggcattcgattaatgggtcgttcgtagtagctttttaattatggtatacccccaatatttgagttattccgataatttgtgttatttgcccacctgagcgcagttaactgtgaaatgaacagcaacaaaaggaaaacaaagagagtggctgcaaatagcaacaattacacgcacgccagcgaagctttttcgctgccccccgtttctttctgtgtgtttatctgtttttttttttttgtttttgttcttggctccctgatacgtgtaagtgaaaatgttcaacaataattccaggaaaaaaaatcaattggatttgaacttcacagcctcagcagcagaagtcgcgctgcctttaaccttgactttttcttagaaaaacataattaatgcattcccacacccccagtggatatatgcacatatatatttagttatatgtgcagtgagtgggcgttgaaatgcacgaagaactttcaattttgatggcagaaaatccaaaagcaaggggcgaaaaaaagtagtcacctggtttgccagccgatttgtcgacttacctataaccacgattgctcgcacggggtggtattttgtagataaacacctccggcttcacgatcagcacactttcgtattccatcttattcgaagttcagataaatttgattttgtttattatctgaatctttccaagtgtttttttaagctttagccagtgtgaccggcgggcgatagtctgcatatgccaagcgaccctcgaaaatataccaacacaaaagtgttgaacatcatttttaaattcagatttaaaaactattaaattgattaaatgattaaacattttaagttcaaatctaatgtttttttggaaaataacattatcgtagtttaactatcactgaaatttgtgtcattattaacatttcttagtagttagtagtagtcattgaatgctagtgtggctgcaaccaataaaatgagttccaatcaaatggcgatgaataatcgagtgcgaattgttgtggttggcgattcgggtaaataatggacgtcaaacgctttccgtggcactaatcctctcgagaattccccttacccaggtgtggggaagacctccctgacgcacctgatcacccacaacgaagccctcatccggcccggctggacggtgggctgcaacatccaggtgaagatgcatccgttcagggagggcaccgctcgcgagtgtccctacttcgtggagctgttcgatgttgggggatcgctgaaccacaagaacacgcgcagcgtcttctatgcgggcatcgatggaatcattctggtgcacgaccttaccaacgccaagtcgcagaggcagctaatcgactggctgtacgagatcgtcaacaaggagggcaaggatacgaacaaatcgaacggagcctccatgccgccatcgccgcccagcccgctgagcagcttctcaacggacaacctcggaacggacggccacattctcttcgacatggaggagtttctgggcgccacgcaaacgcctatcctggtcatgggcaccaagctggatctcttggacgagaagcgccatcccaaaatgggggtgaagaagccgggcggaataggtgcctcctaatatgacatttaacaaatgcttcctcctaacgtttatctatttcaatatccctcagccgacaagtgtggagccgaggagatttggctaaattgccgcaacagtcgcagcctggccgctggtaccactgatgccgtgaaactgtcccgcttctttgaccgcgttatcgaaaatcgcaaagcgctgcgcgcagccctagcattcggagtgagcagctccaacgccgtcagtccgcccgacaggcgacgttttggcccgaccagtgccaaaatggaagacagcgtcttgcccctcctggatacccaagacctcaagtgactaatgcactcaattcagtagttctaagttgtagttatcgtacgggaagcattacaaaaagaaacgattaattcccattataaaatcagacttgctgttgtttagaaaatgttatgcattgccttaggagcgcgttttgagcaaatctcgataccagttgggcaggatttgatgttccggaccgcgcagcacttcgtagctggcgtgcttatttaaaaaagtcacctggaccaccgcaaacggatcgttaatgttcaccagcagcttcttaagattgcgcagaaactgttccaggtaccaagccattgccgatgcactccacggtttgttgcgggccagtgttgccacatcgatctcatcgatcctctgcagcatgcccttggtgtcgcggagtcccacgtagagcgtagtgatgcccaccaggaatgactgactccaccagttggcagacttgaacgatttgaaggtgcgaatttggtgagggttcatattgaagacgctggtctttagctctacgaatttcaatgagtcgagcactctgcaatctttgaagtcactaatgggattcgtgtaagtgtatacacaaataatgaatggatggaacattaatcattcataagtatttaaaccctggaccactcacactggctccttgctgtccacacagtccagttcggcgccgtatagcatcaaaatcccggccaggttcgtgcggtacacgcccatgaactcctctgcctcgttgaccggcacattggtcaccggttttccctgcgcctgggcactggtcaggtactgctcgaacttgaagccccaggagcacatgacccgctgtgccctgctcatgttcgcgttctccagctgctgctctggggtttcctccttgcacatgtagacgttgccgttcaggagcgtcgccttgacgcggaatgagcgattatcatactgcaggcacattatctgccgcaaaataccgcgcagtgttacaaagtcgctgtccaggcgtagatttctcgcatcggagctactctgacggagcagctccttctggtgttgcttaatgtaggtcagcataattt

SEQ ID NO: 9701 - DNA, 919 bp, DROSOPHILA
atgagttccaatcaaatggcgatgaataatcgagtgcgaattgttgtggttggcgattcgggtgtggggaagacctccctgacgcacctgatcacccacaacgaagccctcatccggcccggctggacggtgggctgcaacatccaggtgaagatgcatccgttcagggagggcaccgctcgcgagtgtccctacttcgtggagctgttcgatgttgggggatcgctgaaccacaagaacacgcgcagcgtcttctatgcgggcatcgatggaatcattctggtgcacgaccttaccaacgccaagtcgcagaggcagctaatcgactggctgtacgagatcgtcaacaaggagggcaaggatacgaacaaatcgaacggagcctccatgccgccatcgccgcccagcccgctgagcagcttctcaacggacaacctcggaacggacggccacattctcttcgacatggaggagtttctgggcgccacgcaaacgcctatcctggtcatgggcaccaagctggatctcttggacgagaagcgccatcccaaaatgggggtgaagaagccgggcggaatagccgacaagtgtggagccgaggagatttggctaaattgccgcaacagtcgcagcctggccgctggtaccactgatgccgtgaaactgtcccgcttctttgaccgcgttatcgaaaatcgcaaagcgctgcgcgcagccctagcattcggagtgagcagctccaacgccgtcagtccgcccgacaggcgacgttttggcccgaccagtgccaaaatggaagacagcgtcttgcccctcctggatacccaagacctcaagtgactaatgcactcaattcagtagttctaagttgtagttatcgtacgggaagcattacaaaaagaaacgattaattcccatt

SEQ ID NO: 9702 - protein, 279 aa, DROSOPHILA
MSSNQMAMNNRVRIVVVGDSGVGKTSLTHLITHNEALIRPGWTVGCNIQVKMHPFREGTARECPYFVELFDVGGSLNHKNTRSVFYAGIDGIILVHDLTNAKSQRQLIDWLYEIVNKEGKDTNKSNGASMPPSPPSPLSSFSTDNLGTDGHILFDMEEFLGATQTPILVMGTKLDLLDEKRHPKMGVKKPGGIADKCGAEEIWLNCRNSRSLAAGTTDAVKLSRFFDRVIENRKALRAALAFGVSSSNAVSPPDRRRFGPTSAKMEDSVLPLLDTQDLK

SEQ ID NO: 9703 - DNA, 7883 bp, DROSOPHILA
tcctgcattcggtagcaatcggagacgaccttccatttatcattctcggcggtaacgatgaaagtctgctgaaatttgcgtaactgctgatctgcgaacttgacggagccgctggccatgatgaggtaggccagctggttggacacagcctgatccacaataggctgcgcgtccagggtgttcaactggtggtttgaggatggcagctcctgaaagtagctctcgatcatctggcggccgatggccccgtttccattccagctaagcgtagcattgtccaaatagaggcgtccaatttgctgcaggtggaatctatttgagtttcgttttcccatgaaatgcagactttcaaggcggatctctacttacttggcgtcggttgtccacggaggcgtagtacaggcgtgtgaaggtatccgccgtacgggcgcagctctcgaccttggctttcaaatcctttaaacaaatagttgctatgctaaattgctaaaaaactaaatattttcaactcacgctgtccatgtttcccgcgattctcgaattagagtgaccgtcctcgggtggtcagaaaaaaactctccagaaagaaagaaacaaaaatattactaccaccatttgaaatacaaaaacgctactaatctacgtgagtacccttaatatttatttaaagtttaaaaaagtcaagatgttcaaacacttaaaaacaagtttattgcaaacattttctgcaaattgcccgaaaaacaaatgatgacttttatttttcaagttgtttatttctaatcataattttaattaacaattagacacaatttaaagcatagcgatcacaatttgaattggtaacctaacatttgaagattccctgtcggagtggcccattgggggtcactggaaaatcgagcgagtctagggcgactacgaggcactgcggctagaactatgagtatggctaaaactagctaagctaagacctgttttaagactaaagccccccgacctaggcctccagcccccgggtgtccttcaatggctccaggggctgcaggttgaccgtcttgtagcctcgatcccgccggaaccagagccagttgtccccgttgaaatagtcctcgatgtgctccaggctgcggcccttcgtctccggctggaaaaggcacataaaggcagtgagcaggaaactggacacgccgaagaccaggaacacgccgcgcatcttgagcatggcctgcaaagcgggaaacttcttcgcgaagatgaacagagcgacgttcatggaggcaaacactccgccggcagtccgtccgcgtatcctagccgggaagagctcgccgatcataatgccgggcatcaccatcagagccgtgttgaagatgatgtagcccaagagacagccggcaccaacgaatacgtcgtacgacattttcggttgatcgaatctggcatactgatagacactgagcaccaggcagaacaagccggagccgattcccgacactatcatgatcctgcggcggcgaacgaagatcaggactacgcagaagaccatgcagcagatcacccggacaactgccgtcgcaatggccgcctgcttggagtcgaactccgctccgaactccgagatcatgtccacggcatagaagatcacgatgaacgtgccggagaacatctgcagcagcgagaacacgatcacaatgaccagcggcttgatggccacgcgctggcagcacagctggaagatgttctcgttcgtcttggtggtcacccgctccttggccagcctctgcttcatatcattcagctccttctgcgcactgatctcgctgccccgcaggaacgagagggcctgcagcgcacgcttctcgtggccattgcggagtagccaggccggagtctccggtataaacgagatagacaccatggacagcaggggcagcacgttggcgcaccacgcaacactacgccagtacatcatggagcccagggagtagaccattaggatgccgcttgagtaggccacatagggcgcgccgatcagcagactccgcagattgggttccgccgtttccgcaatgtacaccttcgagaaggtaaaataaaataatgaatgaaggccaaaatagtaagtttatatagtaagtctacattaatcctaatccagcttatccacgttgaccatcaattatataaatgatactattactattactttctgatacatgaccaccttgaacccagctagaactttcgccagcaaaacaatttgatctattcgagggtcacggaagcaacatcaacatcttaatctgtgggaactcttggacggcaatcataaaatcgtaaatcacgtcaggcggcaaaccattaaccattgaaagcgaagcgaaagccgggggaacacgcgcccattcatccaaatccgagcaaatcgcccacccgtccgcatccacgttattatagactaaggtcaagaatccggaactactacgcgtatactgtgtgcgcctaatgcaaatgatgcgctggccatttaaagtcccggcagcgatgacgccgccgacgatgataaatatcgttatcactttggccgcaagataagtcacggacatatccataagatgctcgtaaataaacagcgccggctgagacgctggagacaatggaggcgaccagaggagccgggacaatggaatacgcagcgttaagtggccaattgacaatctgtccacctgccacgactgctcttttgtattcccagtggggcagcgccatttgggggagttcaaggctccgccgattacggttaatgggtcactcgaacaatccggttccgcgttgtccgggtgtttcgggtgatccgtgtgaacgaacccctggccagtggcattgagttactcacctgtccgggtccacccagaattccggtggcgaatccgcacaggaagcgtgcaaagatcaccaccttgatgctcttggcgatcgccaaggtgctccatcccaggaggaggggaatcacagagagaatcagggtcctacggcgacccaaatagtccgccagaggtcccgacagcagggatccaaatggtgtggccaggctatggacacttgctgtgggaatgagcaggaattaataaggtgttttgagcttgatatcacctgtttgaacgcacctatccaggagcccgtctctacatcaatgggtatctccgtggagttgttatccatcagctggggcaacaggatggccgagaatccaatgggcatgccgcatccagcggaaagtaagagtacagcacaggtggccagaatctagaagggaacataataaaattcgatatacaattggatatataattgatttgtgtgcaagcaactatgtaatgtattcctgtttccatgtgccatctagctttaatcgaatctaacgatcacttcatcatagttgccccatcccagcagcaattggcatcaattgaagttgcaattgcatcacggacaacattattttgatttgcgctgatggtgacaaacgatccgggatcgctgcccattgatcagtgattgggcatatgcccgatcaatttgtgacgccagcaaactggacacggacacggacactgacacggacaccctgactttgaatgacacttcgtgcccgttcggtttgtccaattccagcacctccgtcacatgtccgccacatgttgccccccaacggaaccgttttctaatcgtgtcgtgaagaaagttcaattgcgtatcttatcattttgtccttcacggaatatttactatctgtcacgcatgaggaggcgaagtcccagagatgtccgatgttcgacaagttgctgacaagattataggccctgccttgatttggatttatatgggttgggttgggttgcgttgggttgagttgggttggtatgccccactaaaaagttctcttcagttctcgaaaagatttgatagaacaaagttgccttagtttatgaatctatagcttctaaacccacctggtgcatcattccccttcggttggcagcatcgtcgtcctgctcgtcgatggtggagagcttcctggagctatagctggccttcttgcactggaactccgatcccgggacgacttgatacgacatcgtgtggggcacaaattttagatactcgtcatctctagttgaggaagattagaaaagaaaatgaaatatcgcatagaaaaccgaaaaaaaactaggcaaccccatcgctgtgaacctcagatacagggtagcatatagtaggggctggcctattatcaaggtgctccaacactttgtccgcctaatgggcttaatgacccacaattattggcaatttcatggatcggcagagcgggcaaccctttcacacgccactcaaattaatccacttgcattcctcccattccccattgcccatttgcggctcctaccacatttaggtgcactttaatgcgagccactggcacttggagagaagccttcggtgataagaagggcaggaatacgtcacttttggaagcagaaaccagctgagtttgagtttgttttggctgcgcgataagaaaacatggtaaaaacaaaaacaaaacggcgatttttgagcgtttcgcgctctcgctcatttgccgaatgcctttgttttgcttgtgtttcaactgcttaaataatgttaatgtgttgtttttttttttatcgcccgccaaggtcaatacggaatcacgtttaatgaaccgaatcaaactttcttcctctttagtcgatataaatatttttgtggcatagtttgtccaatcaagggtgataaatatggtgcaactcaatacaatattttgatatcaataggcccagagtacggaatacttccccttgggcacctaaaactcaaccgtggcattggaggctccataagtctgccagtcgtgatgggaatgtgcaaataaagtaaagcgaactttggcaaaaccaaaacatttcaaatcgttggacttgagccatataaaacggccatatcgccggtaaaatcgtctgcgattgattaaggaagtgccgaagataatgtcagcggttcaatgtaccaaaacaaatgggtttttgacacactcccaccaaaaactccaaccgattcaagcaaatcctagctcatgactttaataggcccattatgatccctaaactgcctggcaaactttccaatcactttcaatcggcgtgactgaagtccatgtcactatatttgcccatcaatatggcaatgtgtgaattggaagagtcgcctgcacgactcggcggattctacaaaccgaaatgctcacccactgttgacaccacaaattagataatttataccacatcggcacacacaactcgagtaagacaatcattgggcagccaatcgaatgggcagcgcgcaaatgatttggcttaattggggcaatattgggggatcttggggcggaaggggtgaggccagtcagctggtggcgccatgccagtcaatcggggattcatttcaccaccaccggttggcatggtggttccggtctatgcggcgtatgcgtaataactaaactgaatttaattggcacgccagatggcaaagttcaagataagatatacatatttggtggcacagagccgaggaatctcggttagcagtaattcaaaccgaaggcggtgggcttatcaccaattaatggggggttaaccaatccaattaggcaagttccagaagtgaaatttcatcagtacgacaattacgatgagtaatttcgaatcaatcaatatattgaatgtaaattccatgcggcaggacttaaagaacctgcgcggctcaattcacttttaattcaataatgtaacgtcattttgccattgattgatgtgcttatcgttgtagaaatacttcgaatcatcgtgagacatcgtgataaggtggcaataaagtctgagcacatttcaaaacaatgcacatcggttctataaatttcagcttagctgagccggaaaatgtacttttgttttcaattaacacgtgtttttttttttcgtctggtaaatacccacgtatctaatcagccgttcccacattagaaactaatattatttactatcttcggtgaggtaagtgaaatctttcctttgctctgggaccatttcgtcgatcatcgggcattttggccacaagacccatcgacgaagacgtttttggctggcagttagtaatgtagtgataagattcagaggaacatatctttattgggaactcgacacttagctggcaccgaaccgcacctatcgaaggggcagaaaaaggtggtcctccttatctcgcatctgggccacttcagaacctttggcaaagatcacggaccctagcaacacgaatgcacacagtccgaccgaccaaccgaccgaccgaccgaaggaaaccgaaaacttgtttgcgctggctggggtttaaagtcgaagtattcgaaggggggtatttttagctgaccagacagtaagtccgcagaaagcagcgatgactggacacccgatgtcagtgcttggcagcacaacaaatacgcgaatacggcaattgttttgatctgttccattacctttcgacactcattttgtccggctataatgtaggcgaattagttcaagttgtttccgaattaatttatgcaaatccttcgctctctgctgccctttatgtaaccaaagtagtcgcgaattaaatcgcctgcctcatataatttgtctgatcaaagcactcgatcgcgtggtcatatagatatatcaacgatctccggcaaaacactgggatacactgcgagaaaagcgggccacgcggaaaagcgacagtttcatttcatgccaaaacgcacactggctggcaaagcggctccgctgcggctttttatttatgagcagcgatcgacgctgacgctgcgatccgcaacacgcacacacgcaaagcaaagtaatttcgcatttatttgaatttcaccgcgctacgactcagccgacttgcagcactggcctttggaacggcgctttgcagcaccgatccgttcaaaaagtatttagaatttttgaaaaaaaatcaaaactgctgcatatttttatatttttgttgtaaagcataaaatttgaagaaaagttttgtttttctcttttttcgcccaatttttgtgacttttctcgcgactagccaagactagaaccaaagtgcggatctgtagactacatttgtagaatctggccatttagaatttgaatgatacatgttgatgtaaaactaaatcaaatttcaatagtatgtgcaacaaatctttctatctcgatccttaaacagaaatgtgagcctttaagatatgtttgatgtgtaaaaatagccactcattactcgctgttcattttgtttggcttgtttgttttaaaaaaataaatacaaccaccccttcgtgaccaccctgcttaaaacctttcgttctgaatcgaaaagagcaacaaaagagagctgtgaaagcgaaagccgtcgtgaaaatgacccgagggtccgaggaaagctgaattgacaaagcttttcattcataacctggcccaacaacaagaatggtggggatgcatcaacaaatggtggcacaaatggtgctcacaagctggcggaaattcggggaaatgcgaattgcgcacaggataagcggagcgaggaaattacagatgatatatatatatatgtatataacattagaaaaaactccgatggtgcggaaacggtgcgaaaattgcgtggaaactatccgccatgtgactgtttaaaactttgttattccctcttttttatgtgggagcttttgtaagcggctt

SEQ ID NO: 9704 - DNA, 1686 bp, DROSOPHILA
aaatgaaactgtcgcttttccgcgtggcccgcttttctcgcagtgtatcccagtgttttgccggagatcgttgatatatctatatgaccacgcgatcgagtgctttgatcagacaaattatatgaggcaggcgatttaattcgcgactactttggttacataaagggcagcagagagcgaaggatttgcataaattaattcggaaacaacttgaactaattcgcctacattatagccggacaaaatgagtgtcgaaagattctggccacctgtgctgtactcttactttccgctggatgcggcatgcccattggattctcggccatcctgttgccccagctgatggataacaactccacggagatacccattgatgtagagacgggctcctggatagcaagtgtccatagcctggccacaccatttggatccctgctgtcgggacctctggcggactatttgggtcgccgtaggaccctgattctctctgtgattcccctcctcctgggatggagcaccttggcgatcgccaagagcatcaaggtggtgatctttgcacgcttcctgtgcggattcgccaccggaattctgggtggacccggacaggtgtacattgcggaaacggcggaacccaatctgcggagtctgctgatcggcgcgccctatgtggcctactcaagcggcatcctaatggtctactccctgggctccatgatgtactggcgtagtgttgcgtggtgcgccaacgtgctgcccctgctgtccatggtgtctatctcgtttataccggagactccggcctggctactccgcaatggccacgagaagcgtgcgctgcaggccctctcgttcctgcggggcagcgagatcagtgcgcagaaggagctgaatgatatgaagcagaggctggccaaggagcgggtgaccaccaagacgaacgagaacatcttccagctgtgctgccagcgcgtggccatcaagccgctggtcattgtgatcgtgttctcgctgctgcagatgttctccggcacgttcatcgtgatcttctatgccgtggacatgatctcggagttcggagcggagttcgactccaagcaggcggccattgcgacggcagttgtccgggtgatctgctgcatggtcttctgcgtagtcctgatcttcgttcgccgccgcaggatcatgatagtgtcgggaatcggctccggcttgttctgcctggtgctcagtgtctatcagtatgccagattcgatcaaccgaaaatgtcgtacgacgtattcgttggtgccggctgtctcttgggctacatcatcttcaacacggctctgatggtgatgcccggcattatgatcggcgagctcttcccggctaggatacgcggacggactgccggcggagtgtttgcctccatgaacgtcgctctgttcatcttcgcgaagaagtttcccgctttgcaggccatgctcaagatgcgcggcgtgttcctggtcttcggcgtgtccagtttcctgctcactgcctttatgtgccttttccagccggagacgaagggccgcagcctggagcacatcgaggactatttcaacggggacaactggctctggttccggcgggatcgaggctacaagacggtcaacctgcagcccctggagccattgaaggacacccgggggctggaggcctag

SEQ ID NO: 9705 - protein, 460 aa, DROSOPHILA
MPIGFSAILLPQLMDNNSTEIPIDVETGSWIASVHSLATPFGSLLSGPLADYLGRRRTLILSVIPLLLGWSTLAIAKSIKVVIFARFLCGFATGILGGPGQVYIAETAEPNLRSLLIGAPYVAYSSGILMVYSLGSMMYWRSVAWCANVLPLLSMVSISFIPETPAWLLRNGHEKRALQALSFLRGSEISAQKELNDMKQRLAKERVTTKTNENIFQLCCQRVAIKPLVIVIVFSLLQMFSGTFIVIFYAVDMISEFGAEFDSKQAAIATAVVRVICCMVFCVVLIFVRRRRIMIVSGIGSGLFCLVLSVYQYARFDQPKMSYDVFVGAGCLLGYIIFNTALMVMPGIMIGELFPARIRGRTAGGVFASMNVALFIFAKKFPALQAMLKMRGVFLVFGVSSFLLTAFMCLFQPETKGRSLEHIEDYFNGDNWLWFRRDRGYKTVNLQPLEPLKDTRGLEA

SEQ ID NO: 9706 - DNA, 2911 bp, DROSOPHILA
ttgcaagcaataaaaattaatttacgttcgattgcaaggttttcgcgctcgaaacgagagtgaacccgccgccgccgccgcctccgttgatgacacataaaatgccacgtttacggctccttaagacgcgactcggtctcttcactttctgccaacataaaaaatgttaagttcgaaaaatggcgattttttttttaaggagagcaggaggcatgtggcacgccatcgcaacgtttcaaagtggcgcactacttgcctaaaacagagagtaaatcggcgcagttggccatttggatttgatgccccttcaccttgccagtcccccgtctcgtgggcttggcgatcagagtacctttccaggaatcggaaactgggctcgtccgcactccgcctgttcctctggacaggtctgcgctgcggcacttccagcttgaacctgagtgctttgatgtttggcccgtttggctgccagaaactaatatcctttgcgaaactgatatgatttcggcatggaacgggttttaggatcattcgtacttatataatgacaaaagcttattgggttcattagatttatttattcaattttttatcttatttttccgatagatttttattaaacatatttcaattcaactttggtaatgattatcattgctaaacagaactgcattggtgatgatgaagtattcttcctttaaacattaaccaattttgtatttttccagtcttaattgtttgaaaacatctatgtaatttatatagcagatcataagttgataacgatctaaaatgattatgagctaagcaatcccacttctcataagttttttattgaataactttagatttatgtggatatacatttaggaaacacacaatattgttatactaaatttattggcctagattaactatatttagggtaggtcgctgtagtagttgacccaagcgtttttggcttaactaaagtattcctccgcaaagggaagtcggtcatctagcggcgactattctcctccaagcgcgccaccgtacgtcgcaactcgacaagctccgcctgaaggcgatccacggagtcagcttgaactgcactgacagctgggagagggcctgaaggaactggagctggagctgaaggattcaccgccaagggtggaacggcgcgtctaaatggtactgcaccctctacgctggcgatggagaagttcggatggatttgaggagtagtcacatggccagtggccgctggagtgcccgcagacgttgagacgctggccactggccgtgatagtattagcgatgaaatatagcccgatggcggagttcccttatggttggttaaaaacttttgtagcttggacgcagcactgtcacgttgcgattccagcagcagacgcatggcctcctggtcgccggatctggccttctccagcgagtcggagccctcgtcgatgatcacatagttgatgacatgggcatgggtgcccggctttattcggtatactagctgtccaccatcactaattttcgagagcgccggaatgtcgcccatatgggccatttcgccgcccacttgaaagatcgatgtgtgcccattgactaccagtggcttgggcattatgtacggcgcggacacgaactgggagcacttcctcttcgtcttctccaccacagtggccactttgcatccggtggtgttgcaggtgcgcaatggaagcagcgcatccccgccagaagccggatttgtttgctgcattgtcttggctatacgacagttctcacggcagctgattgtgaattgcctgctcctctgcaaatcggccaacgcttttcgatcacgcacaaacttattttttatttatttttctcgttttagtggtttaaaaaacgtttttaatgttaaaaactcagcgttgtcttttttttttgtagtgtgaaccacgcgttagggaatcacaggtttcccgaagataccacgaaaaataccataaaataccagagtgccgttgcgcatgttgatagaccgataagcgtaaagcgggaaattcgaaaattctttggcgattgcaagaaagcaaaaaatgcttttagatatttctggctattacttattaaatattagttgttagaacataaatgctagtatagcttagcttgtaaaagtaattaagatttaagttgaacatatacaacgcatttctatttttgccttgcaatctaaaaaatcgctcaattactaacttattatttgtatatgttttatgtctatagttgtctgaacaaacattaattaaaactatatttgaagcttgcgaccataatagctaatgaagacaattaagaatggggcccttcttaacacattaagttctcgcagagtgagataataaataatttgcatacataatcgaggtgagagcattcaggtgtctgggaaatggcgcgtgggtgcaacgaccaccgcgctgacctcgaaacggggcaaatggagctggacgacggatcggatgatgggtggagtagaatggagttgcacccgcttcatttacattccaagtactttaagagcgaacgctggtcgttaaaagatgctgctcggatcggacattgagcagcgggttttagtactgaaacagcgaacggaccggactggactggactggaccgggctggacagttccagccgccagcttctttaatttccactcgtcaatcatccatctcggcgaactcagagttgcagcctcattgttggctcaaatgaaataattactttagcacacagcgactgactgactccgtctggaaatggattggaatgggccaactcggaccacgccaggccaggccaggcccttcgtgcatctgcatccttagtcatggccaatatatcgactcgcattaacca

SEQ ID NO: 9707 - DNA, 911 bp, DROSOPHILA
agtttttaacattaaaaacgttttttaaaccactaaaacgagaaaaataaataaaaaataagtttgtgcgtgatcgaaaagcgttggccgatttgcagaggagcaggcaattcacaatcagctgccgtgagaactgtcgtatagccaagacaatgcagcaaacaaatccggcttctggcggggatgcgctgcttccattgcgcacctgcaacaccaccggatgcaaagtggccactgtggtggagaagacgaagaggaagtgctcccagttcgtgtccgcgccgtacataatgcccaagccactggtagtcaatgggcacacatcgatctttcaagtgggcggcgaaatggcccatatgggcgacattccggcgctctcgaaaattagtgatggtggacagctagtataccgaataaagccgggcacccatgcccatgtcatcaactatgtgatcatcgacgagggctccgactcgctggagaaggccagatccggcgaccaggaggccatgcgtctgctgctggaatcgcaacgtgacagtgctgcgtccaagctacaaaagtttttaaccaaccataagggaactccgccatcgggctatatttcatcgctaatactatcacggccagtggccagcgtctcaacgtctgcgggcactccagcggccactggccatgtgactactcctcaaatccatccgaacttctccatcgccagcgtagagggtgcagtaccatttagacgcgccgttccacccttggcggtgaatccttcagctccagctccagttccttcaggccctctcccagctgtcagtgcagttcaagctgactccgtggatcgccttcaggcggagcttgtcgagttgcgacgtacggtggcgcgcttggaggagaatagtcgccgctag

SEQ ID NO: 9708 - protein, 252 aa, DROSOPHILA
MQQTNPASGGDALLPLRTCNTTGCKVATVVEKTKRKCSQFVSAPYIMPKPLVVNGHTSIFQVGGEMAHMGDIPALSKISDGGQLVYRIKPGTHAHVINYVIIDEGSDSLEKARSGDQEAMRLLLESQRDSAASKLQKFLTNHKGTPPSGYISSLILSRPVASVSTSAGTPAATGHVTTPQIHPNFSIASVEGAVPFRRAVPPLAVNPSAPAPVPSGPLPAVSAVQADSVDRLQAELVELRRTVARLEENSRR

SEQ ID NO: 9709 - DNA, 15817 bp, DROSOPHILA
acggagaaattcgcccggatccgggtctgcttctggtcctgggactcccagagtcccgggctccggcaagtgctatgttggatttaagtcggcggagggaatcggtcggttggaatctgggtggtcctgttgccattaaacatgtcaccaatgcttcccttttgtggtttttgcactgtgtgtgagcccgatatttatgttttacgctccgcattttgcatgagtattggggttaaagttcgtgtgtgaaaatgtgtgtgtgtgttggcgtgtgcattttgagtgattacgtcgatatcattgatgttgatttatgatgatgacgatggctgtatatacgcgtaagtgttgcttgaaatattctcgcaaaaaatgtcaaatgaaattaaaacatggaaaaacacaggtgaaatttatgctcacagggacataaaagcatgagagtacatgaaacagagaagcttagataaaaccgacaccaatttctattaatttttaactcgcaggattcgtaaatttcaataatataaatatagctaataacgctgtcgtcattgattttgctttaatatttacgttattgaaattttcaggaaccctacttaatccaaataaaccaccaccataagtttcgtagaaaagtgtcgcatacccggcgtttcactgtacccatcttgaggtagttttgtggttgagttggacgactgttcgattgtccggtgcatcggtgcagtgggacgcacagttgggatacccactacaaacaaagggttatttcataggtataatgaaattcgaaaagttggaaatgcaatgcaatgaaaagcgcagtgcagatggccacttaaatggccgcaaccgcagcgggaaagcgttctgcatctccacgcatcgattttccaccgttggtcagatggacaacaaagcggtgccatcgcggcggaatgttcaaatgcaattacgaaatccgccgtaaaatacccaaaggacacagtaaaatctacttacgatcttcgacgcacattagcccgtcgggcattaatttcaggcctgtcggacaggcgcaggatatgcgaggactccgctcgttaatcctgggagctggcaggcaaagatgagaacagtggccattcaccgactggcagtgattcacgccatctggctggcgataaggatggtacacgtgcaccaccatgggatgttccaactagaattggaaatggtaaaagttttttggttataaaaatactttttctatctatccttacaaatatattcttttaaatgtatttaatttctcgtttcttggaatgagtagcttagataagaagctcaaacgtttcacaattatctaccataattcccaagcgacgacttacataccaggcaatcagacacttgtacttaaggtcacattcctccggatatgttatgtattaaatttaataggaagtgtgctatcatcgcaagcagttacgattgcaaaattctcgatatatgtaatcttaaaaagaaacaatttgggaaatacacttaccatatgcgtcgccgtaacaggctccacatccattccattgaacttgttggccttgaagacggcttgcttatcccagtcggtccagtagacgtagtcctcgaaggtggtgatcgagaagggatgtcgcaggtattcgccggagtagagcacctgatgtctttgcgagccatcgtagtttgacgacgagatggtgttcaacttgccatccacccagtaaaggcgtttttgaaccaggtccaatgtgatgccatttggccacttaacatcgtaggtgatgatggcagtgcggtgggtgccatccatacccgccctttcgatgcgcggagaggcgccccagtcggaccagtacatccagccctcgatgggatccaaagcaatggaacgaggaatgtccagggagtcctttaccaggaccttgcccatgctgccctcgaagttggtcagttcgatggtgcacttgtgggtgtccgtaaagtagacatggttatagatccaatcgacagccaggccatccgaggtcaccgaggactttgtcagcaccaccgttctatcgttaccctcatcaatgggcgctttgtaaatactctgggttgcaacatcgctccagaagatcattcccgtgcggaacacgaagtccagagccgtggctgcctttgtactattcactattgacgtcatttccggtcgatccagtgctatcttccggatgtcatggcgcctggccagaagtagcgaggcatgtccttcgctggccttacacctggtgtgattcttcaggagtctcatgtagcccgcctcgcactcgcacttaaaggctccgatctcgttgacgcacacctgggagcaaatgccaggagtctcacattcatcgatgtccacacatgtgtgttgatcggcgcccagtttatagccatcgtggcactcgcagcggtaacccacctccagattcacacactggtgcatacagccgccattcttcgaggagcactcgttgatgccacactttccggccggctcatcctcgccattcgggcaatccttcctgcggttgcagaccttggcattcgggatgcacagaccaccgccgcaatcgaattcagtggttgcattgcaagtccttggcgtcgcactaatgtcgcacataatttcatcactgccatccgcacagtccctcttcccgttgcaggtcagatggccagcgatgcagctttgatcgttgcattggaactgatccggacgacaggacacttttaggcagttggactgcgattcgtcctcgccatcgggacaatcggcctcgccatcgcaaacccacgatttgtgcaggcaggtgattctatccgagcactggaactcacccgcttggcagaagttcaatagactgacggtgcagttttgctaaaagtgaatgaattatatagataaaatgggtacttttaaaattaagtttgcttaaaagtcagagcttaatgcttaagtttttcacaaggtcgtcttttaaaagatgaatctctacccgtggcgaggataaaggaagttaactttactgctgctacaacagtttgcttttcttgttaagtgccaaccaaatattcaggcagctaagcccggttcacaaacacactctcgcacacgcaaagcccttatgcaccagcacgcacacatacacacgagagcatacgtacatgcacacttatatagaggtccctgtggccattgcctgcattttttgtactgcatacttttaggagatgccagaaaacattttccacattctatacgctttgtaaagaggagtacttgtgtgtaaatagcccgtttatttttacgaatttaattaatcggatttttaaaggtgaaatttttaagttggtttttatattgtgtttcgatattgtgtgatgtttttgtgatgcaagataataaatattttaacctttttttttgttggcaatcaaacagtttaagaattttaatacgattttttgctttaaagaattactataaaatattttctcagtaaattcgtaaaagagtattttttgcgaactgttcggatagtttctgcactgtttttattgctgttcggagccatgcaatttcgggcaccaccctacggacaacaaaagccatgcgtcatacatataaatgtttatgggaaacagttgccgacatggtcctcgtcgtcgttgccagttttgaataatgctcgcgtcttgcataatttatgcttcctagcttgctccatataaatacatatttatatgcgagggctgttaaacaacttggcatttgtatgtgtgcatgtttgtgtgtatgtggtttgataatgtgctcatatcaattttcattgcaagttgaaggtaggggaaaagatttccggactttacacggcaaaaatataaatatatcttgcttgcacggtttctgtgttttcccttgttatcaacttgtgttttattttagttaactcaccatttcatcttcgccatttctgcagtctgaatctccatcgcaaacccattgattgggaatgcacggtccacttttgcaagcgaagaaattggatccgcatttcgccttttccccgcagttcttctcatccgatccgtcaccacaatcgtcgtcatcgtcgcacttgaagcgattctgaatgcaacgtccattgccgcaggtgaactcgtcggagcgacatgtcctatctgccgaagtacattccaatgattagtttaatttcactatgggttatcggcgggaggatttgatgattgtgattagtgtgagcatggatgggatgaggaaaagctaaagccgcaaagaccatttctttaaggcttgggaaaagccaacaccattacaaaaattgccaacaaacaaagaaagcatatagagaagggcgagatgtgaaagtgacaacaacagaaacagcgcacacacagaaaaccaaagtgttccctctgtgtgtgcgtaaatatttgtacattattgcatacgagcttcacgatgtcacaacacaagtctcagggacatgtgttcatggcacagtcaagtacggggaatagtgcactacagtatctagaaataaataagcaaccaacaccaaaggaaagcagggaaaaatctacgataatttcaattattacggcaaccaacaccaagcaaagcaaagcaggtaacagagagctaggaaatattcggttatggcttactgcactgcgcctcatcgcttccatcgcgacaatctttgttctgatcgcacatccaggacaagggaatgcactcgccctcgcccgacttgcaggcaaactcctcgggcgaacatgtgtggcttcctaaaaagatcaagatcatggaaatacgtaatttaaagatacatcgagaggcaatctatagtgtgctttgttcataattcagtaattcctagaagaagaaaattttcgattgcattttgaaaaatcctttttgttttattaaatatatcaaataatggtatatagagtcttgttttgcaaatattacccacaacgggtaaaaaatttaataaaatcccgagcacctacttcaaggctataatcacaaagggtgccggaaaaaaaccactaactgcctagctaatgggacttggtcttgatgagataggaaacgatccttaaaggcaagcgagggatgtcctgtaattaagtttataagcagctgccatataagagggagtgggacagcaaccgttctccaagtaataaacatagttgtcatgccaacacacacacacacaccacactggcacaaccaacaaccattcgggggctaaacagttggcattttatctaggcagtaattaagacattatcagccaacactccataaagttaaaacgcacacatgcgtatgcattaaagcaattatcgcacacactcacactcgggaagttccattgaagttatccttgccaaaggaacggacattaaacaaagctgacaacacaaccacacatagacacatagacacatagactcacagacacgcacacacactggcgcattaaaacgcttgtgtttaacccttaatgcgtattagtatgccagttcttggcgcctcgcttttgggctttctttcgctttctttctccatttcattgcctaccacacggccctttgtttcacgccgtgagtgcgtgtgggagtgattttccctgatatgattatgtacatacatacattgccgcggtgactctctgtgtgtgtgtgtgtgtgtgcgtgctagcaataaaatcttatgcttgagccacacatttgaatatgctttttggcgttttgtctatctccgcctgcctttcctctcctctgtttttcatacttgcttcattccgtctatttgtttaccgtttacacgtgcacggcgtacggcggaaatttctgacatcgttgcaaataaattaatttattattattctcttcttggtattcgccattttggcggttgcttagcatgtacaacgggtcgtatgcgtgatatgcctgtaattggaatttactgtgaccagcttacagaaattattcgtcgttcgcctgctgaatatttactgaaattgctaggatgcttcggaaatatttaacaaaatattaggtaacttatttttatatttagctattttataaataaataaaatgacgctttttcagccccgaaaatgcaatttaaattgtaagtataagttcaaagcaatttgtctagtaaatttaatcaattaattggtttatttatacgctacacctatatttgaatatctttcataaatgtccattaaatctatagtagcagttctagctttattttataattgctccattgggtgtccagtgcactgcagtgaattacatttcagggaatatggtttcctcaaaattattggatcagttgactttcatttacatttttcataattaaatggcagctccagcattaaaatcattttctgttaagcatcgttcatattcagttgaaaatacttttcgattatttcgtttgctccgcacaccatgcacctgatataaattcaattatccaatatcatttcgccgaccatgatttatggcttcattaaattctccatcgctggtgaggaaaatattcgcctggggtccttccatataactaactatatgtatgtatatatacatataactttccattttatccattcgaaggtaactacttggctgaatggacgtttcattcttgtgtgtccatagggacacagcttccatctcggcttcggcttttgtgagtcctggcagaatcaatttgctatcgtggggtcacagtcaatggaccgccgaggatgctcggctctggctctccttcctcaacgcacacacatcctggcagaacattggcattgtattcaatagcattttcttgttatctgacgccaaaacccatatacttgcaatttgattttaattttatttaaaatgctttttagaccatgtacaagacatgtcctggtcgagtgcagtggccacgccgcccgtctccgcctccaactctcgggcacttgaaagccaatgaagcttaatgcctttgtggggcagtttgcgttttgtttattattcaactatccacccttggtcgcattgtgagatggccagccgagcttttcccataatggtaaacaaagatatgaagagtccgagtggagtgttaaatggaattaaataaacggggcgggcaccattactgaaaatagcacttttataccgagaaatccacagcagtgagctgaacttttttttaccgaaaaaaaaaacaagttaaattaagattcacaagggtaactgagtaagagcgaaaatgtcaacaaggtttgatgacaattttaaagcacataaaagtcataaaaaggcgaacatatccattcacatgagcagacgtagctttatgctcgtacaacatacagttgtgaacatggaaatatacacaatatatacttgaatttaaaatgttgttataaggatctaaaattatatttgcaatgtatgtaaatgtgcaatttacttttagaaatataaatgaaaacactccaaatattagatacattttgaagccctagtattttggcgaccactgtacatcctggtagccgaccactgagccacgactccccgcgtataaaccacaggctcaatttggcgctgcgttcggcttttgattaccggtttttattttcatcaaggataacatcataaaaatcgcatcattttttcaattacagcgctgaaattccgtccgacataaaaacattttccctgctcttctccgccaggcactctcctctttatatagttggaaaattgtgtcacagacaataaaccactaaacaagttgctcggcagcaagagaaatgcgaggaataaagtgtgtaaaaagcggaaactacacccaaaacggaaaagtgagccgaagtgagcctaatgcataaatacaaattagttccgccgatggtcacgtcgcgatattgtccacaagaggtgacattaatttatgtcctggtcagtccctggcaagtcataaagtcctcccgagatctcagaggccggcaactgtcttccatgcatttaaatttcgattaagtgactctgctttttcgctcgttttagtgatggacaaatcctccagttagtatgcaaatgtgagatggaataattcattctttttagcttactgccacattccaattcgtcggatccgtcgcgacagtcctggtcgccatcgcacatgaattcccggtgtatacactgctcaccatttttacacatgaacatcaaggaggaacacaggccccctgagcaaattatcatttttttgggttattaggatttcaaaaaaaaaaaaaactcttagacataattaaatccatttaaaatttgattccttttggttagccacacttgctcgattcaattacgttttcaatcgcatatagtccgatatctactgcttatatcaaagatattaaccgacacttacggcactgggacgtcgattcatcgcttccatcggcgcagtcgttttcccgatcgcagacccatcttcgcggaatgcactttccgttgccgcagcggaattgttcctggctgcaagttgattctgcaagagtaaatgttcgaaatcaattttacataactgtcgaagataatggcttcgatagaatattcccccccccctcccccaccccataactagatataaatgtttctaaacgtacatatatatgcacacatttatgcagagcatggctttcaaacttttaatgctcgaatggttaagtgtgtcaaaaataaatgtgatttttatgttcctgcggcttccgctttagcttttgttttatgctttagttgaaatagtttttctgccattttatgcttactttattttatgactttactcgcttagatgtttcttttaaaggactaaaggatattcctattatttcaggatgcttcgttgcaaggaaaacaatttatttggctggctgagtgatggtaatgcaattacgagataaaaggaaattcctgatcacgttagctttggcttgttagccaattgacaggggaatgtgatgaatgctactgtttgaagtggttatctatttcttaacagccgtaaaatggcaattaaggctgtaaaattggaataacattttatataattagcttatatctatgcaaaacttcaaacatgtagtctaaggatttttaattgtaatttatgtagaatgttttcagatttgtgaattttttcctaagtgtttactttgcaccttttgagagcttgtacaagagtgcagacaatttggcgcttaattcaaacgaattcctctgaatgacatctgcattcggtttgacatcactttaaggggatccttggctcctccgctgggtgaagttttacccccacacggccgggagtcgtttgccataaacttaagcgcaacttttgtggcaatcccaaactccggtagttcccggtaacctcaaaccgaaacagccacccggagtggaagccaaaacccaggggactcagtcatacagccgccgcagtgcgaaaaatgcgcatcacgttttgcgttttgcgtttggggatccgggaaaacggcgaaactgggaaaactgggaaatggaaacagtgagcttgaatggcgaaaacgttctggttcgtatttacctagacagcggcatttagcgcccaaaaaagaacattaaaattgggtttagtcgggggattagtttcccggggtctggtgtgggttatagtctggtttcggtttgatttagcctgggcttaatgagctaacgcatcaacggaattcgaaagggaatgattaagtatttatagtcgaattgtggcttggtgtagtgttcattcaagtgcatttccaatttttctacaattcttttatgctaaaagtaaatatatgaatgatttatttatgaaaccataaatagtctgtcatcgccagaatattacacacagaattaaggacattattctgagctaatgcacaaatagacattttttacaagcaatttgttttgctttattacacggtgagaaaattgatgataaataaaataaaaaaaagtaataaacctagaacataatcttattgatttattaatgatttgtatttacaaaagaagaaagcaaataattcgtaagggacctaaatcgttattttatgctttcaacatttttggaatggtcattttttatgcctgaataccatattcacaaattttcgctgttgacctttcgccaaaagattatatatgtgtgttgaatataagttggattacgcatatatctaaataaatgtatgcattttttgttcccgtgcctaaaagcactttttgcagctgctttgccacttgccacccagatgcaaacttcattatttacagtctgccgcgtcgcgacaacatgaagcaaaagatatgggatattctgggtgtttcaagtgggcgggaaagtgtggtgttactgccagacaggctcttaattccccttagcattggtgtacgcgggaaaccgacacccccactgcagattgtgcaattcatttaaagtcctttcgccgaggggagaaaatctgacgacacgtcgtgcgataatgaatgacacacctggtggcgtctatttgaatgctcgccaatatttattaaactccagtgtgggggctatcacaaattgaggttcccaactggcgacaacaaaagtgacaaagtcagccgacttaagccaaagcaaatacatcgaaaactttccatacagacaccgggaactaacctcgacaaagtttggtaacaatgcaggtccttcttctgctcctcctcctccaggacaacagtccccaagctcatttacaggccaaaagcttagtgctagaaaagttgccttgtacttgggaagtgtccacggaaaatggaggaaaagtttttgcggtcattcatcgatttggcgcattaaaagttttttgatatttgccgttttccaatatccattcgagtgccctttgttcaaatatattctataaattactgcatgaattaagttgtctaaacacttttcaaatctaatattcacatttatagaaaaacaaagacacagacgcacagatagaaatataacatggaattacttttattgattcttgggttccggggcaaaaagatgtcctaatgaagtttgtctgtctggcagagcataaattgaattgtccgattcatttaaacggcgaaaggcaagcgaaaacaaaaagtatacgagaaatgcgaaagtgaatttcacttctccccaaactccacctaaccctcatctctcactgcccattgtccgcttgtctcgtctcaataaataaatgaaaaatttgtgccacatttaaggggattttcctttttcacagtttacaattgttttccccatccggttttttttatttatttattttcggcctttgtttagacaagtatctgcttccgcacacagcgggttgtgtcgtaaaaaaaaggctcgccgctccttgtttatggcacctttttccactttattgaagttgtactccgcctcaagtatttcaataaaaaaaaaggaacaggcaaatggggcggctaagggtttgtttttggtctggtgtacatgagacaatgtcggcatcataaatcattcccagaacagacgcgagtcgctctaatgaggcaaagttttgtgttacatatggcttggcaactgttgctaaattttggacagtgtaatcgcactttaaatgtttgcccatttatatgttaaataaacttgttccgggaagcgacgcaaacaaattgattcgcggaatggaaaaagaagaatagatggctctgtgaagtattcgaaaagtaattcccatttctgtgaattcctggccaacttaggatacagccaattcgatggattgctgcgcttaaaaatgtgcggaatacataatttatggctttccggaaaggacacggattggggggcaaggaacaaggccaaggatatgtgactgaagttatctaaagaccgcactcggcgcacagaaaatacacacatatatagaggattcagctcctgcttcgtcacatatttttctcgatttttattccttgggtgggtggcaggcttatcagctgtctgctttttccaaatgtgctgcatgaatatttatgccctcgatatcgagcactagcatacccatgaccaatatgtatggcatccagcaccacatggtataaaagctgtttaaaagtcgggaagcgtctacggcgtctttcgtcctttgtctctggctgtttacgcggcgtatgggtaaagcggtgtatgctggcaacacggcgtatgagcaacgccaaggaagcggggcacttagcgctcctcttcgatgtcttcgatcagctctgttgttaatggccatccccagtttagttgcctataagttatttatttatttactgcctcctaagacattattttttgtcatctctgtggaattgccattgatttttgcccacctactgtgccacgcccatgcataagggataacacccactcagcgattacgtcgcacagacaataacagtaaattgaaattcacttgaagcggttaatgggtccgcgccttgatagcgaaaaactttgaccgaacatttcctgattgggcttttttctgtttcatgggaatttacattattaagataatggacaagtgacatttactgtacttggaatacttgcaatgatgtcaggcttaagtgtataatcgtatgtggtaggcgtatcgttcttaaaaatattgtatgtacgttttattaatttcattattataaaaaaggttacgaatgtcgatttatttaggcgtattgtttgaaacagaagattacccattgttcgagatcggcaattaaaaactatattaagcgaaaaccagcgtattccctattttaatctggttgctaatctgatttgcgggaattatcattccacaaccataacagatttccccatcatacccaatccgacgactctggaggcatggtgcggcactaatccggcgatgagcagcagaaaggagcagcccaggatgcggcatattggtcccatgttggttctttggaggctctactgtacactgcacggcagtgtgataatgttcttgcctaagtgctccgctgaattattaaattaaattactgtttattcgggtttgtcgtcgcgcgaatgtttgcactgggctctctgttgcgaacgtgtaatcataattattttaaatggcagtcaagtggtctgccagcaaaaatggcaacaggcaacatcatcacagcatcagaacggttaacagcagtggcagtaactcaaaagtagtcaactgttttccgctcacaaataatatgcgaatttattctggcgaaaatgtcattttaattggtatcatattcaacgaagtcactaaagtttttcctctcaagcgtggaaactgaatttatttactgtctttttttcaatggacttgctttaaaatatttgtaaatattgtgtgcaattccaatggttaattgtttggtttataactattttaatggattgcgcttgttttgtaaggttttctgctattttaaaaacagatactttgtttacttgtttagccacgcattttaaagatgaatagttgaattttatgaaagtgtagtaaatgttgcacttcatgtgtttactttatgtacttaaatgttttcacatggtaaagttcttaattatgctttatgcagccccctttcacagttttccacgtatttaacgcttgtcatatttttgttgaattattattaatgcggatgcgtttgcagaacttcaccgaatcctcgcatgaagcagttttttttgtattttaaggggagttgagttaagccgagttgagtgtttacatttaatagcaattttttactttgacatgccgacaggaattatgacgctcacaaactctcacacaaccgggaattccaaatgaaaattaataaatattaaaaccaattataacagattaaagtgcgagtaatgtgtgaagattaattatgattaagctggacagcaattccagattcctctgcattttaaagtgtttgcattcggattcggtgtcaagttcatgcaatgcaatgcaaaacaaaggccaaatctttgctgaatctcaacagaattatgccagaccctgaagagcgtttgtaagagattctgccaaaaagagaggtctaaatgaaaatgtaataaaaagtggcgcgcagaagcgtgaaaaaaaaacacaaaaaacggaaaaggaaaaacacacgcacacacacagagagagttatcctgcggaaaagcttgcgtttggggggaaaagctgctgttgctgccttttgatgttaccgccaaagagacgccagctaactgttttcaatctgtctgccagcgtttgtcggcacaatttggccttgccattgatttttgctggccgataactgcttttatttaaatttattttaatgaatttgttgaaatgtatttattttcttaaaatatttaattacaaatcactgtgtacttgaagaattttgcactttattttttatatgcctctcgccttgacttttacgaaactgattttatgtttgccgcctcggagtcctgaaatctcagttatcctggccggagagcacacacgtccgtttctttgcagagctcgaagcaaactgaatcgcgtttggtcctcgtcggatgcggaacagatgtactggcatccagtatttcgcagactccgcgcgacagaagcttgcactcggattgataagagttccactcaaagcttccactcacaattaactctcactcaagcgaatgagtttaggactcgcaggcatttcaattgaattagcttagcaagtgaatctatatttttgtgcgcaatttaattgtaatttgtcaaaacaagaaaaatacccaaacctaatgaccctatgccactaataaataatctcaaatgtgttcagtgacgccttgctagttcactagaactataagttcactgataaggtatgtctactgcactctcctagattattagctagagatccggctgaactggctttgtgtagaacttatacttcaatataagttttaggtcaagtttaatctggatttccttgttgtgggatacgcattatttgttgtttctcgactgttcgttcggttgataaaaagtttaaggcgcatataaacgacctttaattgaaacaaacaatttttttttcaaagtataaatatatatatctgaaaaaatgcttaatttggcagtgatttgattattaacattattataatcgaaaactgcaaatatagaaacgtacatttatacattgtacttccatgtacattatctttaaaaatttgacaaatgagttaaaaagttaagttcatcagaatatttgtagaatatttacatatttgtgttggtgatggggatgaagatttcgtaccacaagtcttattgaatacttggagcaatcaagtttcaataagcttttcattctttaagtgattacatccatttggtttgagcagtttgaatgcagttcagtttatcacccaaaagctgatgcaatggtttagttaaattgcacttgacttgcttgcagtgcctccaattagactcaactcgaatgcaactggaactgg

SEQ ID NO: 9710 - DNA, 2516 bp, DROSOPHILA
aagaaacggacgtgtgtgctctccggccaggataactgagatttcaggactccgaggcggcaaacataaaatcagtttcgtaaaagtcaaggcgagaggcatataaaaaataaagtgcaaaattcttcaagtacacagtgatttgtaattaaatattttaagcggagcacttaggcaagaacattatcacactgccgtgcagtgtacagtagagcctccaaagaaccaacatgggaccaatatgccgcatcctgggctgctcctttctgctgctcatcgccggattagtgccgcaccatgcctccagagtcgtcggattggaatcaacttgcagccaggaacaattccgctgcggcaacggaaagtgcattccgcgaagatgggtctgcgatcgggaaaacgactgcgccgatggaagcgatgaatcgacgtcccagtgccggggcctgtgttcctccttgatgttcatgtgtaaaaatggtgagcagtgtatacaccgggaattcatgtgcgatggcgaccaggactgtcgcgacggatccgacgaattggaatgtggcagaagccacacatgttcgcccgaggagtttgcctgcaagtcgggcgagggcgagtgcattcccttgtcctggatgtgcgatcagaacaaagattgtcgcgatggaagcgatgaggcgcagtgcaataggacatgtcgctccgacgagttcacctgcggcaatggacgttgcattcagaatcgcttcaagtgcgacgatgacgacgattgtggtgacggatcggatgagaagaactgcggggaaaaggcgaaatgcggatccaatttcttcgcttgcaaaagtggaccgtgcattcccaatcaatgggtttgcgatggagattcagactgcagaaatggcgaagatgaaatgcaaaactgcaccgtcagtctattgaacttctgccaagcgggtgagttccagtgctcggatagaatcacctgcctgcacaaatcgtgggtttgcgatggcgaggccgattgtcccgatggcgaggacgaatcgcagtccaactgcctaaaagtgtcctgtcgtccggatcagttccaatgcaacgatcaaagctgcatcgctggccatctgacctgcaacgggaagagggactgtgcggatggcagtgatgaaattatgtgcgacattagtgcgacgccaaggacttgcaatgcaaccactgaattcgattgcggcggtggtctgtgcatcccgaatgccaaggtctgcaaccgcaggaaggattgcccgaatggcgaggatgagccggccggaaagtgtggcatcaacgagtgctcctcgaagaatggcggctgtatgcaccagtgtgtgaatctggaggtgggttaccgctgcgagtgccacgatggctataaactgggcgccgatcaacacacatgtgtggacatcgatgaatgtgagactcctggcatttgctcccaggtgtgcgtcaacgagatcggagcctttaagtgcgagtgcgaggcgggctacatgagactcctgaagaatcacaccaggtgtaaggccagcgaaggacatgcctcgctacttctggccaggcgccatgacatccggaagatagcactggatcgaccggaaatgacgtcaatagtgaatagtacaaaggcagccacggctctggacttcgtgttccgcacgggaatgatcttctggagcgatgttgcaacccagagtatttacaaagcgcccattgatgagggtaacgatagaacggtggtgctgacaaagtcctcggtgacctcggatggcctggctgtcgattggatctataaccatgtctactttacggacacccacaagtgcaccatcgaactgaccaacttcgagggcagcatgggcaaggtcctggtaaaggactccctggacattcctcgttccattgctttggatcccatcgagggctggatgtactggtccgactggggcgcctctccgcgcatcgaaagggcgggtatggatggcacccaccgcactgccatcatcacctacgatgttaagtggccaaatggcatcacattggacctggttcaaaaacgcctttactgggtggatggcaagttgaacaccatctcgtcgtcaaactacgatggctcgcaaagacatcaggtgctctactccggcgaatacctgcgacatcccttctcgatcaccaccttcgaggactacgtctactggaccgactgggataagcaagccgtcttcaaggccaacaagttcaatggaatggatgtggagcctgttacggcgacgcatatgttggaacatcccatggtggtgcacgtgtaccatccttatcgccagccagatggcgtgaatcactgccagtcggtgaatggccactgttctcatctttgcctgccagctcccaggattaacgagcggagtcctcgcatatcctgcgcctgtccgacaggcctgaaattaatgcccgacgggctaatgtgcgtcgaagatcgtaagtag

SEQ ID NO: 9711 - protein, 761 aa, DROSOPHILA
MGPICRILGCSFLLLIAGLVPHHASRVVGLESTCSQEQFRCGNGKCIPRRWVCDRENDCADGSDESTSQCRGLCSSLMFMCKNGEQCIHREFMCDGDQDCRDGSDELECGRSHTCSPEEFACKSGEGECIPLSWMCDQNKDCRDGSDEAQCNRTCRSDEFTCGNGRCIQNRFKCDDDDDCGDGSDEKNCGEKAKCGSNFFACKSGPCIPNQWVCDGDSDCRNGEDEMQNCTVSLLNFCQAGEFQCSDRITCLHKSWVCDGEADCPDGEDESQSNCLKVSCRPDQFQCNDQSCIAGHLTCNGKRDCADGSDEIMCDISATPRTCNATTEFDCGGGLCIPNAKVCNRRKDCPNGEDEPAGKCGINECSSKNGGCMHQCVNLEVGYRCECHDGYKLGADQHTCVDIDECETPGICSQVCVNEIGAFKCECEAGYMRLLKNHTRCKASEGHASLLLARRHDIRKIALDRPEMTSIVNSTKAATALDFVFRTGMIFWSDVATQSIYKAPIDEGNDRTVVLTKSSVTSDGLAVDWIYNHVYFTDTHKCTIELTNFEGSMGKVLVKDSLDIPRSIALDPIEGWMYWSDWGASPRIERAGMDGTHRTAIITYDVKWPNGITLDLVQKRLYWVDGKLNTISSSNYDGSQRHQVLYSGEYLRHPFSITTFEDYVYWTDWDKQAVFKANKFNGMDVEPVTATHMLEHPMVVHVYHPYRQPDGVNHCQSVNGHCSHLCLPAPRINERSPRISCACPTGLKLMPDGLMCVEDRK

SEQ ID NO: 9712 - DNA, 4871 bp, DROSOPHILA
ctctttgacattgccatactgacactaaatataaaacatttcaagttatcctaatatctaaacaagaaaccaagaatcccagttcaaaagtcagcagccgaaagatagcaaactgaaagtgatattcgagttgggacaagcgttaagtttgcacaaaaagttcaaaatggagtttctaatgaaaacgtcgcgtttgatcgtcacatcgaagacgttcgcaagacgtgtggccgttccgattcccaggtaacgaaatcgaaatagaaattgaaattgaaatcttctccacggtatacgctgaaaatcggctacagatacaacagatataggtactatatagcttgggcggacagctcattaggcatgtaactgcgttgctgtataaattgtgcagatacaattgtatcttttgtctgcgcaatttgcatttgagaacatttgggattctgcttaggcatacaacagcgccattgattatctaaggatgctggctgctattttctccactttttttgcatgcaggcatacatacatacagcacttttgttttcattaactgatagccataaatatttaacaagccagccagctagccagcgaaacagacagccagtcggtccgacgtacttatagaatcgttcttttgtttagcattttggcgcgggagctctccacacgtgagccgaaccgtattgatctcgttctgggggtatctgtatcggtatcggtatctgtatcttgcagatacatctcgtatgcgaaatacccgtttgtgcgtgctctcctcgcgatcttttcgctgcctccagcgcgaatgatctctctaataaaaccccgcacttcagttggcattcagtttcgccaaagtcgcttgcaagcgcacctcgttccggctcccccaaagatcgctaaagtcaccacctcacatatcccacataagttaaaaaaaaaataacattcgaaatccaaaacatccaaatcctttgatcctgccgcagacatggagccagccgttcccattaagcgagccaacaaggcgccctgcaaaaacgatcgcaaggcctatctgcaaaaagtgatgctgaccaggtgagatgggctgcgatccgagatgtgagatgtgagatgtgggatggggggacaactgatccaccggcggcgggtgattgattgcggtgacatgccgaagcccgtaagccccaaatccagtcgccattcgccattcaatcccaatccccggcgggaactggtttcgattctctcgcggagcgttggaaaccagacgaacagctgcgaagctattgaccgagcgacattttcgcctttgtttttgtttcgcgggattatcgtcgcgtgggcgttccagattctcccaccccttacccccgctacaccatctaataccccgctctaatgtccggtaatcttcttagaatcggagcatatgtgctaattgccgtaagcttaggcacacgaaaaccagaaacgttctatccagcaatatgaaaactatgttttagctgtgagctacgcagattagtgtgattgagtccagcttcaggaagtcagattcatttggtaaaggaatcaatgatcaatgaaagtgaaatcatgcattccatccataactaaaagatagttttttgctatgagctacctagcaacaatgattgaaaagaatagaaaatatatctttagttgagaaagagtttttgagaatggttttaagcttgctagttgattgtgacagattgaataattgagcactttatcaataactccttgttccaattccccattttcgaaattattcacttttgtgttttttttttgtgttctttaaattgatcaaatctgattgaaaaacctaacaattcttaatatttttcttccctgcacacaaaacacttactccattcaaataactccttgcagcaaagtgaaaatgggacaattttatacgagtcagcgtcatagtcatagtctattcattttcagcataatactgagaaaaattctatatagaaaacccaatgctttgtgagtaccagaaaatgtgaaataatatgtatttaattgatgttgtttatttggtgtttattcgctgaaagttgtttgtttgttgcgagaagcttttatcaatttgtttttgattgaaatgctaaaagaaaacacatttaaagacttactcaatctttgtgttttgaaatagcaaaatataatcgaatagtgagtgctaaacacgttcgcttagtcgagtttttatatagttaattgttcaacggctgtaaactaattgagtcacctaatcctattccagaatgggttcatttaactcggccccaaagatcaacaatgtggactcccaggacgatggcctggtactgccctccggtctaagcaccccggctctcctccagcatgtccagcaactgcgtggcggtggcatcgagcagccatcgctgctcacccgcggcttcctaaaaccgctgctggcggacgaggatgtagccgacggactgcgatgcctcaagctgaattccgtgtcgaggggtaggattgcatccttgtcttatccgagggctatattctaatctatttgtgcagtttgcagtgcgccagtcgagggtgatgacattcgattgctgcagtggaacatcctatcacaaagtatgtccctaaaaatatttatatgcttatatatgtttaaagaatttgcattattataccttaactctatcccatttaacttgatttcttcatctgaaacccagctctcgggcagcacaacgatggatttgtgcgctgtcccgaggaggctctcacctgggagcaccgcaagtacctgattgtccaggagattctgcagaaccagcccgatgtgatttgtctgcaagtatgttcacatcagcccacccaacattttcaagacagtcacacttaaatgtgatatattcaattaggaggtagaccacttcaagttcctgcagaccgtgttgggtagccagaactacgcaggcatcttcttcccgaaaccggattccccgtgcctgtacatcgagcagaacaatggacccgatggctgtgccatcttctacaagagggacaaactgcagctgcagggatacgacacgaggatcctggaagtgtggcgggtgcagagcaaccaggtggccatcgcggcccggctgcgtatgcgatccagtggtcgggaattctgtgtggccaccacccacttaaaggcccgccatggcgcccttttggcgaaattacggaacgaacagggacgtgatctcattaggtttgtgaagcagtttgccggagatacgccgctgctgctctgcggcgatttcaatgccgaaccggtggagcccatctatgccacgatcttgggatgtgatctcctccgcttgggcagcgcctatgccgacgtgaagctagaccgcgaggagatactacatcccaacgcggatgtcggtgagttcgtcgcgaaatcgatgaaacgcgagccaccctacaccacctggaaaattcgcgaagagggcgaggaatgtcacaccatcgactacgtcttttacacacccgatcgcctcaaggtgggatttctgaaatagttgcaagcggttacaatttatttaacaatatttatgtccaatttcagatcaaaaactgtctagactttccggccggagagcaaattggcaagaatcgcacacccagcttccaatatccatcggatcacttttccctggtgtgtgactttgagctactgcctccgacggaaaacggaaaggaaagcggcagcggaagtgggagcgatggtgaaaatgaaacggaagtggagggcagcaagcatggatccattcaatagaaagcttcagattcataatttgccgaaaaagaagtttcaataacattacatcgattgtgatattagttgttagatacatattagcctcatacacaaccgttgcactacagtttgcagcttttacaaatgataatccaaaattcacaataaataaattacaacgtatggaagaaagttaactgaactgcattttctatccatataacaatgacctcttaaaaatcaaaattaaggatatacatattttatatagattctgtacatgaactgaatcccccatctaataaaaagattcttcagttccgaagtaaaaggatctttagaagacttttctatagttagggaagccaaagagctactcttaaataaatacattttcggagcccttttgcatttggttttaatttttcatgtaaatttaagcctataaaaagtattccctacttttgggcgcatgtaagtaatattctgctatcggaaatcgcttgttcggggcgtatacttgatttcgctgtcaatggaccgcaagatgtctatttaaccggcctccacactgaattcactctacaaatcaccgaaatcgttaaaaacacgcacaccgtgcaaattgcagcgcacaacaaacgtatgcagcacgcccaaagcaacaaaatggattgcgtaacacaacaaacacctttataaatatacacactacatgtatttagtatataacaattttcacacagtgttcgcactaaaatgtaataggtttagctggggtcttggacttagagcagggccaagatagcggatagcacgaaagaggtggcgaccattgcgtaaccggtggagtaaacctccttgatcttcaggaaccgtccggtgtcccagaggagatgcctaataccattggcggtgtgatagccagccggataggcgatgataaacttgagggcggtcagagtggcgccactcagctggaggccctccaccatggtcacatagtggctaatgtcgt

SEQ ID NO: 9713 - DNA, 1350 bp, DROSOPHILA
atggagccagccgttcccattaagcgagccaacaaggcgccctgcaaaaacgatcgcaaggcctatctgcaaaaagtgatgctgaccagaatgggttcatttaactcggccccaaagatcaacaatgtggactcccaggacgatggcctggtactgccctccggtctaagcaccccggctctcctccagcatgtccagcaactgcgtggcggtggcatcgagcagccatcgctgctcacccgcggcttcctaaaaccgctgctggcggacgaggatgtagccgacggactgcgatgcctcaagctgaattccgtgtcgagggtttgcagtgcgccagtcgagggtgatgacattcgattgctgcagtggaacatcctatcacaaactctcgggcagcacaacgatggatttgtgcgctgtcccgaggaggctctcacctgggagcaccgcaagtacctgattgtccaggagattctgcagaaccagcccgatgtgatttgtctgcaagaggtagaccacttcaagttcctgcagaccgtgttgggtagccagaactacgcaggcatcttcttcccgaaaccggattccccgtgcctgtacatcgagcagaacaatggacccgatggctgtgccatcttctacaagagggacaaactgcagctgcagggatacgacacgaggatcctggaagtgtggcgggtgcagagcaaccaggtggccatcgcggcccggctgcgtatgcgatccagtggtcgggaattctgtgtggccaccacccacttaaaggcccgccatggcgcccttttggcgaaattacggaacgaacagggacgtgatctcattaggtttgtgaagcagtttgccggagatacgccgctgctgctctgcggcgatttcaatgccgaaccggtggagcccatctatgccacgatcttgggatgtgatctcctccgcttgggcagcgcctatgccgacgtgaagctagaccgcgaggagatactacatcccaacgcggatgtcggtgagttcgtcgcgaaatcgatgaaacgcgagccaccctacaccacctggaaaattcgcgaagagggcgaggaatgtcacaccatcgactacgtcttttacacacccgatcgcctcaagatcaaaaactgtctagactttccggccggagagcaaattggcaagaatcgcacacccagcttccaatatccatcggatcacttttccctggtgtgtgactttgagctactgcctccgacggaaaacggaaaggaaagcggcagcggaagtgggagcgatggtgaaaatgaaacggaagtggagggcagcaagcatggatccattcaatag

SEQ ID NO: 9714 - protein, 449 aa, DROSOPHILA
MEPAVPIKRANKAPCKNDRKAYLQKVMLTRMGSFNSAPKINNVDSQDDGLVLPSGLSTPALLQHVQQLRGGGIEQPSLLTRGFLKPLLADEDVADGLRCLKLNSVSRVCSAPVEGDDIRLLQWNILSQTLGQHNDGFVRCPEEALTWEHRKYLIVQEILQNQPDVICLQEVDHFKFLQTVLGSQNYAGIFFPKPDSPCLYIEQNNGPDGCAIFYKRDKLQLQGYDTRILEVWRVQSNQVAIAARLRMRSSGREFCVATTHLKARHGALLAKLRNEQGRDLIRFVKQFAGDTPLLLCGDFNAEPVEPIYATILGCDLLRLGSAYADVKLDREEILHPNADVGEFVAKSMKREPPYTTWKIREEGEECHTIDYVFYTPDRLKIKNCLDFPAGEQIGKNRTPSFQYPSDHFSLVCDFELLPPTENGKESGSGSGSDGENETEVEGSKHGSIQ

SEQ ID NO: 9715 - DNA, 8509 bp, DROSOPHILA
ataacgactttaactttcggttaatgcgactttaagttcagatgatttcaaataacgccaactttcaataaattgattttcttgctaccaatcatctcctgatttgattgggtagtgcgaatgattgaacaccgcattccgagagttctcgctgcgccaccttaggtgcttgaccattagataaccctggatgagaaagacggctatgttgacggccagaagattgtagttcttgggtgtgataaccactgagtagcgagaccaaattaagcccgtgactgccaaggagccgcattgattcagcgatatattggcaggaggacgacttagcgtatcgctcagcccagccagcaccaaggactggaaatataaaacaatcaattaattaggcaatacaaaaccaggacaaattgtacatttcctaacatttaaagtcggctaatgcctagtttaatactacattacttttaaattgaacatttagattagattgtacatacccatttaaacgctggtgcccaaaaaaacacagtacggggtcctgaatggaaaatgatgaacatatatttggtaatatttaatggatctactcaccagctggggattgccaaagtggctgaactgcgcctggaacaaatttatcaatagtactgatggtaatattgtacaacttagacaagggtcccgtgcctttagacatttttaagaaaaactaaaaatttaaaagccaaagttccaggaaaaaagaaaagaattttgaagtgataaccaaggcaaagtgaactaaggtatatgtatcttgacttattttcatataagtgttaacaggttacttttcaatttggaacattcgattcacatacaaagcttttcaaatatgcgcggcaatgtagagatgtgagctaactatcgatatatccattagtgcgataactgttttccagaagtatggcagcgccataaaacagctgttacagaaacaaatcaaaatttgttttcggcagataaaaagtaaataggaatagtaaaatggatcgccacacaaataaggatcgctccccattcaaaggcagtcatatggaaccatctacacgcaaggagaaaagaacggaaaggaataatgtgctgacctacaagaaactgcggaaaatgccactcaatttacgcaaacaggcagttcgagaggctcgcaatagaaacgaaccaattctcggaaagaaaaagaagcggaagacaaatccccggttttttaggactgcccgccgcctgcggaacgactttgatcgatccgaacacaaagccatgttggccagcacttccgaggagctacgacgcatcctgcaggatgttgagactctctcggacattccgcacgatataacaaacgtcgaactgcaaggggaggtaatacccagttcaacccgcggagtaaaactccaggcttacaataacttttatctaaagatgtactggctaagctcttagtattagtcagcattattgttattaaccacgtatcaaatttacatatttatttcattgttgtgctttcctaatcaatttcttgcaaaagtttttccttttatttgttaatcgtgtcttgacgcactctcgaacattgtacaaatgtcggtcaatcattttaatgctcctaattcgacatagttccagttaattccacatttttcgcaaattgacgttcaaaacgccttaatctgcataataaaagactgcaaatttttgtttactaaaagagattttagtgcctattctgattgaaaaaactagatcgcctataggtccatcaaagtgcaaatatcattaacagccataaagtcttccatacaaccagttactcctccaacccactaataccagttgcaattagcactttggggtgttcgttcttgcgatgctttcgtcaccgatattggccattgaatactactgacctactgccgtacaatcaacgtgctaattgatgggcttttattatgaagatatccgtgcccgttacgcggttctattgcacactgaacatactacagtttccacatatttcacaattccagatagccatcgccgagggacgggccacaacgatctatgtgcagcgagatggactcagcaccctgacagtggtggtcagtatttccttgaattgatttatatcgcagctgcttgcacttgctgtcagtaacatcgtcaattggcgcctcagaagcttgagctctggctgaaagtcatgtataataaggcagcgaaagtgtgtcagaaccttctaacattcttaagatgttctccagtcaatctactagtattattccatttatttaatacctatttaacacccttaatctaaaatcttttagtgttaaccatttttacgcgattttcttgactccggaatagctctatcctaatttagttatcccttagcttggcttaaacctctcccttaaactctcttgatatctcttgacaaacgttttttctctaactggtcgcttccttgcagctccaccagcacgagcccacgatcgctcagctgaagagggcaattgctttgatctcacgggcccagcacaagcgcagccaacgcgagcggtgcgaagagcgtcttcgtcgtcggggaatcgccgacgactccgacgaacgacggcaaccagttgcggtggccagctccaccggcgagttagttcactccgctcagcgcaacgggcatgatcatcgcgcgttcgtctcgtggcggtttctatggcgctgttttggactgctcaacgtggacacgaatcagccgatcgacgaccaacgctccagcggcagggctactttaaaggagctgggcattgagaacgcagccaccctaaagttcgtccatcgcgtcaagtatttcggtcgccagcgacagagttgaagacagtcaaaaccaatgatagtacctcaaacaattgtcaaccaaccgattggaaagtcgggcagcaaatcgcggttaatatggatcaactggtttggctttcgttttgcatttcaataggcttttcgctcctgggaaatttctccactggcctgccgttcgaggatggcaataataataacgttaaaattacccgccggagcttggagcttacgcaaaccattaatatacaacgccaggagttcatgcagcgccaatgcgagctgctcggcgaccacacacaaactttggaggatctcagcgagctgcagatggaccacatgatcgtggacaaagagcacaagctgttatactgctatgtgcctaaggtatggttgaatcaactgaaaggggaatacattcaaatgctggctctgcgaattagggtgcgagataggggcatgtggttgtcttttgtataaaatgggctcattcagctaaatattttgattactttttatatgttgaattcattcgctttggttctttttcaagttttcaaattcattttgaaagatatatattattgcttcatttatcgttaatctccagcatattcggtaaaactaagcttctatttaataaattcagtagggttgcatttgatcgcagatcaaacaacagcaatctctaaacataaatgtgttgataaatcttctctggcggttgccatgtgctgtgccatccaaaggcctcagcatacattagtcaaaatcggcatctgtgtctcagttttcagcttttgcctccgctttgtttatagaaacttgtttttcatcaaattcaatttgaagcacatgctgaggttttgttgatgctgcggcttttggcagcatcgccatcggcataaatgatgcttgatagtatgtatgtacaatatgtatgtttatttggcctacaattagacgccagctatgtgaaacgacgtcgcagacagtcctccaaataatcagatttcaagtcataaaatccttacagtacgacttaattgattagatttacagaggagtgttccatgacgagtgcatttgattgctaagctcgcgccacttctggcttatcgaaaagaggcgtcgattctcgtgtcaactttataaatgtgcatacaataaaagtgctgatttcacgcaatttaacgatcaattacagcggcaagaattccacggcaagttgcaataatgcaataatgacctcctctctctcaaatggccggcaattataggccagccatttgtaagtcgttgccagttcgtttgcatatgcatcccattgccagtcagctcgcagcgcaaatcttttagattcaagtcaaaggccaaaatctcttgaaacgttgctatggactccataatcattattaaaataaatttcaaatacatttatatagtgcccatcctatgacgcgcatggctctagataggagtaatctattcattaaattaatgtgctgcccatccgaggagcctcattgggatttgtctaattggattaggaaattaaatttttgggggaatcagctatcggaaattgccttaacagcgtttcccttatcactgtgagtgagttattggaaaacatcaaaccaaaactatgagattagattgcaggtattggtttcttgggtgtttgaaggtggttgagtggtacggaaatagcttggtgtttcatgttgtcgatgccctttgaaccctgacatcaaaaagtaaagtaatacagatcgtaaatagtggaaatttattcaatatgcactcaagtatagattatagagattaaagtaatgattaaaatagtaaacacattagaatgttaaactgttacatcgctgagataattacattgtttactctgttcaaatcgaccggacttgaactatctgatctcgtagaacccactaagttaaagccacatttcactgagttagctacacacactgtgtgccattgaagcgttccacttgccggggggcgtgtttggggaacatgccacctgaatgcctcgacacacgttccctgttatcttgacgtttcttcaatgactatcatcccacattggcgcgactggtttcgatttcaccacgcaggaggggtcagtggagcgcttacagatctcaattgctgctttcgcattcccattcgccacttgttgagtggctagctttgcatgttccctcggcttcgttcttccatgaagtcgtaaattgtttatgtttacccttggccaataccctctccaacaagcccctcccccctccccctccaaaaaggggggcttgccactttggtcggtaactttatgtgaccatcgcgtgttgctttaatggccataaagaaattgcgttagatgtaaaatgttgcgtttatcgcttacgtattgggaggttatacaacattttgcaagcccttttagagattctgaatcctatatctatccggtatctgattctaaaaaatcaaagactaacaagtcgttattacattttatttcatctggcatattgactcttccctaagttttgaaagttgtttaaactcagtgcaagctgacttgtttaaaaatggaatagttgtctaaggatttggattatttagaaagtgtttgtaaacagtcaatcatttcagataagtgacgggaaatagcgccttaactgacgaacgcttttcaatttttgcttaaaataacattgtgcatttcactttagatcgacattttgacatatcttaacctcgtcgctgatctttttgtgtatttctgtatattgcctcacattttacctacgctttccactggctaaacgtacactgaatttgtttgcttttgtaatgtgaaatgtttttgcggtgtttaattgggctcgacattggccgcccaacgaaatgcctttgtatatacactccgactcgtatttatgtgcttagtttgcctagttgttagttcactttaacaacttgacttattgcccaatgcctcctagtagggaaacccatccggccatctcttttagtgcagattataatttattgcacttggcaattaaaagcaaagtaattcagctcgtcatatgttgaggagatttcatttaacgcttgacccccgaaagtcgcaataaaaatttaattttaatgccggtttctcttcactctcgtttctcgaaaaagaacttgaatttcttttgatttttatagtcgcgtatcaatatatattgaattggcttagtggcctcaatttcacttcatttagactttataaaattctcatatcatctgcaagtaataacaactttctataaagtacattaagtgcttaatttcgattaattacttgtctaatcacactagattactgtgccagaacacttttaattaagtaaatctattagaatttaattacaatataattgccagtcattaaatatagccaattcattaatatttccaatgcctatcagtaaatagttctgaggtgagtgtgcaggatgacacctgctcatagataaatcagtccattatctacacaatccactcattaacaaattttttggaaaaagggttgatgtattcctgcttatcggtgcttccctatcattatgttcactcgcgaaatgctcaagaagcgagtgattcactcctccacccccaaaatcgtttttcaatttttcaaggaacgtaaccttcggtctgaaattcttcataatgtaaacgaagaggaattatttttcttgtttatttggtttaattggccgaagaatagtgttcaactaaacaaatccatgaatatgattcttcgttttccaggttgcctgcacaaactggaagcgtgtgctaatgatgctcacaaataagtggcacaacggaaccgatcccctccagattcccggatccctggcccactccgtgggcatgttcactaagctctacgatctatccgaagcggaacagcaacaggttctcagcgacgagtatacgcgatttatcctggtgcgacatccgctcgagcgtcttctctccgcctatcgaaataagttggagggggattcccccagtgcccgctacttccagtcgcgcgttgggcgccaaatcgtgaaagagctgcgcccgggagccagcaacaattcgttggaacgcggcgatgacgtcagctttggggagttcattcaatatctggtcaccccggagctgagtcgagccaatcagtcggactacaacgagcactgggaggttatagccaagctgtgcaatccctgtgtaatgaagtacaacgtagtgggtgagttgcaagatcgtattaccgagatgccatcattgattactactactactttcccaggcaaatacgacactctcttggatgactccgcgttggctctctacctggctggagccgacaatctaacattccccactggccacaaaccgtcgagcactcgagccaatctgcgcaactatttcgatcccctgcccatcggtgccatacgcaagttgtacgatatatatgaggatgactttcgactctttgactacgcactggacgaggtactcggctttgagtttggctaattgtgaatgaaaagctgctctctcaatatccccaagtcaccaccataacgctttccactggaaaagattgtgattttaggctaggacttgtagatttaggtgcactcccatgcgaatattatttttgttctgtatacataccttcccgcgcacaaatgtttccaagggtttttgactgtaaaacttagttataatcattaatgtttcatcctctaaggtttatatatattaggcaattcaaattgtcaatcgattagtgttaaattattacattattaaatacatagttgcattaaaactgccgttttgaatttatttcaaagattatatttaagtattttaatgagatttatttattatttaaatctcgtttgtctttgaaagtgccgatcagacagcctacgtaaatacgcaaataactgacacctaatcatgtaataatctacttgcaatgaacgcgcgcttttcgcactgacattccggctcactgttatcagtaaaaagctcgctgataacattgaatagtgaatggtttgaacgtagatctttagttgcattgcagaaaagctttcatgttttcgtcagcgcgaaacgaaaagctcaatcagctcgaatacgtcggcgattgtttatcaccaaaacatggacggttaaatggtcagcgtgtatatatttataggtatactcgtactggggcgacctgcgatcagcggtcagatgaatttaaatacgcagtattgtcaatacgcgacggcgagacggcgcccaacgcatgcgggcatgttggcaggcgcaccgaatatctgatagatactttttatcactgcgacatatccgaaatagacccagataaacatacacctgccaggccccttccggcggaatcccttgaaggtcaccgcccagagggaaagttggggatcgaacagaaaaagaacttacacctgaaatgggaatatggcttattattgctaaactatttccaacattatcttagagc

SEQ ID NO: 9716 - DNA, 1880 bp, DROSOPHILA
gcagataaaaagtaaataggaatagtaaaatggatcgccacacaaataaggatcgctccccattcaaaggcagtcatatggaaccatctacacgcaaggagaaaagaacggaaaggaataatgtgctgacctacaagaaactgcggaaaatgccactcaatttacgcaaacaggcagttcgagaggctcgcaatagaaacgaaccaattctcggaaagaaaaagaagcggaagacaaatccccggttttttaggactgcccgccgcctgcggaacgactttgatcgatccgaacacaaagccatgttggccagcacttccgaggagctacgacgcatcctgcaggatgttgagactctctcggacattccgcacgatataacaaacgtcgaactgcaaggggagatagccatcgccgagggacgggccacaacgatctatgtgcagcgagatggactcagcaccctgacagtggtgctccaccagcacgagcccacgatcgctcagctgaagagggcaattgctttgatctcacgggcccagcacaagcgcagccaacgcgagcggtgcgaagagcgtcttcgtcgtcggggaatcgccgacgactccgacgaacgacggcaaccagttgcggtggccagctccaccggcgagttagttcactccgctcagcgcaacgggcatgatcatcgcgcgttcgtctcgtggcggtttctatggcgctgttttggactgctcaacgtggacacgaatcagccgatcgacgaccaacgctccagcggcagggctactttaaaggagctgggcattgagaacgcagccaccctaaagttcgtccatcgcgtcaagtatttcggtcgccagcgacagagcttttcgctcctgggaaatttctccactggcctgccgttcgaggatggcaataataataacgttaaaattacccgccggagcttggagcttacgcaaaccattaatatacaacgccaggagttcatgcagcgccaatgcgagctgctcggcgaccacacacaaactttggaggatctcagcgagctgcagatggaccacatgatcgtggacaaagagcacaagctgttatactgctatgtgcctaaggttgcctgcacaaactggaagcgtgtgctaatgatgctcacaaataagtggcacaacggaaccgatcccctccagattcccggatccctggcccactccgtgggcatgttcactaagctctacgatctatccgaagcggaacagcaacaggttctcagcgacgagtatacgcgatttatcctggtgcgacatccgctcgagcgtcttctctccgcctatcgaaataagttggagggggattcccccagtgcccgctacttccagtcgcgcgttgggcgccaaatcgtgaaagagctgcgcccgggagccagcaacaattcgttggaacgcggcgatgacgtcagctttggggagttcattcaatatctggtcaccccggagctgagtcgagccaatcagtcggactacaacgagcactgggaggttatagccaagctgtgcaatccctgtgtaatgaagtacaacgtagtgggtgagttgcaagatcgtattaccgagatgccatcattgattactactactactttcccaggcaaatacgacactctcttggatgactccgcgttggctctctacctggctggagccgacaatctaacattccccactggccacaaaccgtcgagcactcgagccaatctgcgcaactatttcgatcccctgcccatcggtgccatacgcaagttgtacgatatatatgaggatgactttcgactctttgactacgcactggacgaggtactcggctttgagtttggctaa

SEQ ID NO: 9717 - protein, 600 aa, DROSOPHILA
MEPSTRKEKRTERNNVLTYKKLRKMPLNLRKQAVREARNRNEPILGKKKKRKTNPRFFRTARRLRNDFDRSEHKAMLASTSEELRRILQDVETLSDIPHDITNVELQGEIAIAEGRATTIYVQRDGLSTLTVVLHQHEPTIAQLKRAIALISRAQHKRSQRERCEERLRRRGIADDSDERRQPVAVASSTGELVHSAQRNGHDHRAFVSWRFLWRCFGLLNVDTNQPIDDQRSSGRATLKELGIENAATLKFVHRVKYFGRQRQSFSLLGNFSTGLPFEDGNNNNVKITRRSLELTQTINIQRQEFMQRQCELLGDHTQTLEDLSELQMDHMIVDKEHKLLYCYVPKVACTNWKRVLMMLTNKWHNGTDPLQIPGSLAHSVGMFTKLYDLSEAEQQQVLSDEYTRFILVRHPLERLLSAYRNKLEGDSPSARYFQSRVGRQIVKELRPGASNNSLERGDDVSFGEFIQYLVTPELSRANQSDYNEHWEVIAKLCNPCVMKYNVVGELQDRITEMPSLITTTTFPGKYDTLLDDSALALYLAGADNLTFPTGHKPSSTRANLRNYFDPLPIGAIRKLYDIYEDDFRLFDYALDEVLGFEFG

SEQ ID NO: 9718 - DNA, 4676 bp, DROSOPHILA
atgtcgttgcgcgaaaattgaataaaaataatttgtaatgcgtttgcactgcggcagatggctggtgagtttgtggttgagcgctgaatgaaatggaaattacgggaaattttgtaaattaatgagatgttaagggggcgaaccagcttgacgtaattaatgaagagaatgcgacccagaaaaccaatatatggtaacgtatataaatgcccccaaattggtgttattagaggttggctgtaatgttcaatgtacttaaagaatgaattcatgatttttcttattttttgcatgcttttaagtatttgttgtatgcgttaccagagtcaaataaatataatatatataagaatataaatataagcaatgaaaagacctagctttcgtatatatgattaaatttactgttcttggtatgcataagtgctttaatgcactataagaataagtaaaaatacccgacatgcttcatcttaattcgttatcggtggcaagaatttcgaagaagccttatcaaatcagaatttaaacatgagagaatgttatagtcgagtgcttcgacaatgagatacctgttactcagctgataaatttaataaataaataaatataaacggatattttcaaaagatgtgggagcagcagtttgggcggtttttgggcttgagagtgggcgtggcaaaaagtagttaggattatcgatatcaaaaaaaaaaaaacatttttcaaaagtgtgagcgaggccctttggtcggcttatgggcgttagagtgggcgtggaaacattggaacgggcggacagacggacatggccagttcgactcggcattgatcctgatcatactctataaagtcgaaaacgtttcattctgcctgttagatacttttcagcgaatctagtataccctcttactatacgagtaacgggtatacaaattgaattaatgttcgctggcgatacaatatgttgaccgcttattcgcaaacgacagtgtattaaattcaagcgtttagaatggatcgcctttccattctgctcttggttcttggattctcccggatccaggctcttttctgtggtgggtcaatggcgaaagagtgcgtacagcgaaaccgttgccgtattggtaccgaaacgggaagaccaatcatagattttagaggacttaataacggtaatcagggatgtgaatctggccaaacctgctgcccgaaaacggaaatagtaatgctaatcgagagctatcacttgaatgttcttttttgacagcccattgtctttgcagttacaatatccagtacaggctgacaatcaaccgctacctactgaatgtggccacgtgaaccgtataggagtgggcttcaccataactaacgcgagagacatcgcacagaaaggcgaactgccatggatggtggccctgctcgattccagaagccgtctaccgttaggcggcggctccctaattacgcgggatgtggtgcttacatcatctacgaaaactttggaagttcctgagaaatatcttattgtgagggctggcgaatgggactttgaaagcatcaccgaggagcgagcacatgaggacgttgcgatcaggaagatcgtacgacataccaatctcagtgtcgaaaatggtgccaataatgcggcccttctgttcctcgctagaccgctaaaactagaccatcacataggtctcatttgtttgccgccgccgaatcgaaactttatccataatcgctgcatcgtcagtggctggggcaaaaaaacagccttggacaacagttacatgaatatcctgaaaaagatcgagttgccattggtggacagatctgtgtgtcaaacgaaactgcaaggaccctacggcaaagacttcattctcgataacagcctaatatgtgccggcggagaacctggcaaggatacgtgcaaaggcgatggaggtgccccacttgcctgcccactgcaaagcgatcctaaccggtacgaactgttgggaatcgtaaactttggattcggatgtggagggccacttcctgctgcctacactgatgtttcccaaattcgaagctggattgataattgtatccaagcggaagcagtccactattctcctcagttgggaaatgtaggccaatcacctgctccactcgatcgctatataccaaatataggcctagaaactcaaaatgaagtccacagcccggttcaaggatctctccataatgtcgtatatcaaactggtggtgttggatatattcgaggtatgggccaaggaactgctttccaaggaccagttcaagttggagaacttattccgaacgaaggcaccgtatctggcggacttgtatatgattcaaatgaaatccaaaaatttaatcaaggtggaatatacattccacatgtaggccaaggaaatagtgacaatagatattatccaaatccggaaatcggagcagttccagtcggaaatcctattccgaatgaaggcaatgcatttggcggtcgtggatatgattttaatgaaatccaaaaacataatcaaggtgggagatacattccacatgtaggtcatggaaatggtcccaatgcacctaaagaacctcttaaaatcggaggaaatattccaaatgtaggccaaggaaacaggggtaatagatatgatctaaatcctgaaatcggagcagttccagtcggaaatcctattccgaatgaaggcaatgcatttggcggtcgtggatatgatttaaatgaaatccaaaaacataatcaaggtggaagatacattccacatgtaggtcatggaaatggtcccaatgcacctaaagaacctcttaaaatcggaggaaatattccaaatgtaggccaaggaaacagagggaatatatatgatccaaatccggaaatcggagcagttccagtcggaaatcctattccgaatgaaggcaatgcatttggcggtcgtggatatgatttaaatgaaatccaaaaacataatcaaggtggaagatacattccacatgtaggtcatggaaatggtcccaatgcacctaaagaacctcttaaaatcggaggaaatattccaaatgtaggccaaggaaacagaggtaatagatatgatctaaatcctgaaatcggacatgccacatttggtgcaaccggtaccggaatgcaaggaaataatatagataatccatataaaaacaatcttggtgacagagcagaaaatgaattggaaaggtttcctcttgaaaatcccaatagggatcatgttatcaggcttagtgattttttaatcacaacgcccactccgagtgcacctataaaattggtaatagaaaagatctaacataatttcataattttattatagagctagtaatctaaaacaatattatttccatattacaattataattatatttgttctctttttacctgtcttttaaattgtgattttttttaatattgaaagcggagaaatatatataacttttataagctcccttcaggtcagacaatctaatttttggtttagtggtaaccatctgtatttttagttttgactttgttgcttgcattgcgcattacaaatgtgcaagtatattatccagattattagctgatatcgagttaggccatcagcagctggacacactatcatcctattgattctgtggcccacccaaaatccggctaattgtgctggactttggctggagtttattacgaagcaagctggccccaaattgccacccaccaaatacaaccaatttcgcagaaacaacgcacaaaaactggcccaatatgggggcttactatagttacatggcactcagaggcgaacgtcgaatggggaacacattgcggccctattgcttttagccagagttcgtttcttgtttatttgtttgtttgactgatttgctgttgtttattttgatttccggctcaaatgccgagtgggcagaggcggatccttgtcgatttctacattgattgtgttgtcgcagcaggagttcgatttcctctgctggagtgtgtgtatgtactggtgcttgtacagcagcagattagtgttgacaaacagtgaaatggcaaaaggtgatgccggctcctgcgacatcatcatcaggccctccataatcccataaacacctctcaactggaaccatttccgggggtggaaaacctttgtttgcctctccacgcaacaacatcaaaggaacaccgaatcagaatccgagtcagcatgcgaatccgagagtgggccagtgaaaatgtcattccgattggcgtcgataaagagtttactgcgctttttgccctccaaacgtggtccatcggttagttcagacttcattattattttgcataaaaaatgcattaatatgaaattgatgtatttgttttgccgctatattttttttttttttgttttggttaatatgtcacaaggacataacttcaggtttactgtttaacatcaactgagctcagctcagacatggaattacttttagtggttcggtaaaaaagcttaatatttcacttttatgcggtatcttttacggcccctcgtaagcgcaatatttctgcgaaagtaaaaaaaaaatttactcgacatcaaacgcattttaaactatttaaaagtttaaaaagtatttcgaac

SEQ ID NO: 9719 - DNA, 984 bp, DROSOPHILA
attcaagcgtttagaatggatcgcctttccattctgctcttggttcttggattctcccggatccaggctcttttctgtggtgggtcaatggcgaaagagtgcgtacagcgaaaccgttgccgtattggtaccgaaacgggaagaccaatcatagattttagaggacttaataacggtaatcagggatgtgaatctggccaaacctgctgcccgaaaacggaaatattacaatatccagtacaggctgacaatcaaccgctacctactgaatgtggccacgtgaaccgtataggagtgggcttcaccataactaacgcgagagacatcgcacagaaaggcgaactgccatggatggtggccctgctcgattccagaagccgtctaccgttaggcggcggctccctaattacgcgggatgtggtgcttacatcatctacgaaaactttggaagttcctgagaaatatcttattgtgagggctggcgaatgggactttgaaagcatcaccgaggagcgagcacatgaggacgttgcgatcaggaagatcgtacgacataccaatctcagtgtcgaaaatggtgccaataatgcggcccttctgttcctcgctagaccgctaaaactagaccatcacataggtctcatttgtttgccgccgccgaatcgaaactttatccataatcgctgcatcgtcagtggctggggcaaaaaaacagccttggacaacagttacatgaatatcctgaaaaagatcgagttgccattggtggacagatctgtgtgtcaaacgaaactgcaaggaccctacggcaaagacttcattctcgataacagcctaatatgtgccggcggagaacctggcaaggatacgtgcaaaggcgatggaggtgccccacttgcctgcccactgcaaagcgatcctaaccgattattagctgatatcgagttaggccatcagcagctggacacactatcatcctattga

SEQ ID NO: 9720 - protein, 322 aa, DROSOPHILA
MDRLSILLLVLGFSRIQALFCGGSMAKECVQRNRCRIGTETGRPIIDFRGLNNGNQGCESGQTCCPKTEILQYPVQADNQPLPTECGHVNRIGVGFTITNARDIAQKGELPWMVALLDSRSRLPLGGGSLITRDVVLTSSTKTLEVPEKYLIVRAGEWDFESITEERAHEDVAIRKIVRHTNLSVENGANNAALLFLARPLKLDHHIGLICLPPPNRNFIHNRCIVSGWGKKTALDNSYMNILKKIELPLVDRSVCQTKLQGPYGKDFILDNSLICAGGEPGKDTCKGDGGAPLACPLQSDPNRLLADIELGHQQLDTLSSY

SEQ ID NO: 9721 - DNA, 8922 bp, DROSOPHILA
taatagacacagatattccgattgggtgaactccttggtagggttttctatcttcaaagtgttttgttcatagattttctttcccatcgaagtgctggaatcggcggctgcataggagacatgtttatcttctctatgttggctaatttccaaatgcggtggagcaaaggcatctgcctcgcgcttgatcttcttgagcagatgagacctaacgggtgcactgtcagcaggtggtggcgatgtgtctgtacaaccattctgggcatctattttttggcaccagttggctatttccaactggcgctgaataaggcactcctcgacggttttaatctcctcctgaatctcgacatccttgctgcctacttccagctgatcgttctcctgaagttgccgctgcttaaagtatgtcatggtgtccacaaccttgccggtgtcatccttcaatgttactatggatcccgtgaccaccagcgttccgttgccagtccacgttttgtgctttttggtggtctgattacgccagagcacatggaagatgcggctatctttgaggggattctcgcccgccctgaattctcgaggtcccaggctttgggtgccccctgaggtgccccattcgctgggtagattgtttttgggccaggagcagggtgactgtggttcctctttgggaggcgccgcttcgctctctcgctttgcagcgcggcgcatggaaggagctttggaacgccgctttatggtgctaaagaagaggattaccgggtatagttcaccgtaaatacataagttaatttaaaaacttttgctatcaacaaaatataaatatacaaggcgcaatctattttcaagccacttgtaagtgtggccaatgaagtgaacctcgaaaggtattccgaaccctggtcacactggcattctgctggtagccggctctggatgattttctgatagaaatctcgcagaggcagtggtgtttttgtgaatcccctcagccacgatggcgttccactggtgcgacaacaatctgcacaccaccgtgttcacgccgcgcgactttcaggtggagctactggccaccgcctacgagcggaacacgattatttgcctgggccatcgaagttccaaggagtttatagccctcaagctgctccaggagctgtcgcgtcgagcacgccgacatggtcgtgtcagtgtctatctcagttgcgaggttggcaccagcacggaaccatgctccatctacacgatgctcacccacttgactgacctgcgggtgtggcaggagcagccggatatgcaaattccctttgatcattgctggacggactatcacgtttccatcctacggccagagggatttctttatctgctcgaaactcgcgagctgctgctgagcagcgtcgaactgatcgtgctggaagattgtcatgacagcgccgtttatcagaggataaggcctctgttcgagaatcacattatgccagcgccaccggcggacaggccacggattctcggactcgctggaccgctgcacagcgccggatgtgagctgcagcaactgagcgccatgctggccaccctggagcagagtgtgctttgccagatcgagacggccagtgatattgtcaccgtgttgcgttactgttcccgaccgcacgaatacatcgtacagtgcgcccccttcgagatggacgaactgtccctggtgcttgccgatgtgctcaacacacacaagtcctttttattggaccaccgctacgatccctacgaaatctacggcacagaccagtttatggacgaactgaaagacatacccgatcccaaggtggaccccctgaacgtcatcaactcactactggtcgtgctgcacgagatgggtccttggtgcacgcagcgggctgcacatcacttttaccaatgcaatgagaagttaaaggtgaagacgccgcacgaacgtcactacttgctgtactgcctagtgagcacggcccttatccaactgtactccctctgcgaacacgcattccatcgacatttaggaagtggcagcgattcacgccagaccatcgaacgctattccagccccaaggtgcgacgtctgttgcagacactgaggtgcttcaagccggaagaggtgcacacccaagcggacggactgcgcagaatgcggcatcaggtggatcaggcggacttcaatcggttatctcatacgctggaaagcaagtgccgaatggtggatcaaatggaccaaccgccgacggagacacgagccctggtggccactcttgagcagattctgcacacgacagaggacaggcagacgaacagaagcgccgctcgggtgactcctactcctactcccgctcatgcgaagccgaaacctagctctggtgccaacactgcacaaccacgaactcgtagacgtgtgtacaccaggcgccaccaccgggatcacaatgatggcagcgacacgctctgcgcactgatttactgcaaccagaaccacacggctcgcgtgctctttgagcttctagcggagattagcagacgtgatcccgatctcaagttcctacgctgccagtacaccacggaccgggtggcagatcccaccacggagcccaaagaggctgagttggagcaccggcggcaggaagaggtgctaaagcgcttccgcatgcatgactgcaatgtcctgatcggtacttcggtgctggaagagggcatcgatgtgcccaagtgcaatttggttgtgcgctgggatccgccaaccacatatcgcagttacgttcagtgcaaaggtcgagcccgtgctgctccagcctatcatgtcattctcgtcgctccgagttataaaagcccaactgtggggtcagtgcagctgaccgatcggagtcatcggtatatttgcgcgactggtgatactacagaggcggacagcgactctgatgattcagcgatgccaaactcgtccggctcggatccctatacttttggcacggcacgcggaaccgtgaagatcctcaaccccgaagtgttcagtaaacaaccaccgacagcgtgcgacattaagctgcaggagatccaggacgaattgccagccgcagcgcagctggatacgagcaactccagcgacgaagccgtcagcatgagtaacacgtctccaagcgagagcagtacagaacaaaaatccagacgcttccagtgcgagctgagctctttaacggagccagaagacacaagtgatactacagccgaaatcgatactgctcatagtttagccagcaccacgaaggacttggtgcatcaaatggcacagtatcgcgaaatcgagcagatgctgctatccaagtgcgccaacacagagccgccggagcaggagcagagtgaggcggaacgttttagtgcctgcctggccgcataccgacccaagccgcacctgctaacaggcgcctccgtggatctgggttctgctatagctttggtcaacaagtactgcgcccgactgccaagcgacacgttcaccaagttgacggcgttgtggcgctgcacccgaaacgaaagggctggagtgaccctgtttcagtacacactccgtctgcccatcaactcgccattgaagcatgacattgtggtaagtacttgtaatacgaattatttaagatttgttaaatactcttctttagggtcttccgatgccaactcaaacattggcccgccgactggctgccttgcaggcttgcgtggaactgcacaggatcggtgagttagacgatcagttgcagcctatcggcaaggagggatttcgtgccctggagccggactgggagtgctttgaactggagccagaggacgaacagattgtgcagctaagcgatgaaccacgtccgggaacaacgaagcgtcgtcagtactattacaaacgcattgcatccgaattttgcgattgccgtcccgttgccggagcgccatgctatttgtactttatccaactgacgctccaatgtccgattcccgaagagcaaaacacgcggggacgcaagatttatccgcccgaagatgcgcagcagggattcggcattctaaccaccaaacggatacccaagctgagtgctttctcgatattcacgcgttccggtgaggtgaaggtttccctggagttagctaaggaacgcgtgattctaactagcgaacaaatagtctgcatcaacggatttttaaactacacgttcaccaatgtactgcgtttgcaaaagtttctgatgctcttcgatccggactccacggaaaattgtgtattcattgtgcccaccgtgaaggcaccagctggcggcaagcacatcgactggcagtttctggagctgatccaagcgaatggaaatacaatgccacgggcagtgcccgatgaggagcgccaggcgcagccgtttgatccgcaacgcttccaggatgccgtcgttatgccgtggtatcgcaaccaggatcaaccgcagtatttctatgtggcggagatatgtccacatctatccccactcagctgcttccctggtgacaactaccgcacgttcaagcactactacctcgtcaagtatggtctgaccatacagaatacctcgcagccgctattggacgtggatcacaccagtgcgcggttaaacttcctcacgccacgatacgttaatcgcaagggcgttgctctgcccactagttcggaggagacaaagcgggcaaagcgcgagaatctcgaacagaagcagatccttgtgccagagctctgcactgtgcatccattccccgcctccttgtggcgaactgccgtgtgcctgccctgcatcctgtaccgcataaatggtcttctattggccgacgatattcggaaacaggtttctgcggatctggggctgggaaggcaacagatcgaagatgaggatttcgagtggcccatgctggactttgggtggagtctatcggaggtgctcaagaaatcgcgggagtccaaacaaaaggagtcccttaaggatgatactattaatggcaaagacttagctgatgttgaaaagaaaccgactagcgaggagacccaactagataaggattcaaaagacgataaggttgagaaaagtgctattgaactaatcattgagggagaggagaagctgcaagaggctgatgacttcattgagataggcacttggtcaaacgatatggccgacgatatagctagttttaaccaagaagacgacgacgaggatgacgccttccatctcccagttttaccggcaaacgttaagttctgtaagttatttaaatcccttgctaaggatcagaaataatccctaatacatcttacaggtgatcagcaaacgcgctacggttcgcccacattttgggatgtgagcaatggcgaaagcggcttcaagggtccaaagagcagtcagaataagcagggtggcaagggcaaagcaaagggtccggcaaagcccacatttaactattatgactcggacaattcgctgggttccagctacgatgacgacgataacgcaggtccgctcaattacatgcatcacaactacagttcggatgacgacgatgtggcagatgatatcgatgcgggacgcattgcgttcacctccaagaatgaagcggagactattgaaaccgcacaggaagtggaaaagcgccagaagcagctgtccatcatccaggcgaccaatgctaacgagcggcagtatcagcagacaaagaacctgctcattggattcaattttaagcatgaggaccagaaggaacctgccactataagatatgaagaatccatagctaagctcaaaacggaaatagaatccggcggcatgttggtgccgcacgaccagcagttggttctaaaaagaagtgatgccgctgaggctcaggttgcaaaggtatcgatgatggagctattgaagcagctgctgccgtatgtaaatgaagatgtgctggccaaaaagctgggtgataggcgcgagcttctgctgtcggatttggtagagctaaatgcagattgggtagcgcgacatgagcaggagacctacaatgtaatgggatgcggagatagttttgacaactataacgatcatcatcggctgaacttggatgaaaagcaactgaaactgcaatacgaacgaattgaaattgagccacctacttccacgaaggccataacctcagccatattaccagctggcttcagtttcgatcgacaaccggatctagtgggccatccaggacccagtcccagcatcattttgcaagccctcacaatgtccaatgctaacgatggcatcaatctggagcgactggagacaattggagattcctttctaaagtatgccattaccacctacttgtacatcacctacgagaatgtgcacgagggaaaactaagtcacctgcgctccaagcaggttgccaatctcaatctctatcgtctgggcagacgtaagagactgggtgaatatatgatagccactaaattcgagccgcacgacaattggctgccaccctgctactacgtgccaaaggagctagagaaggcgctcatcgaggcgaagatccccactcaccattggaagctggccgatctgctagacattaagaacctaagcagtgtgcaaatctgcgagatggttcgcgaaaaagccgatgccctgggcttggagcagaatgggggtgcccaaaatggacaacttgacgactccaatgatagctgcaatgattttagctgttttattccctacaaccttgtttcgcaacacagcattccggataagtctattgccgattgcgtcgaagccctcattggagcctatctcattgagtgcggaccccgaggggctttactctttatggcctggctgggcgtgagagtgctccctatcacaaggcagttggacgggggtaaccaggagcaacgaatacccggtagcacaaaaccgaatgccgaaaatgtggtcaccgtttacggtgcatggcccacgccgcgtagtccactgctgcactttgctccaaatgctacggaggagctggaccagttactaagcggctttgaggagtttgaggagagtttgggatacaagttccgggatcggtcgtacctgttgcaagccatgacacatgccagttacacgcccaatcgattgacggattgctatcagcgtctggagttcctgggcgatgctgttctagattacctcattacgcggcatttatacgaagatccccgccagcattctccaggcgcattaacggatttgcggtcagcactggtgaataatacaatattcgcctccctggctgttcgccatggcttccacaagttcttccggcacctctcgccgggccttaacgatgtgattgaccgttttgtgcggatccagcaggagaatggacactgcatcagtgaggaggtgtgttaaaggaaagtcaccaataatacgacaactaattgtaatattctttcttgctttcagtactacttattgtccgaggaggagtgcgatgacgccgaggacgttgaggtgcccaaggcattgggcgacgttttcgagtcgatcgcaggtgccatttttctcgactcaaacatgtcgctggacgtggtttggcacgtatatagcaacatgatgagcccggagatcgagcagttcagcaactcagtgccaaaatcgcccattcgggagctcctcgagctggagccggaaaccgccaagttcggcaagcccgagaagctggcggatgggcgacgggtgcgcgttaccgtggatgtcttctgcaaaggaaccttccgtggcatcggacgcaactatcgcattgccaagtgcacggcggccaaatgcgcattgcgccaactcaaaaagcagggcttgatagccaaaaaagactaagaagtcatcgctgcaatcgtgtttcattagatttaatgattatttttttagacataagaactttaattgtacaaatcttaaatagattgtctatggtcgaataactgtgcagaatttcctatcttcttttataccttgcattatgaggtattattgcagaggaaatcgatgttgataagataagaaatcgtcatcaaacgaaagtcactgataagctaatcacaccttaaatgcttaacctttcgcgaactaaactcagtgaaaatttgccatttgataagaaatgtccgctcctgtagagggtgttccctatgaggagatccagacaaaagaggtttgagattatccacggccagctggattggatggcattataaattcaacgtgcaattccattgcagcttataggcaccggattctatggcagcgtatacagggcggtctggagaaatcgtgagatcgcgctgaagagaattcgcgagggatgtgaggataaaaagattgaaagagagatctaccagctgacaaaggccagccatgtcaacatagttgagctctacggcacatcgaggcacgagggatgcgccctgctgttgatggaattcgtagacggtggatctctgtccagttttctgcacgcgaaaagcaagccaagttattcgcatgcccacgccttcaactgggcgcatcagatcgctcaggtatggtatgaatggtatcatcaccatagtagatagtagaagcaaagacactagaataatgcaaaacaagaaattcttacatggtgccaattgatccaaaataatatagatattttgacaaatttacaatgcatgagcatacatgaacatacgtgtgcacacatgcagtggtcggctgtcactgtatgcgtagaaaagagctgttcgctgtagagctctccgctctctcgctcttgaataaaaatgagagagagagagccttaggcaacctcctctagagccacgccaaaaaaattgtt

SEQ ID NO: 9722 - DNA, 6750 bp, DROSOPHILA
atggcgttccactggtgcgacaacaatctgcacaccaccgtgttcacgccgcgcgactttcaggtggagctactggccaccgcctacgagcggaacacgattatttgcctgggccatcgaagttccaaggagtttatagccctcaagctgctccaggagctgtcgcgtcgagcacgccgacatggtcgtgtcagtgtctatctcagttgcgaggttggcaccagcacggaaccatgctccatctacacgatgctcacccacttgactgacctgcgggtgtggcaggagcagccggatatgcaaattccctttgatcattgctggacggactatcacgtttccatcctacggccagagggatttctttatctgctcgaaactcgcgagctgctgctgagcagcgtcgaactgatcgtgctggaagattgtcatgacagcgccgtttatcagaggataaggcctctgttcgagaatcacattatgccagcgccaccggcggacaggccacggattctcggactcgctggaccgctgcacagcgccggatgtgagctgcagcaactgagcgccatgctggccaccctggagcagagtgtgctttgccagatcgagacggccagtgatattgtcaccgtgttgcgttactgttcccgaccgcacgaatacatcgtacagtgcgcccccttcgagatggacgaactgtccctggtgcttgccgatgtgctcaacacacacaagtcctttttattggaccaccgctacgatccctacgaaatctacggcacagaccagtttatggacgaactgaaagacatacccgatcccaaggtggaccccctgaacgtcatcaactcactactggtcgtgctgcacgagatgggtccttggtgcacgcagcgggctgcacatcacttttaccaatgcaatgagaagttaaaggtgaagacgccgcacgaacgtcactacttgctgtactgcctagtgagcacggcccttatccaactgtactccctctgcgaacacgcattccatcgacatttaggaagtggcagcgattcacgccagaccatcgaacgctattccagccccaaggtgcgacgtctgttgcagacactgaggtgcttcaagccggaagaggtgcacacccaagcggacggactgcgcagaatgcggcatcaggtggatcaggcggacttcaatcggttatctcatacgctggaaagcaagtgccgaatggtggatcaaatggaccaaccgccgacggagacacgagccctggtggccactcttgagcagattctgcacacgacagaggacaggcagacgaacagaagcgccgctcgggtgactcctactcctactcccgctcatgcgaagccgaaacctagctctggtgccaacactgcacaaccacgaactcgtagacgtgtgtacaccaggcgccaccaccgggatcacaatgatggcagcgacacgctctgcgcactgatttactgcaaccagaaccacacggctcgcgtgctctttgagcttctagcggagattagcagacgtgatcccgatctcaagttcctacgctgccagtacaccacggaccgggtggcagatcccaccacggagcccaaagaggctgagttggagcaccggcggcaggaagaggtgctaaagcgcttccgcatgcatgactgcaatgtcctgatcggtacttcggtgctggaagagggcatcgatgtgcccaagtgcaatttggttgtgcgctgggatccgccaaccacatatcgcagttacgttcagtgcaaaggtcgagcccgtgctgctccagcctatcatgtcattctcgtcgctccgagttataaaagcccaactgtggggtcagtgcagctgaccgatcggagtcatcggtatatttgcgcgactggtgatactacagaggcggacagcgactctgatgattcagcgatgccaaactcgtccggctcggatccctatacttttggcacggcacgcggaaccgtgaagatcctcaaccccgaagtgttcagtaaacaaccaccgacagcgtgcgacattaagctgcaggagatccaggacgaattgccagccgcagcgcagctggatacgagcaactccagcgacgaagccgtcagcatgagtaacacgtctccaagcgagagcagtacagaacaaaaatccagacgcttccagtgcgagctgagctctttaacggagccagaagacacaagtgatactacagccgaaatcgatactgctcatagtttagccagcaccacgaaggacttggtgcatcaaatggcacagtatcgcgaaatcgagcagatgctgctatccaagtgcgccaacacagagccgccggagcaggagcagagtgaggcggaacgttttagtgcctgcctggccgcataccgacccaagccgcacctgctaacaggcgcctccgtggatctgggttctgctatagctttggtcaacaagtactgcgcccgactgccaagcgacacgttcaccaagttgacggcgttgtggcgctgcacccgaaacgaaagggctggagtgaccctgtttcagtacacactccgtctgcccatcaactcgccattgaagcatgacattgtgggtcttccgatgccaactcaaacattggcccgccgactggctgccttgcaggcttgcgtggaactgcacaggatcggtgagttagacgatcagttgcagcctatcggcaaggagggatttcgtgccctggagccggactgggagtgctttgaactggagccagaggacgaacagattgtgcagctaagcgatgaaccacgtccgggaacaacgaagcgtcgtcagtactattacaaacgcattgcatccgaattttgcgattgccgtcccgttgccggagcgccatgctatttgtactttatccaactgacgctccaatgtccgattcccgaagagcaaaacacgcggggacgcaagatttatccgcccgaagatgcgcagcagggattcggcattctaaccaccaaacggatacccaagctgagtgctttctcgatattcacgcgttccggtgaggtgaaggtttccctggagttagctaaggaacgcgtgattctaactagcgaacaaatagtctgcatcaacggatttttaaactacacgttcaccaatgtactgcgtttgcaaaagtttctgatgctcttcgatccggactccacggaaaattgtgtattcattgtgcccaccgtgaaggcaccagctggcggcaagcacatcgactggcagtttctggagctgatccaagcgaatggaaatacaatgccacgggcagtgcccgatgaggagcgccaggcgcagccgtttgatccgcaacgcttccaggatgccgtcgttatgccgtggtatcgcaaccaggatcaaccgcagtatttctatgtggcggagatatgtccacatctatccccactcagctgcttccctggtgacaactaccgcacgttcaagcactactacctcgtcaagtatggtctgaccatacagaatacctcgcagccgctattggacgtggatcacaccagtgcgcggttaaacttcctcacgccacgatacgttaatcgcaagggcgttgctctgcccactagttcggaggagacaaagcgggcaaagcgcgagaatctcgaacagaagcagatccttgtgccagagctctgcactgtgcatccattccccgcctccttgtggcgaactgccgtgtgcctgccctgcatcctgtaccgcataaatggtcttctattggccgacgatattcggaaacaggtttctgcggatctggggctgggaaggcaacagatcgaagatgaggatttcgagtggcccatgctggactttgggtggagtctatcggaggtgctcaagaaatcgcgggagtccaaacaaaaggagtcccttaaggatgatactattaatggcaaagacttagctgatgttgaaaagaaaccgactagcgaggagacccaactagataaggattcaaaagacgataaggttgagaaaagtgctattgaactaatcattgagggagaggagaagctgcaagaggctgatgacttcattgagataggcacttggtcaaacgatatggccgacgatatagctagttttaaccaagaagacgacgacgaggatgacgccttccatctcccagttttaccggcaaacgttaagttctgtgatcagcaaacgcgctacggttcgcccacattttgggatgtgagcaatggcgaaagcggcttcaagggtccaaagagcagtcagaataagcagggtggcaagggcaaagcaaagggtccggcaaagcccacatttaactattatgactcggacaattcgctgggttccagctacgatgacgacgataacgcaggtccgctcaattacatgcatcacaactacagttcggatgacgacgatgtggcagatgatatcgatgcgggacgcattgcgttcacctccaagaatgaagcggagactattgaaaccgcacaggaagtggaaaagcgccagaagcagctgtccatcatccaggcgaccaatgctaacgagcggcagtatcagcagacaaagaacctgctcattggattcaattttaagcatgaggaccagaaggaacctgccactataagatatgaagaatccatagctaagctcaaaacggaaatagaatccggcggcatgttggtgccgcacgaccagcagttggttctaaaaagaagtgatgccgctgaggctcaggttgcaaaggtatcgatgatggagctattgaagcagctgctgccgtatgtaaatgaagatgtgctggccaaaaagctgggtgataggcgcgagcttctgctgtcggatttggtagagctaaatgcagattgggtagcgcgacatgagcaggagacctacaatgtaatgggatgcggagatagttttgacaactataacgatcatcatcggctgaacttggatgaaaagcaactgaaactgcaatacgaacgaattgaaattgagccacctacttccacgaaggccataacctcagccatattaccagctggcttcagtttcgatcgacaaccggatctagtgggccatccaggacccagtcccagcatcattttgcaagccctcacaatgtccaatgctaacgatggcatcaatctggagcgactggagacaattggagattcctttctaaagtatgccattaccacctacttgtacatcacctacgagaatgtgcacgagggaaaactaagtcacctgcgctccaagcaggttgccaatctcaatctctatcgtctgggcagacgtaagagactgggtgaatatatgatagccactaaattcgagccgcacgacaattggctgccaccctgctactacgtgccaaaggagctagagaaggcgctcatcgaggcgaagatccccactcaccattggaagctggccgatctgctagacattaagaacctaagcagtgtgcaaatctgcgagatggttcgcgaaaaagccgatgccctgggcttggagcagaatgggggtgcccaaaatggacaacttgacgactccaatgatagctgcaatgattttagctgttttattccctacaaccttgtttcgcaacacagcattccggataagtctattgccgattgcgtcgaagccctcattggagcctatctcattgagtgcggaccccgaggggctttactctttatggcctggctgggcgtgagagtgctccctatcacaaggcagttggacgggggtaaccaggagcaacgaatacccggtagcacaaaaccgaatgccgaaaatgtggtcaccgtttacggtgcatggcccacgccgcgtagtccactgctgcactttgctccaaatgctacggaggagctggaccagttactaagcggctttgaggagtttgaggagagtttgggatacaagttccgggatcggtcgtacctgttgcaagccatgacacatgccagttacacgcccaatcgattgacggattgctatcagcgtctggagttcctgggcgatgctgttctagattacctcattacgcggcatttatacgaagatccccgccagcattctccaggcgcattaacggatttgcggtcagcactggtgaataatacaatattcgcctccctggctgttcgccatggcttccacaagttcttccggcacctctcgccgggccttaacgatgtgattgaccgttttgtgcggatccagcaggagaatggacactgcatcagtgaggagtactacttattgtccgaggaggagtgcgatgacgccgaggacgttgaggtgcccaaggcattgggcgacgttttcgagtcgatcgcaggtgccatttttctcgactcaaacatgtcgctggacgtggtttggcacgtatatagcaacatgatgagcccggagatcgagcagttcagcaactcagtgccaaaatcgcccattcgggagctcctcgagctggagccggaaaccgccaagttcggcaagcccgagaagctggcggatgggcgacgggtgcgcgttaccgtggatgtcttctgcaaaggaaccttccgtggcatcggacgcaactatcgcattgccaagtgcacggcggccaaatgcgcattgcgccaactcaaaaagcagggcttgatagccaaaaaagactaa

SEQ ID NO: 9723 - protein, 2249 aa, DROSOPHILA
MAFHWCDNNLHTTVFTPRDFQVELLATAYERNTIICLGHRSSKEFIALKLLQELSRRARRHGRVSVYLSCEVGTSTEPCSIYTMLTHLTDLRVWQEQPDMQIPFDHCWTDYHVSILRPEGFLYLLETRELLLSSVELIVLEDCHDSAVYQRIRPLFENHIMPAPPADRPRILGLAGPLHSAGCELQQLSAMLATLEQSVLCQIETASDIVTVLRYCSRPHEYIVQCAPFEMDELSLVLADVLNTHKSFLLDHRYDPYEIYGTDQFMDELKDIPDPKVDPLNVINSLLVVLHEMGPWCTQRAAHHFYQCNEKLKVKTPHERHYLLYCLVSTALIQLYSLCEHAFHRHLGSGSDSRQTIERYSSPKVRRLLQTLRCFKPEEVHTQADGLRRMRHQVDQADFNRLSHTLESKCRMVDQMDQPPTETRALVATLEQILHTTEDRQTNRSAARVTPTPTPAHAKPKPSSGANTAQPRTRRRVYTRRHHRDHNDGSDTLCALIYCNQNHTARVLFELLAEISRRDPDLKFLRCQYTTDRVADPTTEPKEAELEHRRQEEVLKRFRMHDCNVLIGTSVLEEGIDVPKCNLVVRWDPPTTYRSYVQCKGRARAAPAYHVILVAPSYKSPTVGSVQLTDRSHRYICATGDTTEADSDSDDSAMPNSSGSDPYTFGTARGTVKILNPEVFSKQPPTACDIKLQEIQDELPAAAQLDTSNSSDEAVSMSNTSPSESSTEQKSRRFQCELSSLTEPEDTSDTTAEIDTAHSLASTTKDLVHQMAQYREIEQMLLSKCANTEPPEQEQSEAERFSACLAAYRPKPHLLTGASVDLGSAIALVNKYCARLPSDTFTKLTALWRCTRNERAGVTLFQYTLRLPINSPLKHDIVGLPMPTQTLARRLAALQACVELHRIGELDDQLQPIGKEGFRALEPDWECFELEPEDEQIVQLSDEPRPGTTKRRQYYYKRIASEFCDCRPVAGAPCYLYFIQLTLQCPIPEEQNTRGRKIYPPEDAQQGFGILTTKRIPKLSAFSIFTRSGEVKVSLELAKERVILTSEQIVCINGFLNYTFTNVLRLQKFLMLFDPDSTENCVFIVPTVKAPAGGKHIDWQFLELIQANGNTMPRAVPDEERQAQPFDPQRFQDAVVMPWYRNQDQPQYFYVAEICPHLSPLSCFPGDNYRTFKHYYLVKYGLTIQNTSQPLLDVDHTSARLNFLTPRYVNRKGVALPTSSEETKRAKRENLEQKQILVPELCTVHPFPASLWRTAVCLPCILYRINGLLLADDIRKQVSADLGLGRQQIEDEDFEWPMLDFGWSLSEVLKKSRESKQKESLKDDTINGKDLADVEKKPTSEETQLDKDSKDDKVEKSAIELIIEGEEKLQEADDFIEIGTWSNDMADDIASFNQEDDDEDDAFHLPVLPANVKFCDQQTRYGSPTFWDVSNGESGFKGPKSSQNKQGGKGKAKGPAKPTFNYYDSDNSLGSSYDDDDNAGPLNYMHHNYSSDDDDVADDIDAGRIAFTSKNEAETIETAQEVEKRQKQLSIIQATNANERQYQQTKNLLIGFNFKHEDQKEPATIRYEESIAKLKTEIESGGMLVPHDQQLVLKRSDAAEAQVAKVSMMELLKQLLPYVNEDVLAKKLGDRRELLLSDLVELNADWVARHEQETYNVMGCGDSFDNYNDHHRLNLDEKQLKLQYERIEIEPPTSTKAITSAILPAGFSFDRQPDLVGHPGPSPSIILQALTMSNANDGINLERLETIGDSFLKYAITTYLYITYENVHEGKLSHLRSKQVANLNLYRLGRRKRLGEYMIATKFEPHDNWLPPCYYVPKELEKALIEAKIPTHHWKLADLLDIKNLSSVQICEMVREKADALGLEQNGGAQNGQLDDSNDSCNDFSCFIPYNLVSQHSIPDKSIADCVEALIGAYLIECGPRGALLFMAWLGVRVLPITRQLDGGNQEQRIPGSTKPNAENVVTVYGAWPTPRSPLLHFAPNATEELDQLLSGFEEFEESLGYKFRDRSYLLQAMTHASYTPNRLTDCYQRLEFLGDAVLDYLITRHLYEDPRQHSPGALTDLRSALVNNTIFASLAVRHGFHKFFRHLSPGLNDVIDRFVRIQQENGHCISEEYYLLSEEECDDAEDVEVPKALGDVFESIAGAIFLDSNMSLDVVWHVYSNMMSPEIEQFSNSVPKSPIRELLELEPETAKFGKPEKLADGRRVRVTVDVFCKGTFRGIGRNYRIAKCTAAKCALRQLKKQGLIAKKD

SEQ ID NO: 9724 - DNA, 6017 bp, DROSOPHILA
gcaaacgtaaaattaacaaaatcctacaattattttgttttttattgaatttcatagcctttcaggtttttggttgatcgcacaggactgcaacgctattatggtcatcaccaacaacacaacactgcccgaggagtcggagctgaacgtccaggagctaaatctatcgtcggcggccttacgggcaggcgccttccatttgggcaagcaatgcgagcaggccaataatgttagtacatccagattgcaggggaatcctcctgatagtaatgcttaggtgaaaagcgccttaaagtgaagctgggagccgctgcctctttaaaatccgagcggcttagttatataacctaacctcaaaaagcaccttccccgtttgtttaccttttccttcgtgtaatttcaggagtttatgctgtgccggcaggagctggatgacccgcgagcctgtttggcggagggcaaagccgtgaccagctgcgccctggacttcttccgcaaggtgaagaagacctgccatgaggagttcacgcagtacgccacctgcctggataagagcagcggtactatggctttttcacagtaagcactccgtaaatgttgaatattccaatcatgctataccaatgtccatccatactttagttgccgcaagacccagggagtgttcgacaagtgtatcaaagataacttcgactgggatcgtccctcctatggatacttctcgagggccaaggtaatttctcggcatgctttatttagacctctcctaatcacttctgttttcaggtcatccaatcagctcgggaagcacccaagaaggaggagaaggtctcctatcccgatgccacccccggtttgcccgaggattaccccaagccgccagcaaagtacggttcccgcttccactggctggagtagacagctgccagcgcctagtgaaatttgaaagcgttcatcttaatataaactcttgtttccattagtactcgatatatttatttcatcgtatctttttcctcgacacagtttgcttgattttggccataatatccaggtactggttgttcaggcagcatccgcagtagctaacagggaagcaggcgctgccctcgatacggcggaaaagtggcgtgttctgatagaagacccacgagatgttttcttcgcccagcaccagcatgatcttgtcgaagcggacgccctgcacctgaaacagctccatgtcgccggtgatgatgcgccactctgcgtagcgtatgttagcatctgggggcagcttggagcgctccctcatcatcacatgctcgaaccaatcgcgcacttggataatcgatccggtgggagcgtgctttctgatctggtagctgatgcgcgggtacagaggatttctgcgacaggaatgaatgagtttctggcgatctcttgggtatttatattaattgcttacatgtaaggaacaaaggccaggcgcaccagcacaaattcaactttctctcgaggagccatcttgaagataattttatttttatgcggacgacgcacttcacaggcactgctatgcaatactaatgaacttggtccactgctcagactatatatgcataatacgcgacttgcaggcaggtagaatcattgctaaagcagatgttccgtttctaatcccaagaaaaagtcccagttttcccgttagttacctgtatcgattttctcatttacagttttattgctaaaaagatttttcttatcctagaagagggagcgctactccgtgtaccacttggtacgcttaggcttcttgattttacctcccgtaacgccgccacctccttggtttccactaatcatgttcttgtacttattaattaggggccgaaggtcatccgtttccttcttgcgtccttgcttgggccgattatttgccttgcgctctgccaggtgggactcgcgtatcttcttgttcttctgcttgcgcttttcggttttcaccttcttcaagtgttccttggcctgctctacaatcttctttttggatcgcatcttcagcgaggtgcccggcttggcggccgtgccgacaaaatcgccctgaacatcgctcaactgctttttctccgcgactttaccttcggctttcgctgctcgcgaagcttcaagtttcttaatgtgtttctgaagtttgcttttattatctgcttggggaactggagttttggtctcctgaccattgcgcttttgctggcgtcgctccttgcgctcctgctgtttgttttggtatgtgggattgttctgctttgagcgctccgtgcgcttttctttgattttgtgcacagcacgatcctctatactgaacgcgacaatggggcgctaagggagtgaatagttagcaagtgaaattagcaagagttgtctaaaagtccttacactctgtgttccgaagatattggggttgttgtttagtttccgtagggcggccaaagctctctgatgcgtgtcgaaggataggaaaccaaagcccttggacttgccctgtggatgctcaggggtcaccttatgttccctcatcacccggcattcgtggggtcggaagccagtataagtcagagccatttgtttcagcttttcattgtcatagttttgggggagattgtgaatggacaagcgattccgggaaacaaacctagaggattatcaattggattataaatgaatcggtcatgtacttagtttcagtcttaccgattcaagttcttgagcacctgcgtcttaacctgctcaagttcatgtcgcttggccatgtctgaggcagaaaccccatcggctgccttcgctccagccatgattagaccttccctggccaaatacaggtttcgtgagtccttggcatcgtcttttttgttttcctgcgactgcttcgacttcatttcctcgcggctcaatgcgggatgaggatccaggacctcgtccatcaacttaaactctgttccagcttgcagacaaagatccgctgactccttggctttgaatttaacgaaggctgtacccttggagtggccagaaaccgcctggcgattaataatggcgtagctgaccaagccgaatttgcggcacgcctttctcaagtcggcatcctctgcatcgaagggaacgtttttaatgaagaccgtgcagccctcctggacgtcgttggagatttgcttttcccttttgacatttttgatatccaattttgattttaattcgtccttgttctccttatgatcttcgtcgttctcttcgtcttcagattctccagagtcctcttcatcttcgccggattccgcatcagaatcctccccagaactttcatcttccttgccaacttccgcgtcgctttcctccttaacttccttctcgtcaccgttttcctctttcacttccacctttggcttcttctcatccggctcctcgtctttcgggttctttgatacatactcgtccttgcccaaagcccagtccacaaatacctttctcccgagcagctctttgccgttggagttcaggatcgctttggtggcctggttaatggtctcgtactggacaaaggcgcagcccaccagcttcccgtcacctcgtttcaggatgtgtacatcctccagcgtgccccactgcccgaaatgctcgcgaagcgagtcctccgtggacttgtaactgatgttgcgcacgatgagacgcgctcgctttttctggcggcgctccttctcttccttcagcctctgtgtgttaaaggggttgcggcgcttccggaccccggtttctggctgagattgggattcggcagcgtcgtcttttaaagatttcatttttttaagttccatttgcacgtggaactcttgatgagaactaacgaacaaaacagctgatcggcaaaatacccaaaatgaaggtccatccctggtataaccgatagaaaatgggcgggaatttacaaacatttcaaaaaatgtttttaacattttatttgtaacaattatcaacaattaaaaagtctacgtttcttgtttggtcgcgaacagttggtggaactccgagggggtcttgaagtaatcaaccagaagcattgaggagcggttgcccagtttgtacataatgtggctccagggatttaaaaaattcttgtattcagctatttgaccgcgttcaaaatagtgttttacagttccaatgggtagttgggacccatagacagccacgtatctaaaaataaagtaagttactacttataaatgtcatgtactaccgtacaaagttacttttccgagctcttgtatattctcagtggatatttggcgacaaaagctcgaatcgccaggtttataagcagaaatccacccacaaagtagtacagatctgattcctgggacaccagaatggctatgtccattttctggaccatatccaggtagtttatggttgtggcatagtgataggcggccaccgcagcaagtacagtggtcgtggcagtggatatattcttcgtccaggtcacgtagctctcgataggggcccggtaaatcagtttatagttatctggtagcctgtcgccaaagaggagcttccgttccacttcgccggaggatgcattccgccatttgcggagcacgctgctggtgctaaatgagaaggtgcagagtgattcaatcggataggtcaatggataggtcttactgtaagagctggaaattcggtttagctagtattggccgtaaataaaccaatttaacacttcgtaagagggccgcacacattttgtgttttattatgctgtctttgaaaacaatctggcaacgtgatcagctgtgctgcaatcagcggcactacccgatggttgtcaaagaagaaggtctggcaacgtatgtgcttgaggaatgcaccgaagaataatcagctgtgcctcgaagttgccggatcaccaggtcgcagcagctatgagttttgcgtcagactcgaataatgattagaagccgactccttccggaaacattcattaggtaaacaacacagctatagaacagacttttccagtttccacaactttagctaggaacacgttccacatttttccacatttttgataccttaacaaaatggattcaaaacgcgcggcccttgaatccggcgacggtccggacgccaagcgccttgataccaccgatgatcaagacaaagaagcgtcggggggcgacggcagtcaggttatgctggccaaacacgtagcaccctacacgggccacggatgtactccaccgatggagtcctatttgttcgaaccgactcccgccgggagtcaacttctgccgtggaaaactagcgttgatttggacaacgacgccgagctggagaagcccaccagtgacaagaaacgtaagttgatggtacgctcacatcctagtactcttatacaacaatttcattcagccgacactgccaagttgtcccgtcgggagctggccaaaatgcgccgtgaacacacattaagggccctcgccctggaacgcgagttgaccaacaaaccggggcagacacccgcttccgaagtgttgctcgtccgctttcctgatcccgagattactgctcccatgctggcaggactgtccaaggatattcgggatgtggtcttgcccattagcgtggctccacgatactgtctagtgcatctaaaggccggtgccgatgtggaggccaccatctgcgacataaacagggtgcgcttcggtacggggcaccttcgggcggagcttaagccgttctccgatgaggagcaggccgagttcattgatccctgttctctgtatgtgggcaacataccgttcaacatgaccacatcggccataaaggcctatttcgccaacgccatgcgcgtggacatcggagtgctgaagcgcgagaagcgcgctcgctacgcctttgtgcgttacgcctcacctgaccagaccatggaagcgttcaaggagctggtcgactcaccgctgaacagccgcact

SEQ ID NO: 9725 - DNA, 3138 bp, DROSOPHILA
atgtttccggaaggactaaaccgaatttccagctcttacagtaagacctatccattgacctatccgattgaatcactctgcaccttctcatttagcaccagcagcgtgctccgcaaatggcggaatgcatcctccggcgaagtggaacggaagctcctctttggcgacaggctaccagataactataaactgatttaccgggcccctatcgagagctacgtgacctggacgaagaatatatccactgccacgaccactgtacttgctgcggtggccgcctatcactatgccacaaccataaactacctggatatggtccagaaaatggacatagccattctggtgtcccaggaatcagatctgtactactttgtgggtggatttctgcttataaacctggcgattcgagcttttgtcgccaaatatccactgagaatatacaagagctcggaaaaatacgtggctgtctatgggtcccaactacccattggaactgtaaaacactattttgaacgcggtcaaatagctgaatacaagaattttttaaatccctggagccacattatgtacaaactgggcaaccgctcctcaatgcttctggttgattacttcaagaccccctcggagttccaccaactgttcgcgaccaaacaagaaacttctcatcaagagttccacgtgcaaatggaacttaaaaaaatgaaatctttaaaagacgacgctgccgaatcccaatctcagccagaaaccggggtccggaagcgccgcaacccctttaacacacagaggctgaaggaagagaaggagcgccgccagaaaaagcgagcgcgtctcatcgtgcgcaacatcagttacaagtccacggaggactcgcttcgcgagcatttcgggcagtggggcacgctggaggatgtacacatcctgaaacgaggtgacgggaagctggtgggctgcgcctttgtccagtacgagaccattaaccaggccaccaaagcgatcctgaactccaacggcaaagagctgctcgggagaaaggtatttgtggactgggctttgggcaaggacgagtatgtatcaaagaacccgaaagacgaggagccggatgagaagaagccaaaggtggaagtgaaagaggaaaacggtgacgagaaggaagttaaggaggaaagcgacgcggaagttggcaaggaagatgaaagttctggggaggattctgatgcggaatccggcgaagatgaagaggactctggagaatctgaagacgaagagaacgacgaagatcataaggagaacaaggacgaattaaaatcaaaattggatatcaaaaatgtcaaaagggaaaagcaaatctccaacgacgtccaggagggctgcacggtcttcattaaaaacgttcccttcgatgcagaggatgccgacttgagaaaggcgtgccgcaaattcggcttggtcagctacgccattattaatcgccaggcggtttctggccactccaagggtacagccttcgttaaattcaaagccaaggagtcagcggatctttgtctgcaagctggaacagagtttaagttgatggacgaggtcctggatcctcatcccgcattgagccgcgaggaaatgaagtcgaagcagtcgcaggaaaacaaaaaagacgatgccaaggactcacgaaacctgtatttggccagggaaggtctaatcatggctggagcgaaggcagccgatggggtttctgcctcagacatggccaagcgacatgaacttgagcaggttaagacgcaggtgctcaagaacttgaatcggtttgtttcccggaatcgcttgtccattcacaatctcccccaaaactatgacaatgaaaagctgaaacaaatggctctgacttatactggcttccgaccccacgaatgccgggtgatgagggaacataaggtgacccctgagcatccacagggcaagtccaagggctttggtttcctatccttcgacacgcatcagagagctttggccgccctacggaaactaaacaacaaccccaatatcttcggaacacagagtcgccccattgtcgcgttcagtatagaggatcgtgctgtgcacaaaatcaaagaaaagcgcacggagcgctcaaagcagaacaatcccacataccaaaacaaacagcaggagcgcaaggagcgacgccagcaaaagcgcaatggtcaggagaccaaaactccagttccccaagcagataataaaagcaaacttcagaaacacattaagaaacttgaagcttcgcgagcagcgaaagccgaaggtaaagtcgcggagaaaaagcagttgagcgatgttcagggcgattttgtcggcacggccgccaagccgggcacctcgctgaagatgcgatccaaaaagaagattgtagagcaggccaaggaacacttgaagaaggtgaaaaccgaaaagcgcaagcagaagaacaagaagatacgcgagtcccacctggcagagcgcaaggcaaataatcggcccaagcaaggacgcaagaaggaaacggatgaccttcggcccctaattaataagtacaagaacatgattagtggaaaccaaggaggtggcggcgttacgggaggtaaaatcaagaagcctaagcgtaccaagtgtgcctgtgaagtgcgtcgtccgcataaaaataaaattatcttcaagatggctcctcgagagaaagttgaatttgtgctggtgcgcctggcctttgttccttacataaatcctctgtacccgcgcatcagctaccagatcagaaagcacgctcccaccggatcgattatccaagtgcgcgattggttcgagcatgtgatgatgagggagcgctccaagctgcccccagatgctaacatacgctacgcagagtggcgcatcatcaccggcgacatggagctgtttcaggtgcagggcgtccgcttcgacaagatcatgctggtgctgggcgaagaaaacatctcgtgggtcttctatcagaacacgccacttttccgccgtatcgagggcagcgcctgcttccctgttagctactgcggatgctgcctgaacaaccagtacctggatattatggccaaaatcaagcaaactgtgtcgaggaaaaagatacgatga

SEQ ID NO: 9726 - protein, 1045 aa, DROSOPHILA
MFPEGLNRISSSYSKTYPLTYPIESLCTFSFSTSSVLRKWRNASSGEVERKLLFGDRLPDNYKLIYRAPIESYVTWTKNISTATTTVLAAVAAYHYATTINYLDMVQKMDIAILVSQESDLYYFVGGFLLINLAIRAFVAKYPLRIYKSSEKYVAVYGSQLPIGTVKHYFERGQIAEYKNFLNPWSHIMYKLGNRSSMLLVDYFKTPSEFHQLFATKQETSHQEFHVQMELKKMKSLKDDAAESQSQPETGVRKRRNPFNTQRLKEEKERRQKKRARLIVRNISYKSTEDSLREHFGQWGTLEDVHILKRGDGKLVGCAFVQYETINQATKAILNSNGKELLGRKVFVDWALGKDEYVSKNPKDEEPDEKKPKVEVKEENGDEKEVKEESDAEVGKEDESSGEDSDAESGEDEEDSGESEDEENDEDHKENKDELKSKLDIKNVKREKQISNDVQEGCTVFIKNVPFDAEDADLRKACRKFGLVSYAIINRQAVSGHSKGTAFVKFKAKESADLCLQAGTEFKLMDEVLDPHPALSREEMKSKQSQENKKDDAKDSRNLYLAREGLIMAGAKAADGVSASDMAKRHELEQVKTQVLKNLNRFVSRNRLSIHNLPQNYDNEKLKQMALTYTGFRPHECRVMREHKVTPEHPQGKSKGFGFLSFDTHQRALAALRKLNNNPNIFGTQSRPIVAFSIEDRAVHKIKEKRTERSKQNNPTYQNKQQERKERRQQKRNGQETKTPVPQADNKSKLQKHIKKLEASRAAKAEGKVAEKKQLSDVQGDFVGTAAKPGTSLKMRSKKKIVEQAKEHLKKVKTEKRKQKNKKIRESHLAERKANNRPKQGRKKETDDLRPLINKYKNMISGNQGGGGVTGGKIKKPKRTKCACEVRRPHKNKIIFKMAPREKVEFVLVRLAFVPYINPLYPRISYQIRKHAPTGSIIQVRDWFEHVMMRERSKLPPDANIRYAEWRIITGDMELFQVQGVRFDKIMLVLGEENISWVFYQNTPLFRRIEGSACFPVSYCGCCLNNQYLDIMAKIKQTVSRKKIR

SEQ ID NO: 9727 - DNA, 5769 bp, DROSOPHILA
ctatccagaatttcttgagctcgccgaaggtgagtttgtagcccagtttgtagcgcatatcacgtacatcctcctcggtgagggagagcagcacctcgccgtcgatggcctcctggcgcaggcagtcgagcagtgttctcgaaaagtgctccatgcaggtggcccaactggtcacattctcgatggaccactgggccacgagtagcggatccacgggctctggatctggcgatccattggtcaggtgcttatctgtcgccgcgtcgaggtagtgcgtccgggtctcctgatccattgtgaccaatccaccgccctcggaacgtggctgagtcaccggatcgccaatttcaccgtcgcacatcgcgctttcttttttttccgttcgatgttcttctggctgtttcttattcgttccaattttgcgatttatccaaaatccaaaacaattgtgcggccgaactcagatggagtgcaacattttttcactgctggctgctgttgctgctgcggcgcataattaacacctcacttattgcgcgtccagcgtttgttgatgtaaaagcacatttaatttttggtttggttacttgttaaattcagactactcagttgttccgttcagagagcaagcgagagagcagagcggagtcagcaactatgctgggggcgggagcgagataacaaggccgaacagctgacttcggccatcgatagtttttggacaacgccaacgctatcgatgaacagttacttcggtcttaactgcgtgttcacaccgaaaaattttcgagaatttcgctctcgtaaaagtcaaaaggtttaaaactcttatcgttagcttaatattattttaaataaaacaatttgaggtgtctggcgagtagaaattatttaaatattaacgcttgactgatataaatctcgttcgatatatacgaaaccatggtgaaaatgtggaagagtggaaacggcctccaaagcgaagatatcgaagccacagcttcgcttcgttagcattttgcgagcggcaaagtgatttaattgtcctcgtgcgaatgtctagacagaagtaatcctcgaataatatgaagaaagccaagccgctgctgcacgaccatctaataacgatccgagtaaagaaggtgtgtccaaatccgttgtttatatccacaaactagccagctgcccgatagccggtaaattcccatgaaagcagcacaaaaaaaaaaaaaaaaacacacaaaaaccctttgcagggcggcgattttgggcaagggaaaacaaggttaggtcgcaggctacccgcatcgtgtgctaattgcgttctactttcgatttcagtatctggaggagcacatcggggaaacctacctggatgtgaaacagatgaccagggagttgatgcaaaagtatccggaatattcacgacgcaaattcggaccattcagacagctggtgcaccaaggtaaacatggaacattgtggttatttgtttttaacaaatatttctattacagcattctcgatcatttcggaaagctataacttggacaaggtaagcagttccgaggaagattgtgttagcgaggactccgagccaccacccacgaatagtgtgatgaacaatatgatgaacagcctgtatagtcaaccaagaaagccgctggcgcccaagccaatcagcgagcccatcgatatatccagtggagacgagaacgaagatgactccaatacaaaaaccaccaacggagatggggtagctgctgctgctgctcctcctcctcctactccagcagtgcagggcagtgctttgaaacgcctgatggaggaagtgccggagatcgcagtggctgcaaagaaaggtgggttatcaatccattagtctatgacttggttaaatgacattcttcattagtagctaaaccgaatactattcacgttagcagttcggaggccattcaaaagcgtgagtttttttttaaatacttttgtaaaatcaatgaaacctaaactttttgttttagtgcaccaagttgtgggcaacagagcgaaaaatctttcagaggacgccgttccgcgttccaaagatcaccgtaatgtgcctggcttatatcagcagttgcaccaaaaccaaagtcgcgatcgccttcggaagttcaaaagggatctggaggtgcagcacccaacggaaagtttccgggacattggtggcatggatagcactcttaaggagttgtgtgaaatgctgatccatattaagtcgccggagttctactttcaattgggtctattgccttcgagaggtttattgcttcatgggccgccaggctgtggcaaaacctttcttgctcgtgccattagcggggtgagttttataaatgaacattgaatcgttaattcatatattaatcatctctgctttacgacacagcaactaaaaatgcctctaatggaaattccggccacagagctaattggtggcatctctggtgagtcggaagaacggattcgcgaggtctttgaccaggccattggctactcgccttgtgtgcttttcatcgatgaaatcgacgccatcggaggaaatcgtcagtgggcgtccaaggatatggaacgtcgcattgtctcgcagctgataagcagtctggacaacctgaaggccaacgagtttggccaatcagtagtcgtcatagcggccaccacgcgtcccgatgtcctcgaccctggactacgtcgcatcggtcgcttcgatcacgaaattgccatacacatcccatcgcggaaagagcggcgtgaaatcttgcgcatccagtgcgagggcttgtccgtcgatcccaagctaaattatgataagattgcagagctaacaccgggatatgtcggtgctgatctaatggctctcgtaagtcgtgcagcttctgtggccgtaaagcgtaggtccatgaagaagttccgtgaactgcacgctgctagtgaaaagaatatgacaacggtcactttggatgacgacgagcccagcgaggacgcaggtgaaacacctgtgcctgattcaaaaggtgaagaaactgcaaaagatgcagaggcagaacaaaaggtagatggtgacaaggaaacatctgctaaggataaatcagaaggcgactcgccaaatattgaaacccccaagaaagcgaccaacggcaactcatcgataaagtcgccgcagaaaacaccgaagaaatcagcggagaaaccaactgacgcagcgatggatgtagacaatgttgctcccgaggagccgaaaaaagccgttgagcaggaggtggattcctcctcctccaacgacgagtactacgaacccacactggccgaactgaccaattttcttgacaacccccctgaagagttcgccgacccaaacttttgcctcactctcattgatttcgtagatgccattaaggtgatgcagccttcggccaagcgcgagggctttataacagtaccagataccacttgggatgacattggtgccctagagaaaattcgcgaagagcttaagttggctgtcttggcaccagttaagtatccagagatgctggaacgtcttgggctgacagctccgtcaggcgttctgctatgcggtccgccgggttgcggcaaaactcttttggccaaggctattgccaatgaggctggcatcaatttcatatcggtgaagggccccgaacttatgaacatggtaagataattgaaatgttgtatatttcttgcattgctcatcatgtccgtatattgtatagtatgtcggcgagagcgaacgagctgtgcgtgcctgtttccaacgtgcccggaactctgcaccctgcgtcatcttcttcgacgagttcgactccttgtgccccaagcgatcggatggtggcgatggtaataattcgggcactcgtatcgttaaccaactgctgaccgaaatggatggcgtcgaggagcgcaagggtgtatacatattggcggccaccaacagaccggatatcattgatccggccatcctgcgaccgggtcgcctggacaccattttgtacgtgggtttccccgagcagagcgaacgtaccgagattttgaaggccaccacaaaggtagaatattgtggttacatattttattcggtaaattgaaatctattttttgttcttttccatcgcagaacggaaagcgtccggttctggccgatgatgtagatctcgatgaaattgctgcccaaaccgagggctatactggcgcagatttggcaggattggtcaagcaggcctccatgttctccctgcgacaatctctaaacaacggcgacacaaatctcgacgatttgtgcgtacgcagccagcatttccaggaagctttgcagcaacttcggccctcagttaacgaacaggtaagaatgccccagtacattgttaattataattgtttaacatgtatttatttaataaacaggaccgcaaaatatacgataaactgcgcctgaaatatgctgcaccaagggtacccactctaaatgataagtaaaccgatcaacaataatgagtttgttgatttagcaccatcgcgaatcaatttaattgtaagtttcgaaaattaacttttaattttcgatacaaaatgcgatatgttacccaaaaaaacaaaaccatttaatctatcttgtaaaatgcgtagaagagatatgtatttagtttttggattgttttaattttttgtagtatcttacaaaataaaagttaaactatttgggttcatcgcagtttagtttgacttacacatttaatttcacgttgccacactaatcacaaaacaaagttctaagcttataggagcaccagcgacactggcgaagaaatggtaggtttgccacggctggtcagaatcgcgccatctccaccgccctgtccatcacgactaagtccggattgttttatcggtggatactgaggctccatttgtcgcgggaagagtccgggcggcagggcttgaatgccctcgggcagatctagggcttcacgtgcctttaaactcctttgcagccgtaagatgttctcgtgctgcgcgcgaatcgttgtgcgcttcgatcgcttcttcttggacgtggttttggcaaaatcgccaccagccgtattggtctcttccgtggtcgttgacgtattctcgattgccacgccctcattactgctttcgtgacgagacggccacggcagtggtggctccttttcacggacaatctgatgtcgcagatcaaaggagcgcttgcacatctctcgtataccgtaccaactttcatggccaatttgactgatcatctccactggcggctgaaagccgagctctcgagatggcagctccattaccaatgccatcggtactttcaacactccatatacgtagtccacaacggaaccggcaatggttcgcttggtcagacagctgatgctacccgttcggtactcccggccattgtaggacttgattgcactcttgccggaattcgccagggagctcaattcacgccaataaatcggattgtcacggcagtagccccaagggtacatgatactttggccatacgagtgcagggacaaaaagaacaggaggttcgaactcatcctgtcgagaatgcatctcatggcccgcgtttccggctcggaaaacggactttcacccttgtatgtattacggttgatcttgctgggtccgctgttccagaagatgtcgtaatttcggttgcaatcagtgcccacaaat

SEQ ID NO: 9728 - DNA, 3150 bp, DROSOPHILA
cttcgcttcgttagcattttgcgagcggcaaagtgatttaattgtcctcgtgcgaatgtctagacagaagtaatcctcgaataatatgaagaaagccaagccgctgctgcacgaccatctaataacgatccgagtaaagaagtatctggaggagcacatcggggaaacctacctggatgtgaaacagatgaccagggagttgatgcaaaagtatccggaatattcacgacgcaaattcggaccattcagacagctggtgcaccaagcattctcgatcatttcggaaagctataacttggacaaggtaagcagttccgaggaagattgtgttagcgaggactccgagccaccacccacgaatagtgtgatgaacaatatgatgaacagcctgtatagtcaaccaagaaagccgctggcgcccaagccaatcagcgagcccatcgatatatccagtggagacgagaacgaagatgactccaatacaaaaaccaccaacggagatggggtagctgctgctgctgctcctcctcctcctactccagcagtgcagggcagtgctttgaaacgcctgatggaggaagtgccggagatcgcagtggctgcaaagaaagtagctaaaccgaatactattcacgttagcagttcggaggccattcaaaagctgcaccaagttgtgggcaacagagcgaaaaatctttcagaggacgccgttccgcgttccaaagatcaccgtaatgtgcctggcttatatcagcagttgcaccaaaaccaaagtcgcgatcgccttcggaagttcaaaagggatctggaggtgcagcacccaacggaaagtttccgggacattggtggcatggatagcactcttaaggagttgtgtgaaatgctgatccatattaagtcgccggagttctactttcaattgggtctattgccttcgagaggtttattgcttcatgggccgccaggctgtggcaaaacctttcttgctcgtgccattagcgggcaactaaaaatgcctctaatggaaattccggccacagagctaattggtggcatctctggtgagtcggaagaacggattcgcgaggtctttgaccaggccattggctactcgccttgtgtgcttttcatcgatgaaatcgacgccatcggaggaaatcgtcagtgggcgtccaaggatatggaacgtcgcattgtctcgcagctgataagcagtctggacaacctgaaggccaacgagtttggccaatcagtagtcgtcatagcggccaccacgcgtcccgatgtcctcgaccctggactacgtcgcatcggtcgcttcgatcacgaaattgccatacacatcccatcgcggaaagagcggcgtgaaatcttgcgcatccagtgcgagggcttgtccgtcgatcccaagctaaattatgataagattgcagagctaacaccgggatatgtcggtgctgatctaatggctctcgtaagtcgtgcagcttctgtggccgtaaagcgtaggtccatgaagaagttccgtgaactgcacgctgctagtgaaaagaatatgacaacggtcactttggatgacgacgagcccagcgaggacgcaggtgaaacacctgtgcctgattcaaaaggtgaagaaactgcaaaagatgcagaggcagaacaaaaggtagatggtgacaaggaaacatctgctaaggataaatcagaaggcgactcgccaaatattgaaacccccaagaaagcgaccaacggcaactcatcgataaagtcgccgcagaaaacaccgaagaaatcagcggagaaaccaactgacgcagcgatggatgtagacaatgttgctcccgaggagccgaaaaaagccgttgagcaggaggtggattcctcctcctccaacgacgagtactacgaacccacactggccgaactgaccaattttcttgacaacccccctgaagagttcgccgacccaaacttttgcctcactctcattgatttcgtagatgccattaaggtgatgcagccttcggccaagcgcgagggctttataacagtaccagataccacttgggatgacattggtgccctagagaaaattcgcgaagagcttaagttggctgtcttggcaccagttaagtatccagagatgctggaacgtcttgggctgacagctccgtcaggcgttctgctatgcggtccgccgggttgcggcaaaactcttttggccaaggctattgccaatgaggctggcatcaatttcatatcggtgaagggccccgaacttatgaacatgtatgtcggcgagagcgaacgagctgtgcgtgcctgtttccaacgtgcccggaactctgcaccctgcgtcatcttcttcgacgagttcgactccttgtgccccaagcgatcggatggtggcgatggtaataattcgggcactcgtatcgttaaccaactgctgaccgaaatggatggcgtcgaggagcgcaagggtgtatacatattggcggccaccaacagaccggatatcattgatccggccatcctgcgaccgggtcgcctggacaccattttgtacgtgggtttccccgagcagagcgaacgtaccgagattttgaaggccaccacaaagaacggaaagcgtccggttctggccgatgatgtagatctcgatgaaattgctgcccaaaccgagggctatactggcgcagatttggcaggattggtcaagcaggcctccatgttctccctgcgacaatctctaaacaacggcgacacaaatctcgacgatttgtgcgtacgcagccagcatttccaggaagctttgcagcaacttcggccctcagttaacgaacaggaccgcaaaatatacgataaactgcgcctgaaatatgctgcaccaagggtacccactctaaatgataagtaaaccgatcaacaataatgagtttgttgatttagcaccatcgcgaatcaatttaattgtaagtttcgaaaattaacttttaattttcgatacaaaatgcgatatgttacccaaaaaaacaaaaccatttaatctatcttgtaaaatgcgtagaagagatatgtatttagtttttggattgttttaattttttgtagtatcttacaaaataaaagttaaactatttgggttca

SEQ ID NO: 9729 - protein, 944 aa, DROSOPHILA
MKKAKPLLHDHLITIRVKKYLEEHIGETYLDVKQMTRELMQKYPEYSRRKFGPFRQLVHQAFSIISESYNLDKVSSSEEDCVSEDSEPPPTNSVMNNMMNSLYSQPRKPLAPKPISEPIDISSGDENEDDSNTKTTNGDGVAAAAAPPPPTPAVQGSALKRLMEEVPEIAVAAKKVAKPNTIHVSSSEAIQKLHQVVGNRAKNLSEDAVPRSKDHRNVPGLYQQLHQNQSRDRLRKFKRDLEVQHPTESFRDIGGMDSTLKELCEMLIHIKSPEFYFQLGLLPSRGLLLHGPPGCGKTFLARAISGQLKMPLMEIPATELIGGISGESEERIREVFDQAIGYSPCVLFIDEIDAIGGNRQWASKDMERRIVSQLISSLDNLKANEFGQSVVVIAATTRPDVLDPGLRRIGRFDHEIAIHIPSRKERREILRIQCEGLSVDPKLNYDKIAELTPGYVGADLMALVSRAASVAVKRRSMKKFRELHAASEKNMTTVTLDDDEPSEDAGETPVPDSKGEETAKDAEAEQKVDGDKETSAKDKSEGDSPNIETPKKATNGNSSIKSPQKTPKKSAEKPTDAAMDVDNVAPEEPKKAVEQEVDSSSSNDEYYEPTLAELTNFLDNPPEEFADPNFCLTLIDFVDAIKVMQPSAKREGFITVPDTTWDDIGALEKIREELKLAVLAPVKYPEMLERLGLTAPSGVLLCGPPGCGKTLLAKAIANEAGINFISVKGPELMNMYVGESERAVRACFQRARNSAPCVIFFDEFDSLCPKRSDGGDGNNSGTRIVNQLLTEMDGVEERKGVYILAATNRPDIIDPAILRPGRLDTILYVGFPEQSERTEILKATTKNGKRPVLADDVDLDEIAAQTEGYTGADLAGLVKQASMFSLRQSLNNGDTNLDDLCVRSQHFQEALQQLRPSVNEQDRKIYDKLRLKYAAPRVPTLNDK

SEQ ID NO: 9730 - DNA, 5221 bp, DROSOPHILA
tgacaaacgactgtggatgtgtgggtggctaagtggcaatgtgtgtgtgcgccgtggcataaagtagctaattgccgttagttatgttgccacccacaaaattccgcaattaatgtatctccctgtagcggaaaaatgtgtgtgttgtgcggttaaaagactagcaaatgttcgttctggcaaaacacaaatggagctaagagcgtaaaaaagtatgctacattttattttctatgctgcggaattctactcttttattttgttttaaaaaaaaaacaaagtattaatattatgataataaattaaactaaattgtcctctgtttttaatcatagaaattaaagtgtgatttagagtctgttgcataaacgggatgcacttcattttaagcttttaagaactcaatgccataaacgtcgtattaaaagtgattagtattaggaggtcacccggaatgtaatactgacttggaaagtgttttaactttcaaagtcaaaagcgttgataagtcaaaatttaagaattaaattacttttcaaatttcataaaatcggagttttgtgatattggtcgtcctaagaaattggttagaattacagctattgtttcttaacaatttcctcaagttaaacctatgttccctcccatatcttgctttcagaagaaattaagcagaagaatatgctatgatactagcattggcttggcaacccaatctcataaagtcaaaacaaatatatataaacaaatgttattttaaatatattcaatataaaaccgagattttaaaagtggaggtgcaaaggggctaaggaagttggtaatgaatcgaaacttgacatattgtcaaaagtatcggttactactatggaaggacatcaaactacaacttaccaattgggtagaattagttatgatcattttcctttcagctttaatgcccatatttttctctattggcacaaaagtagcaaaatcaatctttccccccgatatagaaatggaaaagagtcccggtccgaaaagtgtcaacacaagtttgtaagtaaatatttaattaaggtcaacatattctaacattattttatttagattcgtagacttatactttacacctaacaatggtatactagagcaattaattactcagcttgcaaatatttccgaatttaaaagtgtcgaagtgtttgacaccaactctgaactctacttgcaattgatgattaatagaaatgcaattggtattgcgttccccagtgaatggtatgacataaaatcctgcccggaagtgctaaatctaaccatatttatgccgttatccataaaaagaaaagattttaaatatttcgaatcaggatttttattgcttcaagagcgaatatcgaaaatattcatattttttaagaatgctggaaacggaaagattcctcgtgttctgatgaatcattttccatacccctcatatgtgcccaatcattatgcggagtcggcaaaagccatgacatatatgaccctaatatcgttttttcttccctgcatcacaattgccaaggtatgataagcaaactaagtacattaataaaacccccttaacctcattttgttgcaaagtatgtagtagctgaaaaggagcgccatcaaaaagctgttcttaccgcaatgggatttagtaatagtattcactggctggcctggtatactaaatcaatgctactgttattactatgtctgttaattatgatttctattttttctattggcttgatttatgaatttagcagcctggtttgcctgatgaccatttttctggtatacatccattcacttgtgctttttgccttcttcataagctcatttttctcaagaagtctatcggccgtcgtggccacaattttgatgtacttctccacggctcttccctttctaattgtgggcgcggagaattctagtgttgcagcccaaacggcagccagtattggacttaactctgcgctgttctacattttggattcggtggccgtaatggagatgcagtcggtgggagcgcaatggtacaccattgacaatactgcatctagtggatataagctcagcatagtgggctacatgctcatcatgatttcgattagctggattgagctgctcatctgcctgtatatcgaagcggtgcgaactggtgagtttgaagtccctcagccatggagctatccattccaaagaagatattggtgtccgctccgatatgggtcttcagtttttcaccaaggagcccttttgccccttgcagggaaaaattccgaaggaaatttacccgcagcccatccaacgagacaaccgattatctacctcgatgatcgaacccaagaaaattttcagagggtaaacataagcaaaaaaattggaatagaagttagaagtctttccaagacattcggatttcgcaatgtggtaaaggatttattctttaatgtgtacgaaaatgagataacagcgttggtgggacacaaaggttctggaaaaactacaatcataatgatgctttgcgggattttgcaacccactacgggaacagtcctgatcaatggttacgatatagttaccgaagcaaaagtagcaaaaagtagtttgggaatctgccctcaacacagtgtcattttcaaaggaatgagtgccagggatcacatatacttctttagtcgcgtaaagggctacaataaaacagaggccatgatggaatcgaatatctacatcagcaagcttggcttggtcgattcccaaaaatgggacgccatgagactatcaccaggtaatcagcgacgattgtcactggcctgtgccctttgtgccggctccaaggtaatcctctgcgacgagccatcctccggtttggatcccattggtcgccacgagctaatgcgatttttgcagaaggagaagcatggacgcaccatcttgatgacaacccaacagttggaggagggtgagatccttgccgaccgcatagctatcatgaacgatggacaaattttgtgctacggcactttgggatacctaaaacaattgccattcaccagctatacactctcctgccagatggctcccaatagcaaagcggacaacctgacggatctcgttaggctctatatgacgaccaccacttctccggtgttccacggagtggatgtgagctacaaactgccacgaagccaaatagaccgctttccggagtttttccaacagctggaggagaataaaaaaagcctcaatgtcgtcagttttggagtgagcgattcaactctggatggaatctatctcagtttggattatggtcaggggagttcacgtcttaggggcggtgctgatccaggagttaatggtaagattagaattagtgtgcacttgtatttataacatagttctatatattaaattacatttattatgtggttcttaattttgatttgcagataaagtcgagtttggagttcaaacggacaaggcaattcggacgaaggatagagcgaacaactcacttgttaggtatcagcatcaagtggaccccccaaacgaaacgatactaaacacaaaaacgcccataaacccaatagaaatatggaggccaatagatcgggaaaaaggaagttgtatggcccaatggcaggcaatgtttataaagaaaaaaaattacactgcgtcgcgtgcactgatttttattttaatcctcatcattccacttttctattatatcatagtacttgggactgccgcctcggaaaaatgtgcccatcgaacggataaacaacctgtgctcccattgtcgctggactattatagctatgatgacatgatcatcttactcgaagttgataagcagttgtacaagagcgaaggagaggcctacgtccaattggtcaaagagcctgcaaccgtcgaaagcgtagactcaattttttcgcatcttttaaaagcaccgccaataatacgacgtgatattaagcgtaaatatgtctgtggtgcttcgtttaataatgcgtcaactatcacggcctggttcaatagcgatgctttcgaacactcggcacccattgccctgaatttggtctataatgccctgggaaaggcagtgtttgaagaccaagatttcagtattttggtaaacagaggtgatcttcatgatttcatttggttaaataacgcttcaagtatgaggcgcaggtataaacgacagaatgatccggactatacggattattcggactacgaaattcaggaatatgatgttgttgtcaaaccaaacagctccagtacatcgggtcaacacaataaatctaaccccggggatgataatataattactgttcagatgtctataatagaagcagcttcaacattatataatgaaaagggcaaaaggaagcaactcttcggtacactaattataataacagcgtatatagccctgtgtttaagcatattttccatatttgtaaccaaggagcgtgtggagcattttaaaatgcaacaagaaatttacggagtgaccctattctatttctggtcaacccactttgttggcgattttctaatatatgcaatttacatgggggctttaacaattgcaatctatcattttacaatatggtaccaagtggttgtaatgcttctacttattggatttgcctgcctgccatttgtgtacctatgtagtttattgtttagtttgcctaatattgcatttgctggaatctttgcgatcctggtaatgacgggtgagtaacgaaaacataaagctgataatacaaatttgtatgaaataaaacaatcgatctttacaactaagggctggggatgtagattgtctaagatatctataaaaagctaaactgcaaataaatgcagataccatttgaaagtatataataatccaacttcatatttctgtgtaggtggaatgctattttcctttatgtacatgttgaccctaatcacggatgtcaattttacaactgtatttgcgatacttccaatgtacgtcggtacctttggcctatttaaatgcctcgcgtggcgtgaatattgcaaccgtgaagtacttcctccgatcgaagaacttgattgtaaattcggaaattgtaacgtgttctgtgcgtgcaaacgtaagtatttttaatttacattatgcattctacttgattaacttgttttactgttgagcagctga

SEQ ID NO: 9731 - DNA, 1485 bp, DROSOPHILA
atggaaaagagtcccggtccgaaaagtgtcaacacaagtttaagtctatcggccgtcgtggccacaattttgatgtacttctccacggctcttccctttctaattgtgggcgcggagaattctagtgttgcagcccaaacggcagccagtattggacttaactctgcgctgttctacattttggattcggtggccgtaatggagatgcagtcggtgggagcgcaatggtacaccattgacaatactgcatctagtggatataagctcagcatagtgggctacatgctcatcatgatttcgattagctggattgagctgctcatctgcctgtatatcgaagcggtgcgaactggaatgagtgccagggatcacatatacttctttagtcgcgtaaagggctacaataaaacagaggccatgatggaatcgaatatctacatcagcaagcttggcttggtcgattcccaaaaatgggacgccatgagactatcaccaggtaatcagcgacgattgtcactggcctgtgccctttgtgccggctccaaggtaatcctctgcgacgagccatcctccggtttggatcccattggtcgccacgagctaatgcgatttttgcagaaggagaagcatggacgcaccatcttgatgacaacccaacagttggaggagggtgagatccttgccgaccgcatagctatcatgaacgatggacaaattttgtgctacggcactttgggatacctaaaacaattgccattcaccagctatacactctcctgccagatggctcccaatagcaaagcggacaacctgacggatctcgttaggctctatatgacgaccaccacttctccggtgttccacggagtggatgtgagctacaaactgccacgaagccaaatagaccgctttccggagtttttccaacagctggaggagaataaaaaaagcctcaatgtcgtcagttttggagtgagcgattcaactctggatggaatctatctcagtttggattatggtcaggggagttcacgtcttaggggcggtgctgatccaggagttaatgtacttgggactgccgcctcggaaaaatgtgcccatcgaacggataaacaacctgtgctcccattgtcgctggactattatagctatgatgacatgatcatcttactcgaagttgataagcagttgtacaagagcgaaggagaggcctacgtccaattggtcaaagagcctgcaaccgtcgaaagcgtagactcaattttttcgcatcttttaaaagcaccgccaataatacgacgtgatattaagcgtaaatatgtctgtggtgcttcgtttaataatgcgtcaactatcacggcctggttcaatagcgatgctttcgaacactcggcacccattgccctgaatttggtctataatgccctgggaaaggcagtgtttgaagaccaagatttcagtattttgtatgaggcgcaggtataa

SEQ ID NO: 9732 - protein, 494 aa, DROSOPHILA
MEKSPGPKSVNTSLSLSAVVATILMYFSTALPFLIVGAENSSVAAQTAASIGLNSALFYILDSVAVMEMQSVGAQWYTIDNTASSGYKLSIVGYMLIMISISWIELLICLYIEAVRTGMSARDHIYFFSRVKGYNKTEAMMESNIYISKLGLVDSQKWDAMRLSPGNQRRLSLACALCAGSKVILCDEPSSGLDPIGRHELMRFLQKEKHGRTILMTTQQLEEGEILADRIAIMNDGQILCYGTLGYLKQLPFTSYTLSCQMAPNSKADNLTDLVRLYMTTTTSPVFHGVDVSYKLPRSQIDRFPEFFQQLEENKKSLNVVSFGVSDSTLDGIYLSLDYGQGSSRLRGGADPGVNVLGTAASEKCAHRTDKQPVLPLSLDYYSYDDMIILLEVDKQLYKSEGEAYVQLVKEPATVESVDSIFSHLLKAPPIIRRDIKRKYVCGASFNNASTITAWFNSDAFEHSAPIALNLVYNALGKAVFEDQDFSILYEAQV

SEQ ID NO: 9733 - DNA, 7248 bp, DROSOPHILA
cgcgcccgccaatcgtttgctgaaggctgctgcgagatctggcttacttccgaggatacaggagcttatggtcgagatattggaagctcattgccggaattgctctggcaactggtggaagtgatccccgagcactgcatgttgcgtgtaggcatgaccaatccaccgtatatactggagcatctcgaggaagtggccaacgtcttgcagcacccgagagtctactcctttttacatgttcctgtacaggtaaggatcgagtgtaatatatataaatatttttcgatagtcaattatttctttttatagagtggtagtgactctgtgctgggcgagatgaaacgagagtactgtcggcaggactttgagcacgttgtggatttcttaagggaacgagttcccggtgtcacgattgccacggatataatttgtggtttcccaacagagacagaagacgatttcgaggagacgatgaccctttgcgccaaatatcgctttcccagtctgttcatcaatcagttcttccctcgtccgggcacaccagctgctaagatggatcgcatccccgcaaacctggtgaagaaacgaactaaacgtctcacggatctcttctacagctatgaaccctatgcggacagagtgggtgaaatatacaccgtcttggtcacagaagtttcacacgacaagctccattacgtgggccacaacaagagctacgagcaagtactgctgcccatgcgggataaccttcttggtactcgtgtccatgtgcgaattaccagtgcgagcaagtttagcatggtgggagaaattttagacgacgaacgcgattggacgaggtgtgcaaaaaatcaggagttaccaaacgttcaagtgcaaaccaggagtcgggaaagactaatccaacgctattttggcatcgctttggtgttgggaagtcttgctttcctcatacagcttgtagttcgactcttatagccacatcaataaaacatctcgttccaaattcataatttaagtaacgttttgaacttaacctaagatacattagaaacttgatggttccatataggtatggattggcccagatctccttagtactcatcagagggttccgtgccaaagtagcgatcgccaaagttaccaatgccgggtataacataaaacttactattaatctccggatccagagcggaagtaacaattttcacctacataaagaagaacataaataaatgccggcttttggaatttagtgtcaatctcacctttgggaaggcataggcaatggagtgcacaccgatctcagccatcaaaagcgaggccaagataatgttgtcctcgggtacatcgtgatccagcagcacccgaatggccatcatggccgctgctcctgtggccacggtggcatccattagtatcaccttgtagtcttttatgtctttaggcagcctcaggtagtaaagctccggctcgccggtcttaagattggtctggatgaggatctttccgatgcgaatgtccttgcacacatcacaaacggcttgttccattgtttcaccagctcggagaattgagacgccgcatatttttcgcgattccatacgcttgccctcgtaaaggacaccttgtggagtctccactgttgttttcttaaagggaaataagcttagcgcatattcaatgactagccgtatcaggcgctttgagtaaaaaataaactcatcgcgggacgtatttcggcaacggatgaacgtgtgcaggccctttatttggggcgtgggatgcagcaagtgcagagaatgtggcattggctggtccttgtaggagttggccagagtttcgcgcagcttaaatccgcgctggaagacagacagacaaattaacaaggtgaacagcaccgcaagcaggcaattcataccagttgcagctgtgtgtgcacgtgctgaacaatgagatggatggccaccttgttgtcgcctccacgaggaacaatgatatctgcatgggccattgttggagctatgtaattgcaataggagggcttaaccatattaaggtattgcttcagcacgcccttgaggtctcgtccgcgctgagagatgtccctaaaattgaacaattgataacaaaatatgataatcaaggtaggcagagccgagaaccatcacataccttcttaaccgcctggccagacgaatatcgggatctgtgtccacaaatatcttcatgtctagcaatttaagtacttcaggactatgaaaggtaagaataccctcgaagatgatcacattggccccgtacatggttttcgtttggctctcacgaccatgtgtcacaaaattatagacaggaacttccacctttcggccctccttcagcttggtgagcacgtccagcagcagctcgatgtcgaaggcatccgggtgatcgaagttatattcgttgatcagggcctgctcatgctgtttctcattaaggatctacaggattaacataatgaattcagtcaatgtatttcgtcaactaaattataattctccaaccttgtagaaacagtccatggacaacagtgttacccatggaacgtctaggctttcgatgattttctcagccactgtggtcttgccagaggcactaccgccgcagattcctgaaggaaattaagcacattagagagactagaaagatttgttttttgggagtgatgtgtttacctatgacgaagggctccacctgttgcccagcacaattgtaccacggcggtcgtccggccgtgtagatcgtgcggttatttgcgcgtatgatgcattcggacggattcgctgtggtggtctggttgccaatggatgtggttcgctgtctcctaccggaacgtttaagaggcgaatccaacgatgctttagcaggcactgtggtgggcgaggccggacagcagttgagatccccgggcaagccattgcttaggtcggcatacggatccacatagagttgctctgtgacatccgagagtgaacggtcatcgctgcaaatagtacgtatatagattagttggcgattatcaagttctacactcccaccatttaacgatgacgttagccacaagtaaaataattggaattcagtgattagccatgagataacatttttatcacctagcactgattaatttcataataattttaaatattttgatatgtacgaaagagtagattacagaacgtgttagtgaaatttctaccatgccgtaccagctattgcaatgcaagcttaaagctataagttcaaggatgcagtatactcactgacctactctactttaacagcccccatctgcacacgtattgacacccacacaaacgcgagaaaccaggcatatcgtcgacgtaaaattaatctactgctcaatatgttctataaatagacaagttacttgaggccttaattgaatgtgatagaagataacatcgttacgtattatcaggttaattcttatatggctttcaatgagaacagctaatacgttacatttacagctccctttataaatcacgttggtatagcaaaagtattgcaggaatatgcagtaatatgatatgggaatatttgtgatttggcatgaaatacgatatgatcatgatgggttgatatctaatactagtaagtaatatctagaaagaagttggccgttaaaacaataataatagacaataactagggccaagtacatgcaaaaacactcatcatacaattctgggaagatttcaaaaataagaaaacaggggccggcagacaaagcaacgctagacgtatccatttatcgaatgctgcgtaggcgcgttcgttgcactcattctttccgcctttctctgtatcttctgctcttcatttgcgtaccaaaatgaaattcaccacacggaaagaaaaaactgaggatatatttttttagaattctgcagaaggtcaaaaaatgttgtcaaaattttagaacaatatttatcataacataaaaacgataaatattaaaataagtttggggtacttgtgataaaatgtaaatttagaagaatcaaaaatgtttcatttttctctcagtgtggggccaacaatctggtgacgccacagacgagattcctccgcatatttttagtttttgcacaccaacaaaagaagcgagagatgagcgcttgccacgtgtgccgtgctcttcccaaaaaaggaaccaacaggttatggccttccaggcgggtgggacaaggacggcaagcgggagtttcctggcgagggagatgcaggacattgggagccaaagggaggctaagggaactggaaatggcaaacgtggctcatgtgtgttgttgtgatcgctgccatgttgaagaatcgagagagcacttgctgacgctatcatcgtttcaccatttgttgttacttgccgcgcggcagactcaataaacaatgttaaacacagcaagcgttaattaaacactgagaatagaaagagacgtcgcgaaacgggagactggacaaacaagcgcagcaccaaaacaattagaatggcggtaaataacacacacaacagaaacaacaaaaagcactcaaatacaaacacacacacacaaatatgcctctctacaaatgaatgtacaaacatacatatatgaacgtctggtatgtaaaatgggacttcgattggtttttacgttaagaaatggggaaaatgcaatgaattacatgtgaccattggttttggctgctatagccttaacctttgactgctgatgatgctgttgttgttgttgctgctgctgttgatgtggttgctgaagtagctgttgctgctggtggtttgcgatggttagtaaaccggcggatgcggctgcaaatgctgagttcgcttttgccccttttggaacatcgttattgctactattaatgctgttgttgttggtgttgtggcccgacttgctgcacaaaaacgtgatgctgctcatttttagcccgatcccgatctgccagcgattttgaatcactcagtccgtcggcgtgggcgtgagaacttggatgtggaggcagcaagaacacagcaaccggcgatgccaagccaaaatgggtcactcactcacacaacgctcacgcgaatcgccgccggcgtggatcacatgtgatttagagtttttatttcgtacgcagcgattcaccttttgcgttgcggccaatatttattcgataactaatgaaaacaaaaaattaagccaaaggtgtagcgagaagtgcgaggtgagcggcgtttggggattgaatgacaagaaaaagtgttaaggcagctaaggttaaaaagctgcgctgcgctgcggtttcctctgccggcgtcgtctctgcattgttgttgtcgcaagccttcatagaggtgggcatgtggtacatgaggtttggcgtgacacgactcagtcgaagatgtgctctacattttagccaaatttgcataacaaatgtctcttttacttttgttaagtgaaggatatttaatttgttagagaaaaaaatattctaatttttaggcgcataaaatcataaaatatttcacgctacatatacttatacacaagtaattttttatagcattccacggatcgcaccaaagttattttaataatgtttctgtggtatgaatattattttttcaaactgcaacattacaagttactcgctgacgcgcccatccctagcttgtaactgttctcgcagggtgttcgctttgccttctctctcacactctcttccgatccgatgcaaccggcgactatatcgaaattgaatttatcacatgttatgcgtttgcacatgtagtggtgtttgcgaacgcaggccctatgccattttcccagcatttatttatattgcgtgattagaggccccacgacgcacacatgtaagtaggtacgtacgtacatacgatgaatgacttggagcacatgctctttagatatgtttgtgcgcgggtgtgtgtgtgagtgtgtatcacattctaatgacttctgttggattttcacactttacttttggccgtgcgtgaattaatgcggcattaaaaagtcgttcgttacctgtcggagctagcggaactcgatgggttgtagaacttgatttgtttcgtctgggtcacagacatttcgacaagagaatagtgattgcagcagccagttgcagcgattagaaaaaaacacgcggtgatttacttcgtcgtgcctctccctctccgagcaagtgactgattcgtttctgaaggcattgcgttggaaaaacgtgcgccgccttcgtatacatacatatgtatacatctacccgagcttgaatggtcaagtaaagtgctaattgtcagctggggaaaggcactggagcggagggacgctcattgccttgtttatctccatttgatgctgtcattgaggcatttatttatatgttttggggcaattcaattccattcgcaaggcgctcagctgtttgattggggcggcgacagtgttgcgaagcgctgttggctgttgggttgcagtaaattcgaatgtgaatggctaaatccgaagcggggtttttaaatgtttgataattattacttcgagcttgtgtcaatataagtgaatattttacataaaactttgtggtttctaaaagattagcttacaacatgatctttaggtactaacaaataaaaggttgtaaatagcggtagtgctcggaaaatatatcaacatgagacaattaccaattcgattattttttgttggtcctctatcgataactgttactcttactctcttgcactgcaagccaaattcatattaattaagactataaaaataaacacatacagaaacatgtggctgtttcctggctatcttggatggagaaagtagtatgtagtagtatcataatttatagttttctttcctcttgttctgtcccttaaagaaactttgaataaattgcattttgttcagttttaaaatgcattaaataatcgattgccacgctagttcgatagtatttaacgagcaccgagtattgttcgagctctaaaagatggtcactccggaccagagagacgcaacaatatagcaattctgaacttggttcgagtgtttttgcagcacgaattgataatatgccgtaggtgcggcccagcgcggatcatcagcagcagcagcgatggcctacatcaacatcgccgagtggacgcccgac

SEQ ID NO: 9734 - DNA, 3193 bp, DROSOPHILA
cacgacgaagtaaatcaccgcgtgtttttttctaatcgctgcaactggctgctgcaatcactattctcttgtcgaaatgtctgtgacccagacgaaacaaatcaagttctacaacccatcgagttccgctagctccgacaggtaacgaacgactttttaatgccgcattaattcacgcacggccaaaagtaaagtgtgaaaatccaacagaagtcattagaatgtgatacacactcacacacacacccgcgcacaaacatatctaaagagcatgtgctccaagtcattcatcgtatgtacgtacgtacctacttacatgtgtgcgtcgtggggcctctaatcacgcaatataaataaatgctgggaaaatggcatagggcctgcgttcgcaaacaccactacatgtgcaaacgcataacatgtgataaattcaatttcgatatagtcgccggttgcatcggatcggaagagagtgtgagagagaaggcaaagcgaacaccctgcgagaacagttacaagctagggatgggcgcgtcagcgagtaacttgtaatgttgcagtttgaaaaaataatattcataccacagaaacattattaaaataactttggtgcgatccgtggaatgctataaaaaattacttgtgtataagtatatgtagcgtgaaatattttatgattttatgcgcctaaaaattagaatatttttttctctaacaaattaaatatccttcacttaacaaaagtaaaagagacatttgttatgcaaatttggctaaaatgtagagcacatcttcgactgagtcgtgtcacgccaaacctcatgtaccacatgcccacctctatgaaggcttgcgacaacaacaatgcagagacgacgccggcagaggaaaccgcagcgcagcgcagctttttaaccttagctgccttaacactttttcttgtcattcaatccccaaacgccgctcacctcgcacttctcgctacacctttggcttaattttttgttttcattagttatcgaataaatattggccgcaacgcaaaaggtgaatcgctgcgtacgaaataaaaactctaaatcacatgtgatccacgccggcggcgattcgcgtgagcgttgtgtgagtgagtgacccattttggcttggcatcgccggttgctgtgttcttgctgcctccacatccaagttctcacgcccacgccgacggactgagtgattcaaaatcgctggcagatcgggatcgggctaaaaatgagcagcatcacgtttttgtgcagcaagtcgggccacaacaccaacaacaacagcattaatagtagcaataacgatgttccaaaaggggcaaaagcgaactcagcatttgcagccgcatccgccggtttactaaccatcgcaaaccaccagcagcaacagctacttcagcaaccacatcaacagcagcagcaacaacaacaacagcatcatcagcagtcaaaggttaaggctatagcagccaaaaccaatgagcaactctatgtggatccgtatgccgacctaagcaatggcttgcccggggatctcaactgctgtccggcctcgcccaccacagtgcctgctaaagcatcgttggattcgcctcttaaacgttccggtaggagacagcgaaccacatccattggcaaccagaccaccacagcgaatccgtccgaatgcatcatacgcgcaaataaccgcacgatctacacggccggacgaccgccgtggtacaattgtgctgggcaacaggtggagcccttcgtcataggaatctgcggcggtagtgcctctggcaagaccacagtggctgagaaaatcatcgaaagcctagacgttccatgggtaacactgttgtccatggactgtttctacaagatccttaatgagaaacagcatgagcaggccctgatcaacgaatataacttcgatcacccggatgccttcgacatcgagctgctgctggacgtgctcaccaagctgaaggagggccgaaaggtggaagttcctgtctataattttgtgacacatggtcgtgagagccaaacgaaaaccatgtacggggccaatgtgatcatcttcgagggtattcttacctttcatagtcctgaagtacttaaattgctagacatgaagatatttgtggacacagatcccgatattcgtctggccaggcggttaagaagggacatctctcagcgcggacgagacctcaagggcgtgctgaagcaataccttaatatggttaagccctcctattgcaattacatagctccaacaatggcccatgcagatatcattgttcctcgtggaggcgacaacaaggtggccatccatctcattgttcagcacgtgcacacacagctgcaactgcgcggatttaagctgcgcgaaactctggccaactcctacaaggaccagccaatgccacattctctgcacttgctgcatcccacgccccaaataaagggcctgcacacgttcatccgttgccgaaatacgtcccgcgatgagtttattttttactcaaagcgcctgatacggctagtcattgaatatgcgctaagcttatttccctttaagaaaacaacagtggagactccacaaggtgtcctttacgagggcaagcgtatggaatcgcgaaaaatatgcggcgtctcaattctccgagctggtgaaacaatggaacaagccgtttgtgatgtgtgcaaggacattcgcatcggaaagatcctcatccagaccaatcttaagaccggcgagccggagctttactacctgaggctgcctaaagacataaaagactacaaggtgatactaatggatgccaccgtggccacaggagcagcggccatgatggccattcgggtgctgctggatcacgatgtacccgaggacaacattatcttggcctcgcttttgatggctgagatcggtgtgcactccattgcctatgccttcccaaaggtgaaaattgttacttccgctctggatccggagattaatagtaagttttatgttatacccggcattggtaactttggcgatcgctactttggcacggaaccctctgatgagtactaaggagatctgggccaatccatacctatatggaaccatcaagtttctaatgtatcttaggttaagttcaaaacgttacttaaattatgaatttgga

SEQ ID NO: 9735 - protein, 614 aa, DROSOPHILA
MSSITFLCSKSGHNTNNNSINSSNNDVPKGAKANSAFAAASAGLLTIANHQQQQLLQQPHQQQQQQQQQHHQQSKVKAIAAKTNEQLYVDPYADLSNGLPGDLNCCPASPTTVPAKASLDSPLKRSGRRQRTTSIGNQTTTANPSECIIRANNRTIYTAGRPPWYNCAGQQVEPFVIGICGGSASGKTTVAEKIIESLDVPWVTLLSMDCFYKILNEKQHEQALINEYNFDHPDAFDIELLLDVLTKLKEGRKVEVPVYNFVTHGRESQTKTMYGANVIIFEGILTFHSPEVLKLLDMKIFVDTDPDIRLARRLRRDISQRGRDLKGVLKQYLNMVKPSYCNYIAPTMAHADIIVPRGGDNKVAIHLIVQHVHTQLQLRGFKLRETLANSYKDQPMPHSLHLLHPTPQIKGLHTFIRCRNTSRDEFIFYSKRLIRLVIEYALSLFPFKKTTVETPQGVLYEGKRMESRKICGVSILRAGETMEQAVCDVCKDIRIGKILIQTNLKTGEPELYYLRLPKDIKDYKVILMDATVATGAAAMMAIRVLLDHDVPEDNIILASLLMAEIGVHSIAYAFPKVKIVTSALDPEINSKFYVIPGIGNFGDRYFGTEPSDEY

SEQ ID NO: 9736 - DNA, 5144 bp, DROSOPHILA
gtctactaattcaaattaaatgtagtttagttacatttataagctgataattcaaaagcttaaatgcggcgattttaataattaatttaccacattaatttagcggattacttctcaaagaatcgaaaaacaaacaattgaaaaagggactaaatcgattggcagcaatcatctctaaaaaaaattttgtttatttctgacaaccgcatataaacaaaatgaaaagagcattaaccggaaatatctgcgcatttattgcattattactgataatcgagagattaaatggtattagtgcaatgataacatatttgcaagcaaaaaaaaagagacaatcaaattttatatttaaaggtagacagataaaatcagtaccttttattatccaattaaatattgatttaggtggctattttttgtcttattaaatatggatagagctttacattttaacacatattcgttgaataaattaacaacaaagattgaacataaatatttatggaaattgtaattgaagcttttaaacgtatagccttaatattaaacattattaatattatattattttaagatgaaggttttccttacaaaagtaaagacgagaaagtaaaacataaacatttgtcataaacatttaaatgagcccgcgtggtgtgcagattcagccgacttctattcagctgttggctgaatttggcttgcatgcgcacacgttccacgttccacaacaacatattgaaatccaaaagctgcttcaccacttggcaagcgatcgttaacaagttacaccagaaatttatatatactaaaaaaataataagttacttaaaaatttagtaataattatgtggatataaaaaatgtacattatttttctctacgcgccgttgtccgaagttaacagcaagataacatgcgatattaggcacctacgttcacactggcatcaaatttcgataactgacaaagatcgatagccatctgcgtttcgttcgccactaaggcttgcttttcaaatcaaacggtaaattctggcggcgccaagcaggcattgactccaatttcgcatcgattacgagagtactgtctacgtttgtctacagtttcaccgacacattcagcgtgctaacacgctcgacaaattctcgtgctcgcgtttcgttagggaacgataaaaattgtgtaaaaattcagtaaagtgaatttccattcgaaaaagccagcacacgcattcaaaagggcaaaggtacaaaggtaagtgcgtgtgtactcttttcttccttttcgcggtttttcccactgctttttactagcgttcatcaatttgaccgcctcttcgtgatctcctcttctcgttcccctctttccgcgaatcggcaaatggcggctgctgcagctgttgccaaccaaaggcgtagttcttaactcgcgggggcttgagcgattgggtgccccgttaaaaataatcttgtaaattagttggcttatgttggctaacacataggaataacatatcgagttgctggccacaaagaaaaccccttttttgaactcatggttacgcccctgttgcacgccgaaaggaatataaaagacagagataaaaaaaaagaacccaagcagcccttgattctgcttcttcctgacattgactcacattttccttttcagtttcacacatttcatcgcagcagcaaacatctaaacttttaaagaaaaaacacaaaactcaaaaaaaaaaaaaaaatgagtaaggcggattctaactcacgacagggctcctacaaggccaacagcattaacacgcaggtaatgtacacaagatcctccgcagaactgcgttcggaactaacctcactttttgccctaggactcacgcatgcgccgccatgaggtgaccatcgagctgcgcaagtccaaaaaggaggaccagatgttcaagcggcgcaacatcaacgacgaggatctaacgtcgccgctcaaagagctcaatggccagtcgccggtgcagctgtccgtggacgagatagtggcggccatgaacagcgaggatcaggagcgccagtttctgggcatgcagtctgcccgcaagatgctcagtcgggagcgcaatccacccatcgacctgatgatcggccatggtattgtgcccatttgcatacgcttcctgcagaataccaacaagtgagtagtggctttagaatgttgatgagagcattattgaatatcccctgattcgccgctacagctcaatgctgcagttcgaggccgcttgggcgcttaccaacatcgcctctggcacatccgaccaaacgcgctgcgttatcgaacacaatgctgtgccgcatttcgtggctctgctccagtccaagtccatgaacctggccgagcaggcagtctgggctctgggcaacattgccggcgacggagccgccgcccgcgacattgtcatccaccacaacgtaattgacggaatcttgccactgatcaacaatgagacaccgctctcttttctgcgcaacatcgtctggctgatgtccaacctgtgccggaacaagaatccatcgccgccattcgatcaggtgaagcggctgttgcccgtcctgtcgcagcttctgcttagtcaggacatccaagtgctggccgacgcctgctgggctttgtcctacgtcacggacgacgataacaccaagatccaggctgtggtcgactcggacgcagtgccgcgcctggtcaaactgctgcaaatggacgagccgagcattattgtgcccgccctgcgcagcgttggcaacattgtgactggcacagatcaacaggtaggaaaacaaatgattttaatccttattgttataacatgcctgaccgacctgttttttttttttttttttattagactgacgttgtaattgcatctggaggtttaccaaggctgggactccttctacagcacaacaaaagcaacattgtgaaggaggctgcctggacggtcagcaacatcacagcaggtaaccagaagcagatccaggctgtgattcaggccggcatcttccagcagctgcgcaccgtgctggagaagggtgatttcaaggctcaaaaagaggctgcctgggcggtgacaaacaccacgacatctggcactcccgaacagatcgtcgatctaattgagaagtacaaaatattgaagccttttatcgatttgctggacacaaaggatccgcgtaccatcaaggtggtgcagacgggcctatccaatctgtttgccctggcggagaaacttggtggcaccgagaacctatgcttgatggtcgaggagatgggcggtctagacaagctggaaactctgcagcagcacgagaacgaggaggtctacaagaaggcctacgccatcattgacacatacttcagcaacggcgacgacgaggccgagcaagagctcgcacctcaggaggtcaacggagccctcgagttcaatgccacccagcccaaggctcccgaaggtggctacacgttctaatcgcccaccccacacattccaaactccgctcacacgccttacaaacaactacaccttcgaccgcgctcacacactatgccattgtcaaacatacgcatactcatcatcacatcttacaaacattcccaaacactttggaggtatgcatggaaacacaggcgaatgcattagcttaaagtcataattgaatcgggttggcaaaatccactcgcatgaatccccatttaacatacccgtattcctcgcgttagactagacttcacagattgcagcatggatctttctggcagtgttcctcgttcacgatgcaaccgctcgggcagctgcgctggctgggatccgtggatcatagtatttccagaatccgtctgtacagggggcaccttatgtttgcgtgtactaggctttttattggatacgtttcgagctcatttcggatatattttaggctgtttagtatttatttatgtatacaggaaacgcttttaatcctccaccttcgcgcaagcattacaacaacaacaacaacaacaacaactcattcccttcacaccagtgtcctcattcccgaatcgcatgtttatattcaaagttgtcaataaataatgaattgtttgaatgattaattaaatttcatgtgtatttaagctgcatttgagcattgcgaaaattggagcctatttttgggccttggcatttttttttgtatattatttggaatgctattgggatatacaccgatgcaggcaatcgaatttaaaatgttatcccttcgatgcgctggcgccttttgtccgtaaatccgcgataaaaagtcatgcagtcaatacatgtttttttttttgtcttgtacatttaaatcgcatttgggccgtaagcggatagccggaagattaagagctatctaccgcagccacgcccactcgagcagcggtggacagcgaccccaaaaaagttccagattagatataatgattaaacaaccgacgagtgagtagtgagtagtagtctactactggcacagaacgcgcaccacgcacaactcaatcaagatgaatcgcagcgttcgtggttattgcagtgatccagagggtaagcttaatcagtggagcgacgacgtcacatcaacaaccatgtccacgtacgatcttgttcccatcggatgcagtgcgtcgaattcggcgaatcgtgtgtgtgtgtggcaaaacaaattataaaaatagattaaaaattcagcatgggcaaagtagttgccgaaaattcgaactgaattgtggaagcattggccgccatccggagcttttgcctccgcgttgcccaaattgtcgtcaccgatggatcggatctatgtattcaattggttctttctcgagctattttattatttccgagcgcaagcgtttagtcgactttctgccgaagctgcgtgcgggcgtgaatctctaagggcaactaatttatataattgcaaaacgatctgaactgacattacgcatttgaaacttaaaaatttctaacgatttttaaaaaaggtaatagagaatagtgcaagtgatgtgaaaccaatcggtagtttcgtaaattgccttgtgtgtaaatcaattcgcattttcactgaatgtgt

SEQ ID NO: 9737 - DNA, 2525 bp, DROSOPHILA
actaaggcttgcttttcaaatcaaacggtaaattctggcggcgccaagcaggcattgactccaatttcgcatcgattacgagagtactgtctacgtttgtctacagtttcaccgacacattcagcgtgctaacacgctcgacaaattctcgtgctcgcgtttcgttagggaacgataaaaattgtgtaaaaattcagtaaagtgaatttccattcgaaaaagccagcacacgcattcaaaagggcaaaggtacaaagtttcacacatttcatcgcagcagcaaacatctaaacttttaaagaaaaaacacaaaactcaaaaaaaaaaaaaaaatgagtaaggcggattctaactcacgacagggctcctacaaggccaacagcattaacacgcaggactcacgcatgcgccgccatgaggtgaccatcgagctgcgcaagtccaaaaaggaggaccagatgttcaagcggcgcaacatcaacgacgaggatctaacgtcgccgctcaaagagctcaatggccagtcgccggtgcagctgtccgtggacgagatagtggcggccatgaacagcgaggatcaggagcgccagtttctgggcatgcagtctgcccgcaagatgctcagtcgggagcgcaatccacccatcgacctgatgatcggccatggtattgtgcccatttgcatacgcttcctgcagaataccaacaactcaatgctgcagttcgaggccgcttgggcgcttaccaacatcgcctctggcacatccgaccaaacgcgctgcgttatcgaacacaatgctgtgccgcatttcgtggctctgctccagtccaagtccatgaacctggccgagcaggcagtctgggctctgggcaacattgccggcgacggagccgccgcccgcgacattgtcatccaccacaacgtaattgacggaatcttgccactgatcaacaatgagacaccgctctcttttctgcgcaacatcgtctggctgatgtccaacctgtgccggaacaagaatccatcgccgccattcgatcaggtgaagcggctgttgcccgtcctgtcgcagcttctgcttagtcaggacatccaagtgctggccgacgcctgctgggctttgtcctacgtcacggacgacgataacaccaagatccaggctgtggtcgactcggacgcagtgccgcgcctggtcaaactgctgcaaatggacgagccgagcattattgtgcccgccctgcgcagcgttggcaacattgtgactggcacagatcaacagactgacgttgtaattgcatctggaggtttaccaaggctgggactccttctacagcacaacaaaagcaacattgtgaaggaggctgcctggacggtcagcaacatcacagcaggtaaccagaagcagatccaggctgtgattcaggccggcatcttccagcagctgcgcaccgtgctggagaagggtgatttcaaggctcaaaaagaggctgcctgggcggtgacaaacaccacgacatctggcactcccgaacagatcgtcgatctaattgagaagtacaaaatattgaagccttttatcgatttgctggacacaaaggatccgcgtaccatcaaggtggtgcagacgggcctatccaatctgtttgccctggcggagaaacttggtggcaccgagaacctatgcttgatggtcgaggagatgggcggtctagacaagctggaaactctgcagcagcacgagaacgaggaggtctacaagaaggcctacgccatcattgacacatacttcagcaacggcgacgacgaggccgagcaagagctcgcacctcaggaggtcaacggagccctcgagttcaatgccacccagcccaaggctcccgaaggtggctacacgttctaatcgcccaccccacacattccaaactccgctcacacgccttacaaacaactacaccttcgaccgcgctcacacactatgccattgtcaaacatacgcatactcatcatcacatcttacaaacattcccaaacactttggaggtatgcatggaaacacaggcgaatgcattagcttaaagtcataattgaatcgggttggcaaaatccactcgcatgaatccccatttaacatacccgtattcctcgcgttagactagacttcacagattgcagcatggatctttctggcagtgttcctcgttcacgatgcaaccgctcgggcagctgcgctggctgggatccgtggatcatagtatttccagaatccgtctgtacagggggcaccttatgtttgcgtgtactaggctttttattggatacgtttcgagctcatttcggatatattttaggctgtttagtatttatttatgtatacaggaaacgcttttaatcctccaccttcgcgcaagcattacaacaacaacaacaacaacaacaactcattcccttcacaccagtgtcctcattcccgaatcgcatgtttatattcaaagttgtcaataaataatgaattgtttgaatgatt

SEQ ID NO: 9738 - protein, 522 aa, DROSOPHILA
MSKADSNSRQGSYKANSINTQDSRMRRHEVTIELRKSKKEDQMFKRRNINDEDLTSPLKELNGQSPVQLSVDEIVAAMNSEDQERQFLGMQSARKMLSRERNPPIDLMIGHGIVPICIRFLQNTNNSMLQFEAAWALTNIASGTSDQTRCVIEHNAVPHFVALLQSKSMNLAEQAVWALGNIAGDGAAARDIVIHHNVIDGILPLINNETPLSFLRNIVWLMSNLCRNKNPSPPFDQVKRLLPVLSQLLLSQDIQVLADACWALSYVTDDDNTKIQAVVDSDAVPRLVKLLQMDEPSIIVPALRSVGNIVTGTDQQTDVVIASGGLPRLGLLLQHNKSNIVKEAAWTVSNITAGNQKQIQAVIQAGIFQQLRTVLEKGDFKAQKEAAWAVTNTTTSGTPEQIVDLIEKYKILKPFIDLLDTKDPRTIKVVQTGLSNLFALAEKLGGTENLCLMVEEMGGLDKLETLQQHENEEVYKKAYAIIDTYFSNGDDEAEQELAPQEVNGALEFNATQPKAPEGGYTF

SEQ ID NO: 9739 - DNA, 27666 bp, DROSOPHILA
caactgcaggcgccaattgcaaagaaagtaagatggaaggtaatggaattcggggggatacggagttccgcctctcgaattattcgaacgccaagatgtaatccgaatcttccatgccgatcgtaatccaagaccagcgacaagcaaaaccccaaaaaacaagagatgaatgcgtttataaatattttgatggcggtacatcgatcaggttggtccgccttatagcgaggggatatcggtgaacggcagcacactgaagatggatggattgttggtggttgggttacctaatgatctaatgatcttgtacaattatttgccgggtgcacttagaaaatgactatgcgacttttggaattttgaaaaatatagatggcgttaaataatatttgacatttgtatggaaacttcaaagttattctcccaattaatgataaatattttataaggtgcggaaataaagtgaggaatatcttttaaattcaagttcaattctgaaagcacttaataccggtttttccaagtgtaagtcaaagatcttgcgagtggcgggcaacgttagctccattgttttgtggcttgtaaacggttaaattaaattgatttgcgtctaatgcccccgacaattggcccgttctcggtggttcagtggttcgatggttggaaggggtatgctcgtgtaattaatggtttcattagaccaaccgcggatccagcggcactacggcattcccggtcccgctgcttatgtatgaataattgttaataatatttaatgattggcccacctgcccgagcaattgtatttggatttgagccattggaagactaatcttaattttggtttcttctctcgccctccagcatttagctccgtccatgggcgccgcggcaaacagagtccggtgaaaatggacaaaggccgcgcgaggctgccgccgaattagcagagaagccggaaaatccgcacatacggacgggcagtgcaaatatttgccaggcccccaaaaaaaaagaaagaaatattaaaaaaaaaagaagaacacacacatataacaaaggcgctcagaaggggaagcatttgtgcgacaatagccaaggaattagccacaaaagaaggagcaaccgggtccattaagacagtcaaaccatccgatcccatcccggctagacgaggtccacttaaatgaccgaatccacacagctgcagacggcggagaacaacaacgcgggcgtggtcaaaatggagcccccgccgccggcgacctcctccgtttccgtatccgccgccgcagccgcccacgccctctcctccctctcttcgcttacaatggccgccaccggatccgccctctcgccggccacgcccccgccctccctgaacctctcacatcagcagcagcagcaccagcagcactacgccctcaagtggaatgacttccagagctcgatcctcagctccttccgtcacctgcgggacgaggaggatttcgtcgacgtgacgctggcctgcgacgagcgttccttcaccgcccacaaggtcgtcctgagcgcctgcagcccctacttccgccggctgctcaaggccaatccctgcgagcacccgatagtcatcctgcgcgacgtgcgctgcgatgatgtcgagaatctgctgaggtgaggttatggcataatagaagattaattcgatttaaatcttcaataaattaaatatagtcaatttttaagacatatattgtgtgattgtaagcacgaaatggtattttacatatttcatttacaattttttgtagctttatgtacaatggtgaggtgaatgtgagccacgaacagttgcccgactttctgaagacagctcacctgctgcagattcgcggtctggcggatgtgaatggtggctatccctattccaaggccttgtccgccgccttgagtcacaacagcagcaataacaacaacaacaacagtagcagcaacaacagcctgagcaacaacaataacaataacaacaataatgccgagagcagtaatcataacaagataagcagctatttatcgcccaatcaaacgagcgccgcgtgcaacaacagcagcaacagcaatagcaacaaccacagcagcagccacaacaacagcagcagcaacaacataagcggatccctgaacagcagcctgaactcaccgtttagtgcgccacagataccgccaccagtgaccgcatcgagtgcagcggcagcagcagcagcggccgcatccctgaccgccgcagtagccgcagcagcggcagcaacagcagccagtgccggcagcagcagcagcgccgccagcggacagacgagcggtacgcccgccatccaggagctgaaggcatcgtcggcagcgtcgcccgtaagaaacccgaaccccaatcccagcaaagtaaagtgtgcagttccacgaaatgctagcactcgacttggttgatccctaccagactttcactaactttgggcattcctactctaccatattacttgcaggccagcagcagcaaccactgggacatgggcgagatggagggcagccggaagagccatctgacgccgccgccacagaaacgcatcaagagcgccgacttgttccgtgcccagcatggcatcagtcccgagcgattgctgttggatcgggagttccccgtcgccggacagcatccactcacaaggaacagaagcggtcgggacacatccaaggatcgggagcgcaacttggagttgagggaatcgctactgggacaggctttggagaacagcaacggccagcaggccaatccggtgggttactttggataacactcatactcatatagcatagttttttgtttgaaggaatatatttttcccccacacattttttttcagtgtattaattattatattattaattataatatatataatcttttgtagaaacacgaactgggacagagcgcgggtgaagattcgaacagcagtgataccgagccctcggatcgcggcgatggtcagcacgatggaaccctcgacgggattgacaaccagcgctcgcactcgttccccaatgcattcctcggcctccagggcattccaggacttctgccaggaccctctggcatcaacagcgatttcggtaagtcgagtttttcatttcaatatgctccattataccgaaactatatacgattacgagcttgtcattcgtttacactttattgtacggaaccaaaattgaatatttgcctcttgtatatgatttacaaatcgattggaaagagagagtgttttgaaacaaaacattacacatatgatttgcattttgccttgtaactaacggtcgatctatcgataaacaaatgggaagtatatataactaaagcagttactaattggcaaaaaaaagtgatatatttaagataaaagataaaataatggattataaattagtaatacaaatttgaagaagcgttatcgatttatcgaatatttgcctgttctgtattatttataaagaaaaaagaaaacggatattttgtatatgatttgcatcattttagaaatttgttatgatgtaactaactatcaaataattataagccgataatgagcatccgaagtatacggaaataattggaataaaaaaaaatggaaaattgttttcgaaaacttatcggtttgttgcacacctactgcatttaatattcatgtgtaaaactattattaatattattttaagacgtagtattagcttagcatttaggcagtgaaactcacaaatgaaccatttcccaaagtcaaataaccccattgttcgattcgagtaacgcgttgaccaacccaaatgggcggcaatcattaggcccataaccaactgtcgctggtatccagaaccagaacctcaaccagatcccatgcccaatcccgtccagagtgccaagaaatatgcgcggagcacgtgtcgcattaggccaaggatatgtaactgttggccaggacattcggcgtgtgattataaacacattcgctttcggtttcggggtgcgtaatgtccgtttggccattcacgtatgtgcaaatgttctacataacggacgacaaaaaatgattattgccattaccaaacactattgctatcgacataactacggctattgctattacgattattgtgattatgattaccattcgattgtgaaacggaaggatgccgagacaggctgcactgacagaaaaatatgtcttcagagatattacaggcccatataggtatagttgaagaaagtgcatatcatatatagaatatatacaaagtaatttgtctcctatccattcaccttttgaaatggaaatatatgtatatacgcaaccgctttttgcaccttactctcagtgtaggaaaaaaagcgctacaaatatgatttgaccagatccttatttctgcctcctttcgggttgtttgtgttcctaagcacatgacacgcactttgtcccatgtcgcaaatgtcgcatttaacgcgcattaaaatgataatggttccggcttcagaagcagaccgagttccatccttcgaccgaatccaggacactcaaagtcctgtttcgatgtcgtttaatattcagggcacatagatcattgcaacaaatgttggccagcacttggtcagtttagttggagttgactggaggcgaagatgccggtgtggcgaagagaaatcaaatttaataaagcataaacattcaataagcttcgcaacgagccaaagtcatttgaaattccgaacagtaacggtaaaggggcggtcctgcgacttttggccatttcgaaatccgaatcgaaaatattaacggcccgagcaaaaaggataaacttttgcgcaatgataaaaatgataagtttttctcctttatttttgcctgccttctgtttttcctgccatgtccgcctacatttaccccgctgcccccctttcaccaacccttaaaaaaaagggcgacactcgagaccatacatatttagattttatttcgttttattgcttttttgtgcattcgatttattcgctgggcattggcaatggccgaaaacggacttggaaattgcgcacatgtgtgcgcaaggacttggaagctaagtcctgccccctgcccacgattctgccctcggtaatatgagttgggtttgcattttaatatatttacttggaccccaccactccgcccacacaaatgtcacacactcgcaatcagatgcgggcttccaaaaactacaaaagacgaacgagaaaagaggaaaaagtttactttgcaaaaatccattgcagaaacatttataaagtggcccggcctggccaaaaacctagcacgaaattgtcttcgaggagcaggagcacaaaaaggactagaataacatgggagaacgtacactgtggaaaataaattatgtttttctcacgagcactaaaagaaaatattgcatcttatgtagtacctagcaatttcttcgatagacttataaatatattgtgtaagctccagtgtgagcaagaatatatttgatatattcgaaagagttcctagaatcatttgatcaaaaaaatgaaagactctaaccggtttctttctctgtaatagacaccgtagaaaagaaggctggcccaagaaaagctggactctggctaggaggcgtcttcgctgtcgttgccggggacattttaaaatgaaaatgatatcggggagacaaaaaagaaagcggacagccaggccggcggctgaggcctcgtcaggtgggtgggtggtggttcggtgggcggctggtggaccaaacattgacagcaaataaatggcagccaaaataataacagcaaaggggagtgtgtgtgtgtgtgtgtgtgtgtgtgtgtgtgtgacaggacgataaggaggagggcttacttcaaatcagctaaatcggagaaaaaaagagttgagcagccaaggaaaaaaggattcctggcatcgaggagcgtaggtgcgaatactgcatttggcgccgatggcgtgggcaaagaaatgcaaacaaacaatgcgaaatggaaagaaatcattgacatatgaggccagtggctcatttcttggccagaccgaaatgcaaaagtttccggaagtcgtggggcgggcagggggcgtggctggggcggatacaaacttggccggaccaactggcgctgtctgtctgctggccatttggcgtttggcattcgaaagctaatgcgcaaagtttctttcgatttggttcggttgggttctatttgccagctgctcacaaatgcacttcttttctttctatcgttcatcttctgacatttccttcgactgcaacgccaaagcggcaaaagaaaaaaagtcaaagtatggccgggaatgcattttccgtggtctaaatgattaaatgatgttgtttaatgggatctcataaataactatatatctgaagttaaattaaagcaataaatacagcattctcaaataccaacaattttcaatcgagagctgaaaactaaagcctttaatcagatcgatgtgattagtgctgtcagctgcatcgcttgcctaattatatttttgtggtaaatctgctgactgctatgccacgtaaaggattacaatctgcgcgccagataatttgctcaggtgtgtggattttggccgtaagtcgcagcgatagagacatttaatgacgtacgctcccaatatcccgaccattaccccactcgttccatttcttgggtcctgaaactgcgtgaaatgcgtaaaattagcagccggcagcaaaaggaaataagcatgcgagaaacattatttctcaggtcaaacaaaacgcacccatgtggctccgaaatggggtggtgtttagttcgaaaggtgcgtgctggcttccccacccaactgccttatgtatgtatgttctggccggcatttgttggcgtgtttgcatttaataaattcgattaacaacggaataaatacgcttaaatgcggaaaataatgaaaactaacgaaaagcgttttgttagcagttgccctttgtcggcgtcgcctgggcgccgctttcattccatccggcattcaatcattccattcagttattcattttacgagctgtgttattattgtaaatatgtgtgttgctgttgctgtaacaaatacaaatacattacgtgaataaacgcacccattatttcatttcatcaagaaccattaacgccaacacgccgcacactttcctacatacatacatacatacttagttgtagttgtatctgcggggtcctgttcggtcccgttaacttatcgcgcctagtgtggccagctttgcttacgaggcacccgtcgcccactttttccatccactccgccacccactgccactgccaccaatcaagctgctgcaaatgagcgaaggacatgaaaatgttcaagtagatccacacacttgcacacttacacatacgtacatacacttcacatatgggggcccgcaaaacttttgcccggataatgagtaaaatgattggaaatacatttgcagtgcgtgcggctgtcgcatgtatccgtatctttgtatcttggccagcttcaatcgttcaatgtatccttgtccaagacattgttatgtcatctcaaagttggtggcagtggggatgtggggcagaaggttgatgattcccgctcatgaagcggtacttaagcgaaggaaatccatttccttaagttttgtggtggaggaaaattgataaggggaatttacagcaacgcactatgtttagctaataaatatttaatttaatagacagtggttttggttcaaaaaggatttaaaaaatttcgtaaagttgtcagctcaattttaaatatttgtgaaatccccaaaggtttcctcactttcaactgaataaaaattcaattaattgatggagcgaagctcttcaaattctcagcgcaaaagaattcaatttttggcaactttactctttaaaagtggttggagataattttcaaatatatatgcactagatgggtgtatatagtttgcaccaatgccacgccccgcttgcgaaactgaacaaaacaaaaatgttatcaaattaatttcaaaaactccatctgctgcacgtcacactcaagtgagtgttggtgaatggatgagtgtgtgcgtcggtgagcatatatgcgcgtatgtgtatgttagctggatagaccaccctggcctatacgagctgatatatggactcgtatgcatgaaggctgctgggcaacaaagtggcaaaagtgctagagacggagacactttcggtccgacgggcaggaattggaattgggggatggaccgaaaacgaaaccgaaactaaaaacttttgagttaaattcccgctctaatgtttatgtagatgagggattatgtcattgtgcgccccacacatacgcaccaacacacacacacacacacacacgctctccttctcttgaaggaaaaccaaaaccagaaacccagcaacggacagcatgggacaggtttccacacatacattctatatgaggggtggagatggcttttcctttttctacagcaaaacccattgcaacacttgaaaattctaattttctgcttaaacttcaaatgaaattgttttgcacgcacacacacacaaactgtttggaaatagatgcgaaaaatggaaatgaaaaaccattattattatgtatgtagaaatagctctacagttctatccatctcgttcttgggcacaacagtgggtgggcggcggttgttgttgaatgggtgggtggtacaagtggacaagtgtttgccataggaaatacattaaatttaaacaaaattccctctgctactgctgctgcttcttcttggcgctcagcgttctacttgagcttaacgcacacagacacacaagtaccggggcccaaatgcaaaagttttgctcaaaactatttcgtttttgggtagggttgaattttgggttaccaatccaagaatccaaagggttgagtgcggccctttttgccacgttgtattttaaattcaagtggtccgtatgtagcaacaaagcatccgtctgcccacacacaaccaaagccgagcaaatccatatccacattcaccatcagcttccacctcctcaattgtatgcttaaggatttcgtttactgaatccgaatccgaatccgaatccgagtccgtttcaaatgcgaatttatttccaacgaaaatattactaaagtcaaagacagagctcttttgccccgcaccgcagtgctaccttggcaaaaaggtcatttttgggcatagaatttacataaatccatatggatgccgtccatgtgtgtgtgtgtgtgtgtgtgtgtgagcgagtctcgagttcagttccgcagccgagtccatttgaagtccttttggccttcttcggtccttcggctactcttcgtgcggcgcctgcaatctgtcggcatttttcgcttatcactcggatttcgtttacagcttctattgatagctacactattaaaaactaattgtcaatttgaagggaacaatagaaatcaatgtggcattatcaattaaacagacaaaaaagctgaattgagtttattatactttattttaattatcgtacaaattttccactacttactatgaatgaaatgaattttatttgtatccataaatcaccttatattgcattccctgttttatattcaagtgttgtaagtgattatgtatattgtgttttcctcaagtgtattaggaaaggttcagaagaagaaaatatgtgcgtgcggttttcaaacggaaggcgaagacttgcctcgactcgtcctttttccatgtgaccccgatgccagccaggatctgctccttcgcttccgccttgcgtcttgcctattttgtgccactcacgaaaactccctgccatccaccgtctctgacgcattgatatcccttttaatggatgaattattgccgcacatgcgaaagtagttgctgcccaggacttcaccccctcgagaagagcagggtttccactcagcgtcctgcgctcacatatccttttcacacagacacaaacacaagacggagcatttgtttgcatttcatttccttcagatccatctctgtgtgtctttcgcatcccaatgactgggatttggttgtttgtggggtttcagactcgtagcccagggtgggggttagttgacaggccatgctggcgggtcagttaattaagggcggacgttgagcagaaataactcttttgcggctacccaaacccgtttttgatacacaagaatttagctgcgcgggaatgcgccaaatatccataataattgaaggatattacatcaataaaccaccacgtacacactcgcatatcgctgggtgagtcctgcattttaatatttccaaatatcgcactcgcacaccaacacgcatcctggcatataatttaggctttgacaggcggccaccacctacaacgaggttaaatgtgcgtgtgtgtttgtgtgtgggcacaaaggggggcagggacaaaggggcgcaaaggggcaaatggggcgtaggcgaaagggggtcgtaggggtgtcagtcaggcgggcattcgagcgccaacagccgacgccataaactaaatttattgcaaatatttcctcagcaatgagcaatttgtgcgatcgaatcctgcgcctaagtgggcgcgcgggtggggttttggggctcgctcatgggtcaagggagggactttctggggggtggtggttcgttatgccacccggcgaacgtgtcgatgatgtatttcccctgtccagcatttgacccaagccggaagaaagaaaaaaaaaaaaagaaacacggtgtgagagtaccggctttaccaaataaacgagaagaaatcccaggctaactcggcatgaaacgaaattaaattcctctttcgtgcagtgtttttattgatttagctggcccagcttcatacctaaatagtctatattattttgcactatttatattgccaactaagctctaacacaaaaagagttccccgctttttgtcagagaattacacgcaaaaaccgaaaagccgggagaagtagtcaaatgaaattactcatacgcccagtgtgccgcaatcaagcccactcgcacacacagatagcgagagaaagagagcgctagacaggccgacaaaatggttggccaacgacaaccaaacaacaactaaaacagcaataacaaacatgaattttaacagaatacaatttcaatacaattcaaactttctaacacacacacacacacacacgcaaacatgcacgtagctaggaaaatacatatacacatacagacgcagccacgcatagaaaagcgagtgaaagggatagagatggcgctacagcatgccatcgcccgcttttcaagggggatcctatttaacccctccccgtcccacccaacaaaccgcagtgccaacatcgccagtgcccaagccactgccaatccaaaaaccccttttcggccacccattcactacgccactggaacccatagccgtgcgaatatgaaactaaaacttcctctactcatttcctgtcctgctcccaaccgcatcgcctgctgatgatgaatagaatgcggggggatgggcgaaatgggggtggtgcgggaatttagctgggtgcaaaaactatctcgaccgactgtctcgccagttttcagttgcgttctaaattcatacattcattaccatcgcaaaaccacccacatgccccacaaataccccactctcccctcttcattcccaatgaagttaaatacaatcgttggtccgtgtccaaggggtggggggagggggttattggcgggggatagggtctgcactgggcggtgggcgagtagttcgctgctcataaagtaataaattgtaccgtaaatagtgcggcgcaagtgttcgatggaaggacggatggctagatggttagatggataggcgaaggttctatagttggatagatggatgtgtagtgggcgggaaggacggcgatgaatcgggttgaaaagccggaaactcaagctgcttttggggccatggagaacggttcgaccactgactgaagcaattcatctttgactcggctctactttcaggcgaagaggtcctttcaacagctgctcgcaaccgcaaaagatccagcaggcagctgtaaaaggattagcattctgccctttaaatataagtgtccgttagggtatgattttaagtccccttcaattgggtagcccaattatgcttgttattacattttaagcttaactaaaccaaaagtaatcttaaccgatttctgtcccgaatttttttgtaagtgcccaagtcctattaaattaatgctgattaatcaggtaacattaaattcacattttatatgcaaagtattttaaaatacccccctgcactgaatgaaaactaatcatgaaagtttagatcggtgagttaccgaaacttcttgagctatttatgctattcattgagtttggcatcatccgaatcgccacccatgagcagtagtaaatccccgacagccacaccatctcatccgccctctcagaaatccaaagagtaacccacaccccggatcgcctaatccccggcaacgttaaccacatacgaccgcatcgttcatcatttggccgtgcgtgctgacgcctttttggggtggggttgggtggtccagtgggtgttccagtgggtggtgcgagtgatagggtggctgggcatcaggctgcagcctgtactaatgaattacgcaatctaaaactatgtacatttaattcaaattcacaaaactgtacgccaaactaaccgagacgaactcccccaccactcctgcacacacacgcacactctcacacgtacatgcagacgtccatgtggattttcacacacacacacacactgacacagtgagacaaactttgggcaaacttttttgctgcctcggctggcgtcgctgcctcggcggctgtatattttggaataattcaaagcgaatacatttcggaccctcgcccatccgaacatccatcttcgctccaaccccatcagcagctggccgaagtcgggctgctcccccctccctttcaaaaaaaccgaaacccctgaaagcgacgcccctgaacggcctaagcattttcgcccattgcccattgccattccattaccgacaccattggcgtcaacgtcagcatccatcgcacatgtccttgcaattgttccgagtcctcccaggaccacccactgaaccccaccccacccaccacactaacacagccgcactcacacagaaagaaggaaaacacgagagcgaaagcgtgcgcaaaaagcaacaacaagttagattcccatataatattcgtacacactttgcaaacatgtttgtcgatgatgtattatacaaaatgcccataaaaaggcccgcatgagagagacagagtgccacttggaaaaagggatagagctatgggtgtactctatgctagagtgagagcgtgcgatggcgtaatcgtcgtttgtctctctaccaaacatgcaagtgtgtgtgtgtgccactaaatcgaaatgccaaaatgcccatttctattccattccatggctctagaaccccgcataagcgatacagacatttcgttttttggggtaatacatcaaactagccgcatcaatagcacactcacacagacaacccttatatcgcagtatgcgtgtgtgttgtccgtgtgtgtttagttgcatgaggcaacaaggacagcgaaaaacaatgggccaagttaatacgagcgtgtgtgctagtgtgagatggagagtgtatggaaaaagagtgaaatacttcatgcagaaccgagccaaaaaaccgaatcgaatagaacagacaatgaagaagaggaagacgaagtagtaaggatatggacatggggacgtggggaggtgggaaggtggggctcgggcaaaaagttcttgccaccaaaagtaaaggagataatcttggccaaagacgaagtgaggagcgaattgcttgccaagaacgaacatcgctcaccacccctttcgtacccgattccaacaattccagcactcaccgcccttacccagccccctcggacccaacaccgcccctcgcccctcaccttgtgaactccgttctaatgaccgccaagatagaatgacatttggggctgtcggctttcattgttgggtccgttcttgtgttgttcctgtgtgccgcctgcatgtgtatgtgtagtttagttgtacggctaagtgagtgtgcggctgtcgagaagaaaactttaagtacacaggacccaaggagtcgggttcggttttaaaccagccagaagaacagtggaactacgttggcatacttgtattatatagagataaagggtcattagtctaattttttggatgtctgcttatatagcgctgttatagacttgcattaattctatgaacgtgattgttaagagaaaattttaaaatcttctttaaactaatcgaaaatatccttttaattttattgaatatgaatatatgtagaacaaaacaaatggatattgtaacgaatctaaatgtgttctttaaaaattcgttatgattctatacagttgagttacaatataacttttcccacaacttcatgataaactttcacgtttcaatacggtatattctgattttgttttagtttttagttttctatttttcccatttgtgatcttccagtaatcaatctcatttctcaccactgtgcttgagtctctggcccacaagaaagatggcaaagggcaacattttggcaataggacgccttcttcggtccaggcgcacaacgccacacaatcgcaatctccgaacccaagcactgaatgggggcggggggcgtggccgtggcggatgtggggaaggggcagctgcggtccaagtacgtgaaaattgatagatgagttatgggaccgaagagtgaggccgaagggttcgcatgcatatgtccttacacgcacacccacagcgaaagaagaggaagaaggagaagaaagggaaagggaacgagagagcaagataaaggtctgtcccccctcaagacctatccgcccctccctgtcgcgcacgcctcaccaacccccttcaactgctcgtgtagttgattctgtctgtctgcttgtgtccgtctgtatgtgtagttgggctttgcaagtggcaatgagtccgaagacgttcatgtccgtcccagctgtcccttggctgtctgtgtgtgtgtgtgtctctgtgtgagtgtgtgtggcatgcacgtgtctgtgtgtgaaggcaaagcatttttcaacgtttgcctcggcagccgggggcattaaaagttttcgtatttattttgtagtcggttaacaatattcctttgctgtcttacccgaaccgtacccccccccccccaccatctcctcaccaacccaccccacccatctaagctcgaccgttcgacccactcacacacacttgcacactggcataagggacacacgtacgtgtaacagttttgtaattgtatgcgtgcgttttgtttgcggacgtggtctcgtggatgtcttggacttcttacacagacacacacacacaaacgcgttgcaaagtggggacatgtgggggcatagataatatatagtacatggatgcttgagtgtctcaatgtatgtacgtctgtgtgtctgtgtgtgtgtgcgggtcgagctgaaaacttttatgtgtaatacatcaattgcaaaaagatagccaaatgctgttaactttatatacaactcatacacgactgctgtgctgtcttgcacatgtatatgtgtgtgtgagtggggtaagtgggtggctgggcggctgggcaatggtgtttctttggtggttcacggggagttacttacgctcctcatgcggcgcaagtaaaagatacatttattatgtgcgaagagcgatgaacacaagcgatttatcctttttaacttgcctgttcgctttatctccgtgtgtgggattgtgtgtgtgtatgtttgtattgggagagggtaatacttgagtgaatgagtgtgtgtgtcccaactggaccacccacatctggaccgagtgactaatttatgggcaccaccagcttggctccgccgcttaagcccggctaatttcgattcttgcccgcctaagtaggcaacactttctgcacggcatttttcttagctgtttggtaagcgcaagttacacacactcgccgcaatcatattaaaaacacgttggcccactgaaacttttctcatttcaaaagttaaaaaaaagagggcagacaaacaaacggtattatcggccgggtcccatcaacattcgtcacaggccaaggagcagctgtccctggaatccttgagtcctgtatccccagcaaaaacttctcgacttgatcttggcatgtgtccgccttgaatatgcattcgaggcgtcacttacaatttgttgtttttttttttctatcccgaaaactgcgttgtcgatggcgaatgtcaatgctgatgtcggtgtttgggaaattcaggaaaaattggaggcagattgcctgtgggagtgtgggtaggtggccatcctgccagttcatatatcacttgatgttgcctgccccccatcttgccggaactcctccactgtcgtcacacatgctcaacggcaatttcgctttcaatttcaaatgctatctatgagggaatgcgaaacgaagtccccggccacacttacagtcatacgtatatgtgcagggacaacaaagataaaaaaaggtaacgaaagggtaccgaatacactaaataccctatcaaccaagggttactctgcctactgtaagatgggatagtttaaagtaggattcttattttttttatccatgaagtagcttagaaagaagcaataaccaaaaatagattttaagctttctataatttagtaaaaatttgtattcatttttaagaaccccttcattttggactgcaaactgattctcggaacaaaaacactcttagaaagtgtatcttgaaagaaaagtggaagaaagcaaagcgaacaagcaaacttgtttgcaaagtttaaacaacatttcgtttggcttttggctggccgtacgtgccaatgccccgcccacttttcccgcccccctcagcggacaaaactttgccatttttttcagctttttttcccttgtttttcttttgtggctgcgttttatttataagataaacaaatgcagagatggattgtcccggcatgtgtcgtctgacatctgggcagcgttggcaatctaaagtcggttttcccgatacatatcctgaccagttcgcagtgttcctcatccctggtaaagtagatagacctgaaagctaattaactgcggacagaacgggagtgcgtatctaatgaattcggtcagcgattttacgacacttggtcgcatatgaaattgccggccgagtaatccactttatccataattcaatcacaactatttttggggtcggagatcgtaaaactgcaggacgtcgccaatttgtatccatcagatacttgagacgcatatactcacccgttttatggcaaaaattcgccaaataaaacggaccataaaaattaataaaaacgcgcaaggtccgacccgcaattttatagttttattatcgggcaagatttcggattaagaccaattctggttactttcaaaaattcaaaagcaatggaaatattgctgagcgtgcggtcgtaaaaatctgaatgggtgggtcagactgaccagcccgaaaaccatttaccatcgcccttaccgaccaaaaaaaacttattaagtaataaattccaataagaacaaaaggccgaaccaaattacaagaggctttgggagcgaaatatgcataacagcaataacaataataataataagcgaggtgataacgatcgcaagacatcgagaaatgaccgttaaacacacctacgacgcacccttggcaacccttttaaccaccgacccctgatccctaacccctcctggacagagacaaagcgccgctcggaaatgtttacacattggctataatggtatcaatgggcctggcccattgacgcgagtgatttatatagaaaaattcattatttgccggcacctccttctgcagtccattctcgaaatgcaaaacgagtcctgaaacacggggcaaagggaataactactatgtggagcggcgggggtgacttcgttataatggccccttggcgcgaaaggaaatgttacccgagtcgcgtcgccgctttatctttaataaagctaatttctattgccgctaacaggaccgcgacatgcgagtccgtctcctcgcacggggatcggaatctcaggaagtaacgtagtccggactgcgattgaatgctccgctagtaattgatgtgggtgcggaggttccatcgaccatcgaccatcgtccggtggtccgatgtcttgcataacccgatgggtttccttaacgcgaattggcacagaaaacgcgctcgcatgcggccataattgatggccaggtggcagttgctcaccaagcccttgatttggaataggtgcacacgccctggaatatctttaatcgccgaggtttctttgtgaacggaaattaacaattactaacctcgaatgtatcattctaatactgcagaaatgaaacgcaggcattagttagatggtaggcattggattttcttatatagccaactcaagtgtgacagttcaaactaataatttagaatattatgtcgccgatttcagtatatagacccatccacaaaagttcaggtccttacagtctttggagtcttcaaaaatagacatttatgatgcataattattaggaaaaattaggttttgcattttatatttcattaattatgcacagccaccgaggtggccaaaaataagacgggcaggaatagcccaggccaacgcacacggctccaaaggcttcaccctgggagttcattcctcactctcacctgtgtccgtgtcgtccaaacgcatcttttacaaaaagtgcacttgccgagggaaaaaagggcgggaggaaatcttacgcctgatttgatccgggccacacaatgtcctctttcaggacttgttcttgtggctgtcacttgcaggcaggagcagaatgcctcacacacgttggctggctggctgggtgacatcctttcggttttctcaaatgtgacaaattcgaaatgtgcttggctggtcaaaggcgatcggctggatggcccatccagtcctgcccggccatgtcgggatgggatggtttgggtttgggttgtcctgactgcacttgagcgccggccaatcgacgaggagctcgggatgttctgttcgccgaagaaaactgtgatgcggccatgcatgtttcatgtgcatctaagcatatgccagctcattcgagagacagggccagctatatagatatgcaagcggattggggggattgtgggtatggggatccttgcatattgcattttccattttattcaattggattttattgtatttttcacttgatatatttatgcagccgaattgtttgccttctcccttgagttgtcacgcacaaaggcagagctaaattgtttaatttgatttcaggcttttttttttgtttttgtggcgttgggaggggtggtaggagtcgccgccttgcgtcatgacctgcacgcccacttctgcaaagcctctggccatcccaaaaatgactcaatatttcgattcgatggcccttctggcatgggccttggcaattttgtagacattaaattgcgttttatttttcaatatttattattatcgaatattgaaacgaaaccgaactgaaccgaactgaaagtggaggtggaaatggaaatggcgctgcaaatgggagcgggcggaatgcaaaaggatatatctgaatcagggacggggccaggtgtgttccagcacgccacttggatatggtctacatacgtacgtatgtatatgcacaatcgcagttcgcatatagagttgtacgaccgtctaatccggcaatggttccatggcacgcgatacgcttctccaacccccaaaccccatgatccaccccttttccccagggctatgcccactcgattctgtgcgttttgcagtcttagaacggaaaccaccgaacacatcatttaaattgcaatcaaatatgttttgattaaaaagaaaaagtcataaagttagcacccaataggcgagggtataataaacctcagcgcatttatgagtttcactgtagccatagaactattgtgtaaataatatatatcaatttttagttgtttagtttgtttgcactttttttgtaaaataatttaaatactcattgcctgcctgcctgcaaaaaaaaaaaacaaaaattaatgtataattatataaacacttaaaaaccttatattacacgatatatttgaactgatggaattggctaaacaaagaaattgtcttccaaaatattggcttaaaccgtgtgtgtgtgtgtgtgtacttccgattcaggcggtagttgaagcaatattccaaactctagaactgaatctgttccccaaaaaaaaataaaaataacaaaatcgtccagaaattggctttaattggttaacccgaaagtgattataaatttcgaaacagagcaagccagtcgcggttaattcagttctgctgttgttgttgttgctgctgcttatgatggaactcaaaattgaccccaaaaaacccacacacacgttccacaattgaaaatccaaattgaagctggctaatgaaatcaatagcacacctttatgtagcctctgattttcgatctctcattgacttcctaactctccccacaattggatcgcaggcacattcctgaatgccaagagcggcatcaaacaggaggtgttggagccggaaacggaagaggatgcagtgcagcaacagcgaccgcacgaggcccatgccgccgaccgtcgtcctgcggcctgtaagctggccaagctgatgcagcagcaggagcagcagcagcgtcaactgtttgaccagcggcgcagccaccaccagcctcaccatcaccaccagccgcatcatcatcgccaccaccatcatcaccagcaacgcatcaacaacaataacaataatacgaaaaagaaccgatcggccaattcctcgcccacgccgtcggctcgatcctggaatgacagcgaagaggatcaggacatggactgcagcagcggcaaccagcagcagcatggacagcagcagcaacagcagcacaatagcaacgaggacgaggatgatcgctcctcgtcggcctcctcggccatttccttgaccatgaagagaacgcgccaggatagtgagtccacgctctaccaaacgctactcatgaagcaggagcaacaccagcagcagcaccagcagcaacaccaacagcagcagcatcagcagcagcagcagcagtatctggacgagctgcagcagtcgcaccagcagcaactgacggcaaatctgtttatggccaggacaatagctctaagcaggtcacgagattttccggaactctttcaaaacaccattgccgcggcggctgcgaatgcgacagctgcatcggccagtccggggaacaatgccagtggacccggtcaggtggtggcaaccggacccggaccgggaccaggaagtgctgcacccgtggccgtgggaagtggcagcggagcgtcagccggaaacagcaactacatgctgccatgtccgctgtgtgagaccccactggagcagcgggtattccggcagcacctggaccgacactatccgcgcgacagtcccgtctgtccggtgatcgaatgtggacgccggttcgcgcatcccaattcggtgcgaaatcacatgcgcatcaagcacacgctgcagtgggccaagatgaaggcaatgcggtcgtcgggcggccccttcgccggcggtccggacttcaaatgaaactgcgaggccgtgggctaatgttactccgcgtagtcacgctaaaagctttctaggttgctgcttctcagtcagtcacaatggcgacaataaatcgaatctaactcgcaatccacgagaaatcacccagtctcgagacactcgcatctatcgtagatagccaaaagtagtccaagacccactcggtgtcccactataactaaacagtaactgtaagcgcacgagagatccttgcccgaaggccaactacttctgcacacccagcccaccagtcaccgaagctcctccaagtggtcaatttgtttttttaaagtattcataacaggtttcattccaagttaccaaaaaaaataagatctgggtgtcctttagggatatgttaccaatggattcagtacgattcggttcattcattgtttatcatttatgtagaatatccatatacgagtattgaaacaattgaaaattcatgctttcaacgagcggtaagatatataatataccaatgattgcagaggagctccttgattggcggcgatggatgaacgctttgggttaggaaacttacaacaattattacgttcctatatgcgataaaaagtacatatatactacaagtgcagacagacacctacagctctaatgcgtttacctaaggcaaaagtaaatctcaaactctgaattcctttacactagctgatggagatcaaatctgtaggtctcggttccaaaaaacgctccagttaagcatgtgcagtattaaagtaaaagctaacgaaaccgaagaactaaaaaccacaagaataataacattaattcatagagttacataagcaaaatacgtatgattaagccatagagggtgagataactatgtagataaagagctaaaaacgagcaaacaaagaaacatgatatatagaaatatataaagtagttattatgaatattgatactgaaacaaaatagaatgtgcctgcgtaatatatttttagccaaaaaagtaaaacgaaaaaatgaaaactgaaaactgaaaaacaagtaaaccaaagttgagcattaaaaagtgaagaaaaaacaatgaaaaactgaaaacgatttgtattagagaaagttcaaaattcaaggataatgttttttgttgatttttttgttttgttcactaaactgtaattcgaatcaattggcggcataacactccaagagcagacatacgtaaaaaggttcctataatgttaatcaaaaacacactaaaagctccagacaaaactggctaaatgaggtccatcgagattgcatcccgatgctgaccaaatataaattctatttcgaaaccgacaattttacaattgtagtttataaagcccaaagagaaaacaagcagccatatgtacagcgattgtacaaccgtttgtatgccattttagtttgcgaaattgtctgaggggcgaaaacaaatgtatctagtacgagtatcttgtatctgcgttgcctgaaggaatgtatttggaggcggcaaatctattttggtgaacaataaacagcaaacgagaagactagctggcttttcattggtctctctgttagcggaacttcgatgagcccaagactaattcgtactttaatgtatcttacagtttcccgacgctccctggaaatgcgagtccgagccacagatccgcgtccctgccccaagtgcggaaaaatctaccgctccgcccacacgctacgcacccatctggaggacaagcacaccgtgtgccccggctatcgatgtgtgctctgcggcacggtggccaagtcccgcaactctttgcactcgcatatgtcgcgccaacatcgcggcatctccaccaaggacctgcccgtcctgcccatgcccagtgctttcgatccagagctcgcctcgcgccttctggccaaggcgggcgtcaagatctcacccgctgagctgagggccagagcctcgcccaccggcggaagtggcagcagcggcggaggcggcggaggtggtagcagccaggccaagttggatttaagcaacgctagcggtggacccatggacgatgccgaggactcggacgacgatcccgaggacctgaccacgggcaacggattgtatggaatgggcggaagcagcagcgacctgagccgttaccacgagagcctgttgagcaacttcggtcacgccaggatgcgaaatgaggcggctgccgtggcggccactgcagctgctcttggtcaacccaaggacttgggcgttcagctgccaaacagcaacgcgcctgggcaatccctgctggacacctatctgcagttcatcacggagaatacattcggtgagttttacctttgcatattaagtttttccagtaagtaattcgtctcctcaccctcgacaataggcatgggcatgtcccaggagcaggccgctgcagcagcactgcgcgccaagatggcccagcttaacgcgatgggacacagtctggacaacctgccgccgggccttcttcccggacaattcgacctgagcaagctggccgccggaaatcccgcctttggacagagcggacccggactaaccattgagccgataatgcgacacgaacaggcagcgggaaacctctcgccgaaccgaccactggctctcaactcgggcggcaggatgatgggtcacgatgaaatggcggaaaatgatggcgacatgcggcgggaaggttcggaacccatggatctgggcctggacaacaaccagtcgggcagcaaccatgaggtggccaactccgatgccgaggagaactactcggaggatgagggagtgcacaacacataggaggagcaagagactccagcgagggaaccacgaatatgaacatgaacatgaacataaacaaatgtataccgattacccatggaacatatgtaacgagtagccttatcctcatgtataccagtttatgtgtacgatacgatacaatacgatagtgaaacctaggactaaaatcatatttgtgccgctgccagagctggcctagtagaattctatgttgtgcttttaaaactactactactactactacagatatatgtagtatacctctatatatagatatatcgctatacacatgtatatttataatttatatacacaagtacctgctgtgtatacaagtcgatgaggagaagaaatgaaaagagccccagacaacccatcctgcatgaaaaagaaaacgtaatggtagtcttagagtactaagttagatttcacattgaaagagatgcctgtaaatacattaaaagaaaaacttgaatatgttaggccaacagcagcccccaaacgatccgtcgtaattagtattgtaccagacgccagcagataattcagatgtgccatgcatgccacagccttccagttccaagtctagccagtctataccagtgcttaccatatctcaggaacacttgcggacaaatccgaacaactcaaccgaactacctcagccagcgaaagagctgaatccccgaaacgaacctcagacttccatgagttgtgactggtcctgcactccatcttcatgaaacttgccaattttcagcagcagatatctgctcttagacttagaatcctatcgcgaggggatcagcaaacaagaaatttaatgtttatacaactaacatacggtatacagtgcacgctcggtatacgtatttacacttaaatatacaaaacatatgaatgcctgtacttatttgtcagagaattgaatacctcagcatactcagcattcggtcgtcagcactcgaaggtggaacccccttaatgatatccagtgcgaatcataagcatatacttatacttaaactaggctagttagtttatgtggcagcactgcaagcaagacatagatagatgtaactacttgtttcctgaatgtatgtatttagttggaatatgcctcagttattctaggtttatggttagcttcaatcggagatgagcatagactctacaagagtcgatacaacttgccttatgaccaacatatgtgttaatttagtaattttctacctcaattaatttaaatgtattttacttggatatttatttgtaagtccttaactgcactctgtaatatgtaacttatttcactggcatgcgtgtttttaaaaatcttacttaagagccacctaacagcatagcgagatataaataaaaaaaaattaagaacacgagagtatctttagtttttattacccggtttaaagttttatttggttctagacactttttcctctcactctcgcccaaattttggcgcaagcggagtgcaatagattgcatttttaggcttgaaatgcatttatggctaatgcgatttggttaagacgttagaataaaatatattagttaaagtcgttacataagcaatataagtagacattcatgtgcttagaaagttatataaatatttattgacattacaataaagccgcgttatgaagacaatgtgtgttttactcaaaatatgcggatccatttaataattggtaatattgaatacaatttaattaaaatatatacctaacaaggatgagacgtttaagtacaacacattaaatgcaatatttctaatagctcggaactctgtatgaactcatattgatgacacccaaaattaacctaagcccaaacacatacacatatgtacacaaatataatacctagtgacttatttatctgatgtagttgtttcatatttcgcgagtttttcccgcagagcatccaaatcatcatttcgaatcgccaaaattcgcttggcggcttcatacttatatttgattgccaaaatttccttcttttgggactcacactgtgcctgcaaaaacaatattttatataagaactacttgagtaacgattcgaaatagcaaccttcaatgcactggtttgtccagctgagagtgaggtaatattcgaggtatcactgttttcgttttgcctaagtttctctttcagttcctggatgagatggtaacggtagcgcaacatgcgaaccgcttcctgatactttacgttcgttttctcaaggattgtctcaagatcggattccgtctgagtttgagcggctacggtagcaggtttagctgcttgtgccatttggttagattctggttccttggctgatgccgtagtgaggtcattaatcctagcattaagatcttgaagtttcattttaagccgtttctgctcaacctttgccttgtcttgctcctcaataactcgcttcgttagttgcgcattctcatccttcagcggatgatggtccagctccatctttagtgccgtcacttgactttcacgaatgaaaagctcacgctggcagtcctgaagcttggaattcagctccgcacagttgcagttgttgtctgaaattgaattcattgagtgggaaaaccagaggaaatacactgcaactactcataccaacgggatctgtca

SEQ ID NO: 9740 - DNA, 4568 bp, DROSOPHILA
gcccccaaaaaaaaagaaagaaatattaaaaaaaaaagaagaacacacacatataacaaaggcgctcagaaggggaagcatttgtgcgacaatagccaaggaattagccacaaaagaaggagcaaccgggtccattaagacagtcaaaccatccgatcccatcccggctagacgaggtccacttaaatgaccgaatccacacagctgcagacggcggagaacaacaacgcgggcgtggtcaaaatggagcccccgccgccggcgacctcctccgtttccgtatccgccgccgcagccgcccacgccctctcctccctctcttcgcttacaatggccgccaccggatccgccctctcgccggccacgcccccgccctccctgaacctctcacatcagcagcagcagcaccagcagcactacgccctcaagtggaatgacttccagagctcgatcctcagctccttccgtcacctgcgggacgaggaggatttcgtcgacgtgacgctggcctgcgacgagcgttccttcaccgcccacaaggtcgtcctgagcgcctgcagcccctacttccgccggctgctcaaggccaatccctgcgagcacccgatagtcatcctgcgcgacgtgcgctgcgatgatgtcgagaatctgctgagctttatgtacaatggtgaggtgaatgtgagccacgaacagttgcccgactttctgaagacagctcacctgctgcagattcgcggtctggcggatgtgaatggtggctatccctattccaaggccttgtccgccgccttgagtcacaacagcagcaataacaacaacaacaacagtagcagcaacaacagcctgagcaacaacaataacaataacaacaataatgccgagagcagtaatcataacaagataagcagctatttatcgcccaatcaaacgagcgccgcgtgcaacaacagcagcaacagcaatagcaacaaccacagcagcagccacaacaacagcagcagcaacaacataagcggatccctgaacagcagcctgaactcaccgtttagtgcgccacagataccgccaccagtgaccgcatcgagtgcagcggcagcagcagcagcggccgcatccctgaccgccgcagtagccgcagcagcggcagcaacagcagccagtgccggcagcagcagcagcgccgccagcggacagacgagcggtacgcccgccatccaggagctgaaggcatcgtcggcagcgtcgcccgtaagaaacccgaaccccaatcccagcaaagccagcagcagcaaccactgggacatgggcgagatggagggcagccggaagagccatctgacgccgccgccacagaaacgcatcaagagcgccgacttgttccgtgcccagcatggcatcagtcccgagcgattgctgttggatcgggagttccccgtcgccggacagcatccactcacaaggaacagaagcggtcgggacacatccaaggatcgggagcgcaacttggagttgagggaatcgctactgggacaggctttggagaacagcaacggccagcaggccaatccgaaacacgaactgggacagagcgcgggtgaagattcgaacagcagtgataccgagccctcggatcgcggcgatggtcagcacgatggaaccctcgacgggattgacaaccagcgctcgcactcgttccccaatgcattcctcggcctccagggcattccaggacttctgccaggaccctctggcatcaacagcgatttcgtttcccgacgctccctggaaatgcgagtccgagccacagatccgcgtccctgccccaagtgcggaaaaatctaccgctccgcccacacgctacgcacccatctggaggacaagcacaccgtgtgccccggctatcgatgtgtgctctgcggcacggtggccaagtcccgcaactctttgcactcgcatatgtcgcgccaacatcgcggcatctccaccaaggacctgcccgtcctgcccatgcccagtgctttcgatccagagctcgcctcgcgccttctggccaaggcgggcgtcaagatctcacccgctgagctgagggccagagcctcgcccaccggcggaagtggcagcagcggcggaggcggcggaggtggtagcagccaggccaagttggatttaagcaacgctagcggtggacccatggacgatgccgaggactcggacgacgatcccgaggacctgaccacgggcaacggattgtatggaatgggcggaagcagcagcgacctgagccgttaccacgagagcctgttgagcaacttcggtcacgccaggatgcgaaatgaggcggctgccgtggcggccactgcagctgctcttggtcaacccaaggacttgggcgttcagctgccaaacagcaacgcgcctgggcaatccctgctggacacctatctgcagttcatcacggagaatacattcggcatgggcatgtcccaggagcaggccgctgcagcagcactgcgcgccaagatggcccagcttaacgcgatgggacacagtctggacaacctgccgccgggccttcttcccggacaattcgacctgagcaagctggccgccggaaatcccgcctttggacagagcggacccggactaaccattgagccgataatgcgacacgaacaggcagcgggaaacctctcgccgaaccgaccactggctctcaactcgggcggcaggatgatgggtcacgatgaaatggcggaaaatgatggcgacatgcggcgggaaggttcggaacccatggatctgggcctggacaacaaccagtcgggcagcaaccatgaggtggccaactccgatgccgaggagaactactcggaggatgagggagtgcacaacacataggaggagcaagagactccagcgagggaaccacgaatatgaacatgaacatgaacataaacaaatgtataccgattacccatggaacatatgtaacgagtagccttatcctcatgtataccagtttatgtgtacgatacgatacaatacgatagtgaaacctaggactaaaatcatatttgtgccgctgccagagctggcctagtagaattctatgttgtgcttttaaaactactactactactactacagatatatgtagtatacctctatatatagatatatcgctatacacatgtatatttataatttatatacacaagtacctgctgtgtatacaagtcgatgaggagaagaaatgaaaagagccccagacaacccatcctgcatgaaaaagaaaacgtaatggtagtcttagagtactaagttagatttcacattgaaagagatgcctgtaaatacattaaaagaaaaacttgaatatgttaggccaacagcagcccccaaacgatccgtcgtaattagtattgtaccagacgccagcagataattcagatgtgccatgcatgccacagccttccagttccaagtctagccagtctataccagtgcttaccatatctcaggaacacttgcggacaaatccgaacaactcaaccgaactacctcagccagcgaaagagctgaatccccgaaacgaacctcagacttccatgagttgtgactggtcctgcactccatcttcatgaaacttgccaattttcagcagcagatatctgctcttagacttagaatcctatcgcgaggggatcagcaaacaagaaatttaatgtttatacaactaacatacggtatacagtgcacgctcggtatacgtatttacacttaaatatacaaaacatatgaatgcctgtacttatttgtcagagaattgaatacctcagcatactcagcattcggtcgtcagcactcgaaggtggaacccccttaatgatatccagtgcgaatcataagcatatacttatacttaaactaggctagttagtttatgtggcagcactgcaagcaagacatagatagatgtaactacttgtttcctgaatgtatgtatttagttggaatatgcctcagttattctaggtttatggttagcttcaatcggagatgagcatagactctacaagagtcgatacaacttgccttatgaccaacatatgtgttaatttagtaattttctacctcaattaatttaaatgtattttacttggatatttatttgtaagtccttaactgcactctgtaatatgtaacttatttcactggcatgcgtgtttttaaaaatcttacttaagagccacctaacagcatagcgagatataaataaaaaaaaattaagaacacgagagtatctttagtttttattacccggtttaaagttttatttggttctagacactttttcctctcactctcgcccaaattttggcgcaagcggagtgcaatagattgcatttttaggcttgaaatgcatttatggctaatgcgatttggttaagacgttagaataaaatatattagttaaagtcgttacataagcaatataagtagacattcatgtgcttagaaagttatataaatatttattgacattacaataaagccgcgttatg

SEQ ID NO: 9741 - protein, 856 aa, DROSOPHILA
MAATGSALSPATPPPSLNLSHQQQQHQQHYALKWNDFQSSILSSFRHLRDEEDFVDVTLACDERSFTAHKVVLSACSPYFRRLLKANPCEHPIVILRDVRCDDVENLLSFMYNGEVNVSHEQLPDFLKTAHLLQIRGLADVNGGYPYSKALSAALSHNSSNNNNNNSSSNNSLSNNNNNNNNNAESSNHNKISSYLSPNQTSAACNNSSNSNSNNHSSSHNNSSSNNISGSLNSSLNSPFSAPQIPPPVTASSAAAAAAAAASLTAAVAAAAAATAASAGSSSSAASGQTSGTPAIQELKASSAASPVRNPNPNPSKASSSNHWDMGEMEGSRKSHLTPPPQKRIKSADLFRAQHGISPERLLLDREFPVAGQHPLTRNRSGRDTSKDRERNLELRESLLGQALENSNGQQANPKHELGQSAGEDSNSSDTEPSDRGDGQHDGTLDGIDNQRSHSFPNAFLGLQGIPGLLPGPSGINSDFVSRRSLEMRVRATDPRPCPKCGKIYRSAHTLRTHLEDKHTVCPGYRCVLCGTVAKSRNSLHSHMSRQHRGISTKDLPVLPMPSAFDPELASRLLAKAGVKISPAELRARASPTGGSGSSGGGGGGGSSQAKLDLSNASGGPMDDAEDSDDDPEDLTTGNGLYGMGGSSSDLSRYHESLLSNFGHARMRNEAAAVAATAAALGQPKDLGVQLPNSNAPGQSLLDTYLQFITENTFGMGMSQEQAAAAALRAKMAQLNAMGHSLDNLPPGLLPGQFDLSKLAAGNPAFGQSGPGLTIEPIMRHEQAAGNLSPNRPLALNSGGRMMGHDEMAENDGDMRREGSEPMDLGLDNNQSGSNHEVANSDAEENYSEDEGVHNT

SEQ ID NO: 9742 - DNA, 6581 bp, DROSOPHILA
ggaggtgctgaagagtccgattacgtggacttccataaactgacatgcctgctctgcaagcgtgccttccaatcgttggaaatactccagaagcacttgaagatgtccactctgcacaaggagaacctggccaagctcaatcaaaacactagcagtagcatcgaagaggcactagcgtaagtgaaatcgcgatgtgtggtggagtatattatcattgaattcatattctttcccagctatcgtgatcgtgccaaggagcgcaggctgaagtacggcgagagcgatcctcccccaccaaataggagcagggagcgattcgagcaggagatcaagacactgcagtcgcggcaaaagcagtctactagcgctactccagccatgcccatcagttcgagcaacgtgggcagtcgactgctccaaaagatgggttggtcggagggacagggactgggcaggaagaaccagggacgcacccagatcatagaggtaactgagctgacggcaagctataaaatgaattaagaaaattaagcattttgggttccctcaggcggacggacgctccaattacgtgggcttgggcaacaaatcgggacagatgataccgggcaacgactacaaatcctatataaagaagatgatgaagcagcgctacgagaatgcttgagaaattggtttttagccgtttcacatgtttcatttcaactaaagtcgccgtttaattcagcttttcaaccgaagcaaaaattatttccatattatatatgaagcttcttgagcattgttttcctaacagattggcgtttttttaagtccacgagcaagtgtgaccgtttagttaatagtttctgattaagcgaatttaaatcctttttcgaatgtacaaaataaaatgtaacggtgtaaagtttaaatttgcttggtgttgggaaacaactgttagctggcacttggtagccctggagctatcggtcagttatcgataactggcagtcagatacttcgggtgaacggcaaaaaagaagaccgagaatttttctattcgggtttttttttttggccggataactgattgtttctgcctgaatgcaaagagacttccagttcgggaacaagtttaaccagcttccaatcctgttacagtcgtggtaaccaagtaagatgtgcgcacatagacggttcatctaatggcaaaaggccaaatcacaaacactgcatttaattacaatcgattcgcattagatatggattctcgatatggtcacagcttctcgggcggcaacggaaacggcagcgaatcgggctacagacgctacagtcgctcccgatcccgatccaggtaggtagtcctttgtccacctggagcctcttagtggattactaccaattgcgattatttcagggaacgaagtcgggaccgcaatgagtacagacgtcgcaactcccgttcgcgcagtcgggagcggtcctcacactatagaaacgaccgcagtccggatcgcgatctgtaccgcgacctgatcaacgaggattacgaggatcagggaaactacaactcgagacagaaccttgaccagcgccacggcgaggacaaatacgatcgtcggcatgctgatagccagggtcgcagggatcacgatagcaactacgacaagagtggccaggatatggataaggaccgcgatcaccgctggaaaaactacgatcgcgtttcgagagagcgcaaccatgatgacttcgatcggggatcggagcgcagcaggtaagaaatgatacatattgcatattacccatatcgtgctcagtgttatcactgagattaagattaagctaagttctatgtttccattcacaaggcttccataagaaggaggactcctctttcactagtttaaaagacctttcatttgctaatcacttgtaataaaagtcaaaataattagaaatcaacccattcagtaatgtacacttccctttgttcgcataaatgcatacaaatcatcttatgaaatattcatgctggatgcctttaattacagtggatagtatgcaaacgatggtttcaaacgaaccgaacgaaaatttattcgacaaagtgctcattgtatgaccttaaagaatcgctttcctttcagccgcagcaatgaccagcggcagttcaataataatggaaatagtaactccagcagcagttacagagatcgcgagaaggagcgcgatcgagatagacggtgttcctcggacgaggacagcgacatggccagcgaattcaggcagagaggtgcctacaacagtggcagcagcgttgagcccttgaacaacataatcctcttcggtctgaagaagcacgtcacggaagcagacgtaatgtttaagcgataagcagaacgaatgtaaaattaaccaagtaatcctccacagatcatgggcgagctgatcaaggtcgacctggagcccacatccattcgcgtgatgaggaagcaacaaacaggtgggttacatttccgtgtgttacattcgatttaaagtgaaattgtagagaaagcgtgagtattgcgtgcccagcaacatgttcgatgtaggacttatagcaatttcaattatacttggcttcgacatcagcaaaaacatatagaaaactacaaaccgaaacaaaaacacaatccccaaaaatgacacaatgctaatgatacaaccaacattttttgaccaaacattttcgtatctacttctatctaaaatttaggtgcctcacgctgttttgcatttgtcgagtttaaaaccgttgaggaggcgactcgttggatggagttaacccaggtatccctaaaaaccacaagaatcttgaatcttctcgtatccgccaaaatagaaatgacggcaagatccgatagcttggcatcaactgttgaaaaatgtgtgccttgagttcaattctgctggtgggctgcctgtcccttccatttttctgtcttagatcagggaactgaactcaaaggcggaatcgaatcttacgtaaaggaagcaaccagcatctgcgtgatgtcgaaaaacacagatgcaatcttggtgactgtgtagtctgtgaacgatttgcctgatcagcagtttcagttactaattccaattttacctcttctatttttccgttcagggagtcctccaactgggcgatcatcgtgtcaccatgcagtatagtcacactcgcatctcagactggacttgcattaaggtatgctccgttaagatacagattggcaacaataattagcttttttcgccatccttcagtgtggtgccagcaactttaagcgccgcttccaatgctacatgtgcaatgcgtcgcgggcggagagcgagaatgctctttacggagccggcgagggcgtcgacgagatcagccaaatcctcacaaaaagtatatccaccatgagcaatatctttcaatgccgtttcctagctaatcagctaaataccccactaacctgccacgctttccccatgcagagatcatgcttcgcggcttggacgcgctgacaaacgaggagggcgtgctaactgcccttcagcagcgcctgcccgaactggccaaaacagtcagcaaggtgctggtcagtcgcgacgccctaaccaatgcatctcggggcatttgctacctcaattttgacacactcattgattctatgaacgtgttcaacgggctgacggcgttggatccgccactcactctggacgacaaaacaggtaaattattacttcttaattatttcataattaaaaaacaaaactttaatccatgcccttcagttatcgtcacctactgcattgactccgaaaaccgtcaaatgatgccagccgaaggcaacttttttagagcaggtgaaacagcgatgtctccgtcggccattacggcggcctacactttggcggatgtgcctcgtcttgcggagtacagtgcatccgtgtatgcctcgaatccgttggagcatgctaactacgtccagtactatacggattattacacgactgaaataagcaagaactgcagagatcgtcaagtgacggaggccaactccggcgctgccgttgctctctcggccatccagcgcaagcaacggaaggtcagccagatggagaccacggtttcggtgacagaggcgaaggtcgccttccttgccaggggtgaaagtgctcccaaggggaatgatggcaagaaatacggtaagtgagcgcacactattctatctatgcgctcctgtaatgtcgaatatttcatgctcaatggttagatactcccgatgtgtccaagtaccagtacgacgagacctccggctactactacgaccacgttacaggactctactatgatgcccactcgcagtactactacaacaacgagacgggcgcgtatttgtactgggatcagaagcggagcacctatgtgctggccacacccgcttccactcaggcagccctcaaggaagtattagccgatgccgagaaaaaggaggaggaggccaaaaaggcaaaggagaaggaaaaagaaaaggaggaagctggggggaagcccgacaaggtgaaggtggccaagaagatcgtcaaggacatggagaagtgggccaagcagctaaaccaaaaaaaggactacacagcagtggcaacgccgcagcctatcctgtcggatactgaggcggccaccacctcccgtgcttcccaaggggcatatgctgatgtgggattctcaatccttgagaagaaggagcttggcaagctcaacgactatgtaccggaggcaggacctccagcgataagcaaattggttggtgcttatggaggaccttctgactcggaagatgataatagtgccaatcagaaagcacttgaagctagcgttgggactaaacgagccattagcgatgaatctgactacgtggacttccaaaaacttacttgcctgctctgcatgcgtgccttccaatcgctggacatcttgcagaagcatttgaaaatgtcgaatctacacaaggagaatctggacaagcttaaacggaatcccgcagttgaggctggcacggatgagggtctatcgtaagtgggaatatgctgctagaatggagataaactcactaatttacttacccgtacttagctatcgtgatcgtgccaaggaacgcaggctgaagtacggtgagagcgatcctcctccaccaaataggagccgggagcgtttcgagcaagagataaagactttgcagtcgcgccagaaggattcttttggcgccactgcagccatgcccatcagttcgaccaacgtgggcagccgcctgatgcagaagatgggctggtcggagggccagggactgggcaaaaagaaccagggacgcaccgagatcatagaggtaggagtcgacgagggcgacgaatggcaaaatatggataattcaatgtcaatgtgtatccacaggctgatggtcgttctaacaacgtggggctgggcaacaacactggccatatggcgcctgggaacgactacaaatcctacatcaaaaagatgatgaagcagcgttatgagaacgcctgagactcttcttaaagtgtatgattttattccgcttgaatataggggcatttaagcattgttgtttacctcgattacacttcctccaccttgtcgcgttcatttagcattagttgcgaagttcaaattgtaaatagttcgtaaatacagtctcaaattaggtttaaatttaaattgtaaatgctttaagtatggaattgtgcaagggaatctaaatctcgtccatgtagccatgctcataggcgtgacgaacggtcttgaagatctcctggttcgcctcatcgccagcgatgtccaaggacaactggtggaaggcggggccgtgcatatccgtctcgaagaggcgggacaactcggcgcaatccttctcggtgccgagcagccagggaaggaagtgcatgcataccattggtccgtagaaggcatatcgtttgaagtgggcattgaagcgttcgaagctgtattcctgtagcaactggtccacccgatcgtcggtcaactcgttccggtttcggcgcagaaccagttccaacatttcgatcatgcttcgatggtacttgcgcaacaagtcggcgtagatctccttccttccttcggatggcgtgttcatgtacataaagaagctcaggtcaatggccgtagtgctgaagcgcagctcctggaaatcgatggctttgatagcgtccaccttatcttcagcgccgtagtggaacagcacgttgttcctgttgtagtcgccgtgcagaaaggtggcaaagtggctgtccggttgatcttcggcaaaggagctggtgcggattctctccagcaggagagttggctgcttgaagtacttctcccgcagtcgctcgatggcggccccgaatccggggtctgccccctggaggagctgctccttttgccggtcgtagaactcgtagaaccgatcgaaagccacgcgatagaggacatcaaagatgccctttcctgagctggacacgaagggcatgtccaccactccggc

SEQ ID NO: 9743 - DNA, 2912 bp, DROSOPHILA
cttcgggtgaacggcaaaaaagaagaccgagaatttttctattcgggtttttttttttggccggataactgattgtttctgcctgaatgcaaagagacttccagttcgggaacaagtttaaccagcttccaatcctgttacagtcgtggtaaccaaatatggattctcgatatggtcacagcttctcgggcggcaacggaaacggcagcgaatcgggctacagacgctacagtcgctcccgatcccgatccagggaacgaagtcgggaccgcaatgagtacagacgtcgcaactcccgttcgcgcagtcgggagcggtcctcacactatagaaacgaccgcagtccggatcgcgatctgtaccgcgacctgatcaacgaggattacgaggatcagggaaactacaactcgagacagaaccttgaccagcgccacggcgaggacaaatacgatcgtcggcatgctgatagccagggtcgcagggatcacgatagcaactacgacaagagtggccaggatatggataaggaccgcgatcaccgctggaaaaactacgatcgcgtttcgagagagcgcaaccatgatgacttcgatcggggatcggagcgcagcagccgcagcaatgaccagcggcagttcaataataatggaaatagtaactccagcagcagttacagagatcgcgagaaggagcgcgatcgagatagacggtgttcctcggacgaggacagcgacatggccagcgaattcaggcagagaggtgcctacaacagtggcagcagcgttgagcccttgaacaacataatcctcttcggtctgaagaagcacgtcacggaagcagacatcatgggcgagctgatcaaggtcgacctggagcccacatccattcgcggagtcctccaactgggcgatcatcgtgtcaccatgcagtatagtcacactcgcatctcagactggacttgcattaagtgtggtgccagcaactttaagcgccgcttccaatgctacatgtgcaatgcgtcgcgggcggagagcgagaatgctctttacggagccggcgagggcgtcgacgagatcagccaaatcctcacaaaaaagatcatgcttcgcggcttggacgcgctgacaaacgaggagggcgtgctaactgcccttcagcagcgcctgcccgaactggccaaaacagtcagcaaggtgctggtcagtcgcgacgccctaaccaatgcatctcggggcatttgctacctcaattttgacacactcattgattctatgaacgtgttcaacgggctgacggcgttggatccgccactcactctggacgacaaaacagttatcgtcacctactgcattgactccgaaaaccgtcaaatgatgccagccgaaggcaacttttttagagcaggtgaaacagcgatgtctccgtcggccattacggcggcctacactttggcggatgtgcctcgtcttgcggagtacagtgcatccgtgtatgcctcgaatccgttggagcatgctaactacgtccagtactatacggattattacacgactgaaataagcaagaactgcagagatcgtcaagtgacggaggccaactccggcgctgccgttgctctctcggccatccagcgcaagcaacggaaggtcagccagatggagaccacggtttcggtgacagaggcgaaggtcgccttccttgccaggggtgaaagtgctcccaaggggaatgatggcaagaaatacgatactcccgatgtgtccaagtaccagtacgacgagacctccggctactactacgaccacgttacaggactctactatgatgcccactcgcagtactactacaacaacgagacgggcgcgtatttgtactgggatcagaagcggagcacctatgtgctggccacacccgcttccactcaggcagccctcaaggaagtattagccgatgccgagaaaaaggaggaggaggccaaaaaggcaaaggagaaggaaaaagaaaaggaggaagctggggggaagcccgacaaggtgaaggtggccaagaagatcgtcaaggacatggagaagtgggccaagcagctaaaccaaaaaaaggactacacagcagtggcaacgccgcagcctatcctgtcggatactgaggcggccaccacctcccgtgcttcccaaggggcatatgctgatgtgggattctcaatccttgagaagaaggagcttggcaagctcaacgactatgtaccggaggcaggacctccagcgataagcaaattggttggtgcttatggaggaccttctgactcggaagatgataatagtgccaatcagaaagcacttgaagctagcgttgggactaaacgagccattagcgatgaatctgactacgtggacttccaaaaacttacttgcctgctctgcatgcgtgccttccaatcgctggacatcttgcagaagcatttgaaaatgtcgaatctacacaaggagaatctggacaagcttaaacggaatcccgcagttgaggctggcacggatgagggtctatcctatcgtgatcgtgccaaggaacgcaggctgaagtacggtgagagcgatcctcctccaccaaataggagccgggagcgtttcgagcaagagataaagactttgcagtcgcgccagaaggattcttttggcgccactgcagccatgcccatcagttcgaccaacgtgggcagccgcctgatgcagaagatgggctggtcggagggccagggactgggcaaaaagaaccagggacgcaccgagatcatagaggctgatggtcgttctaacaacgtggggctgggcaacaacactggccatatggcgcctgggaacgactacaaatcctacatcaaaaagatgatgaagcagcgttatgagaacgcctga

SEQ ID NO: 9744 - protein, 917 aa, DROSOPHILA
MDSRYGHSFSGGNGNGSESGYRRYSRSRSRSRERSRDRNEYRRRNSRSRSRERSSHYRNDRSPDRDLYRDLINEDYEDQGNYNSRQNLDQRHGEDKYDRRHADSQGRRDHDSNYDKSGQDMDKDRDHRWKNYDRVSRERNHDDFDRGSERSSRSNDQRQFNNNGNSNSSSSYRDREKERDRDRRCSSDEDSDMASEFRQRGAYNSGSSVEPLNNIILFGLKKHVTEADIMGELIKVDLEPTSIRGVLQLGDHRVTMQYSHTRISDWTCIKCGASNFKRRFQCYMCNASRAESENALYGAGEGVDEISQILTKKIMLRGLDALTNEEGVLTALQQRLPELAKTVSKVLVSRDALTNASRGICYLNFDTLIDSMNVFNGLTALDPPLTLDDKTVIVTYCIDSENRQMMPAEGNFFRAGETAMSPSAITAAYTLADVPRLAEYSASVYASNPLEHANYVQYYTDYYTTEISKNCRDRQVTEANSGAAVALSAIQRKQRKVSQMETTVSVTEAKVAFLARGESAPKGNDGKKYDTPDVSKYQYDETSGYYYDHVTGLYYDAHSQYYYNNETGAYLYWDQKRSTYVLATPASTQAALKEVLADAEKKEEEAKKAKEKEKEKEEAGGKPDKVKVAKKIVKDMEKWAKQLNQKKDYTAVATPQPILSDTEAATTSRASQGAYADVGFSILEKKELGKLNDYVPEAGPPAISKLVGAYGGPSDSEDDNSANQKALEASVGTKRAISDESDYVDFQKLTCLLCMRAFQSLDILQKHLKMSNLHKENLDKLKRNPAVEAGTDEGLSYRDRAKERRLKYGESDPPPPNRSRERFEQEIKTLQSRQKDSFGATAAMPISSTNVGSRLMQKMGWSEGQGLGKKNQGRTEIIEADGRSNNVGLGNNTGHMAPGNDYKSYIKKMMKQRYENA

SEQ ID NO: 9745 - DNA, 3063 bp, DROSOPHILA
ttcctgggcgatgctgttctagattacctcattacgcggcatttatacgaagatccccgccagcattctccaggcgcattaacggatttgcggtcagcactggtgaataatacaatattcgcctccctggctgttcgccatggcttccacaagttcttccggcacctctcgccgggccttaacgatgtgattgaccgttttgtgcggatccagcaggagaatggacactgcatcagtgaggaggtgtgttaaaggaaagtcaccaataatacgacaactaattgtaatattctttcttgctttcagtactacttattgtccgaggaggagtgcgatgacgccgaggacgttgaggtgcccaaggcattgggcgacgttttcgagtcgatcgcaggtgccatttttctcgactcaaacatgtcgctggacgtggtttggcacgtatatagcaacatgatgagcccggagatcgagcagttcagcaactcagtgccaaaatcgcccattcgggagctcctcgagctggagccggaaaccgccaagttcggcaagcccgagaagctggcggatgggcgacgggtgcgcgttaccgtggatgtcttctgcaaaggaaccttccgtggcatcggacgcaactatcgcattgccaagtgcacggcggccaaatgcgcattgcgccaactcaaaaagcagggcttgatagccaaaaaagactaagaagtcatcgctgcaatcgtgtttcattagatttaatgattatttttttagacataagaactttaattgtacaaatcttaaatagattgtctatggtcgaataactgtgcagaatttcctatcttcttttataccttgcattatgaggtattattgcagaggaaatcgatgttgataagataagaaatcgtcatcaaacgaaagtcactgataagctaatcacaccttaaatgcttaacctttcgcgaactaaactcagtgaaaatttgccatttgataagaaatgtccgctcctgtagagggtgttccctatgaggagatccagacaaaagaggtttgagattatccacggccagctggattggatggcattataaattcaacgtgcaattccattgcagcttataggcaccggattctatggcagcgtatacagggcggtctggagaaatcgtgagatcgcgctgaagagaattcgcgagggatgtgaggataaaaagattgaaagagagatctaccagctgacaaaggccagccatgtcaacatagttgagctctacggcacatcgaggcacgagggatgcgccctgctgttgatggaattcgtagacggtggatctctgtccagttttctgcacgcgaaaagcaagccaagttattcgcatgcccacgccttcaactgggcgcatcagatcgctcaggtatggtatgaatggtatcatcaccatagtagatagtagaagcaaagacactagaataatgcaaaacaagaaattcttacatggtgccaattgatccaaaataatatagatattttgacaaatttacaatgcatgagcatacatgaacatacgtgtgcacacatgcagtggtcggctgtcactgtatgcgtagaaaagagctgttcgctgtagagctctccgctctctcgctcttgaataaaaatgagagagagagagccttaggcaacctcctctagagccacgccaaaaaaattgttacgcatcttgttattctagtgtctttggtagaagcgtggtagctattgtgcccaataatacggacggtttcatagggcatagcctatctgcatggcatgcagccgaaagcagtaattcatcgcgatataaagccactcaatacactgctatgcgagaagggactcaaactgaagatttgcgatttcggaactgttgtggacctatcccaatcgatatcgtgcaatgcgggcacctgcagatacaaagcgcccgaggtaagggagttgtttgatttcaaatccaatcgaataataatcaaccaaccaaccggctttcaaaaggttctacaaggaaataaacccgatgaaaagtgcgatgtgtatagttgggctattaccttttgggaaatattgtcgcgcaaggagccatttgagcaatataatacgctttttgaactgtacatggctattaatgaaggcaagagattatctctcgatattattattattattattatgtaataaacttatgatttcaggcgagagaccggatttaagttgcattatgtctggctgccccgcggatatagttgctcttttgtacgcttcttgggatccggatatcagcaaaagattttctatggaactgatttcccaaagcatgggtagaatcctaagtgaggcgggatccattccaccactggatttttactcataaaactaattctccaccctttacattcgttattaaaaacggatatcgttgtgaacgttaaacactattttattttcttgaaaactctcctgaagtatttacattgtacgggatgctgtacgggttatgcggataggttgggtgggtggttggtatgtgggctagatgccttttgggttttggagcgccaaatattcaattcaaggctatatccagtgaactgcagaataatttgtggaagtacatagtttgttattttcgttagatgcgggtataggtattaggtattcggtaatgcatatagggaatttataaaatatgatctaggcatatgttttacagtatatggatcactagcaatacgtttgttactgataatgttacttaatctggtgatgttttgtttttgtcgtttttcttctatcgaatgtaaatttaaaaaattaaattttaaaacgcttttaataaatatattcatatgtgtttgtatatatattttgcttgcttgttaaaacaaaatgatcctcgctcatgtgttggttagttacacaatggaaaactgtaactgtttcgtagaggtttctgtttttttggaggtataattgtttctgttagttataggttgcttcttacttattcccttttgttttgt

SEQ ID NO: 9746 - DNA, 759 bp, DROSOPHILA
atgtccgctcctgtagagggtgttccctatgaggagatccagacaaaagagcttataggcaccggattctatggcagcgtatacagggcggtctggagaaatcgtgagatcgcgctgaagagaattcgcgagggatgtgaggataaaaagattgaaagagagatctaccagctgacaaaggccagccatgtcaacatagttgagctctacggcacatcgaggcacgagggatgcgccctgctgttgatggaattcgtagacggtggatctctgtccagttttctgcacgcgaaaagcaagccaagttattcgcatgcccacgccttcaactgggcgcatcagatcgctcagggcatagcctatctgcatggcatgcagccgaaagcagtaattcatcgcgatataaagccactcaatacactgctatgcgagaagggactcaaactgaagatttgcgatttcggaactgttgtggacctatcccaatcgatatcgtgcaatgcgggcacctgcagatacaaagcgcccgaggtaagggagttgtttgatttcaaatccaatcgaataataatcaaccaaccaaccggctttcaaaaggttctacaaggaaataaacccgatgaaaagtgcgatgtgtatagttgggctattaccttttgggaaatattgtcgcgcaaggagccatttgagcaatataatacgctttttgaactgtacatggctattaatgaaggcaagagagcgagagaccggatttaa

SEQ ID NO: 9747 - protein, 252 aa, DROSOPHILA
MSAPVEGVPYEEIQTKELIGTGFYGSVYRAVWRNREIALKRIREGCEDKKIEREIYQLTKASHVNIVELYGTSRHEGCALLLMEFVDGGSLSSFLHAKSKPSYSHAHAFNWAHQIAQGIAYLHGMQPKAVIHRDIKPLNTLLCEKGLKLKICDFGTVVDLSQSISCNAGTCRYKAPEVRELFDFKSNRIIINQPTGFQKVLQGNKPDEKCDVYSWAITFWEILSRKEPFEQYNTLFELYMAINEGKRARDRI

SEQ ID NO: 9748 - DNA, 6594 bp, DROSOPHILA
ctagtgcgatgaagactgctgacgagtacgagaaggatgacagacttgaggagctctatgctcaactggaacgcgatcctgatccttaatctgtcatgctacagtgtaccaaattactcgtcgtagacgaattagaataatagtttagtttattttttattggacttctgtttctttatttgttgtatcttcgttttcgtttttgttcagtttctcttatttcagcgtacatttatggtatataatattaataataatacataataatacgtaagttaaataatatttcggttttaaatattaaacccgaaaaaatatcgtttaatggactgtcttaaatatcacttatataataatcatatgtactcgatgatgattttcatattagtttatatatggtcaagtcacgtatcgttttgtaaacttaaaacacttgagtttgcgaaattgtagcacagctggaggagcatgcggagctcctttcccatgtgccgacattaacaattatatctaaactaaattacgttcaatgctcagtattttatttttgtttggttctctccaattccttgcatatggctcgttaaatttaatatcgcaatttgtcattaccaaaacagcaaaactacgtagagaacttctggtttgatatgacttttgatcgttttgtgatttgaatgcggaatgttataaactatttcattatatttaaggctgattttatttacacaacaacaaaagtatttgataaggcacctgtgtcacatgctgatcgctcaatttacaattgatattctgttcgatttcaatttgtatgttttcattattcttttttggatttcctctcatcgtattcgatatgatgtgcgtaacatttgaatttcaagcacttcggtgtccaacgtgcagtaaaattttggaaactttactcgagtggctagcgttgatcctaaggttcacaaatgcactgcccgtaggtcgctggtatctcttagctcttttagctaacgatgagcttggagacgaggcacatcaggatggtggtgatcacagtgctcacggcggagctgctcgtcagcttggactgggacatggctccgtttccggttcgctcggccacttccggaactattggttcgtcgttggactggtgatcgcccacggctaagggaaacagggatttaaaaagtcgagttagtggcgtttcttgtcaagctgttcaggcttaggatgttctgtgcagaaacggcttagatctaagctaaatacgatttggtattggatattgtattttaaaggcgtgacttggtatgggggctgggggcaaagaaactaaaaaacggatcagaacgtaggtataacttaagtaacttagggggataaaattaaaataattgatgtaacatactcttcactcttctgaaaactcgtttctttctatttggcttggtttggcgtttcggcaggcggcgcagttcgtgggcgtggcatgttttgtatgtttcgattgatggtttactttattcagacagagatcactcatgcgggcgatggattacactaatgctggcaaattacaacgggactggctacaacacacggatgagcaccagatcctctagactagaagaatctgttcgttaggccccacatccagctgggcagaatgccctggttcgggttgggattcagactcggcacttgcggtgctgtgtagatcggtgcgagtatgagagccgcaaataaaaatattcgtttaaagaacaaaagtattgaataaagcaatatcaaggttgcattctgggaggacgggatgtgcgatgcgatggggtctagcagtctaaaacaggatgatactacgtgtgagcaggaagaatcagcattgccgcactacaactacacacacaagatatatgtacgggagaagaggcgggaaaggagaagaaagacagtagcaagcagccagaagaccgaatgccatgtgctatggcggctcattcgctttgtgattcttctgcgccatgagtcttatgtatgtggatgtggatgtggtggtggtgtgggttgttatggagtcgatgttcgttttgttcggctgttgttgttgctgttgtgctttctggatgtgtgctgtggttaattgttcttgtttttgtatccgcgtctcttaaagcctgcaagaaatatacatacgtacatacagacagatgacaatgacgaatacgaatacatttggattgttcggctcttgttgaatgcaaattagacgattatgggccaggcacgtgcatgcgagtgttaagtgagattgggtcataacgggagtggatcacatatcacttagagagcccatatatccagcattcttacaataccctccgactttccgtgccatgcaggtgggaatcttttgtttgctccatgttagtacaatttcagttgttcatgcaattacttgggtgggcgtgtggagttcggatatgtgagtgtgtgttgggtggtgtgggtagagtgggtggttggagagtgagtgggtggttttaggtgcggctcaacccagccgctagccatttggaattttgtgccgagggtgccaaaacaaggaaacggttacgcataaacatggttcgaggttctgcgatttcgactacagggtatagagtttagttcggggagtggaagatcaaatattaacagtaccatatctagatatatacttagtgctacggaactacggagcttagaccatagggtggggtgttctttttgggggtttccattttcggaatttgtggtgtttaacagatagtgttgcttgctcttgggattagccagttagtaactattgcagatgctatattggatttggttaggcggttaggaacagcgcatgcaacgatcgtgacttataggctaggaacatggtttccggtggagttgatctgggacctcagttagtgagaccgactgaccagtagttttggttgttgttgttgtcgttgcggctgataattgctaatatattcttttggctactaaactgtaagcaaggtattatattatttgtgtttttatattcatttttttcttttaagtatctttgtacatggtatgctaaattgagttggttagtttaatagaatcaaaaaactaaaagtaccaaaagcgttaccaaggatgggttagttaagttaatggaaagaacacattgttagttgaagatgaaattagcaaagttgggttagttacaaagtttagttagatgattagtacagctagtttagaaaagtaattacaacattggtttcattaaaattaagcttagaggcttactctatagaaaagtactttcaccaaataaaactcagcatgaaagcactgaaacaaaactaaaataaaacaccacaaaatcaagactaggagaaggtaaaattttacaatatttgtataaggcacacgctatatatgtatatacatatatatatatatatatagactggcaaaagacatttgacacacacagtttggtaattagtttttcaataggtattataaatgtatttcttccataggcaacaaagacaaacacattcgacttgagtactagaatttcactacatagacattaacttaattaaacataccataaagataggatttattaatattatcatttcattacttgtaactgcttctcgctaagtaacaactcatacaagacttctttctatgagatctttttgactttcagagttcgggattcgatattcgtggatccagtagatcgattcgagctcaaacaaaactaccgctgagtcggtcccactcacctgcgtcaaagtcatcaccgttgccatcgtcggcatgcgggatcatggagtgctgttcgaactcgttgtccgagccttcgacgatattacctgtggacgagggcgtgttcttgcagccgaaccaccagtgggcggtgggtctggggaaggggggcgtggccgagtcaacctgcgggagtccaaaagaataaggtattgttttaggtattgctgagatccccagctagcagtacttacagcaaatcgggcgtcatggaatctgtagtacttgtcgcccttgaagaagtacgtgtagccattggtgtacttcagcgctgcgtccaggttgttgggaacaccctcccagttggagatgggcttgggatagctagccttgaccggcggcctcttggccggatcgaagcgccagaacttgctgcccttgaagaagtatatcttgccattgcccccccaaaccattgcggcgtccagatggtcgggaatgcccgtgaagccctcgctgatttccttagggtagacgccgtccatctgacggccctggtagcgccagtactgagtacccttgaagaagtacgtcttgccgttcttgtaggtgaacgccgcatcgatgttgcccggcaatcccggccagcccttggagatgagctgtgggtagccctcctccacggagtccgtggtcagcttgtagtacttgtcgcccttgaaggcgtaggtctcgccctgcgccgagttgaagagtgtgtctaccttggagtccttgcagatggagtcgtctagtggcacctttggaggagagtatggccgctgggtggtggccgggtacacgttggtaggcctcagctggtttgttttgcgcccatacagtgactggatggccgccttgtcgtcctcgtccaacttgaagacgggttcaaagccgcgatagaagggcgccatcagagcggagctctgatctgagtgggagagtcccaaggagtgaccgaactcgtgagcggccacctggaacagattggtgcctcgaggagagccaatggtccacagttccgcgtcgtcaaagtgggcatctccgccaaagacagggaagaaggcatgcgccagggtgccgccttgaccgtcaaaggcatcgccgtctccatgctcgctctccacgaacctgggagtaagggaaaggaaggagaggaagattggcaattgtatttaataaaggcttttgtggtactcacttgatctcgatgtgcacggggccggaggtcttcctggtgaaggtcaggtcggtgtcctcggaccacacggcaaatgcgcgaccgatctccgcgtcgacatcgactcgcttcagccgcttggggtacttggagatcttgtaggtgaggttcttcacacgccagcgactgccctgcagggcgtaccgcttggagcggctgtcaccggtgccgacgcgatcccgaactccgcagcggggcagggacatcagcttcattgtctccgcatccagctcgccggtgatgttcagtcccgcgaagctttggaactcctcgatggcactcacccaggtccgctggtcgtgtagcccactgctggcgggattgcgggcagaggcgggtagatagccgaactgggacaggtagatctggaaggagggaggaaggaaggcttagggacagctggcgaagatcaatgggctgcgaccgatggccacccgtcgcggccaacttgatttatgacaatcagattagtcctggctactctgtcgcctttcctttccatctgacttgcataatttacgaccgcctcactggcttccactttttataaataaaccagcggggaaaggggcaccatgtcgtatgcttcatatgcatgtacccatatccatacagataacctgcgaatgcgacgtgactgggaaaggtgtgaaaacgcttaatcgatcatcaagcatcggcagctttaaggaagcgatcactggctaattgtaaattgtaaattgtaacattgagaaatcgaatgaaaacagtttgcgcatcagggaagtgcactgcgatcggagaacaatgcgaggttatctcaacagttaagtgttcactaactatctaactatctagctacatggaatttgctttctggccaattacaacggcaaactgtcttacaaccgcttgttttatgcgcttaacgtttcggcaatgcgataatacgattttcgacttggcatgggcatcaggttccccggccgtttatgtgtcgcacattcttaatgacttaatgccgccgctcacatacatatatatatatagtatatagtacatgttgtataatgatttgccgaatcttgcataatgccagctgactgttaattttattgtgttctttccgcctgcgaggaagtaaacatttcgctggaatcttgagtattcgagtcgcgtctgctgccagtggctctgtgatctttttctgggtgggttggctaccagtctttactcttcgccaccgatcagctgggtccggtccgttcctcgaaaggtaaacgaactgtaaacaaagcacggttcgagtggagagtatctgtcactcatctccggacagatgcagatccactccaagtccagattcccattcagattcagagcgattgtaacgactcatctgcgatcttagcaatgcctctttgtgcaattaacataattactcccatttggcgggcacgaacatcttcgattaccgagaaggtgctatgccagtatgcttgggtaactgtggggcttgt

SEQ ID NO: 9749 - DNA, 1707 bp, DROSOPHILA
atggaaaggaaaggcgacagagtagccaggactaatctgattgtcataaatcaaatctacctgtcccagttcggctatctacccgcctctgcccgcaatcccgccagcagtgggctacacgaccagcggacctgggtgagtgccatcgaggagttccaaagcttcgcgggactgaacatcaccggcgagctggatgcggagacaatgaagctgatgtccctgccccgctgcggagttcgggatcgcgtcggcaccggtgacagccgctccaagcggtacgccctgcagggcagtcgctggcgtgtgaagaacctcacctacaagatctccaagtaccccaagcggctgaagcgagtcgatgtcgacgcggagatcggtcgcgcatttgccgtgtggtccgaggacaccgacctgaccttcaccaggaagacctccggccccgtgcacatcgagatcaagttcgtggagagcgagcatggagacggcgatgcctttgacggtcaaggcggcaccctggcgcatgccttcttccctgtctttggcggagatgcccactttgacgacgcggaactgtggaccattggctctcctcgaggcaccaatctgttccaggtggccgctcacgagttcggtcactccttgggactctcccactcagatcagagctccgctctgatggcgcccttctatcgcggctttgaacccgtcttcaagttggacgaggacgacaaggcggccatccagtcactgtatgggcgcaaaacaaaccagctgaggcctaccaacgtgtacccggccaccacccagcggccatactctcctccaaaggtgccactagacgactccatctgcaaggactccaaggtagacacactcttcaactcggcgcagggcgagacctacgccttcaagggcgacaagtactacaagctgaccacggactccgtggaggagggctacccacagctcatctccaagggctggccgggattgccgggcaacatcgatgcggcgttcacctacaagaacggcaagacgtacttcttcaagggtactcagtactggcgctaccagggccgtcagatggacggcgtctaccctaaggaaatcagcgagggcttcacgggcattcccgaccatctggacgccgcaatggtttgggggggcaatggcaagatatacttcttcaagggcagcaagttctggcgcttcgatccggccaagaggccgccggtcaaggctagctatcccaagcccatctccaactgggagggtgttcccaacaacctggacgcagcgctgaagtacaccaatggctacacgtacttcttcaagggcgacaagtactacagattccatgacgcccgatttgctgttgactcggccacgccccccttccccagacccaccgcccactggtggttcggctgcaagaacacgccctcgtccacaggtaatatcgtcgaaggctcggacaacgagttcgaacagcactccatgatcccgcatgccgacgatggcaacggtgatgactttgacgcagccgtgggcgatcaccagtccaacgacgaaccaatagttccggaagtggccgagcgaaccggaaacggagccatgtcccagtccaagctgacgagcagctccgccgtgagcactgtgatcaccaccatcctgatgtgcctcgtctccaagctcatcgttagctaa

SEQ ID NO: 9750 - protein, 568 aa, DROSOPHILA
MERKGDRVARTNLIVINQIYLSQFGYLPASARNPASSGLHDQRTWVSAIEEFQSFAGLNITGELDAETMKLMSLPRCGVRDRVGTGDSRSKRYALQGSRWRVKNLTYKISKYPKRLKRVDVDAEIGRAFAVWSEDTDLTFTRKTSGPVHIEIKFVESEHGDGDAFDGQGGTLAHAFFPVFGGDAHFDDAELWTIGSPRGTNLFQVAAHEFGHSLGLSHSDQSSALMAPFYRGFEPVFKLDEDDKAAIQSLYGRKTNQLRPTNVYPATTQRPYSPPKVPLDDSICKDSKVDTLFNSAQGETYAFKGDKYYKLTTDSVEEGYPQLISKGWPGLPGNIDAAFTYKNGKTYFFKGTQYWRYQGRQMDGVYPKEISEGFTGIPDHLDAAMVWGGNGKIYFFKGSKFWRFDPAKRPPVKASYPKPISNWEGVPNNLDAALKYTNGYTYFFKGDKYYRFHDARFAVDSATPPFPRPTAHWWFGCKNTPSSTGNIVEGSDNEFEQHSMIPHADDGNGDDFDAAVGDHQSNDEPIVPEVAERTGNGAMSQSKLTSSSAVSTVITTILMCLVSKLIVS

SEQ ID NO: 9751 - DNA, 3322 bp, DROSOPHILA
cgcttcacgctgcgcaaactgccagagaacctaactcagtcgtggcaaaactacatgttgcagctcatgatgcaagactttcagatgaatgtgctgcaggtcctagaaaatccgttcgacgaacgggttgctgctcaaatcccgacggtacactatgagtttcctaatggttatcatcaggactttggctctgagcggttcaagatagccgagagtctctttgacaatgcaatgctgggagctggccaattggcgtccaccagtgtgggcatgtgtgatgcggatgtgcggctgtcacttttcggctcagttgtcgttactggtatgaattttccctaggttttaaaactaattacttataccttaatattttgctcttaggtggcaatacccttctgcaaggctttccggagcgcctaaatcgcgatctccagctgcgtgccccctcaaatacgcgcctaaaaatgatttctgccaatggcagcgtggagcgaagatttggagcctggattggcggctctattctagccagcataggtactttccaacagatgtggatatcgtcgcaggagtacgaagaggccggcaagagccaagtcgagcggaagtgtccgtaaggacagcgcaatcgaattccaattttaattttaaagacgcaactctatgtaataatataaatgtgaaatgtgaaaagtgtcccattattcagaagacatctgagcgtttgtttaggaatagattgcatttgattacggaaatgtttttagttacacacatatgtatatatttactgcgacgctgacgcggacgttacagtttcacatttcaatggagttttcaccggctgccttttgtctttcggatctaattcgtacgtaatggatatggagtgaactctgggtcctcgctttttgtggaactgttgatagagcggtggcacataaatcttgcggcgaatcagcgtctcttctgttatttcgtggcaaagttttataaatcgtcacatggctccagacattgtgttgttgcaaacgcattgctatgggcggaacacatgatgaacttagttttaaatgatgtttatctcggctcactcaccttggcatttagtatgtcctccgaccagtcctccttggcaattcgaccaacagcgttgaccagaatcttcttcaccttaattacgttctcggcaaaagtacggaggacatcctgcacgttgacaccctcgcaacccatgcgccagcagtcgtagtccgtggcaatggccaccgacccgtaaagtaggccagcctccttggctagcaccacttctggacacgtggtcatgtttatgaggtccccgccccactgacggaacatgtggctctccgagcgagaggagaagcgcggaccctcaatagtcacaatggtggccttatcgtgggcgggaatctccagctccttggccgcctgaagcagaatgttgcgggtgcgttcgctgaatgccggaaacatgggcaggtggcaaacaccacgtggactttgtgccttgccatcgtagaaggtctgaaggcgtttagtagtcctgtcgataaagtcgtgtggaacaaccaggttgcccggcttgatttcctcgcgcaacgatccacatgccgtggagacaattaagtgggtgcagcccacatcgcgtagagcccagatgttggcccggtagttaacattggagggcatgatgtcgtgcttgcgtccatgacgcgccaggagtacgcactgtactccattgatctcgccttcaatcaatgcatcagacggttctccgtagggcgtctccaccacacgttcctgccgctgttccaggatatctgggtcgtcaagccccgaaccgccaataataccaatctgtgggttatttatagtttggcattgaacaaaatggggtgcttaatttttggacggactacgaactcaccttgaccggaagcgggtccagattggtgtctttacatttaatcgtaatcatggctagcggaggattgtgcttttacaagctgctgttgcggcagtctggagcagagtagaatgttcccgctgatagcgtactgataactgtgtgtctacacggtagggtgcataagccgcaaaagctcgggcatattgaaatgacactcagcacgtcgtcgtgggtgtgtaattatggtaattgaattatgtttgcaaaattttgattttaaatcttataataatagttatgacaaattaatatttataattattcattttagaacaaaactaatcatttgataaagaatcaaatcaatcaaaattaaactaacaaagcccttctaattatatttattacaacttatatccatatcagttccgaataaagaaaataggaaattggaacatggaataaattatttattgtatcatttatataacaaacttaatttgtatgcttattttgtagggtgtctaaatgtgacagccgaccctgttatcgagccgttagtcgggtaccctacccgtatgcacttcacaacactgcctgaagtgaagaagaagaaatctgaatgtaaacagctggaagtgcggcacatgtgttttggcatagaatctaaaacaaggagaaggaaaaacaatgtaccaccttggacaggatctgccaggcaacgatgtggatgatatagaggatctgatatccgccgatgatgtcaagccgcgtgagcgctacgaaaacaaaaaaaccgttacggttcgggccaagaaacgatcccaaattcgacttgaatctcaagaggaggaggaaaagccgaagcccacgatccacgagagtgtcatacccggcacccagaaagtttttgtgaaaacatggggctgcgcccacaacaattcggactcggagtacatggccgggcagttggctgcctacggatatagattgagtggaaaggaggaggcggatctgtggctgctcaatagctgcacggttaagaatccttcggaggacactttccgcaacgagattgagtcgggaatgcgaaatggcaagcacgtcgtggttgccggttgcgttccccagggagctcccaaatcggactatctgaacggtctttccgtaatcggtgtccagcaaatcgaccgagtggtggaggtcgttgaagagaccctcaagggtcacagtgtccagctgttgcaaaacaaaaagaaggtccatggtcggcgggtagctggagcaccactctcattacccaaagtccgcaaaaatccattaatagaaatcatatccatcaactctggatgcctaaatcaatgtacctactgcaagactaaacacgcccgc

SEQ ID NO: 9752 - DNA, 1193 bp, DROSOPHILA
gaagggctttgttagtttaattttgattgatttgattctttatcaaatgattagttttgttctaaaatgaataattataaatattaatttgtcataactattattataagatttaaaatcaaaattttgcaaacataattcaattaccataattacacacccacgacgacgtgctgagtgtcatttcaatatgcccgagcttttgcggcttatgcaccctaccgtgtagacacacagttatcagtacgctatcagcgggaacattctactctgctccagactgccgcaacagcagcttgtaaaagcacaatcctccgctagccatgattacgattaaatgtaaagacaccaatctggacccgcttccggtcaagattggtattattggcggttcggggcttgacgacccagatatcctggaacagcggcaggaacgtgtggtggagacgccctacggagaaccgtctgatgcattgattgaaggcgagatcaatggagtacagtgcgtactcctggcgcgtcatggacgcaagcacgacatcatgccctccaatgttaactaccgggccaacatctgggctctacgcgatgtgggctgcacccacttaattgtctccacggcatgtggatcgttgcgcgaggaaatcaagccgggcaacctggttgttccacacgactttatcgacaggactactaaacgccttcagaccttctacgatggcaaggcacaaagtccacgtggtgtttgccacctgcccatgtttccggcattcagcgaacgcacccgcaacattctgcttcaggcggccaaggagctggagattcccgcccacgataaggccaccattgtgactattgagggtccgcgcttctcctctcgctcggagagccacatgttccgtcagtggggcggggacctcataaacatgaccacgtgtccagaagtggtgctagccaaggaggctggcctactttacgggtcggtggccattgccacggactacgactgctggcgcatgggttgcgagggtgtcaacgtgcaggatgtcctccgtacttttgccgagaacgtaattaaggtgaagaagattctggtcaacgctgttggtcgaattgccaaggaggactggtcggaggacatactaaatgccaagcaatgcgtttgcaacaacacaatgtctggagccatgtga

SEQ ID NO: 9753 - protein, 289 aa, DROSOPHILA
MITIKCKDTNLDPLPVKIGIIGGSGLDDPDILEQRQERVVETPYGEPSDALIEGEINGVQCVLLARHGRKHDIMPSNVNYRANIWALRDVGCTHLIVSTACGSLREEIKPGNLVVPHDFIDRTTKRLQTFYDGKAQSPRGVCHLPMFPAFSERTRNILLQAAKELEIPAHDKATIVTIEGPRFSSRSESHMFRQWGGDLINMTTCPEVVLAKEAGLLYGSVAIATDYDCWRMGCEGVNVQDVLRTFAENVIKVKKILVNAVGRIAKEDWSEDILNAKQCVCNNTMSGAM

SEQ ID NO: 9754 - DNA, 2784 bp, DROSOPHILA
ccggtgtcccagaggagatgcctaataccattggcggtgtgatagccagccggataggcgatgataaacttgagggcggtcagagtggcgccactcagctggaggccctccaccatggtcacatagtggctaatgtcgtgggacgagatcagagcgcccaatcccagaccccaaacacccacacccagggccaatcctgtgccgcggtgacagatcgagagcatggaggtcagctgcggttggtagatggtcagatggggcgacagctccctgcccaagcgctcgttcttctcgaagaacgactcgtccttctgggtttcggccacggaaaccaccttcatcgataccgggcggctggcagcggccatctggaggccctggcgcagcgccggagagcggatcaaagaactggagagtgcatacctgcaaaaagcagtcacaaatcagggtttttgcagtgccatcacagaaattacgtacatttccctgtttttcactcgaacttgtattgatgggaccgtacactgactgcgcgatattaccgcaaacagggatgccactacgttggtaaaaaacaaataagtctcgaaagtattgattttatatcaactgtaaaacattgttattactttatatgattaattctgttcccacttttatattattccaattgagaatattacacatatttatcttttttactgaaacagtctcaaattattaaaagttagaatggccataaatatacgtaagaaacatcaatattatagctataataattttgttcgccttgttaatattccctgctcttaactaacaataaatcgaagaaaacattgaaattatcgatacgtgtatagtaggcgctgccactcccggatcaatcgttaccactcccaagcgagttggcagttctttcgccattttttctcgctcattctttttgctgttcgagtgagcgcgtggcaggtcgtttcgcagtgttcccggtccggtgcagttgtagttgcattttcgccagcgatttagacgccatcttccgactcccgacaagccaatcaccatgaagatctacaaggatatcatcaccggcgacgagatgtttgccgacacctacaagatgaagctggtggatgatgtgatctacgaggtgtacggaaagctgatcacccgccagggtgacgatatcaagctggagggcgccaacgcatccgccgaggaggccgacgagggcactgatatcacctcggagtctggcgtggatgttgtgcttaaccaccgactgacggagtgcttcgccttcggcgacaagaagtcgtacaccctctacctgaaggactacatgaagaaggtgctggccaagctggaggagaagtcgcccgaccaggtcgacatcttcaagaccaacatgaacaaggccatgaaggacatccttggccgcttcaaggagctgcagttcttcaccggcgaatctatggactgcgacggcatggtggccctggtggaataccgcgaaatcaacggcgacagcgtgcccgtgctcatgttcttcaagcacggtctggaggaggagaaatgctagatggatcccaatcccccaaacaaaacggaacctatactcatgcataccttctacacacatatacatatttatcagatgcttagttacaattttgaaagtcttaaatttatgtttaaaaacgctgacaaaaatgcctgtcttcgatcagtgcgattttatatctaatttctttttaccggagcgcttataaattcgacattgtatgtttattgtttaatcacagcgagctaaacaattcaattgcgccacctattgtaattaaaataataatttgatagcaacacctacaaattagtatgcattttcgctaagatatcaaaaagcaacgaagaccgaaaatgggaacaccagtactgaaattaaacggaacacctatacaaaacaactgtgaatccgcatgtctgtacttctttccaaatctgcagttatgcgtaggtagacgccgccatatggcggcgtgagtgggaacgagagggcgccaccaccgtctgagtcacagacttcagttagtttgtgttgttgctgctttttggggcaatcgcggagttattgacctttgacagtgatgtacacatgccccgcaccaataccgttaccgtcattggacattttggaggtcatgcgcagtggaacacgattttctgcacgttgcagttcgacttgccccagtttctcacgttggcttcgccctaacctcaaccatgctaatgaaatgcgccgctctcgctggaatttgggattctataatctaattccaggtcaagcaatacgtacgtctttatctgcttgaagggcggggctctgcgccccaggtgctatttccatttcagcgaaacgtgtcgacctgttgccgttcgtcgcgtgagagatgcgcacagtggacactcgttagggcgaacggcgatattgtctgatgttcgaaaacaatttttttgaaaagcacaatatattttcctaaaattgtaaagaatattttattcaagtatttgaatctagttgaaatagaaccattttcgggataaaaagctaaaagtttttcttcgctattctcatacattgttgaatttaatggtttttaatatacatacatatgtgtctatttatgtacctttccattcttatgaagcgttgttgaaatggagtattgttccaagaaaactttttaacaataaggagaacaacaagctatacaattctggttt

SEQ ID NO: 9755 - DNA, 784 bp, DROSOPHILA
ttgtagttgcattttcgccagcgatttagacgccatcttccgactcccgacaagccaatcaccatgaagatctacaaggatatcatcaccggcgacgagatgtttgccgacacctacaagatgaagctggtggatgatgtgatctacgaggtgtacggaaagctgatcacccgccagggtgacgatatcaagctggagggcgccaacgcatccgccgaggaggccgacgagggcactgatatcacctcggagtctggcgtggatgttgtgcttaaccaccgactgacggagtgcttcgccttcggcgacaagaagtcgtacaccctctacctgaaggactacatgaagaaggtgctggccaagctggaggagaagtcgcccgaccaggtcgacatcttcaagaccaacatgaacaaggccatgaaggacatccttggccgcttcaaggagctgcagttcttcaccggcgaatctatggactgcgacggcatggtggccctggtggaataccgcgaaatcaacggcgacagcgtgcccgtgctcatgttcttcaagcacggtctggaggaggagaaatgctagatggatcccaatcccccaaacaaaacggaacctatactcatgcataccttctacacacatatacatatttatcagatgcttagttacaattttgaaagtcttaaatttatgtttaaaaacgctgacaaaaatgcctgtcttcgatcagtgcgattttatatctaatttctttttaccggagcgcttataaattcgacattgt

SEQ ID NO: 9756 - protein, 172 aa, DROSOPHILA
MKIYKDIITGDEMFADTYKMKLVDDVIYEVYGKLITRQGDDIKLEGANASAEEADEGTDITSESGVDVVLNHRLTECFAFGDKKSYTLYLKDYMKKVLAKLEEKSPDQVDIFKTNMNKAMKDILGRFKELQFFTGESMDCDGMVALVEYREINGDSVPVLMFFKHGLEEEKC

SEQ ID NO: 9757 - DNA, 3793 bp, DROSOPHILA
aagtaacctcatataacctccagccaaaaatctatgcaattagtacgcaaatgtaaatggttgagtggcaaaaatgccgcatgcggatggagattatttatgaagtacttaactggctaacgaaagatgcctattaaatgaatttatcttccttgatttttgaaattgttgcgttattatttgctggaacatttggaagtgaataaaaatcctggccaatttagtttaatgtatatatgcttgtggtttctagcagcttttcatacttttcatttgtgtttactgcaagtcaattaaattgatcgcaattttaatggcgttcagctaaatggtaaatttctgtgaaaaattattattgcttttagtacaaagctgctgcttaaataaatccctttcaatacctgtgtgtattacaatatctagaatatctttattgaaaagcgtgcgtgtatctatgtttactttcaggtgtaaagtttatttgccacgatgtaatcatattttctggccatccacttgattttcaaaatacgtggaggatggcaagggggtggctaaaatcaatttggcagttatcactgcaaatggacgaccgtgtttgccttggttcaatatgattaaagctgatgaccgccatggaattgcacctaaaagtgcagtcagaaagtgacctataaatagcggagattcaaagaagtgcggacgtagtgcattatgaggacgttgacggaaagcaggcggcgccaaagtggctcctccgggtgcaaaaaggactccgagtcggatgacgatgagaataccatctgtagcagggcggccattaagaggagtgtggtctactatctcaagaacagcaccctccatggattaaagtacatcgccgaagagagcatcaccattccggaacggtacgtaagcaaggtagccgaatcgatcagcctatcgcagagatcgcggacactaaaagaggcattactttatatatagacaagtacgagcaatgccacgaacttacaattcatattttatatcgcctttcagcatcttttttggtcttgcctttgtgctggtggtgatcctttccgtgttcttcatatccaacgtgtacgtaaagtggagtgcttcgcccataatcatttcgaccagtgccaagcaaaagctgaccagcaacatgccatttccggcgatcacgatctgtaatctcaaccaggcgctgctaagcaaagtggatcgcattggacggaccagcacgaatttctcgctgctgatgggtctgtgtgaccagggcggggacacgaccatctcgtacatcggcacctggaagtacttcaaggcgatcctggtggacgtggcccagccgtgcgagaaaatgctcctgtactgcagcttcggatcgcgcgaggaggactgctcctggctcttcacctccatactgacggacgatgggctgtgctgcaacttcaatgccctgcatccgtcgtatcttatacggaactacagtgacgatgtgcggctggagacggctcatccgaatacccgttatgagctcatcgattggacaccagagaagggttatgcccgcaatttgccggagttctactttccgcgcacctcggggggcacgggcatccgcatgggtctcaccgtcgtgctgaacgcctccatagcggagtattactgcaccaagtcgatgagtgttggtttcaaggtgggatgcatggtatttagtcaactatatacttctactgattgtataaatccgctttgaaggttcttgtgcacaatcccgccgagctgccaaaagtgagcaactatggcttcgttgtgaccgcgggacgcgaggcacggatacccatcgaaccagtctatgaggatgccctgcccacgatacggtcaattaagaaatcggtgcgtcgctgcctcttctccgatgagaatgacctggcctactatcggacatattcgcgtaagaactgcgagctggaatgcgaggcgaagttgctgctacgcgagtgcagctgtgtgctgtactatctgccccggatcgatccgttggccagggtgtgcggacccaacgataatcagtgcacggatcgggtgcaaaccgagattgagtcatcgctgacgaatctgtcctgcgagaactgctggccgggttgcttcgagctaacatacagggccacactttcaacggcttcgatcgtttcggatccacgatttcaggccggcgagaatctacccgaatatatcttccacgggccatatagcaatgccagcgagatttcgatattgcacttctactacatgaccaacatatttcgcagcaccaccaagtccgagatgtttggctttaccgaattcttgtgtaagagttcaaaactaagaaatgtaactaatcttaattatatcttatcttttaaatttccagctaatacgggcggccttttgggacttttcatgggcttcagcattttttcggtgatcgagatcttcttctacatcaccgtccgtccgtactgcgcctcgcgaacactccggcagcgccacaaacgccgcctggagcagctgagctggctgacgccgatcaggatgcccgtgcgcagagcactgcgtcgcaatcgaggtggtctcctccggaatccgccgccgccggcgtacagtgatctgcaaaagttccgcgggaaactggacaagccggagacatgcaagcggaaactttggcggacgctgcaagtgcggccagtagtggatcgggcggatgaggaactgcccacctatccctacctggactaaatttatgtgtagaagctgtatacactgggaaaaacacccgttcactatactaaaaactaaaaagaaaatcacctggaagcaatgaaattgctttatctttgaaaattattaaagagcaaatgttgttgcgatacaataaaaaaaaacttattcaaaactaaagaatacaatggcacagaaaatgtaatattcaaaaatggaaataccccaagtgactggaatttctctttctgtagccacgtttctcatgttcttatttattgtgcttcttgcatagtcgaatgtttatggcccagaaaacagtacaacaataaataaatccacggcaaagacaacaaaaaataaagggcaacgaacgctgaatccacgggtaaaatgacctcagttgacactgaaaaaaaatatagtttgcaataagatattaaggttttcgaaagaaagtcgagttcatattgagggcacacttataggaattacccacattttcgctgcgtgtaggcaggtagaaaaaggggctgcgccggaaattcggactgcgccctctgcgattgcggatatcggctaatggcgctaatcgccacgcgacttcaattttaattgatacccaactcagtttctcccgctgcccttacaaagtgtaaaggaaataacgcttggttataaaataaatttaaaaaaaaattttcaatacatatattcatggatttttatatatattgtatgtatattaaagtgcgtactctaagcttaataaacaaaaaaatacaataccttttaaaaatatatttaaattttataaagtcgttataaaactggcaaaatataagctagaaaagtatttcgaaataaatatatcgaaatataccaaaatatatgctaaataagagtttgcttatatacactttttgagaagcgcatagaacggtggcaaatactcaaacctttttgcgatgattaaatacattcataattcgattgtttttggccattaagcaattgc

SEQ ID NO: 9758 - DNA, 1731 bp, DROSOPHILA
atgccacgaacttacaattcatattttatatcgcctttcagcatcttttttggtcttgcctttgtgctggtggtgatcctttccgtgttcttcatatccaacgtgtacgtaaagtggagtgcttcgcccataatcatttcgaccagtgccaagcaaaagctgaccagcaacatgccatttccggcgatcacgatctgtaatctcaaccaggcgctgctaagcaaagtggatcgcattggacggaccagcacgaatttctcgctgctgatgggtctgtgtgaccagggcggggacacgaccatctcgtacatcggcacctggaagtacttcaaggcgatcctggtggacgtggcccagccgtgcgagaaaatgctcctgtactgcagcttcggatcgcgcgaggaggactgctcctggctcttcacctccatactgacggacgatgggctgtgctgcaacttcaatgccctgcatccgtcgtatcttatacggaactacagtgacgatgtgcggctggagacggctcatccgaatacccgttatgagctcatcgattggacaccagagaagggttatgcccgcaatttgccggagttctactttccgcgcacctcggggggcacgggcatccgcatgggtctcaccgtcgtgctgaacgcctccatagcggagtattactgcaccaagtcgatgagtgttggtttcaaggttcttgtgcacaatcccgccgagctgccaaaagtgagcaactatggcttcgttgtgaccgcgggacgcgaggcacggatacccatcgaaccagtctatgaggatgccctgcccacgatacggtcaattaagaaatcggtgcgtcgctgcctcttctccgatgagaatgacctggcctactatcggacatattcgcgtaagaactgcgagctggaatgcgaggcgaagttgctgctacgcgagtgcagctgtgtgctgtactatctgccccggatcgatccgttggccagggtgtgcggacccaacgataatcagtgcacggatcgggtgcaaaccgagattgagtcatcgctgacgaatctgtcctgcgagaactgctggccgggttgcttcgagctaacatacagggccacactttcaacggcttcgatcgtttcggatccacgatttcaggccggcgagaatctacccgaatatatcttccacgggccatatagcaatgccagcgagatttcgatattgcacttctactacatgaccaacatatttcgcagcaccaccaagtccgagatgtttggctttaccgaattcttgtgtaagagttcaaaactaagaaatgtaactaatcttaattatatcttatcttttaaatttccagctaatacgggcggccttttgggacttttcatgggcttcagcattttttcggtgatcgagatcttcttctacatcaccgtccgtccgtactgcgcctcgcgaacactccggcagcgccacaaacgccgcctggagcagctgagctggctgacgccgatcaggatgcccgtgcgcagagcactgcgtcgcaatcgaggtggtctcctccggaatccgccgccgccggcgtacagtgatctgcaaaagttccgcgggaaactggacaagccggagacatgcaagcggaaactttggcggacgctgcaagtgcggccagtagtggatcgggcggatgaggaactgcccacctatccctacctggactaa

SEQ ID NO: 9759 - protein, 576 aa, DROSOPHILA
MPRTYNSYFISPFSIFFGLAFVLVVILSVFFISNVYVKWSASPIIISTSAKQKLTSNMPFPAITICNLNQALLSKVDRIGRTSTNFSLLMGLCDQGGDTTISYIGTWKYFKAILVDVAQPCEKMLLYCSFGSREEDCSWLFTSILTDDGLCCNFNALHPSYLIRNYSDDVRLETAHPNTRYELIDWTPEKGYARNLPEFYFPRTSGGTGIRMGLTVVLNASIAEYYCTKSMSVGFKVLVHNPAELPKVSNYGFVVTAGREARIPIEPVYEDALPTIRSIKKSVRRCLFSDENDLAYYRTYSRKNCELECEAKLLLRECSCVLYYLPRIDPLARVCGPNDNQCTDRVQTEIESSLTNLSCENCWPGCFELTYRATLSTASIVSDPRFQAGENLPEYIFHGPYSNASEISILHFYYMTNIFRSTTKSEMFGFTEFLCKSSKLRNVTNLNYILSFKFPANTGGLLGLFMGFSIFSVIEIFFYITVRPYCASRTLRQRHKRRLEQLSWLTPIRMPVRRALRRNRGGLLRNPPPPAYSDLQKFRGKLDKPETCKRKLWRTLQVRPVVDRADEELPTYPYLD

SEQ ID NO: 9760 - DNA, 4941 bp, DROSOPHILA
catttcggatatattttaggctgtttagtatttatttatgtatacaggaaacgcttttaatcctccaccttcgcgcaagcattacaacaacaacaacaacaacaacaactcattcccttcacaccagtgtcctcattcccgaatcgcatgtttatattcaaagttgtcaataaataatgaattgtttgaatgattaattaaatttcatgtgtatttaagctgcatttgagcattgcgaaaattggagcctatttttgggccttggcatttttttttgtatattatttggaatgctattgggatatacaccgatgcaggcaatcgaatttaaaatgttatcccttcgatgcgctggcgccttttgtccgtaaatccgcgataaaaagtcatgcagtcaatacatgtttttttttttgtcttgtacatttaaatcgcatttgggccgtaagcggatagccggaagattaagagctatctaccgcagccacgcccactcgagcagcggtggacagcgaccccaaaaaagttccagattagatataatgattaaacaaccgacgagtgagtagtgagtagtagtctactactggcacagaacgcgcaccacgcacaactcaatcaagatgaatcgcagcgttcgtggttattgcagtgatccagagggtaagcttaatcagtggagcgacgacgtcacatcaacaaccatgtccacgtacgatcttgttcccatcggatgcagtgcgtcgaattcggcgaatcgtgtgtgtgtgtggcaaaacaaattataaaaatagattaaaaattcagcatgggcaaagtagttgccgaaaattcgaactgaattgtggaagcattggccgccatccggagcttttgcctccgcgttgcccaaattgtcgtcaccgatggatcggatctatgtattcaattggttctttctcgagctattttattatttccgagcgcaagcgtttagtcgactttctgccgaagctgcgtgcgggcgtgaatctctaagggcaactaatttatataattgcaaaacgatctgaactgacattacgcatttgaaacttaaaaatttctaacgatttttaaaaaaggtaatagagaatagtgcaagtgatgtgaaaccaatcggtagtttcgtaaattgccttgtgtgtaaatcaattcgcattttcactgaatgtgtgtcgaaattttcacaactattgttgttgatgatgccacttcgaaaacaattttctgatctcatatgcctcactgagaatccagttggggatacaccatatgccacttggtgcatttaaacgtttacaaaatacaagaaaaaaagtgtgaaaaaaatcgaaagcacttttgacaaactcatgatgcagttaatttcgttgaataaaacaaaaaattggcacaccaaaaataaacaataaacatctagcactagaacagcgctactttatagcgactactacatagcgtacacagcaagaaatttgtactcattataaaatgtttaattttaatcattgggaaaacatttaattttgctgtgaattgatagaatagtatattacctatactaaatctattcaaaatgcattttaaagttgttcatgtgataaaattgtgaaaactgaaagagtatgagtgacatgattttctgatagatttttcttgcagtgtgggcagcgtggctctcgcgattttgaagcggaaaacggtctttttttccgtttcggtccgtttttattttccgattggggtgggtgggcgcgtattttgtttgttgatgtggcaattaagcgcgcaagtgtgcgcgtcgcgtagaaatcggcgtgcagagctgcagcttcgaatcgacaaactatatagtacatatatagcgagtgggcattgaagtgggcgtgggcgtgggcgtggtaggcggtgggattgggtttgtttgccatagaacggcggcggctgccgaaattcgcgtgaaattaaaagttgccgcaaatatatagccacagcactgtcacaaagttttccgcctcggcgtttccgctttgtttacttgccgaaaatagtgtcaagtttggcctagtgtgttcagttgactttatttgttcaaggcgcttcttttgtattcgccaaatgaaatggtagacaatttacattttcattacagtgtgcacttcaagagccaaggtgaatttaaatgggattcaatgtagtatctacttgcggctgggccgcattatattttcattttatttaaagcatctcatggccctaataaatttggccaagtttacttacaaatgtatatctacatatgtatgtatatacatggcacatgtgttttgcattatgccgtagggcgcatttatgctaaacaattacttttgatagaatcaaccatgtggaagcgataaattcacgcctttataatattaataagacttcatctgcatacgaaaacactgcccaaggcttctcaagagattcagatttcattagattcctggaaaaagtgggcaagataataccccttccaaagttgaaagctaagtaatttatcatgcaatatatctgtgtatgttttttgtagctttacgaagattacgatttcattttgcatacaaagatttcaaaacttgaattttcttggatttttttgaagcaacacaatgagtgaagctgccaatccaacgccctatgattgccacataggtgctggtatttaccacagcatagcaacgagttttgcagaacaaaatgtagttgtatcaccactactactggaagccactctgtccctgctcttcctgggatcggatggagccaccgccgaggagctgcagaaacaactgcgactgaagcaacgttttgccagcaatgccaaaatggccaatttctatgccgcggaactgggcaatatcacaacagatgcagataccttcctgcagctgcagaatcgtttgatgctgtcatctgaatctggagtggccgatgatttccagaagattgcacaaacctatttccatgccactgccgagtgtgttgatctggagcaaacggagaaactgcgtcgccacatcagcgaacagatcctggccagcgttggaggcggcagctggaaggatattcacgtggcaggtggttcgtcagccaataccctgctcctgctgctggccgccaatctgcagagcaagtggttcctgcccttcagtgcctacagaaccggactctatgagtttcacagcggcagccaggtgaaatcggtgcccatgctcttcgacgacgacatgttcgtgaagttcgctgagctgagggatctggatgcgcgtgccattgagctgccctacgagcacgccgaggagctgtccatgctgctcattctgcccaatcagcgtggtggcctgcaggaactggagaagcagctgcatgacctggatttgggtgcactgcagcagcgaatgcagatggagggcgtgcaggtgttgctgcccaaattcagtatcgatttcgagtgcagtctgcggcagccgttgaaacaggttcgtaaaatcaataaatgtatcctctttcccaatttcgaatatgttatcttatatagctcggctttgaggagatatttgctgcatcggcgaacttcaaacatctgcatgcatcggcgaatctgcccattgccgatgttcttcaaaagctgcgcataaatctgaatgagtctggatccggatccggacccgagttaccaaagaatgccacaggtatttaatttctttgtagttcctggtgataaatataccttatccataaacattccagaatataagcccattgtgatcagcaattcctcccgccagaaattcttccgagctgaccatccattcttcttcgccattcgcagtgagaatgtgacctatctgatgggtcacgtggtggaattttaaaaattcttaaaatttagatacacggaagggtagtgcaatatgttaacttctataaaactaagtaaaataaaactaatatttactaaacaagtaatatcgatgtatgaatgcttcggaatatatgatcgattttttgtatttgttgcaaaatgaaaatggtttaaaatttctatgaaaattattataaaaatctaaccacaatcttaccttgcatttccggcttgtcagtaatttttagtcatttaatatcatattttttttccaaattcaaacacacacttttaatagattttctaacaagagtctcgagtttatttaaagatatatctgtataatttgttttgttccagaaatagtcctgttatgtttattagttttacaattattgtattttgtatttaatctctgcttcttaatagggcttaattttggctttaattctaggaaactttaaatggaatcaaaaacatgttctcgctcattaatttgtttttttttttttcaatttcgttctcattgtattctccacaataggctttttgtaaatctagctaaaaagttatcctaagtttaaattcattcaattcgttttacatatgccatatgatgtaaactttaaattgtgttctaaatatgagtctaggttgattgatgcctaaatcactttgaaggacagtaactttgaacatttcatgaattgatagaactgaaaattggatggtcttatttgataaaaaattggtaaaaccaggagctgctaaactgattgttatccatatttggtatctatatccgatgcatacttagatagaatattcacagagatttgttttttactgtagtttagtttcgaaatttgatttacacatatgtacatctgttgatagaaaaacgaagcctcttaaatgcatcttagtgtgggcatttggcctacaaatgccatccaactcacggatattgctattgtttctgctgtccatcatcactggtgggcggtggg

SEQ ID NO: 9761 - DNA, 1259 bp, DROSOPHILA
cgggcgtgaatctctaagggcaactaatttatataattgcaaaacgatctgaactgacattacgcatttgaaacttaaaaatttctaacgatttttaaaaaagcaacacaatgagtgaagctgccaatccaacgccctatgattgccacataggtgctggtatttaccacagcatagcaacgagttttgcagaacaaaatgtagttgtatcaccactactactggaagccactctgtccctgctcttcctgggatcggatggagccaccgccgaggagctgcagaaacaactgcgactgaagcaacgttttgccagcaatgccaaaatggccaatttctatgccgcggaactgggcaatatcacaacagatgcagataccttcctgcagctgcagaatcgtttgatgctgtcatctgaatctggagtggccgatgatttccagaagattgcacaaacctatttccatgccactgccgagtgtgttgatctggagcaaacggagaaactgcgtcgccacatcagcgaacagatcctggccagcgttggaggcggcagctggaaggatattcacgtggcaggtggttcgtcagccaataccctgctcctgctgctggccgccaatctgcagagcaagtggttcctgcccttcagtgcctacagaaccggactctatgagtttcacagcggcagccaggtgaaatcggtgcccatgctcttcgacgacgacatgttcgtgaagttcgctgagctgagggatctggatgcgcgtgccattgagctgccctacgagcacgccgaggagctgtccatgctgctcattctgcccaatcagcgtggtggcctgcaggaactggagaagcagctgcatgacctggatttgggtgcactgcagcagcgaatgcagatggagggcgtgcaggtgttgctgcccaaattcagtatcgatttcgagtgcagtctgcggcagccgttgaaacagctcggctttgaggagatatttgctgcatcggcgaacttcaaacatctgcatgcatcggcgaatctgcccattgccgatgttcttcaaaagctgcgcataaatctgaatgagtctggatccggatccggacccgagttaccaaagaatgccacagaatataagcccattgtgatcagcaattcctcccgccagaaattcttccgagctgaccatccattcttcttcgccattcgcagtgagaatgtgacctatctgatgggtcacgtggtggaattttaa

SEQ ID NO: 9762 - protein, 382 aa, DROSOPHILA
MSEAANPTPYDCHIGAGIYHSIATSFAEQNVVVSPLLLEATLSLLFLGSDGATAEELQKQLRLKQRFASNAKMANFYAAELGNITTDADTFLQLQNRLMLSSESGVADDFQKIAQTYFHATAECVDLEQTEKLRRHISEQILASVGGGSWKDIHVAGGSSANTLLLLLAANLQSKWFLPFSAYRTGLYEFHSGSQVKSVPMLFDDDMFVKFAELRDLDARAIELPYEHAEELSMLLILPNQRGGLQELEKQLHDLDLGALQQRMQMEGVQVLLPKFSIDFECSLRQPLKQLGFEEIFAASANFKHLHASANLPIADVLQKLRINLNESGSGSGPELPKNATEYKPIVISNSSRQKFFRADHPFFFAIRSENVTYLMGHVVEF

SEQ ID NO: 9763 - DNA, 4007 bp, DROSOPHILA
ttggccattttcggggcagggacgctgcacaattaccaaaacaaagagtggccgaagcaaacataaacacgtgaacgtcttgctgctatttgcatttgtcaaataaacgtccgaaatggaagcttaaatcaaaaattcggactgcacttctgatggcttgttattttcgactcgagttagatgaactttgaggctggctgttgaaatgcaaaagagcaagttgcctgaattcggaataatggaggagcaggtggcccggtgggttcaagaaactcccatttcacacttcgggtttcgtttggactcgttttctagatactgcccagtgcccttcggccataactttcgttctgggccatgttcctggttcaacgaaatctcaatatttattcattctatatattatttaatcgcgcatacgcagcgtttaactccggccacgccagcagaaaacgaccaaaaattgtcatcataacaccgactttccgctgttgtcttgacgtcttgtcactttggagtcgccgcacgttcggcctgccgcatcacgtattaatgagtgctttccctcccctcccagctcgccgcaccccgtccactacacgcccacgccgagatccttggggccggaataacaatcataatacttatacttattgcactcaggtcgcccgtgtagacaaacagttatggcatttaatggcaaagaaaaacacggctccatgaggacagtcataatttgtgttctgctctgttctggtcggctttgttccagccagccgagagaagcaatcaaaaggcagggaatccacttgggaccctgactcctcctcctcttcctcctcccacgctccactcgaccaagtgtacttcagcttgtattcattgcaaagttgaattgtttattgcactcgatgaaaaccacttgattaaatgcacctggtttgtcactgccacttccgcctgcaaactgcgaactggcaactgggaatcgcgctcctcttcagtagccaaagaagttgaagccgcagagcagtttgtccggccggcgaatccgcaggatgccgaactggaagaccgacatgtcgtcgtcctccgccatgttcatgtccagggccatcagcttctcggcggccagcggatgccaggagccgaatgtgcaggcggaattcatctgggaatgaaggaagtcaggggatcaggagagtcggctgagtaaattaattttcgagcacacctctttgctgtagtagtgacagcgtccattgagtcgtgtggacggcacgtactccacgaagtccacctggggacagtgcggcaggagcagggccagtcctgggaaggcacataatagaaatcactcagcaattcacattcgagaacccaattttttctgcaggcgcaaggcacacaattccaagcatctgaactttatagcttacctataaaaccggaactggggggattcttgcttatcggccggtttccggcaaacatctgcagactctgccacaggcgccacacggagtggggatcgatgaggaaggcacgtgacttcggatagcgccgcctgtacagctcgtagttggaaaagaggtcgtagtcagcgctagtgagccaatcctccagtgtgccattgtacttgcccggatcccaggcggcgatcgtgacgttccggaagatgggggctcgggtgaagtcgaattccggcttggtgaccacctggggaggggaaaagttgattgcagctgcaatcgaaagtgcggaaatgcgcttcagcctacttgcgaattcaccacacggatcgtggttttgctgccaacatccacctcgtgtccttgcgtgggcgcatgattgaatctcatcacaatgtcgtgcgtgtctgggagcagggcggagcgtagtgggccaaaatgtatagtaaacggaattagagtagacggctaaatcaaaccgatcacgagcggcctcttccgactgattgtgcatgcaggtgggtgcactgcagttgcaaacagcgaaacttaacaatgccagtttaacaagtaaaattttactttatgagtacaaaaattagtgctcaaacagaaaaaatagaatcatgttcttatgcatactgctttcagatttactcaccaatgaagcggcctaacttggagccagccaaggatcccgcactggagacgatggcgcaggtcttgatgtctttgacgttgcggaagagcttttgacgcggaaagagccggccgaagggcagtttgttgaagggcgcgtccttgcggcgcaggacccgcacgcccgcctccatgaccaggcaggtcgaggggtagtactgctcctcgaagctgtccccaaagacgggcttgtagtccacgttgtagtggttcgcctgcgactcgtttaccgactccaccatggccttctcgaaggcccggacaatgcgctggcgaaactgctgggtcttgttgtggcacagctccgagtgcttgtcgtggcagagatacagcttggggctcagcgtgagcttggtgttcttcgagaccttgagtcggggatgcggagccagcttggacgagttgatggccggattctcgcgactctccacgatgaacttctcgttggggttccagcgcacgtggaacacactgcgcggcacgcggtggccagtggtcccatttcctgtgggaatgcatttccaaattactttgcgcaatcgcctctccgtgccagtactgttttcatacgcaccgttgccgggctgccgcgaattcacctcgccgggttcgcgtcccggctgagctttcacaccctggatatgcccagattgaattattaatgcggcgcacacggcgataatgaggcatgaaaggagggcctgactttgacccgacgatgcgcgtgtcacttgcctcattctccactcataatacgctggtcgaacgagggctcaattaatatttaagtgagctgaagatgctcgcctcacggcaatcagcgccagaagccaaaggactcaattcgtaaaaggatgtaaagttgaaacaatgcaagcctattcggattctatcaatggcatcttgtattcatcttatattcaaccaaattgtgactaaaggatctgctaataacttttaacttttaacttaactttttaaagtaaatatgggcttatttttaattaggcttcaatgaactttaaatcaattaaaatatttgaaaaaaaaaccaactttaaatttatcaaaataaaaccataaaatgcgctctagcaaccattgacttaaatattaatctaatcagatactactattggcagcggcacccaagtttttgcacaattttccctctttttctttaacgacaattaccaagcgatcaaaatgttccgagagtaggattgaattttattcccaattatcgagaaattcccaacttatttgccgcgtcagtgtcaattagcattgacctttagctcgcacttaagcctgagtagcaattcatgtagctgtcagttggcataaagttttcatgccgtataaatgcttttggacggattcacaatttcacttttctattttggactttttcagctggcgccaaaaagtatgcaaatatatacgccactgccgcgagcaaacagaaaagctagttgaccgtcgacgcacaactagttagcactaggcaaatatttagcgccacaaaaatacatttcaaaggcggataaacacgtaccgacagtgcgttcacatgcagcccgcaaaactcggaaaagcagccggaaaagcgaaggattttccggcgacgcgtccgcagttcgaactttccctttcgccagccgaaacgtatctgaaaactcggcagacggcggcacagtgccccggccaatggagccgaaggactcgtctgcgaaggagccagcttcggcagcggcattccgactgccttcgtcctttgcccatcgcctcgtcctcctcgctggtcgcgcctaattagagtgtttgctgttgcgg

SEQ ID NO: 9764 - DNA, 1452 bp, DROSOPHILA
ctttggcttctggcgctgattgccgtgaggcgagcatcttcagctcacttaaatattaattgagccctcgttcgaccagcgtattatgagtggagaatgaggcaagtgacacgcgcatcgtcgggtcaaagtcaggccctcctttcatgcctcattatcgccgtgtgcgccgcattaataattcaatctgggcatatccagggtgtgaaagctcagccgggacgcgaacccggcgaggtgaattcgcggcagcccggcaacggaaatgggaccactggccaccgcgtgccgcgcagtgtgttccacgtgcgctggaaccccaacgagaagttcatcgtggagagtcgcgagaatccggccatcaactcgtccaagctggctccgcatccccgactcaaggtctcgaagaacaccaagctcacgctgagccccaagctgtatctctgccacgacaagcactcggagctgtgccacaacaagacccagcagtttcgccagcgcattgtccgggccttcgagaaggccatggtggagtcggtaaacgagtcgcaggcgaaccactacaacgtggactacaagcccgtctttggggacagcttcgaggagcagtactacccctcgacctgcctggtcatggaggcgggcgtgcgggtcctgcgccgcaaggacgcgcccttcaacaaactgcccttcggccggctctttccgcgtcaaaagctcttccgcaacgtcaaagacatcaagacctgcgccatcgtctccagtgcgggatccttggctggctccaagttaggccgcttcattgacacgcacgacattgtgatgagattcaatcatgcgcccacgcaaggacacgaggtggatgttggcagcaaaaccacgatccgtgtggtgaattcgcaagtggtcaccaagccggaattcgacttcacccgagcccccatcttccggaacgtcacgatcgccgcctgggatccgggcaagtacaatggcacactggaggattggctcactagcgctgactacgacctcttttccaactacgagctgtacaggcggcgctatccgaagtcacgtgccttcctcatcgatccccactccgtgtggcgcctgtggcagagtctgcagatgtttgccggaaaccggccgataagcaagaatccccccagttccggttttataggactggccctgctcctgccgcactgtccccaggtggacttcgtggagtacgtgccgtccacacgactcaatggacgctgtcactactacagcaaagagatgaattccgcctgcacattcggctcctggcatccgctggccgccgagaagctgatggccctggacatgaacatggcggaggacgacgacatgtcggtcttccagttcggcatcctgcggattcgccggccggacaaactgctctgcggcttcaacttctttggctactga

SEQ ID NO: 9765 - protein, 451 aa, DROSOPHILA
MRQVTRASSGQSQALLSCLIIAVCAALIIQSGHIQGVKAQPGREPGEVNSRQPGNGNGTTGHRVPRSVFHVRWNPNEKFIVESRENPAINSSKLAPHPRLKVSKNTKLTLSPKLYLCHDKHSELCHNKTQQFRQRIVRAFEKAMVESVNESQANHYNVDYKPVFGDSFEEQYYPSTCLVMEAGVRVLRRKDAPFNKLPFGRLFPRQKLFRNVKDIKTCAIVSSAGSLAGSKLGRFIDTHDIVMRFNHAPTQGHEVDVGSKTTIRVVNSQVVTKPEFDFTRAPIFRNVTIAAWDPGKYNGTLEDWLTSADYDLFSNYELYRRRYPKSRAFLIDPHSVWRLWQSLQMFAGNRPISKNPPSSGFIGLALLLPHCPQVDFVEYVPSTRLNGRCHYYSKEMNSACTFGSWHPLAAEKLMALDMNMAEDDDMSVFQFGILRIRRPDKLLCGFNFFGY

SEQ ID NO: 9766 - DNA, 6277 bp, DROSOPHILA
tgctgctgtttctaccgataagagccactgaatgcggtctgttccagatgaaatctcccaatcaactaacagagaaacgtttagtcagtccgctgatcgcactcagagagactgaaatacccctaggaaccgcccagcgcactctttcgctcaaaaaacaaagctgaatttgaaaacaaccagtcggggtctccacacaaaaaaaaaaaattgttttaaataaatataaagattgcaaataaaatgtgtgcttattttaagaagaaatgaagatacttttctttgtgttgatttgcaaagtataaagcttaataaacctacattatatatcataaattcatatgttcacttggagtgctaatcataattattcgaaaccatttctgtaaaatcagacagtaagctttcccaacattttccagtgcattgtggcaaattgttgtattaattgagttaattgtagcgcttccaagccgatcatccaatcgcgcgtgcaacgcccgcacaatgcgagctgggcgcgtaaagagcttcgttccgcccgcgcagattgacccttctcctagccaccggttgctcccctttgaccgctcagtctgccgtggtgtcaattgagtgcgtgttccgctgctccggttggacctaaattgaacgtggaaaagtggaacgaagcaaccaggaggagaactcggtgagaaccgagtgaatccagtggaactctcggctgtgtgggggatgagtcaaaataacattgcagacttgtgaattaaatcattgtcgtcgatgttgtttgttgtgagcacgattgttgtgtatacccggctaaaagtcgcattgttgttgtgcgttttattagcattgattatggatttaattcattttttgtgtgtgagcaaataaatgacgagtacaggtttgcagtcgctaatgggtagatgtaagttgaagattttacaactgttctgctgatattttaaaaaccttaaaatgaattgctcgttctaaaaaagtctgctttattagcaagttcactacaaaattcttataaattagtagtcatgtaagaaggtggatattaaagtgtaaagtgagtatatgctcccttaaaagcgtagcaagctctcattgattttctcgtagatccaatcgatatagtgattcacacggacgtagacacccggtctgttcttgaagccgcagtgctgaccccacgaaataagcccgtacagagtctcgccatctaagaatataaattcatgaaaaatagtacgtgtctcagaacacatgtaagctatgcataccgtcatcggagcagacaagtggaccgcctgagtcaccttcacaggcatccacactctcgtccatggagccggcgcagaacatgcctgaaataaggtggaacatgtgggttatttcctgcacaaactagttttacgctcttagtacatctatttaatgggactaatttatcaaaataaagcctaagtggtacacaccttccgacatggctgatccatacacattagattgcttgcatacgtgatcggccaaaatgggaagctcggcggaacccaaaacttgcgcaggagctataaaaaaaagcaataaaaatcatgtttattagtgcccagaatcgttatctcataaactactcactggacactcccgatttaatagaaccccatccggagatggtgcacttgcggtcctcgacgagctcagcattcttatctggcaaacaaatgggctgcacatagtcactaaatttcagaggagtcttcaacaccaccagggcaatatcgttattcatatgtgttcccttgcggaagttctcgtgtagataccagttctcaatgaacgaatcgacctcggaggactcggctatgtttgcgtagtgatctccgacgcgcacaaagtaagctcctttgggacttccatacagacagtgagcggcggtgaggagatggcgcttggatattaccacagctccacaccaatgactggagataccaccacgtccgcgggttctgatggtagcttgccaagggtgacgaccccgctgtgccacatttcccctaaccacgcgctcctctcggtgggcgtactcatcggtcaggtcatccttgaagattccgcatcgacgaggagtatgtactgccttgctcgaccgttcccacagcccaatttgtgaataggtcttcggtgtggtttcccgtcccagggatctaccacctttaatctgagtctgggaatacctctgactgcgaggtggtggcccagcgctgcagtgcagcgcaacatcttcagtgtgattgcagttgtgctcgccccagttccagtggttacattggtcaatgcttgtctcgtttccaaagcacattacctgatcgagccaaatgggtccattgctgttgccaaatatgttcttttcgattttctgggaagtataaaaaaaaaagttaaaacaatttatacggaaattaaagattatgtaataccgctggtccaaaaaagcccattgagttgcaggcaacttgggcagacttgagattaaagtcatcatcacaaacactgccccatacgccatggtgttttacctccaggcgtccttcattggaattccgaccaccctctaaacggtattgaacgggagcctaagggtatgataaggattacattatgaagcatgtggaaactttcaattaacccacctgacagacggctgcacactcatccgacttatccgcacagtctggggtattgtcgcacacaaaggctggtggtatgcattccttggaagtgtgacacagccagtagttattgggacacttcatcaccggaactttgcaggtcacgccagccacttcatcaacaccgcagttgtgaacaccccagcccttgaaggcgcactgacccagcttggtttcattgccatggcactcgacctcatccatcaggtagttaaaatcctggtttgggggagcataaaaggagctaccacgcacttcttgggcgcccatctgaaagccaagttctcggcaaacgacatctgcatccttcaaaccgaacttgtcatcacacacatatccccattgaccattagctggaaaaggtttagggataatttttgtgttggtatgatagtgtattaagatttctggggaaccactcacccttgacttcgatacggcccatgtttggactctcgccccctgatagccgcacctcgtagtccgatggcgggcagttagcctcatctttgccattggggcaatttttcttcccatcgcaaatctcctccttcttcaggcattggccgttgccgcaatcgaaatcacattgggtgttgaagcttgaacgggtagctaatttgggagtcacttcctcagcattggaattgggtagcagatcccagtcatcattgagatcctgatgttgcggagtttcattctttagtggaaatgggttgggtagctccggatgacgaatatggaagtcagcactatgttcatgtgggtgacggtggtggtggtggtgttggtggggagaggaattgggatggtgctcggtaaacggatcgggtaaatttggatgacgccggtggtagtcacgactgtgaccaggcgcatgccaattggttttcattgtagttgcggttagggtgtcaggatctaactcagccctgcgagtgctccgttgaaagtttgtcgaggcgtatgtggtactgggatctagggtctgctcggttcgggacgtctccctggcatctggaaaaacatagtcgtcgtcaacggaatccaagctttcctgttcacccgctttaataagttcggcgtcaaagtcagggtctgttttaggtgtcttggaagttggccttggtgtggtggtggtagtggttgacggcttactaattacagacactatagccgattcagcctgttgagcaagttgctcttgggcattcccactgtgattgaaatagggacgcagcataagcttaagagcttctttaattgccgcttgggagttgggaccagatgcagattgatttcgattaatgcttggatttgtcgactgaggactataaaacttatggtcgaaaggcggaggcaccaatacatttctcactgttgtcgttaagaagtcgacatcgtcgtagaaaggttcatccaattcaggattgaaaggatcgggatcttgtgctggagtcgtactagtcacaggcactttggcccaaggggcgtctctagaatgggcaattcctgcataagagggactatagtgtggttgtattggatttcgcagagaggttttattatccacaggtggataaataggaaatgtgtgcaatcggttagccaattgcggagttggagcctgggaagatgaagggttaggagttggagtgggtgttgtgttaactggtgaatctggtttgggaggtaagagaccaccataaagattggattcattatacaaaggataccctggattagggctatgccttgggggaacttttgatccgtgaagcccattgtcaggatccaaaggtttttgctggtctgggtaaccactggcgtcagggctggactcaactggttgctgtctaccaattggctttgagccactgggtaactgatctggataaaagcgtggtggcgatcccggatacggcggtagtccgttgtgaagatactgaggtattggttcctcatcatagtccaagttaatgggtttctgtccgggcaaactatcttgggattggggttccttggcaccaggagaatggggagaataatctagatttaatggttgctgtccgcccaatggatccagtggtggcataggtttccatccattgccaggcgagccataatcaattctgcgactatagttctgacgcgacggcacattttgtttgtcttcaacgggctggccgtagtagacacctcctgtattggtcggtgccatgggggccaatggagtcttattggtaggataattacggttcggctgtagcgatccctccacatatagagtactttgtgtaggtccacgctgaacgtaggatgtctcctggccagaccaacccgggttgtatccatgatgatgatgatgcggattttgttccacacctacacctgaaggtcgctgcatgttcatatccgtccaacggtctccgatcacccgcgttgtcgtggtagttctggttgtatatcggttgccgaactgatccctgccagatgtctcatatgacttggattgacggttgtctgtaagcagagaagggaattttaaaaaggggggcaagatttatgccaagggttagtaaccattagagggatccatccaaccggaattaaccccccgaaccaaatagtcagtgcgatcataactagagagtttatcatccagcacgcacactctgcgagaaacgctgaaaatctgttggctcggacagtcgtacatctccgcctggcctggtccacaccgcaggtacttggtgggcaccctaggatgtggtagggttccagttattccttcagggcaggctgtgactgcgcctactatcatcattttctgtgtccactcgaaaatgatgtgcagttcattgatcgtatatagacgatcctcacgttgcacctgatcaacgggcttacagaatccatgagagatactatagtgttgttcacccgggcaatttaacaatttcattccgctcggtccacagctcaggtactttgagcaatcgaatggatacacaacgaagccaagaaaatctctaggacagtccaaagctgcaaggaaatgtttaagggtaaaaaaaacatcgagttcggagtttttcactcacaattatcctgataagtttgagtcctttcaaaggggacgcgatccgttttatttacgtgctgttcgggcaagcagtagccttgggaaacactgaacacatcgaggggctgacattgcctaggtaacgtatgaccatcgatgcaggtcagatagcctgtagcgtcgaaaggatttggaaagaggccgctaatcttttctggacacaacagaggagttggaatagcatagggcgcatcttgcccaggataatggcctgaaccagttgattggaaaggtggctgatatccaccagttgatggctgtggtggctgatatccactattttgttgagaaagtggtcggtaacctaaattcccttctaaaggaggctggtagcctccgtttaactgagaaggtgccgggtaggctccatttaactcattgg

SEQ ID NO: 9767 - DNA, 3778 bp, DROSOPHILA
acagacaaccgtcaatccaagtcatatgagacatctggcagggatcagttcggcaaccgatatacaaccagaactaccacgacaacgcgggtgatcggagaccgttggacggatatgaacatgcagcgaccttcaggtgtaggtgtggaacaaaatccgcatcatcatcatcatggatacaacccgggttggtctggccaggagacatcctacgttcagcgtggacctacacaaagtactctatatgtggagggatcgctacagccgaaccgtaattatcctaccaataagactccattggcccccatggcaccgaccaatacaggaggtgtctactacggccagcccgttgaagacaaacaaaatgtgccgtcgcgtcagaactatagtcgcagaattgattatggctcgcctggcaatggatggaaacctatgccaccactggatccattgggcggacagcaaccattaaatctagattattctccccattctcctggtgccaaggaaccccaatcccaagatagtttgcccggacagaaacccattaacttggactatgatgaggaaccaatacctcagtatcttcacaacggactaccgccgtatccgggatcgccaccacgcttttatccagatcagttacccagtggctcaaagccaattggtagacagcaaccagttgagtccagccctgacgccagtggttacccagaccagcaaaaacctttggatcctgacaatgggcttcacggatcaaaagttcccccaaggcatagccctaatccagggtatcctttgtataatgaatccaatctttatggtggtctcttacctcccaaaccagattcaccagttaacacaacacccactccaactcctaacccttcatcttcccaggctccaactccgcaattggctaaccgattgcacacatttcctatttatccacctgtggataataaaacctctctgcgaaatccaatacaaccacactatagtccctcttatgcaggaattgcccattctagagacgccccttgggccaaagtgcctgtgactagtacgactccagcacaagatcccgatcctttcaatcctgaattggatgaacctttctacgacgatgtcgacttcttaacgacaacagtgagaaatgtattggtgcctccgcctttcgaccataagttttatagtcctcagtcgacaaatccaagcattaatcgaaatcaatctgcatctggtcccaactcccaagcggcaattaaagaagctcttaagcttatgctgcgtccctatttcaatcacagtgggaatgcccaagagcaacttgctcaacaggctgaatcggctatagtgtctgtaattagtaagccgtcaaccactaccaccaccacaccaaggccaacttccaagacacctaaaacagaccctgactttgacgccgaacttattaaagcgggtgaacaggaaagcttggattccgttgacgacgactatgtttttccagatgccagggagacgtcccgaaccgagcagaccctagatcccagtaccacatacgcctcgacaaactttcaacggagcactcgcagggctgagttagatcctgacaccctaaccgcaactacaatgaaaaccaattggcatgcgcctggtcacagtcgtgactaccaccggcgtcatccaaatttacccgatcctgctgacttccatattcgtcatccggagctacccaacccatttccactaaagaatgaaactccgcaacatcaggatctcaatgatgactgggatctgctacccaattccaatgctgaggaagtgactcccaaattagctacccgttcaagcttcaacacccaatgtgatttcgattgcggcaacggccaatgcctgaagaaggaggagatttgcgatgggaagaaaaattgccccaatggcaaagatgaggctaactgcccgccatcggactacgaggtgcggctatcagggggcgagagtccaaacatgggccgtatcgaagtcaaggctaatggtcaatggggatatgtgtgtgatgacaagttcggtttgaaggatgcagatgtcgtttgccgagaacttggctttcagatgggcgcccaagaagtgcgtggtagctccttttatgctcccccaaaccaggattttaactacctgatggatgaggtcgagtgccatggcaatgaaaccaagctgggtcagtgcgccttcaagggctggggtgttcacaactgcggtgttgatgaagtggctggcgtgacctgcaaagttccggtgatgaagtgtcccaataactactggctgtgtcacacttccaaggaatgcataccaccagcctttgtgtgcgacaataccccagactgtgcggataagtcggatgagtgtgcagccgtctgtcaggctcccgttcaataccgtttagagggtggtcggaattccaatgaaggacgcctggaggtaaaacaccatggcgtatggggcagtgtttgtgatgatgactttaatctcaagtctgcccaagttgcctgcaactcaatgggcttttttggaccagcgaaaatcgaaaagaacatatttggcaacagcaatggacccatttggctcgatcaggtaatgtgctttggaaacgagacaagcattgaccaatgtaaccactggaactggggcgagcacaactgcaatcacactgaagatgttgcgctgcactgcagcgctgggccaccacctcgcagtcagaggtattcccagactcagattaaaggtggtagatccctgggacgggaaaccacaccgaagacctattcacaaattgggctgtgggaacggtcgagcaaggcagtacatactcctcgtcgatgcggaatcttcaaggatgacctgaccgatgagtacgcccaccgagaggagcgcgtggttaggggaaatgtggcacagcggggtcgtcacccttggcaagctaccatcagaacccgcggacgtggtggtatctccagtcattggtgtggagctgtggtaatatccaagcgccatctcctcaccgccgctcactgtctgtatggaagtcccaaaggagcttactttgtgcgcgtcggagatcactacgcaaacatagccgagtcctccgaggtcgattcgttcattgagaactggtatctacacgagaacttccgcaagggaacacatatgaataacgatattgccctggtggtgttgaagactcctctgaaatttagtgactatgtgcagcccatttgtttgccagataagaatgctgagctcgtcgaggaccgcaagtgcaccatctccggatggggttctattaaatcgggagtgtccactcctgcgcaagttttgggttccgccgagcttcccattttggccgatcacgtatgcaagcaatctaatgtgtatggatcagccatgtcggaaggcatgttctgcgccggctccatggacgagagtgtggatgcctgtgaaggtgactcaggcggtccacttgtctgctccgatgacgatggcgagactctgtacgggcttatttcgtggggtcagcactgcggcttcaagaacagaccgggtgtctacgtccgtgtgaatcactatatcgattggatctacgagaaaatcaatgagagcttgctacgcttttaagggagcatatactcactttacactttaatatccaccttcttacatgactactaatttataagaattttgtagtgaacttgctaataaagcagacttttttaga

SEQ ID NO: 9768 - protein, 1186 aa, DROSOPHILA
MNMQRPSGVGVEQNPHHHHHGYNPGWSGQETSYVQRGPTQSTLYVEGSLQPNRNYPTNKTPLAPMAPTNTGGVYYGQPVEDKQNVPSRQNYSRRIDYGSPGNGWKPMPPLDPLGGQQPLNLDYSPHSPGAKEPQSQDSLPGQKPINLDYDEEPIPQYLHNGLPPYPGSPPRFYPDQLPSGSKPIGRQQPVESSPDASGYPDQQKPLDPDNGLHGSKVPPRHSPNPGYPLYNESNLYGGLLPPKPDSPVNTTPTPTPNPSSSQAPTPQLANRLHTFPIYPPVDNKTSLRNPIQPHYSPSYAGIAHSRDAPWAKVPVTSTTPAQDPDPFNPELDEPFYDDVDFLTTTVRNVLVPPPFDHKFYSPQSTNPSINRNQSASGPNSQAAIKEALKLMLRPYFNHSGNAQEQLAQQAESAIVSVISKPSTTTTTTPRPTSKTPKTDPDFDAELIKAGEQESLDSVDDDYVFPDARETSRTEQTLDPSTTYASTNFQRSTRRAELDPDTLTATTMKTNWHAPGHSRDYHRRHPNLPDPADFHIRHPELPNPFPLKNETPQHQDLNDDWDLLPNSNAEEVTPKLATRSSFNTQCDFDCGNGQCLKKEEICDGKKNCPNGKDEANCPPSDYEVRLSGGESPNMGRIEVKANGQWGYVCDDKFGLKDADVVCRELGFQMGAQEVRGSSFYAPPNQDFNYLMDEVECHGNETKLGQCAFKGWGVHNCGVDEVAGVTCKVPVMKCPNNYWLCHTSKECIPPAFVCDNTPDCADKSDECAAVCQAPVQYRLEGGRNSNEGRLEVKHHGVWGSVCDDDFNLKSAQVACNSMGFFGPAKIEKNIFGNSNGPIWLDQVMCFGNETSIDQCNHWNWGEHNCNHTEDVALHCSAGPPPRSQRYSQTQIKGGRSLGRETTPKTYSQIGLWERSSKAVHTPRRCGIFKDDLTDEYAHREERVVRGNVAQRGRHPWQATIRTRGRGGISSHWCGAVVISKRHLLTAAHCLYGSPKGAYFVRVGDHYANIAESSEVDSFIENWYLHENFRKGTHMNNDIALVVLKTPLKFSDYVQPICLPDKNAELVEDRKCTISGWGSIKSGVSTPAQVLGSAELPILADHVCKQSNVYGSAMSEGMFCAGSMDESVDACEGDSGGPLVCSDDDGETLYGLISWGQHCGFKNRPGVYVRVNHYIDWIYEKINESLLRF

SEQ ID NO: 9769 - DNA, 6181 bp, DROSOPHILA
atttcgagacaaacaagttttcgatctaaaaaaaagaaaaataaataataaataaaattcccaatcaattaaagaaaagaaaaagtacagattaaagggaatcgaatcggtgaataaattatgcaaaaatatcacaaaagttcttagccgaaagtcaaagtatttataatggtcaagacgcgtgcccaaaatctcgtctcgtgacgcgtttgccgctttatttcggaactttaaaaaactggtcgcaaagcccgaccttgacactcacttttctaaacaatcgactctcggatccgagacaattttttggccaagatctcgtcttctttcttggccgctttacaaaccgcccgtcagtcttccgccggaccggagatggaacgcacggatcgcgtccgctgaacagagtttcttttagtattataatattttcccccaagctaatcacttaaaactaagagctcttgaagaactgaaactcttacccaatcggcgtcagtgtgcagcgtgcaaacaataaaacaaacaaacagccaaacaaaagtgcaaaaaaaaaaaaaatcaacaaaaaatcttacaaatacgtgcggctgtccatgcaacagcatattttaatacataattagccagagatcgtggaagcatctcggtgcatgtgcacagtatatacagtatatatatataaaatttacatataattggtaaaaatgtggcagggaatcgtgtgcagcttggctttatgcctcgtcggattggcgggtctcggcatcgccaacaatctcgccggctacgaagggtaatatcatcagcggctacttgcattaattttaaattaattttaaattacaacgttaccaaaaggtagcaaaaaagacgaaatacgtaatacacatcaatttaaaacgtttttatgttggtcagtggacgagtgttgtttctagctgattaactggttttcgcatctcatccatgatcagggcttttttagctggttttgctaatggcccgtatcaggtatacaactttaaagaacataaaatttaaagtccttcatattgcatttatcatatttggatatccagattagatacatagagatcattaggaatgtaatccaaaaatagtaatgattgcaatagattaaatcgaaggagtcttttagaaattgcggcattttgttgcttcttatttttagaaaatttctcatgcttgttattttgagatagttagctcacttatttaatatttataatttttgtaaagaatattgctctgatttagaaatattttgattgtgtgcttttcgttgaccaatgaaaaacttgatttgtgttttgactactagtgcactttgttgaacatcttaagatatgcaaacgccataaagccgcatctaatcataggataaacaaaagctgtatgtttttaaacaattttttttttcttattgttaaccgaatccatggtcattggccgtgattagaagtcatcataatgagcagggctaaacgttttgtcgtttggtgaccaacaaaccaacaaacagatgtacatacatacatacattcagcaattccgttgataattgccagacatttgcaattggcaagcgatcgcagtgcaaactgtttgccaaacatgccacgcccccaatcgcgcatacctcccctcctgtcattggaccatgtggcgtatgagtaatgatggctttgtggttgcagaacttccgactggaagaccgtatcgaaatgaaaatcatacttccgattaatactggccagatgtttggtttcctaaccgttttcaagttcaaaaacataaagatatgcatgcagagtgataaataaaaattttcacaaggccaagtttcgttggacaataggctttgatttgcttaaataggcgttgggaaaatttcgaaaaaaatcgtaacttttaaagctgaaaaatgcgccccgctggctattttattttggccaactgttcggggcgtctttttaaattatcatcgaatgccgttggccggctcacgtgattagcttttgtgtggcatatgaatagcatatcgtaatgcaacaatgcccctcactccctgccacccacgaaatcgcataatgcaaacgagataaatatgtatgaatgtagggggacctaagtcttgttgcttcactattcacatattttcatctattttcttataaatgtgtgtttgtgtggaatttcgagagatgataaattggccaccgattcgctgcgaggtggcaaagagccaacaaacagcggccagcagacgttttgcataaatttatgaatcaacaactcattttgacgccaggcgagggcgagccataaattaatttgttgtccaattagtttgagacatgtggagcaatcatcgggatttcccgccgctagattatgattatctggctattggtgtatcagttaattagaaaccactaatgaccacatcacactattagtttcaaacaaaaaagaaaactagcaaaaagttcgaaaatgttttgctgttaaattaattaaacgcctgccaactaaatgttaatatttatttgtccaaacaacgcgtatctctacaatgaattaattaacacgtatccagcaaaacaatttatactccaaccttgacatactcactggaaattatggctttaaaattgttagcaaaattaagttaatcttattaaattttggctaaattggcagtgcataaaatatggcagtataaaccatcttttaatgaataatataaattagacttatagcactttatctaaacttgtaattttaattttaattattataaaaattgacagcattttagtaaatttaaaaatccttatttcagttatacaaaatacacggtgcaacatggagacgagaatgccttcaagtacatggtcgacctgcagacgaatgacgcggagctggacttttggttgctgaccagaaactcctccgtgctgacagtgagtccccggcggaagacacagttcgaggcgagtctttccagtttgggagttagctacgagatgcagccgctcatggagctgatggcggcccttcaagcgaacagttcctttgcggatgacaactacgatggggagtacgaggagtgccagcaggatgagtgcgagcaggcggagcgaccacgtcgaaggactcgtcgtcaggctcgcggcttcttctcgcactatccgcggtatcatgaggtgctcagcttcatgagtggcttggccgccagatatcctcagttctgccgctatgaatccttgggtcgttccaacgagggtcgccacatagctgctctctccatttcactgaacagtagggtacgtcctcgtcgagtggcctatatccaggcagccacccacggtagggagtggattactacgcagaccgttctctacttggcctacgaactgctgagcaatctgcgcgccttcacgagggtcctgcaggatgtggagatctttctggtgccgctggtcaatcccgatggctatgaatacacgcacacaacggtaagtgaggggtttaactgacttatttactaatgcttataatccaaataagttagatacatttgttatatcagctagggcaactaataagtattttttgcgcaaaaaaaaacttaaatttatttaattatacaacgaaatatcaaagattcaaacatgtgttaaacaagtcttgctcatttatcttgtaatacatatacgctttaaatatccattgaaaagcttagggaaaacacattaattattttagagaaaagtgtcatttaaaaagtgcttggatgtcacgggatttaaaatacatttgaaatatatatttaatgttcttgcgtgcccataaactgccagtctaaatgaacaaataaattttgagcataaggaactgaaaaataaatatttcacacaatattcaattgctgttatgtttgttgtttattgaatttaataaatattttaattgaatccattgcaggatcgtttctggcgcaagaaccgtcatcgttatgcgggtcattcctgctccggcgtggacatcaatcgtaactttggcaatcactggaactatcagggagccagccagaacgtaagtcacacattgaccccgacattgaccttcgccattgagccacgtaatcctcgccaaaacccttttcactcccaaatccaacagctctgctcggaggtgtactcgggcactgcgcccaattcggagccggagacctcggcggtggtgcggtatctggaattcaatcgaaaccgtgtgaaactcagcctggatgttcactcatttggcaaattcattttttatccctacggctatgcgaagtgagtacgggcggaaagtggagtgcagccaccctgatttccatgttgcatgttccatgtccgaaaatcctcggctgcgggtgaaggcgtcaccagcgggtggcccagaaagaaattcaatttacttttcaattatttgctaaaagcaattaaacgcgaatatttctgccaatgcaaccatttaattcatttttgttgcactgctcgttgaatactaaagtttaaactgatgtcttgaaatatgacaggcaaagtacattttttttaataatttgtaatattatttcaagtcataattaaaatcttttaaaatatgccaggttttctttgattgcaaaaagttaatataaatgttacttgaaatttttaacacttaaaaaataatattttaaatttgatgaaaagaaatatttcttattaaactgttcaacgttattattgtacattagatacattgttttaccattcagctgctaatatgttttaaattttgtatataatctataatttctctctgtgtagaaacaccgtgccaccaaccgtgggaacgctgcgctcggtggctctgagggccgccaaccagatcggcaggtaccgtggaacgcgctacaccaccggcacctccgcctccattttgtacgaggcctccggcagcttggacgacttcgcctatggcaatctgggaatcccgctgtcctacacgctcgagctgcccggtgacgagttccatgtgcccgcccacgacatcatccacgtctgcaaggagacattcgccggcttcatcgagttcatccggcacgtcagcctttactagaaggcgccactgtatttcctaagccctaaagcaattgaatttattgtttgttaaaaactaaaattataagtcacctcgttgttaagcattaaagagatgaatagtgaataaatattgtcgtttaaatatttttttatcacccgaaaggaatgcatatttatttatgcgcatatattcgttgattttatatgcatttgctgaatgaattgcagattgctgttaattaaaattagtgtagccaaaaaatgaaaagaatgttaattgaatatatgaaagtgaacaacagttattgcggacttgattttgaaacaaaatttgatttttcttcacttatattcaacgactaataaaatacggaggtattttcgctattttatttctgttttatagctttaaatttcgatttaaatttaagtttaaatgaactggaactagtgggttctctcgagccctgaatataagagggggaactacttacttggtctgtgtatcataaaagcgatccgtcattttggtatcgtaagcataccgcctgaggaagctaataggtttattgaaactatgagaaactatcacttggagtataaggttctgatcgaggatctggctcctttggtgcatgcccaacgagctgaaaatcttagaaagaagctgctcatccaatggccacacattgatgtactatcagcattttatacacattcagaaattaatgattatctggatagtttactcgaaagatttccgaaacgagttcaggtgaagcaatttggctggagttacgagagacgccccctcaaagttttgactataacaaatggagatggtaggcggaataagccggtgatcctaattgatggcactgtccatgcccgggaatggatatcaccatcgatggcgctttatatcatccagcagctgttggacaactatggggataaccaggagctcttacaggactacgactgggtgattatgccagtggtcaatgcggatggat

SEQ ID NO: 9770 - DNA, 1248 bp, DROSOPHILA
atggcccgtatcagttatacaaaatacacggtgcaacatggagacgagaatgccttcaagtacatggtcgacctgcagacgaatgacgcggagctggacttttggttgctgaccagaaactcctccgtgctgacagtgagtccccggcggaagacacagttcgaggcgagtctttccagtttgggagttagctacgagatgcagccgctcatggagctgatggcggcccttcaagcgaacagttcctttgcggatgacaactacgatggggagtacgaggagtgccagcaggatgagtgcgagcaggcggagcgaccacgtcgaaggactcgtcgtcaggctcgcggcttcttctcgcactatccgcggtatcatgaggtgctcagcttcatgagtggcttggccgccagatatcctcagttctgccgctatgaatccttgggtcgttccaacgagggtcgccacatagctgctctctccatttcactgaacagtagggtacgtcctcgtcgagtggcctatatccaggcagccacccacggtagggagtggattactacgcagaccgttctctacttggcctacgaactgctgagcaatctgcgcgccttcacgagggtcctgcaggatgtggagatctttctggtgccgctggtcaatcccgatggctatgaatacacgcacacaacggatcgtttctggcgcaagaaccgtcatcgttatgcgggtcattcctgctccggcgtggacatcaatcgtaactttggcaatcactggaactatcagggagccagccagaacctctgctcggaggtgtactcgggcactgcgcccaattcggagccggagacctcggcggtggtgcggtatctggaattcaatcgaaaccgtgtgaaactcagcctggatgttcactcatttggcaaattcattttttatccctacggctatgcgaaaaacaccgtgccaccaaccgtgggaacgctgcgctcggtggctctgagggccgccaaccagatcggcaggtaccgtggaacgcgctacaccaccggcacctccgcctccattttgtacgaggcctccggcagcttggacgacttcgcctatggcaatctgggaatcccgctgtcctacacgctcgagctgcccggtgacgagttccatgtgcccgcccacgacatcatccacgtctgcaaggagacattcgccggcttcatcgagttcatccggcacgtcagcctttactag

SEQ ID NO: 9771 - protein, 415 aa, DROSOPHILA
MARISYTKYTVQHGDENAFKYMVDLQTNDAELDFWLLTRNSSVLTVSPRRKTQFEASLSSLGVSYEMQPLMELMAALQANSSFADDNYDGEYEECQQDECEQAERPRRRTRRQARGFFSHYPRYHEVLSFMSGLAARYPQFCRYESLGRSNEGRHIAALSISLNSRVRPRRVAYIQAATHGREWITTQTVLYLAYELLSNLRAFTRVLQDVEIFLVPLVNPDGYEYTHTTDRFWRKNRHRYAGHSCSGVDINRNFGNHWNYQGASQNLCSEVYSGTAPNSEPETSAVVRYLEFNRNRVKLSLDVHSFGKFIFYPYGYAKNTVPPTVGTLRSVALRAANQIGRYRGTRYTTGTSASILYEASGSLDDFAYGNLGIPLSYTLELPGDEFHVPAHDIIHVCKETFAGFIEFIRHVSLY

SEQ ID NO: 9772 - DNA, 7280 bp, DROSOPHILA
tatccgttatccagttggctggcagctttttaaggttgttcgtgcactggcttcactccccacagaacacagagcttttggatctgaaggtcagttgggactgggacccacatgccgagcttagtttgatagtcagcgcgctttaatgacgacaactgcacggcgcgcacaacccattaataatatattaattcaaaagagctataaaatattaaaaaatattcaaatataactaactaacgcgcagtgcacgattttctgacaacaattcagtttcgcttttcatgagactccattgcattttcctttgtgtttttcacacacgtggtgtttttctgttactcgcacttcgatagtggttattttttttggttacattgaaaaaatacaccgactgccagccgaattcccattcgaaccttaatttgaccaattgacggaaaattaattgcgcccaaaattaattagcaagcggatatacaatttttttacgtgaaaagagcgtgttatttgtcgaaaagattttacaattgattgtgtttaagtaaattaacctgcgatatctatgtgtatgtgctacgatccgaatttctgacattacggtaagtggcgtgtttttggcgggaataaagtcggtttctctttgtgccgtatttctctaccgttttttctggcgccaaaatgaatgaaaacggttggcaacatttcaaacttaacattgcaacattctaaccgctgttaagcgtttgctctgcaaattgttgtagctatgttggagttctggaacaccacctctccctgcgactttgttttgtttttcgctctcgacatatggaatcgaatctcttattccgggagcggttcattgacccagcaacaacaatattcgccagattttctcctgccagcgatttgcggaattcatccgctcaacagttagaagtaaatgccgtcgagcagcgggcaaaatcgatcgacgaaatcgagagccgcgttcagttgccttcaagccgtacttagaagaagtgctggtcccccagaaatcagagagatttttcccaacttgcatttttccaatactctgacaaagcccctcagaccgtcgcaatcacacagctatatactgatatatagatctctattgcgcagatcacaccttaaatgcctttcgtcgagagatttcaacaaatacgtaattttgttatgaacgtctgcctcgtcgaggccatccaattcgtccaggacctctcgcacgccatctgtctggacctccagggcctatttaatctcaagtagagatcaccgagcgatctcccagcggtaagttacgccattggtttttgggcacaaggaagtgaaagtgaagacacgggtgaaattacggttttcgggatctcgagagaaaggggaaagtacgaacctcatggcagcagcactccattttgagaggttatgtgaaagaacacacaagaaagtttggaattttcgacaggcggcgaaccaataataatgttgttatccataataatattaattagtgaatttttatttcaccttttcgcggcattattctcacaaatttataagacagattttcaaattaagacagaaagttttttaatgttagtgaaaagtacttattccagttgatagttaaatactatttaccgcaaaaaattaaaagagaactaaatttaaaggtaaaatcgtttttttttttggaaagtgcattgcttaaattatggtaccgactatcaaaataaaaataattaatttttatatggtgtttcaatattcactttaaattacctatgactcgctttctaaccactctcttcttattacgaacatcaattttcttgttacatcatttcggacctttcatttttcatcaccagctcatcccatcaattcagatacactttacttcattaagtagcagcaatcatctaacaaagctgaccaaacaacggaccggcttccagaatccttaactgagacggacgttttgcttggtttttaaaactaaacgactttttggtacccacacctgttgacctctgacgaatttctcgatccactgaccgatccactgatccagtgatcatcatcatcatccgaattccacaatgttgtcctgtgcctctttcaataaactgatgtatccgtcggccgcagatgttgccaaaccgccaatggtgggcttggaggtggaagctggatccattggatccctgtccagtcttcacgcccttccatcgaccacctcggtgggcagtggagcccccagcgagacgcagagcgagatctcctccgtggatagcgattggagtgacatacgcgccatcgccatgaagttgggcgttcaaaacccagacgatctccacacggaacgtttcaaggtggatcgacagaaattggaacagttaataaaaggtaatgcctttatatataaaaataatagattccttattatacattgccttttttctgatagcggagagctccattgagggaatgaatggagctgaatattttttccatgacgtgagtacatatttttaagttttgggcacctattagcttcacactttcttttgtctcattttgagacacagaatgccatgccttataaatattgaacatataataatatgtttcctattcaatagtatattaagttatttagtttttgagcaaaatttttaagttaattgattcatgtctttgtttggcaatctgactttgcatctataaaatttcagtgtataacccaatttgttttaagatactgttaggaccgactcttttgacttgatataaaagaattcgccatatatccaaaacatattcttttactagatcatgaacactacggatacttatgtgagctggccttgcagactcaaaattggtgccaagagcaagaagggtaggatattgaaatattttcaatgttcaagagtatttttcaaataaatcccataatttaaagatccccatgtgcgaattgtgggaaaggtggatcaggttcagcgggcaaaggagcgcatccttagcagtcttgactccagggtgagtgagccaaagcataatacaaacttatctgttttaattgttacccatttttctccgaacagggcactcgagtgatcatgaaaatggacgtcagctacacggatcactcgtacatcatcggacgaggtggcaacaacatcaagcgcataatggacgacacgcatacccatatccacttccccgactcgaatcgctccaatcccacggagaaatccaaccaggtgtcgctgtgcggcagcctagagggcgtggagcgagcccgggctctcgttcggctctccacaccgctgctcatctccttcgagatgcccgtaatgggacccaacaagccgcagcccgaccacgagactccctacatcaagatgatcgagaccaagttcaatgttcaggtgagttccagatgtcggagtcaactaagtgtaagattataaattaattataaattaatcatggcatgttaccaaatattatttgcatttgactataatggcttgattagtttaactaatttaggtaagattttgtaatatacattcatacatacatttaagagggggtatagaaaatgtcaaatttttttttcccaacccttgagagttgtgattatatattgctccattataattttatcaactgatgttacattaggctaattttgcagttgtgttattattatatatttttaagtgatttagaacgcatttaaagtaataaagttacttaaacgttattttcgaatttggcaaccttaaattacaaccaaggatttttgtaaacagttttttcgttgctcttaattattattgaatatattttaaagatttttcctcctttcaggtcatattctccacgcgtccaaaattgcatacctcgctggttttggtcaagggatccgagaaggaatcggcgcaggtccgagatgccacgcagctgctgatcaacttcgcctgtgagagtattgcggtaggttcgagaaggataactcaaaataaggctcatcagcgaatcctttttcctttttagagccaaatcctggtgaatgtccagatggagatctcgccgcagcatcacgaaatcgtcaagggcaagaacaacgtgaatctgctgagcattatggagcgaacccagaccaagatcatattccccgatctgagcgacatgaacgtgaagcccctgaagaagtcccaggtcacgatcagcggacgcatcgacgacgtctacttggcgcgacaacaattgcttggcaatttgcccgtagcattgatttttgactttccggacaaccacaacgatgcatccgaaataatgagcctcaacaccaagtacggcgtctacatcacgttgcgccagaaacagcggcagagcaccctggccattgtggtcaagggagtggagaagtttataggtaagatctctaaagcaatgtgtaaagtgtatgattttcgttgattctgcattaatatacgattgcactttccattattgtttgatttttatcccatattttccttactttttagatatattatacaatttaagatatttagcaagtgctgaattaaatttccgtattaatccgttgttgtcaccctccttagacaaaatctacgaggcccgccaggagatcctgcgcctggccacgccattcgtgaagcccgagatccccgactactacttcatgccaaaggacaaagaccttaatctcgcctaccgcacccagttaactgctctgctggctgggtatgtggacagcccgaagactccatcgctgctgccgccctccttggctggccaactgacgccctatgccaacaacaatcacctgttgttgaacgccaatggcttggccacgcccactggggtgtgtgcgcccacccaaaaatatatgcagttgcacaacagcttccaacaggctcagaatcgttccatggtggctggtgggcagagcaacaatggcaactatctgcaggttcctggagcggtggcgccgcctctcaaaccgccgactgtttcgccacggaacagctgcagtcagaataccagtggttaccagagctttagcagcagcaccacctccctggagcagtcgtatccgccgtatgcccaattgccgggcaccgtgtcgtccacttcatcctccaccgcgggaagccaaaatcgggcgcattattcgccagattccacttacggcagtgagggtggtggcgttggcggcggaggtggtggtggggcgcgtctgggacgacgccttagcgatggagtgctgctggggctgagtaattccaacggtggaggaggtaactccggaggagcccacctcctgcccggcagtgccgagagctatcggagtttgcactatgaccttggaggaaacaagcactccggccaccgtgcctttgacttcgacatgaaacgggccctgggctacaaagccatggagcgcaccccggtggcaggggagctgcgaacacccacgaccgcttggatgggaatgggcttgagcagcacctcgcccgcccctgccccgctggagaacggggaaaatggggctgctggtggaggagcatctagtgggtggcggctgccaccaggactgggttccccttacggactgagtgccaccaccggactcctggacgccactccagtcaaccgacggatgcagctagccaagcacaaggacatccagactctgctcaccagtttgggtctggagcactacatcagtgagtagctccgccgatcatgtccgtttttaccaactgtgtactagaagtcttttataaagctatcatatatgtctggcttgaactggagagtgttttatttaacgcaaacgttttttcacagtcatagataaagttacataaagttcaacatccatatagcatttaaaatcaaactattttatatttacaacctgggaaaactacagtttttatttctcctttcagaaatattcgttctaaacgaaatcgacctggaggtgttcaccaccctgaccgaggaaaacctgatggagctgggtatcgcggcgtttggagctcgcaagaagctgctgacggccattcacacgctgctggccaacgaggcggcctgcagcacaatgcccagcagcagctcctcgcagaactcctcgtcgccgcgattctccggaagtgcggccccaggcgcagagcgccgtccctccaaccagtggtgatccgctcctgtcgttcgaccccattgcctcgaattctttttttctttttttttttgcatgcccatttatttggtagtcgtaagatcaagagaatcggaacggtaaaaagtataggaagaagtcaggaagaaaatggcaactccctgggcgaatagctttcccgcacaacacagccttgaccttgacttatactcgcatttgtactcaaattccaagtagcatagctgcgctcgggaaagtgcacagttttcccagtgtgccaataggtcgtagttgcctttattttaagcgattaatttattttgaaattatttatataggaaaccgtcttaagcaaaaaaaaaaaatattgtgaattatttatgaaatctaactaaacgaaatcacttgttgtaagaaatgaatttatgtaaactaactgaaaaagaaaaaaaaattaaaaacaaaagcacagcatgtattaagtgataagcaaaatagtcacgcacaaacatttgatatgaataaattgatgtctatgaaaaatcaactaaatatattttttagtagattattagattaatatgatttgcttaattttgtagaaacatttgtaatatatgtacattaagtcgttgccgctttgaactcttttagcctggttggaatagaggttaatgactttattgtctccagttgtctgcataatttgtattgcctcgcctcgtgccaagaagtcttgcaaagcaacaaaatcgaatgtgtgtccttacacgaactaaacgggcggcaaaaggggcgtggctgagctaatgaactggaaatgttttgctccagttgccggtggttgctaccgtgttgcatcagcataattgcaaatttttatgattatgacactttgggcgcaaagtgcctttgccaatggcaactaatttctgcagccatctcagtcccagtctggtggtcatctacatggggctatgctccacttaagtacttcgagtgggcttttgcgggacat

SEQ ID NO: 9773 - DNA, 3269 bp, DROSOPHILA
tgccttcaagccgtacttagaagaagtgctggtcccccagaaatcagagagatttttcccaacttgcatttttccaatactctgacaaagcccctcagaccgtcgcaatcacacagctatatactgatatatagatctctattgcgcagatcacaccttaaatgcctttcgtcgagagatttcaacaaatacgtaattttgttatgaacgtctgcctcgtcgaggccatccaattcgtccaggacctctcgcacgccatctgtctggacctccagggcctatttaatctcaagtagagatcaccgagcgatctcccagcgctcatcccatcaattcagatacactttacttcattaagtagcagcaatcatctaacaaagctgaccaaacaacggaccggcttccagaatccttaactgagacggacgttttgcttggtttttaaaactaaacgactttttggtacccacacctgttgacctctgacgaatttctcgatccactgaccgatccactgatccagtgatcatcatcatcatccgaattccacaatgttgtcctgtgcctctttcaataaactgatgtatccgtcggccgcagatgttgccaaaccgccaatggtgggcttggaggtggaagctggatccattggatccctgtccagtcttcacgcccttccatcgaccacctcggtgggcagtggagcccccagcgagacgcagagcgagatctcctccgtggatagcgattggagtgacatacgcgccatcgccatgaagttgggcgttcaaaacccagacgatctccacacggaacgtttcaaggtggatcgacagaaattggaacagttaataaaagcggagagctccattgagggaatgaatggagctgaatattttttccatgacatcatgaacactacggatacttatgtgagctggccttgcagactcaaaattggtgccaagagcaagaaggatccccatgtgcgaattgtgggaaaggtggatcaggttcagcgggcaaaggagcgcatccttagcagtcttgactccaggggcactcgagtgatcatgaaaatggacgtcagctacacggatcactcgtacatcatcggacgaggtggcaacaacatcaagcgcataatggacgacacgcatacccatatccacttccccgactcgaatcgctccaatcccacggagaaatccaaccaggtgtcgctgtgcggcagcctagagggcgtggagcgagcccgggctctcgttcggctctccacaccgctgctcatctccttcgagatgcccgtaatgggacccaacaagccgcagcccgaccacgagactccctacatcaagatgatcgagaccaagttcaatgttcaggtcatattctccacgcgtccaaaattgcatacctcgctggttttggtcaagggatccgagaaggaatcggcgcaggtccgagatgccacgcagctgctgatcaacttcgcctgtgagagtattgcgagccaaatcctggtgaatgtccagatggagatctcgccgcagcatcacgaaatcgtcaagggcaagaacaacgtgaatctgctgagcattatggagcgaacccagaccaagatcatattccccgatctgagcgacatgaacgtgaagcccctgaagaagtcccaggtcacgatcagcggacgcatcgacgacgtctacttggcgcgacaacaattgcttggcaatttgcccgtagcattgatttttgactttccggacaaccacaacgatgcatccgaaataatgagcctcaacaccaagtacggcgtctacatcacgttgcgccagaaacagcggcagagcaccctggccattgtggtcaagggagtggagaagtttatagacaaaatctacgaggcccgccaggagatcctgcgcctggccacgccattcgtgaagcccgagatccccgactactacttcatgccaaaggacaaagaccttaatctcgcctaccgcacccagttaactgctctgctggctgggtatgtggacagcccgaagactccatcgctgctgccgccctccttggctggccaactgacgccctatgccaacaacaatcacctgttgttgaacgccaatggcttggccacgcccactggggtgtgtgcgcccacccaaaaatatatgcagttgcacaacagcttccaacaggctcagaatcgttccatggtggctggtgggcagagcaacaatggcaactatctgcaggttcctggagcggtggcgccgcctctcaaaccgccgactgtttcgccacggaacagctgcagtcagaataccagtggttaccagagctttagcagcagcaccacctccctggagcagtcgtatccgccgtatgcccaattgccgggcaccgtgtcgtccacttcatcctccaccgcgggaagccaaaatcgggcgcattattcgccagattccacttacggcagtgagggtggtggcgttggcggcggaggtggtggtggggcgcgtctgggacgacgccttagcgatggagtgctgctggggctgagtaattccaacggtggaggaggtaactccggaggagcccacctcctgcccggcagtgccgagagctatcggagtttgcactatgaccttggaggaaacaagcactccggccaccgtgcctttgacttcgacatgaaacgggccctgggctacaaagccatggagcgcaccccggtggcaggggagctgcgaacacccacgaccgcttggatgggaatgggcttgagcagcacctcgcccgcccctgccccgctggagaacggggaaaatggggctgctggtggaggagcatctagtgggtggcggctgccaccaggactgggttccccttacggactgagtgccaccaccggactcctggacgccactccagtcaaccgacggatgcagctagccaagcacaaggacatccagactctgctcaccagtttgggtctggagcactacatcaaaatattcgttctaaacgaaatcgacctggaggtgttcaccaccctgaccgaggaaaacctgatggagctgggtatcgcggcgtttggagctcgcaagaagctgctgacggccattcacacgctgctggccaacgaggcggcctgcagcacaatgcccagcagcagctcctcgcagaactcctcgtcgccgcgattctccggaagtgcggccccaggcgcagagcgccgtccctccaaccagtggtga

SEQ ID NO: 9774 - protein, 905 aa, DROSOPHILA
MLSCASFNKLMYPSAADVAKPPMVGLEVEAGSIGSLSSLHALPSTTSVGSGAPSETQSEISSVDSDWSDIRAIAMKLGVQNPDDLHTERFKVDRQKLEQLIKAESSIEGMNGAEYFFHDIMNTTDTYVSWPCRLKIGAKSKKDPHVRIVGKVDQVQRAKERILSSLDSRGTRVIMKMDVSYTDHSYIIGRGGNNIKRIMDDTHTHIHFPDSNRSNPTEKSNQVSLCGSLEGVERARALVRLSTPLLISFEMPVMGPNKPQPDHETPYIKMIETKFNVQVIFSTRPKLHTSLVLVKGSEKESAQVRDATQLLINFACESIASQILVNVQMEISPQHHEIVKGKNNVNLLSIMERTQTKIIFPDLSDMNVKPLKKSQVTISGRIDDVYLARQQLLGNLPVALIFDFPDNHNDASEIMSLNTKYGVYITLRQKQRQSTLAIVVKGVEKFIDKIYEARQEILRLATPFVKPEIPDYYFMPKDKDLNLAYRTQLTALLAGYVDSPKTPSLLPPSLAGQLTPYANNNHLLLNANGLATPTGVCAPTQKYMQLHNSFQQAQNRSMVAGGQSNNGNYLQVPGAVAPPLKPPTVSPRNSCSQNTSGYQSFSSSTTSLEQSYPPYAQLPGTVSSTSSSTAGSQNRAHYSPDSTYGSEGGGVGGGGGGGARLGRRLSDGVLLGLSNSNGGGGNSGGAHLLPGSAESYRSLHYDLGGNKHSGHRAFDFDMKRALGYKAMERTPVAGELRTPTTAWMGMGLSSTSPAPAPLENGENGAAGGGASSGWRLPPGLGSPYGLSATTGLLDATPVNRRMQLAKHKDIQTLLTSLGLEHYIKIFVLNEIDLEVFTTLTEENLMELGIAAFGARKKLLTAIHTLLANEAACSTMPSSSSSQNSSSPRFSGSAAPGAERRPSNQW

SEQ ID NO: 9775 - DNA, 3286 bp, DROSOPHILA
gcttgatcagacctgaaagcaaagaagagtgccattaggatttatgctaacgaaaaggtaggaagcgtaaggaaacgtacccttctcgcgcagctcgatgagagcacgcttggccagggagccgcggatcttcagacgctcggagaccaccgatggggtgatcagcttgtaggcgggcacttccttgtacagcttctcgtaggtggccttgtcgaacagcacctggttgttcagcttgtccctgacttttcccttggaccacttcttcttcttggccttgccgccgccggatccctccttcttcttttgtgtcttttgcggctgcttggccgaagacttcgcgtccttcttaggcggctggaatgttgcaaagaaaaacgggcttgtattaacaacttgcacttgaatcccagacataaataaaccccattgaccaccattgagcagcacctggagttgcttgctttcgaggttaaggcatgcttttgttttttgcccgcattttcacattttcccacttgagctgggtgttgttttcatggcccagccctggggcggcacttcactcatattttgcctccatttgcgggccactttcacagtgaaaaactattattttcgcagaatttagtagcagcgaactcaccatcgtgaaaagtcaatgcagaaagatggagggcggaaacggccagagttaccatccatcgcacgggttgctcgcctgcctatcgatagttggtggtggagtgtataaaaataccaaacactattcataacggatttcgtagatattgaatatgaataatctgcatttcttgggaaaattagacttctcacatttgtgaacatggaattaaacaattgttttgactatcgaaacatttttggataaaggtgcccgttgcgcattcaaagtgtattttgtcattctgagcaacggtcacactcctacgcatgtcaaacaaataaatttaaataattggcaaatcaattgcataaaatgaaggagttctgccgcacctgcggcaagaccgtcgtggccgatgaatgccttcagatcttcacgcctgcgggccgaaagttgctgcagtgcgtccgttccatcacaaattgctgggtaagtgaacaattccactcagtagtttccgtatccaaccagcgattgtttcccatcttacagctgcagaatgtccaggatttgcccaatcacatatgtacggactgccaggtgctgctcagccaggtgcaaaagttccggcggcgttgtgccaagatcgagaagtacttcgccaggcggcggaggagaatgaatctcggcgaggctccagcggccatggagcaacttcgcgtccagcaggcagctgctccggatccgctgggcattgacgagctgatgtcggccagtgacatcaaaatagaacccatccagttgcaaatggaagaggacccacaagcgccgtatcccgaaaatcagcttgaacaagctcttagctatggcaatgcaccgggtgaggacatcctaccccttcccgaggactatggagaggcacagactgaagtggcgaccactaccaacgagccagcacagcgaagaagcaagaacacggccaaaataaagtccaagaagcacacaatgcgcgtgggccgaaagctgatccatgtaaaagtcatcgatgataagcagccaaagcgtattgtggaccgcaatggacccagcgccaagccctgcatctgcgagcactgcggccggcaattcaaagacaccagcaatctccatgtccatctgctgcggcacacgggcaccaagccgttcgagtgcgaccagtgccaccagaagtgctacacgctccacctgctgcggcgccaccagctgaagcacacggagggtccctacgcctgcaccttctgcggcctggagtacagcacgaacagctcgcgcgtgagacatgaaaggtgcgtcctacgcagcagttaaagctacgaattataaatgattataatcattttacagggaggcctgcaagaagggacgagcgccgcaatccaagtgggagatcatcaagaagggcgagcgcactttccagtgagttgctcttagtaatttcgcattattctatctaatttccccgtacttctcagctgcgaggtgtgcgatctctggttcctgcgcgccggcaactttactcagcacatcaactcttccagtcacatcgaaaacgaacgaagaaagaaaagaaaatcaaatccaaccgccattaattcataaatccaactaagtgaaaattgaaaaagaagcacgcatttcattcggttgcaacaatttgtactacgcccaatttgcgagcattatcctgatgcattttactgttcgcatggcttttcatgttgtacttgtagcgaaagttaacattgcaaacctcgcacctgtaatgattaacaagcacaattatattaattaggaaactaatgatctaaaagctcgagaacacccaccaatatggacgttcgccggtgtgaatgagctcgtgctcccgcagccgcgtccgctgatagaatcccttcaagcagacgtcgcactggagcggcctcttctcgtgcgtcatctcgtggcgcttgagcttgttgggatccgagtagctcttgctgcaccgctggcacttgtaggcgttcgcatcggtgtgcgatttgatatgccagcccagggcgtacttggaggcgtagtgcttttggcacagcttgcactgatatcgcacactttctcgaggcttgggcatgggcttgggattgatgcgcttcacaatgagacgaggcgccgcattgtggacctcgctgaaatggatggccataagtacaaaagaaagttgatgcatgcatgttagttgtgtacatttaccactcacctctcgtgcttttggcgagctccgggataggcgaatgtttcgctgcagaagccgcaggcgaagggagtttctccccgatgacggatgcgtatgtgcatgttgcgcatgtaggcgtcgtagaatgtctttggacattcggtgcactggtagttcttggtgcgagtgtgccgcagcatgtggatgcgcaaattgtgtgacatgcggaacgcctggccgcactgatcgcacacaaagttcggcggcttggcgcgtagctgggcgcgccgtataagattcctctcttctttggtctttgggttggcactgcgcttcggtttctgttcaccagctgccttttccttagctttgggcttactcgcgattggtgctcccttcctgagtcttgc

SEQ ID NO: 9776 - DNA, 1172 bp, DROSOPHILA
atgaaggagttctgccgcacctgcggcaagaccgtcgtggccgatgaatgccttcagatcttcacgcctgcgggccgaaagttgctgcagtgcgtccgttccatcacaaattgctgggtaagtgaacaattccactcagtagtttccgtatccaaccagcgattgtttcccatcttacagctgcagaatgtccaggatttgcccaatcacatatgtacggactgccaggtgctgctcagccaggtgcaaaagttccggcggcgttgtgccaagatcgagaagtacttcgccaggcggcggaggagaatgaatctcggcgaggctccagcggccatggagcaacttcgcgtccagcaggcagctgctccggatccgctgggcattgacgagctgatgtcggccagtgacatcaaaatagaacccatccagttgcaaatggaagaggacccacaagcgccgtatcccgaaaatcagcttgaacaagctcttagctatggcaatgcaccgggtgaggacatcctaccccttcccgaggactatggagaggcacagactgaagtggcgaccactaccaacgagccagcacagcgaagaagcaagaacacggccaaaataaagtccaagaagcacacaatgcgcgtgggccgaaagctgatccatgtaaaagtcatcgatgataagcagccaaagcgtattgtggaccgcaatggacccagcgccaagccctgcatctgcgagcactgcggccggcaattcaaagacaccagcaatctccatgtccatctgctgcggcacacgggcaccaagccgttcgagtgcgaccagtgccaccagaagtgctacacgctccacctgctgcggcgccaccagctgaagcacacggagggtccctacgcctgcaccttctgcggcctggagtacagcacgaacagctcgcgcgtgagacatgaaagggaggcctgcaagaagggacgagcgccgcaatccaagtgggagatcatcaagaagggcgagcgcactttccactgcgaggtgtgcgatctctggttcctgcgcgccggcaactttactcagcacatcaactcttccagtcacatcgaaaacgaacgaagaaagaaaagaaaatcaaatccaaccgccattaattcataaatccaactaagtgaaaattg

SEQ ID NO: 9777 - protein, 383 aa, DROSOPHILA
MKEFCRTCGKTVVADECLQIFTPAGRKLLQCVRSITNCWVSEQFHSVVSVSNQRLFPILQLQNVQDLPNHICTDCQVLLSQVQKFRRRCAKIEKYFARRRRRMNLGEAPAAMEQLRVQQAAAPDPLGIDELMSASDIKIEPIQLQMEEDPQAPYPENQLEQALSYGNAPGEDILPLPEDYGEAQTEVATTTNEPAQRRSKNTAKIKSKKHTMRVGRKLIHVKVIDDKQPKRIVDRNGPSAKPCICEHCGRQFKDTSNLHVHLLRHTGTKPFECDQCHQKCYTLHLLRRHQLKHTEGPYACTFCGLEYSTNSSRVRHEREACKKGRAPQSKWEIIKKGERTFHCEVCDLWFLRAGNFTQHINSSSHIENERRKKRKSNPTAINS

SEQ ID NO: 9778 - DNA, 3495 bp, DROSOPHILA
atggtaactgcttgatagaaaagtaattcgtttttaagtgaccactgagatagcagttaatttttaagatagctgctatttactatgatatttatcaacttgattaaagaaatctcaagatatggcaagaatgactagctcctttgggttatcaatatgctctatatttttagatttaaattatcacttacaaatattttaaattcaatagatattgtattcaaaattgaaataactgattataaattttggttttttatggaacaatattttccagatattatgtaagcttttgttgatagtaaattagatttttcttttaattgataacgatataatttattggtggcttagatagcaaaatgcgactttatctcaatcaaaaagttatttctttgtgcttacataacaagtacaattaaggcagtttctaagtaaaccatctaaatattattaggcctatcaaaactattagaaattaaacaattgtttttttacttgcctagtttctaaagcaatatttctcttcttaatctttatatgtaataaaataataattattgttatttaattcacccagcgactttccggatacctatcaggacatgatgtccgttgcggatgcgggtgccaaggcgatcatttactcaacgaatggaatatatagctacggaagtacatattatgtgctatatccaacatccggcgatacgacagactttgcgtttggagtggtgaatgccacagttgccatgaccatggagctgccggctgcaggtttccagggattcgatccctggatttcccaaatcgagcgattggtcacggaaagttgggtgggagtgcgagccatggccgcagaggtgataagacgctatccgtcgtaatcgggctgtaaataaatagacattagcgtcgagttgcgccagctctgatttgcgggtcactcgtgcgggagttttggagtggtttattatttatggatccatttgtcgattagatatgtggccagttgaatgtgtctagctatttaagtggcccggcacatccacgcggttgctcagttcgtgcgaagatgaagttctctctgggtttgttagtcctctttttgggcgccactcttgtggctgccgaacaggattacgaggggtaagtattggatctacctggacctatcaaggatatccgccagggtttagatataaaattgtatatttaaaatattcgctttcagttaccgcatctatgaggtgattccatcgactgccgaccaggctgaccttttgcaccaactaagtctgcagggatacgatttcatcagtgagactcgtctattgggtcatccttctcgtgtgattgtgagtcccgctcagttgaagcacttccagcagctggttgaggcagagaaaatgacacttactctggtgaactccaacctgggcgcctccatagccgaggagtttgcccagcgacagatgcagcgccttttggcgcccatcacgggaaagggtcgcttgagcacggagcgctactatacgcacgaggagattatcaactatatcgatgacctggcccagcgttttcccagccgagtcttcgttaagaccgttggctggtcctatgaacagcgagtcctgaaaaccatcaccatcaccaatggcgatggcaaggctaacaagaaagtgatcttcatggatggtggtttccatgctagggaatggatttctccagcagcagtcctctacgtcatcgatcaattggtggagcagttcgaggagaacgctcatctgctgaaggactacgactgggtcatcctgccactggtcaatgccgatggctatgagcacacccagaccggaacacttgctcgaatgtggcgcaaaacccgtcagccatacacgtacgctggacagacgtgttacggagctgatcccaaccggaatttcgacttccattggaacgaggagggcgcctcctcgaatccatgtgcggacacctatgctggaccgacggccttttccgaaccggagacgattaccgtccgggatctgatgcactcactggccgatcggggaattatgtacctcaccctccactcctacggcaactatctgctgtatccatggggatggacgtcgtaagacatagctatcgtattttaaatgatatactttaacaaataactaataattcacagcgatctgcccgagaattgggaggatctggatgcggtagcccgcactggagctgaggccattgagaacgccactggtacggtgtacacctatggatcctccacaaatgtcctgtatattgctgctggagccagtgatgactatggctactatgccggcttcaatgtgtccatcaccatggagttgcccggtgctggctccattggattcaatcctccagtcacccgaatcgatgagtttgtcaccgaaacctggattggcatccgtgccatggccgagaaagtgatcgagatgtattaaataaataaattaatctataaaacacacaatatacacaatatacccactgatgatagagacgtaaacgttacaatatttcaaatatttttcagtggattgtttataagctttctttgttatggaaaatagtattcaattaaaatcgaattagattcacttgactttcagagaaaacgtaattgggaaccaaattgataatggctctttattattgttgttagcaatcttactcttcgatcgatttctcttgattttaccaccatccatatacacagtgcgatttactgataacgaattaagaatgtcgccaacaaaagtttcttcgatagcttggaattgctagtgctcagatagggatcgaatttgaaagatgacagttgtttgggtcattctggcactaagctgcctgagcttgtcagctggactgcagagaaccaataaatacgaagggtataaaaaaaaaaaaaaattaaaattgtaatttaaactaacgtttttttcttagttataaaatctatgaggtctctagtgaagcgcgttctgtagccttttcagaagctctgtccgaactggtcaagaatgcgtcatattatgaggtgttctcggaattgaatgctggtaatccaggcaagattatggtgcatcctcacgaacaggtgaactttgtgcagctgatggaggagaataatgtgaagtatgatattatcaaccgaaatgtgggtcttactctgagccgtcaattcgaaacgaaccggatgttacgacattggtttccctacaatggaagattgggcactgagagatactacaaccatgaggagatcaaccagttcattgaggatttggctggggaacatccgcgtagggttttcctaaaaaccgtaggcagaagttacgaaggtcgctggctgaaaaccatcacaatcaccaatggcgatgccaggcgcaataagaatgtgatcctcgtagatggtggcttccatgcacgagaatggatctc

SEQ ID NO: 9779 - DNA, 1350 bp, DROSOPHILA
atatgtggccagttgaatgtgtctagctatttaagtggcccggcacatccacgcggttgctcagttcgtgcgaagatgaagttctctctgggtttgttagtcctctttttgggcgccactcttgtggctgccgaacaggattacgagggttaccgcatctatgaggtgattccatcgactgccgaccaggctgaccttttgcaccaactaagtctgcagggatacgatttcatcagtgagactcgtctattgggtcatccttctcgtgtgattgtgagtcccgctcagttgaagcacttccagcagctggttgaggcagagaaaatgacacttactctggtgaactccaacctgggcgcctccatagccgaggagtttgcccagcgacagatgcagcgccttttggcgcccatcacgggaaagggtcgcttgagcacggagcgctactatacgcacgaggagattatcaactatatcgatgacctggcccagcgttttcccagccgagtcttcgttaagaccgttggctggtcctatgaacagcgagtcctgaaaaccatcaccatcaccaatggcgatggcaaggctaacaagaaagtgatcttcatggatggtggtttccatgctagggaatggatttctccagcagcagtcctctacgtcatcgatcaattggtggagcagttcgaggagaacgctcatctgctgaaggactacgactgggtcatcctgccactggtcaatgccgatggctatgagcacacccagaccggaacacttgctcgaatgtggcgcaaaacccgtcagccatacacgtacgctggacagacgtgttacggagctgatcccaaccggaatttcgacttccattggaacgaggagggcgcctcctcgaatccatgtgcggacacctatgctggaccgacggccttttccgaaccggagacgattaccgtccgggatctgatgcactcactggccgatcggggaattatgtacctcaccctccactcctacggcaactatctgctgtatccatggggatggacgtccgatctgcccgagaattgggaggatctggatgcggtagcccgcactggagctgaggccattgagaacgccactggtacggtgtacacctatggatcctccacaaatgtcctgtatattgctgctggagccagtgatgactatggctactatgccggcttcaatgtgtccatcaccatggagttgcccggtgctggctccattggattcaatcctccagtcacccgaatcgatgagtttgtcaccgaaacctggattggcatccgtgccatggccgagaaagtgatcgagatgtattaa

SEQ ID NO: 9780 - protein, 424 aa, DROSOPHILA
MKFSLGLLVLFLGATLVAAEQDYEGYRIYEVIPSTADQADLLHQLSLQGYDFISETRLLGHPSRVIVSPAQLKHFQQLVEAEKMTLTLVNSNLGASIAEEFAQRQMQRLLAPITGKGRLSTERYYTHEEIINYIDDLAQRFPSRVFVKTVGWSYEQRVLKTITITNGDGKANKKVIFMDGGFHAREWISPAAVLYVIDQLVEQFEENAHLLKDYDWVILPLVNADGYEHTQTGTLARMWRKTRQPYTYAGQTCYGADPNRNFDFHWNEEGASSNPCADTYAGPTAFSEPETITVRDLMHSLADRGIMYLTLHSYGNYLLYPWGWTSDLPENWEDLDAVARTGAEAIENATGTVYTYGSSTNVLYIAAGASDDYGYYAGFNVSITMELPGAGSIGFNPPVTRIDEFVTETWIGIRAMAEKVIEMY

SEQ ID NO: 9781 - DNA, 3271 bp, DROSOPHILA
agtacgtgctgcggatgaagagatgcccagaccaaaagaaaatttgtatacgtattgtatatattcttgcagcatgtacccctttctcaacttaattgcaaatatctctaatgacttctaagcgctctatcaaaagattttatacttttaaagtttctcgaaaataacgtgtcggctagccgttttcaatcatacctcttaagtccaagtattctcagcatattcagctttcattttatttaacacgaaatatgttgatatttttttacgctaacctcaatgagaaaagcaaacgtgaaaccgaaaccgaagaaccctttttcaaacgtgcaacataaatgaaaaaagcagcatgctggttggaaattttagaggctcctgacaatgcctacacctgcaatatgaggatttctgctcgttttcaggtgccccgcccccttttttaacgccccccttgactcagccacgcacaaaaccgttcataataaaatagagagaaaaatacacacacacacacacacacacggcgaaacagaaaaacgccgtcaaagtcatacgtgcaacgccgccaagtgactttattgcaggtacgtgacgtgaattattgtcaaggggggtgcagattggtggaccaggggcgtagtcaggggctgaaactcgttaggattaacaagcgtttactggcgcacggcgtgcaatggcaacctagcttttacgcccagctacaggacaccaagtctgctgttcaaaggatgctgacgaaatatatagaaaaaatcgggaaatattttaaagttttttgaaacttttggaatatttttttatcagattttatatatcgcctgctagttccctcaaatctaatcatttttacccttttccttcatgctctgttggttttaatatttttagaaatatttcgctcagtgtattctatacatgtatccgttgttatatatccagctgcattagatggcgccagcttagccgcgtttgtcactcattgccggagcaacgagcgtgcagttaaattgatgagcagcaggtacaaccaggaggcgatgcgcggctccatgaaggaatatggcacgaaaaccagatacccaggatggttttgtgtttggttggcacgatgcctggatggatgccggtaagctgggatggtcggatagatagatagatagatagatagatgggtagatagatagatggatagcctggttggatgaatggcctcctcgcgttccggtaagtgcgcgcgcgtgtttcaactaaactgacaaaggcagccaactacgggtctaatataatatgtacccatcccaaggatttccccctcaattggtgccgctttcattcctcatttagtagagttcacccacactccaacgcccacgcccaccccggtaatcgaatactcacactccacgtccagaatgatccgcttggacaccgatggcggtactccattggtggcgatgcacaaataggcgcccatttcattgcgactcactttggttagaggcaggacatcagcatcgtacacgagaactgttgttttcgatgagcgattttggggcggcaggtaaataaccagtacatggaaataagcgtgttgaaagcattgtgaatttcaatttaaaatggttagggttattcaggagccgacttaaacatctggttgaagtatatgctatacttaaaattatgctacaaaatcaactgctttgcttttaagtcatgccaaaaatgatgctccttttaaaagcttgcagacacaagtcattttttttttacctttttattatctacgtatcaaacatacctttcttcttcttttcgacggcaatttcctctccatcctcgcgccgccaaatgatttttggggccgggaagccatcggcccggcacgtcatgttgatattttgattttcacgcaccgccaccgacgacggcgtactctcaatgtccaaaatatttggtggcactgcgggacgggtgcaatccgaatcagctcaggttgattaaacagcgggtgtggggatactcaccgaccacctgtaggtagcccacttggctaatcatcgggttggtgttgacctggcacatatagtagccgcgatcgtcctgatgagcctgattcacgtgcagcagccacgtgttgtccgtgtatgtgatgctatatctcggtatccttgatatcacatgccggtggatggtcagtatcatttgcctgtctatgtgaatccaggcaacctgcaaagtgtgcatagttttcaagcttaactcgcattattcgatcaatttttcaactaatgtcgtgagacctcagggtgttctttaaagagccagccatccatactccaaatgggattgccggctaaacacatgtggagaccctgccattataaatgaacgtcatgttgtgacgcaggaccccaggataaagccagcctgacagctgtttccgcatttttaatacactttttgctccttctgttcgcactttcttttggactttgctctgccttgcagcagaagacatgttacactgagaaatatacattttccaaggcaatgaaatcgtggaaatgtaatccgagataagtgcctgttttgtgattaacttaaatctaaattcccctggattttctaattttatattttgccccttaaaacgattaatttttgaagattttgctagtatttactctctaacatcttttcttactctgtgatggagacgaactctttctggtggaaggactttcccagccttgagttagcaggaaacttttcaaatttgcccccagcaccaacactgacagcaatgagtttcccgctttactgtcctcggccattttcctcatgtccaggccaatgttgacaaaagtccaataaggggcaaggagcaaggactcgtgtcctagctaggccccggtggtcctggcgacagtgttttatatgaagttgatatggcgagtaaatatttgtgatttgttatgagctcgctgtgtgccagcagctgagggagataaatgataagtgattttctagtcattttgtttggtccgagagagcatcagaggtctttcgtcctggccaaagcgtatccatagcttaatgtggattagatgcatatatgcatccagcgccgaccagagctcataaattgtgtctccgggcaaacaaaacttcgacttgctaatgacagcagaaagtcatcgatagcaagcacagaatgtccattgtattttcgggtaatattttg

SEQ ID NO: 9782 - DNA, 648 bp, DROSOPHILA
atgcacactttgcaggttgcctggattcacatagacaggcaaatgatactgaccatccaccggcatgtgatatcaaggataccgagatatagcatcacatacacggacaacacgtggctgctgcacgtgaatcaggctcatcaggacgatcgcggctactatatgtgccaggtcaacaccaacccgatgattagccaagtgggctacctacaggtggtcgtgccaccaaatattttggacattgagagtacgccgtcgtcggtggcggtgcgtgaaaatcaaaatatcaacatgacgtgccgggccgatggcttcccggccccaaaaatcatttggcggcgcgaggatggagaggaaattgccgtcgaaaagaagaagaaagtgagtcgcaatgaaatgggcgcctatttgtgcatcgccaccaatggagtaccgccatcggtgtccaagcggatcattctggacgtggagtgtgagtattcgattaccggggtgggcgtgggcgttggagtgcatcgtgccaaccaaacacaaaaccatcctgggtatctggttttcgtgccatattccttcatggagccgcgcatcgcctcctggttgtacctgctgctcatcaatttaactgcacgctcgttgctccggcaatga

SEQ ID NO: 9783 - protein, 215 aa, DROSOPHILA
MHTLQVAWIHIDRQMILTIHRHVISRIPRYSITYTDNTWLLHVNQAHQDDRGYYMCQVNTNPMISQVGYLQVVVPPNILDIESTPSSVAVRENQNINMTCRADGFPAPKIIWRREDGEEIAVEKKKKVSRNEMGAYLCIATNGVPPSVSKRIILDVECEYSITGVGVGVGVHRANQTQNHPGYLVFVPYSFMEPRIASWLYLLLINLTARSLLRQ

SEQ ID NO: 9784 - DNA, 2306 bp, DROSOPHILA
aaagaaatcctttttacctcataaatcacatattaaacattgcttatgtttttttgggtacaaaacacacatgagtatcgcaagacctccaaaagatcagcaactacaacataaatgactttgccccactttgggtggtagcaacatagatacacgaattcgaatacgaatacgcccacacaccaaatgaccccaaagaattgaatacttttcaaattgcaatcggtggcgagctatgtacatatatatgtggggtatttcgaaataatagggggaaactctagaattacatttagcacacaatgtccaaaaaagcatttctcctatgcgtgtgtgtgcgagtggactggatatttttttctcacatgcaaaagcatataaagtttatttttaaccccaccgaatcgtgcagcaaataaacatataaacatatagctcaccgacggatccggattcggattttgagtgggcgttttgaaaatggaaaatgaaaattacgtgagatcttttgagaatgctcggcgtagccgccaaacaaaatgtgtttacatttaattctcaaatttattgcacgaacacatatgcacagcatatagatatatacaatttaattatacctatggataacctatagaatgcgcctggatcgtttaaataaaccgattttgtcttgcagcggaaacataaaaattctagaagtcacagtaaagaaacaaaaatgtatagtcaaaagaaaaatccaagttcaaaaaatctgtaatttatgaaaggaaataaacattggaatatcttaggaccaacgtatatatgttataatatattattaagcggttcaaagctacaattagatttaaataaaaaagtcatacattttattaattatataatattattattattatattatagtatatataatattctatgccttatgaaaattgctccttaaaaattgcacattaaggattcagttattcagcttactcatttgtattatttggcacagtgcttttttccagttttcttcccttgtaagtcaaaaacaaaaacacaaacaccatggacgccatcaagaagaagatgcaagcgatgaagcttgagaaggataacgccattgacaaggccgacacctgcgagaaccaagccaaggatgccaactcccgcgccgacaaactgaacgaggaggtgcgcgatctggagaagaagttcgtccaggtggagatcgatctggttaccgccaaggagcagctggagaaggccaacaccgagctggaggagaaggagaaactcctgaccgccaccgagtccgaggtggccacccagaaccgcaaggtgcaacagattgaggaggatctggagaagtccgaggagcgctcgaccaccgcccaacagaagctgctggaggccacccagtcggccgatgagaacaaccgcatgtgcaaggtgctggagaaccgttcccagcaggatgaggagcgcatggaccagctgaccaaccagttgaaggaggcccgcatgctggctgaggatgccgataccaagtccgacgaggtctcccgcaagctggccttcgttgaagacgagctggaggtggctgaggatcgtgtccgctccggcgagtccaagatcatggagctggaggaggagctgaaggtgggtcctcaagagaaatccttctgttctcaaaccactattcatggtgtattcccaactaggttgtcggcaactccctgaagtccctggaggtgtccgaggagaaggccaaccagcgcgtggaggagttcaagcgcgagatgaagaccctgtccatcaagttgaaggaggccgagcagcgcgccgagcacgccgagaagcaagtgaagcgcctgcagaaggaggtcgacaggctagagggtatgtatccaacttcctacgcccctggcacattcactcagccattttccgcggaggtatctctccacgggacaccggagatgctgtccaccggaagtgatccgcctcgaacggccggatcgctggcttcaactaatgctcgcattgtatttatcgccataaggatattaataattgtacttagtactctgctttcattaattgacgttccacattcacacatctcgctcgctcgcccttttttttgaatatctctctatatatatatttgtataaatgaacaacaaacaaatgctttttgcagaccgtctcttcaatgagaaggaaaaatacaaagcaatctgcgacgatttggaccagacatttgccgaacttactggatattaaaaaagatcacaaacagaactcacaca

SEQ ID NO: 9785 - DNA, 914 bp, DROSOPHILA
gcacagtgcttttttccagttttcttcccttgtaagtcaaaaacaaaaacacaaacaccatggacgccatcaagaagaagatgcaagcgatgaagcttgagaaggataacgccattgacaaggccgacacctgcgagaaccaagccaaggatgccaactcccgcgccgacaaactgaacgaggaggtgcgcgatctggagaagaagttcgtccaggtggagatcgatctggttaccgccaaggagcagctggagaaggccaacaccgagctggaggagaaggagaaactcctgaccgccaccgagtccgaggtggccacccagaaccgcaaggtgcaacagattgaggaggatctggagaagtccgaggagcgctcgaccaccgcccaacagaagctgctggaggccacccagtcggccgatgagaacaaccgcatgtgcaaggtgctggagaaccgttcccagcaggatgaggagcgcatggaccagctgaccaaccagttgaaggaggcccgcatgctggctgaggatgccgataccaagtccgacgaggtctcccgcaagctggccttcgttgaagacgagctggaggtggctgaggatcgtgtccgctccggcgagtccaagatcatggagctggaggaggagctgaaggttgtcggcaactccctgaagtccctggaggtgtccgaggagaaggccaaccagcgcgtggaggagttcaagcgcgagatgaagaccctgtccatcaagttgaaggaggccgagcagcgcgccgagcacgccgagaagcaagtgaagcgcctgcagaaggaggtcgacaggctagaggaccgtctcttcaatgagaaggaaaaatacaaagcaatctgcgacgatttggaccagacatttgccgaacttactggatattaa

SEQ ID NO: 9786 - protein, 284 aa, DROSOPHILA
MDAIKKKMQAMKLEKDNAIDKADTCENQAKDANSRADKLNEEVRDLEKKFVQVEIDLVTAKEQLEKANTELEEKEKLLTATESEVATQNRKVQQIEEDLEKSEERSTTAQQKLLEATQSADENNRMCKVLENRSQQDEERMDQLTNQLKEARMLAEDADTKSDEVSRKLAFVEDELEVAEDRVRSGESKIMELEEELKVVGNSLKSLEVSEEKANQRVEEFKREMKTLSIKLKEAEQRAEHAEKQVKRLQKEVDRLEDRLFNEKEKYKAICDDLDQTFAELTGY

SEQ ID NO: 9787 - DNA, 2798 bp, DROSOPHILA
tattaaacaggttattattttttttttacaggtggaacatttcattaatacatgacccaaattacatcaatactttagataaagattattaattagaacgttggttatgtttaaaacaatgcctcttaaatgatgaacaataaaaacaaatttcattcgaaaacctatgaatacccgaaccatttattcatgctaagttcctcttcattagtgagtatatttatttgaatcactatccaaaattgcggcaatatcttccctgatttctcgaagtgcagagagcgcgaagagcagaggtcgtaaatacattagtttaagtgaaactgtgggacaaaacaagatattttccatagcagcgtgtttgtcttcccgcttttcccgacttttcccctttatcgtatgatttttaccggctaggcgccaacaatgcaattctttctctcccatcttacgcttcgctgagctggtgagaattcttagggaaaagatagagagaggggagagaaagaagagagtcgaagaatgaggtaacagcacgtgagtctaaggtgcaaagagcgccacattctacattctacaactgcattcttcaatcagatttgtagaattgtacatggacgtacaagattgaaatgtagccaaatgtaaaaatgtaattgaaatatataaagttagttgtttgagtattgaacatatattttattatatgctatttaatcagtatatttttgttttccaattacaaccttgtaaatcatagaatcgtagcttgaacaaaccaaacttatctacatgaataattggaagcggtttagttagtcattttagacatctaggttatcagcttcatgagattgacaataaaaaacgctgctgaaatggaataacatgaagtctgtcgagtcacacacacttaataccagtttaaaatttaatttatgactaagttgtaaacttagatagacagtatttttattttgtgatactcaaataaatttcttcaaaagcccattctgttaatagttcttttaataaacttggcgtagtatcgcacacccatgtatacgtctggcttttcgttgttgccgcatttgaaagtccacgtgttgatgccacaaacttgccgccccaacagaagtggtccaccggagtcgccgaagcagagagtcttgttgttgtaggcaccggcacagatgatattgggtggcatcttgcgatccagctgcttctcgcaatctcgtttactcacaataccaactttcatcgagcgaaatgttttcttcctggactcatcccaaacgccgccttcgaatccccaaccggctgcaatgagtttatcccttggatgcagtaccgatcgacagagctgggcgtagccgatgtacttgctcctcaagggatacttggtcttcgccaccgcgacatccgcgatgaatttcattttcgcatatttcggatgaatttgcacccttataagtttattcttgttgaagttgttgccgtgccaagtgaattccgctgactttccaccgatcacgtggaacttagacctattcaggttttcgaaacaatgggctgccgtaaggatgtgtcgcggtgttagaagtgttgcggagcagacgagctttctcccattgaagagctgaatgcccactcctccaagagattcgacagtcgtctttatgccattataaatcctgggatggaacctgccagtccactcctctctattcccagcttctgttctcacggaatttagaattaacagcagccgaacgagtgtccaacctgattccatggcttttgaagagcaaatgatgggcttacattctcagaacagtttctttgaatggctcgaaattgattcgttccacgagaaaagtctacagtgactacaaaaagtgttctgtattatttatggtaaattgcaataggttttttgaagatctaagtacaatgacttttgtatacagtatggatacttgtcaagaatttcgattaattcgattaattttgaactttgacgagaaagtctgatttctgatttaggattgatatcttaccatccttaccatccatcctaaactgataaaaatcagccaaactcaaggaaacataatttcggatggagttaagttggaatgccatcttaccataaagaagtttcactggccaatgggattttggccgtgacagcggcgtcgtcgagtcgattacgccaaaagtttgactgtgtgagtggaaagtctaacccattttgctttgagaattcccattggtctttttgtggaatcgcggcacgttttgttgccagtacatttgcggttatgtgctcattgcaggctcacacgcacacacgtaaatgtctatgtattactgtgcgtgcgtgtgtgcgtgcggctcttgccaaattgtcgatttttttatttgtgtttatatgatttttcagctgttctgcattttaaaggaagccgaaaaatggagtgggcaaaacgggggggttattccgagttgctagagatagagcgaaatgcgaggcgcgtcttcagcctcatttcttattataatgtgaaaaatatccttttacaaattcaaaacgttgaaatgtgctatttcttttgttgccgattttaacggccggatagagagattccgtacattcggccctgtgttcataggacccccgtgactctacggatcacgtccgtttggcatgtagtttacgaatctagatattcatcagtgggtattgaaatattcggcgcatcactgggtggtaattttctaacattttcgtc

SEQ ID NO: 9788 - DNA, 798 bp, DROSOPHILA
atggaatcaggttggacactcgttcggctgctgttaattctaaattccgtgagaacagaagctgggaatagagaggagtggactggcaggttccatcccaggatttataatggcataaagacgactgtcgaatctcttggaggagtgggcattcagctcttcaatgggagaaagctcgtctgctccgcaacacttctaacaccgcgacacatccttacggcagcccattgtttcgaaaacctgaataggtctaagttccacgtgatcggtggaaagtcagcggaattcacttggcacggcaacaacttcaacaagaataaacttataagggtgcaaattcatccgaaatatgcgaaaatgaaattcatcgcggatgtcgcggtggcgaagaccaagtatcccttgaggagcaagtacatcggctacgcccagctctgtcgatcggtactgcatccaagggataaactcattgcagccggttggggattcgaaggcggcgtttgggatgagtccaggaagaaaacatttcgctcgatgaaagttggtattgtgagtaaacgagattgcgagaagcagctggatcgcaagatgccacccaatatcatctgtgccggtgcctacaacaacaagactctctgcttcggcgactccggtggaccacttctgttggggcggcaagtttgtggcatcaacacgtggactttcaaatgcggcaacaacgaaaagccagacgtatacatgggtgtgcgatactacgccaagtttattaaaagaactattaacagaatgggcttttga

SEQ ID NO: 9789 - protein, 265 aa, DROSOPHILA
MESGWTLVRLLLILNSVRTEAGNREEWTGRFHPRIYNGIKTTVESLGGVGIQLFNGRKLVCSATLLTPRHILTAAHCFENLNRSKFHVIGGKSAEFTWHGNNFNKNKLIRVQIHPKYAKMKFIADVAVAKTKYPLRSKYIGYAQLCRSVLHPRDKLIAAGWGFEGGVWDESRKKTFRSMKVGIVSKRDCEKQLDRKMPPNIICAGAYNNKTLCFGDSGGPLLLGRQVCGINTWTFKCGNNEKPDVYMGVRYYAKFIKRTINRMGF

SEQ ID NO: 9790 - DNA, 4598 bp, DROSOPHILA
gacttccgatctgttgcaggactccactggagaaggaattggaggcagaacttccgaggatactgactcggccaacgtctctgtccaaaatctgtccagtggttccagtcccgttggcagcttagagcacctccgtgacgactctgaggagcttctggtgggcgtttcgaaggccaccacgcacctgcaggcggagcagttccagagcgacgtgtcgtcggaatcacccaggataattaatcgccgacctcagcgcaagttcaagaatgccattgctattgcctccgccaccaagctggaggacctccatgacgatgtggaggatctgctggccaagacggcgatggagaccagcggccaggaagtgcgtcagcagcgtcaaccggccagccgtcgccgtcttttagcacaatcatttgtgaaacctcaaacaggtttatagttatttcattaattcaaaacataaattggttttaggcatggataggtttcaagttgtttaattactagtgttttggactcgcattttctactatagatagctattcaactatggcattcaggaacgccctagctttgcaaactaactcaccgataccggaccttttggccatcgcaggatgttggcccgcagactcatttcgacgacatccctctttacggcgtacaatcggcacagggaaacggtggtgaagttttcgtccgcactcaggcactcgatgtttgtgaacttggcaactccttggacctgaagtgagctagtgttcggttcataatcccagccggcctagcttacggtcgaacttgcctgcaaaatgtgccacagcccaaacaagaggaataactctgtcaacgtggccatcactaagttcaccaaagagccattaaaaactggcaaactgtggcattataatgttgacgaaagtggcaaaagccagtcaagcgaaaccataatcgatagatatcaatcattacgggcaattatcaattctgtttaattacttgaactttcgaattgttgttgagttttaattaaacaaaaacgtatgggtctgtatccaacaggcagcacttaactaaactaggcgaatgtaaactagatttgggacatgggtgtgtgaggagcgtggtgtgtgtttatggaattgatttgttgtgtttatggccctaatcactggcctcatcttcctcatcctcatcgctggcattgctgtcctcctcgctctcctccggttcgctctcgctcttggcctttttcttcttggcatcgccgtcggatgggggcttgctcttcttcttggcaggctcgttgtccttctcgtcgtcggagctggtggagtcgtcgtccgaaatgtactccttgctcttgaagccgctgcccgaggtattcgccttcttggatggagaaggctccgtcttgcgcttcttggaggactttccacccttctcgttgtcgctgtcaccgcccgcttcaggcttgtagttgcgcatctcgtcgtggtagcgctgcttgtccttggccgccgcatcctcccacttggacttgtccttcagctccttccacatctcgccgcccttcttggcgatctcggtaacctttatgcccggattttccctcttgatgctctcgcgcgtgtcgttcagccagagcatgaaagcggtggtggcgcgcttgggtttgccagagtccttcttcttcttggagggtttcttctataaaaacatataaaaacatgttaccataagctataataataagcaaacattactcactgttctctccttctccttgtgttttttctcctttttctctttcttctcggacttcttctccttctttttcttggcgccgtcgctgtcgcctccgccgccactagcatcgctgtcatcgtccgaatcactctccacgttgctgtcatactcctcggccacatcggactcgttctcgttgggcttgaagtcctcatccgtggactcttcatccgagtcgccatcgtcgtcgtcctcctccttttccctcgcctcagccttgaggcgagccagataggcatctggttcgttctcgttgtccgaatcaccaaagtccacgtccttgtagccgctcttgtccttgcccatgttgctgacatgcaacttcttctgtgtgatgtagtcgaagagcttggcatactcctccttctcgatggaggagaagatgtgaacagttccgttcttgagcgtcacttcgaagtcgaaagatcgcgtggatccgccgctgcgggcaaagttcacagaactaatctcctcaaagcggatatgcagcggtggcttgtggatatagatgaatcctcgctccaggggatacagatatccagctgcagccttgaacgagcagcccactgcagccgtgccagagtgtccgataaagttaccgggtccggtaatttttcgaccgatcagcaccttcatcactttgcccatcacctcgtacaccggcccggagatctctttctccagcttgccctcgtacttgtctcgcaactcggcttccgagaatggcagctcaatggtggtctcctcatcgggagcaaacagcaggaccaggtagtggtaacgcgtttgtccctgcttgatgggcggatccaaggagagcacaaagaacatctgtcgactgtctttgtggggcagcatgaagagccgcagcaccgagtccatgggaatcttgtagtcgaacgtcttgccgtgcagctggaagaaggtcgagaagatcttgatgtcatagcgaccgcgaggcgtgaggatctggatctctctgaaaatggcgatggactcgcccgaagccgagatgaccgaggccttgctcattacgttctggtggaacttgtctaccggatcctcctcggccgactccacggcgggtatgtggaaccgcatctccagtagacccacgggcgcatcgtcgttttggtggaactccagggtgacctcgttcttgccggtcacgcactgcgaaacgtgcgacagcggcacctcgaagatggtcttcgactccttgtcgaagctcaggacggagcccatgaagcgggcggtgccccagttccagcccttgacgcacatctccttctcgaccatctcctgcgagtaggcagccttgataaacttgcccagcttctcgtgctcgctgtcgcggaatccggtgaagcggtggagcacgccgcctttggtgaacaccctcagtccccaggtgcccacgaacttctgcgaattgatcaggtctatgtcctctgccgagatctgctccaccttgccggtcttggtgttcttgaagatgatgttctgctcggtcatctttaggcgtccggaacacttttttgcgcgcagggaaatggaaaacctcggtcatgcgaaatgtgacaaaatacgccggcttttttgcgactcaccaagactccgcgcacttcggcgtttatgtcgttgtactccagagagtctgtcatcctgcacttcttcctctccagtaacaagataatagatcaactatgtattacgccgccttgcgaaattgtcaccaatttacaataattccggcagacacaaaacaacactgcgcgcctaattttaggttagacgccagtcagctatattagagtgaccgtatgtgtgtttagtatttttgagtgcactattcttaaattgcaatcgatataaactcttaatattccaatgcagtttcctttattgtttatatatatcttgtttgcaatacatgaacaatatatgagtcattattaaattgaaaaattttaatgggcaagccagagcttatttaaagaccataacaattcgctcgatcttttaaaataccaaattgacagtccgaatataaacggtcacttaattcacttgtttacaaaatatttaccgcatattttcagagaaatatagttttaattaaaaatttgaaaatccacttagcgtggggccttaaaactatgcaacgcggtaaaatttccttcgggaaaatcaaactgaatgtaaacgtacctcctgcggagccaagatccaacgaaaccgaggcggaagatgcaaaggagtccactgaagccagcggaaatggcggaggattcaagaaaatggacaaggagcagatgattcggcagatcgaggacgtggccgaagatctggagagccagcacctcaaggaagtgatgggcatcagtggctttggtcgcaaggcggccaaggtgttcgacatcaacgagcagatagaaaaggcgagagttacccgcccgggaatggacaaaaaaagggaggagtccaagccgaaggaggatgaccagaaagacgaggaagaggaggacgtaataggtcccctaccaccagctgtgaccacagacaaggagaaagccacgaaggaatcgtccaaagacgaagactccgatgacgatgattattcgtccgatgaagattcagatgacgaacaaagccttgctaagcgcataccctacacacacgaggtgcagatgcagcacggttcccgcgctgtccttgccctggctggcgatccctcgggtgcccgcttggtctctggttccatagactacgatatgtgcttctgg

SEQ ID NO: 9791 - DNA, 2461 bp, DROSOPHILA
aaattaggcgcgcagtgttgttttgtgtctgccggaattattgtaaattggtgacaatttcgcaaggcggcgtaatacatagttgatctattatcttgttactggagaggaagaagtgcaggatgacagactctctggagtacaacgacataaacgccgaagtgcgcggagtcttgtgttccggacgcctaaagatgaccgagcagaacatcatcttcaagaacaccaagaccggcaaggtggagcagatctcggcagaggacatagacctgatcaattcgcagaagttcgtgggcacctggggactgagggtgttcaccaaaggcggcgtgctccaccgcttcaccggattccgcgacagcgagcacgagaagctgggcaagtttatcaaggctgcctactcgcaggagatggtcgagaaggagatgtgcgtcaagggctggaactggggcaccgcccgcttcatgggctccgtcctgagcttcgacaaggagtcgaagaccatcttcgaggtgccgctgtcgcacgtttcgcagtgcgtgaccggcaagaacgaggtcaccctggagttccaccaaaacgacgatgcgcccgtgggtctactggagatgcggttccacatacccgccgtggagtcggccgaggaggatccggtagacaagttccaccagaacgtaatgagcaaggcctcggtcatctcggcttcgggcgagtccatcgccattttcagagagatccagatcctcacgcctcgcggtcgctatgacatcaagatcttctcgaccttcttccagctgcacggcaagacgttcgactacaagattcccatggactcggtgctgcggctcttcatgctgccccacaaagacagtcgacagatgttctttgtgctctccttggatccgcccatcaagcagggacaaacgcgttaccactacctggtcctgctgtttgctcccgatgaggagaccaccattgagctgccattctcggaagccgagttgcgagacaagtacgagggcaagctggagaaagagatctccgggccggtgtacgaggtgatgggcaaagtgatgaaggtgctgatcggtcgaaaaattaccggacccggtaactttatcggacactctggcacggctgcagtgggctgctcgttcaaggctgcagctggatatctgtatcccctggagcgaggattcatctatatccacaagccaccgctgcatatccgctttgaggagattagttctgtgaactttgcccgcagcggcggatccacgcgatctttcgacttcgaagtgacgctcaagaacggaactgttcacatcttctcctccatcgagaaggaggagtatgccaagctcttcgactacatcacacagaagaagttgcatgtcagcaacatgggcaaggacaagagcggctacaaggacgtggactttggtgattcggacaacgagaacgaaccagatgcctatctggctcgcctcaaggctgaggcgagggaaaaggaggaggacgacgacgatggcgactcggatgaagagtccacggatgaggacttcaagcccaacgagaacgagtccgatgtggccgaggagtatgacagcaacgtggagagtgattcggacgatgacagcgatgctagtggcggcggaggcgacagcgacggcgccaagaaaaagaaggagaagaagtccgagaagaaagagaaaaaggagaaaaaacacaaggagaaggagagaacaaagaaaccctccaagaagaagaaggactctggcaaacccaagcgcgccaccaccgctttcatgctctggctgaacgacacgcgcgagagcatcaagagggaaaatccgggcataaaggttaccgagatcgccaagaagggcggcgagatgtggaaggagctgaaggacaagtccaagtgggaggatgcggcggccaaggacaagcagcgctaccacgacgagatgcgcaactacaagcctgaagcgggcggtgacagcgacaacgagaagggtggaaagtcctccaagaagcgcaagacggagccttctccatccaagaaggcgaatacctcgggcagcggcttcaagagcaaggagtacatttcggacgacgactccaccagctccgacgacgagaaggacaacgagcctgccaagaagaagagcaagcccccatccgacggcgatgccaagaagaaaaaggccaagagcgagagcgaaccggaggagagcgaggaggacagcaatgccagcgatgaggatgaggaagatgaggccagtgattagggccataaacacaacaaatcaattccataaacacacaccacgctcctcacacacccatgtcccaaatctagtttacattcgcctagtttagttaagtgctgcctgttggatacagacccatacgtttttgtttaattaaaactcaacaacaattcgaaagttcaagt

SEQ ID NO: 9792 - protein, 723 aa, DROSOPHILA
MTDSLEYNDINAEVRGVLCSGRLKMTEQNIIFKNTKTGKVEQISAEDIDLINSQKFVGTWGLRVFTKGGVLHRFTGFRDSEHEKLGKFIKAAYSQEMVEKEMCVKGWNWGTARFMGSVLSFDKESKTIFEVPLSHVSQCVTGKNEVTLEFHQNDDAPVGLLEMRFHIPAVESAEEDPVDKFHQNVMSKASVISASGESIAIFREIQILTPRGRYDIKIFSTFFQLHGKTFDYKIPMDSVLRLFMLPHKDSRQMFFVLSLDPPIKQGQTRYHYLVLLFAPDEETTIELPFSEAELRDKYEGKLEKEISGPVYEVMGKVMKVLIGRKITGPGNFIGHSGTAAVGCSFKAAAGYLYPLERGFIYIHKPPLHIRFEEISSVNFARSGGSTRSFDFEVTLKNGTVHIFSSIEKEEYAKLFDYITQKKLHVSNMGKDKSGYKDVDFGDSDNENEPDAYLARLKAEAREKEEDDDDGDSDEESTDEDFKPNENESDVAEEYDSNVESDSDDDSDASGGGGDSDGAKKKKEKKSEKKEKKEKKHKEKERTKKPSKKKKDSGKPKRATTAFMLWLNDTRESIKRENPGIKVTEIAKKGGEMWKELKDKSKWEDAAAKDKQRYHDEMRNYKPEAGGDSDNEKGGKSSKKRKTEPSPSKKANTSGSGFKSKEYISDDDSTSSDDEKDNEPAKKKSKPPSDGDAKKKKAKSESEPEESEEDSNASDEDEEDEASD

SEQ ID NO: 9793 - DNA, 3078 bp, DROSOPHILA
tgagcacaaaagccgcaatttgttttcatctgcgcaaggggcagcaacacttatgtacatacatgtatgtatgtatcttataggtatcgcactgcatcggatgtggacatgtacagagacaagcaacaacgttccgcaatgccacaaagcaagaacttaatcaggctgctggctgctcttcagtggctccggatgtgcactgagagaaagtggagttgaaaaatgaagaaaaattatgaaatgaagagaggttgtaattttttaattaattaaaaagctaagactttcgttattttcgagctagaaacaacgttatttaaataattagtgtcgaatgataaccaagagttaccatgttttaacagcacttttaaacttttataaaaatgtgtcatacttattggtcatttgtttctctcagtgtgagctgcaaatcatccggataggggtcaaggaaccgggtggggctataggacacgccggctaccaattccagttttagttatttaggttgttgcctttgccgttgtttatgctgctattaaatttaattgaaatcaaaattcggcccacatttatgaagagtttatgctgcacatatgtggaatgtgatcggtgggtcggggggccaaaaggttgaggtaggacagggtccgagtgaacgtgttccgtgagtccaggagttgggcagctaaagggttcagttcagccggatcttgaactttaggtgtcgcgagtttagttatgattatattcaaataaagatacaaatgttaaaactagaaattataaagaaatttgttgattgaagaataattttagaaagaatacttagaaagaatatatttcgaacaaatattgtgttaccaaaatgaatttgctaaaaatttctttatattatcccattaccacttcaaaagaaacgttgcagactgattgacaattttttaatttaaattcgaaattcttaaataatgaaccaaatcgtgcgaattcagctgccattcaatagtaaaatccgggggtgtagtacctgggaatggtgtagccgtagaccggagcaggaaccacgacatggtggctgcgagccacagcaactggaatcttggccagcacctggttgcgcacgccttcatcgtggacgcgttgaagatgaagcgacttggccgcagccacttctgcggtatcagaaacgggatgaggcaattgggagtggccaccatgggatccggatgggtctgagccagaaaccgggtgctcgtggtgttcgatagaatggggcacctctggatgagcacttcgaccgctctcaacgacagtgtgatgatgaggaacctcaacgggatggttgccaacaggatgctgagctacagcaacggggtgctcatggtgctcgacgggatgatgtccatctggatgagcacttcggccggtttcgacaacagtgtgatgatgtggaacttccacgggatgatggccaacaggatgctgagctacagcaacgcggtgctcgtggtgctcgacgggatgatgtccatctggatgagcacttcgtccgctttcaacaacagtgtgatgatgtggaacttcaatgggatggtggccaacaggatgctgaactacagcatgcgacacctccgcgtgatgctcaacatggtggtctactggatgcgacgcgctcctgggactaaattctagcgactcctggggaactttagcctttggcagattagtggctgccacatggaaacctttgttgtcggccacatagttaaccgtttgcagctttcccgccgcatcccggtaactatagtatccttgggtgattccgtctagggtgcgggtctcctgtttgctggacaatggttccgaatagccataggagtactgacccaactcatccttggcgatatactggcgctgggtgggcgtgaacacggcggatccctcggcagtgtacgcatagggatagtacaaggccagtccgtgggccaagctgaggcttcctaacagcagaagtggatacttcatggttgggcagtggaagattgcttcgagtgagtcttgttcgtcagttcactggtaactgttgattctgagcctaggtcttcatccttttatacccagcaggttctttcgcgagttctaggttctggttctggctgaggttcctgccggtcagatgcttctattctgatacactgcgaaaaaattctaaaagtatgccatattattatctaagagagtatacaaatgttttatgctcttttaccctaatatagtaacgtgatttttatgacttaaattaaatccaaaaataagtagttcgtaatttgtttaataatgatttgtacaaagcttaaaacataaatttaaatgcatataaataataatattgctaaaaaagactgttcttaaattcctgaaattttaattttatgattatgacaatcattaaaaaaatattttattattgataaaaaaggtggtttattgtacttaaatagaattcatcaaatttgtacaagcacacgtatttcattaaagaataacctaatagtaataatatctgtcacattttaaaatagtaaacagccaattaattttttctccaaatgtatccatcagatgcacttcaatgcaaacgaggagatgcgaatgcgtcgtcgtgtccacttgtgtcgttaacggacattgcagctccgcctttcactccccttttggggatcgacgcctcgtgaaggcgttgtcaatttggtttaattgtggccaaggctggagtgggcccaaatgagggaggcagaccctggttctccgcagcgggaggagcaatcgctgcctggcatctccatctgcatctgcatctggatctgcaagcgagccaagggccttggctgggtggaccatcaaggccaaagaccgcatccagaccagcgtgtaattgatatgcaatcgttgttgctgccacagcattgtggcatctcagcctcctttttgttcgcacactgcaacggggccacgacaacaacagcaacttcaactgcaacagcaaatgcaacaactgtggcaacaaccgac

SEQ ID NO: 9794 - DNA, 1078 bp, DROSOPHILA
gaactgacgaacaagactcactcgaagcaatcttccactgcccaaccatgaagtatccacttctgctgttaggaagcctcagcttggcccacggactggccttgtactatccctatgcgtacactgccgagggatccgccgtgttcacgcccacccagcgccagtatatcgccaaggatgagttgggtcagtactcctatggctattcggaaccattgtccagcaaacaggagacccgcaccctagacggaatcacccaaggatactatagttaccgggatgcggcgggaaagctgcaaacggttaactatgtggccgacaacaaaggtttccatgtggcagccactaatctgccaaaggctaaagttccccaggagtcgctagaatttagtcccaggagcgcgtcgcatccagtagaccaccatgttgagcatcacgcggaggtgtcgcatgctgtagttcagcatcctgttggccaccatcccattgaagttccacatcatcacactgttgttgaaagcggacgaagtgctcatccagatggacatcatcccgtcgagcaccacgagcaccgcgttgctgtagctcagcatcctgttggccatcatcccgtggaagttccacatcatcacactgttgtcgaaaccggccgaagtgctcatccagatggacatcatcccgtcgagcaccatgagcaccccgttgctgtagctcagcatcctgttggcaaccatcccgttgaggttcctcatcatcacactgtcgttgagagcggtcgaagtgctcatccagaggtgccccattctatcgaacaccacgagcacccggtttctggctcagacccatccggatcccatggtggccactcccaattgcctcatcccgtttctgataccgcagaagtggctgcggccaagtcgcttcatcttcaacgcgtccacgatgaaggcgtgcgcaaccaggtgctggccaagattccagttgctgtggctcgcagccaccatgtcgtggttcctgctccggtctacggctacaccattcccaggtactacacccccggattttactattgaatggc

SEQ ID NO: 9795 - protein, 341 aa, DROSOPHILA
MKYPLLLLGSLSLAHGLALYYPYAYTAEGSAVFTPTQRQYIAKDELGQYSYGYSEPLSSKQETRTLDGITQGYYSYRDAAGKLQTVNYVADNKGFHVAATNLPKAKVPQESLEFSPRSASHPVDHHVEHHAEVSHAVVQHPVGHHPIEVPHHHTVVESGRSAHPDGHHPVEHHEHRVAVAQHPVGHHPVEVPHHHTVVETGRSAHPDGHHPVEHHEHPVAVAQHPVGNHPVEVPHHHTVVESGRSAHPEVPHSIEHHEHPVSGSDPSGSHGGHSQLPHPVSDTAEVAAAKSLHLQRVHDEGVRNQVLAKIPVAVARSHHVVVPAPVYGYTIPRYYTPGFYY

SEQ ID NO: 9796 - DNA, 2783 bp, DROSOPHILA
ggtgatggcatcggtaaggagtcctcgaagacaaagaagcatgtaaccttcaaccggatggtggagtattatacctactcggaaactttgaccagctggaagaggcgccttatgtccgacaacgacttggtaggtactgaaacaccacagacatgaattccccattgatacggtctgtgggcttttcagcgccagagcatgccgaccgagtcgaaaacttgctttacaaagcactaggccaatttatgactccggcccacccacattgcccatattgaagaaccaatactgaacaggaacgaaacgctggcggaagttgttaaactgaacgtgacacttttaacctaattggcaaataaacgagagcccgagtcctgccagcgaagcggatgtggacttgtccgttgtttttaatgcattttccgtgtcctgcgatggggaacgaagtcgagcaaatgaccaatgagttattcatgatttgtacctacatttctatattttttgttcgtatattaaaagcataagctagtgcagagtggttacgtctattttggccttcatgctcattcaaagcacgtaagtggtcatgcaatttacaacgctttttgcgcaccgaacggaagaagtaatctgtatttgaaatatttacaattggtaaggcccagtcaatagctggagagaacagagaatggattatagccagattaagacgtcaaaacaagcattcctacgataagtctaagcccagcaactgacctatcccacctatctcacggctaactaatcaataaccagtcggtaattaaaagcacccatattctcctgccagcacctggagacaattgccggatgatgggccttttgggtaatcagcgattgatacgaatgaaatatggccgtgtcatttgacaaccttatccgcacgcgggcaatgcccaatctgtggctataaaaggccacccatcgcagttagttagccatccaaggttgaaccgcaaacatgtccctactaatagcaactttcttagccctgctggccctcacgaatggcgcagtcattcccattggcctggaaccacaaacatcatcgctaggtggccggattgttggaggcacagcctcttccattgaggatcgtccctggcaggtttctctgcagcgttccggaagtcatttctgcggtggatccatcatcagcaacaacatcatcgtgaccgccgcccattgcctggacactccgaccacggtctccaatctccggataagggctggctccaataagcgaacctatggtggcgttctcgtcgaggtggctgccatcaaggcacatgaggcatacaactccaacagcaagattaacgacattggagtggtgcgtctgaagactaagctgacctttggctcgaccatcaaggccattacgatggccagtgcgacgccggctcacggatcagcagctagcatctcaggctggggcaagacctccaccgatggcccctcgtcagcgacgctgctctttgtggacacgagaattgtgggccgttcgcagtgtggcagttccacttacggatatggttccttcatcaaagcaaccatgatctgtgcagcggcgacgaacaaggatgcatgccagggtgattctggtggacctctggtatccggaggccaactggtgggcgtcgtctcctggggacgagattgcgccgtcgccaattatcccggcgtgtatgccaacattgccgaactgagagattgggtccttcaggcccagaagactgtctagctttagttaagcacaataaaatcgcactcatagcacgtatagttaaactgcagctggcagggcttttatttcaactgctgcttccgctcatttactgctcaacagcagtgacttctgaatccagtccccagagccatacatgcaggcagcaggacgtgcccttcctgtgggccacagccgctcgtttggctcatgcaatctgggtcagtccacaggggttggctgccgggtggggccttcaattctggcggggcacaggggcaggcaagcccatggtaagccagttacagcgtttgcatactaaagtcgggtgacatatctgtgacatggctgcgaatgacatgtaaaatctctgtctattccatttacacgcttttgtattactaaaaattaaagttatgtatgccatttatttaaatattcaaatttttttagttcatttgctggaacattttttttttgctaatggtttaacttcctcactgatagtttagtttgaaattcctttgagttcccgtttatgcactgcatgtgcacttaaaatttgctatctctattgtttctaatcggtttaagcgttttacaacttttgattgtcgtcatttaaataaccaatttatggctaacaataaattttgaatgcaaaagtgcctgtcaatgacgtgcaaacattctgtttactttttgtaattgctcttttaaagcttttttaattgtatatcagcggaaaagttggtgcacaatgtacaaaaaaaaaaaaactgttgtaaattattaattatactaaaaacaggctataatttttcataacaatatattgtatatcaactgacaaaagcgcgccatactttaagtagttaagtggaaccgaaaactcccttgaccttccacacgctgcacatctagaaaatcagcacagcatatgtttgcgcatattgaaaaggccaatcgaaagtgtacggtctataaacaaatgaagttgttagcaaacgaatctccg

SEQ ID NO: 9797 - DNA, 783 bp, DROSOPHILA
atgtccctactaatagcaactttcttagccctgctggccctcacgaatggcgcagtcattcccattggcctggaaccacaaacatcatcgctaggtggccggattgttggaggcacagcctcttccattgaggatcgtccctggcaggtttctctgcagcgttccggaagtcatttctgcggtggatccatcatcagcaacaacatcatcgtgaccgccgcccattgcctggacactccgaccacggtctccaatctccggataagggctggctccaataagcgaacctatggtggcgttctcgtcgaggtggctgccatcaaggcacatgaggcatacaactccaacagcaagattaacgacattggagtggtgcgtctgaagactaagctgacctttggctcgaccatcaaggccattacgatggccagtgcgacgccggctcacggatcagcagctagcatctcaggctggggcaagacctccaccgatggcccctcgtcagcgacgctgctctttgtggacacgagaattgtgggccgttcgcagtgtggcagttccacttacggatatggttccttcatcaaagcaaccatgatctgtgcagcggcgacgaacaaggatgcatgccagggtgattctggtggacctctggtatccggaggccaactggtgggcgtcgtctcctggggacgagattgcgccgtcgccaattatcccggcgtgtatgccaacattgccgaactgagagattgggtccttcaggcccagaagactgtctag

SEQ ID NO: 9798 - protein, 260 aa, DROSOPHILA
MSLLIATFLALLALTNGAVIPIGLEPQTSSLGGRIVGGTASSIEDRPWQVSLQRSGSHFCGGSIISNNIIVTAAHCLDTPTTVSNLRIRAGSNKRTYGGVLVEVAAIKAHEAYNSNSKINDIGVVRLKTKLTFGSTIKAITMASATPAHGSAASISGWGKTSTDGPSSATLLFVDTRIVGRSQCGSSTYGYGSFIKATMICAAATNKDACQGDSGGPLVSGGQLVGVVSWGRDCAVANYPGVYANIAELRDWVLQAQKTV

SEQ ID NO: 9799 - DNA, 3499 bp, DROSOPHILA
gttcttggtcaatgcgtccgaggagcgaacgaaatccacctgaacggaatggtcgatgaccaggtcggcagggcagatgggattgattttctcaggattgccgcccagctcgcggacagcatcccgcatggcagcaaaatccacgacggcgggaacgccagtaaagtcctgaaagcagggaatatcttaagaagtcacatacaaacataatctatgtgatgcaataatccacacctgcaatataacacgagctggcttgaaggagacttccacatcgctggtttcctgcttcagcgatggagtccatcccaggatgctctgcacatccttctccagcacatgaaagttgtcacagttgcgcaccgctgattccagcagaacgcgaatggaaaagggcagtgactctgtggggggttaataatattcataaagataacaacaataatgataacgaacaacaataacgattaccaaccatatttgctgtcgatggagggcagatcaaaatacttgtagacgttgccgtcctgggtgaatgactcctggaactgggcaaagggattggcgcctgcaaggaagacaggattagcgtacagatcaaatactcctttttccaattaaatcccaccggagccggacattgtggaaaaattaaacagaaaaccaagcaatgtgatatagagatgagcgcgtgaggaaccgctaccaggcaaaacttgctcatcactaacgcaaacattatattatcgataactgaacatgaaaacaaaccggtacacagtaaaaaatatttatttattacttaaaatgaaacatttgtaaattatagtggaataatttatcatttttgtgattcgaaaataatattggatataatattggattgattgcttttttattttagttcaaaataaggtatttaaaataacttgtttgcatgtctttaaacgcttttcccttcctacatgctaatttcgttaaataaacttaaatattaattatgttttctgcggtttattgcaatagttacatggtaggcttattgtaatgtcacgtagtataattggtatttgtaatctatataaataatatgtataggggattatcatctaaagctgcgtcgggatgcaaagcctgttttatggcgcaagcaatttggcagcggggataacaagtctgtgatggacgtctacaggtagattcgtcgcaggtccttcggcgtggtaatcgagttgcactgcgggcacagctttcgcgcgccgagcgtctgcaaccaacactgctcgcagtggacgtgccagcaggacacggagatggcgggattcttgtagtcgtcgatgcagatcaggcacttgtacttgccctgcgcctgcttttcgtagagccgcagcttggccttcagcgattcgatgatctgctgctggttttgggaggtggatcgcgtggaccgcgacgtagacggctcctcgctggctggtggagcctccacgttgcttgtgctggcaggctcttgctcggtggcttcgctggaatggtttggcttgggcccatcgctggaggagataagtcggcgcacgtagctggtaacatccgcctcggaaacatttccctctgtgtcctcgttgaccagtgggatcacatcgccctcgccatactgcgtaggaccatagatgtgagtgtcatcctcgtccacgttgagatcttcgtcctcgtcgtcctgcgcctgctgactgccattgtatttgattctctggcccaggcccagggcggaatagcctccttgcacgagagtggagacgcgaatgcgcttctgtcccgcccactcgtactcttcatattcctcgctgtcctccgagtcctcactcgaatgccgctcaccattggcctgaccattgcggcggctctggcgcaggcaatgattaacatgctcttggatgttggactgcggaaagttgtggttgcacacgggacaggtgggttggctcgattcggcagcagctacggacggagttgctgcagctggaggaggagcagctgctaccgtaggatttacagttgctggtggggcaggagaagccggacgcttcctggtgcgctggcgctgacgggcctgccgattgcgctgcacccgctggaacacgctccacggttgtctgccccccgataccgaaccggattcctcggacgcggttgctccgctagttggggtcggtggagtgacagcgctaatgggattgtgcaatcgctccatctccacttggcagtgatcggccacctgactgcgcttgatcttcacgtcgcatgtgggacagatcacgtcgtcgtcgctgtttctgctcaagtgctgggcgaagttctcgccgttggacaccgtgtccgtagccatcgattcctcggatccaccgcggactcttaagggtaaacgaagttaaaagattctgtagtcggattttgttttgttcgataatctctgtccaagccacgcgacgccgatttcttacgttctcgtacggtggaaaacggtcacactgatttcgttatttttcgtgtcagtggaagtggtcattgcgatatacatcgtaaaaccgttacaaaagcgccaagcacagtgattaatatgcttaagcaataattaaaattttattcacttaaaaatatctttataataattgattatttgtttgaattccgtgttaattaaaacttcaaagtttgcattttgcattccaacaactcttttgaccttaagtcttacaataaaataattaaacgtactgatttcttaatttttactctactctggttggtcttaatacagcaatatatatatattatcagattgcgttgtttacatgcccgatataacatgtgacagatagtgtctctccctcactgttaggaaatttttataaagcacagcccccgctttgataaaagtttaaacatccgaaatgtaagctattttaatttcctttcttcgttaaattaaataatttgacggtaaatgtaaattaactgatagttccatggcactttatcgctatcgagaaatgcccagccaaaacgatagtatcgagacaacatcgatttaagttccagctctatgagggaagcaaaacattattattttcgtcgtttttattttttgattatatagaaaagtcagtggtcgaggaacatgtgaaagtggaaaagcgacagagcttttcaagcagagtgtaagtgcatacaggttgaacccaaaaccgacgcatatttttgcgaaagtgcaaagcagacggcgagagtgtgaaaaggcagcgaaaagagaatagagaaaaaatatagcagccagtttctcctgggcgtgagtgtgtgtgcgtgtgccatattgttaaataaggcaaatatagtaaaataaacgtagaaaaaacagcaacaactatgcatcagcagtaccagcagcagcaacaacaacagcagcagggtaaccttgttggctacaacaacaaaatgaacg

SEQ ID NO: 9800 - DNA, 1499 bp, DROSOPHILA
aagaaatcggcgtcgcgtggcttggacagagattatcgaacaaaacaaaatccgactacagaatcttttaacttcgtttacccttaagagtccgcggtggatccgaggaatcgatggctacggacacggtgtccaacggcgagaacttcgcccagcacttgagcagaaacagcgacgacgacgtgatctgtcccacatgcgacgtgaagatcaagcgcagtcaggtggccgatcactgccaagtggagatggagcgattgcacaatcccattagcgctgtcactccaccgaccccaactagcggagcaaccgcgtccgaggaatccggttcggtatcggggggcagacaaccgtggagcgtgttccagcgggtgcagcgcaatcggcaggcccgtcagcgccagcgcaccaggaagcgtccggcttctcctgccccaccagcaactgtaaatcctacggtagcagctgctcctcctccagctgcagcaactccgtccgtagctgctgccgaatcgagccaacccacctgtcccgtgtgcaaccacaactttccgcagtccaacatccaagagcatgttaatcattgcctgcgccagagccgccgcaatggtcaggccaatggtgagcggcattcgagtgaggactcggaggacagcgaggaatatgaagagtacgagtgggcgggacagaagcgcattcgcgtctccactctcgtgcaaggaggctattccgccctgggcctgggccagagaatcaaatacaatggcagtcagcaggcgcaggacgacgaggacgaagatctcaacgtggacgaggatgacactcacatctatggtcctacgcagtatggcgagggcgatgtgatcccactggtcaacgaggacacagagggaaatgtttccgaggcggatgttaccagctacgtgcgccgacttatctcctccagcgatgggcccaagccaaaccattccagcgaagccaccgagcaagagcctgccagcacaagcaacgtggaggctccaccagccagcgaggagccgtctacgtcgcggtccacgcgatccacctcccaaaaccagcagcagatcatcgaatcgctgaaggccaagctgcggctctacgaaaagcaggcgcagggcaagtacaagtgcctgatctgcatcgacgactacaagaatcccgccatctccgtgtcctgctggcacgtccactgcgagcagtgttggttgcagacgctcggcgcgcgaaagctgtgcccgcagtgcaactcgattaccacgccgaaggacctgcgacgaatctacctgtagacgtccatcacagacttgttatccccgctgccaaattgcttgcgccataaaacaggctttgcatcccgacgcagctttagatgataatcccctatacatattatttatatagattacaaataccaattatactacgtgacattacaataagcctaccatgtaactattgcaataaaccgcagaaaacat

SEQ ID NO: 9801 - protein, 398 aa, DROSOPHILA
MATDTVSNGENFAQHLSRNSDDDVICPTCDVKIKRSQVADHCQVEMERLHNPISAVTPPTPTSGATASEESGSVSGGRQPWSVFQRVQRNRQARQRQRTRKRPASPAPPATVNPTVAAAPPPAAATPSVAAAESSQPTCPVCNHNFPQSNIQEHVNHCLRQSRRNGQANGERHSSEDSEDSEEYEEYEWAGQKRIRVSTLVQGGYSALGLGQRIKYNGSQQAQDDEDEDLNVDEDDTHIYGPTQYGEGDVIPLVNEDTEGNVSEADVTSYVRRLISSSDGPKPNHSSEATEQEPASTSNVEAPPASEEPSTSRSTRSTSQNQQQIIESLKAKLRLYEKQAQGKYKCLICIDDYKNPAISVSCWHVHCEQCWLQTLGARKLCPQCNSITTPKDLRRIYL

SEQ ID NO: 9802 - DNA, 4656 bp, DROSOPHILA
aacattgcagtaaaaaaaaacagaagcaaaggggagcaacaaaaacagagagagggcaaaataagagagaggacaaccagacagagcgagatgccaaacaacagctgttcttcttgccagatgcgaaatgggcaatttaatgaaatttatctagatttcactcacttttcacttgccaaacgtcgtgtttgtgcacttttcacaattgtcgcggcgtcacacgtttatttatttacatttctctgcgtttcaggcgctcgcacgctcaattagcgcgctttccgctttgtgccacacattctgtgccagccacaaaaaagcccgcaattcgcactttcatgtgttttcggctatttctgcgatcgtttttcctgcacttgcactgctcaatagctaatgtttagttaattgacactttctaagcgttttgcgtatattttttacgaattattttggcaaaacgacgcggtaccagcgtcaacgtccgcattcttcaaaatcggcgaatgaactgaacaaaacgaactgcgcaagttgggcaataggaacagctgaccgcgctgccagactgccgaacggaaactcgctgcgagagtctggcagcacttgcaaccatcgatataaactattggtaacgaatatttaaagaattaactttatagttccattgaaaatacatacataaaacaactataattatgatacctaacataaaacatcgtaatatcttatttatagttatcttttgtatgcaatattcaattttaagttaattagataaacaccaaacgtttttttatttgtgaaaatagaaaaagaattcaatagaaacaagttttcaaggcaatctgcatattcttaaatccaactttatgggcacttttgaatattcatttattttgcagccctagcaatcgctgagcgataaccataagttgactatcgatagcagcagagcgatatgcaaaacaaacgaaaaaagtaaaagagcggtgtaaagcagacaacatagtttacattttttgcaacaagtttttcaacttaaagccaactcccatcgtccaatggaggtggaccagattcccctggccgacgtggtcttcgtcatcgagggcagcgccatcaacggagcctacatcaacgaactaaagaccaactacatcctgccgactttggagcacttcaccactggctccatcgacgagcgggaatacctgattgcggagcgctttgccactctgtacggtattgtggtctaccgtacagcggccaatctgctggagccagtttgttcaacctatggtccctttctgcagccccaaaaagtgatggagacgatcgaaagattgccactagtgggaggcggaatggagtcctgtgcccacatggccgaaggatttgctgcggcccacggctgttttgatgacatcagcgaaaggcgccagttgctcgatcagaccagcgtccagaggcactgcattctcatctgcaacagtccgccgtaccagatgcccacaacggagtcgtggaagtatccgggcaaatcatgtgagcagctggcggcgctcttcaacgagcgcaaaatcaatctctccattattgcgccacgcaagatgccggtgttgttcaaacttttcatgaaggccgacggagatcagcccattacgagcaaaaactatgccaagaacataagacacctagtgcttctaaagggatacagcctcaaggagagagcacctagtcccaacagcatggcggcccaaatggctgcacccaatgcggcacaggctacagtgcagcagcaacaacaacagcaacaaaatcaagctggtcagcaacaacaagggcagggcatgcccatggacaccactccagcccagcagcagcaacagcaacaacaacagcagcagcaacagcaacaacaaggcaatcctcagcagcaggtcatgaacatgaacacgatgcagcaacagcagcccggtccaaatcccccagcgggcttactcaatccacagcagcagcagcaactattgcagcagcagcagcagaatcaattcgtttccaatcaaatgcagaatcagaacttccagcaaaacgtgggacccggccaaaaccgctggatgtatcccaaccagcctggtcaggcgcgtccgcccttcatgcagggagcaggcaatgtgggcggtgtgggccaaggcggcggcatgcaacagaatccaaattctgctctgatatcgcgcattaatgcgccgccgccgaaccaaactgtgacctcgctgcagcagcagcaacagcagcaggcgcagcagcagcagcagcagcaacaacaggcccaacagcagcagcaacaaaggatgcagatgctgagccagcagcagatgctaaatcaccagcagttgcagcagcaacagcaactggcccagcaacagcaacagcagcagcaaggacagcaacagcagcaggtaaatcccaatgcaggaaacaatatgatgccggctagcaatgccggcaacatgtctaatccgcagcagcagcaacaacaagtaggacaacagtcgaatccgcagcagcagggcaatccgcagcagcaacagcagggaaattcgcagcaggagcaggcctccttgagggaaaagatatggaccggagtgctggagtggtcagagaagccaaagtccgatcaacagaagattccccatacactccagtgtaccgtgtgcaccaacatcaaagatggcgagcccgagatcaaggctgagaactggccgcccaagctgttgatgcagctaatgcccaagcacctagttggcaatattggtgggcagtttctcaaggactcgaaaatggttgtttttcgacccactccaggagaggcactcgattcgctggccaagatgatgacctccggctatgctggctgcgtccacttctcctccatccccaactcaccagcctgtgaccttaaggttctcatcctactctacacgcccgatcgcaacgcttttctgggcttcattcccaataatcaggcaatgtttgtggaacgtctgcgcaaagtcatacagcaaaagcagcacggcaacatgcaacagcagcagcaacagcagcaaatgatgcagcagcaaggcaagtcgcccatggagctgcagcagcaacagcaacaacaacaacagcagcaacagatgcaacaggataactcgcagcagcaacactacaaccagttccaactcaatatgcagatgggtggtggaggtcctggcggcggacctggtcccggtcccggcggcatgcccatgcaacagaatcaaatgcagatgaacatgatgcagcaacagcgaatgccactgggcgtaggtgttggcgtgggtgttggtcccggtggcgtgcccaatccaaacctccagcagcagttgcaacaagtggcgccaaacgtcgccgcaatgcagcagcagcaggcgcaacagcagcagcagcgcatggtgcgtcccatgatgagcaacaacaacccggggctgcgccagctcttgcagcaccagaccacgccaggcaatcagttccggccgcaaatgggtggccagaatcccaatcaaatgggagcaggcggtccaatggtcggcaatcgcaactttgacgacggaaactatgagttcatgtaggctacttaagagtatcgtataaaaaaccagaattaagacagtaaaatattttataaaatccaactgcaagtcttttttggggtagtggcaaaatctatttcccaaaatcgaaatattaatttctccattttcataacatttcgtttatttaattagtaagaatcaagggaaatccgaatttgcacaagacttatattaatcacagaacataatctccgagaaagtccactagtttgctccaccgccgccgccccccgaggatgcggaacttgcacttccagcgctagcggcaaacaccttgcgaagattctgcaagatgctgaacagaaccgttcccgcgctgcccaacgtttccagaacatcgaatccggtgctgtcgatggctgtctcccgatcctcctccgtttcgatggccggggagctgatgttcccgccattgtggtgagtttcgtggacgccatggtgtccaatcagccgatgagtattgctcttcacatgggagtcgttcacgccgccaccgccaactgtgtttatcaggtgcttcaccggctccaggaccggaatatttagcttaatgcgatgccatgcatccgcagtttcggtgaagccctcatgctgctcgccagtggccttcatctcatcatccagctggtttcgctcgctgaccggatcgtcgtccgtctccagggacagctccagactcatgtttcccttaccaggcagttgcaacaaactgccgaagagctgttgcagatgcgccgagttggtggcctccgcctcattctgctcgaaatcgaactcttcacgtactcccgacttgggcttctggttcacaaagctggtcacatgcagcattccattcttggtgccagaatcactggagttggtgggcttggcggacgtcgtcgtcgtcgtcgtcgtcagcagtagcagccacaaaaactgcagatacattcggagaaatggaatctataattggcgcttaatgaccggctgcacg

SEQ ID NO: 9803 - DNA, 2656 bp, DROSOPHILA
cagacaacatagtttacattttttgcaacaagtttttcaacttaaagccaactcccatcgtccaatggaggtggaccagattcccctggccgacgtggtcttcgtcatcgagggcagcgccatcaacggagcctacatcaacgaactaaagaccaactacatcctgccgactttggagcacttcaccactggctccatcgacgagcgggaatacctgattgcggagcgctttgccactctgtacggtattgtggtctaccgtacagcggccaatctgctggagccagtttgttcaacctatggtccctttctgcagccccaaaaagtgatggagacgatcgaaagattgccactagtgggaggcggaatggagtcctgtgcccacatggccgaaggatttgctgcggcccacggctgttttgatgacatcagcgaaaggcgccagttgctcgatcagaccagcgtccagaggcactgcattctcatctgcaacagtccgccgtaccagatgcccacaacggagtcgtggaagtatccgggcaaatcatgtgagcagctggcggcgctcttcaacgagcgcaaaatcaatctctccattattgcgccacgcaagatgccggtgttgttcaaacttttcatgaaggccgacggagatcagcccattacgagcaaaaactatgccaagaacataagacacctagtgcttctaaagggatacagcctcaaggagagagcacctagtcccaacagcatggcggcccaaatggctgcacccaatgcggcacaggctacagtgcagcagcaacaacaacagcaacaaaatcaagctggtcagcaacaacaagggcagggcatgcccatggacaccactccagcccagcagcagcaacagcaacaacaacagcagcagcaacagcaacaacaaggcaatcctcagcagcaggtcatgaacatgaacacgatgcagcaacagcagcccggtccaaatcccccagcgggcttactcaatccacagcagcagcagcaactattgcagcagcagcagcagaatcaattcgtttccaatcaaatgcagaatcagaacttccagcaaaacgtgggacccggccaaaaccgctggatgtatcccaaccagcctggtcaggcgcgtccgcccttcatgcagggagcaggcaatgtgggcggtgtgggccaaggcggcggcatgcaacagaatccaaattctgctctgatatcgcgcattaatgcgccgccgccgaaccaaactgtgacctcgctgcagcagcagcaacagcagcaggcgcagcagcagcagcagcagcaacaacaggcccaacagcagcagcaacaaaggatgcagatgctgagccagcagcagatgctaaatcaccagcagttgcagcagcaacagcaactggcccagcaacagcaacagcagcagcaaggacagcaacagcagcaggtaaatcccaatgcaggaaacaatatgatgccggctagcaatgccggcaacatgtctaatccgcagcagcagcaacaacaagtaggacaacagtcgaatccgcagcagcagggcaatccgcagcagcaacagcagggaaattcgcagcaggagcaggcctccttgagggaaaagatatggaccggagtgctggagtggtcagagaagccaaagtccgatcaacagaagattccccatacactccagtgtaccgtgtgcaccaacatcaaagatggcgagcccgagatcaaggctgagaactggccgcccaagctgttgatgcagctaatgcccaagcacctagttggcaatattggtgggcagtttctcaaggactcgaaaatggttgtttttcgacccactccaggagaggcactcgattcgctggccaagatgatgacctccggctatgctggctgcgtccacttctcctccatccccaactcaccagcctgtgaccttaaggttctcatcctactctacacgcccgatcgcaacgcttttctgggcttcattcccaataatcaggcaatgtttgtggaacgtctgcgcaaagtcatacagcaaaagcagcacggcaacatgcaacagcagcagcaacagcagcaaatgatgcagcagcaaggcaagtcgcccatggagctgcagcagcaacagcaacaacaacaacagcagcaacagatgcaacaggataactcgcagcagcaacactacaaccagttccaactcaatatgcagatgggtggtggaggtcctggcggcggacctggtcccggtcccggcggcatgcccatgcaacagaatcaaatgcagatgaacatgatgcagcaacagcgaatgccactgggcgtaggtgttggcgtgggtgttggtcccggtggcgtgcccaatccaaacctccagcagcagttgcaacaagtggcgccaaacgtcgccgcaatgcagcagcagcaggcgcaacagcagcagcagcgcatggtgcgtcccatgatgagcaacaacaacccggggctgcgccagctcttgcagcaccagaccacgccaggcaatcagttccggccgcaaatgggtggccagaatcccaatcaaatgggagcaggcggtccaatggtcggcaatcgcaactttgacgacggaaactatgagttcatgtag

SEQ ID NO: 9804 - protein, 863 aa, DROSOPHILA
MEVDQIPLADVVFVIEGSAINGAYINELKTNYILPTLEHFTTGSIDEREYLIAERFATLYGIVVYRTAANLLEPVCSTYGPFLQPQKVMETIERLPLVGGGMESCAHMAEGFAAAHGCFDDISERRQLLDQTSVQRHCILICNSPPYQMPTTESWKYPGKSCEQLAALFNERKINLSIIAPRKMPVLFKLFMKADGDQPITSKNYAKNIRHLVLLKGYSLKERAPSPNSMAAQMAAPNAAQATVQQQQQQQQNQAGQQQQGQGMPMDTTPAQQQQQQQQQQQQQQQQGNPQQQVMNMNTMQQQQPGPNPPAGLLNPQQQQQLLQQQQQNQFVSNQMQNQNFQQNVGPGQNRWMYPNQPGQARPPFMQGAGNVGGVGQGGGMQQNPNSALISRINAPPPNQTVTSLQQQQQQQAQQQQQQQQQAQQQQQQRMQMLSQQQMLNHQQLQQQQQLAQQQQQQQQGQQQQQVNPNAGNNMMPASNAGNMSNPQQQQQQVGQQSNPQQQGNPQQQQQGNSQQEQASLREKIWTGVLEWSEKPKSDQQKIPHTLQCTVCTNIKDGEPEIKAENWPPKLLMQLMPKHLVGNIGGQFLKDSKMVVFRPTPGEALDSLAKMMTSGYAGCVHFSSIPNSPACDLKVLILLYTPDRNAFLGFIPNNQAMFVERLRKVIQQKQHGNMQQQQQQQQMMQQQGKSPMELQQQQQQQQQQQQMQQDNSQQQHYNQFQLNMQMGGGGPGGGPGPGPGGMPMQQNQMQMNMMQQQRMPLGVGVGVGVGPGGVPNPNLQQQLQQVAPNVAAMQQQQAQQQQQRMVRPMMSNNNPGLRQLLQHQTTPGNQFRPQMGGQNPNQMGAGGPMVGNRNFDDGNYEFM

SEQ ID NO: 9805 - DNA, 11230 bp, DROSOPHILA
gttttgtcgcctcgcgtcgctttgtgtgtccatttttgtgtgtcactgtcaacaaattgctcttaatggctcgccgccgggtgggtggtggccactggccacgccccccggcaaccactgaaatgatacaactataaccgaaagccaaccagaacccgcagagcctagcatccagaatgatggcaatcacggcagctctatgtccatcggggtcgtctaattttttgtgatttccgcaccgccagcaacaatttgcaatgcagcgtggaacaaaaactaaataaataaaaaaaaaaaaataaaataaaataaaatatagtatgaaacaaaaatacaataagagcgcaacagcagctgcgctgcggcagcgacgcaacttcgctgcccactcggctagacgaaaagcagtcgcagtcagagatggctaacattttatgccattaaataatttcaactattaaactatttataaaaaagatactataattcaaaatacaatttaattaatacctaaatgtatatttaattttaaatatgagatttatgggaagggatataaatatgaatgcatgtaaatatatgtttaaaaacatgttattttttgtataatatttgagctgtttaatgaatttgttatttacttaaagaattgcttttggttgcttagcctctacagacattttaacataagctgatcatctgcaatgacttagctctcgcactaaaatatgtttgcttaaataattaaaatcttaagtaattaggtgtttccaaagttttgtgcatttgttactatagaataaattccttatcagttttgattaccttcaaaaggcagttttgctagtactacaaactcacaactgtgagtgcaattgtcgggaatcaagccagatgggcatcgctcgctctgccgccgtcgctgcaaaacgctgcgccagcgtcgtcgtcatcgttagcggccgttcttaattcagttgaccaacagacgcagacgacgtcgcagacgcgacacgcgactaaaaaatattgctaaaaagaagttaaatatataattgaaaattatagaattcccacacagttatatatagctgcggtatatatttgcgtaggatactacgcgtgcattcgttactcaactccgcaattttttgagtataaatcaaaaaaaaaaaaaagcgcgcgcgttttcgaaaaagttacacgatttaaattataaaaaaaaggtgacaaaaacataattttttttattccattttgttgttgttgtggtgcgtgtgcgtatcaggatcgttaaatcaaaatgtgtcttatttttgttgtatgtttcttgtttcttcatttttttttttgtttaatgctgggccggcattcgccaggttcgcccacctgaaattaaactgtccaccacagagctgaaaaaatatagaaggagatatatgtatatgtgtatttataaaaaatacgttggcagcaacaagtccaagtccaagtctagggccaaaaaaaaaaaaaaaaaaacacagcgtgtctttttcgtttcattttgcaattattatatttaaaaataaccgaaaacagaagcgaaacaaaggcgtcggccaaataaatgccagacgccgaaaatgccgccaaatgcgccaaaatgaaaaaaatttaacaatattaacaaagaaaaaaaaaagaaaaagaaaagcaaacacttgttgaaaatgcactctttttcttgctgaaggtcattggattccggagaaatattgttgttacaaatattcgaaaaatttgtaaatcgatgataacttgtcgaattcccgaaatgccaaaagttttcgagctaaaattcatggatatccatatccattgcacagcatttccataaatcagtcaaagaatggcatgaaaatttaaataattcatggggtggaaaataggaaaggggttgctatatacttttcccatatatcacattgctttaaagcaatttttaaaatgcttttaaatgcgtgtagttctcatttttaaacaatttttctaagcaataaaactaagagtttgcttttatcaatgaaagagtcattagaacaaatgatatgataagtgaaagcggaaggagcaagaaagaaatccacaagaactaataataatgttgatatgaccgccaagagaggaaatgaatacgcaagtggatttttctgccattattttatcgcatttgaatgaactccgctttagcagcagaagtttattggccatcatgacgcagctgcaataatatttccagcgaatcataggtactggtcgtaactcaatatgaatgtgagtgaattaaatataatacgcttggttggggattagtttgacatgtcatgtctagtctatttttggcaatcacaaccccttaatttttttattggctttcggaaccctgaccttcacttctgggcccagtggccacaataaagataatgggcgggaaaacacacacaagaatatcaccacaactgcgataggtcgagttcaggctccctttgttttcggcttatcttttgatcccgcatgaactcgccggcacactctccttcccattttccagtatttttcatttttttccatcattttccatcatcttttctatttctttagtccaagtacgatgtttgtttggtttgttgctatttggtgggttggtttttttttttttttttatcaagctaattcccaagagagcgctcaattgttggctcaacagatccagatctgggatcgggccacttagtctaacagtaatcgacgctaaacgtcgtctcgtttcggtgccttcagctgattgctgacaacttaatcaaccgaacgaacgagtagagaagaacaaaatcagagctctgaagaaaaggccatgccagctaatatctggatctgggtgtctatctactacacaacacccagatgccactcaacacatcatactacatatactatgtatatagtacacaatgtgcacccgcattgggattgcgctacttatctggtggccagtgtccctgaactttgggcgagatcaatttgcactgtcaccaatttggtttgaaaaatgcgagtgcgccagtgcggcgaatgtgtcaaaatccgtgaatgacagatctttgttctagttgatctatggcgagtccctttcttttcattatctcgtctgggttttgaattgagcatctttgtgctgaaagggttaggcaaataatactaaatatgtacataacaatgacttaatacgagatgcgtgcaagtcctgagaatatttactatatatgtattactatccggaaagctagaaaaagaaaataaatataattaataatataattacttatgaagaacttaaaaatggtaatacgtatggcttaagtaaacttctttagctaaaaatacaataaatgttctaataaacatttacatttaaattttatttcaaaatatattcaattttgaaaaatcgtttcttttacgatatgccttgttataaaacttataagcaatatttgttattttatgtaagtttgtcatttgaatacttccttttaagattcccgaactttatggttgttttagatctatgaaattcgcgttgaggcataccattttcataattctcccggccattcgatttcgaaagatgtttttttgagtagctgcgaacaaaatacagtaaaaatagctctcagccgaccgactcctcgtaaagctgggaatggggccactttggggtctctgggcgcaaaaaactcaaaagattcgtcattttggccaactttgggacataacaaactttgacgcattgcaatttggaaaatttttaagtatctcgcgaaggcgttcgtcactcgaagctaaattatgcccagtattggccccttggaaagttttgatttatttgcgccggtcttcgtgcattttaattgtatttgtttttgtcaaattgttgatttaattgcccaacgaatcgattcgtttggcatccgaaatgcaaattggattggtgccgccatttgattgggcttgggcatgcccgatcaaccatgatctatggccatctgcccttgccctcttgaaatacaaacaataatcaagtattttgtgtggaaatctattcgaaatagcatatgtttagcttttgggttaaatattgtagttagttaaaaggaaaaacataagtgtttagtatgtctgtaattgtaaatatttctctgtactaactagcccatatctttcagctttcccatgtactccatatttcctcttttattaagtttatctatccctttgataagaagtcggctaaagatgaaagccaagctatgattttcgcattcctttgtcttgtaaatataatgagtaattaaaatattgcacactcgcatgtctgaaacacatgtagccatgtatttggacatgggtgtacttattattaatattgcttgtcggtcacttccctttaaaagtacttacccaaacgaagaaactatccaatagccataatttaagcgatttcttatcgaatttttgaaattattgctaattgtttaatcttcacacgtaggcataatgacagccaattccaattgcgatttcatattagttagctggcagttaatttggtttgcaggcgctgcgcaagcgccaaaactaagaattgtaatgtgaaaatgaagttgacagaatttaaattgacgaatggtgaaaattaaacgttattgaataaatgtgtaatgttgcgtcgagcgaaagcctaacaattttgaagttattcacatttgtatattacaaagtaatttaacttaattgaagtataagttatttagctttggtaatgattgccgcgaagcatttgccaaacaaagttgcaattgagtaattatcctttgcctaatgaccaccaccaacacgccacctgtcgttcggttcctgcgaaccgctaagtgcaaatagcaatcaattaaagtgaagcagaatagggaactatttgtgggtatttgtatttaatttgctatggtcatggcacgacgaactctattttggtttccctgtgccatttttcgtgggcgcagccaggaacaagtggatcgtaaaccccaattgcattccgaatgcctcataattgtggcttgttctttcggcccaccgaccatttaacgaaaacgaaacgaaattaaatgcagttgacccaaaaatagcgcgaatgcctgcccgccaggcagcgcaaagaaggcagcagcaaagagtattattaaccagaaaagaaaaaatgggcaatattaaaaagtgcacacaacgcatagggccattcatttcaggcagaactctaaacgatgtacagtggtacttggataaattgaatgaaaatcgcagaaaatattgcaaatgtctcggtgatttgccagttagtaacttcatatttttttaagcacaaatattttttcatatttttttaaattttactttgggacctaagccaaaattgtaatgctatgtgaaaatgtatataaaagtaatggtaacttatataacaccaatttttctcggtgtagccccttaaaactttaaactgctatcaagcacgattaactcaccgcctgtatttgagtgtgtctactttttgagcaccctgttttacgaggggcttttcctcttcagcaagtgtcgtcatcactgcgtgctgggttaagggggggcctagctgcttgttgtttcatgggttaaaagggagggtggtgggtgttgttgtgcgagtgcaagtggcgacgtcaacaattacaaatgtagcccaggtcaggtccgcggtgcaagaggtgctgccctgtccgttggatatgttttaaattttttatttttcccgtttctcattgctggcagcaattaacccaattcccgcgagcaatgacttaacccaacaccaccccatttccgcccacaaaatcccgccgaccacgcgagctcacaatcacaacattcaattatggttatggtcgaaacaacaaaaggaaatccacttgctcgattgaggaaaatgcatttcccactgctaccgactcggtcggcgtcgctgtcgacgtcgtcgcttgtctgacccatttttatacgggacacgcccacacaaggaacttgggggcggtgggcgttgggcggcgggtggtgaacggtgtcgggtagccgagcacacaagccacatcctgccatcaaagttggcgatgacgacagcgatatagttgttgttcgagctgtgacagtggagtttcgctaagtcgaacttaaaagctaacggatgccaaattaaaccaaatgatcaatatctttataatatgaaaagatatttgtggttttataaatattaaagattataaagtggtttttatacctcattttctgtgcacaagcttaagcaaatttatggagactccactgtacttgtcgttcaatgagaatcgcttgagattgtcggtgcttgggccgcattcattttcagtttcagttgctgctgaaagctgctggcgaaaactgttgcatattttcgagcgccgaggatatcaaaaactgttgcatttgtttacaacttattttcgaccgttttttttcgtttttttttgccaactacagctccatcacaatcccagcgggatcggcgggaacgggaacaggagccggagcaagtgcagcagcggatgcccacaagatggtgcaccacagcaacgaggatgccatgaacaagatacccctgaagtccgccggcggattggactccgacgaggagaagaatggcggcgaactcatgcaggacactgccgccgccgaggaggcgcgtcgcgaacagatgtgagcataaaaaggagcattaacaatagcatttaggttcgaaatgtccttggcgagttttatgattgcgatgcggagaggaagtggcttacatagaaatcgcatttattggattgagccaactgcaatagtaggcgaatagtaaattcttgtttcggacaatttgcagatacatttctgttctataaacagaagttcaaggatgcggcaaggactacagctttccaagttatttaaaaattaatttttaagggcacagagattttaactaatttttattatcattgggcttagtatcttaatatgagaatttcatttggatttttgcaggcgcgtgaaagttttggcctggatgaagaagctaaccatcgtgctaatctgctttatcggcattgccctgatcagctacgtgataattagcctgtgtttcagtggtgagtatgggaaatcgggttaaaggtacaatagccaactacatccagctaacaattcactcacccactgcaaactaataccgaaactcgattcacatagatattgtatgtgtagatgtgtattgtgtattgtacatatatacgaacagacagactttgggaccgttttttaaagaccgaatttagtcaaactgtcaaaaaatagaacaaaacttcgcttattttctgcatgctttcgattcatcttaaccaagcacctggcatttaatctagttcaaaataatttcttctattgtggcaccaaaaagtattcacatgaacaaaaccccaaccaaaaactttacaccccaactcactaaacaacaacaacaacaacgaagactggcctaaatcgacgccaaatagaaacaacacaacaaccgcaacaacaacgacagcaacaccaacaacaataagcacagaggcaaccataacaacaattgcaccatcaggattagcaacaacaataagcaccagcacaacaacaatagcaacaagtgcaacacaacaaccaccaacagcaacaacaacaacaacagcaaccagaacaacaaccactagcagaacagatagcaatcccagccccacacctaaaacatttcatttaacagatgatgagcagcaacaggaaccggaaacggaaacggacaacattggcaatctcaatctgggaatcacgagcacagcgaccacgccatcggacgacgtcttgcccaatgtggccgcctccacggcggcaacgacagcggcaccacccacctggctagcggatcagatcaagatcgataccagcgaacagtacaactcgatcctgggggtctaccaacatggagccgtgagttccgataaccttgagtgcagcaagatcggcaggtaactatatgcagttctatgggctttaaatttagaatttaaaaagaatttagatcgaatagtgaaggtagaggaatatgggaatgagccaccttttgcccaaacgatcgaggtcatcaaaatttcattttaggattattactaacacaataagaagcgttatacaatttttggatcacctaacagaaagacagcagtgacattaaatattaaatattaattgaatattattattattagcggcatcctgcagaagaatggcagcgcggtggacgcagcgatcgccgcccttctgtgcaacggactgctgaccctgcagagcatgggcatcggtggtggtcacctgatgaacgtctataaccgaaaggagcgccacgccaccgccatcgatgcccgcgaggtggcgccctacgaggccaccgaggacatgtttgcccagcagccggagaattccgacaagggaccgctgagcatcgctgtgcccggcgaggtgatgggctaccatgttgcgcatcagaagttcggacagctgccgtgggcggaactggtggcgccatcgctggagctctgcgagaagggataccatgtgtcgcagcacatggaacgggcactggatatagctttgccgtacatcaaggagcacgagcagtaccagtaaattgtcgaaaagcttgaaaagtgctctaaaagtgtctaaaagaacgccccatttctctgagtgcacttttcagcagcttttcaagcaatttcaaactcatacttttgtgaatagaactcgattctaagcgtatgattctttacagaatctatttgaatgcggaaactggcaagccccatgtcgccggaactgtagttaagccgcccaaaaatctctgcaagacctacaaacttctggccgagaatggacccatggacatgtacaatggaacgatagccaagttgctggcggaggatctgcaggacatgggcagtattattttggccgatgatctggagtcgtacgaggccgatgtaatcaactccatcaccatggacttgggtgacgacaccttgtatgtggtgccgccggtcagttccggttcggtggtggctcacgtcctggccatactgcagggctataacttcacggcacaggatctgtccacggaggagctgaaggcgcgtaccattcatcgatttgccgaagccatgaagttcgcctttgcccagcgtccagaattgggcgatatgcatttcatcgatgcacgagagctggttagccggctgaatagtccggactttggcgatcagaaccgggccaagatcaatgattcccacgtgctgcccgatgcccaggcgtatggagccaacttcgccgccatcgaggatctggatggtacttcgaatttggttgtcttggcgcccaacggtgatgccgtctcagtgaccagctccatcaattcctagtgagtatccattgttagcctccgtgaggtttaaaaataatctggattaatccattcaatatttatccatcagctttggctccggattaattggaccccgtacgggtattgttctcaacaatggaatgaacgattttgcggtgaagaataacattttcgcattgccccagtcgcagtcgaataaaattgaggcccacaagcgggcgatgtcctcgcaatcaccgatccttctggccgataaggatggcaacatgaagatggtcatcggagcagctggaggcagcaagatcattccggccgtggttgaggtggccgccaatgttttgtggttcggcaaggatctacgccaggcggttgatgcaccgcgcttctaccatcaactgatgcccgatgtcctggagtacgaggaggatggcttcacggaatccctgctccaattgctgaccaaacggggacacaagttgaagtccatttccgtgaaaactggatctgtggtcacggccatatcgagaaatgccacagcgatctatgcgaatgccgattatcgtaaacgcggcggagttgcaggtttctagggtgaagagtttaggaggtcacccaaccaaccaatcaaccaaccaaccatccacccatccacccactcactcatacacgcatacgtcacacacacaaaaaacacacacacgcacggaaacattgcattgagattagagtagaactgcccgaaaatgagagcaatttccatggaacaagagagtataaatgggcagatctggtttagagagtggtaaaacagatcgatcgcatcaagtgaaagtatttaagctagctatgtcttttttacatactatgtatatcgtacgttatataaatttatatgctactacctaactactaccttatacaataaaaataaaaacgaacaaaaaccaagaatccaaatcttgaatcatgacaccaggtttcaataactttcgaatggaatttcacataaccattatcttaactggttaattatccattgagaataaccggatgagttctaatttatgcaatgccatgattttggggcagtatttttcgaaagccccccaaaagatgcgaaaactatgtgcttggatttcaataaacttaataggaattctttatttctggaaagcaactctgaacgttttccgacatttgttggcaatcgacatcgctatcgatgtggctataataaaagtagttgtaatcgaaatatacatacatagttatatacaggcgttacgctaagactaagactaattactaccctgtagttttgttgcttgattgccgccctgccctggcattaattcaataatatacaatatatgtgtttaaaactgatatgagcgcatcatgtgtggttccgttatttctttttcggctatatacaactttggactagatgctgtgcgtttcaaaaaaaaaaaactctatgtacactgcgagagaatcgatatcgtttttgataggctctgcgagttaaaatactatctgcttaaaatcaaagtaaatacaatgccattatgctatgacaagctaatagtt

SEQ ID NO: 9806 - DNA, 2636 bp, DROSOPHILA
tcgcagacgcgacacgcgactaaaaaatattgctaaaaagaagttaaatatataattgaaaattatagaattcccacacagttatatatagctgcggtatatatttgcgtaggatactacgcgtgcattcgttactcaactccgcaattttttgagtataaatcaaaaaaaaaaaaaagcgcgcgcgttttcgaaaaagttacacgatttaaattataaaaaaaagctccatcacaatcccagcgggatcggcgggaacgggaacaggagccggagcaagtgcagcagcggatgcccacaagatggtgcaccacagcaacgaggatgccatgaacaagatacccctgaagtccgccggcggattggactccgacgaggagaagaatggcggcgaactcatgcaggacactgccgccgccgaggaggcgcgtcgcgaacagatgcgcgtgaaagttttggcctggatgaagaagctaaccatcgtgctaatctgctttatcggcattgccctgatcagctacgtgataattagcctgtgtttcagtgactggcctaaatcgacgccaaatagaaacaacacaacaaccgcaacaacaacgacagcaacaccaacaacaataagcacagaggcaaccataacaacaattgcaccatcaggattagcaacaacaataagcaccagcacaacaacaatagcaacaagtgcaacacaacaaccaccaacagcaacaacaacaacaacagcaaccagaacaacaaccactagcagaacagatagcaatcccagccccacacctaaaacatttcatttaacagatgatgagcagcaacaggaaccggaaacggaaacggacaacattggcaatctcaatctgggaatcacgagcacagcgaccacgccatcggacgacgtcttgcccaatgtggccgcctccacggcggcaacgacagcggcaccacccacctggctagcggatcagatcaagatcgataccagcgaacagtacaactcgatcctgggggtctaccaacatggagccgtgagttccgataaccttgagtgcagcaagatcggcagcggcatcctgcagaagaatggcagcgcggtggacgcagcgatcgccgcccttctgtgcaacggactgctgaccctgcagagcatgggcatcggtggtggtcacctgatgaacgtctataaccgaaaggagcgccacgccaccgccatcgatgcccgcgaggtggcgccctacgaggccaccgaggacatgtttgcccagcagccggagaattccgacaagggaccgctgagcatcgctgtgcccggcgaggtgatgggctaccatgttgcgcatcagaagttcggacagctgccgtgggcggaactggtggcgccatcgctggagctctgcgagaagggataccatgtgtcgcagcacatggaacgggcactggatatagctttgccgtacatcaaggagcacgagcagtaccaaatctatttgaatgcggaaactggcaagccccatgtcgccggaactgtagttaagccgcccaaaaatctctgcaagacctacaaacttctggccgagaatggacccatggacatgtacaatggaacgatagccaagttgctggcggaggatctgcaggacatgggcagtattattttggccgatgatctggagtcgtacgaggccgatgtaatcaactccatcaccatggacttgggtgacgacaccttgtatgtggtgccgccggtcagttccggttcggtggtggctcacgtcctggccatactgcagggctataacttcacggcacaggatctgtccacggaggagctgaaggcgcgtaccattcatcgatttgccgaagccatgaagttcgcctttgcccagcgtccagaattgggcgatatgcatttcatcgatgcacgagagctggttagccggctgaatagtccggactttggcgatcagaaccgggccaagatcaatgattcccacgtgctgcccgatgcccaggcgtatggagccaacttcgccgccatcgaggatctggatggtacttcgaatttggttgtcttggcgcccaacggtgatgccgtctcagtgaccagctccatcaattcctactttggctccggattaattggaccccgtacgggtattgttctcaacaatggaatgaacgattttgcggtgaagaataacattttcgcattgccccagtcgcagtcgaataaaattgaggcccacaagcgggcgatgtcctcgcaatcaccgatccttctggccgataaggatggcaacatgaagatggtcatcggagcagctggaggcagcaagatcattccggccgtggttgaggtggccgccaatgttttgtggttcggcaaggatctacgccaggcggttgatgcaccgcgcttctaccatcaactgatgcccgatgtcctggagtacgaggaggatggcttcacggaatccctgctccaattgctgaccaaacggggacacaagttgaagtccatttccgtgaaaactggatctgtggtcacggccatatcgagaaatgccacagcgatctatgcgaatgccgattatcgtaaacgcggcggagttgcaggtttctag

SEQ ID NO: 9807 - protein, 777 aa, DROSOPHILA
MVHHSNEDAMNKIPLKSAGGLDSDEEKNGGELMQDTAAAEEARREQMRVKVLAWMKKLTIVLICFIGIALISYVIISLCFSDWPKSTPNRNNTTTATTTTATPTTISTEATITTIAPSGLATTISTSTTTIATSATQQPPTATTTTTATRTTTTSRTDSNPSPTPKTFHLTDDEQQQEPETETDNIGNLNLGITSTATTPSDDVLPNVAASTAATTAAPPTWLADQIKIDTSEQYNSILGVYQHGAVSSDNLECSKIGSGILQKNGSAVDAAIAALLCNGLLTLQSMGIGGGHLMNVYNRKERHATAIDAREVAPYEATEDMFAQQPENSDKGPLSIAVPGEVMGYHVAHQKFGQLPWAELVAPSLELCEKGYHVSQHMERALDIALPYIKEHEQYQIYLNAETGKPHVAGTVVKPPKNLCKTYKLLAENGPMDMYNGTIAKLLAEDLQDMGSIILADDLESYEADVINSITMDLGDDTLYVVPPVSSGSVVAHVLAILQGYNFTAQDLSTEELKARTIHRFAEAMKFAFAQRPELGDMHFIDARELVSRLNSPDFGDQNRAKINDSHVLPDAQAYGANFAAIEDLDGTSNLVVLAPNGDAVSVTSSINSYFGSGLIGPRTGIVLNNGMNDFAVKNNIFALPQSQSNKIEAHKRAMSSQSPILLADKDGNMKMVIGAAGGSKIIPAVVEVAANVLWFGKDLRQAVDAPRFYHQLMPDVLEYEEDGFTESLLQLLTKRGHKLKSISVKTGSVVTAISRNATAIYANADYRKRGGVAGF

SEQ ID NO: 9808 - DNA, 5727 bp, DROSOPHILA
aaattgtcgattacgagttatgtttagttttgttacttttgttagttcagtgtataattaatggagacaactggacaaagcagacgactcatttttgaacaattgaggaaacgaaattttgggttaattactttgctttatccagcgtcatgggttaaatgtgttaagtacattgaattacattgttattacgttaattttgtattgagttacattgttggtttagttagaactttatattcgtgtataagtaaatggagtatttgttattcatacgcttacgcttgcgtttaagtattcttttttactctgttattgttttcgtatctggtgttttaataaagtaatcatttgcagcactatccacttatggacattgtttcacaataaacttgtatatattttgtaatttgttagttatttgtagttctttagtattcgatatattaattctgaatgctcgagtattagataatttttgttagggttattctgttacctttcgtgtcaacatggggttagtcgatctctgttaattatgtaaatattagaatttgtaagtgtatatatatatattctttatctgtatcgttagttttgttaaatatatgcatatataaataaaattatggtttaagtgtgccctctgtatttattattatattctattaagttaattaatctcatagattctgtctctaccgaccgtcagtcgggtccttctttccctatacatagctttgtcttgctgtatcaactggattcgctctgtatcatctgtacgccagactatcccagctcaactttgagctgagccgtgtgcttaactactgatcactcccgaccgaatacagctcccactaatcattcaggctctttagtatctttaagatggtttgtaaatagagataaaaaactggacacagtttcgtctgtgttttatagccaacgcgaaagtatggttttcgatttgttgatccagcctcatcatcattaaacgttaatccttgcacgcaaaaatatatgtataaatatatttgttatgtatatgttttgtatgtggtatatatcgtaaagttcattttgtccattttgtaaatactcctcctacgccttcctctaatcttatgaactcaagtgtacaaagtttctgtgatgttcatgttgatgtgatttttcgatttgcttgttctgcttgtagttcttgtatctgttgggttcagaaaaactgcacgggcaagaacggaaatgtgccaatatgtagcgaaggattagcaggtctgtaagagaatgttaatttggatttagagagatgttcttgtctttgatttgcggtgtataatcgaaagggttttttttgcgttttcggatcaatgcaaatcaatacgggaactttgacggataagcggagaggtatatgtatgttagaagcaagcaagcggattcacataaagcccgtgtattcatttgcattgtccaaagacatcgatttagtgtgggttgtgtgcaaggacgaaggagttctcttctgcgttcgataatatcgcatttcaataccttactaagagcatattgggcactgaagcggttgtggtggtgttgttgctgtggtttttactgcctaatgtgtgattgttgatattgttgctgttggcactcttttggccatccattggaccaagtcgataggaggatataaatgaaacgtcgttggagtttttctcaccgactgggtgaaagttgctattgcaattattgtggctactggtgttaatcatattgctggcccggctgccattgctgctgttgttgttgtggcctgatagctgcggtgggagatttggttgcgactgttggagttgttgctgatttacctaaaagatagttgggattatttttatggatcagtctgtttatcagttgggtactcaccttggaactgccgttggaattgtagtagtagttgggatttatgttcttgccattttggcactcacttgctccgtgatttggcaaaaagttgttgctgctattgggttgggatttcatggtcaaattttgggtggttgccgccgggtttgtacctcgacctccgctggcactactagggtccagcaaatttcacctgttaacatggctgcgattgtgattggaactgagaccagagccgccgatggcatttgattgagaagcgccgccagtgcccagacctacacctccgccgccgccagctgaagagatgactcgaaaagtaacatactgtctgtagaggtaaccactccgtaactcaccagaatagccgggtgaatgctgatagtattctcgtcttccataatccggctcgtagtcggagctttcgtagtgcccaccccgaccaccgccaccgctgatgccgcccactccgcccagaatgttagctggcggtccatggggtccatgtccatgagtgccataggagtagctatcgtacgactggtggggatcataaccaagtccgtcgtcatagccccgactgcaaaatgtgtttgttaagtatgaatccttgataatatctatatctaagtaacatacccataggtttcgtccatggccgtcctggctttttccaatatggacatcactttctgcttcggagccagaacatttttactaaaagatgacggctgtgagctcctaaaaagggttaacgaaagatacaagttaggtacgtttttgacgctaaatctagaaaaatataattcacctatagctgtgatgcggcgtgttcttgacccctccaatcgggttgattgagccgccacccaagacattgttgcctccctgcatgtgagacgtcttcttatagccactcttggcattatcgttgtcattgaggctagtgctgtccatcagctcgcgcagctgctcctgtcggataatgtcgttactgtctgggatcaaatactttctcagctcggccatggcgtaggcgattcgggcgtaggcttctgcgggcggcgctattgtcgatatctcaacatgcagatcgctgttgaggtgagcgtacttgggatccttggagctgcgcaattcctcttctttgactcgatcgcgcatagagttgcggcccaggacggtcatcttgcaaagggtctcctcctgaaggcggcgaagggagttgcccttgggccccagcagttttccaacgaagttgaactgaataataaaagattagcggtcatgaaatgcgccagtcataaaaattgtactcaatttgaattggttacaattactaggtaagctaatcagtgtgaaattcaccttgggatgttctctaatgggaactaaaacacgttgcgagatccgcagcggcttctctctatagatatcggcatacttttgctctctggaaggaatccttcctgtggtctggaccttttctatctctaaaacaagacaagagtaataagataatgcttagaaatgattagaattacttaccgccttccagcagtttctcggcaatgggaaacttcctgtccattcgatttctttccgccatacaatcgcgtatgtactcattggctttctcgtttatttggacattgccgccgggatctcctccatgatggccgtgatcgtgggcggaagcgtcgccattgtgggcgccacctggtgctccaatagatccaccaggcttgcgaggcttgccgccaaaatcgttgtcatcgtcgttgaaagcggaaaagtcaccgttgccgtcgtacttctcggtcatgattgtttcgaccgtttccctaggagctgcggtctataggaaactaatgatataatgtcttacatctaaatacatacatcttctaaacacatattataaaattttcaatttgtaataagattattctttaaggacataaagcttttttggatactgtaagaaaaaggattgctatttcttgaaactatacgtattttggagatacccgatcaatcaaggatttcaatagtattctatctgtattacgagattactaaagtccttaggttttttaagaaaacactctttttaatttttgtaaactatcctagtttcagtggatgagttttcaaggaatttcaatatgcaattatattattattagcgaaaatgtaattatttatcgtaatcaattaggcggcgaaccactaacaacgcttttaccaacacactcccgcgccacacacacacacgtacagtcccacgcacacacacacacacatacacacagtcacaggcattgggcaaaaacaaccaccgtgcaaaattgagcgaatgggaaaatcaaattgttgccgtagttccgcacacaagagctttggtttagcagaaccggtaaaaaggatattatcctttaagattcagtattaacaaaaatagcgcctgattttagacagttttcccctgcaactgctgggtgtccaactggtgccctccgcacgcgtcccgcgacccatgctgcactttcacttttcagtgggacgcagtttttcacctatttttttttctgtatttgcaaattgcatcgagcgctttctgttgcttctgatgcttttctgcaactggactttccagtgcttgctcaacaaacaaacccttttcaagtttgccgttagtttaaaaagttaattaccgctgttaaatggccctttcgattattgctcttaatttaaaaggttgcgaaaaaactgcaattgaattcgcgaaaaaaacaattgtggaagtgtgaccgcggatcgaaagctcaaaaaagcccaattcgcaaaaatgccattgtcttcggcggttagtacagtaagcactgaataatcagaaattatttgggatatgaaagggtagtagttttaatttatgtttattttctttattgcttacattatattaattattacagaattatttatttaccgtataaaaaatgaaatttacaaaaatttaacttcaatgattgcaataaaattaaaactagtgaatgcaaaacagcagtatcattattattacaaagagaatgaagtgtaatattttcttgtatatgaatttctttattaactaaaaatttatttgaaagcaaaaacccaataagaacaatgccaataagaatttagctgataagagacccacctatcgatgagtgcagcatatcgatatcacctcgatatacttcggtctatttcagtatatttgcctaagccaccgctcctaggagagccaaaccagcgaacacaaaggatctataaaagtgggatctatattagatgtattagcattgagccaatccccgaaatgtccgccgtgagccccaactcttgtgtggagacgcccaaggcgccggaatggctatcgaagctggagagtcgtcgggagcaactgaaacgctccaagctgggtcacgaagccggagctggagccccctgtgccgagtgcaaggacaaatgtccggggctggacttgcacttctggcgcaaggtttgccgcaactgcaagtgccccaagattcagcatgtgtgtccggacgacgatgatgccactggctgggcgcagttcgagattctgggccagattagggccaaaccggcgtgtaagtaattgcgaaacatatttataacatataaaggttagaaatgaaaacataacacatactgttgcagatatcaaaatcaaagctctggccagtcagcccgttcagctggagtgggtgccgccaaatgctg

SEQ ID NO: 9809 - DNA, 2184 bp, DROSOPHILA
ttttttcgcgaattcaattgcagttttttcgcaaccttttaaattaagagcaataatcgaaagggccatttaacagcgaccgcagctcctagggaaacggtcgaaacaatcatgaccgagaagtacgacggcaacggtgacttttccgctttcaacgacgatgacaacgattttggcggcaagcctcgcaagcctggtggatctattggagcaccaggtggcgcccacaatggcgacgcttccgcccacgatcacggccatcatggaggagatcccggcggcaatgtccaaataaacgagaaagccaatgagtacatacgcgattgtatggcggaaagaaatcgaatggacaggaagtttcccattgccgagaaactgctggaaggcgagatagaaaaggtccagaccacaggaaggattccttccagagagcaaaagtatgccgatatctatagagagaagccgctgcggatctcgcaacgtgttttagttcccattagagaacatcccaagttcaacttcgttggaaaactgctggggcccaagggcaactcccttcgccgccttcaggaggagaccctttgcaagatgaccgtcctgggccgcaactctatgcgcgatcgagtcaaagaagaggaattgcgcagctccaaggatcccaagtacgctcacctcaacagcgatctgcatgttgagatatcgacaatagcgccgcccgcagaagcctacgcccgaatcgcctacgccatggccgagctgagaaagtatttgatcccagacagtaacgacattatccgacaggagcagctgcgcgagctgatggacagcactagcctcaatgacaacgataatgccaagagtggctataagaagacgtctcacatgcagggaggcaacaatgtcttgggtggcggctcaatcaacccgattggaggggtcaagaacacgccgcatcacagctataggagctcacagccgtcatcttttagtaaaaatgttctggctccgaagcagaaagtgatgtccatattggaaaaagccaggacggccatggacgaaacctatggtcggggctatgacgacggacttggttatgatccccaccagtcgtacgatagctactcctatggcactcatggacatggaccccatggaccgccagctaacattctgggcggagtgggcggcatcagcggtggcggtggtcggggtgggcactacgaaagctccgactacgagccggattatggaagacgagaatactatcagcattcacccggctattctgctggcggcggcggaggtgtaggtctgggcactggcggcgcttctcaatcaaatgccatcggcggctctggtctcagttccaatcacaatcgcagccatgttaacaggtgaaatttgctggaccctagtagtgccagcggaggtcgaggtacaaacccggcggcaaccacccaaaatttgaccatgaaatcccaacccaatagcagcaacaactttttgccaaatcacggagcaagtgagtgccaaaatggcaagaacataaatcccaactactactacaattccaacggcagttccaaggtaaatcagcaacaactccaacagtcgcaaccaaatctcccaccgcagctatcaggccacaacaacaacagcagcaatggcagccgggccagcaatatgattaacaccagtagccacaataattgcaatagcaactttcacccagtcggtgagaaaaactccaacgacgtttcatttatatcctcctatcgacttggtccaatggatggccaaaagagtgccaacagcaacaatatcaacaatcacacattaggcagtaaaaaccacagcaacaacaccaccacaaccgcttcagtgcccaatatgctcttagtaagacctgctaatccttcgctacatattggcacatttccgttcttgcccgtgcagtttttctgaacccaacagatacaagaactacaagcagaacaagcaaatcgaaaaatcacatcaacatgaacatcacagaaactttgtacacttgagttcataagattagaggaaggcgtaggaggagtatttacaaaatggacaaaatgaactttacgatatataccacatacaaaacatatacataacaaatatatttatacatatatttttgcgtgcaaggattaa

SEQ ID NO: 9810 - protein, 428 aa, DROSOPHILA
MTEKYDGNGDFSAFNDDDNDFGGKPRKPGGSIGAPGGAHNGDASAHDHGHHGGDPGGNVQINEKANEYIRDCMAERNRMDRKFPIAEKLLEGEIEKVQTTGRIPSREQKYADIYREKPLRISQRVLVPIREHPKFNFVGKLLGPKGNSLRRLQEETLCKMTVLGRNSMRDRVKEEELRSSKDPKYAHLNSDLHVEISTIAPPAEAYARIAYAMAELRKYLIPDSNDIIRQEQLRELMDSTSLNDNDNAKSGYKKTSHMQGGNNVLGGGSINPIGGVKNTPHHSYRSSQPSSFSKNVLAPKQKVMSILEKARTAMDETYGRGYDDGLGYDPHQSYDSYSYGTHGHGPHGPPANILGGVGGISGGGGRGGHYESSDYEPDYGRREYYQHSPGYSAGGGGGVGLGTGGASQSNAIGGSGLSSNHNRSHVNR

SEQ ID NO: 9811 - DNA, 11081 bp, DROSOPHILA
ctataacattttaaacaggcgtgtttcgatagtgcgacgtaagatagtgttagccttggtaatggcgagcaattagataaagatcactcagctcaaggtctcagagaaatctcgagctaatcaaacatctcgatggaatcccgctttctggacgaaaaattgttttcccacccgtagcaataagaaaaggcgaaacaaaactgtcaagcagagtggacacatgtagcacgatcactttttttgttccggcgatagtgtgtttagctagcctgggtcgccagcttcggctccagctctagtaccaggttcatcttcatctgcagatcagtagctgaaatcaggatcaatgtgagccacatccaggcttaggtttatctctaccgcctgctctcgtctagatctgtcggatgtcaggttgcatagttgggccggcaattgcatgtcgcgatcgtccagcgccgaagatctgcctcaacctcaagctgaacctcatccgcgtccacatccacatcctcaatcctgagtcgctaaaacttgaaagccgcattcgatggctggccgctgacagcgcggaattgtcgttcgcattgtcagctggcatgggcgtcgaaggaggggcggtgctgagccaggggggtttatccgccgacttttgccgacgatatacaaaagatgcaactgtcgctgcttgttgcagcagttgtttctgctttctgtagctgcccagcttgacagttgctgcaagagcaaaaaaatgcgcttgggaaactgccactggcgatgccgctgctgctgccaccgcgagctggcttaaatcaaatattgaaatgcctcagagcagatcggcgaccctgacccgtgcccgtgcccctgtccctgcccccccactccacctccccggataccagctaattgccccacacatggtccaaataattgccccagcaacaacagcccgtaccaatgaattccacttggcttttattttttgtaattttttactcattgtcgttttgtgttttttttttattgatttgttttcgattgcattcgcatttttctgctcgcttttttgtttcttgttttccttcgcattaatactttacaaaattgaatgtctatgagctagtataaattaattaaatattatattcatatcgagctatttatatacttagtttaactagccagctaagtgcatttaattagttagtaatacctacatggatggggtggtttaagttaaatgtgtttacaaaaaaaaatatttcgtgtgcaaaatttcataaattccaagcaactaaaatctttttctgtacttcgtggggttggtatgaatttaatctaaaactaaaagttaatttaagcttatttatgtacaaaaaagaatttgttgttttgtatgaccatggaaatggaaaaacaatagtggaatttttactgttgcattccaaatgttttccagccctggttaccgattttctcgaactattatactgtccacttcgcatacgttttggtcctgcccaaagcagtatgcaagcagttcaagcagtgctcgctagagagaaggaaggagctgcgcgctttttgaattttcagtcttgttttcaatgatttaaaaagattttaaacgacagcatgaggagggattcagcagaaagggggcgcgcttcgaagactttaagctacactaaagtattttaaatcgattactattatctaggggtacaaaaaatgggggctttgtaatttacaaaatattttgcttcgattgggagctggcttacatgactaaaaactgggcaaacacatgttgtattcctcacttcttcttgaaatctattcgttaatattccttgtgtaatactgctaaaaaaaaagtgagagcttaaagggttttgcatggtacacttcaggggcggttagtcgtatctttaactaggctatagtctaggttcttaaggtgctaataacaaaggctaagcgtagacaaaatacataacacatacaaagaacgaagagggcggcttcagaggacgggactgggctggaggcgggcagtgtccttacagacacgtgtagatgacctttttggtccgacacagcttgcacttcacctcgcagcaccagtggaaggtgcaggcgcaccgctccacaacgacgacctcgtctcgccgatagccacgcccacagcacatcagcccacagccgtcgacgcccagcgaggtctcattgcactggcggccatgggttcccaggatgccctgccgcaggttcttctcgcagaagctcggcgaaggctccagatagacaaggtccttcgagccgggtggcttgtgctcgggattgtgcgggttcagttggaagtgatatctgcaaggaacaaaacaagaaggtaatgagtaaacatgctattttgtgagattactataattttaaggctgtgttttttttaagaaatgaagttatgattgttaacaaaaaatatcgtggtgattctttacctattatgcttgcgtccctgacgacgtccatttcgtccgcccctttgaccagcctggggcaaactgttgggcgacggcatgttcgggtgatggatcttgctgatcgggtggctgttctctagcaggatgtccggcatatggtcgttcagcatacgctcctcctcctcgccgtagaccagaccagactgcggaataatcaggccgttggagcccacggaattcgagccggctgcattcggactaactggggccagagcgttggtggcccggagactgttggtcacttgcacgcgggtggctccatcgaagcgggccttcagattgtcgccaatcacacggaagttggccagtcgcatccagcaggtcttcactgtacacgatccggacatgccatggcatttgcactcctgtcgcatctccgcttggacgtgctgtagatgagaaaagagcggggagagattgttcattagtatgactttattaggcttcttgcgtatcgactcgcaatatgtttttcacttaattattttgctgttttttcttggccggttgtttttgccgttttgctggctgaatggctggatgggatggctggctggctgggagattggcggcccgcctgccacgttgttgcagttattaaaaatcaataaatgttgttgcaacttgctgtgcgcttgttgcatgtcccccccgaagttgctgtttgtaattgttgtgcgcggaccaaaagtaagaaatcaacgcagttgggggccttctcagttagttcggttagcagcggccgcagcagcccgatgatcatcatcatgctgatcgcaatgattacggagctgcggcccataacaagtaataaaataataacacaggcggtgggctctgctccctccccaaaaacgtcggaggactaggcccggatccggagggatcggtcgactctagctggatacagtgcatgtagtggatgttggcgcagtgtgctactttctacgccccactaaaatggatagcaggagtgacggtgcacagtggtttggtcaggccaaaaaagtccattgcaatatgtgaaaaactaactattatcccaccattaaaactcatttatcggtaattaagaaaacagctctttttacatttctgtataatcacaattttctcaacattcgaccactgtacccctaaaactagagtcctactattttcttgcatgtggaggggaactggaagctgtcaacgagttaatatacgagcgacacaagcgcaaacgagtgcagaaatccccccacattctcattcggatgaaagagacagctggagggggagcgaaagagagagcgctaatctctacaagctaggccaattggcgttcggctccaattaattgtggggacggaaattgtcgtcgctggtttttattagcgctccagtcgtaaatcgcccagccaggcttaaaaccgaacatttggactacttattacgaggtacactgcgaaaagagcatatgaaataaagccaaatcatacctcatttcttatagtattgtatagtagtattttggctctatttgtattcgtttctcagtgtattaatgctgggtatctaaacttaccgctcgacccgcctcgttgttgtgcagattcatcttctcgcgcagattgcgacccctctcgccggtatcgacgaattcccgggagaacttgaacccgaatccgatgttgtcggagcagccgccccactcccaatcccgcacgccggccacactgcccgcctggtggttcgcttgtggagatctcgactggtggctgtagtcgcaggtgcaggactctatcgttccttcactgcaggccctggcaatcgagtgggtcaccgccgcgctggtgattgcgtaaatgaagctcgtctctcggcagcctagaatgattacaaataaaatattttagttagtcaaatgtaacatatttttagaaaattaaaatacagaaatattttttaagcgagtggaatgtccacatggctgatttcatgagttttcttctctgtgcagtcattattttcgccttctgggtgttccacttggcaccgaagaccaataccgcgaccaagacaagatctcaatctcgaccaagtgaagtgatggccggagacgtcgtgggcaagagttgaaattttcgttatgagtaatggcacttgtcttccaaagcctggtcaattatgacacttcaagttatcaatgccacgatggcacggcgaaaaagagagatgaacgcaccaaaacctgacacagattaaacgctcaactataaattccaacttaacactttgggcccatctcggcacaatccattttgagtggacagtttccccttgtggtctttacatttattttttatttttagtaactgcctccgtttctgtttcggtttctgctctgagagcgagaccatcacagataaagaacaatgaaaattgaatttacatgttgcagataatttttcaagtggtttcgcctcggttcatagctcaagatatgatatatatatagggatggtcccgccggtcaggtagctgaaaattcctgggtagcgcgtcttgtcaaccttgtttggaatttccagttgcgttgcgaagagcgtttcaagtgtagtatttattattaaatgaataactctttccctatttgaaatgagtagtaacatttagaatttgaaaggagcaagcccaacaaaaatcactgcctaacttattttcgttgaggtgttgattgacgcatctgtgattgagtagtctgcacttgaagattgacacattctagcgctctccgtatcacggaaaacaacttccgcttggtgttaggaattttgccgcttttgatttcgatttcctggaattcgaccacgaaataatttggtttattttttcgaaactataccgaagtgagcctccaattcccggttaatgtttgtttgtttgtcgttggtggtttcgtttttccttaaataatttcacgtatgtaacgaaattgaaggcgcacacaggtaaattgtgtgtaaatatgtgcaagatgtttgggccgcgataagacgtcggcgcatgcgcaaacggtatgggaatcacagaggcgggggtgcgagaagggatcggaacggggggcggaggagcggactcaggggcgtgacacagtcattggtgactttgttttttttttttctgatgattagcttagcaagaattcgcgttaccttttggaagcgaaatgttgtttgcatttcgtactctccttttgtggctttgctttcctcgttttatgtgtaaatagcgaacaaaagataataaatacgaaatataaaataaaaagcgggggtggtgcaccctgagcaattaagcaaagaaagggtgtggccaaaatggagcaaccaaaaaataaatttccgcatgtaatgcgatatgtttctgtctttctgttttatataattgccaaaacggatttccgctgcgagtgggcgtggctcgagctgattgaaattgagagcaggacgaaaatcagaagcagggtgccttgctgatcctcagcccagcaccaaaaaccgggagtacagctcatctcggggttaagctgcttagtgacagcagcgtcagcagttcccggaatagtttagacctcttgatataaaacccacaggaatataggcataggaatatgcgagacactgggactcagggacacccggggcggcttcgtcacgaactgatgattgccaaaaagggatctgtacgaggaacccaacgaaaatttactaatagagacagcctgttaaagcgtgtggcgtggcaaattgacaaggtgtcaccaattagaaaacaagttaggccagccctaggactaaaaacgacaaaaaaaaaaaagagaacccagtcaagagacaggaatttcggtatgccccgctggcagggttcctacttctttcagtttccagcagtttggaagccactgactcaactccgaaccccaagtgttaatggtgcgctctaggtgttaattagggccaagggcacggcacggcaaatacattaaaaatttgattgtggaaagcgatgaaagtgctgcgataaaaagctgtcaccagggcaataatttcccttttcttttaaagtactccataaaatgtcgagagctcataaaaaggatgttggcggagagtcaaaataacttgataaggtcaagagcctggctataaaagtcagctgccgttgacagacggacgcagcgtaatcggaatatcgaagccacgcgacgcttgccacgcccactatgaacatatatatagggacatcaggtagtttcagtttcagttgcaggatctcaggaaacaggacaaaacagtagctaataaaacagcaggcgagggcgggagtcgtatggatttccagctaaaaacgcgctaggacaaaaactgcgcatgcgcgacttttgtttacattgatataagaaaaactggccgttctcctgggattttgctggcgcagcaggcgaactaaactcccagaagacaagcacgtttgattgatttgaatgactgagtgagtgacaacagtggttcagtggttccagtggtgctgccaacttgtgctcattagcataaacacgctgaaaccgaaacgcaagtggagcaagtgcagcgagcacagagccaactctttgttcctccgacccgatccgatccgattgtccgtccaggggaaagtggccccttcaaaagggtagtcaacccatatacaaaatatatacatgctgccaagtgctcagatcgtattacaataacaaacaagcgccacatacatataccgaagaggtccaggggagtgacatttcataacataaataaagggccagtcaaagggaaaaactggattcgagctgggttatgcaagcaatttgtgtggtagccttgttttctagtagctagctaaggcaaaaaagaaggcgttgccaagaatagatcagtggatcatatttcccatggtaaaaggagtcttaagtgagttgcaagtactgcggcagttattaaatgaagtgttatttttaataaagaaaaaatcatatagttagctcacctcgatcaacgattttgccgaatagatttttgcccctcgagaagtttctcgtcgagcagttccagcggcgatttctgaactggtgttggcactcgctaatggccaagttggcgcccttgaccagggctcccagtacaccgggattgtccctgaccaggcgtcgctgtttccttctcaacgtagagtggatcgctgggtccatgtacatgatgggcgtaatgttgttgggttcgccgaccttggcaatgcccctgaaagaaaatgagccagaaaaccgaaagttaatagagcaatcttcggaaagaggttgtcaaaactattaaatgcttggctgagtttttcgcctaattatgagaacaagaataaaggggacgaggatttccaccagctgaacgatattttttttgtcatattttccaggggcttatgtgtctttccacttgacttgagatcgagctgtttttcttttggcagtgcgtatcttttttttcgttttttcatttgcggcttttctgtgtcttttctatttcgaatatttgttgtttctgggcggtatacgtcaattgccggcgttactcaagcataaaccacacagaaaacgcatatataaattaggtacactcacacggggatggacaaatatttgcagacacctgtcggctaacgcttttcttctctgtgacctgtcataatttattttcttgtttcaattgttgatctttataatattttttctgcgcttcattagcaacaactcgtatatatacatttattttttcacataacaaacaataaacaagtataaacaaatgtttattgacaggcagcggagaatgcaaattaattgccaattcaattgaatgctgattgcggtgggaaccgaacgttgcgcaatgcaacgaaaattaataaaagtacttaaataaaataaaaacttgatcgaaagtgtaacatctgtgggtatccgcaggtcagcgattgccaatcgatttcaattcccaggcggattaaatcgatggcccgaactgagatttatgcgacggcaatccgaagtcgtagccgcaatttgtgtcgttgtgtttttatgtatttgtgttgatttttattgttcaggccgaaatttatgccgttataaaaagttattaaggcttagctgaagttttgcacatgataaaagtcaaacaagcaactcatcaaagccggggaatctctgggagctgggtaataatatcaatgacaaatatcagttagtcccaaaatggttaaaaagccttagtaaataatttgtatttaacgaaacaaaccatttgttgtttaattttaatcgtattcgttcacaatactttagatcaatttacactttcaataaatttgtaaaatgcatatcaacaatttttccgcatgccaaacgaaagacttaggcaacgaacttgatttacttcatcaataactgttgttgcatctctgcggtagatccccaagtcttgacttccttatcgagtctttattgctcccctgccattcacccaaaaccccattcatatctaaaactgtgtcacacacacacaaagtttatcccaagtaaaagttgaatgcgcgcttagaatttttaattgctttcatcaggcgagaagatgaacgaagttgagaagaagtcgaagctttatttcagttttaagtgtgtgtgcattttgtggcttccgcatttggtgcgtgacgcacaagacctttaaactttttttttcttttgattttgtttgctttgtaggtttgttgctgtgggaaatgtttctcgaaatgtttcggcgcgtgccttgttgttgttcgttgacttctgcttttcaatttttccccggctggtgtttgcagatattattttcgcccgcccgctaattgcccaatttaatggaaaatattcaatgaacttaccaccacatggagccccggccccttccggatttctgtttgccctcgacttggctgagactgctgccgccgctgcacagggccatcaggcagatgacgaagatatagctgatatccattattgctgatcgggtttatctgttcgacggcacacacactctcacactgacacacggggtatgatagatacttcccttcgagttgttgtttgtttgcgaatggtttggttatattgaatgtatcgagcaatttcgcgttcaattagcgcactataaatgaggcataatcatcattagcatgcgtatgccgatattgctgctcatatttgtgcgattaattccgctggatcacacggcaatcatgggacacaacaagaacttgtaagttttccacgcatatacaaatatatattgtatcgtaaatttggctgtttcgatagaatacactcggctcgctctagttatagatggctagttatagatcggttcgatcgcggcgtttcgagcggaggagtgaagattgttgcccggttcagtgccaacgcttaactgaaacacacggtgcgttctttcgtccgactctgcgtttgtcagcagcgacccgagatccccgatccgatcgcatcgtcggtcttcgtcttcggatcgcatacacgaccgcccgatggtgtgtgtgtgcgagtggggtggagctataccctgactcctgcattgcagctgcgtgcgccagaagagcaccgctatatggcgcggtgatcgttcgttctccctgtctcttcgtaaacgtttcttgtgtgttgcgctttgaagtgtgcgtgcgtgtgtgtgtgtgcggtatatagccagcatggcccaataagaaatggcggaaatggaaaaactctgcccggcattttcggtgtaatcgattgtattgcccgattatttgcgcaacctcatgaatttcgtcatagctttgactacatttaattatacatatttgtcgcaatattttcgcctatttctgtaagatatttatgggattggttttttatggtgattttgttacgcttactgttcggctaataaaggctttgaactattattttcgactgttgaatttgggttttatctttagcttatgggtgaaaaagtggtattactacttttaacttctagcttttggctatgaaagtattcttaaatcgatagcaactaaatttagctactctataaatataaatatttagaaacaattaacaagaagtttctttaatatgcctgtttccttaaacctttccatacatttgccgtgtcagaacaagttttctgctgcttttcggagtaaatttcggagtagtcttatatactgcacttggatgcagccagctccctcactctcaggggattgttaccacacactttggcattccgaaccgagtttatgtcttaccttttcctcatccattgcttggccgcttccactaattggacagtttgtgcagcccaagaagagctggtatcccaccccacctttaggggctatcttccccaccta

SEQ ID NO: 9812 - DNA, 2893 bp, DROSOPHILA
actgaaccgggcaacaatcttcactcctccgctcgaaacgccgcgatcgaaccgatctataactagccatctataactagagcgagccgagtgtattctatcgaaacagccaaatttacgatacaatatatatttgtatatgcgtggaaaacttacaagttcttgttgtgtcccatgattgccgtgtgatccagcggaattaatcgcacaaatatgagcagcaatatcggcatacgcatgctaatgatgattatgcctcatttatagtgcgctaattgaacgcgaaattgctcgatacattcaatataaccaaaccattcgcaaacaaacaacaactcgaagggaagtatctatcataccccgtgtgtcagtgtgagagtgtgtgtgccgtcgaacagataaacccgatcagcaataatggatatcagctatatcttcgtcatctgcctgatggccctgtgcagcggcggcagcagtctcagccaagtcgagggcaaacagaaatccggaaggggccggggctccatgtggtggggcattgccaaggtcggcgaacccaacaacattacgcccatcatgtacatggacccagcgatccactctacgttgagaaggaaacagcgacgcctggtcagggacaatcccggtgtactgggagccctggtcaagggcgccaacttggccattagcgagtgccaacaccagttcagaaatcgccgctggaactgctcgacgagaaacttctcgaggggcaaaaatctattcggcaaaatcgttgatcgaggctgccgagagacgagcttcatttacgcaatcaccagcgcggcggtgacccactcgattgccagggcctgcagtgaaggaacgatagagtcctgcacctgcgactacagccaccagtcgagatctccacaagcgaaccaccaggcgggcagtgtggccggcgtgcgggattgggagtggggcggctgctccgacaacatcggattcgggttcaagttctcccgggaattcgtcgataccggcgagaggggtcgcaatctgcgcgagaagatgaatctgcacaacaacgaggcgggtcgagcgcacgtccaagcggagatgcgacaggagtgcaaatgccatggcatgtccggatcgtgtacagtgaagacctgctggatgcgactggccaacttccgtgtgattggcgacaatctgaaggcccgcttcgatggagccacccgcgtgcaagtgaccaacagtctccgggccaccaacgctctggccccagttagtccgaatgcagccggctcgaattccgtgggctccaacggcctgattattccgcagtctggtctggtctacggcgaggaggaggagcgtatgctgaacgaccatatgccggacatcctgctagagaacagccacccgatcagcaagatccatcacccgaacatgccgtcgcccaacagtttgccccaggctggtcaaaggggcggacgaaatggacgtcgtcagggacgcaagcataatagatatcacttccaactgaacccgcacaatcccgagcacaagccacccggctcgaaggaccttgtctatctggagccttcgccgagcttctgcgagaagaacctgcggcagggcatcctgggaacccatggccgccagtgcaatgagacctcgctgggcgtcgacggctgtgggctgatgtgctgtgggcgtggctatcggcgagacgaggtcgtcgttgtggagcggtgcgcctgcaccttccactggtgctgcgaggtgaagtgcaagctgtgtcggaccaaaaaggtcatctacacgtgtctgtaaggacactgcccgcctccagcccagtcccgtcctctgaagccgccctcttcgttctttgtatgtgttatgtattttgtctacgcttagcctttgttattagcaccttaagaacctagactatagcctagttaaagatacgactaaccgcccctgaagtgtaccatgcaaaaccctttaagctctcactttttttttagcagtattacacaaggaatattaacgaatagatttcaagaagaagtgaggaatacaacatgtgtttgcccagtttttagtcatgtaagccagctcccaatcgaagcaaaatattttgtaaattacaaagcccccattttttgtacccctagataatagtaatcgatttaaaatactttagtgtagcttaaagtcttcgaagcgcgccccctttctgctgaatccctcctcatgctgtcgtttaaaatctttttaaatcattgaaaacaagactgaaaattcaaaaagcgcgcagctccttccttctctctagcgagcactgcttgaactgcttgcatactgctttgggcaggaccaaaacgtatgcgaagtggacagtataatagttcgagaaaatcggtaaccagggctggaaaacatttggaatgcaacagtaaaaattccactattgtttttccatttccatggtcatacaaaacaacaaattcttttttgtacataaataagcttaaattaacttttagttttagattaaattcataccaaccccacgaagtacagaaaaagattttagttgcttggaatttatgaaattttgcacacgaaatatttttttttgtaaacacatttaacttaaaccaccccatccatgtaggtattactaactaattaaatgcacttagctggctagttaaactaagtatataaatagctcgatatgaatataatatttaattaatttatactagctcatagacattcaattttgtaaagtattaatgcgaaggaaaacaagaaacaaaaaagcgagcagaaaaatgcgaatgcaatcgaaaacaaatcaataaaaaaaaaacacaaaacgacaatgagt

SEQ ID NO: 9813 - protein, 468 aa, DROSOPHILA
MDISYIFVICLMALCSGGSSLSQVEGKQKSGRGRGSMWWGIAKVGEPNNITPIMYMDPAIHSTLRRKQRRLVRDNPGVLGALVKGANLAISECQHQFRNRRWNCSTRNFSRGKNLFGKIVDRGCRETSFIYAITSAAVTHSIARACSEGTIESCTCDYSHQSRSPQANHQAGSVAGVRDWEWGGCSDNIGFGFKFSREFVDTGERGRNLREKMNLHNNEAGRAHVQAEMRQECKCHGMSGSCTVKTCWMRLANFRVIGDNLKARFDGATRVQVTNSLRATNALAPVSPNAAGSNSVGSNGLIIPQSGLVYGEEEERMLNDHMPDILLENSHPISKIHHPNMPSPNSLPQAGQRGGRNGRRQGRKHNRYHFQLNPHNPEHKPPGSKDLVYLEPSPSFCEKNLRQGILGTHGRQCNETSLGVDGCGLMCCGRGYRRDEVVVVERCACTFHWCCEVKCKLCRTKKVIYTCL

SEQ ID NO: 9814 - DNA, 13173 bp, DROSOPHILA
atttttataacctgattagttattttaatttctcttgaaattttgttcaagagcaaaggagcggagagctctacatcgaacagctcttttctacgcatacagtgacagccaacaaaatatgtccttcatattaaaagttcttagactaagtctatattatttttgatcaattggcaccatgtaaaaaaattcttgttttgcattaacttgctttggtaagagcttaactctagacatgagcttatagcttaaagatcctagagtctggagagcttgaggttagggattacttacaggtattcaggagaccggtttcgggtaactcgctgcggcgaaaaggcagacgaaagcggaaaatggaaggcatagcttgctggtgagcaactggtgacagaacataaacatccgagacagattcgcagcggggaaaagccaagaaaagccgcccttgtttggcttccgtttgtagttgtacacaatccgttgctcagttccacgtagaaggcaaactcttttgtggcatcaaacataaatactacataaattaacgcactgatagattggatcgtattctacttaagcacggtgaataatgcatgtgtataaccaacgtacatacatatgaatataagttgataaggcggtaaacaaagccgataaggagtcagtttgtctttagttatagtcgcgacgtttatttttgctttttgccattttgtggttttattaactacagctgtcttcattcgaaattgagacagtctggcagcgctacctcataacagctgttcgcaatctatcgaatatcgctagcagaccgttcaaaaagtccgttaaaaagtacttgcttatataaaagataatatataaatttgtaaaatatatatatatgcatatttttaagtcttgatcgccccaaaattattatctaatttaccttaatgcctttcattcaaatgcatcaagcccacaactcaagttaatacaaaacgcaaaccaataattctaacgcaattgtttattccataaaacgacgggtacaaatgacttaagttctagatcttgttctccaggacaacgcacactactttttacacattgtacaaatggatgtttcgaacaaaaagggttattggatggcaacgtagctaaactgttttgtccggcaagtcaaacaattatttcaatatccgtttcgatggttaactgaaatcaaggattaagagcagttaagcagcaggagaatacattaatcaggcagtcactacacgcaaatgattggaaaatggagggttatgcgagacaagaatcaggtcgagtatgctagagaatattcgttaaagttatggtactaggggatatatatatatatacattctaatatacatgtgtcattcaatatgaatgagtgcgccgggttagatacatattttcagcacttcaagtttcaagttagtttcgttttgtgcttaaaacaggtgtgtgtgtgtgtgtgtgtgatagttcattcaatgggttcgattccctcaacagtctttagaaaatgcatgggtatttcgtactaatagcttcgttgtttacggtctttttaaacaaaaaaaaaaaatagaagaaaacacataaataattgatatcaagttagcaacgagacaacaaaatacaatgcatacaaaatataagaatggcaagaaatggcaattgaacattgggtgaatggcctctcgggttaatgctgatatactggacgtcggcgcgatcgttataactcattctccatgtttgagcgaacgtttcgcagcacattgtgcgtttttagtatttgatttttgatgtctttctcaacttgtgcttttgctttgttagccatacgcaacttttcgtaggtgtcttcaaatgcgcgcttggtgcggattagtttgcgccgcaactcggcgttttcaagatctaccttggcacagtcgtgtactgtggctgcaccagttgccacgttgctcttgctgtccggtgatgtagattctgtgaaaaaataacactttttagttgggtgatctcttcggtgcgaggttaatccaaacataccctctgactttgcctttggactcgctgatccctccgttttcatctctacagtcttaagcatcgcacgttgggcgttggatacttctacgctagatatcctgccggcatcgctttctatgcccagatcgggagatgatgtgttcaccctctggcccaaaactgcggcagcagcctgtttgcacgttgtagcctgacccgaaggtggccccatgggcaccgccacctcttcggatgtgtaaccggactgggaaacgtcgctgctgttggagcgcttctgcagcagcttttgatgctcttccttgagcgcctccagttgcagcctcaattcctcggaacgcttctccagttgcagcttgtcgttgtaggcctttgtgcgctccatcaccgccttggaggcctgcagagtgctttcgtctagctgctttttgagggcccgcgtggccagctcgttctcgacaagcgtctgcttcagctccttctcattttcttggtgatagtccagggatcgttgcagttccaacaactgttgagcctgctcctggtaagtggtcagtgccacccagtcgcgttcaagagcctcgcgatgcaggcgctcgtgctcttctagctgctgcacggcatctagtttgagtttctgtagctgggattgcagggtttctactgaatcggcgtgcagctgctctatttcctgcatttgctgctgcaacgcctgcagctccatctcggttatctgcgaatctgccgtcagagtgctgtgggccagttttagttgatcaatctgctggttcttaagctccagctggcgttgcaactcgaccatgcgttcctcttcgtgtgatcctatagcatgcaggtctgcagtcagagcttcgttgatagcacgcaattgctccaattgttgagtaatatcgaggcagcgcaattgctcctgcttatatctattgtccagctccaccatttggcattgcacattaagcatacgttcgtctttctgggcaatctgctcctccagctgggcaatacgctcactgttgcgattgcgatcctgacgggtagcacaggttcttccctcgctctccgactcgctgatcgcctgctcaggcgctgccaaactgttggaggtttcgtccaggccaatgcgtgccaaggaaaccttgcggtcaggctctgaccaggcctctgactcgctctggttatcgaactgctgggagggcagcggtaaggagcggcgctctttcctctgtccttctgagctgcgtcgcttttccaactcctttttaagagccttattctcggcctttaagttctctacagtcggagccatcgaagtagcggcgtgcagctcttcgtgggaattgaaagttttgtggcttgcatcaccttcggtgtacaagatctcggatagattgcacagctgagcgaggctttgatcagccaaggatgtagctgttatattcagagtcatattaagactcttggaaagatccaagctgcgatccaccgccttacgcatggcattgcgtcgatcagcggccaacacgccaagaacatctttgtgcttcagcagagagttgaggaaaccagccagctcttccaatcggtttgtcagcacactgcagacatcgacgcattcaagacgccacttatccgccgtctcgacttccgtgcgagcttgttgaagttccaaacgcaactgcccaatcacagcgctgttctgttgatcgtctgccaggcgctggaagagcacatccacctttcgctgcagcagcttgtttcgctccaatgccctcatgtactccgcctccgtgaaggattgctgcagatctgcttctccggcggattcctcacttatctgtggcaacgtcttctgttggttagccagcagcttagtgaggcgctccacctcacgatttttctcccatagctccttgttgaccagattttgcagattcgccgtcttcttctttacttccgtctgcaactgcttgatcttctcctcctgctcgttgatctttagttcgtagcgcaccctgaggttggtggacatttcctgggagctggcctcgttgtcactcatggaacggccgctggaggatggcgaaattaccgtcttagcgcagtcgttctaaaagaaatatatcatttatataatacatttatactttgtataaaacaaaaatcaaatatgtctttaaataatatttttctgtgtcacgcattattagcagtctgcagttggccgacataagtatgtcagaccattatagaagcgaaacatctttacgtattcctagcaattttagcgacctagtagcccacagtgcgtttagctcacgcacacgagaaatcgagggtcattgtgtttaaatttaaatttgagcacaaaacacttttttaataattaaagtactgtgacaaagcaaacacaaaaagttcattaatttgtggaatgagtcactcaattcatctttgcaaattcaattaacaatgctatgcaaatatttgtttatttatgcattgttcctcttgaaataagccttacctccttgtttgccgactgttcgttctcctggttgagcttctttatctccttctcctggctgcttagcttttgcattagcttttgaatggtgcggcatgcctgctcgtggatgcgctcgcgctccttgagcttctcctgggcttcctgcagctcgcaaatcttatccgccagttgggcgcccagatctcgattggcctgaaagtgagcagagaaaaccggaaatggctacagcattgggaggaataaaaaaaaaaaagaccttagcttagaattatctgatacgtttaatgaaacaattattaaattcagacggggggatatgtgagcaaatttaatacactttaacaaaaaatttgtcgacgtctgagagagcaacattgttctaatagaatatggacaacatcggattcatttgattggatttctttgaacgatcaacgaaagcggaacgatcaaatgatgatcaaatagagtacagaatgccagccaacggcatggaatgccccagctcaaaggacaccctaagagggatatggacattctggaggcaggagtgcaaccgcatagccaagaggatgatcttgagggctaagtgccccagcgccaaaggaactgccgaaatccagtcaagcttggcagcgaatagttgtagaaggccgtacttggcgcggtcatggccattaactgggtatgtctggtctggtggtggccctgatgataaacgtactgcggacacggatacgttgcttgttgctgcagctgtggacgacgacgttttaggagctgaccacactgttcgctggatggtaagtgcttcacctgactgcctttccaatggcaaaggctcttgtgcgacgatggtccctgactgccacacaaaacgctgatcgatgagaagtttgaatgcaatgaggatgtgctgccgctacgttcaagagaagatgtgataccaaccccggcatccgccgtcatgcgcatcggctgcacgatggccacgccgcgatccagttgccgcacctccttctgttgtaggttttcggagagctcacggaagtaaacattctgttgcctcatagtctccagttcggcgtttaacttggctatcagtgcctcatagtttagcacgttcttctgcatacttccgcacgacttttccttgcgcttgattgtggcctttttaagggggaaggattgctaggttgagctgggtatggctgaggaagtggaaggttgcgactcacttccaagagcaggatggactgacgctgcacgtccatcgtattggcggcctccttcatcgagcggacttgtcgcttcatatcatgttttaaggttcgaatggaggtcaccagatcctgattctctttcctacaggcttctaattcaaccttaagagagtctatggcctcctaaatatacagggttctctcaaacccaattaccaaacactctacctactctacaggggaattactattaaacggatttacttacgttggatgactcggcggatgctgtttccttttcaagacgctctaccagttcggaattcttgatggccagctcttgaatcttgccctcacaggctgttagggattctaggcgctcggccaacatgaattccagctcgttccgggctgcaacgttacgagcttcgatattcaccagttcctcctccaatctctgcacctccgattcaaggcgcaacattttcctggttttggcaatattttcgacaggttgaccaccagactccgccatctagttaaacaaacaaatgcaattggttactgctttcagataagtgtcgtgctcgtagataaaaactcacctgataggcgtgtatttgctcttgcaactcgtcgattattgcctggctgtcaatgtctgctttgcgctgcaattcctcgtgatgagaaatggctcgagcggcatccttgagcagctccatctttacatcgacagtttttctcaatgtcgcgatttcgatcttggcatcgatgagctgtttgcttaaggattctgtggagctgtctgcccgggcacccggctgaccctcctcgaggaagtagatgcgcagctttagattgaagttctccttgcgcagcgcggacatctgctcctccaattcgcgtacagagcgaccctgtgacggcaagggcgagttgccgccgcctggaggtcgtggaacgtcaaaactggcatctgcaaaggaaacaaagggattgatattgatttagagtgtctaggataatccataaggttatctttactgactaagaatctttagatttctcgaattgtgcgaagacgacgttcgattactattcatgattttatagctttctcctagccgttagggagcaaccacatataaaatataaaacgccaacagtgcggccgaataaatgtgctaatgctcgtgtgtgtagccaaaacggaatcctaatatgcaatggtttccattctaataaaacataacattaagttcataggctgcttgaaaagcagtggaaaaacaggcgaaattcacaaagatctctcaattctaacaccagtgatataagcatttcgaaagcaggaaatatttggcatattcatcgtgaaacttacatgagttctccatggtgacatcttgcagggctcccggactggtgctgtaaaaaaaaaaagaagagagagagagaaatctgttaattaagctcactaaaagcaactcgctgtggtgacctcgcagcacaacatccaataaaacaagtcgactttaaacggtaattaagattttaatttcgcatacataaattctcatatttcggcagtgatgacctaatgggcagactatctctaacaatctttgacctctgccagctcgtcgctggtcatggattctgtggcgtttcctggctggaaacacacatcgatggcatccaatgtgccattgcagaactccggataaacggaccaggccgtccagccctgttgcttctgaatgagccgggcgcactggacggccatggtgatgtcgtcgctcagaaggtgagtgcaattcacattgcaatcgttgaatgcatagtattccgttcgatttggcggcgcacaccagtagcgatcgctgatttggaacagtccgtaatcccgggatccatccgcattggcctggcccacaacgtgcgtgttgaatcggctctcgaattcggcaatacaaagccataggggtaattccgatttcgggacatccagtatgtagagttggccagctaattcgcagggctgcaagcgaatggccagcaggggaatcccgtggaacaggaaccacagcaacgggagtactctcactttcgaccaacttgatcggaccattccaagcgggctccagtcacgaagtggctctccaactccggccatcaaggtatctctctactagtatctaacgatattggctagcgcgcttaatccgattctataaccggtttacattatttggcccggcttatgacttaaattggcattaaatactggaaaatcgacggacaattgcaacaaggtttgatgattgcgttgcactttgttctgaatactaaatatctactattaattaatgacatttcttccatgtacgaaaaactaaactggaaacgattgagatttctattttgagcatagatatattgtctaattaagagatttacccagttttcacgagatgttcattgttgcggaaaagtaacagaaacattttcaatcaaatgaacacctacagtgggatactttaatgatttatcatccaaaatgatttttaatagttattaataaaaaggaactatccctttttattcctatcccattcgaaatatttccagttaagttttaaaatgaaatccatataatcgatataaaaatccttatgaatagcgtcttaaaactatgatccgcaacgtacattttttctatcaattgtagacacacccaatatttgcccaaatcggcaatcaacctctttttattcgatttcgcccaattgcgctgtgaactaaatttcagctaaagtcacacttgaatgatcacacttccaaaaaccacaagtcgcaatggatgagattacacttccgcgccttaaatccgccgtgaatcggggaacagggaggggggctatagattacatacagtgagcccaactattatagaatacataacctaccagaatgttgagttgttggaattcagagagtatctcttgaatggggtgccaggtacatccgacgagtgatttagtgaggtagatcgaaagatacccgccatattctatgtttcatttaacatttgcgctcttattagcgtttatttatattcttttcactttccttcagttctcttctgtagatatttgcagcgactctaattttgagatttaattagttgcttttacacggggtggacacgtcattcctggctgctgctgcggctgctgttgttgttgttgttcttggctttattccctaaatactttcgcggcgcacgccaaacttcgttacgtatccgccatgtcgtcttcgaagggacgggcagccatgagtcatgggctgctgggcgatgcgacgtgcgcagcagcaatcaggagcattcagccgtagagcggaagaagagtcttcaaagagtctggcgctcctacggacgggatgcatccccaacaggacggggggttggacgacggcacatgtgggccaccgcatcgttgaagatactaaccaccacatacactgcaccacgcaccgcctctggtcgttatttattttgggaattgagcaaacagcaaaacggcgaccgcattagaaacagcaatttgtgaacgggacaagaaaattctgccaaacattttcactcattgttttgttttggcattcggctatcgctggttactatggtggtaatgaaaatcaatggtttaagccgacagctgagcgacctggtcactgggaacaacaggtgtgcattttgaaccgtgccggaacatgtgtctcttcgtttagcacctgaactttgccgcgaatgcattttagggccctcacatcgacaggtaaactgcagttaacagcccattctcacctcacctggaacgcagacgcgactcatctacctggctgcctggcgcgcctcgagtgggtgtcaaactatggccaacgacacacaaaggcgcctgccttaatcaacaaagaaatacaataacaataaacagaagtggatcgagactatagcgagtgatatgcgaggaaagcatcttaagacaataaccatatgacgaaggacgcactgaatcttgaaggcttttgaacaggatgtcaaatgtcactcatattcataaatcgaatcaaaacattcataaaatatgcaagatgtttattgttcaaaattagaaaggaaatttcaattgaataagaaataaaatataacattactcaattaaattatgactaaagtgtgtttttttttaattccttatttaaatttaaatgaatgcgataaaaacaaaactaaatgagccatttgcatgataaattctacttatgatccctcaaattacatatcatacaaacgatactgtactttaccaaccaggatgctttgtttttcgagggtagggaagtcagcgttgcagttttggaagggcaacaaaagaggtgctctgttcggtttttaccccataggggttaattccacgagtccatgacccctgatgaatgcacatgtgtatataactaactaacccacacacacacacatggagcatacgacgaaactgcagtctgataagacgacttgtgacgaaattcagagttccaggaagtgcgaaaacgcagataatgatataggttgttgcggctgtcgattgagccatggaatgctctatttcacaaacaaattaattcgtatactttttctccgactaaaattagccgcagcatcgtggcgacaaaaacgacaaacgaacaacaacaacaacagcagcagcagcagcatcagggggcacaagcacagatatctttagtatttctaagtatatattacatttattgtaaatccgagcacactttgtactttatatatctgtgtatttcgatttggttttttgtttttcatccgagaaccaccagcatcccactaatcgcttatccacagcaacgaatgcaataaattacaaatcaatctatcactttttgtatctcgcagtgcaatataaacaattgcacttatgtacagatatgtatgtacaatcaatcactcacacacccgcacaacgcttgacccgctgattgtttctatttacatatatgtatgtatatatgggtaagtgagtatatagatatgtatgtatgtacatatggcacgattgatagccgagaggcaagcaaaataaaccgaaaaacgctctctgcacgtccaaataaaccgaaagctagaacataactgactgaaactgcgatgcgaccgattcagagcgaccaaaggcagagcagcaaacgggcggaaaactcgggctcatctgcgaggaaaaaggaaaatgcgctcagcagatgttacgcatttcccaatgccgtacacagcgagaaagcggtcagcaaactcagttcattggctacgaatagaatacagaaatatctgttgtatacttaagggattacatttgtgttcccaattctttttcttttaaattttcattttcattaggaatcagaatagtaatagtaaatctaaagattataataaaaaaatgtattaaactttgactctattcagcatttgaaaaagtgatgaagcatacaatcttaaaaataaaagtacatcttataagagtaccttacaaatcttatttcatttaaaatcgtaaattaatccaaatcacttaatgtttttaaaaaacattttaaaataaatattgatggaaatttagctttaaaatttttttcagtgcagatgtattattgttcctctcttcgaattttttggggtgggtaatacgcccattgtacgcctgtgcttgtgagtatgcctccccctatggggccgagcagtacggatgcgggagagctccagctgagagcgttagttcccgatcacagtgggcacgatcaccatgtcacatggcgatcatctgctgcgcactcgcagttgccagggatttcgatggatttgccacacaagtcttattggtaagctattgtttatgctagtgttttggacttactcgtctatgcttttggacagtgcctcggctagtttgcgcaggacccttctgtcgatttcggcggcgccattctcctccaggaaactggtcacggtctcaattaaggtgatttccttcaaggacgatgcacaggtaccattgccgtcgccgcaatagtcccgcaaaacctgtttagactggtccatgggaggtcctcaaatagttaactttcgcacacaataattctaacacttgacaatttcacaaaggacgctaacaattacactttttttctgtttggaaaatgaagcgcgctggaacagctgtttctggcgtcagttatcgaaatgctgccatgcgcactggcagcactgccgtacaacgggaaaaagttaacacagcggtatggcaacgctgttcgtcgatttacgttactgcaaagtcgattcttatcgatggtaaacaacatcgacggtttacgaaaattagcattcgcctgataagcaagtagaacactacggccaccagatataacgccatgctataaacgctctgtgggcacgttttcgtcagccccagccacaagcaggccaacttcagtcgggggcagtacacatacagaaaatagagcagcgcaacagagaaaaagctcccccctcgaaaaacctaacaatgtttgctacactgaaaaacaagatcaaggaggaaactggcgatgatgtggtccaatcagccaatcaacgttatcccggcaacaacaacaacaattaccggctacgtagtcgccgcgttagcattaattccaactcagctgatgatgtgggcggtggcggattctacaatgaggtaaactgagcgaaaaaaaaacagtctatttgtgtatacttacacattaaacaaaaacacggataaacaaacaccttcactcttttcgcagtcggagcaattgtgcgagctgcgaagtcagtgcaacgagctcaccacgaagctgtccaccgtcacgcagggattgcagcagctgcaggaggagaagacgcgcgtggacaagaccaacgagattctgctagagagtgtgcgtgtggcccagacgcagaaggacatatactgcgaggagcaggagaagattcagaatctacagcaaatcgagattgacaagctgaagaatctgcttagctttcgggagcaggagtcggtggatcgcatgggtctcatgcgccagcagacccagcaaatcgagtccttgagcgaggaactagaacgtctgcgtcccattgaatccgtggccgaagatttacgcgacgaactagagcaactgcgacattctacacagcag

SEQ ID NO: 9815 - DNA, 4333 bp, DROSOPHILA
ccagaaacagctgttccagcgcgcttcattttccaaacagaaaaaaagtgtaattgttagcgtcctttgtgaaattgtcaagtgttagaattattgtgtgcgaaagttaactatttgaggacctcccatggaccagtctaaacaggttttgcgggactattgcggcgacggcaatggtacctgtgcatcgtccttgaaggaaatcaccttaattgagaccgtgaccagtttcctggaggagaatggcgccgccgaaatcgacagaagggtcctgcgcaaactagccgaggcactgtccaaaagcatagacgacaccagtccgggagccctgcaagatgtcaccatggagaactcatatgccagttttgacgttccacgacctccaggcggcggcaactcgcccttgccgtcacagggtcgctctgtacgcgaattggaggagcagatgtccgcgctgcgcaaggagaacttcaatctaaagctgcgcatctacttcctcgaggagggtcagccgggtgcccgggcagacagctccacagaatccttaagcaaacagctcatcgatgccaagatcgaaatcgcgacattgagaaaaactgtcgatgtaaagatggagctgctcaaggatgccgctcgagccatttctcatcacgaggaattgcagcgcaaagcagacattgacagccaggcaataatcgacgagttgcaagagcaaatacacgcctatcagatggcggagtctggtggtcaacctgtcgaaaatattgccaaaaccaggaaaatgttgcgccttgaatcggaggtgcagagattggaggaggaactggtgaatatcgaagctcgtaacgttgcagcccggaacgagctggaattcatgttggccgagcgcctagaatccctaacagcctgtgagggcaagattcaagagctggccatcaagaattccgaactggtagagcgtcttgaaaaggaaacagcatccgccgagtcatccaacgccaatcgagatctgggcgcccaactggcggataagatttgcgagctgcaggaagcccaggagaagctcaaggagcgcgagcgcatccacgagcaggcatgccgcaccattcaaaagctaatgcaaaagctaagcagccaggagaaggagataaagaagctcaaccaggagaacgaacagtcggcaaacaaggagaacgactgcgctaagacggtaatttcgccatcctccagcggccgttccatgagtgacaacgaggccagctcccaggaaatgtccaccaacctcagggtgcgctacgaactaaagatcaacgagcaggaggagaagatcaagcagttgcagacggaagtaaagaagaagacggcgaatctgcaaaatctggtcaacaaggagctatgggagaaaaatcgtgaggtggagcgcctcactaagctgctggctaaccaacagaagacgttgccacagataagtgaggaatccgccggagaagcagatctgcagcaatccttcacggaggcggagtacatgagggcattggagcgaaacaagctgctgcagcgaaaggtggatgtgctcttccagcgcctggcagacgatcaacagaacagcgctgtgattgggcagttgcgtttggaacttcaacaagctcgcacggaagtcgagacggcggataagtggcgtcttgaatgcgtcgatgtctgcagtgtgctgacaaaccgattggaagagctggctggtttcctcaactctctgctgaagcacaaagatgttcttggcgtgttggccgctgatcgacgcaatgccatgcgtaaggcggtggatcgcagcttggatctttccaagagtcttaatatgactctgaatataacagctacatccttggctgatcaaagcctcgctcagctgtgcaatctatccgagatcttgtacaccgaaggtgatgcaagccacaaaactttcaattcccacgaagagctgcacgccgctacttcgatggctccgactgtagagaacttaaaggccgagaataaggctcttaaaaaggagttggaaaagcgacgcagctcagaaggacagaggaaagagcgccgctccttaccgctgccctcccagcagttcgataaccagagcgagtcagaggcctggtcagagcctgaccgcaaggtttccttggcacgcattggcctggacgaaacctccaacagtttggcagcgcctgagcaggcgatcagcgagtcggagagcgagggaagaacctgtgctacccgtcaggatcgcaatcgcaacagtgagcgtattgcccagctggaggagcagattgcccagaaagacgaacgtatgcttaatgtgcaatgccaaatggtggagctggacaatagatataagcaggagcaattgcgctgcctcgatattactcaacaattggagcaattgcgtgctatcaacgaagctctgactgcagacctgcatgctataggatcacacgaagaggaacgcatggtcgagttgcaacgccagctggagcttaagaaccagcagattgatcaactaaaactggcccacagcactctgacggcagattcgcagataaccgagatggagctgcaggcgttgcagcagcaaatgcaggaaatagagcagctgcacgccgattcagtagaaaccctgcaatcccagctacagaaactcaaactagatgccgtgcagcagctagaagagcacgagcgcctgcatcgcgaggctcttgaacgcgactgggtggcactgaccacttaccaggagcaggctcaacagttgttggaactgcaacgatccctggactatcaccaagaaaatgagaaggagctgaagcagacgcttgtcgagaacgagctggccacgcgggccctcaaaaagcagctagacgaaagcactctgcaggcctccaaggcggtgatggagcgcacaaaggcctacaacgacaagctgcaactggagaagcgttccgaggaattgaggctgcaactggaggcgctcaaggaagagcatcaaaagctgctgcagaagcgctccaacagcagcgacgtttcccagtccggttacacatccgaagaggtggcggtgcccatggggccaccttcgggtcaggctacaacgtgcaaacaggctgctgccgcagttttgggccagagggtgaacacatcatctcccgatctgggcatagaaagcgatgccggcaggatatctagcgtagaagtatccaacgcccaacgtgcgatgcttaagactgtagagatgaaaacggagggatcagcgagtccaaaggcaaagtcagaggaatctacatcaccggacagcaagagcaacgtggcaactggtgcagccacagtacacgactgtgccaaggtagatcttgaaaacgccgagttgcggcgcaaactaatccgcaccaagcgcgcatttgaagacacctacgaaaagttgcgtatggctaacaaagcaaaagcacaagttgagaaagacatcaaaaatcaaatactaaaaacgcacaatgtgctgcgaaacgttcgctcaaacatggagaatgagttataacgatcgcgccgacgtccagtatatcagcattaacccgagaggccattcacccaatgttcaattgccatttcttgccattcttatattttgtatgcattgtattttgttgtctcgttgctaacttgatatcaattatttatgtgttttcttctattttttttttttgtttaaaaagaccgtaaacaacgaagctattagtacgaaatacccatgcattttctaaagactgttgagggaatcgaacccattgaatgaactatcacacacacacacacacacacctgttttaagcacaaaacgaaactaacttgaaacttgaagtgctgaaaatatgtatctaacccggcgcactcattcatattgaatgacacatgtatattagaatgtatatatatatatatcccctagtaccataactttaacgaatattctctagcatactcgacctgattcttgtctcgcataaccctccattttccaatcatttgcgtgtagtgactgcctgattaatgtattctcctgctgcttaactgctcttaatccttgatttcagttaaccatcgaaacggatattgaaataattgtttgacttgccggacaaaacagtttagctacgttgccatccaataaccctttttgttcgaaacatccatttgtacaatgtgtaaaaagtagtgtgcgttgtcctggagaacaagatctagaacttaagtcatttgtacccgtcgttttatggaataaacaattgcgttagaatta

SEQ ID NO: 9816 - protein, 1148 aa, DROSOPHILA
MDQSKQVLRDYCGDGNGTCASSLKEITLIETVTSFLEENGAAEIDRRVLRKLAEALSKSIDDTSPGALQDVTMENSYASFDVPRPPGGGNSPLPSQGRSVRELEEQMSALRKENFNLKLRIYFLEEGQPGARADSSTESLSKQLIDAKIEIATLRKTVDVKMELLKDAARAISHHEELQRKADIDSQAIIDELQEQIHAYQMAESGGQPVENIAKTRKMLRLESEVQRLEEELVNIEARNVAARNELEFMLAERLESLTACEGKIQELAIKNSELVERLEKETASAESSNANRDLGAQLADKICELQEAQEKLKERERIHEQACRTIQKLMQKLSSQEKEIKKLNQENEQSANKENDCAKTVISPSSSGRSMSDNEASSQEMSTNLRVRYELKINEQEEKIKQLQTEVKKKTANLQNLVNKELWEKNREVERLTKLLANQQKTLPQISEESAGEADLQQSFTEAEYMRALERNKLLQRKVDVLFQRLADDQQNSAVIGQLRLELQQARTEVETADKWRLECVDVCSVLTNRLEELAGFLNSLLKHKDVLGVLAADRRNAMRKAVDRSLDLSKSLNMTLNITATSLADQSLAQLCNLSEILYTEGDASHKTFNSHEELHAATSMAPTVENLKAENKALKKELEKRRSSEGQRKERRSLPLPSQQFDNQSESEAWSEPDRKVSLARIGLDETSNSLAAPEQAISESESEGRTCATRQDRNRNSERIAQLEEQIAQKDERMLNVQCQMVELDNRYKQEQLRCLDITQQLEQLRAINEALTADLHAIGSHEEERMVELQRQLELKNQQIDQLKLAHSTLTADSQITEMELQALQQQMQEIEQLHADSVETLQSQLQKLKLDAVQQLEEHERLHREALERDWVALTTYQEQAQQLLELQRSLDYHQENEKELKQTLVENELATRALKKQLDESTLQASKAVMERTKAYNDKLQLEKRSEELRLQLEALKEEHQKLLQKRSNSSDVSQSGYTSEEVAVPMGPPSGQATTCKQAAAAVLGQRVNTSSPDLGIESDAGRISSVEVSNAQRAMLKTVEMKTEGSASPKAKSEESTSPDSKSNVATGAATVHDCAKVDLENAELRRKLIRTKRAFEDTYEKLRMANKAKAQVEKDIKNQILKTHNVLRNVRSNMENEL

SEQ ID NO: 9817 - DNA, 4814 bp, DROSOPHILA
atactccgcgaagggtgtactgatcaccgaccgtacgtactgcacagcaatcaattgagagttttggttttttttgaaaatttagttatgaaatttaggccatgtcctaaccactgcggacttttcccaagacaaccccttctccttgtgagtccattgaaatgaattcgcgaacagcatgttttgcaaattaagatattatatttccgcagagccattgttgtgatgggtatggaattccaagctagcgcgatttttaagccgtttgcggacattaacatatcactgattagcctgacgcgtcggttggaaaacagaggtaaaattagttggacaacataggctgagacattacagtgattttctgttgcaggtgcattgagaccgatctgcattctggaaactgcaaacatcgctggttctttaagaatcactggcacaggtcaatatggcttaagcaattacgttataaatgtgcaaagccttaattggcagttgtgtgaacttgagttgaggagaaatatcgaacagaatcagttttgtgtgaaaaacactttccaaccaaatgcgcttaagcaatttggtacagctggcgatatattggttaaaaaaatattgaatgtttcgggcatggtccatttcgttctattgggcttggtagacgtttcgcacaatgacgtatacgtaataaccagtgctatggcaaatgcagaatggatctcgaaaatagtaaatcagaatgaatagggtatctggattatcgggcgatttaatcgaaaactacacaagcagtaaataaatttaaacacaatatcatttcagttctcacaacatttattagctatttagtttaagtttgtgtgtgaaacaagcatatattatattaattaagggcaaacttatcaccaatcacacttgactctttaagtcgaaaaaatgcaatcgcattaataagcttatttatgaattggggttctgaaatgagaagctgaaagtgccactagatgaatctagttagcagggaagagagcagaagcaaggagatggaggccacaataccagacgccgatccggtgtcagccttctcgtgaatcacaattcgttcctcgatctcgggatacacgaaatggcgctgcttcaggtactccatggtagcattcagatcgtttcgctgcatgctctcggtgaagggatccgactcctcgatcagagtgtagccatcgccgccttccagcaggaactggggcacgatcacttggtacagggccgtctcattgatgctcttgtacgtgggcacggcgcagctggcgcatagggcctgtgcggaaaccactcgcttgccctgctcattgttgtagttgtacaccacacgcagtccggacatctgcaggaatccaccattggagtcctgcaacctcacagacgcggagtgttccagggcagccagaagggtgcttccgagaatccttgtcacgtacagattattctcgaacggaagaacggctaagagggtggcgccattgatgactccatcatccttcttatcgacggagccacggattcctataaaatatgtagatccacgtaatttcgaatttctctaatgacaccaaataaaacacacctcctccctgcataaaagcaatcgcagtatctgtccagaattcgccgcccttgttttccaacacgcgactatagatcatggcatctgtcaccaagttgccaaggttgcactccctcatgcggcagatgttgccgccctcgagaaacaccttagtgtaacccagaaccgtgttctccagctcgtccagcttggggcggtattcgtctagcaaatccaggagatcctgctcctgagctacagaggcattcagcaaaatgggagcgccatcaaactcgatcagatttccctcggcatcaaactggaaatattcgtattacaattatattcaaatttctttaataataatccagataatatatagtgcttacctgaacatgaatctttccgagatacttggtatacgcgtatgcctgaaccactggtaccttcttgccgctcgcctgcaccactgtggtgggatagggacctcgaaccgcctccggatcagagtccgtgggatcggccaccggctgattggcatctaagaatgtgtgcgaatggccaccaatgactatgtccacctccgggcagttcatggctatctcctgatccttttggtatccagagtgacccaaagcgatgatgatattgatgccttgagcctttagctttgcggcctccgcactgcggaataaatgaacatgcattaacatccttgctctccagcggatttgagctatacccacttgatggacacgatttcctcctcgtactccactttgttccgaaaggcaagcaccttggtatcgggcgtaaggtaaccgataacgccaaccttcaccccatttctctcgaggatcgtcgagttggccagctgcttggcagccgccatttccggaacatcggtgaggttcagattacaggccaaaacagggaattccacggcatttaggaagggcaccaaaccctcaacattctgatcaaactcatggttgcccagagactattgaaaggtatattgatgaaatatagtaagagaatgcggaaaacaataaaataatagttacaatagcatctggcgatagcttgttgaggaaagcactggcgatcttgtccttatagacggtgaaccaagcagttccggtataggtgtcacctgcattgagataaaacactggagttccaccctcctccgcctccttgcgatactttcgcaccctagttgaagttcatcagcatgaatagttgaactctaggcaaactgaccgcacttactcgtatgccaccctggcgaatcctccgtagcactgatccgtattggcctcctccttggagcaggtgccactggtcacactcgtctgctcgaatcgggcgtgcatgtcattgttgtgcagaatgatgaactcggcggcaacttccgcccggggtgcaatgggattcggctgcacaggatgaatcagtagagccagtaggcagcatgatccgataaggagaccacgggcaggtaacattttggtgctggaacaataaacacaacaatcgctgataagttatcacacacgaagggatgaaatgtgggtggataatcttcggtgaataagcactgattcgcgcacggcaactggtttgtcataatcattgtttttgcactcatgaaaatctaaaaattttaataaaaaattaatgcactgccacttaatgaagcgtgttttaagtattagttcgttttcttatccgaatggttttacacatgtaatggaaacacttcaaacgttgttaaccagattttctacttagactgttgaaggtccttttcgaccttatcaccaatccactgctgagaggcaaatatttatcaatcacgagcgcgcagaaatcgcaatttatagtttattgggtgttttaaatctaatcgccgcttatcactttgcgtgtgcaaaaaaaaaacacacaaatccccagcacattctgctcgacaaatttctgccatcgcggtccacttcactcggtcaactggttttcgattgaactcggaaacgagctcgaacttcagcttgctcatggcattggcctaaaagctaactcggctcaaaaaggcccgatcgatgttacttcagaagcaacgaattaccaaataccaacgatcgctactcacatgcactcgtcgcacggtccgcgggctaactgactgacccaccaaattggctgagagtgcgagaaccgttattagccgaaaacataaagccgagtaccttaaacagcaaaaccgaaatttactgcctcgcgaagcggactgattacgataaggcctcgtattgcgattgcgggttaaattggctgagaatgacaatgcgatgctctttctgcattaccccattgtatttcgatgttttggaagccatcggaagcagacatatcgcgcgataatcgtcggttatagatcagataatggtgaattggctatatatttatctgactcatagccactcagacagaggcaggtagttggcccaacagttgtctaaacacaacgtgacattcccacgccgaaatatggattgtactaaaaaatatatacagtgcacgctcgctacggagaatttacattcggcgtaactctagcatcaaacagcatttacttgtaagtgatctaaacacatgaatcaaagatcacgcattcgaaaggatatttttggaatatctatatctgtaattaatatttgcacttttgtttcatagtaaaacattttcactgtcacgaaattatatgcaacatggttgcttacctatatttagagtatttactgtacatgtttattgacgcaccattaacaacagtccgccgattgtgccgagtaagccgatctttgttattaatttcccgaaaattccaagcaagtgtcttctgcgaactttcaggcacattcgattgatgaacaatgaggcctgcttgttgcacagatttatggccgccaaaatggaaggatagataaatattggaaagatgaatttcactcaacagccgcgtaaattactttatgagtttactgcgaagttctacccacacgaaatgatcacaattgccgggttttgggccacagttcatccccaaattatccgctgccacttgtcgcgtgcttctcaaactgttcaatcatatagtatgtataatggctcaatagacacacgacagctgcggctgtggataatg

SEQ ID NO: 9818 - DNA, 1887 bp, DROSOPHILA
tctcagccaatttggtgggtcagtcagttagcccgcggaccgtgcgacgagtgcatcgattgttgtgtttattgttccagcaccaaaatgttacctgcccgtggtctccttatcggatcatgctgcctactggctctactgattcatcctgtgcagccgaatcccattgcaccccgggcggaagttgccgccgagttcatcattctgcacaacaatgacatgcacgcccgattcgagcagacgagtgtgaccagtggcacctgctccaaggaggaggccaatacggatcagtgctacggaggattcgccagggtggcatacgaggtgcgaaagtatcgcaaggaggcggaggagggtggaactccagtgttttatctcaatgcaggtgacacctataccggaactgcttggttcaccgtctataaggacaagatcgccagtgctttcctcaacaagctatcgccagatgctatttctctgggcaaccatgagtttgatcagaatgttgagggtttggtgcccttcctaaatgccgtggaattccctgttttggcctgtaatctgaacctcaccgatgttccggaaatggcggctgccaagcagctggccaactcgacgatcctcgagagaaatggggtgaaggttggcgttatcggttaccttacgcccgataccaaggtgcttgcctttcggaacaaagtggagtacgaggaggaaatcgtgtccatcaatgcggaggccgcaaagctaaaggctcaaggcatcaatatcatcatcgctttgggtcactctggataccaaaaggatcaggagatagccatgaactgcccggaggtggacatagtcattggtggccattcgcacacattcttagatgccaatcagccggtggccgatcccacggactctgatccggaggcggttcgaggtccctatcccaccacagtggtgcaggcgagcggcaagaaggtaccagtggttcaggcatacgcgtataccaagtatctcggaaagattcatgttcagtttgatgccgagggaaatctgatcgagtttgatggcgctcccattttgctgaatgcctctgtagctcaggagcaggatctcctggatttgctagacgaataccgccccaagctggacgagctggagaacacggttctgggttacactaaggtgtttctcgagggcggcaacatctgccgcatgagggagtgcaaccttggcaacttggtgacagatgccatgatctatagtcgcgtgttggaaaacaagggcggcgaattctggacagatactgcgattgcttttatgcagggaggaggaatccgtggctccgtcgataagaaggatgatggagtcatcaatggcgccaccctcttagccgttcttccgttcgagaataatctgtacgtgacaaggattctcggaagcacccttctggctgccctggaacactccgcgtctgtgaggttgcaggactccaatggtggattcctgcagatgtccggactgcgtgtggtgtacaactacaacaatgagcagggcaagcgagtggtttccgcacaggccctatgcgccagctgcgccgtgcccacgtacaagagcatcaatgagacggccctgtaccaagtgatcgtgccccagttcctgctggaaggcggcgatggctacactctgatcgaggagtcggatcccttcaccgagagcatgcagcgaaacgatctgaatgctaccatggagtacctgaagcagcgccatttcgtgtatcccgagatcgaggaacgaattgtgattcacgagaaggctgacaccggatcggcgtctggtattgtggcctccatctccttgcttctgctctcttccctgctaactagattcatctag

SEQ ID NO: 9819 - protein, 599 aa, DROSOPHILA
MLPARGLLIGSCCLLALLIHPVQPNPIAPRAEVAAEFIILHNNDMHARFEQTSVTSGTCSKEEANTDQCYGGFARVAYEVRKYRKEAEEGGTPVFYLNAGDTYTGTAWFTVYKDKIASAFLNKLSPDAISLGNHEFDQNVEGLVPFLNAVEFPVLACNLNLTDVPEMAAAKQLANSTILERNGVKVGVIGYLTPDTKVLAFRNKVEYEEEIVSINAEAAKLKAQGINIIIALGHSGYQKDQEIAMNCPEVDIVIGGHSHTFLDANQPVADPTDSDPEAVRGPYPTTVVQASGKKVPVVQAYAYTKYLGKIHVQFDAEGNLIEFDGAPILLNASVAQEQDLLDLLDEYRPKLDELENTVLGYTKVFLEGGNICRMRECNLGNLVTDAMIYSRVLENKGGEFWTDTAIAFMQGGGIRGSVDKKDDGVINGATLLAVLPFENNLYVTRILGSTLLAALEHSASVRLQDSNGGFLQMSGLRVVYNYNNEQGKRVVSAQALCASCAVPTYKSINETALYQVIVPQFLLEGGDGYTLIEESDPFTESMQRNDLNATMEYLKQRHFVYPEIEERIVIHEKADTGSASGIVASISLLLLSSLLTRFI

SEQ ID NO: 9820 - DNA, 2475 bp, DROSOPHILA
caattaagatctttgcatttttgtacgctgtctatgcgtttccattgcgattgcataatctcttaaacaaccgacaattactcattcactgacaatcgaccgattttcctgtagctccacgcacacaagtaactatatatataaaaacagcggggagaacgtgacccgagaacccgaactcaaaaatgattaaatagaaataaagcaaatctcaaaccgtgacacagagcaggcagctgtagacaaaaagcgaaagagccgatcagtagctaaacaaaaaataaataaataaataacaaaatacgagtccaggaaacaacaacaaatcgtgcggctaaccattctggattgcacaattaaaggcttaatttatttggccggcaattgataggccgcaaacatttagatatctcatattcctttgcatttctgacagcacataaagcaaaaatgcaaacctacaaaactgccaactgccgactgctgactcactcgaatccgaatcgatattctggtggtgttttgcatgaaccaacctcagttcgttttttacatcactcttttcatgctcggctgggatttgaagggcctcgtcaaagttgttgttacttgggctgttttagtcgcttttgttgttgctggtgtagcgtgtcaactttaattgcagtggaaaacggagacgaagtcgtttatggggcacttttttatgccagcactttggcaaggctagggggtcgatgtctccgccaacacgaacttgctccaaaatcggaacccaaaatatcatggtctatatttaagtgtttccaaaaaaaaaaagtcaagggaacgtgaaaataaaatgtgggttctcgtgctaaatttgaatatttcattgtaataggttacgaaaacggaaagttactactattattattaatattttttattctttgaatttcagcagttttgaatacagccaagagacaattttagcccaaacgttccttttacaaatcaccctattccttttgaatttgctcaatgaaatgatcctggaatcttgggatcttctccacgtaaccgctgaactgcgtctccggctctcggctgctgaggaagacgagtttctgggcacagagcttgtagagccaagggatgtccaagtagttgcagccctccatgattttgcaaatgctatcgatttccacgcgcaggaactccttgtcccaatcggagatctgcagctcaatctcctcggccggaagaggatctttgctgtccacccaggcgggctcttcgtgtttctcatggtactcagcccacagcaagatcttcagcaggacattgctgtgtataccgtgcagcggcaggacgaagtcctcatcctctgggacctggccaacgcggcacatctcccggatcaccaaggatttctcgagcagagccagatttacgcttatcgtacggccatcccttgtctcgaatcgcaccattcttgaaccgaatttcgaataacaaattaagagcttcggatcagaaagtcagggcctactgcttgcaatcaatacgaactaaaccacaaacttgtgcctactctacctctggaaattgttcaaattggagttcaatatcgaaataaaccaccatctgctgtaatcacaaagtttccaagcgaccaaccaaagccataacctccgcaacaaaggcagtgacaatgaaagagaaaagtgtaaagaaggcggctagcaaatggccaacgacagcagaataataaaataaaagttagtaaacaaacggagggagggacagtctgaaattcacttgaaataattacaagaactttttacgtccgaccttggccataattttgctggccaagctttttctcgaaaacgaaaagcaaaaaaaaaactcgagacaaaagctgtgctgtgtgtcaatgagatacgtacccatacaggcgcactcagaaacctggcccacaatgcaaacacacaatgccaatgttttatttctaacgacgactctcttcggcactgcgctctgctctgttttgtaatttaattaatatacaaaaaatgttttgtatttctcgaaatgctaattacgcacaatgcgaatgacaatgaaaccgccgactggcggccatttgttgttcgtttttttttttttttgcccctttttatccgttaacagctggctttatggcattataagagcccaaaggttatttatatcgcaccgattgattgatgagttcttgcacttggcattgatcatatctgcgggtacttacatctggcaggccctggcatattgtgctgctgaccaggaggagcgctgtgaaaaggaccagtggtgaggacatcttactgcttcggccgcctagggtgctaatataatccttaaaaatgcttaaactgcaaagagacgaaggggaaacgaaaattaaataaattaaatattaattattattagccacatcccatttgc

SEQ ID NO: 9821 - DNA, 475 bp, DROSOPHILA
atggtgcgattcgagacaagggatggccgtacgataagcgtaaatctggctctgctcgagaaatccttggtgatccgggagatgtgccgcgttggccaggtcccagaggatgaggacttcgtcctgccgctgcacggtatacacagcaatgtcctgctgaagatcttgctgtgggctgagtaccatgagaaacacgaagagcccgcctgggtggacagcaaagatcctcttccggccgaggagattgagctgcagatctccgattgggacaaggagttcctgcgcgtggaaatcgatagcatttgcaaaatcatggagggctgcaactacttggacatcccttggctctacaagctctgtgcccagaaactcgtcttcctcagcagccgagagccggagacgcagttcagcggttacgtggagaagatcccaagattccaggatcatttcattgagcaaattcaaaaggaatagg

SEQ ID NO: 9822 - protein, 157 aa, DROSOPHILA
MVRFETRDGRTISVNLALLEKSLVIREMCRVGQVPEDEDFVLPLHGIHSNVLLKILLWAEYHEKHEEPAWVDSKDPLPAEEIELQISDWDKEFLRVEIDSICKIMEGCNYLDIPWLYKLCAQKLVFLSSREPETQFSGYVEKIPRFQDHFIEQIQKE

SEQ ID NO: 9823 - DNA, 6260 bp, DROSOPHILA
agattgaattatgcttcgatagagatcgatccattcttagattacaattgactttgctctcattttgtcagtctttccattacgttccttttacacaatcataaacctgatacttcttccctctgaaaatattaaaattgagatcgttttcgtctcgaaatcaagaagaaatcttctcatgatttatgataaatgccactgagtgacgttcttaatttttctgggtgtatggtggttgcttcaaaaagtcatagggtccgatcggaagagggtctgattatattcttactaatagccagagattatagtttaaagttttaagcaaagctttgtgtggttataccttgtatacgaaggtgatccctaatgtgcaaccaaactctatactctattcatgacctacaccattttcttgaatagttagctcatgagtcacttatttgtttaaaaaaaacccacattatgaatttagacatcgccaagttccctaattatcggcaatgccaagtgtttgcttacattaaaaaacacaataagacatatggaactactaagtgtggagctggccaatcgcaacattgtcaatggaatcacggatctagctcttggctagaaatcgaaactaaaaccgaaccgaaacagaaactgaaaccgctgccagcaaaatcagaaatcgaactgaggcaccaattgattgagtgggtgaccaggtgactagtgaatcaattaatatgcagcaacggtaggggcaattgtggtacctaaatttaattcaaaatgcatttagaggcccccaaaaaagtcggttcttcgagtttttggagtgacagcatttatgggattatatctgcagcaaataggttgcagtaatcttccttattttcaaggacttgccaaacgaatcgattgtggaatcttatagaaatttcgggaaagcagtaggctagcgaattttagttcataatctcgtttggcttactggcccagtctgaaaacatagcccagtgctagtacacaaccttttgtaaacctacaaaaaaaattccaccaaaattcaaaattcaaagtttttagtttttggcctttcagcacaagtgaaaaattaagtagtatgcgcttatttggcagagtaaccaacattttacaggtacagtacatttgaattaaggctaaaacctaaaatcagtaggccctttacttttacgttagacatttggttagcttttacaccatttttccttgctacgtcttacactacacaacattttggtttctttcctttctcaaaactgaaattctaccgtgtgttaacttatgtattcctgaatcaagtcaaaaatttgtacataaaaagaaaaaatgccaggcatattcgggaagttcccgactaaccgtctcggacttaatctcctccagatatctagatgcgttagctaccatgctccgctataccgaccgcgcagcctactccatgcagaacggttgaggcaactatgcaccagtgcctcctccggatcaaagtctagccggaggacgaatcatccgtgtcgcgtccgggtgcagaggtactcccaaaagggtagcaatgtgttctcggtcagcgataacgtggatatgctgcgcaaacggattagcttttccggcaactcgagcaatgcgcccaagatcatgcccattggactgattacaccggaaacgggtgatggcaaggatctgaagatagtcattgtgcccttggatctgtctggcatggatggcaacgaactcaaggacacgctggaaaccatcaacaagttgcgcttgtacgccaaccacatcgagaccttctccaacagcatggtcgaggaatacggtgccttgaacgaggccctgcaggaagtggaatcgggcggtcagccccaagaagtcaaggccggggcgagtgccgaggaccgcaaattttgggaggccttcccatccacgccaacggcggacgctgtgggaaccgcactggatgcgggtcagggtgccaacatgccaatgcaacgccagacggcagtcaatagttgcctgcaaaacgctgtgggtaactcagctatcaactctgctctgaaaaccaccaaatccatgtcggccatggcccagacggaacccatccatggctcaaccaaggcatctaatctccaagagctcgccaaccaagagagcgacttcgtcgaggaggtgcgagtggatgtgccgcaggatttgagcaatcgcctcaacgatatggccgtttcgtcgatggagctgtccttcgaaatggatatgaccaatctgcggcaggctctggaaagcaaggacaagaatgcagtaactccacaggatcccatgatctgtatgcacacaaaggtggaattggatgcgcctggcactgtggagaaaacgctgccgcttaggttcaacgccttgatctcgggcgtagtggagatcgatacccagaagttgagccccgcccagataacggaggacaaaatgcccggcttcaacgatgacctcacctcgctggctgccaacctttgcagtaccgccttggagaaaggtttcgcaggaaaatcctcagatacctacatcgcggacctggaactgaccaaggatgaggagactattcctaataggatcatcgatacttcccatatgtcggcggctaatcaagttggtcaagtgcgggaatccctgcagaagatagccgaggaagcgtgtgccatgcccggcattcaggagcaagaggtgccagttccggtggacaaagacggctgcaagcatccgcccgtgaaacccaagcgcaaatgtcctggaaagtgtcctctaatcacagatccctgcaaggaggatccctgcgagcggcctgcaaagaagaaggcacccaaaaagaaggcgttgaagaccactgagatcacgtgcaagggaaagggcggcggaaagagtgcttgcggcaaggataagaagaaggatccgtgtggcaagaaggacactaagaaaaaggacccttgtgctaagttcaagtctggcgagaagaaggatccgtgcgccaagaaaaaggatccctgtgccaagaagaaggcagatccctgtgccaaaaagaaggcagatccctgtgccaagaagaagaaggatccatgtgctaagaagaaggcagatccctgcgccaagaagaagaaggatccttgtgccaagaagaaggcagatccctgtgccaagaagaagaaggatccttgtgccaagaagaaggcagatccctgtgccaagaagaaatcctcttgtgccaagaaagatgacaaaaagaaggatccttgcgccaagttcaagaagggcggtagtggcggcaagagcaaatgcaagttctccaccgttgctaacctaccggatgcaagcaggcgccacttgtccaccgccttgagccaagctttccgtgaatcgaatagtgtttcaaatggtccccgcttcaaagtctactccactcttgtgcgccgtcactatcgtgtccctgttccgaagattgagagctcttgccagtgctcgctttgcacgagtcggctgctccacaaagcagttgctccggcccgattcaccatcaacacggcccttatgagaagacgcttcggtggacttgcgggaaggatctccggtggagccctgcagcacatcagctatcgcggatacgccaagaagagcaaatccggcggcaagtgtggcgaattgcagaccaaataccccattaatcgtggcaaggacattaaggagcgaacgggactgcgcgaggattgcttcagcgacgaagacagctgtccaaagaaaagctgcaccggcaaatgcgccaaggtcaagttcccgaaaaagaaatgcgatcgcaagaagaaaaaggatggtgcgtagtcatgtgatagtgtatagttgctcagttccctcaggtcaatcatcctgttcccaagacagaataggcaatctcttgacccggagttctattgcccagctgcagccgcagagaagatcatttagcacgcggccatgttgccatccatcctctgaaaagcgcaccgcggatgatgaagcacttacgctgcgcataacgaatccctacgagatcagcgtggttcccttttccaagccgcgaccaaaggactttggtaggtgatggtttatccttcagttgaaagcattataatcggtcacttgattctcgtacagacgtcctcattcgaacgggctcagtggctgtctccaactcggacatccacgtctatgagaacggcaatcgggacatggaagccatgtccctgggccatgatgcgacgggtattgtggaggaactcggtcgatgcgtccagcatctgcatgtgggtgaccgggtcgtcatggagtcggcgttatcctgcggcatctgtgatctatgcaagaagggcctgtacaacatgtgctccgggttggtgtacaacggcttcctaagcacctaccaaacgcatccagccgacctttgtcaccgccttccagagtccatcagcatggaggcgggtgccctgacgcagacactagcactggggtgccaggcgtgcttcaaggccaatgtcacgcccaccagcaacgtcctcatcctgggagcctgcccaacggctgtggcggccggcatatgcgcaaaggccatcggggccaagcgtgtggccattgccggatgtatggctccggctctggatgtggtcgcccgggacttcggcttccaagcagtcgagttcgatagcaacgcactgttcggagaggtccttgaagccatctacagcaagttccgggattggccggactgcgtaatcaactgctccatctctgcaatgacgatgaatctggcggtcatggctctgcagccatgtggggtgtgtgtgctggccgagtgcgattcagagtgtgccagcttcaatgctctggacgtactgatgaagaacatccgcctagtgcccagttttcgttccgccaatatgtgggtacaccagaatttccatgtctaaccatttagttatcctcttatcttcgcaggtatccgactgctctacaactcatgcaatctggtcgagcacatatgcaaaaattcataacggccacgtatcccctgagcaaggcggacgaggcgttccgagctgcccagcacgagtccaacattgggctgggcaaggtgattgttaactgtgcggaagaagtggacgtctaggcgattcggaggagaagttccgagccggcattggataaatttatggtggaaaaaactgtgtgaaggccaaaaacgaaacaacttattctaattgaagttaattctgtgttttcgacttcaaattcggaattagaataaaacaatagatttaagtattgcaacaaaaaatcgtctcgcattttactaagttctgcgtgggcccataaaacaatgaatttgaaagtgcgctattaaaatactttaaataatatttttcaacagcattctaaaatctatcctctctggctcgtcataagattggtttatgtgtgtatacatacattcatttatatatttatgtaaatatattttataaaattattattgtacttcgctgcttacaacaaactattttacaattttacaagaacgaaagtgactcactaaaggtgtgtatgctacggggggaaatcaatgtacacaaaacgaaaatgaaaacataagctaacaacaattagaataacgcatacatgtttaatttaattttaaagcacttgactacatcgcacactttggaacattgcttggactgagtataaataataattagagctaactaataagaattaaagatatgccattttatatgtgagtgtggaactaattaatggactgttttgtggtttcggttgcctatggtactgccgcttcgctgattctttgttcccttcgtggttttggatatagctttccaattactatcgatcgtttggccaacagtagtagttacatacatatatatactagtagaatcgtcagagtttaaattaaaaaccacttgctctgccactcggagcggagcatccgatcatgaaggtagtttgtcttttgcaattcaatcgctcgccctcctcctcctgttagttgtcatgtatctgcatttccaactccacatccgagagatttatctgacgcatcgaattgataaacatgtagcgcgagaagtaaatgtagagccagcgaaaccatcgcatctgcgactgatgctccatcatcgcactcctca

SEQ ID NO: 9824 - DNA, 3813 bp, DROSOPHILA
cccagtgctagtacacaaccttttgtaaacctacaaaaaaaattccaccaaaattcaaaattcaaagtttttagtttttggcctttcagcacaagtgaaaaattaagtagtatgcgcttatttggcagagtaaccaacattttacagcagatatctagatgcgttagctaccatgctccgctataccgaccgcgcagcctactccatgcagaacggttgaggcaactatgcaccagtgcctcctccggatcaaagtctagccggaggacgaatcatccgtgtcgcgtccgggtgcagaggtactcccaaaagggtagcaatgtgttctcggtcagcgataacgtggatatgctgcgcaaacggattagcttttccggcaactcgagcaatgcgcccaagatcatgcccattggactgattacaccggaaacgggtgatggcaaggatctgaagatagtcattgtgcccttggatctgtctggcatggatggcaacgaactcaaggacacgctggaaaccatcaacaagttgcgcttgtacgccaaccacatcgagaccttctccaacagcatggtcgaggaatacggtgccttgaacgaggccctgcaggaagtggaatcgggcggtcagccccaagaagtcaaggccggggcgagtgccgaggaccgcaaattttgggaggccttcccatccacgccaacggcggacgctgtgggaaccgcactggatgcgggtcagggtgccaacatgccaatgcaacgccagacggcagtcaatagttgcctgcaaaacgctgtgggtaactcagctatcaactctgctctgaaaaccaccaaatccatgtcggccatggcccagacggaacccatccatggctcaaccaaggcatctaatctccaagagctcgccaaccaagagagcgacttcgtcgaggaggtgcgagtggatgtgccgcaggatttgagcaatcgcctcaacgatatggccgtttcgtcgatggagctgtccttcgaaatggatatgaccaatctgcggcaggctctggaaagcaaggacaagaatgcagtaactccacaggatcccatgatctgtatgcacacaaaggtggaattggatgcgcctggcactgtggagaaaacgctgccgcttaggttcaacgccttgatctcgggcgtagtggagatcgatacccagaagttgagccccgcccagataacggaggacaaaatgcccggcttcaacgatgacctcacctcgctggctgccaacctttgcagtaccgccttggagaaaggtttcgcaggaaaatcctcagatacctacatcgcggacctggaactgaccaaggatgaggagactattcctaataggatcatcgatacttcccatatgtcggcggctaatcaagttggtcaagtgcgggaatccctgcagaagatagccgaggaagcgtgtgccatgcccggcattcaggagcaagaggtgccagttccggtggacaaagacggctgcaagcatccgcccgtgaaacccaagcgcaaatgtcctggaaagtgtcctctaatcacagatccctgcaaggaggatccctgcgagcggcctgcaaagaagaaggcacccaaaaagaaggcgttgaagaccactgagatcacgtgcaagggaaagggcggcggaaagagtgcttgcggcaaggataagaagaaggatccgtgtggcaagaaggacactaagaaaaaggacccttgtgctaagttcaagtctggcgagaagaaggatccgtgcgccaagaaaaaggatccctgtgccaagaagaaggcagatccctgtgccaaaaagaaggcagatccctgtgccaagaagaagaaggatccatgtgctaagaagaaggcagatccctgcgccaagaagaagaaggatccttgtgccaagaagaaggcagatccctgtgccaagaagaagaaggatccttgtgccaagaagaaggcagatccctgtgccaagaagaaatcctcttgtgccaagaaagatgacaaaaagaaggatccttgcgccaagttcaagaagggcggtagtggcggcaagagcaaatgcaagttctccaccgttgctaacctaccggatgcaagcaggcgccacttgtccaccgccttgagccaagctttccgtgaatcgaatagtgtttcaaatggtccccgcttcaaagtctactccactcttgtgcgccgtcactatcgtgtccctgttccgaagattgagagctcttgccagtgctcgctttgcacgagtcggctgctccacaaagcagttgctccggcccgattcaccatcaacacggcccttatgagaagacgcttcggtggacttgcgggaaggatctccggtggagccctgcagcacatcagctatcgcggatacgccaagaagagcaaatccggcggcaagtgtggcgaattgcagaccaaataccccattaatcgtggcaaggacattaaggagcgaacgggactgcgcgaggattgcttcagcgacgaagacagctgtccaaagaaaagctgcaccggcaaatgcgccaaggtcaagttcccgaaaaagaaatgcgatcgcaagaagaaaaaggatgacagaataggcaatctcttgacccggagttctattgcccagctgcagccgcagagaagatcatttagcacgcggccatgttgccatccatcctctgaaaagcgcaccgcggatgatgaagcacttacgctgcgcataacgaatccctacgagatcagcgtggttcccttttccaagccgcgaccaaaggactttgacgtcctcattcgaacgggctcagtggctgtctccaactcggacatccacgtctatgagaacggcaatcgggacatggaagccatgtccctgggccatgatgcgacgggtattgtggaggaactcggtcgatgcgtccagcatctgcatgtgggtgaccgggtcgtcatggagtcggcgttatcctgcggcatctgtgatctatgcaagaagggcctgtacaacatgtgctccgggttggtgtacaacggcttcctaagcacctaccaaacgcatccagccgacctttgtcaccgccttccagagtccatcagcatggaggcgggtgccctgacgcagacactagcactggggtgccaggcgtgcttcaaggccaatgtcacgcccaccagcaacgtcctcatcctgggagcctgcccaacggctgtggcggccggcatatgcgcaaaggccatcggggccaagcgtgtggccattgccggatgtatggctccggctctggatgtggtcgcccgggacttcggcttccaagcagtcgagttcgatagcaacgcactgttcggagaggtccttgaagccatctacagcaagttccgggattggccggactgcgtaatcaactgctccatctctgcaatgacgatgaatctggcggtcatggctctgcagccatgtggggtgtgtgtgctggccgagtgcgattcagagtgtgccagcttcaatgctctggacgtactgatgaagaacatccgcctagtgcccagttttcgttccgccaatatgtatccgactgctctacaactcatgcaatctggtcgagcacatatgcaaaaattcataacggccacgtatcccctgagcaaggcggacgaggcgttccgagctgcccagcacgagtccaacattgggctgggcaaggtgattgttaactgtgcggaagaagtggacgtctaggcgattcggaggagaagttccgagccggcattggataaatttatg

SEQ ID NO: 9825 - protein, 1139 aa, DROSOPHILA
MLRKRISFSGNSSNAPKIMPIGLITPETGDGKDLKIVIVPLDLSGMDGNELKDTLETINKLRLYANHIETFSNSMVEEYGALNEALQEVESGGQPQEVKAGASAEDRKFWEAFPSTPTADAVGTALDAGQGANMPMQRQTAVNSCLQNAVGNSAINSALKTTKSMSAMAQTEPIHGSTKASNLQELANQESDFVEEVRVDVPQDLSNRLNDMAVSSMELSFEMDMTNLRQALESKDKNAVTPQDPMICMHTKVELDAPGTVEKTLPLRFNALISGVVEIDTQKLSPAQITEDKMPGFNDDLTSLAANLCSTALEKGFAGKSSDTYIADLELTKDEETIPNRIIDTSHMSAANQVGQVRESLQKIAEEACAMPGIQEQEVPVPVDKDGCKHPPVKPKRKCPGKCPLITDPCKEDPCERPAKKKAPKKKALKTTEITCKGKGGGKSACGKDKKKDPCGKKDTKKKDPCAKFKSGEKKDPCAKKKDPCAKKKADPCAKKKADPCAKKKKDPCAKKKADPCAKKKKDPCAKKKADPCAKKKKDPCAKKKADPCAKKKSSCAKKDDKKKDPCAKFKKGGSGGKSKCKFSTVANLPDASRRHLSTALSQAFRESNSVSNGPRFKVYSTLVRRHYRVPVPKIESSCQCSLCTSRLLHKAVAPARFTINTALMRRRFGGLAGRISGGALQHISYRGYAKKSKSGGKCGELQTKYPINRGKDIKERTGLREDCFSDEDSCPKKSCTGKCAKVKFPKKKCDRKKKKDDRIGNLLTRSSIAQLQPQRRSFSTRPCCHPSSEKRTADDEALTLRITNPYEISVVPFSKPRPKDFDVLIRTGSVAVSNSDIHVYENGNRDMEAMSLGHDATGIVEELGRCVQHLHVGDRVVMESALSCGICDLCKKGLYNMCSGLVYNGFLSTYQTHPADLCHRLPESISMEAGALTQTLALGCQACFKANVTPTSNVLILGACPTAVAAGICAKAIGAKRVAIAGCMAPALDVVARDFGFQAVEFDSNALFGEVLEAIYSKFRDWPDCVINCSISAMTMNLAVMALQPCGVCVLAECDSECASFNALDVLMKNIRLVPSFRSANMYPTALQLMQSGRAHMQKFITATYPLSKADEAFRAAQHESNIGLGKVIVNCAEEVDV

SEQ ID NO: 9826 - DNA, 12120 bp, DROSOPHILA
atggctgtccgccaagtggatggagcggcgctccttcacctgccagagtgaagtgagcccgggctcgcagggacgcaccttgatgcagacctggatggagctggcgttcttcgcagacatcttggcgccttcttggtctcaatgctttatgataaacagaacgcagttcataaacaaacataaaattcaatgttttacagtaaacaaacattgatcgacatctttgttgctcgttaaattcgaacaaatgccgctttgcaaaatcagggatgtatatgcttcgatatcttcgagtggcgctaacgactcgatagataaatcggttcatcgattgttatcatagttccaaatagggctgcaaaaataaaaacagaaacacattatgttcttatcccacagggctgcattaacattcctgatcaagggtcgctacggcatatatatattctaagacgttgtgttcttattggtagggcatgctaactaacaaagttctatgactcaatactttaaggtcaaacagaaaatagaacaagctcttaaatacatgcgaaaactacggtttaaatttcatataagttcgtattttttctactaattcataacttctattcatagcacacatataatgtggaaagtatttgattccaaaacaaatatttgaaataaattataactaagctccctaatataaccactataatattttccaaattttcaattttcctattttttttaatagtgaacaactgggattattattccaatgaaatctcatgtttatatcagacagtattcttctgtatgcattaaacaatcccctcagcttttgtctgtctgtaagtaagcatttaatttagcggtctttactattttggaaatatagataataataatctatattatatatcacgaaaaagctcggaaaaagttttatgttcgaagcctattggattatattttcatattcgccgaaagctcctcaaacttttaaattgaactggctcgcgcctatttactggttccgtatttcgatctggttcgcttccgaagcggtatttgttcgaatttacaaagagaaactaacatgtcgatcaaactagcttttataaaacgttaaaatctgtttgtgtctgttcattgtgcatgtcaaacacgtttcccacaagtcgcaaagatgtctacgaagaacgccagctccatccaggtctgcatcaaggtgcgtccctgcgagcccgggctcacttcactctggcaggtgaaggagggccgctccatccagttggcggacagccatgcggagccctatgtcttcggtgagtggttagagcgttgagcgtatcctgatctacaagacctttatctcatttacattccattccgtttggcagactatgtgttcgacgagggcgccagcaaccaggaggtgttcgaccggatggccaagcacatagtgcacgcctgcatgcagggctccaacggaactatttttgcctacggccagacgtcgtcgggtgggtactgtgctatatatacgcggcggtatacctaaaaccgggcatgcatttcaggcaagacgtacaccatgatgggcgacgaacagaatccgggcgtcatggtgctagccgccaaggagatctttcaacagatctccagtgagacggagcgggactttctgctgcgcgtgggctacatcgagatctacaacgagaagatctacgatctgctgaacaagaagaatcaggacctcaagatccatgagtccggcaatgggattgtgaatgtgaactgcaaggagtccatcgtaaccagcgaggacgacctcctgcgccagctctacatgggcaacaaggagcgcgtcgtgggcgagaccaacatgaacgagcggtccagtcgttcgcacgccatcttcaggatagtgagtgctagattcttgtattaatcatataatatgcaagattatttctacagatcattgagtcccgaaagtcggaccacagtgataacgacaccgtaaagcagagcgtactgagcctggtggatctggctggatccgaacaggtggaccccgcggaccacgcatccagccttatgatttttcgcaacttggttaagagcctctccgagagtgtagatagcaagccgaatagctttcgcgattcgaaacttccgcgcatcatgctgccttcgctgggtggaaatgttttgacctctatcatctgtacaattacgccatcgttcgtggaggagtcgtcatccactataagcttcggcacgtgtgccaaaaaaattcgttgcaagccgcaggtctgcaagatagactctgaaaccacgatgatgaggcaacttgatcgcgggatcagtatgttgaaggataagcttgctaagaagaagatcaagaatgagagccagctggtattgcaggaattggaaggtcgcatcaagcgcgacatgttgaagatcgtttccagcgcctcgcttgacgactatcgcctccagaagcgtcgtcgtacttggactttaaccgcctcaggctcagaaggcgacgctcctgttctcgcattgcctgagccagaggagtcccgtctaccgcgtccttcgaagctgactaacctgccgaaacccttgtttcagcggcgggggattgctcccaaagccaaaggcatttgtaaaaccctaaaggagaaaaggttacaaacggataatatggacactatgcctggccgggcgaaacagttgggaagagagacagctagcagaattccttcagtaatgatgtcaaaaaagtatcaggagtcggtgccgaagtaagtaaatttatgaattatttattttacttttagatctagagttataaaaagattcaaatgagttaaacaaacgaaactacatagtattctacgcgactatatcgttttgaaaagtactttaagtaagcaattttgcgcattttgaacataccaactcacctcttgcgcgcactcacctgacacctgaactaaaaacgaggtggagacgagtgcggcgtgctcttctactcggctgtcttctcgtgcggtcttcgctcgctcttcttgctttctcgcagcagtcgcagcgaagagggcaagctgtctcaactgggagtccgatcgcgaagaaatcgaaaacaaaacaaacgccaacgcaaatagccgtcgagaaggaaagatttctgggggagaatccgggagcggaaagaggcgaggcgacgcctgttgtgagccagttttgcgaatagactcggctggatgcgatgtgacgccccagctacgatcgctttgtggccctggaagcgcgataaggcagtcagccgatcgacaaggtagttaactggccaacttcttgataatttgatcgctggaattccgcaatgctcattgtatttgccgctgtccgtcagtcagcacgcttttcctccgcccatcgctctcgcgctcctcccccgatcgtcttgggtgatcgatgacgtcggccctactgtcgatccaccaacgttatagactgtgatgtaacgcatatagattggctaaccgaaaccgaaaaagtgagtgagtgagtgagtgacttgggtaaaagatctgcgctcaaaataatagcacagtgcagttgcacttctgtttcgtttgcgaaaataaacaatttgtgaaaggtgtttagatttgaatctttaaaaacgcttctatttctttgaccatgttcgcgtaacccacacatctcgcctggtgcaacttcaacttgaatgccgccagctgcttctatttttagtggttttttgtgaacgccggattccctcagacagcacccatttagctaggcagagtaaatagcttttcgtagccatgcgcgcactggaaatataaatagagttaaagtatatttatggagttcctgaatttacgtattcattcaaatccctcaattttcctatcaattacagctgcgatgccccgcagaccgagatctctgcgcttactgcatccaaccaggtagcaaaggagacgatcgagaagtacgaggagcaggtgaagaggctaaaggagacaattgagcggctggagatggagaacggcaaggcagtcaatctaggggagcaattcgaaacacacaaggccaagtcgaagcaaatggaggaagaacttctctcctccatctccgaaaaagattcgaccatagtaagtctgcaacagtcccttgaggagctatctcgggatgtgttgcgaaacagcaaggaggatcaaatgcgatccatgtgccccgagcttgagtccagctgcgagcggatctgcaacaagtgcctggagttggaacggctactgcccctagcgagtgcctcaggactggactcagtcgcctgccagtttgatcagttgcgatcggagattgctgccacccgtatgaagttggaaagtatgctgtctactttcagccatgcaagctgtgaggtatcacaaaagaccactgattgcaaacggctctccgaacagatatccacagcgcatgatgactttggacaattgcaggaaaagtacaacaacctgaagcataagtggtctagtcaaaagctggccattgataccatgcaggttgactacaatactatacagcaaaagtacctacagctgcaggacgagtataggcatctggaactcagatcggatgaacagtgtcagcagctgcaggatgaaaattctaaactgcaagccgagattggaactctcaaggagcgagtggaggagatccatagtgagctattagaagttcccaatccggatactcatccagaagatatggagctacaaaatcaagagctgaagaagcgcctctccaagttgcagtgggagtttgacgagatccaactgaattacgaatgtctatccaacgaattgatgagtactattcaagagtgcgatgcactccgagaggagcacaagcaacgaacaacgaactccgatttggaatccatgaagagttcgggtgtaggcactgagtgcagtgatccggaaaacgaattggacactgatctgctgcaacagttcaccaagctgtcgaagtccatccaacagattgagctcaccgactactccggtggcaggcgcctctttatatataaccatgccgaacaggatcaaagcgtgccaagcctaaaactttgccttgagcctgctaagtatttagagggtgatggtaaacaacatgatgcatccgactccgtattccttaaaggctttctgaaatgccaaagatttcagattgtcaaaataaatcaggaacagaatttggtgaaagaggaagaccgaatgcgtgatatcattttccaactgaaacaagaagttgacgggaaaaagaatctaattgaggaagagaaagaagttattaacaatttgcgtgcacaaattaccagcctgaatcaaatcgaaactataaaaaatcaaaatgccaagacaaaaatattgtgcgaggagttgcagactaaagataccgtacagaccgctaacaagcaggaatctcaggaagtccttactctcaagacatcccttgcacatctgaagtccaaggtgtgtgaactgcagaaaaaacttgaaaagcagtcagaggacgaaaaaatatccgaactgcagtcggatattggagaaataagcgagtgttgcttatccatggaactgaagctagcagacattgtaaattggcaggcggaggagttgcgccctctagatcagcttcaagaaagcggtgtcgaactgcagcaccatagtaccacagctgaagaatctctaaatgttgagaagcctatccaggaacaaactgaacgaactcttaccaccgaatatgaacgccgaatcgagcaacttgaagaatcattacaaagggcacaagaggaattaagtattctggagaagcgaaagacagatgagaacaaaagccttcagcttgagtacatggcgaaaattgagacgagcgagaatgaaaaccgctccaaattccgtgcatactgcctggatttaaaggaaacccagaaacgctacgaagagcagctacagcagaccaatgaaaagctcgccagtgttacgactcagtgtcaggtgcatttggatgtcattaaaagatctcttcaagaaaagattactcaggccgagaaggaaagaaacgaattggctgtccgacacaaggcagagcttgaaaaaatcagggaaacgctgaaggagaaggaatcttcttacaaggagaaactaaggcaagcggaggaggagcgcgataaggaaatttctaggcttgaggtgatgcgaaacacaatagcagagctgcataaaacgaattctgatcgggaagtggaactcgagggagtgaaaatggaaaaatgccaacttaagaagctgtacgacaaaagcatgttggagctagaacaactgcaatgcactgccgaccagaaaagttcggatttgctgccaggctcgtcgaacgagaacatcgatgacctgcaaaagaagtgcgatcaatatgttcaggatttggagctgttgaggggcgagaaagcagaactgctatcggagatccagaaaatcaacggacagcactcgaataccataaaaaaacttgaggaaatcgaagcggaaatgattacactaaccactcaaaaggagttggagaggtgtgaaattgcagaaaagctggagactttcaagtccaaggaggcagatatcaaagaagctctgcactgtgcccagctcaggcttcatgcctacgataagctggtgtgcgagtacgagcggctaaaaggctgtctttcggattcaaataagttgtcggaaaatctgcagaagaaagtggagcgtttgcatgctgaacagcttgctttacaagaaggaatttccggccgagattcagagattaaacagcttcgctctgagctcaaggacgccattgatgaaaataaaacagtgagagaagcaaaagtaggcctggaaaatagtcttaaagcagtacaggaaaatatgtctgcccaggaaggtcagtttaaacaaaagattgctgatattaagggttcagtagacgagcttcagattaaactaaaatctctgcaagaagtaagagaccatctagagtctagaaatgaagagcttaaaagaaagctaaaagatgctcaggaactacagaacatggtggataaggagcgaaagctcaattcctctctacgagaagattttgacaaactggaacaaaccaaactcgatctcgaagagcagcttcgagccaagaaagtagaaatcgatcgccgatccaaggagcttggcgaagtgaccaaggattgcgaaaatatacgatccgatctggtaagttttatttatttaacgccttcacttttgtattctattatattttattctataccaggaagctcaaactaatgatttcctaaaagaaagggaaactttgaacttgactatatccgatcttcggttgcataatgagcaattgctagaaacctcgaaaaattatctatcagacataacagcagcaaataatttaaatctcgaaatgaagaagaatcttcacgatctcacaaaagagtgcaagagcttacgttccgatctggtaataattaatctggtaatctatctggttgattacaatataggtaattaaaatttttcagcaatccaaagaagaatatttccaaacgcaaaagcaactgttggatgaaacaatttctaatctaaaggaggaaaaccgcaagatggaggaaaagttgagttcgggtaacaaggcgctcaaagaggattgcgaaaagctccgttcaacattggtaatattagacttgtctttgtaggttattcggtcgctaatgaaatatttatttaggaatcaaaggaacttatactgcaacagaataaacaagagttagaggaaaggctgactgttattaatgagaagaatgggaaaaacgcactacttgacgcccagttgaaatccaatgaaaccgcctttacatcactgcgaaaggcatggattaagcaaagtttagccatagaagcggccaataaaagaagcctcgagatggaacagaaggttgataaacgtacgagggagtacgaagaactacgatcaactctggtagaataattgcaatcaaaggctcttataaaatagcttaatgttttctctttaaatcgcctagaaaaccagggaaatcaactttcgatcggagaaggaacgcatggacggcaccatctctagcctgttagaagacaagcgtaatcttgaggagaagttgtgcacagtcaccgagctcctggctaagctaaagcgcgaactgccggctttacacacgcaaaaagtgaacggaggcgatgtgtccattgagttgaattcctcgaatggatcgccgactcctgcagctgttccagcaacaaagaagcccctggactgcaattccgctgaatgtgtgccaaaggtacgtatgatcttctaaatttcaagcatgtaatattttttttatttctctcgtaaagaaatccagcagcctagagactgcggagcggaagaatcgacggatgacggcctacgatgagaaccgtaagcagttttgctgaaacgacttacgtgacggcggaactacgaccgttcctttaggtaagttaaggtttgcttggccgcgaaatcgtctaaactttatgtggttttaactaatattgcaggtggcaattgccactgcgagcagcggagctgcaaacaaagactgagttcggactggaggcaaaacgttgagttcaacgatgataaaaaagatgattaatgttatccaagtattagggatttcttttgttaggtgttatcttgcaaacggtggaattccacatcataaagttttctatttatatttacgccctaagtatttgtcaaatactatcaatacaaaaattacaaaaacaatcgtgatcgtagtatttaaatttaaatctgtattatgctggtttttgtttaatagttaaattcgataaatagttaaatattgttaattaagaaatgtttccttcatcatgtgtaataatatttggttcatatgtatagcattgaataaactatttacattttcttaatgttaaaatcagattcgcataagttgctggttctaataataaaagacataaattacttaaatgtaaatctaaataagcataacgcttcttgtttgaattcccgattgcaccaatcgataagtcgatagtagcgcaaatacatattctagtgttgtgcattggaaaattgacggccgcttgagtgttgtgtacggcgtcagtgttgaatagctgcggacgcaaaactacgtaaaattacgacaaaaaaacagcgccccgcgaaaaaaggccatgaactcggcaatcaaggtaggttcagccgctccaccacatccgccggcagctccgaccgcgttgatcccgtcgccagcgcctccgcgcgttgcaagcgagaaaaaggcggcgcgggagagagtcgagagtcattcgtttgtctcactcctgcgagtgggaaatttgttgttccaccgtgagtgggccggcgggcggtgggcaggggcggtgcgtttgttttgaatttgcacgcggtaacaacaaactgactccggatgcaaatccgcatgcacttgcaggtgggggagatattcacggccgccggacaggcgttcagcagactgggcgatctaaccatgcagctgcatcccaatgcggagtcgccatcggggtaagttgattctatgcggtggagtcgcgagttttgtggacactaatcggagtgtttctgtgtgccttgttccctcgccacggctgcaggaagtggacggacgaggagatcgacatgctgcactcgtccataatgcgcttctccgacgacctgaccaagatcagcctaagcatcaagaaccgcaccgtgtaagtgatcctgtgctcctggcgagggaaccggctgcccagtgtgtacgtgctagttttaattgaccttccccattgcagttctcagatccgccaggcgctgaagaagaaggccttcgaggacgccggcattcccgccaagcaagtgcccgtccagcaggtgcaacacgttctccagacgctgccacaacagcagccgcagcagccccttcagcagccacctcctcaagtattcaagtcacagccaatcgtgcagcacgtacagctggtggcgcagccaaagcagatcatcctgcatccacagtctaatacaactacgacgggcacgacggtgactgttaagcagtaccagcagatgcagaaggctgcggcattagcggcagcccaggctgcagcctcgacggccaacaacacgcccaccatcacggagaacatcattatccagcagcccacttcgactacggcgacagtggtgcagcagccacatatggtgtccacctgctcgtcgacgcagatcgtggtgcccgttgtgtcggcagtgtccactgttccaacagtactctcgcccacggtggtgattgccgacgatgtggttagcacctccaatcctccagcggcagcggcgacagtaggatcgccagcaggggcgccagcaggcttaaagtgcggaccagacgtgtccatgaccctcaatcgcatcaatgtccaggagaacgaggtggacgtggaggagtgcctgcccgcagaggtggtcaagctggattttgtcagcgaggaggtggccgggtgaggttcgagccctcggaacgggctggacttcttctactagatctccggccgcagaacgaatcacgtaacttggaacagaaccgctacaaatccagatcgagaactcttaagcaaaaaggttgagatgccgccctagccctaagtctaaactgttaagtgttgtcatatttgatataccctgaaatcaccttgttccgggccccggatgacaaatgaattgtgcgatgtggaggacgagtctgtggatcgccagccacagagcgtagatattaattgcggagcgtatatgcgccgcctagacttaaatttacgcaagacacaatagtgcaaagtacataacgacgatcgtgtaagttgagagtgaataaacgagcattattttaagattcggcgatctctgggattttattggagttaggaaagcccaaggagcgtagaaatttagttatttgcaatggcttctacaatctcattgctgtaatttgtacttcatacttttattttgatcagactgtattataaaagcatatatataattatatttttaaagcacccaatgcaaactcaattgtgtttctaatggtccgctaaattatattgcattttatctttatttgaatgtacccatccaatttatgggacctattttataaacctttccttttaaatgcacaccacgtattttaaattcatccaattattgtacaatgaagtctcgagaaatttcgaatgcattttcaaatttcgttctgctcataattgcgctcgcaacccatacattgccattcgcatgtcggatttcaaatccgcactttcagaatttccaaagcgggtagcaagaagaagagcggctaataaagatacggatacatcaacaacaacagtcggaaatccattgttccccacaaaatgagacttcgtttgcaagtcctggtggccctgttaacctgctcgtccatttccgtctcactggcctacaaaccggtggtcatactccatggaattctatcaggagccgaatcgatggcctctctggtccgggaaatcgaagaggtttgtttttcgattcccctttgttattgtttacagtggcaaggtcgaatttgacgcaaacaacgcagtagcactgataaactcatttcgtccgtttgtagtttcatcctggcactatcgtctacaactgcgacaagttcaatggatggtacagcttggagaacgcctggcgacaggtcgatcaggttagggattatctcaacgaggtgggcaaactgcatccagagggcatcattgtgctgggtaaggcagccgattttcattagagtattttcttttagttaccaatactatgcctttttcaggatactcacaaggaggccttttggcc

SEQ ID NO: 9827 - DNA, 7985 bp, DROSOPHILA
ctggctcgcgcctatttactggttccgtatttcgatctggttcgcttccgaagcggtatttgttcgaatttacaaagagaaactaacatgtcgatcaaactagcttttataaaacgttaaaatctgtttgtgtctgttcattgtgcatgtcaaacacgtttcccacaagtcgcaaagatgtctacgaagaacgccagctccatccaggtctgcatcaaggtgcgtccctgcgagcccgggctcacttcactctggcaggtgaaggagggccgctccatccagttggcggacagccatgcggagccctatgtcttcgactatgtgttcgacgagggcgccagcaaccaggaggtgttcgaccggatggccaagcacatagtgcacgcctgcatgcagggctccaacggaactatttttgcctacggccagacgtcgtcgggcaagacgtacaccatgatgggcgacgaacagaatccgggcgtcatggtgctagccgccaaggagatctttcaacagatctccagtgagacggagcgggactttctgctgcgcgtgggctacatcgagatctacaacgagaagatctacgatctgctgaacaagaagaatcaggacctcaagatccatgagtccggcaatgggattgtgaatgtgaactgcaaggagtccatcgtaaccagcgaggacgacctcctgcgccagctctacatgggcaacaaggagcgcgtcgtgggcgagaccaacatgaacgagcggtccagtcgttcgcacgccatcttcaggataatcattgagtcccgaaagtcggaccacagtgataacgacaccgtaaagcagagcgtactgagcctggtggatctggctggatccgaacaggtggaccccgcggaccacgcatccagccttatgatttttcgcaacttggttaagagcctctccgagagtgtagatagcaagccgaatagctttcgcgattcgaaacttccgcgcatcatgctgccttcgctgggtggaaatgttttgacctctatcatctgtacaattacgccatcgttcgtggaggagtcgtcatccactataagcttcggcacgtgtgccaaaaaaattcgttgcaagccgcaggtctgcaagatagactctgaaaccacgatgatgaggcaacttgatcgcgggatcagtatgttgaaggataagcttgctaagaagaagatcaagaatgagagccagctggtattgcaggaattggaaggtcgcatcaagcgcgacatgttgaagatcgtttccagcgcctcgcttgacgactatcgcctccagaagcgtcgtcgtacttggactttaaccgcctcaggctcagaaggcgacgctcctgttctcgcattgcctgagccagaggagtcccgtctaccgcgtccttcgaagctgactaacctgccgaaacccttgtttcagcggcgggggattgctcccaaagccaaaggcatttgtaaaaccctaaaggagaaaaggttacaaacggataatatggacactatgcctggccgggcgaaacagttgggaagagagacagctagcagaattccttcagtaatgatgtcaaaaaagtatcaggagtcggtgccgaactgcgatgccccgcagaccgagatctctgcgcttactgcatccaaccaggtagcaaaggagacgatcgagaagtacgaggagcaggtgaagaggctaaaggagacaattgagcggctggagatggagaacggcaaggcagtcaatctaggggagcaattcgaaacacacaaggccaagtcgaagcaaatggaggaagaacttctctcctccatctccgaaaaagattcgaccatagtaagtctgcaacagtcccttgaggagctatctcgggatgtgttgcgaaacagcaaggaggatcaaatgcgatccatgtgccccgagcttgagtccagctgcgagcggatctgcaacaagtgcctggagttggaacggctactgcccctagcgagtgcctcaggactggactcagtcgcctgccagtttgatcagttgcgatcggagattgctgccacccgtatgaagttggaaagtatgctgtctactttcagccatgcaagctgtgaggtatcacaaaagaccactgattgcaaacggctctccgaacagatatccacagcgcatgatgactttggacaattgcaggaaaagtacaacaacctgaagcataagtggtctagtcaaaagctggccattgataccatgcaggttgactacaatactatacagcaaaagtacctacagctgcaggacgagtataggcatctggaactcagatcggatgaacagtgtcagcagctgcaggatgaaaattctaaactgcaagccgagattggaactctcaaggagcgagtggaggagatccatagtgagctattagaagttcccaatccggatactcatccagaagatatggagctacaaaatcaagagctgaagaagcgcctctccaagttgcagtgggagtttgacgagatccaactgaattacgaatgtctatccaacgaattgatgagtactattcaagagtgcgatgcactccgagaggagcacaagcaacgaacaacgaactccgatttggaatccatgaagagttcgggtgtaggcactgagtgcagtgatccggaaaacgaattggacactgatctgctgcaacagttcaccaagctgtcgaagtccatccaacagattgagctcaccgactactccggtggcaggcgcctctttatatataaccatgccgaacaggatcaaagcgtgccaagcctaaaactttgccttgagcctgctaagtatttagagggtgatggtaaacaacatgatgcatccgactccgtattccttaaaggctttctgaaatgccaaagatttcagattgtcaaaataaatcaggaacagaatttggtgaaagaggaagaccgaatgcgtgatatcattttccaactgaaacaagaagttgacgggaaaaagaatctaattgaggaagagaaagaagttattaacaatttgcgtgcacaaattaccagcctgaatcaaatcgaaactataaaaaatcaaaatgccaagacaaaaatattgtgcgaggagttgcagactaaagataccgtacagaccgctaacaagcaggaatctcaggaagtccttactctcaagacatcccttgcacatctgaagtccaaggtgtgtgaactgcagaaaaaacttgaaaagcagtcagaggacgaaaaaatatccgaactgcagtcggatattggagaaataagcgagtgttgcttatccatggaactgaagctagcagacattgtaaattggcaggcggaggagttgcgccctctagatcagcttcaagaaagcggtgtcgaactgcagcaccatagtaccacagctgaagaatctctaaatgttgagaagcctatccaggaacaaactgaacgaactcttaccaccgaatatgaacgccgaatcgagcaacttgaagaatcattacaaagggcacaagaggaattaagtattctggagaagcgaaagacagatgagaacaaaagccttcagcttgagtacatggcgaaaattgagacgagcgagaatgaaaaccgctccaaattccgtgcatactgcctggatttaaaggaaacccagaaacgctacgaagagcagctacagcagaccaatgaaaagctcgccagtgttacgactcagtgtcaggtgcatttggatgtcattaaaagatctcttcaagaaaagattactcaggccgagaaggaaagaaacgaattggctgtccgacacaaggcagagcttgaaaaaatcagggaaacgctgaaggagaaggaatcttcttacaaggagaaactaaggcaagcggaggaggagcgcgataaggaaatttctaggcttgaggtgatgcgaaacacaatagcagagctgcataaaacgaattctgatcgggaagtggaactcgagggagtgaaaatggaaaaatgccaacttaagaagctgtacgacaaaagcatgttggagctagaacaactgcaatgcactgccgaccagaaaagttcggatttgctgccaggctcgtcgaacgagaacatcgatgacctgcaaaagaagtgcgatcaatatgttcaggatttggagctgttgaggggcgagaaagcagaactgctatcggagatccagaaaatcaacggacagcactcgaataccataaaaaaacttgaggaaatcgaagcggaaatgattacactaaccactcaaaaggagttggagaggtgtgaaattgcagaaaagctggagactttcaagtccaaggaggcagatatcaaagaagctctgcactgtgcccagctcaggcttcatgcctacgataagctggtgtgcgagtacgagcggctaaaaggctgtctttcggattcaaataagttgtcggaaaatctgcagaagaaagtggagcgtttgcatgctgaacagcttgctttacaagaaggaatttccggccgagattcagagattaaacagcttcgctctgagctcaaggacgccattgatgaaaataaaacagtgagagaagcaaaagtaggcctggaaaatagtcttaaagcagtacaggaaaatatgtctgcccaggaaggtcagtttaaacaaaagattgctgatattaagggttcagtagacgagcttcagattaaactaaaatctctgcaagaagtaagagaccatctagagtctagaaatgaagagcttaaaagaaagctaaaagatgctcaggaactacagaacatggtggataaggagcgaaagctcaattcctctctacgagaagattttgacaaactggaacaaaccaaactcgatctcgaagagcagcttcgagccaagaaagtagaaatcgatcgccgatccaaggagcttggcgaagtgaccaaggattgcgaaaatatacgatccgatctggaagctcaaactaatgatttcctaaaagaaagggaaactttgaacttgactatatccgatcttcggttgcataatgagcaattgctagaaacctcgaaaaattatctatcagacataacagcagcaaataatttaaatctcgaaatgaagaagaatcttcacgatctcacaaaagagtgcaagagcttacgttccgatctgcaatccaaagaagaatatttccaaacgcaaaagcaactgttggatgaaacaatttctaatctaaaggaggaaaaccgcaagatggaggaaaagttgagttcgggtaacaaggcgctcaaagaggattgcgaaaagctccgttcaacattggaatcaaaggaacttatactgcaacagaataaacaagagttagaggaaaggctgactgttattaatgagaagaatgggaaaaacgcactacttgacgcccagttgaaatccaatgaaaccgcctttacatcactgcgaaaggcatggattaagcaaagtttagccatagaagcggccaataaaagaagcctcgagatggaacagaaggttgataaacgtacgagggagtacgaagaactacgatcaactctgaaaaccagggaaatcaactttcgatcggagaaggaacgcatggacggcaccatctctagcctgttagaagacaagcgtaatcttgaggagaagttgtgcacagtcaccgagctcctggctaagctaaagcgcgaactgccggctttacacacgcaaaaagtgaacggaggcgatgtgtccattgagttgaattcctcgaatggatcgccgactcctgcagctgttccagcaacaaagaagcccctggactgcaattccgctgaatgtgtgccaaagaaatccagcagcctagagactgcggagcggaagaatcgacggatgacggcctacgatgagaaccgtaagcagttttgctgaaacgacttacgtgacggcggaactacgaccgttcctttagtggcaattgccactgcgagcagcggagctgcaaacaaagactgagttcggactggaggcaaaacgttgagttcaacgatgataaaaaagatgattaatgttatccaagtattagggatttcttttgttaggtgttatcttgcaaacggtggaattccacatcataaagttttctatttatatttacgccctaagtatttgtcaaatactatcaatacaaaaattacaaaaacaatcgtgatcgtagtatttaaatttaaatctgtattatgctggtttttgtttaatagttaaattcgataaatagttaaatattgttaattaagaaatgtttccttcatcatgtgtaataatatttggttcatatgtatagcattgaataaactatttacattttcttaatgttaaaatcagattcgcataagttgctggttctaataataaaagacataaattacttaaatgtaaatctaaataagcataacgcttcttgtttgaattcccgattgcaccaatcgataagtcgatagtagcgcaaatacatattctagtgttgtgcattggaaaattgacggccgcttgagtgttgtgtacggcgtcagtgttgaatagctgcggacgcaaaactacgtaaaattacgacaaaaaaacagcgccccgcgaaaaaaggccatgaactcggcaatcaaggtgggggagatattcacggccgccggacaggcgttcagcagactgggcgatctaaccatgcagctgcatcccaatgcggagtcgccatcggggaagtggacggacgaggagatcgacatgctgcactcgtccataatgcgcttctccgacgacctgaccaagatcagcctaagcatcaagaaccgcaccgtttctcagatccgccaggcgctgaagaagaaggccttcgaggacgccggcattcccgccaagcaagtgcccgtccagcaggtgcaacacgttctccagacgctgccacaacagcagccgcagcagccccttcagcagccacctcctcaagtattcaagtcacagccaatcgtgcagcacgtacagctggtggcgcagccaaagcagatcatcctgcatccacagtctaatacaactacgacgggcacgacggtgactgttaagcagtaccagcagatgcagaaggctgcggcattagcggcagcccaggctgcagcctcgacggccaacaacacgcccaccatcacggagaacatcattatccagcagcccacttcgactacggcgacagtggtgcagcagccacatatggtgtccacctgctcgtcgacgcagatcgtggtgcccgttgtgtcggcagtgtccactgttccaacagtactctcgcccacggtggtgattgccgacgatgtggttagcacctccaatcctccagcggcagcggcgacagtaggatcgccagcaggggcgccagcaggcttaaagtgcggaccagacgtgtccatgaccctcaatcgcatcaatgtccaggagaacgaggtggacgtggaggagtgcctgcccgcagaggtggtcaagctggattttgtcagcgaggaggtggccgggtgaggttcgagccctcggaacgggctggacttcttctactagatctccggccgcagaacgaatcacgtaacttggaacagaaccgctacaaatccagatcgagaactcttaagcaaaaaggttgagatgccgccctagccctaagtctaaactgttaagtgttgtcatatttgatataccctgaaatcaccttgttccgggccccggatgacaaatgaattgtgcgatgtggaggacgagtctgtggatcgccagccacagagcgtagatattaattgcggagcgtatatgcgccgcctagacttaaatttacgcaagacacaatagtgcaaagtacataacgacgatcgtgtaagttgagagtgaataaacgagcattattttaa

SEQ ID NO: 9828 - protein, 1931 aa, DROSOPHILA
MSTKNASSIQVCIKVRPCEPGLTSLWQVKEGRSIQLADSHAEPYVFDYVFDEGASNQEVFDRMAKHIVHACMQGSNGTIFAYGQTSSGKTYTMMGDEQNPGVMVLAAKEIFQQISSETERDFLLRVGYIEIYNEKIYDLLNKKNQDLKIHESGNGIVNVNCKESIVTSEDDLLRQLYMGNKERVVGETNMNERSSRSHAIFRIIIESRKSDHSDNDTVKQSVLSLVDLAGSEQVDPADHASSLMIFRNLVKSLSESVDSKPNSFRDSKLPRIMLPSLGGNVLTSIICTITPSFVEESSSTISFGTCAKKIRCKPQVCKIDSETTMMRQLDRGISMLKDKLAKKKIKNESQLVLQELEGRIKRDMLKIVSSASLDDYRLQKRRRTWTLTASGSEGDAPVLALPEPEESRLPRPSKLTNLPKPLFQRRGIAPKAKGICKTLKEKRLQTDNMDTMPGRAKQLGRETASRIPSVMMSKKYQESVPNCDAPQTEISALTASNQVAKETIEKYEEQVKRLKETIERLEMENGKAVNLGEQFETHKAKSKQMEEELLSSISEKDSTIVSLQQSLEELSRDVLRNSKEDQMRSMCPELESSCERICNKCLELERLLPLASASGLDSVACQFDQLRSEIAATRMKLESMLSTFSHASCEVSQKTTDCKRLSEQISTAHDDFGQLQEKYNNLKHKWSSQKLAIDTMQVDYNTIQQKYLQLQDEYRHLELRSDEQCQQLQDENSKLQAEIGTLKERVEEIHSELLEVPNPDTHPEDMELQNQELKKRLSKLQWEFDEIQLNYECLSNELMSTIQECDALREEHKQRTTNSDLESMKSSGVGTECSDPENELDTDLLQQFTKLSKSIQQIELTDYSGGRRLFIYNHAEQDQSVPSLKLCLEPAKYLEGDGKQHDASDSVFLKGFLKCQRFQIVKINQEQNLVKEEDRMRDIIFQLKQEVDGKKNLIEEEKEVINNLRAQITSLNQIETIKNQNAKTKILCEELQTKDTVQTANKQESQEVLTLKTSLAHLKSKVCELQKKLEKQSEDEKISELQSDIGEISECCLSMELKLADIVNWQAEELRPLDQLQESGVELQHHSTTAEESLNVEKPIQEQTERTLTTEYERRIEQLEESLQRAQEELSILEKRKTDENKSLQLEYMAKIETSENENRSKFRAYCLDLKETQKRYEEQLQQTNEKLASVTTQCQVHLDVIKRSLQEKITQAEKERNELAVRHKAELEKIRETLKEKESSYKEKLRQAEEERDKEISRLEVMRNTIAELHKTNSDREVELEGVKMEKCQLKKLYDKSMLELEQLQCTADQKSSDLLPGSSNENIDDLQKKCDQYVQDLELLRGEKAELLSEIQKINGQHSNTIKKLEEIEAEMITLTTQKELERCEIAEKLETFKSKEADIKEALHCAQLRLHAYDKLVCEYERLKGCLSDSNKLSENLQKKVERLHAEQLALQEGISGRDSEIKQLRSELKDAIDENKTVREAKVGLENSLKAVQENMSAQEGQFKQKIADIKGSVDELQIKLKSLQEVRDHLESRNEELKRKLKDAQELQNMVDKERKLNSSLREDFDKLEQTKLDLEEQLRAKKVEIDRRSKELGEVTKDCENIRSDLEAQTNDFLKERETLNLTISDLRLHNEQLLETSKNYLSDITAANNLNLEMKKNLHDLTKECKSLRSDLQSKEEYFQTQKQLLDETISNLKEENRKMEEKLSSGNKALKEDCEKLRSTLESKELILQQNKQELEERLTVINEKNGKNALLDAQLKSNETAFTSLRKAWIKQSLAIEAANKRSLEMEQKVDKRTREYEELRSTLKTREINFRSEKERMDGTISSLLEDKRNLEEKLCTVTELLAKLKRELPALHTQKVNGGDVSIELNSSNGSPTPAAVPATKKPLDCNSAECVPKKSSSLETAERKNRRMTAYDENRKQFC

SEQ ID NO: 9829 - DNA, 5296 bp, DROSOPHILA
gtgttcattttgtgtcgttactgtcattgatgctcacatacataacttgctttggtttcctttccctttcttcgatttccacaacaacaaccgcagtagcaacaacaaaactgaacaacttatccttgtgcttgttatatttaccctcaattgtatatgtcctgcctgccacctcacaccctaaggataattccttggcaattgtgtttttatgtggccaaccccaaatctgattagacgagcttccgagggtttcagctttgggccaagaacggcagtatcaggctacgataaatggctgaaacttgtaactgagcaggatatcagacgtggcattgtcaaggggaaactgcttttagcctgttgctaaaaatactgtcgcgcgtttgcgtccccttgagggtcttcgtttgcaatcctttcgacaggaggttctgcaattccaatcggcttgttacctgtccggggaattgactgtgttaagtggtaaattactttttttttcttggttccgtttttttgcgacatattacgggaaaagggtttgcatgtaattgatactaaaactggagcaaagtatatgtctaaaaagtgaaacacttaaaaaaggacttagaaagccctagaagtgtaatgtgtgaggaatatgttaagcgattcccagctattgagcatttgtgcatttacccaattgattttttggggtagcaaaaagaacagaaatggaaaagattattgctgtgatttatgctttattaatatatttttttaaaattcaataaaaagacacctttcattgggaacagaggtgcattgaagaagattatcatcgaaaatcgttccctcatcgcaatccacggcatatggaatgggatagtcacagacgacatagcgaccgcaatcattgggatacggaagcagagttccaagagcttggccacagcatatattgggggtgtacggatctagagttgttggtgtagaaactgtggttgtcgattcagttgttgttgttactgttgtcgattcggtggttgttgtctttggagttgttgaaacggttgttggctcggttgtcgttggggttgttgaaattgtcgttgactcggttgtcgttggggttgttgaaactgtcgttgactctgtagtagtagtctttggagttgttgaaattgtcagttgattccgtggtagttgtttggggagtggttgtagctgtagttgattctgtggttgttgttgggattgtggttgactcggtagtagtggtctttggagttgttggctcggttgtcgttggagttgttgaaattatcgttgattctgtggtagttgttttggaagttgtcgattctgttgtagttgtttggggagtggttgatctgtggttgttgttgagattgtggttgactcggtagtagtagtctttggagtagttgacatttctgtagtggtagcctcgggtgttgttgaaactgttgttaccggtgtagacgaagcttctgtacttaaagttgtaagccctggtgtggttaacttagtgctacaaccagctagttcgggatccatgcaggtcaattccgtgggactaaactccaaaccatccggacaatcgtaaccaactggtattggatattggcactttatatacttgctacagtttctcgggtagggtaccaaggagtcgtctgtcttgccttcacaaattccatctgccggcttttcagttgtagaagcttccgggttagttgttcctggttccattgtagtagatgatggtggtgttgaaattgttgaaggtgattcagaagtatcagtagataatactgtagatgattctgtagtttctgttgattgtcctgtagatgattctgttgttgattccgttgttgattctgttgttgattctgttgttgattctgtagatggttctgttgttgattctgtagacgattctgtagaagatcccgttgatggttcggaaggcgttgttgagccttccccgtctcttggtgtagtcgtcgactccgatggcttagcagtggttgtaatcgaacaattggcgagtgaagcatcaacacattttccaagctccacactaaattcatctcctttttcgcattcaaaggcaaccgcaatgggtctatcgcactgaatatacttcgaacaatcgttgggataagcgacaagggccccatcctcgacgtcgtcacaaggtcctttctgcggtggtggtctcgtaaccgctgtggtcgttgtcggctcactggtagttgatgtggttgaagtgtagtcccatcgacaggcatctgaaggaacatccgctccacacttttcagtaattggatcgtagtactccccacaattacagacgtccatcatgtaaatgtaatcatccacacagcgtatgaaccattgacaattgtccggatatgggaatgtatcccgactgctatttgtacacatggtcggttccggaggaggtcttgtatagcctggttctagagtcgttgtgctttgatcaccctcacaatcactttcatcccaatcatcaatgcacttctctaacttggaactgaagaatgtaccatcgggacagaagaacgctatgggaattggtgaaacgcacacaatgtacttggtgcagttgttgggataagcaatattctcgttctcatttcgaccaccgcaaataccagtttttggggccacagttgtggttgtcctttcggtggttgtagctgtggacttgggtgtggtatttctttcggttgttgtggtctctgtcgttgttgttgttgtggtggttgtgacttgtgatggtttgcacgcatcgggtgccacatcaggtccacactgacctgtgctgggatcaaaataactgccgtaaatgcagggtgccagagtccattgtccgccgcccaagcaaagataatacttgctgcaatcatccggataagaaaacgaagctcccaactcctgaccatcgcaaagctgatctggtcccaaagttgttgccactgtggtggtagtcgtggtaggagtggttttttcagtagtagtagttggtatggtggttggaattggtgtcgtggtgcgatctccaaggcacacaacatcatctggctcatcgcatacaagcaagtcgggattgaagagcgtattaggaggacaatgacccatttgcacttgattgtctttacatattaagtactccgaacaattgcctatgtaggcaaaaatagtgccgtccttttcatctttacaatcatttggatcgacatcagagggaagtccatctgtagtggttacaatctcttctgtggtgctagaatgtatttccgttgtagacccatcagaaggcagtgttgtaggcgttgaaggagttgtagtgattgaaggcgtcgtcgtgactgaaggcgtcgttggtttgttggttgttcccggagttgtggggaatggcagggggtcacaccgcaccgaatcgggtgtatcgcagatgtgcagccaattattaaagagtttatccggctggcagtaatccaaatctgtgcaaccatttttgcaggccaagtacccactgcaattgtaaggatactcatagaaaccatttcccttcggcacacaataatcctcttcaattccctccggcgttggaccgcaaaccacatcctcctcagttgttgaagtgggcggcatttctgttgtggttgtaggaaggggcagctcctcgcaatctgccatatcgggagtatcgcaaatgccaaggtacttattgaataccttgtcttcaatacagtaatttagcacgggccagccgtaagtgcagtttatataggcctggcagtcatatggataataatgtaccgagccatcctccttgttgcgacagtagtcatctgaaattcccggtggtgccggtggtggatcccaactggatgttgggaggtaacttgagggggtagaggacgttatctctgtactggttccggtggtactttctgtcgttatctttgccgtacttgatggtggttctgtgggttctggcgttatcttttgagtactggatgttggttctggcgtaaatcgagtagttccatccgtaggttctggcgtttcaatcgagtagtagatacattctacagcttggggataattacattgctgggtcttattatcccaccagagatttgcgggacacaacttcaccgtgggatagagacagtcgcaaactaggaacaaactacagttatccggatacggtaccaaagcaccaaagtccttgccctcgcacatcacctggttttcgtatcgctgttcattgttgcaagtttcgtgacgaggttcgatctttggcagggccaaaacatttagctgccagctccagaatacggcgataaccaccagaagccatggcaaaggcttgaaaatattatctggaaaaggaaagaatacaataataatacaaaaaaaaaaacatacagagactattactagtatttaagtttaaatatttatgtataattgacataataatttattgcattgtacttgcatagaatatcttagatttaccttgcataacaactcccctttctaaattgtactatatatttttaataggtcttttcgcctgcgagtttaactccacactgacttgttaactaggccaactgtcttgtctatagcaaaagctatttcctgatacaacgtcggtagcttatattaatgacattttgattagatttaattagaaattctttgaaatttatagaatatcgttttcattctagtgattgtgatttgtgattttatgttatcgttaacttctgaattatttttcttaagtgccatttcaacacgagcaacacaagatagtttccgtaatattctaatctagtgataagccaattacgtattgaagtcttatcgtggcgtcatagattgttttgtttataaaggttaattttaagcaaaatataaggcaggaagcttctctggggttttctttaagtatttcccctactggtgtttttttacacacgtattgcttgtgaaatgagtgtcattttatattctttcatttcgaaggtaaatcattttatcctgttcgcatgtgttttgtgtgcgccttttgtgactcttattgctgctgttattacacttattgttcttgttccagttcacggtgttgttgggtctttaatgagcccacgtgacctttccgacagcgaagttcgagtcacaatttatgatcagcactcgacgcgtaaattacacgaataaaaatgcgaac

SEQ ID NO: 9830 - DNA, 3234 bp, DROSOPHILA
atgtgcgagggcaaggactttggtgctttggtaccgtatccggataactgtagtttgttcctagtttgcgactgtctctatcccacggtgaagttgtgtcccgcaaatctctggtgggataataagacccagcaatgtaattatccccaagctgtagaatgtatctactactcgattgaaacgccagaacctacggatggaactactcgatttacgccagaaccaacatccagtactcaaaagataacgccagaacccacagaaccaccatcaagtacggcaaagataacgacagaaagtaccaccggaaccagtacagagataacgtcctctaccccctcaagttacctcccaacatccagttgggatccaccaccggcaccaccgggaatttcagatgactactgtcgcaacaaggaggatggctcggtacattattatccatatgactgccaggcctatataaactgcacttacggctggcccgtgctaaattactgtattgaagacaaggtattcaataagtaccttggcatttgcgatactcccgatatggcagattgcgaggagctgccccttcctacaaccacaacagaaatgccgcccacttcaacaactgaggaggatgtggtttgcggtccaacgccggagggaattgaagaggattattgtgtgccgaagggaaatggtttctatgagtatccttacaattgcagtgggtacttggcctgcaaaaatggttgcacagatttggattactgccagccggataaactctttaataattggctgcacatctgcgatacacccgattcggtgcggtgtgaccccctgccattccccacaactccgggaacaaccaacaaaccaacgacgccttcagtcacgacgacgccttcaatcactacaactccttcaacgcctacaacactgccttctgatgggtctacaacggaaatacattctagcaccacagaagagattgtaaccactacagatggacttccctctgatgtcgatccaaatgattgtaaagatgaaaaggacggcactatttttgcctacataggcaattgttcggagtacttaatatgtaaagacaatcaagtgcaaatgggtcattgtcctcctaatacgctcttcaatcccgacttgcttgtatgcgatgagccagatgatgttgtgtgccttggagatcgcaccacgacaccaattccaaccaccataccaactactactactgaaaaaaccactcctaccacgactaccaccacagtggcaacaactttgggaccagatcagctttgcgatggtcaggagttgggagcttcgttttcttatccggatgattgcagcaagtattatctttgcttgggcggcggacaatggactctggcaccctgcatttacggcagttattttgatcccagcacaggtcagtgtggacctgatgtggcacccgatgcgtgcaaaccatcacaagtcacaaccaccacaacaacaacaacgacagagaccacaacaaccgaaagaaataccacacccaagtccacagctacaaccaccgaaaggacaaccacaactgtggccccaaaaactggtatttgcggtggtcgaaatgagaacgagaatattgcttatcccaacaactgcaccaagtacattgtgtgcgtttcaccaattcccatagcgttcttctgtcccgatggtacattcttcagttccaagttagagaagtgcattgatgattgggatgaaagtgattgtgagggtgatcaaagcacaacgactctagaaccaggctatacaagacctcctccggaaccgaccatgtgtacaaatagcagtcgggatacattcccatatccggacaattgtcaatggttcatacgctgtgtggatgattacatttacatgatggacgtctgtaattgtggggagtactacgatccaattactgaaaagtgtggagcggatgttccttcagatgcctgtcgatgggactacacttcaaccacatcaactaccagtgagccgacaacgaccacagcggttacgagaccaccaccgcagaaaggaccttgtgacgacgtcgaggatggggcccttgtcgcttatcccaacgattgttcgaagtatattcagtgcgatagacccattgcggttgcctttgaatgcgaaaaaggagatgaatttagtgtggagcttggaaaatgtgttgatgcttcactcgccaattgttcgattacaaccactgctaagccatcggagtcgacgactacaccaagagacggggaaggctcaacaacgccttccgaaccatcaacgggatcttctacagaatcgtctacagaatcaacaacagaaccatctacagaatcaacaacagaatcaacaacagaatcaacaacggaatcaacaacagaatcatctacaggacaatcaacagaaactacagaatcatctacagtattatctactgatacttctgaatcaccttcaacaatttcaacaccaccatcatctactacaatggaaccaggaacaactaacccggaagcttctacaactgaaaagccggcagatggaatttgtgaaggcaagacagacgactccttggtaccctacccgagaaactgtagcaagtatataaagtgccaatatccaataccagttggttacgattgtccggatggtttggagtttagtcccacggaattgacctgcatggatcccgaactagctggttgtagcactaatttcaacaacacccgaggctaccactacagaaatgtcaactactccaaagactactactaccgagtcaaccacaatctcaacaacaaccacagatcaaccactccccaaacaactacaacagaatcgacaacttccaaaacaactaccacagaatcaacgataatttcaacaactccaacgacaaccgagccaacaactccaaagaccactactaccgagtcaaccacaatcccaacaacaaccacagaatcaactacagctacaaccactccccaaacaactaccacggaatcaactgacaatttcaacaactccaaagactactactacagagtcaacgacagtttcaacaaccccaacgacaaccgagtcaacgacaatttcaacaaccccaacgacaaccgagccaacaaccgtttcaacaactccaaagacaacaaccaccgaatcgacaacagtaacaacaacaactga

SEQ ID NO: 9831 - protein, 1077 aa, DROSOPHILA
MCEGKDFGALVPYPDNCSLFLVCDCLYPTVKLCPANLWWDNKTQQCNYPQAVECIYYSIETPEPTDGTTRFTPEPTSSTQKITPEPTEPPSSTAKITTESTTGTSTEITSSTPSSYLPTSSWDPPPAPPGISDDYCRNKEDGSVHYYPYDCQAYINCTYGWPVLNYCIEDKVFNKYLGICDTPDMADCEELPLPTTTTEMPPTSTTEEDVVCGPTPEGIEEDYCVPKGNGFYEYPYNCSGYLACKNGCTDLDYCQPDKLFNNWLHICDTPDSVRCDPLPFPTTPGTTNKPTTPSVTTTPSITTTPSTPTTLPSDGSTTEIHSSTTEEIVTTTDGLPSDVDPNDCKDEKDGTIFAYIGNCSEYLICKDNQVQMGHCPPNTLFNPDLLVCDEPDDVVCLGDRTTTPIPTTIPTTTTEKTTPTTTTTTVATTLGPDQLCDGQELGASFSYPDDCSKYYLCLGGGQWTLAPCIYGSYFDPSTGQCGPDVAPDACKPSQVTTTTTTTTTETTTTERNTTPKSTATTTERTTTTVAPKTGICGGRNENENIAYPNNCTKYIVCVSPIPIAFFCPDGTFFSSKLEKCIDDWDESDCEGDQSTTTLEPGYTRPPPEPTMCTNSSRDTFPYPDNCQWFIRCVDDYIYMMDVCNCGEYYDPITEKCGADVPSDACRWDYTSTTSTTSEPTTTTAVTRPPPQKGPCDDVEDGALVAYPNDCSKYIQCDRPIAVAFECEKGDEFSVELGKCVDASLANCSITTTAKPSESTTTPRDGEGSTTPSEPSTGSSTESSTESTTEPSTESTTESTTESTTESTTESSTGQSTETTESSTVLSTDTSESPSTISTPPSSTTMEPGTTNPEASTTEKPADGICEGKTDDSLVPYPRNCSKYIKCQYPIPVGYDCPDGLEFSPTELTCMDPELAGCSTNFNNTRGYHYRNVNYSKDYYYRVNHNLNNNHRSTTPQTTTTESTTSKTTTTESTIISTTPTTTEPTTPKTTTTESTTIPTTTTESTTATTTPQTTTTESTDNFNNSKDYYYRVNDSFNNPNDNRVNDNFNNPNDNRANNRFNNSKDNNHRIDNSNNNN

SEQ ID NO: 9832 - DNA, 5027 bp, DROSOPHILA
gatcttctgaatgcgcggctcgtcctccaccttcatgaagggcacatggttcatcagatagttgatgcaacccttgccgcccagatacgcctttttcagatcggtgcgctccagctccgattccacatactccttttcatagttgttgatatcctcctcggtgatgggcttgaagattttgctccacaactccagccacgacgacagcttggactcgctctcatcgtcgtcgtcgatcacgccctgctcgtcgtacagcgcccgcttctgcgtgtcggtaagcacctggtagagcttcgatagcaccttgaacttctcggtggactccgccttctgctcctccggcactcgatcgggatgaacgagcagcgagagcttgtggtatgccttcttcacctccttctcgccggcgccccgggccagctccattagcttgtacacatcgcgcgtcccaaaatacttttcgcacagctccagcgtcgacattgctaatttcgtattttgtatttttatttttcgcaccaacactaccaaacgcaaaatgcgccaaaacgccgcgccagtgtggcggtgcgtggggcagacaaaaattcctttgtttaatggtgcgaaaaaatctttgattttcctgtttacagcaatttggttattatttaacaagtaaaatggtattctatgaattttgttttaactattgataatttttgagagcctgcgtgataagtaacaaaaataaattggagaattgaacatttcagtgctgcacaacattgcatggttggtgtcccaactaaaaagtaacccgtgttaagaacgtatgagggtggcatccctcaaaatccatggcgagcagtgttaccgtactgcgaaaagtgaccttaaacccatctcaaaaaatataccaaacgtgtatttctcagcaaagttaccactgggcacactacacactatataacgagacggaagtcggaatcgtttcttttccgttttacacgtctgaagagaacagacatggtgagcatctcgatcggataaaataaattatattactatgtgatgtgtcaaaaagatggatgattgcaagttaaataattgattagtttggaaacagtagcgttataatcactctaaatgtaactaatacaaacaaagcgtaattttaatgcataatttgcacttgcaacatccacgtgttcacctaacctcaaagtgcagaaacgcattgtgctaatggattttctccattcattttgcagtctcatcgtaagttctcggcaccccgccatggctccatggccttctaccccaagaagcgctcagctcgccatcgcggtaaggttaaggccttccccaaggatgacgccagcaagccagtccatctgacctgcttcatcggctacaaggccggcatgacccacattgtgcgcgaggccgatcgtcctggctccagtaagtaccagcatccacctctatcaactaacaactactttccatgatgagtatactagaagatttatggttagaacacatatgattaaccgtgattatctcaactagggcggactgaccaagcccactctgtagatgatttctcttagggaataccattactcggtattaatggcttttctttctcttgcagagatcaacaagaaggaggtggtcgaggccgtcaccgttctggagaccccgcccatgattgtggtcggtgctgtcggctacatcgagactcccttcggtctgcgtgccctggtcaacgtttgggcccagcatctctccgaggagtgccgtcgtcgcttctacaagaactggtatgtatccgaggaccacgtggtcgttcttcctactccatttgtcgccattttctttgcaccgggtgtacacacacacaaaatggcagccgacacgtgctttctactcgagtctggatgatgaaacgatggtatctgaatgagcaaattattgttgagaagccttttaccatctgctgccttccttctgatcggcctcttagaaaataagcgattgattttgctgcaatacaatatctattgttttttgaagtataaatcaaccagtgcgctgttttgtgtgtgtgcgaacttccgatcaacagtgattccctcgtgtaatatagacccctattaaatgtaaaacaaaatcataaagttcttcgatcagcttgctgagagagcttttcaaatcgctaaacgttgtgtgagctgtcaggttaatcttgatcatggggcgcacaagcaagcccctggttaattgaaattgcctgacgagtgagcatgacaaggaagactgcatctccgctcgccattcgtttgcgatgaggcgcacttcctgttctatctcgccccacataaacagcgcggctaagaagttggagttgttgcgacaccccaatggattgctacattacgctcgtttctgaccactgcgtctccaacttgaccatcgtccatatcaggtacaagagcaagaagaaggcattcaccaaggccagcaagaagtggaccgatgatctcggcaagaagagcatcgagaatgacttccgcaagatgctgcgctactgcaaggtgatccgtgtgattgcccactcgcaggtaaatatcaatttcaattatgtattccatatttcccgacgtccttggccttgttgcgccactggtgctgggtcctcgggctcggtgcctttggtgcgcctggcctaaaaagcattcgcgctgtggttttcaatgcacggtttagggatgcaacgtcgcagagcaatctgcccctcgggtggcgggacttgatatattccagtaacggtgcggagccgttcaggcgatgatagcgcggttaaaccatatcacgtacagtcccaatttccaataccacaaggtggatgaaactaacctgttgtgtactttttctctatttgcctgtagatccgcttgatcaagcagcgccaaaagaaggcccatgtcatggagatccagctgaacggcggctccatcgaggacaaggtcaagtgggctcgcgagcatttggagaagcccatccaggtcagcaacgtcttcggccaggacgagatgatcgactgcgttggtgtgaccaagggtaagggtttcaagggtgtcacctcgcgttggcacaccaagaagctgccccgcaagacgcacaagggtctgcgcaaggtggcctgtattggtgcctggcatccgtcgcgtgtgtccaccaccgtggcccgtgccggtcagaagggttaccaccaccgtaccgagatcaacaagaagatctaccgcatcggcgctggcatccacaccaaggacggcaaggtaagcaccagtacccattattcccaccattccactttaatcgggctgtagaagaaatctgtttttgtgatgataaaaccttaaaaataatatcgacatcgaaacaaaaaaaacttgatgaaccatgatatttataatgataggactgataacagatcttcagctacataagattaaatcctgaatccccctgccgcaagaccacagtaatctgatccagaatgtatcgctttgcttttgcaggtcatcaagaacaacgcctccaccgagtacgatctgaccgacaagagcatcacgcccatgggtggcttcccccactacggtgaggtcaacaacgacttcgtcatgatcaagggctgctgcatcggctccaagaagcgcatcatcaccctgcgcaagtccctgctgaagcacaccaagcgctctgccctggagcagatcaagctcaagttcatcgacacctcgtccaagatgggtcacggtcgcttccagacccctgccgacaagctggccttcatgggaccgctcaagaaggatcgtctcaaggaggaggctgccgctaccaccgctgctgctgccgccgccaccaccaccagtgcttaaacaaaatgtcgtgtccgcgttcaattgtctgctcgcttctaccaccaactgctgcggtagggcagcgatcaataaacagattttggctaagctgactcattaatcttttcaattgcatctaatgggaaaagaccacgtcacagattttacaatcgattaatgttgattaggaggtggaatcattagtttatttctcatgatagtttaatatatgtacatacccaggctaaattgttatttattatacctccttagagctaaaagtaaaataatattaggacactagtaaatagtttatctacaataaaagagtaccaccaaacttaaacactcgtagaacatttatagcaaaagagattagaaatcgccaattgagttcgatgtgatttgctagaataattgggtgtcctccggatcagcaggttagcatcgtagttcctacggagagcattgctacaatgccactgactcttggcaactgattgtccgtagtctatagttctgcttttatatgacactcgagtatgggtaaactactccatcgtgaccagacattcatgggaatgcagctgtaacaatacttggctacaattcctctccggttacttggtaaaaaccccccacagctatcctataaatagggtactttgggtagctaagcctcagtccaaaaccaacgctgaagatggccattaagtctctgattttgcttacttccctgctgggaataagccttgcagcggactattgtgctctgcccacgtgcctggacaagcacatagcctgcaacaacaagggagtaagtagtgatagctggccaaaacctgttggtgctcacccattctcgcccagaatttcagtgaaaattgtcccaaggacgtgcgtgaggtgaagatcgagccgcaccacaaactcatcctcaatctcttcaacgagttgcgcaacaacgtggctggaggcaaaatagaaggactacccaaggctgttcgcatggccaagatgtcctggtgcgaggagctctcccatctggccttgctgaacgtaaagacctgtgagtccctgccagataaatgtcgcagcaccgagagattcgcc

SEQ ID NO: 9833 - DNA, 1599 bp, DROSOPHILA
agagaacagacatggtgagcatctcgatcggataaaataaattatattactatgtgatgtgtcaaaaagatggatgattgcaagttaaataattgattagtttggaaacagtagcgttataatcactctaaatgtaactaatacaaacaaagcgtaattttaatgcataatttgcacttgcaacatccacgtgttcacctaacctcaaagtgcagaaacgcattgtgctaatggattttctccattcattttgcagtctcatcgtaagttctcggcaccccgccatggctccatggccttctaccccaagaagcgctcagctcgccatcgcggtaaggttaaggccttccccaaggatgacgccagcaagccagtccatctgacctgcttcatcggctacaaggccggcatgacccacattgtgcgcgaggccgatcgtcctggctccaagatcaacaagaaggaggtggtcgaggccgtcaccgttctggagaccccgcccatgattgtggtcggtgctgtcggctacatcgagactcccttcggtctgcgtgccctggtcaacgtttgggcccagcatctctccgaggagtgccgtcgtcgcttctacaagaactggtacaagagcaagaagaaggcattcaccaaggccagcaagaagtggaccgatgatctcggcaagaagagcatcgagaatgacttccgcaagatgctgcgctactgcaaggtgatccgtgtgattgcccactcgcagatccgcttgatcaagcagcgccaaaagaaggcccatgtcatggagatccagctgaacggcggctccatcgaggacaaggtcaagtgggctcgcgagcatttggagaagcccatccaggtcagcaacgtcttcggccaggacgagatgatcgactgcgttggtgtgaccaagggtaagggtttcaagggtgtcacctcgcgttggcacaccaagaagctgccccgcaagacgcacaagggtctgcgcaaggtggcctgtattggtgcctggcatccgtcgcgtgtgtccaccaccgtggcccgtgccggtcagaagggttaccaccaccgtaccgagatcaacaagaagatctaccgcatcggcgctggcatccacaccaaggacggcaaggtcatcaagaacaacgcctccaccgagtacgatctgaccgacaagagcatcacgcccatgggtggcttcccccactacggtgaggtcaacaacgacttcgtcatgatcaagggctgctgcatcggctccaagaagcgcatcatcaccctgcgcaagtccctgctgaagcacaccaagcgctctgccctggagcagatcaagctcaagttcatcgacacctcgtccaagatgggtcacggtcgcttccagacccctgccgacaagctggccttcatgggaccgctcaagaaggatcgtctcaaggaggaggctgccgctaccaccgctgctgctgccgccgccaccaccaccagtgcttaaacaaaatgtcgtgtccgcgttcaattgtctgctcgcttctaccaccaactgctgcggtagggcagcgatcaataaacagattttggctaagctga

SEQ ID NO: 9834 - protein, 403 aa, DROSOPHILA
MAFYPKKRSARHRGKVKAFPKDDASKPVHLTCFIGYKAGMTHIVREADRPGSKINKKEVVEAVTVLETPPMIVVGAVGYIETPFGLRALVNVWAQHLSEECRRRFYKNWYKSKKKAFTKASKKWTDDLGKKSIENDFRKMLRYCKVIRVIAHSQIRLIKQRQKKAHVMEIQLNGGSIEDKVKWAREHLEKPIQVSNVFGQDEMIDCVGVTKGKGFKGVTSRWHTKKLPRKTHKGLRKVACIGAWHPSRVSTTVARAGQKGYHHRTEINKKIYRIGAGIHTKDGKVIKNNASTEYDLTDKSITPMGGFPHYGEVNNDFVMIKGCCIGSKKRIITLRKSLLKHTKRSALEQIKLKFIDTSSKMGHGRFQTPADKLAFMGPLKKDRLKEEAAATTAAAAAATTTSA

SEQ ID NO: 9835 - DNA, 2733 bp, DROSOPHILA
agcagaggcaggatcagcgagaagatcgacgacaagatcagcgagaagatcgacgacaaaatcagcgagaagatcgacgacaagatcagcgagaagagaggcgagaggatcagcgagaagagaggggagaggatcagcgagaagagaggcgagaggatcgtcgtgaagatcgtcgagaagatcgccgtcaggacctaagaattgaccaagaatcccgtcaagatctgctccaagacctgcgtcaagatctgcgccaagatctgcgtcaagaactgcgccaggacctgcgccaagatcagtcccgaaaccaagaatctttgcgagactcgagtcaaatccgggagaatgctcgtcagatctcatctgatcgcgatggcgatgatctgcgcctgcgcaccgtctactccttggctgatctaagctccagcagttacctgaaactcggcgacttggccagtgccgagaaactgctcgaggatcgtttggacaacagtgatctccgtgtgccaataggtgcctactacaccctggtttctcccaacaccaagtacagtgttaccacgcccacggaactgcgaaccctgcgcccagtggcccttagtcgcagtttgttggtaagcaaacgcaattaatggcctgatgatgcggatcgtggtgatggatcaaagccggctaatgatcgtggaacaaagtgaggagtgactatgacgtgtttcctaagaataaatgcaagacagagcaccattgtgccaaaagtaaatttttttccattttttctttggtggcttatactgtgaaaagtgtgaatatctttatcttatctgaaaatttaaatattagaaatgtgattgatggcttaagtgatttctaagccatatacttgtgtctttttcaaggattttctataataatgaatctgagatataatttaaatttccgatttgcatcatttattgctcaacaattaacatattttttgcgaagacgaccaatccaaagattagactactggcaggtagttcctcgatggaacttgggcctgcgtcttggtgtggtagttgtacacgaatcctgtggtggtgggctggtagacatatatcggctgtgaacgaacagcgatgggagttggattcggtatcaccagaactttcttctcggcgagcaacttgttgcgcagcttctcggcttcgaaacgcttgaagaatgcaaccttagcggcggccacctcgggagtgtcccgaacaggctgtggacccacggagtagtctccggccaacctcaatttggcctggttatgggcctccagatgctgtgttcgcagtgcagccacttcaggggtttcctgattggcctgctgattgggcagattggaggttacatggaagccctcggcatcggccacatagtccacggtctgggtttcgccatttgcatcgatgtgggagaaggtaccccggatcacaccatccacggtgcgggtctcgtgcttggaatacagtggtgccatgtaaccataggcgtactggccatgctcatcctggtggtgatactgactgatcgtatccgaagttggtgggggaccgtactccaaggttggtgaaccgacggccaaaccgatggtggtacaaatcaggcaaagattaaggaagtacatcttctcaagcgtggctgtttaagataattgagggttttttttaaatttttttaaggcgctgctagtgtggtgaactagtactcgctctagagaactctgtgctgggatcgattggggattctgccttttataggcggcgcctactgccaaaaatttacaatttcgtgcgttctcaggaaggtcgtccggttgggttttactttcatattccaccaggctggaggattattgttcctttttcctcttcctctgcttcctcgcattttcgtacataaatattttgtcgatttcgatttcaacaagttcagcataaatttgagcacaaaagccgcaatttgttttcatctgcgcaaggggcagcaacacttatgtacatacatgtatgtatgtatcttataggtatcgcactgcatcggatgtggacatgtacagagacaagcaacaacgttccgcaatgccacaaagcaagaacttaatcaggctgctggctgctcttcagtggctccggatgtgcactgagagaaagtggagttgaaaaatgaagaaaaattatgaaatgaagagaggttgtaattttttaattaattaaaaagctaagactttcgttattttcgagctagaaacaacgttatttaaataattagtgtcgaatgataaccaagagttaccatgttttaacagcacttttaaacttttataaaaatgtgtcatacttattggtcatttgtttctctcagtgtgagctgcaaatcatccggataggggtcaaggaaccgggtggggctataggacacgccggctaccaattccagttttagttatttaggttgttgcctttgccgttgtttatgctgctattaaatttaattgaaatcaaaattcggcccacatttatgaagagtttatgctgcacatatgtggaatgtgatcggtgggtcggggggccaaaaggttgaggtaggacagggtccgagtgaacgtgttccgtgagtccaggagttgggcagctaaagggttcagttcagccggatcttgaactttaggtgtcgcgagtttagttatgattatattcaaataaa

SEQ ID NO: 9836 - DNA, 733 bp, DROSOPHILA
actagttcaccacactagcagcgccttaaaaaaatttaaaaaaaaccctcaattatcttaaacagccacgcttgagaagatgtacttccttaatctttgcctgatttgtaccaccatcggtttggccgtcggttcaccaaccttggagtacggtcccccaccaacttcggatacgatcagtcagtatcaccaccaggatgagcatggccagtacgcctatggttacatggcaccactgtattccaagcacgagacccgcaccgtggatggtgtgatccggggtaccttctcccacatcgatgcaaatggcgaaacccagaccgtggactatgtggccgatgccgagggcttccatgtaacctccaatctgcccaatcagcaggccaatcaggaaacccctgaagtggctgcactgcgaacacagcatctggaggcccataaccaggccaaattgaggttggccggagactactccgtgggtccacagcctgttcgggacactcccgaggtggccgccgctaaggttgcattcttcaagcgtttcgaagccgagaagctgcgcaacaagttgctcgccgagaagaaagttctggtgataccgaatccaactcccatcgctgttcgttcacagccgatatatgtctaccagcccaccaccacaggattcgtgtacaactaccacaccaagacgcaggcccaagttccatcgaggaactacctgccagtagtctaa

SEQ ID NO: 9837 - protein, 217 aa, DROSOPHILA
MYFLNLCLICTTIGLAVGSPTLEYGPPPTSDTISQYHHQDEHGQYAYGYMAPLYSKHETRTVDGVIRGTFSHIDANGETQTVDYVADAEGFHVTSNLPNQQANQETPEVAALRTQHLEAHNQAKLRLAGDYSVGPQPVRDTPEVAAAKVAFFKRFEAEKLRNKLLAEKKVLVIPNPTPIAVRSQPIYVYQPTTTGFVYNYHTKTQAQVPSRNYLPVV

SEQ ID NO: 9838 - DNA, 4237 bp, DROSOPHILA
ttattaattttgtttttacctttgacattcgttggcttaaatccaaagcgttttaaccctccgcttttagccaagttgaaggtttcgttgaagattaaaaacaaacttgcttggagtccaaccatttgttattcccttactgcgaacataacaaaaactattcatatttcgatatgatggactaaaatattcagattaaaagcgactaacaatggtgaaatggtcgatactatgccctgatatttaatcagggtctattgtatttttggttctacactgtacttttaatttgcgcaaataattgattattcagcaattttcttaccaatttgaatgtttgaatgttttgaatgttctttgaatgttttacgtaggcctttatgtaaactgcctgcttattcaatgtcatttacaaacagccgcgtttgaagctaaaattacttcgttagtcaatcttctgtttatgtttttttaaagctaagccatattttttaaagtgcttgaattacttctgggtgggggataatcaaaatagatatcgagatcagcttggtaacaacaaatgtttataaataagtcgagctacttccagtttatgttggagtagaatgtacatatatctgccacgtgctcggatcgatttacaaaaaaacgttgaccaatgtgcaaggccaagaaactccaagaatcggccacttgttgctctttttgttctctgctcccccgtctaccacggtttctctcctcttctctctttctcggtattctctctgtacatttcacaagagccgccggagtttaagtcttcaagtggcgctccattcgcttcatgtagcgatgccggccggtacaaaaaataagcataaaatggaataattataaggggaagcagaacaagcaaagagtgtacaccgaaagaaaatgcataaattctgaactttaaagaacccttttttttaatgtcatatatagcacgccaaaaagtatgccacactcgattttatcccggtactttagtcactttaagcatgagttttagtggaacttttattacagtgtaagcagaggcgagttgtagaggaaagtaaaaggtttctgccgacaaaaaagagcacggagcatggggagaaaagggaaagagctctgcagtctggaaatcgtatgacgatgtggaatgttgggacatggaaatggaagtgcagtttactggcattgccagacgctttggctttcggctggcaacaaaattcacataaataaaacttgagccgagtcagtcggagtcggagccttagctaaaatcggagtcggactggaaatcggggtatgcatacgtatgtacacatggctggtggcatgatcgccagaaatgagagagttggagttggagccaccaactataaacaccgcatccccttacactcggagaaatcgaagaagatccgacaaagtcgaaccatgattacgagccttaagtgtttacaactctcaattaaggctgcaaagtatattgtgatttaaattatttttcagtttaaattttgattattctgcactttagttttgaattttatattcatagctttttaatagatatttaaaatacggcaactcttacaaaaatgattagttttgatatgatggaaagcttaatttgtgacgtgatgttaatagttgactaattctaataattcgccggcaatatgtatgaatgtttaagcctttcatgaatcataaaaataaatacaagttgataaaaagagtgactaaaagatttataactacaaatacctctagcatttagaacttctaggaataaaccatttttatgggcttgtaaaaacttacatatgtccaaaggagtgccgatttttcctgacacattcaagaactttaaaggatttccgtttagcaccgaattaatggaactgccaaagtgtcccatcccgattcccatgccagatcctgtaccaggactaatgctgttggctgccgcaggagccagatgcttcagctgatcgagggtgggtcccagagtactggctttcagacgctctagcagcgccgatccgctcagattgtgcattatctcgctggcagtgggcgtggcagcggtcacatgggcggcatttaccgccgccgcattgcagaatttgctgatgctcagtatgcaggtgatgaagagcaggtggaacgatgaggtgaagctgaagctgattagctgctgcactttgctctggtaatgtgtgctggcgctgtagaagaagccactggttttggacggttctctacagccactgctgctgctgctgcttctgctgttggcactttcatttgttgttaactctgactgggtggtggtttgaaaatattccgtgaaatgcggcatgcaggttgtggccatcttttgcagctgctagaatatatatacggtagaaattgcactttaggctcagtgggtcacacacgcttttcactctggttcgatttgccaacttatttatacacgtccattaaataataagtttaggcgaatacacgcaacgtttgccaaaaaaacgttcacaaaagtgagagaatgaatcgactgtatcgggatgagagtgtaaggcataggtacgataaacatgcggaaaaggcgatgaagggaaaaagaaacatacgatgttgcgaaaaaacagcataagagcacagaaaacacgaaatacacacataaaactgcaagctaagggcgacgcctttggtcaaagcgagggttagccccttatgctgtccctctcactcattttaaaacattaaaataattttttatttggatatatctgctatcagcggtataacggttgataagccaggtaagcctggtaagtcatgcgcagccactacccattgacaccattattccagctcggaatgggttctggttgttcaaatcttgtatttactttattgaatggcaaaacacatgttggactaaaatttatgctgttttttcacatgacatattgacgtaacgttcggccaaaatagattcatacatttttttttaattaacacttatttccgctcgacaaatgcgatgagctggccttaaagccccggcttgaacttttttttatttgctttgaacttttgctttccgaaacttttttcgcattccgaaatttctcggtttaacggtgaagttatatccaaagcatggggcgtatgagcgataagcgaccagcgacgacctagcgacacgcactgcgagtacaaactgccggaatatcgcttccgaagtgagcggaccaatggaaccgtcttagaaacttcggcagtgctcgtctttcgttcggcaacgaaccgacgatcgccacgcgtaccatatcacacctgcgaagagaaaagagagtgtcgacgtcatcatcggggggagccccaaagcgttgaaaatcaaaagcctcgatctccaacacaaagagaagacaaagctaccagtgcgcaaataagctgacattgaatcagagctaacaggtggttctctcttcggccgctctcttagaacgtgtatcaatctattttggaggtgtgttccactatttgtcgtttcggcatccaattagtgaggtagcaatttctaaaattacaggtctaaattgtttgttggcccgggtcaatcagtcaaggcttcgattgaaactagtaatgggctttgtagcatagacacacgtaaatcacaattggtcaataaatgttaaaccatttactgtagcggaaattgatctattgacagcacctgtacctctgcatttcaattcataacatggtttccatttgaataacaaagatgcttgagaaacacgatgggcttttagcaagtctggatatcatcaaagtgtaaaatcatcaagctttgatgaattattccccttcggtacatttccaattgagatttcttcaaggaacagaaatatatgtgcatttttaacagctgtgcatctgaagatgaaacgaaatgctacaaattcagcaaaaaattgtaaattggacaatgttggaaataaaaactggaaaaatagctggcaacttaccactcacactttgaaatcaatcaaattaaaatcccatccacaaagtcatgtaattatatcacaggagtacgctacacataagtatgttctgagtttattattcatcatattttctttttagtggggaaacatatacatatgtatgtacacttaacaaatacagt

SEQ ID NO: 9839 - DNA, 775 bp, DROSOPHILA
ctaggtcgtcgctggtcgcttatcgctcatacgccccatgctttggatataacttcaccgttaaaccgagaaatttcggaatgcgaaaaaagtttcggaaagcaaaagttcaaagcaaataaaaaaaagttcaagccggggctttaaggccagctcatcgcatttgtcgagcggaaataagtgttaattaaaaaaaaatatggccacaacctgcatgccgcatttcacggaatattttcaaaccaccacccagtcagagttaacaacaaatgaaagtgccaacagcagaagcagcagcagcagcagtggctgtagagaaccgtccaaaaccagtggcttcttctacagcgccagcacacattaccagagcaaagtgcagcagctaatcagcttcagcttcacctcatcgttccacctgctcttcatcacctgcatactgagcatcagcaaattctgcaatgcggcggcggtaaatgccgcccatgtgaccgctgccacgcccactgccagcgagataatgcacaatctgagcggatcggcgctgctagagcgtctgaaagccagtactctgggacccaccctcgatcagctgaagcatctggctcctgcggcagccaacagcattagtcctggtacaggatctggcatgggaatcgggatgggacactttggcagttccattaattcggtgctaaacggaaatcctttaaagttcttgaatgtgtcaggaaaaatcggcactcctttggacatattgactaaagtaccgggataa

SEQ ID NO: 9840 - protein, 191 aa, DROSOPHILA
MATTCMPHFTEYFQTTTQSELTTNESANSRSSSSSSGCREPSKTSGFFYSASTHYQSKVQQLISFSFTSSFHLLFITCILSISKFCNAAAVNAAHVTAATPTASEIMHNLSGSALLERLKASTLGPTLDQLKHLAPAAANSISPGTGSGMGIGMGHFGSSINSVLNGNPLKFLNVSGKIGTPLDILTKVPG

SEQ ID NO: 9841 - DNA, 27396 bp, DROSOPHILA
aaaaataaaattctacagaaattaaagtttttatatcctctttaggacattgtgaaattataggaaaataaactaattataagaaggtattccatacacgactgtttaagctatttatcgaaggtttttaatttgccagcttgtcccgtttttctcgctgggttttccttatatttttttctgtggattaagtttttgtcccgggtcttagtgatattattttttcatttaccctgtgcagcacacgcacggattagtgtttaaatgaaatcgatttgagagtgtgtgtgtttgctctgcatctgtgtttgaggcgatttttaattaaagtactgcagttaattgcattaatcactgtgtttgccgagagtgttggggcgtgcacgtggtgctgaatgccatcaaatggatctggtccgaaacacttaatgaattattcaactgaattttgctgaaatatttaatgtgcaatcaaaaagcaataaagtttagcagtgcttttgttttggaattcaaatggctgttatttaatattaatgtttaattatgatcctaaatggcttcagttcgcacttaatatttatttcgtaaccgacaacttttaaaatactgcaaaattaaatatataaaataatttataatgttgagtaataatttgggatttaatagattgaaataacaaaaatttagctagttattaattagcaattgcttattattaataatagttattgctaataattaggtacatttaaaaaaaaaatatttttgcctttaaagccaatcttatctaaatttaaattttcttacaattacagttgagtttctgtcgctcagaaaactatttctacaaaactcgaattaggccaaattcaattgacatttattggccaatatatatttataaggaccaaaaggaagcaaagaaagatcgagcaaagagaaataacaaaacggaggacacagcccctacgcaaaaatagtaaaaatatctatttcaatggcgaagacgactattccgggggcaagcacccgtcacatgcaaatggccaatcggtggaggacggaaaaggacgttggatcccatggttcccaaagtgggcgtagctgcatctgctggatatccgtggtactcctactcattctggtgcctggtaagtgaattataaaccgagcgagtccaaatcacagctaagtcaagtgacacaaagtcgttgaaggacgacaaaaactttgatgagatatttcaaaaagttcgtcaaagcctccaaatataaatgacagccgtccgggtgacagacgaaagtcctagatgagtccccgactttggcgataattaatttttaagccgcgcaaaatgaagcgaggacaagtggccgaaaagtgggtggggaaagtgcggcgggcggttggaaaagctggctaaatggagcggcaagcacagaacggaagacgaaatcaatcgttcgtaaaataaacaaatcttatttttccgcaaacattatttctcatcagccgacgcggaggcgaaagcacattcagcaaatggcaataaaaacaacagtgctgcgatgacaacaacatttttcataaatacgcgcattcatctgcatgaaacgatggtcaggaaaagaagaagagcgaccagggaacagtttaataattcgagggtcgaccgtattgttctgaaacaaaaaagggtgcttagctcaaacatataaaaaaaagctttcttttctaaattaaaagcttattttaatatattttaagttttatggtattgtatatcaatgaaaatgaaatacaatataacatactcgagatgagaaaggttattaagcgatcaattgctggatctgccccaatttcagtactcaatggattcaactcattgagcttgtcttctcctcttaaatgccaccattcaaccgcaacaaggccaaaatgatgacgttgcaaaagaaactacgatactaaatatacaaccaatgcttctgaatgccgtttttgctgtctatactcatttttctggccaaaaggcgcgagcaggacattgtgtaaacaagcaaaacaaaaacggcaacttaaggccaacaacaacggtaaaggatatataaataaagatagatgtatatgtatgtatgggggaaggcaagcaattgctgcctagagacggagaatatttcataattttttgcgtgatgaagtcgcatttgttgggattaaatgagattttcttgcaattaccgaatgcgtggttagggcacaagttttatttatttccccctcgtcatcgcttgccaactaaatccccactgtacgagtactcttcgaaattacaatttctgttggttagcagcttagccgaaaaacatttcctggtccgggatattgatttgaaactttttttttcgattgcggcaaagttgccttttcaatttcgccacagctcgatcgatactttctaatttatgctaaacgcacatacaaaaggggctcgtcgaagggaaagtgcttaccgtgaccatcccattgaggggcaaacaataaacaatgcactgcatcgcatgtggggattaagtggaaaactcatcggccccgagccccaaaaatgggaaactattccattcaactttggtcaggcgcttgtgaaagcatgcaacatgttgagggcccttgctagcaatctccttctgaacaaaggccaaaattggctatatccctcaatataggtatgcctggaaaaagtttcttctctgcggccagcttcaatcacaatggaagccagcagcgactgggccggggataccgtttcaattttccagaatgcacaaaagtcagttagcattcttcaccgccatcatcattatcgccgccatcttcatgatcgtataccacacatatcacacatacgccccgtgtgcctgcgttttatcagcccttcgctggcagggattctgtttagcatctcagttcctctcccatttacacatagacaaataggttcttatatatttgcattttaagataatttaattctagcttcaatatatttagaagtatagagaactatagatggaagattcactgtatataaatgggtatcatatatattaatgccttctatagtattcatgatgctgccaaaaatgaaaggtttgttttgttctttaattttggggaaataaacaccatttatttaggaagtattctttcagtgcaccacaaattcatataagcccgcactgaaactccatcatgcactccactttgcatatcacatgaacttgcacttcggctttttgtttttcgtatttcggcaagagagcaggtggatgcaggaattagggatctgcgatgggatggcaggagcacgccatggagcaccaaaggctaaggggctctggtgctgagtcgtctttgtctgccagacatttgccgtttactgttctgacattccaacttggttgcaatgcaggcaggcgactgacgtgccttttgtcagcatacgacaattgcgtgaaatgtgcggttgatgtcggccagtttgtcaggccgtcgagcagcagaaggtaaaaatattttcgtaatctgatggctaatgctgttgaagaaaaatgtatggacactgtatttcttattctgcaattgcgaagaagaaatggaacttccaaatgcataagcgattgaaaatataccagctagtggttaaactaaacataatatgcttaatgttaagctacctcaatcatatacatttaaacgaagcctttccaacttatttccttgaacgcatttaatttgtataaattaatttagcgctttcaacaaaccgagttccatccaaattgtttatcgcaattgaaaattaatatgccagctctgttctgtaatcccataatgtgtatcaacttcaaagtggcctacgcacgtcatagccggctgagctgcacttaaaatgctttattcgaaaaattgcatttaatttgcacaatgcaagtgaaaaaaattgccttaaaatgcaattttaaacgtactatttttactatgtgcatacgatgtgataaaagattatgaaatatcatcaaaacgatgtgaaaaactggcttaacatatcttatatgtacatatgcggttataatatacaaatatcacatataaatgcaacaaatttgcgggcaacaaccattggagccacaacaatggagcgccgaacaagatggtcaatgtacccgtagatttttattctcttcttttgcaggggtatgaaatatgagtcaagttttcaatgcatggcggatgcattcattatgccgttgacgagaaaacccccaaatggtcggaagtgagagaggtggagtgtgggagtgggacgggtgtagtgtgagtgtgtatgccgtgtatgccattatagagtttcttttgggttttttgtgtgcatttatgacaaatgcattgcactcacaaagctcacacacacacgcgcgcgcactgtcgcaatctttatgatctcatgcatatgtatgcgtttataaatgccacgatactgtcggcgaaagagaaagctgtatgtgaaacgggatagcactgttttttatcccaaatggtggtcactttgggcaacaggcactgccaaaaaatagtatatagctgaacaaggtttttccatttatttaaatatttaaaaatataaaaatacggaatatttgtcatatgacaggaatataatcatgaaagaaatgattgcgatttgaaaataacattacactgcgctcggataaacgaacatttcttacattaaggttgattgccaaaaattaaattacctattaagtttaacaaataccaacccgttcaatagactggaaataagaaatgcattgcatacaagaaggccgtggaagtatgggccttgccaaaaagagtgattggaaagagcagaatgaactgggaatgccaaaaaagaaaaaaatctttaaaaaaggtgttgagaacgccaagtcacgagatgtggcagttggctgaaaggcgtttgctaattttctaagacatcaattcgaggggagcgatgaaagtacgtgtgacaatgtctgacccccttttccttgtcacccagccacgcagcgttttttgcgctgattttggcacgcacacattttgcatactgatcagcaatcagtggcaacaattcttccaactttctagagagagcctgaggccaactaggaagtggagaacgcaaattaaaattccactttggcatttggggaattcaattatttttcggtgctcaagggcacggggcaaagtcgctccacccattgggtaacatgcaagttgacagtttgtcttcttgttcgtctcctttctattgaccaccaataaatggggagttgggcgtagtcgcaatggcactcggaatacccggcaaataaataccgaagcatcgcttacacatgcccagatttattgcctcccatccactcactctgatgccaattgtcaggcaatgcaatcagcgtgtttattgatttggaaaattaaatatttttccttgatttcccaatgcggcacaaaatgcgaatgcgaatgcgaatgcaaaagtctaaaagtcgcggccctcccacagatttcaccataaataacgcaatccgatttgccgcttctgatgctgccatgcttattttatgaaatttccggctgcccttagaaaacattttaattagtttaaattccctgacagaaactacaagagatcgtcgctctcggggaatagacgaggtctgttttgcgaggggcttggatatatgctagctagttcaccgcattgttgtcgcttccgtatggcattccgctaaaagcaaaaacatgtcggcacacggcggagtggagacgaaaaaatatggtcggaatttcgcttgcttaacggaaatgtataaattgcattttgcgccatcgcaaaagagccttaatgcgtaaatggcggcaggagttgagtggatggtcgggctgaaactaaagcaggtgcatctggaggaatgttgtgctaaattttaacacacgcactcatactcgaaaataaattgcacagctgcaggatacacgaaatgggcgacaaaagtgtcgctttcggattcgaaacggtaactagatcagagttatccgagttaatggtgtgcagaaaagttccagaactccggataatacgtttatttaacaagaatacattgctaaaaataatgtttgcgagcttactcttgtgcaactaaaatattattggttttaaaacaacgtagagtataaattcttgtctcacgcctcgttgccttaaattcattatgaacataacttgccaactccatgagctttccattttaatatcgggtgtcaggtggttaactccgcacagactcagccaccacatagagaaaaaaggtagaaataaaagacgtgaaaaaagattgaaagtgttaagagcattttagctcttcgtctcgcccggcacacaattcccagacatttttcaccaccaccattctttagcatccttttcggcaaggaaaaagcactttacactaatgcacctggaaatttaaaacatgtcataacataaacatttatcatcgcgacaggaaccggaagttgaatttagcacttaacttgctgataacttttagtgattttattgcaaaagatagaatatttgtgagtgtcttaaatatttttatgatttagttctagatagttttcacattattttagatcgcttatcccaaggcactagacgtatatatgcacaaggttaagtactttgatgtgcaaaaaaatcatttatttgtcctacacaatgaactagagtgttacaaaatgctttccatattgagctaattgatttcgtcagcaaataataaacacttttcccattccacacctacttaattgtgtctcctcacttcatccagcgccaaatacaaacaaagcaaaataagagtccccagaaagcctcataaattccttcaagaatatttcttaacgcctatgagaaaatgtagtctaagtagtccataaaaagctttgtctacggcttctcggctgggaaatgtgtgtgtgtaggcaaatttttaatttatttcattttcacttttaatttaggcactaatctaggcaatttgtactcttacacgccattaaacagtacatgaaacgggaaattagtcgagatcaggcaaccaaggcgataattaaaatacactttccacgttgttttgaaaacaccgttttttgatataaaaagtattattaatatgataatagaatatttaaaaaaaaaaccccgtcgcatgatattggcccgcacaacacaaataatgccaaacatatctggagatgtaatatttttgtcttttatggaatacaaagcaaacaaagttttaatccagctgagtaaccttaggccggtaaaagctttatattctcgagataacaaatatgatacaaacaggcaacgccttgctccatcgccttgctgagatgccggtgccctgtgagccataaaatgcccacggaatatttatttgctttcatttattttcaataatttcgaaatttccattacattagtttcggttgttgttttttcccaacgtccttccctcatgatgttctttatgcttttgcacgaaaacaaacaaattttggggcgatttcgaagggcaccccatcgacaaattcttgctttgattactaaactaaatttcaccccctgaaaaagttgctacaaatataaaataaatgccatcggtctgtggagccgaaaacttttctcatttctactttcgatacagcagccgcggctgttggattctcttcgagccgttttttcctcggggcttgtggatacttttcgatacttttcactgctagccaccacaaatccatgtgacatttggcacttgcccttcgtcctgtcttgccgaacaaatttacacatcttttgagttgttttcgggttcctttcttcggttttttttttttcgctccgcggctgcttctgtggaactttaagttgcttttgtcgtatagcttccgtttcctgttcatttgttcacatttggcatgtcagatgcgaaaatttttttaatataactgtcaacagttgatgtagattaagaaattatggcagttcaaagaaagtttgccctggcaatgttcggatttgtgtgtgggctgggtgaaaaatcaatcagcaacaaagttcttggagcgacgaactaataatgtgagttcactgaaagaaattcttcaaagtattatttgctatacttgtaactataatatccctgatactatttcaattgaatgtgctgaaagataaacaaccattaaatttttgtcagttaattggtcttcttaatgcatgtagcatatttatttatattatacaacaacatcattatatttggtaggtataagagacttatgaagaaaatattttggtaaaggactacaaattccgaatacgataatgtaaggatgtactttactgtatttgtgtcaaatatcttctttcaagctttcaatggcagacattcccacaacgatatcggccatctgcctgaacatcttttttgcggcggccattagggacggaatatggcaaatccataggccacttaatgcattttgatcggaatccgatttggatttccacccagctcaaaggcgaacatctttattgcccctattcagctgccaagactcaggatatgccttgaccagtttcacttcccattccagaaactgttgccagtcgacactgtttcgatttggcattcgactgcaccagagtattgcataactgcattctgaaatgacgatgaatgggccatgggtttggtagaattagcttagccatcgaaatttcccttttctggttatcagagagaagttggacgatgcaggtgaaagatacatatgcctggtggccagtggcatttatttctaattaggcaactttgtaactgctcttaacttgagttgtccaattactcggtaacaggagctaaattggaatgtcacataacttaaatatttaaggccatgaaatattcaatttctctgaaagctattaattaatacgtacattattattaagatgcttttagtgaagctctttgaaattaagttgaaactgaacgagcttgacaatttgacgtatcgaaaaatgtaattttccaccgtaacaattgcactcctattattaataaaccgatatgagaagtatccaacagagttcgtaatgcgaaaataaggactcagttcgagagcgtcaccactttaagatagtagataaatgccaggcgaatcagttaaagcccaggattctgtcccttatcaaaaccaaattacaaatctccgactaggaggcggagggccaaaccccaaaggataatctcgaacaacaatgggatgactgaaagggccaaagtcttttatcaactgaatgtgccataataaatgcgaggaagacaaatgtggagaaaccaaaacgccgtggtctcttcttgttcctcgcgttgactttaagttacacaagacactggaaatctcagtcactcgaaaataatcggggggccagcaaataaaacaaaccggctaaccaactaatcggagaagggaccgacttagcgctgttgttgctcgactattgataagcatcgaattcattaatttatatgttcgatgagtatcaagcgaggaatcgcacaagcagaaaggagttcgcctccttcgtcaggatggctttgtaatgtgaaactaagtgatttgagccggacatgtgtgcgattgtatccctgccccccgtgcgtgtttgtatctaagaacgtgtctgtatatcttcattacaaatcctagctgggtttcgccttgtggatttcaaatgaaatgttctgcctgtcctctaaagctatgagccaaagccccatatagactcgcacagtgggtcaggagctggctcatcaccagccgcggtcaaaataatatatgaatttataaggcattgactactttaatgtaagactgcacgcgagtttcacagaatattttccacttaacgcttagctatagtcaaactattgtgcaggtatatatacgaaccagttttttcataccgctttctactactaaagctaattggcttttaagcccactgtgccatctttgcactgtcttcatggcaagagctgcctttgccagttggctttcctttggggggacttgtagcttgacttaagtagtaatttcaatcaatttggccgagccaccacacagagacacacactcagccacgcaaacaaagacagaaagaaagctcatgccagggactgagaacaataaaatctgaacttaaatatgtcacagcaattaatacaacagcagaccgaaaaccaaacccaagccaaatacagacaccagtccgaaatgccagatacaaacatggaacaataactgggccttgtgtcaaagggcctatgcaaacgaaagtgaaattccacaccaaaaggctctgtggccaaaaagcatttggttatggtgtgcaacgggtcgtatgcgtaatatgggccaggccaattgcttaacatcaataggtggaattctggactattttgcatttgacagctcatttgtgggttgtttctttgaaatttcggacttggtctttttattaatgggaaaattgtcaacttaacatgggggtcaaatgatatatggctaatcgatgatccaagtcaaacaaaaccaaaaacatttacacaattaggaaataaccctggctgctctataaatcaacaaatatttacatatatcacagatggagaaagatagttataaatcaaattgctacaatcaattaaaatactaaaaacaaggacattcaagtttgggtggttactgttgtgcttgttttaacatccattgaaggacgaacatgtttttgcgtcaaaataatatacaaattcatttgtttaaaagcttttttgaattgcctttggacacaacaaaaatataatagacagcaccactcatcttttctcatttaatgttaatagtttcgaaaagttaatttgcttaaatttataaaattaagtttagtgctcttgcacacacattcattttaataatcctccgtcttcggagtcatcactccaagccatctttatcattttccactgccgatgtcaaacaatcaaaccgtcctccagaccaatcaataatcccaaaagctccatttgagtggcataaacaaaatgtacgaaactcgagaccttttggttttcaattccccttcactttccctttccagtggcctgactttcacataaatttccaaagattatagtgcccacagatccgaagaagccagcatgtcaagtagcagcgatgatgcttaggtgctggaaaatggcagacagcaagtaaaactgcacacggaactgggaactgggttctggaaactggtaacttggaacttggcattgaaggggcgtggctgcccggccacattgttttgtaatttattttgtttcagacagtttttccatggcgatatgcagggcgccccggaccgaaatcaacttgctacttatgcgtcgtcatttcataaacaaggcactcgacggcagcaggtttaccggtctggttttccctgagtttttccccactcactgagaaattgcaacattacgtgccccaggagccacgtccacttctcatgcaaagcatgcacaattctccagagctctggactaaagataaattgatattttggggctgactctggtaccccaacattttcctaggtggctcatttttttttctcttttttggttaggcaatacacaaatggtgaaactgtccattaacagaaaagaaataaaagttaaacaagaacaacagggaaacaataaggtggacgggctgcagaaaaaagttgaaatcctttattgtccattgtcggccatggagttctctatcagaatgccttaattaagaacgctcagagtctggccaaagagtcagacttcatttcgatttttaacagcgcagctgttaccgaaaacccaacgattccattcgcctgaaaaactcaacccaaccaaccagccccacttcgtcctgtcagggaaaaaatggaaaccaacaatttgcagtttacatttaacagcagatcgaggggcggtgggggcatgggacacgttattggaaaagcagtgaaaattggtttgtttgacggcccgatgtctggcggaataacatagccccgtacctatacacctatacacatacacactcgaacacacacacagcgaacgtatattttatatcgcatatagttaccgtcattgtcgaaaactctcggatagcagaagaaattacatcgataggggaaaaactttacgatcaagaaaaaataaaaataaaatgtgagagcccaaccaccgatagacagtcaatcaggacccttatattgagttgcattttttgtgtatcttcataaattaaccgtgctaggggatcccaatcatggcgctgccatcgagagtattaacaaaaaatatgacatatttttaatgaatacataacgaatatattaaacaacaaaactacaaacaagttttctgtttaagatttatgaaatggaatgttttcttctccgaaataatatgtagtaggagcgatttactgcatcgattttagttagccaccaagaaattttccattgatacgtttagaatagaatagaagaagtaaaataagttaaggtagaaaatgcatgtacataggagctttagaaaatataagtttctcctttccctacctcgcctaatctcccaaaaaaaaagtgctcatgtacaacatttgctaacatttcgaatcgatgaagcattcatgggaaaccactcgaaatgcaaactccccctgcacatatggaggaaatcgtttttcgcagcaaatatttacaagaaatacgaattttaatttatgcaacaatcgacgagacgaatcgtctaaatggagttcgtcgggggtccaggggatcaaacaaatcgatccatcaactgcagttgcaactggccatgcaagattgctggcgaaaaacaaaaggtatatttgtatctatgcattttgtatgcgggttttcagcaactgttgtccaccaggtagttgacacaccccactcaaactcgccagttatgccccatatattctcgggagcccagcaaaccatttatgtttatatttggcacattgcacacttgtcatccgctgctccgaaattcccacacgcagtccaatgcaaaagggaaaatcaacagccccatttttagatggcaccaatggtgtttgtttacccgtccaaattagaaatgaaacttacaatttaatttagattattattatgttttcaatttaaaaatgatgtttttttgaaaaactataagtagggcaaaaaaaaaataaaacaaatttatgagacagttgatatgtaagttaagaaatcttaattagcttatgcattctgctttacacgtaagttttaacagccattacctgtccgtaaaaatgtattactgatgtccatttaaatattttaaaaaattgtcaatcaatacccatctacatgaccaacatttttcgattcggatcatatatttattaaaaaattgtggtcacttaatattgccaccgctaggtggagcttgtgagcaacgtctgaaacggtcgctttgcttctagcatatctcaagcagctttacacttgcattagctgtatatcttacagtcggacactcgactacagtattctaactggttctatcactaaagaagcgccgttggatgggcaagtgatggggtcagaactcagggctttgttggtttccatgtgcgatgatgcttttggcgccgctttggcggtcgcgtgtaaatacacacacagtcgacactcggggaaaactcgcatgaatgccaaatccagagtgccttttgagtccagatcatccagtgagaaggacacaccccttagaatctcatgtgcaaaaggtctatgctttctttggcctgaataattatttaaaatgtatatattttgaatgtggtttttcatatacatgggaaaataaatcataaaaccaatttagttttggtccagaattataacatctcccttcgtttattgttatattttagaaataatttctagtgcacagctaatatgtattgttgtggaccctagtttagattatcaataataaattactgctgcttattgtaagctaattgaaaatcaagcacgagcaaaatggaagaacacaagtaacccaataaacgtttatgtaattaaattttacttttatattttacttattttattttacttatatatttttaaaccatttttcagccagcttatgctctatttaaattctcctttttatatcttataacaaaatcttgccttaaatacgtaatccggtattttcagaaacaattcgatatattcaatttgaagtgctgcacaatgcataccaaaaaaaataaaaacatgacaaagaacaagtgtcatgctaaaaattgcacagattttcatttaacataattcccgaaacacaaaaaaaaaaagttcgccaaaccagagtggcgaaaaaccaaacaaaacacacacaaaagtgggagtctgtcgccattgtcgcggctccaattcaatacaataataataaaatttgtatgcaaaataggcgttgagtgttgaatgcatgcaaaaagattgcaggacgaaaccactgggcgtattgtggtgccgggtggtgctgggtgttgcaaggttggtgtatcgcatagtggctcgatttacatatacaaatatgcaggagagcggcgatgttgttggctcgcgttgaaaaatcgtaatcaaaaattgcgcaataatttgcatgtttatttaatagccggtcgcatagagcgcccaaatgacctgccgcccggccattttcccctttgaaaatacaggaaaaatgcaggacaaagtgtcctttgcttatacacatacatacacatacgtatgtacatacatatatgagtgccaggcattgcagtgacaaacatttcggtaaatgccacaaactgcgaaactctgcatgtgcttttttctctttaatgccttcggtcaccctcatttctaggcttttaccccctttttggctgccattgagtatctcataatgtgagtaaattttttagcttccacgctaatgaaattgtctgcgggctgagctttgttcgcactcctttgagtttgtttttgtcattgggggcaaaaacgttggccgcaaaattttatgacactctaaaattaaaacaaagcaaaacacaaaccaaacagaaaaccaacaaaagagccgcccaaattagcggacaattttagagatcgaggtttttgtttggggtatttttgaccgaatgttgaatcagaatcgtgaagttgcaaatgagcggaaattaagagcaatcgtatgatacaattttaaagtattaacagtaaataaacttatattttttgaatttttattaaagttaacttgtaataaaactgaaagataggcctgccacgttaggccagaaaataaagcggacgcagacttataccttaaaaaagtgtaccaatatatgacttcacacataaacacatcgcaacgcattggcaatattttgactgtttcgtaatttatttgacatatttatggggttcataaatacagatacatacatatataatgcatttatttctatttgttgatttttttttagtttttatggcaagcaatgaagttgcaagcagggagacccatcaaaaatgtatttatacgttcaagtttggactacttccaaagccagccactatgtaacgcaacaaaaacaaataatttcactattttcgctacagttgttgctctgctcacacaccatactctgcctggtcaaagttgcaatagcaaaacataaaacattttttatgtaatggtttttattttttcccatcccgtccctgcagatcttctcctggcttattttccgttttggctgcttctttctgtgggcagctgcctgaactattgacagctgatgataaaaaattgtttgaaaaataaaccaaaagcctggaaaaatatagagtgggcgaaataggagtggggatgaataggtactggaaatggatttcgagctgggtggaaaaatggccagctagattttggcttaaaagaagaactgaaatgcacagcttttgcgacttgacttggtcatttggttggtagcgaacgagtgatataatgacaagtttttccaatttactttgaacatttaggagcttcaacaagtttgcagttttgtaaatatattataaatttactccttcccattcccctaatgtaatgtagataggatacagcattgttctaaaggccagcttgacgaaaatccctccgaaaagtctgttatttcagacactttttccattagaccaaaccctgcatttaattggcattggcattgtattaaggtgaaaattgtcgcccctcgtcgccatagtcctttagtcaatccattccatttgagtacgtcccaacgcatccattcgcgaattaaacatttttcgcctttacacttttaatttatgtatttactttcctggtttatttgcctttctttatgccagccggcaacttgggaccctctgtgccagccacctgcggcattttcactttccgagcctcttattgaaattccaaagttgaaatgactgcaaagtgagaggacggatggggcaggatgaggactccgggtaatggtcgaggtcctggcagtggctacagtgttgacagccatgtcagttaccatacccatcgccgtcatcggttgccgttttcccgttgtgctcctcttttgccctggtcgagttttgtggtcgcgtttcggtctggagtctgctttgagtctgctatatagcatagatatatatgtagaataatacatttttggggcttcatttaggagtgagaagcacttacaaggcaacttagaggcgaccctttccttgttctgtttgttttgtctggcactttgttttgctgcttaacttttgatcagcttttaatataacttaatgtggccaaattaaatgctttttgtctgtaaagttttattgcaaattatacattgaagtcgcggtcaacgcctcacccgattgcaaaatcaataaaatgcagggtaagccagaacataaatttataaccatgtttgctataagctgctataagccacataaccaaaacaacttattttgagatcctccggggcttagcaatttattttggcaaattaattgtttgttaaatgctgaatccaccaggtggatttattatgtaaatattaatgagcaaaaaaaaaaacaaattaaaaacactctgcttaaaataaagcaaaatatacaagggatttaaataatgaatttgtgaatacatacatattttgtcagaaaaaaacgcaatcaaacaacaacttggtactgtactagtagtagtggctgccagataggagaaaagtgggcattacagatggtttataaaagtcataacaacaatacagccaaataaaagaatacaaaataagacgaagctggcgtcggagtataaaataacacacaatagaacataacaatatgtataataaagcttgtcaaggagcagcttccccactttctagcccaggatatccaactttgtggagtcctgagcaggttggcgtccctccagttaaatggtgaaccattaaaagtggacatttgtaaacataaactgacagataaacaccgagagcagacacaaaactttctccgacccaagggtgcatggaaagaaagtgaatgatacgaagagttgcccatgcaattttcattggtttatattgcacagccacacacatttatcaaggcaaaggtacgaatccgaccaccgcacacatcagaccaggaaaagcagttagaatacttaaaaaacatagattgtgaaagtttttataacaacataaaatggctggaaaagttgttgttcttgctgtggtttcagggggcggtcctcgaggattgggtatctggtggtcactgctaaacaacaatgtgcagctgaaggacaattttgagcgccctgcgataaatgcaggtacatcaagtgcgggtcgcactaccgaggtcagaggtcggagggcacaacaaaatgctcgctcgttatatgggtcaatatgggaaacaaaagcattgttcaccggtggaaacagaaaaacaaactgagggcaacggaacaaaaaacaacatgcactgtgaaaagtttttaattaatgttggagaatttagggaaaatatgtagttgaagtttggatgtgtttaaaactaaaaacaccgactttagcaatagacaaaagctgaaataaaatagctttttaatggatgttaggaaattcttaactgcttttcacttaaaattttacatactcaactaaatggtaaatttatgcttcatttaaattaggaaattttaatcagaatatacacaaaattgtctaaaatagtatgggatatatctcagatgttcttttagagtatatatgtaatatatacttttgtacaggattttttctaccacacccccttggccagtccagccaaatgatagggactataaaacgagaaaaggaagcaaatcgagaagccggtggtcggatggaactgtactttgttttcaacattttgtgttgtcatttgaaacatcgaacggaaggcagcggtcggatcagctggtcactcgcttatcaaagaaggggttagcacagtagttagcatcgaattggaatcccaagacgagggggagtgtttagttcttcactcagaggtttggtttggggacccccgttagatggggtgatgttaatactgggcaaggacgagaaaccaacagttataaacaaattaaaatagagtctttatcattaagagcggtatttcgaagggctcgaagggttcagccaagcgaattaaacttttaatcgtatattttttaaacagtctttctatatatacacgcagccccagattcatgcatatttcacttaccaaactcattttatttgcagattttattgaagcactcaaggatgtgtcggtaatgataccgcaggcggtgaaacgtggcagcaatgcgctattcacttgtaattacgatatggaaaacgatactctatattcggttaaatggtataagggcaagcgtgagttttatcgctatacgcccaaggagaatccggcgatgaaggtctttgccatgacaagtggtctcaatgtcgaggtaagtacagcagtgcccagacactgcctctcgttgataatgtagatgaggatgtggatatggatatggataatttcccttaactccgtgtgtccccataacgcgcacatgttactgcagttgcgtgtaaattatatccataatggctgattgccaggaccccggctgtattcgttctcataacgacatttgccggcttaaatgtcctgtcccactgcccggtgtaattatgccagtccatccggagacggatccgttaagagttgttgggcgtggccaattagtcgcgcttgcgattgacttgcggctcattaaaaaacaatatatagagattgcataccccgtaaaaagaaaaactacaccagagaacacgaaaatacactcggtccacacaaattttaaattaataaaatacagtttcagtttaaaatcattgttagatacataaaatagttaaaattgtatctaaacaaatagctgcttacctccaattcttaccagtttaataagatatcctaacagacccgttggcagggtatgatgacaacccttaattattacggcgaaatacacaagggccaattaggtatcagcagcaacaaattgggttaaacattcgcacgagcctcagccattgatcctttggaagtagcaacgacctttgcccccacttgccacacttaatttcgccttctccattgcatttatgtgacatttattctgaaaataaagcacaacattaaatgcaatttattaaatttgatttttattaagtgaattgtgttatgtgaagtttcaacgtttcctcttcaagagattaaatttcgtcagcttaacaaaaaatatatattctcatttatgattggaaagcttaaaatggccgatgttaaaatgatggttaaacaaaagctgctaagccattataaaaatttactttaaaaggcaattatttataataaacgtgtagaaacaaataactggagtaaagggagttttaagttacgtttatatattattatatttaattttttgtttttatcctatatgtattttctatagctttatgtttaggtattaagtaacaaagcttttaagaactaaataagtttttgcttattatttattaaatgtaaacaacaagtgctttaagtggtcaagaccagagaccttaagatagttgaagtttttccccttgctttcgtcttattaaaagaaaagtatgggaataaggattacactcgtgaatcaaaaaaaatctgccactcatagccccatggcaagttgctttgactcaaagaaaaacttaatcaaatcgagatgaccccttcagctttaaaatcaacccttcacccttcacctttgtgcccccaatttgcagtcactttccagcaagctgctgcgcttttcatcattcaggaccaaggcaaaattttcatatttttcccatagcatttttcactttctgctcgcgctctgtcgcaggttatattcaatttctatgcaccgcgtccagccaattttgggagcaactaatttttattacgttctttatttccccgccgctgattttctccattcgctttatcctttctccagcgcaacctttcgaatcagagccacgtcgtcctgcagtcggtgccgctgaatatttcggggaaatttacatgcgaaatatcggtggaggcgcccacttttcaaacggccatggtgtccggcgaaatggaggtggttggtaagtgaaaaatccaaaaatgtacatacatacatacatacgcatatatatatatccaaatccagatatagcgttaagaattgcaatggactaatggtaatgtaaaggcaaaccggcggtcggggcaagcaaattaattagaacaaatctatttgggcctgccaccggtcaggtccttttcggctaattttacatttccattccttggctaactactaacgactgtttcccctcctttttggccaactttttgcagagctgccggaagagcacactgtggttaccgggatacaggcacgttatcgcatcggcgatttggtcgacggcaattgctcaattaaatactcgaaaccggctgctaatttgacatggactattaatggtattgtggtaagttttggtttcgtttaccactgttatccccatccggacacgcccaccatccgcctattccgcccataccgcatttcaattagccggcaatcggaaaaacggtgaacggaggtctttgatcactttctattgatggtccgccaggttttcaattagtcatcagttcagggagcaaagggtgatactttgtttcgggtgcgaatgcactttgagtgggaaagtgcggctaatgcatgtttattggatgttaggagcttgccttaagcattttcaaaatatatttgaaatgaaggcaccaaaatgtgtgccttaaagtggaaatatagttaattggcttaaccatttagggttctccatttgaatgatgcttacaaaacatataatttttcaccctgtatgaactgtttcgaatcgaagtacattaaagagtgaacttcgtaattacctcctactctaggtgttttaaaacaaaaaatcaggtgagccgtggccattgggtttgcaattttttgcgtttagtgtgtaatttttcattctccgtctgttgcatactttttggcacctgagtgtgcgtcgctttcattttgcaggcccatcttttggcatttatatttgcctagaaccacgctcttttcctgctttttcttttggctcttcggttttatacatacattttttgatatgccgtcagtttttatgccatttcgcttgttccaggctgagctgttctgggcgggattgggctggtcgggatgttttatggccgcaaccacagcagccgactgtcgactccaacagaaggtcaccctgccacattgccacactgcctcctgccagtttgcgcccagctgctgtcatggcccttctctccgcatgattgcgcaggtgtgatgcggagcagcaaggatccctgacatgtcctggcattttgcgttcggtttttcgaagaaacgtttaggttgtcagctagtttttctctgtcgtttttatggcggccccgtacattacggcctctcgcccagacttttggctggtgttattgttattgtttccccaatccagacagacggttacctggtggcagctggagtatagtaaatgcgttgtcaatgtcacggaggcccctactagtcatatttcaaaattgcggcctttgtgtgtgcttctctgggtgagaaatcaagttgtaagattgttggtcagtgcttaactctaaagtaaatgaagtcggctttatgggtctggagctagaaattagagctcaaaggggcccatttaaccagtaattaaagtttgaagtgcttaagataatgttaaggatgtcgttggcgtcgtttgccatataagttttaatagttaagcccttcaaacggaatgttatgaaattagtttacattattagggtagcaatgtaggaatatctgtgtaaaattcaaagaatttctaatgcttatccttttaatattacaaatttgtaacaaataaaaaaccaagttgaactgggcgatattaagaaagtagaaaaaatcgctatttcactaatcatgcaaacgcttaatgctagtgtatgcattttaaacgttagcaatacattgaccaaataaaaatattattaaatggaacttacgtatataaattctgcttaaaaatccgatcaataaatgtatcaccggttttggttttaatccgagctacgaataaataaaattatttttgaaaatgcaaagtttcggacttagtcggcatcaagacaagcaattcagcaaaaaacatatttataaatatacgaaaatagagcagggaaaactaacacaaacagcacttgagtgttgcctatagtgggtggccatgcacagtgggtgcggccacttgatcttttagctaacgagcgcatttcaacaggagcaccactcacccaccgacgaccgcccaccaccccagagccatcatgtgtgctgtcagctgtgggtggtgcgggtgcttttgggtggcttttgggtggtgcgggccagggctcgtatctgccaggcacttcaaactaaactcaccgcaaacaaagtggcctcgtcttctcgacacagctcacccatgtcctttggctcctgttcctcctgcatcccccatccttggcatcatcatagtcatcagcatcagcatcaccatcatctgctctagttaatcactcaagcgtaaatctattcatcattcataagttataaatttgcctcggccgctcctttcgtggtcgcctttatttttcggctaaaagctgacactttggctttgggggagcagttttcgctttcatatcgcatcccacttcattgaaaaaggattgctgaatatttacaaattgatttcgctgcaaaatcgagatgccacttgacattattcgtccttcttcttgtttctcattcattgtaggtgccaccgcatcacataaagacctaccagacggagaagcgggagaacagcaccctggaatcggttacaagtgccatacatttcatggtcaccaatcaacatttcctcaagggccagatgagggtaaggaaacaatccgcaccagttgagactctaataataaagctccgttccattcaccatttcccgttgttagctcaagtgcacggccaatatctttgacatcttcaaggaggaaatggagagtgtcatcgaggaggaccggcccaggataatggcttccggcagatcgtatgacatcaacaattatcccctcgaggagcacacgaatggcgaacgaggcggctttgaggatcacaacgagtcctatttgacgtactactccggtgagtacttacagtttgaataacgaaagaggttatattgccattaaaactcgggctaatgatgagaaaatactggatattttgatatacttgatcttatatcttagaagcaaggttactactcctacacttcagtaaaattggattacaattacgattactgagggccaatcaaataatttatttagatttgagttcttcctaatcggcaatatatttagacaggtatccagttcaataacttaccaaatcaaaaatatccggctgcacgttcgatacgtttaagtgaaggagaagcaaagccccgggcaaacaaaagaagatggactgaatcccacttagttcggcccactgcatcctgtcgatgtcgggcacacaatgtaaattatgtaaataaaattgtgcagcataaacattcctccagactgctaacaaccaggagcaaggagcaggcttatcgaatcagatggcggggaatcaaattgctataaactaagtttagacatgaaagattgtcgcggaattgcggcagactgtgtgggacggaagcgtgattggggcctctggcgaaaatggggggtcctttctatatcctttcatttttctttcgcctcgcgctccttttgcggttcttttgccacttactagcgacaacatttacttaacaccaagtaacgacaacaccagaaataacaagtgtgtaaacgcattgagctgaaaattgtatttaaaattgagttcactggcttaccgatgaaagcagctgggaaatggaaacggcggaattccagtgaaatatcaacgtatgcgacaatattttggccatagcgcccaagggaagccctcaaaacggaagtttgcaagccaccctcgttattaagcaaaaggaatggggagattgcatgttccgattccttgcttgcattccgctctgaactttatgcaaatgcactgttgacacacccactcgcacagaagaacttgtctggttgaatatcttttggtaggaaactgcattttctaccttatttcccccagccaaaattggttacaagagaaaccttattttggaatgcacatgatgaaaacttagctaaattcttacaatttttactaagccttatacgtaaaaggtataaagggggtcaataggtaaatgtacgattattggcttataaattattaaagaagcctgacagacattgacttttccaaaaatcgaacaggacattgcgttgtttagttttcacaaaggcatcaaagggggaaaatttgaagcccctttaatggcaatgtcccttctttttacctccacccaatgctcacctgtgcatctctctatttccagcggataacacggcatcgggcgcctcgacagctgcacacgaaatcttctggcagttctggccatcgcagctcacaaagctccccatcaacaggcagttggcgggggcgtggcactggctatgtgggggcggtggagcggctgctcttctcctttttttcctgctgcagcaagggccgctgggccatcaaattatcaactgtcaatacactaagccggcgactggcaaggtgcaacagcaacaacgcaacagcggcagcagcagcaacatcgaggtgacagcttcaaaagcggcaacatctagcgcatctagcgtcaaatgcttttataattgtcaaatggctatggcgatgccaactcgaagtcgtgatgatgatgatgacggtggtgatgcgtatattggcagcacgagtgcaaatgcaacggcaacagcgacagcaactgccgatgctgatgctgcagatgttgctgctgcaggaggagttgcgagttgcagcattaagcggctgtcagcgacacttgtggggggcgtcaatgctgtaaggggcgtggccagtgggccggatcaacgattattgatgactcggcggcgagaaaggcggcaaaagaaatcgcaggcgatggatgcgatgatgcagtcgcgttggagcgcgtgctgatgccgaattgatgatgaaatccattttcgaaagtagcttaaggtgctcgccaccgtgcaaaatagccagtatatggctcttttcctttcgcacccgaattgttgaagggcataattaatatacattcgtactcatactgattgcatcagccagctgcataaatcgatctggtcgtagctcttaagtgttgaacgcataaggtcagggaaagtgcagtatatatttaattattggcagagcaaagtcagcaagtagatattaaaccgatgaataataacaggaaatgaattaatcttaggtaaaatacaacatacggtgaaaccattaaataaaaagataccctgtacgccgctatctctcaaatctgttttcggcctactcacattttcgcaacagaattaaacggaaatatattgtgctgtaaaacagatcaccaatcaatcacattacttccattaactatgtgaaactgttctgttcactgttaaaattaaatatctatttgtcatatttattattttgtaaaaatagtaacacattttattttcagctagacacacttttcagacaataatatcaactcaataagcatatatgaatgctacagcaaggtattttcactttttattcccgatactttcgaacagatctttactgtaaaaaataaaagatcacaataagccacgacaaatggctctcagtgaagagaacattaagagatgcggaaagtcaaaccaaaaatgcacagttgcctgggcactgggcacgtacagggtgagaaaatgcgtgtgctcagtcactgaaaatcaaaatgtacttagaataaatactatgtacttcaaactcttatgttatatatcaagcgttaaatatattcaaataaaaaatcaaaaagttataggaattgtgcacagtgtacagcaagctgaactttagactgcacttgagcttagctttcgggtaccgtagtgcattttaaagtggggttttgacagcttca

SEQ ID NO: 9842 - DNA, 1632 bp, DROSOPHILA
atggcgaagacgactattccgggggcaagcacccgtcacatgcaaatggccaatcggtggaggacggaaaaggacgttggatcccatggttcccaaagtgggcgtagctgcatctgctggatatccgtggtactcctactcattctggtgcctctcattttatttgcagattttattgaagcactcaaggatgtgtcggtaatgataccgcaggcggtgaaacgtggcagcaatgcgctattcacttgtaattacgatatggaaaacgatactctatattcggttaaatggtataagggcaagcgtgagttttatcgctatacgcccaaggagaatccggcgatgaaggtctttgccatgacaagtggtctcaatgtcgaggtaagtacagcacgcaacctttcgaatcagagccacgtcgtcctgcagtcggtgccgctgaatatttcggggaaatttacatgcgaaatatcggtggaggcgcccacttttcaaacggccatggtgtccggcgaaatggaggtggttgagctgccggaagagcacactgtggttaccgggatacaggcacgttatcgcatcggcgatttggtcgacggcaattgctcaattaaatactcgaaaccggctgctaatttgacatggactattaatggtattgtggtgccaccgcatcacataaagacctaccagacggagaagcgggagaacagcaccctggaatcggttacaagtgccatacatttcatggtcaccaatcaacatttcctcaagggccagatgaggctcaagtgcacggccaatatctttgacatcttcaaggaggaaatggagagtgtcatcgaggaggaccggcccaggataatggcttccggcagatcgtatgacatcaacaattatcccctcgaggagcacacgaatggcgaacgaggcggctttgaggatcacaacgagtcctatttgacgtactactccgcggataacacggcatcgggcgcctcgacagctgcacacgaaatcttctggcagttctggccatcgcagctcacaaagctccccatcaacaggcagttggcgggggcgtggcactggctatgtgggggcggtggagcggctgctcttctcctttttttcctgctgcagcaagggccgctgggccatcaaattatcaactgtcaatacactaagccggcgactggcaaggtgcaacagcaacaacgcaacagcggcagcagcagcaacatcgaggtgacagcttcaaaagcggcaacatctagcgcatctagcgtcaaatgcttttataattgtcaaatggctatggcgatgccaactcgaagtcgtgatgatgatgatgacggtggtgatgcgtatattggcagcacgagtgcaaatgcaacggcaacagcgacagcaactgccgatgctgatgctgcagatgttgctgctgcaggaggagttgcgagttgcagcattaagcggctgtcagcgacacttgtggggggcgtcaatgctgtaaggggcgtggccagtgggccggatcaacgattattgatgactcggcggcgagaaaggcggcaaaagaaatcgcaggcgatggatgcgatgatgcagtcgcgttggagcgcgtgctga

SEQ ID NO: 9843 - protein, 528 aa, DROSOPHILA
MANRWRTEKDVGSHGSQSGRSCICWISVVLLLILVPLILFADFIEALKDVSVMIPQAVKRGSNALFTCNYDMENDTLYSVKWYKGKREFYRYTPKENPAMKVFAMTSGLNVEVSTARNLSNQSHVVLQSVPLNISGKFTCEISVEAPTFQTAMVSGEMEVVELPEEHTVVTGIQARYRIGDLVDGNCSIKYSKPAANLTWTINGIVVPPHHIKTYQTEKRENSTLESVTSAIHFMVTNQHFLKGQMRLKCTANIFDIFKEEMESVIEEDRPRIMASGRSYDINNYPLEEHTNGERGGFEDHNESYLTYYSADNTASGASTAAHEIFWQFWPSQLTKLPINRQLAGAWHWLCGGGGAAALLLFFLLQQGPLGHQIINCQYTKPATGKVQQQQRNSGSSSNIEVTASKAATSSASSVKCFYNCQMAMAMPTRSRDDDDDGGDAYIGSTSANATATATATADADAADVAAAGGVASCSIKRLSATLVGGVNAVRGVASGPDQRLLMTRRRERRQKKSQAMDAMMQSRWSAC

SEQ ID NO: 9844 - DNA, 6907 bp, DROSOPHILA
catcgcttctaaataaataaatataaaaaaaaaaaaaaaaatttcaatgtaaatacatttatcatttacctgtttgtttttacttagtacaaacctagataaaaaaataagcggatgcaaatatccaatcaatcatacagacagttattagggtccttgttcaatttgcaaatggaattatgatatggtctttctgacagttttgactttatgatttattaaaatgctcgcccatttaatagttgcattccgcattatttctatgtttttataattaggctcaattaatgtttaattcaattaaatgggaataatttaagtaagctgtagtatggatctttcaagagtttaaaggcctaaacgaatgtttaatatatttgttacatttatataccctttaacattaagttaagcaagagtaaactgaccgaaagtatctacttgatgagtgcacttgaaaaactatttattacttaaacttgtttctcgttttccctttctgcacaaaagtattaaaatatgtaagggtggtacttaatactttctgctttccctcgtcaaaataacgaactcttcatttatcaaattactactcgtcaaactttataagggatttaattagatggcttgcagttcggtattaactgagaaattttatataattttgtctaattttactacttactctttgtcacagtagaaaggattgattaaacctttgacgtttcccaattaaaccatttaatgaacaaataaatatcgaaaggatttattacaacgagaattcgatagagaaaccatatgcacacgaaacatgttttcattaattactgtaattattatggacgtaaggaattagttgccgaaatatgaaaccctgatgtatgccattaaatatttaactcgttatccactcgtaccgtatgaagtgcatccataaagctgaattacacgtttaattacacgcacattaagctgaatgcatttttctgtttcccatcccgcagagaaacttaaaatgctggacatcactcgcgacaagccggtgaaggtggccgtcaaagtggccgttcctgtgcgggatcacccaaaggtatgtaggcggatatggagttggagggggggggggggggtgggttcggtttcggttctggaaacccgttaacggagggtaaacattttcattgcatttccctttgtgccgccgcaacagttcaatttcgtgggcaagctgctcggacccaagggcaactcgatgaagcgcctgcaggaggacaccatgtgcaagatggccgttctgggacgcggatcgatgcgagaccggcggaaggaggaggagctgcggggcagtggcgacagtcgctacgcccatctcttcgaggacctgcacgtcgagatctcgaccttcgccgctccggcggaggcccatgctcggatagcctacgctctggcggaagtgcgccgctttctggttccggtgagtcgagtcaatgaggcatcttttttggggcagctccctcggcattgtttgtgtttaatacccattaatgatttaagtttcgtccgcgccatgggcaggcaaatgagcatcttaaagttggcccgaacaagggtcttaaagttatggccgcatggagtgcacttggacaaaaagtgtacttcaatttggaaaggcatttggaacatttaaaggcagtcaaccgaatcgcggtagacatttcattctgtgaggcggttaaattacattattaatagactaggcagttcctgctgaaaaccaattcataatacgtaagctttagggccaaaggctggtgtcacttttagattttagcgaaatgtttatatctaattaagtgaaatttgtttaatatttcaagagtttacatctcttctgattaaaacccgcttatccagcgcatttgtatggcgtgtgttcgctgctctccaattttccagaatgtcatgttttggggccaatttcgttttaactttagaaaactgcgctgttttgatgaaagtttccgaactcgctgacgactttaattaaagtcaaatttgcgaaagtcatggcaaatagttttggaagtgtagttcaagaggactggagccggagctctgctcctcgaactgctccaactgtgctcgttatcgacttcggcttccgtgttgcttgtgttcgcgtggcatgcagcgggtttcctgctcctgctccccgtgctcgctgactaaattgcattgtgctgtaattacatttgccaccccacggcactcgaatcgccacccatcccacttggccccactccttttggccgcgaaccgggggaacttggcttgcatcttccttttggccattgtgctgtgctcgacacgccatcgccattgccacatcgccatcgccatggccaacgccattgccatcttccgcagccaaggagtgtgtgtgtgggcgcaatggggccattcctcggcccgcctccacgagagacaccaacgttaagcgtatactatctgcagcctgcagacagggacgcaggcagattgtgagaagtcctggaggcagcacgtcctgggcatcatcctcacttgcccggcgccggcatactttatttatacatctccgttaagttgcagccagaaatgtggggagtggacatggagcaatttaaacggcatgccggggccatctatccggggtagccagccatacagatagaatgtgtacggagcagttgctggatccgagagaattacaaatgagcgccatatatccagcttattgcaaattataccccggtaccagatccgggctttgatctataattttccacaaaattcaattctcacctaccccgtaaccgtcggtgctccgaagtcttcccacattatgaccaacttaagctggagaggatgcgcttgggttcgggtaatccaatatattgacatcctggccgacctttgactggcagatgctggcaacattgaaactccctcctggccgctggttcagtcttttccccctgagttattccgatctgattacacatgagaaaaatttgcatagaaattatttgatatccccaacacgaggcaaagacaaaggcgatgaaagaagaaactgtttcaatttagataaattgctggggttacctggagtgcgtatgtgggttttttcctcattcctttgcccgggagtctctgtgaatctcatctgcgacatatttaagcctcacccacctggcgggaaattgtttatggcatctgcaatctcgatttatgttcgccagcgagtggcataaaaaggagcacttgtgtgactgtagtagaggtagtaaaaatgtaggaaaccggagtgtcgctcacatatgttttgtaaattcagagatatattcataaacgagttagttggttaatggggttgatgaaatgtgtatccaccgggctggagtttcctgcgtgcgtgtattcatcgcatccaggcccatttgtcgcacagaacccacaaacactcccattccaactcccactctctttctcctacacccacatccacgcccactccattgccacccacataattgcattaagcactcacagatactcagatacacatccatgtgtatgtgcgaccgatacatatatgagtatcctggggcaagaatggattctgctcaaagggtgctccgccggcgacacatgaaacgtggctgcgcacaaacttttaattgacatccaataaaattcgcatttattgcgagcgacggccgccagggaaacgtgaattaaatttaattgctcgactgaggtgttccggtggttccactactaatcccgccagtgatggacagtatcttggactcgcagaactgcattacgtggcaaggtgctgccacaaactgagagtatatatatattcccggcgagataaaacgataaagttggtactttaacacgaaaaccactctgaatgtaataccactagcttgaagtactccacattgttgttgaaaacactattatgatacatattattctgcaccatgccttctgtgtatatctagtacacacaatgtgttgccattcccatcactgaatcactcatctcttgcccgcaggactaccacgatgacatccgccaggagcaaatgtgggaaatgcaggcgctgacgtccacgcccgcactgggtgcccactcgctggaggattcgcatagccctaccatcaacagcagtagccaggtgggcggcaccaccaactcctcctccaacggggccagtgggcgtggcctgggcggcggactagccgacatggacacgtccaacgatgacaaatcggacgacgccagcggcatggagtgcctgtcggcagtcgacaagcttgactgctcgtccagctgcgccagtctgggcatcagtggcatcaccaccatcagcaccaccagccccgagcatccgcatccgcaccagcaccaccagcagcaccaacagcaccaacagcaccacgcccacctgcacccagcacacgcccatggaaaccagcagcagcagcagcaggtccagcaccaccacagccaccaggcgcacttccaccagctcctgcagcaggctcacggtggagccagtgccgcagcggctgcctgcggggagcatctctctggacagacgactccggcgacggcggcggcatgtaagtgtactccggccgcagtggctttgccaaagcccgcctgggctcgactattaattggaatttacggctaccattgatgcagaccatgaataggccaatgaacataatccagcttcagtcggaagtcaagttaatttcaagcttaggcacactttcacaggatacatatgatttcgtgaggacttaacattatatgccgaatatttgcttaatatatacattatatgagaactgtatggttaaaacagcaatagcttccaaatgaagctttaaaatttcaaactgaatttctgcttaaaatagcatatatctaagaaaaacttcggcaaatgctacagggataattattctgatagtgcattgaatgcttcggttatcaaagtccttcttttccccaagccatttgcaaagcaatattccagctgccactcattccgttctcttcctttgtacgccttaaatctcctgcagtgcacaccacagccatggcagtggcactccagcatcagctcacagccgcaggaatcggaggactcctgaagccggccaccggagtgggggccaccatggccgggctgcccaccacccaggcgggagccgccgcccttcagttgcccggcgatggggagtcatctggatcgacgctcacgctgctggagccaccgggcaccgcactcctgcatcccgctctgcgcaacgtcaagaccatcaacataggtaaggcctggtatccacagccagtttcagttgctacactgataaaaaaaagtgcggcctacttctaaaagacagatacaatgttttgtatttgatggtagtaaaagtataaccgacttcatcttcgtataattttctttctgtacgccaggtggcggcctgggaaggaagcgtcccctgctgggtgttccccgctccggaatgaaccccacaaagcgcacggtgatgagcctgctggccagggccaagaactcgcaggcgctgcactcggtccgccaaccgatggtgacggccaccagtttcgctgagtgagttgcccgcacgaaaacgagccaccacgtactccgattcaatggattaatcaagggggaagcgggaaacttaatgatttcgttttttagacccttgcagatgctggcctcgccgttcatcattccgcaccgggcggtggaccagccgatcctggcgctgtcgaaggagagcctcgcgcagggcgtctaacccagtgagctgctccacctgcggctgcccagatagaccaatctgaccgaataccacctgccccgcctcacgcttgggaggatcagcgagagtctcgaggagattagcgaatatttctaggcgatgtttgcgtagttgatgcgtacttgtacttgtactctccccgtagtaaggctataccgatctttagggactaactgtgaacttatccgagcgaatctcgagctcgtgctacacgattttattttttacagagaataaacggagcgtctatttgcaatgcgatgttttatttccacagatgcaagcctaggcaaaccaaatcgaaatgttcgatcgaatggaacagagttaaaacccttaacaaaattgaaacctaaacttagtgtcaaattaaaacgagagcaacttcaatagaataaatgtaaacgtaattactttaaaaaaattactttaaataaatatacacacaatacgaatacgaatgcgtatgcgaatgcgaatgcgaatgcagataccgaacacgagtaccacaaaagatatatatatacaatacatacgaacacgtatacaagcaaatatacaaatatataaatatgtgtgtacttaaatctacataaacttaagattaaaccaaacgaaactactaaattaatgagataatacaataattttaacgtattttaacagccacaaaacgaagacaaagtcgtaccgcatagaagggaaaagaaagaaagtagaagttgaggtagaacccccgatcagagagatcccaccgccttcagcttgcgttgcctgattgattccaatttgagtcccctcggatccaaagccacagctgatagatatgatagttcggtttcagtttcagaacagaaagtttcagaacatcgaaagcagcgatcgcctacagagttatattttttcgttcagattacgtacatacatatatatactatccacatagtatatatgtacatgcatccgaggataagtg

SEQ ID NO: 9845 - DNA, 1431 bp, DROSOPHILA
cccgcagagaaacttaaaatgctggacatcactcgcgacaagccggtgaaggtggccgtcaaagtggccgttcctgtgcgggatcacccaaagttcaatttcgtgggcaagctgctcggacccaagggcaactcgatgaagcgcctgcaggaggacaccatgtgcaagatggccgttctgggacgcggatcgatgcgagaccggcggaaggaggaggagctgcggggcagtggcgacagtcgctacgcccatctcttcgaggacctgcacgtcgagatctcgaccttcgccgctccggcggaggcccatgctcggatagcctacgctctggcggaagtgcgccgctttctggttccggactaccacgatgacatccgccaggagcaaatgtgggaaatgcaggcgctgacgtccacgcccgcactgggtgcccactcgctggaggattcgcatagccctaccatcaacagcagtagccaggtgggcggcaccaccaactcctcctccaacggggccagtgggcgtggcctgggcggcggactagccgacatggacacgtccaacgatgacaaatcggacgacgccagcggcatggagtgcctgtcggcagtcgacaagcttgactgctcgtccagctgcgccagtctgggcatcagtggcatcaccaccatcagcaccaccagccccgagcatccgcatccgcaccagcaccaccagcagcaccaacagcaccaacagcaccacgcccacctgcacccagcacacgcccatggaaaccagcagcagcagcagcaggtccagcaccaccacagccaccaggcgcacttccaccagctcctgcagcaggctcacggtggagccagtgccgcagcggctgcctgcggggagcatctctctggacagacgactccggcgacggcggcggcattgcacaccacagccatggcagtggcactccagcatcagctcacagccgcaggaatcggaggactcctgaagccggccaccggagtgggggccaccatggccgggctgcccaccacccaggcgggagccgccgcccttcagttgcccggcgatggggagtcatctggatcgacgctcacgctgctggagccaccgggcaccgcactcctgcatcccgctctgcgcaacgtcaagaccatcaacataggtggcggcctgggaaggaagcgtcccctgctgggtgttccccgctccggaatgaaccccacaaagcgcacggtgatgagcctgctggccagggccaagaactcgcaggcgctgcactcggtccgccaaccgatggtgacggccaccagtttcgctgaacccttgcagatgctggcctcgccgttcatcattccgcaccgggcggtggaccagccgatcctggcgctgtcgaaggagagcctcgcgcagggcgtctaa

SEQ ID NO: 9846 - protein, 470 aa, DROSOPHILA
MLDITRDKPVKVAVKVAVPVRDHPKFNFVGKLLGPKGNSMKRLQEDTMCKMAVLGRGSMRDRRKEEELRGSGDSRYAHLFEDLHVEISTFAAPAEAHARIAYALAEVRRFLVPDYHDDIRQEQMWEMQALTSTPALGAHSLEDSHSPTINSSSQVGGTTNSSSNGASGRGLGGGLADMDTSNDDKSDDASGMECLSAVDKLDCSSSCASLGISGITTISTTSPEHPHPHQHHQQHQQHQQHHAHLHPAHAHGNQQQQQQVQHHHSHQAHFHQLLQQAHGGASAAAAACGEHLSGQTTPATAAALHTTAMAVALQHQLTAAGIGGLLKPATGVGATMAGLPTTQAGAAALQLPGDGESSGSTLTLLEPPGTALLHPALRNVKTINIGGGLGRKRPLLGVPRSGMNPTKRTVMSLLARAKNSQALHSVRQPMVTATSFAEPLQMLASPFIIPHRAVDQPILALSKESLAQGV

SEQ ID NO: 9847 - DNA, 6659 bp, DROSOPHILA
gcagttgcagccggagatggagatggagctaaatctgaagctggaacacgccgacagtagcagacattggagccacagcctggataccgaggaggatcagggggaatcaatggggcaagggagcgatgcaggggcggctaacacgagcttgatgactattatgtgggcagaggtcggcggggtcggtgcgccgtgaacttctcatgaaaagcctaaccatggggaatttaatagtgcttagcaccagcagaagacacccgagaacgagaccagaaccgccagcaataaagacagggtcggaagcccggagactctgaactacagaccgaagagaaccaagaccgagccacagatacagatacaaatgctgattggtggtagccttcatttggcagtcaattacgggcagccggagtagtagtagaggaatcatgctggtagcacctggcaatatgaatatgcttgagccactccactgatcagtcaaagtcagaattaaagttggggaagctcacgatgtgcctttaacatcttaaaagctagcatttgtttaggttcggtcttagaatattttatttgagcgaatcacgtttgatgacaacaattaacaaagaaaaagtcaaagaaagcatgcttttagtagagaaatttccataatttgaactttgtggtttatacggacagagtaagagttttagcttctctattgacttatgacttatgatcgttatcaataatataatataatatatatataggtaatacaaacaattaatagtatattaaactcaaataattcaaaccgtataatctagatgtactatgtatataattaaactttagacaactttgctcatttttgcatacatacatatagaaaaggttcacaacagactaagtcactaatcggtgttctaagcgattgcgcaatagacaaaaacagagagctaatactaatgataatgatgccccatggagacgcaatccgtacgtggaaagactagacaacgagaaatcggtgacaaaagtacaaaaagctgagtattaagttgggttcaagagacatgtagcccgagttggcgatgtgcttatgctgcacatattggcgatcctcccgttccggatagataaccttgtgctcctgcagatactggatgacagccatgcgatcaagtatcgtcatattttccacttccggtcgctttggatcgacgaaactgtagccctcgccgccattcaatagaaatgatgttactaccacaccgtaatacccattcgtatcaacggcctcgtagtggggaatctggcaatcggagcacagggcacggatttccgtgatcctttcgcccttgggcaaactgtggttgaacttgagccgaagacccgaaacctgtaaatgggcactggtcatgtgtttgctacgcatttgggctgaatgctccagcgccttcatcagttgactaccactgatcctggtgtaatagagatcttggctgaagggtagcactgtgaccacatcagcctccgtaatggcgcccgtctccccagggtcaatcgaggctctaatagctagttatttccaattacaatggttgtactatggaagctagatccaatcacttaccgcccgcattgatgagtccaatggaagcatctgtccaagaacttctatccgccatcgtttgcactactctcgcatacacaaagctatcggctatgaagtttccaaaattgcactcactataaccacaactcttccgatcgccattcaaataaacggatgtggtgcccaccacatggcgctccatatcatcgatcacctggcggtacagttgaagaaaatcttgaacatcttttcggggatgaaaacgattattcaataaaatggggctacccttgaaactaagcagatttccaccattgtcgaactgtaaaatggaaacttatacgatttatatgatacatttgaggttttatatcctacttctagggaaagatttcccaaatatttcgtataagcataggcctgaacaacgggcactttcctgccatcgggctttaccactattgtgggatagggaccttccgaaacttccttactcggtgcctttcccgaatagagaaacgtgtgcgactgaccaccgacgacgatatccacgtccggacaccgcttggctatttccatatctttctcgtagccagaatgtcccaaagcaatgatgatatcgatgccttgacccttaagtttctttgtttccttactgcaataaaatgttaaaatgaagtatttagcacatgcagtaaacgctatctagtttacttgatggcgggcacctcccgtttaaatatcacattacttggttgggttcgctccttggtatccggtcttatgtagcccactatgccgatcttacgattaccctttgtgataaccaaggaagtcactagattagcgttttccgcaagtttaggttcatttatcaggtttatattgctgctgaccattggaaaagtaatggtatttagaaattcggccaaggcatctgttccatcgtcaagttcgtgaactccaagggcctgcaaagggatcattgcaaattgattttataaacaattgggcaatcagtaccatggcgtcgggagccagaaaatttagcattcgggccaccatttttcctcgataaaccgaaaaccaggaagtaccttgaaaggaatcgccaccgtttaagtaaataaccggatcagttgcagtatttcttgctgctgaaactctgaaataaatattttcacctagtaagcattaggattactcccaagtcaggaatacttacgcttccgccactcgtccaaatcccccgaagcaaatacccattgcatcgtcgacagtcttgcaccttccacctgtgtcggaaatggggtcgaacctggagtgcatgtcattcgtgtgtaagagggtgaatttgaaaccactgatccagtccaggaagaacaggatcagcgagagaaaaaaccaccattgtggagtaagtgaatgcatcgttactagaaactacaaataaataaagaaaagtgaccgaaaagcacttgaaaactgtgatctgccatttttgaatgcctacttttaggatgtacgattgggcttgtatccattagccaaacgtaataaaaacttgtatcagttttttagggaatgttagttgtatattgaatttgttgaaaaaatgaatatttgcgcattatttaagtataatcagttttgtgacaacggcatggtaatactgataaatgattgcacaatttaaattttctagctatcttgctcataaaattcatcccgaagttaatttaaattttttatttgttaagcgcaagatttgcgcacaaaatttgaatttaaactaaagcgcgccagctactagtcgaaattggtcacactaataacgatgtaatgtaatatgtaacttttcattttatactggtaacgagccgcttagaacatattattaaaaatatagtatcttgctaaaagttcataccgaaatgaggtaaacattataacgaacatagattttattctattaacaacacttcttttggacatacaaatgttgaaatcataaaatgaaaaccaaaaacctatttacatacgatttttattattgtagttttgtgtctacttaagtcagcctaaaactatgcaatggcaaacacaattgatgaagaagttctttttctagattcaaaattatcgcattatcgacgcatcaactttgaagctcattttaagcatacactcgcgattatttgtttattttaagcaataatttttatcagaagggaagagataagaagcagggctgccgagcccataagtgtactggatgcattaatgaaaataatacgaccctcgatctcgggatagacatagtcacgctggttcagatattgggataccgcctcgagatcgttattttgcaggcgctgtggttggtgggctgagtccctcattacatgtccatcgccaccatctagcaggaactctcccaggacgacattgtagatggcagtatcattcagatcactataggtgggcactcggcaggcggcacatcgaacctgcacggaaaccactcgctgaccctcgggcttgttcgaattgaaaaccacacggattccggacacctgcaggaagccaccgtccgaatctttgcctctcagggcagctccatgctctaaggctcgacgaatagtgctacccgtcatgggcaccatatagagcttattaccccagggcagaacggaaaggatatcgttgtcggtgatggcgccatccgatcgcttttcaatggagctgcgaatgcctaatggacagaagtgtttcttattttccactaacaaacggagcatgtgcgtccaacttacctccgccctgcattatagaaatggcagcatctgtccagaaatcaccgccctgctcctccatcaggcgactaaacaccattgcatcggctatcagattgcccaggttgcactcctcggcccggcaaaccgccttgttgccctccagatgaaccttggtgtgcccgacgaccgacttctccagcctggtgacattcggacgaaagacctccaatagatcgagaaggtcctgctcctgagccactgaagcattgagcaggatgggagatccatcccactggatgaggttgccatcggcatcaaactggatatacaagtaacgtagttgattaatgaccagcttattcctttcataaagcttttacttaagtgcttacctgtacatgcagttttcccaaatatttggtatacgcataggcctgcacaacgggaacctccttgccactgttctgcttgaccatcgttggatacggtccatctatgtgctccgcatccggctgggcaccggtgtagagaaaggtgttcgtatggccaccaatgacaatatccacctccggacagttcttggctatctccagatccttcaaataacccgagtggccaagagcgataatgattttgatgccctgtgccttcagtttttttgcttcaacactttggagtaatattttcaaattaagtacaatggatttaaatgtttcctgcactcacttaatggactccacctcctcgttgaactccacatccatgttgagagtaagttttttggtatctggagtcaaataacctatgacaccgaccttagtgccattggtctccagaatggcggagttagccaagtgccaagtggccttcagttggggaaccttgcttaggtccagattacaggcgagtacaggaaaggtgacctcgttgaggaagggtattagaccctctactctctcatcaaactcatgattgcccaaggactacaaataatgtagcattgaagatattttgtcagcgaaattaaggcaaaattatatactatagcatccggtttcaatttgttaaggaaagcactggcgattttgtccttgaaaatagtaaaccaagaggttccagtgtaggtatcaccagcatttaagtacaatacggaggtaccgccctcctgagcctccttacgatactttcgaactctaaaaaacaaatttgataaaaggataccatactgcggatggataactcactcgtgggccaccctggcgaatcctccatagcatttattcgtatgtacatcctccggtgggcaggtgccgctattaacgctcgtctgatcgaaacgggcatgcatatcattattatggaggatgatgaactcggtggccactttgggatggctcaaaattggattggcccgtgtccaatgggccaggacgatcacgaagatcccgcaaagccaacgtgactgcatcttctatacaattgggaataaaagttgagattttcattattgcccagcgaatagcttatatcaacaaaatccaaaagcagttgacaagtgttttgcgacaatttgtatggtcccatataactataattgctttacaacagaaattataaagtcttgcggattgcgatatcattatcttaggtgaagcttaatgttgttgtttcaaaattaattacaatttatccaactgattgagttcgcctctgctacgaacgtgctgtctaaacaattttttttttttttttattttactttgcttttatttattgaatcttcttgtataagaactaacaataagtttaaaaatcttaactataacaagtattttttgaacagttgtattatttttccaactgttctatgtttaaacggccctaataatttattcgctgggttggtaggtcctttcgccggagacgggaacggctgctgagctggattagacctcgcgctaggtggttggggtgcgtgtgaagcttgctatggtatttttccttaagttccgtgattgcgttggtaactgatgggatatttaagtctctttggatgttttcactccgaacgtaccacggtgccccagtgatggttctcagaatctttgattgtgctcgctgaatgatgtcaatattgctgttgctggcattgccccataactgtgagccataggtccagattggtttcaatatagaattgtagagcaagaccttgtgatctaggctgagcggagaaccagagttgatgagccagt

SEQ ID NO: 9848 - DNA, 3293 bp, DROSOPHILA
agaagatgcagtcacgttggctttgcgggatcttcgtgatcgtcctggcccattggacacgggccaatccaattttgagccatcccaaagtggccaccgagttcatcatcctccataataatgatatgcatgcccgtttcgatcagacgagcgttaatagcggcacctgcccaccggaggatgtacatacgaataaatgctatggaggattcgccagggtggcccacgaagttcgaaagtatcgtaaggaggctcaggagggcggtacctccgtattgtacttaaatgctggtgatacctacactggaacctcttggtttactattttcaaggacaaaatcgccagtgctttccttaacaaattgaaaccggatgctatatccttgggcaatcatgagtttgatgagagagtagagggtctaatacccttcctcaacgaggtcacctttcctgtactcgcctgtaatctggacctaagcaaggttccccaactgaaggccacttggcacttggctaactccgccattctggagaccaatggcactaaggtcggtgtcataggttatttgactccagataccaaaaaacttactctcaacatggatgtggagttcaacgaggaggtggagtccattaatgttgaagcaaaaaaactgaaggcacagggcatcaaaatcattatcgctcttggccactcgggttatttgaaggatctggagatagccaagaactgtccggaggtggatattgtcattggtggccatacgaacacctttctctacaccggtgcccagccggatgcggagcacatagatggaccgtatccaacgatggtcaagcagaacagtggcaaggaggttcccgttgtgcaggcctatgcgtataccaaatatttgggaaaactgcatgtacagtttgatgccgatggcaacctcatccagtgggatggatctcccatcctgctcaatgcttcagtggctcaggagcaggaccttctcgatctattggaggtctttcgtccgaatgtcaccaggctggagaagtcggtcgtcgggcacaccaaggttcatctggagggcaacaaggcggtttgccgggccgaggagtgcaacctgggcaatctgatagccgatgcaatggtgtttagtcgcctgatggaggagcagggcggtgatttctggacagatgctgccatttctataatgcagggcggaggcattcgcagctccattgaaaagcgatcggatggcgccatcaccgacaacgatatcctttccgttctgccctggggtaataagctctatatggtgcccatgacgggtagcactattcgtcgagccttagagcatggagctgccctgagaggcaaagattcggacggtggcttcctgcaggtgtccggaatccgtgtggttttcaattcgaacaagcccgagggtcagcgagtggtttccgtgcaggttcgatgtgccgcctgccgagtgcccacctatagtgatctgaatgatactgccatctacaatgtcgtcctgggagagttcctgctagatggtggcgatggacatgtaatgagggactcagcccaccaaccacagcgcctgcaaaataacgatctcgaggcggtatcccaatatctgaaccagcgtgactatgtctatcccgagatcgagggtcgtggaaggtgcaagactgtcgacgatgcaatgggtatttgcttcgggggatttggacgagtggcggaagcagtttcagcagcaagaaatactgcaactgatccggttatttacttaaacggtggcgattcctttcaaggtacttcctggttttcggtttatcgaggaaaaatggtggcccgaatgctaaattttctggctcccgacgccatggcccttggagttcacgaacttgacgatggaacagatgccttggccgaatttctaaataccattacttttccaatggtcagcagcaatataaacctgataaatgaacctaaacttgcggaaaacgctaatctagtgacttccttggttatcacaaagggtaatcgtaagatcggcatagtgggctacataagaccggataccaaggagcgaacccaaccaagtaatgtgatatttaaacgggaggtgcccgccatcaataaggaaacaaagaaacttaagggtcaaggcatcgatatcatcattgctttgggacattctggctacgagaaagatatggaaatagccaagcggtgtccggacgtggatatcgtcgtcggtggtcagtcgcacacgtttctctattcgggaaaggcaccgagtaaggaagtttcggaaggtccctatcccacaatagtggtaaagcccgatggcaggaaagtgcccgttgttcaggcctatgcttatacgaaatatttgggaaatctttccctagaattcgacaatggtggaaatctgcttagtttcaagggtagccccattttattgaataatcgttttcatccccgaaaagatgttcaagattttcttcaactgtaccgccaggtgatcgatgatatggagcgccatgtggtgggcaccacatccgtttatttgaatggcgatcggaagagttgtggttatagtgagtgcaattttggaaacttcatagccgatagctttgtgtatgcgagagtagtgcaaacgatggcggatagaagttcttggacagatgcttccattggactcatcaatgcgggcgctattagagcctcgattgaccctggggagacgggcgccattacggaggctgatgtggtcacagtgctacccttcagccaagatctctattacaccaggatcagtggtagtcaactgatgaaggcgctggagcattcagcccaaatgcgtagcaaacacatgaccagtgcccatttacaggtttcgggtcttcggctcaagttcaaccacagtttgcccaagggcgaaaggatcacggaaatccgtgccctgtgctccgattgccagattccccactacgaggccgttgatacgaatgggtattacggtgtggtagtaacatcatttctattgaatggcggcgagggctacagtttcgtcgatccaaagcgaccggaagtggaaaatatgacgatacttgatcgcatggctgtcatccagtatctgcaggagcacaaggttatctatccggaacgggaggatcgccaatatgtgcagcataagcacatcgccaactcgggctacatgtctcttgaacccaacttaatactcagctttttgtacttttgtcaccgatttctcgttgtctag

SEQ ID NO: 9849 - protein, 1095 aa, DROSOPHILA
MQSRWLCGIFVIVLAHWTRANPILSHPKVATEFIILHNNDMHARFDQTSVNSGTCPPEDVHTNKCYGGFARVAHEVRKYRKEAQEGGTSVLYLNAGDTYTGTSWFTIFKDKIASAFLNKLKPDAISLGNHEFDERVEGLIPFLNEVTFPVLACNLDLSKVPQLKATWHLANSAILETNGTKVGVIGYLTPDTKKLTLNMDVEFNEEVESINVEAKKLKAQGIKIIIALGHSGYLKDLEIAKNCPEVDIVIGGHTNTFLYTGAQPDAEHIDGPYPTMVKQNSGKEVPVVQAYAYTKYLGKLHVQFDADGNLIQWDGSPILLNASVAQEQDLLDLLEVFRPNVTRLEKSVVGHTKVHLEGNKAVCRAEECNLGNLIADAMVFSRLMEEQGGDFWTDAAISIMQGGGIRSSIEKRSDGAITDNDILSVLPWGNKLYMVPMTGSTIRRALEHGAALRGKDSDGGFLQVSGIRVVFNSNKPEGQRVVSVQVRCAACRVPTYSDLNDTAIYNVVLGEFLLDGGDGHVMRDSAHQPQRLQNNDLEAVSQYLNQRDYVYPEIEGRGRCKTVDDAMGICFGGFGRVAEAVSAARNTATDPVIYLNGGDSFQGTSWFSVYRGKMVARMLNFLAPDAMALGVHELDDGTDALAEFLNTITFPMVSSNINLINEPKLAENANLVTSLVITKGNRKIGIVGYIRPDTKERTQPSNVIFKREVPAINKETKKLKGQGIDIIIALGHSGYEKDMEIAKRCPDVDIVVGGQSHTFLYSGKAPSKEVSEGPYPTIVVKPDGRKVPVVQAYAYTKYLGNLSLEFDNGGNLLSFKGSPILLNNRFHPRKDVQDFLQLYRQVIDDMERHVVGTTSVYLNGDRKSCGYSECNFGNFIADSFVYARVVQTMADRSSWTDASIGLINAGAIRASIDPGETGAITEADVVTVLPFSQDLYYTRISGSQLMKALEHSAQMRSKHMTSAHLQVSGLRLKFNHSLPKGERITEIRALCSDCQIPHYEAVDTNGYYGVVVTSFLLNGGEGYSFVDPKRPEVENMTILDRMAVIQYLQEHKVIYPEREDRQYVQHKHIANSGYMSLEPNLILSFLYFCHRFLVV

SEQ ID NO: 9850 - DNA, 3385 bp, DROSOPHILA
agcggcagcggcgacagtaggatcgccagcaggggcgccagcaggcttaaagtgcggaccagacgtgtccatgaccctcaatcgcatcaatgtccaggagaacgaggtggacgtggaggagtgcctgcccgcagaggtggtcaagctggattttgtcagcgaggaggtggccgggtgaggttcgagccctcggaacgggctggacttcttctactagatctccggccgcagaacgaatcacgtaacttggaacagaaccgctacaaatccagatcgagaactcttaagcaaaaaggttgagatgccgccctagccctaagtctaaactgttaagtgttgtcatatttgatataccctgaaatcaccttgttccgggccccggatgacaaatgaattgtgcgatgtggaggacgagtctgtggatcgccagccacagagcgtagatattaattgcggagcgtatatgcgccgcctagacttaaatttacgcaagacacaatagtgcaaagtacataacgacgatcgtgtaagttgagagtgaataaacgagcattattttaagattcggcgatctctgggattttattggagttaggaaagcccaaggagcgtagaaatttagttatttgcaatggcttctacaatctcattgctgtaatttgtacttcatacttttattttgatcagactgtattataaaagcatatatataattatatttttaaagcacccaatgcaaactcaattgtgtttctaatggtccgctaaattatattgcattttatctttatttgaatgtacccatccaatttatgggacctattttataaacctttccttttaaatgcacaccacgtattttaaattcatccaattattgtacaatgaagtctcgagaaatttcgaatgcattttcaaatttcgttctgctcataattgcgctcgcaacccatacattgccattcgcatgtcggatttcaaatccgcactttcagaatttccaaagcgggtagcaagaagaagagcggctaataaagatacggatacatcaacaacaacagtcggaaatccattgttccccacaaaatgagacttcgtttgcaagtcctggtggccctgttaacctgctcgtccatttccgtctcactggcctacaaaccggtggtcatactccatggaattctatcaggagccgaatcgatggcctctctggtccgggaaatcgaagaggtttgtttttcgattcccctttgttattgtttacagtggcaaggtcgaatttgacgcaaacaacgcagtagcactgataaactcatttcgtccgtttgtagtttcatcctggcactatcgtctacaactgcgacaagttcaatggatggtacagcttggagaacgcctggcgacaggtcgatcaggttagggattatctcaacgaggtgggcaaactgcatccagagggcatcattgtgctgggtaaggcagccgattttcattagagtattttcttttagttaccaatactatgcctttttcaggatactcacaaggaggccttttggcccgggcggccatccaaagtctgcccgagcacaatgtgaagacctttatatctctatcctcgccacaggcggggcaatacggcagtaagtgagatcaaagtttaaaccaatgagtaaattctatttatatagatgcataactgcgtcacatttttccgggctaaactcttttaaagcttacaagaaacaaatatattatgtaactgtgttcaaaaattacgcagttgggttataaaacaaagggggatcacaatggttcaagtttttattttttggtaatattttcagctagcttcttgcatctaatctttcccgacttggcggccaagacagccttcgaattgttctactcgcgcgtgggacagcacacctcggttggtggctactggaacgatccgcagaggcaggatctctacctgaagtacagcgaattcctgccactgatcaataatgagaagaagacctccaactccacatcttttaagatgggaatggtgcgtctaaataagttggtaatgatcggcggacccaacgacgatgtgattactccgtggcaatcgaggtatggtttacttagtcggatattatcaaaggtgaaataaccacaaatcgtatatatttcctcagccactttggttactttgacgagaatatggatgtgattccatttattaggcgaccgattttcaccagcgactccattggcatcaggacgcttcaggaggccggcaagcttatcattgtggtcaaaccccatgttcatcatcttgcctggcacacgcgaagggatgtcatccacgaagtgatatttccatatctggactgaataagaaaccaaaactactgaactatactgagcgatcaaacggctgtgatcggaaaggcggacaaaggctcactctcatcaataagcattaatgtgaagttgctgcctgggtaattaggctacaaacatgatcttttattggtaactaagctatatatttttaaaacagcctgcgtattgcagcagagatttttacaaaaactcataaactacttataaatagccaaataaagtgaaactagaaatttttaaattgcaatttcaatgatatatatttggatattaaaatgaatcgttaaagtttatatttcatgtcgtcaaatttgtttgttgaatttaaatacttaaatctcccgcgcatttttagttactgatagataacaataagcgataactttacttatcgcttaatgaagaatcgatatttaatcgatacatccgcggtctatgtgatggcgaaatagggcgtaatatcttattttgtgaatttttaagttgcccagttaaccatgaatggcaccacgacagcagagcaggatgctgacaacgtgattcgcatcctggtggctaccgacaaccacctgggctatggcgaaaaagacgcggtgcgcggcgaggacagtttcacggccttcgaggagatcctggaactggcggtgtccgaggatgtggacatgattctgctgggaggtgacctcttccacgacgccgtgcccagccagaatgcgttgcacaagtaggatttgcatggcattgttcactctattctcattttgattcctcatcagatgcattgagctcctgcggcgctacacattcggtgatcgtcctgtttccctggagattctcagcgaccaggggcaatgcttccacaatgccgttaaccagtcggtgaattacgaggatcccaatctgaacattgccattccagtattctctattcatggcaatcacgacgatcccagtggcttcggtcgtttaagttctctggatttgctga

SEQ ID NO: 9851 - DNA, 953 bp, DROSOPHILA
ccaaagcgggtagcaagaagaagagcggctaataaagatacggatacatcaacaacaacagtcggaaatccattgttccccacaaaatgagacttcgtttgcaagtcctggtggccctgttaacctgctcgtccatttccgtctcactggcctacaaaccggtggtcatactccatggaattctatcaggagccgaatcgatggcctctctggtccgggaaatcgaagagtttcatcctggcactatcgtctacaactgcgacaagttcaatggatggtacagcttggagaacgcctggcgacaggtcgatcaggttagggattatctcaacgaggtgggcaaactgcatccagagggcatcattgtgctgggatactcacaaggaggccttttggcccgggcggccatccaaagtctgcccgagcacaatgtgaagacctttatatctctatcctcgccacaggcggggcaatacggcactagcttcttgcatctaatctttcccgacttggcggccaagacagccttcgaattgttctactcgcgcgtgggacagcacacctcggttggtggctactggaacgatccgcagaggcaggatctctacctgaagtacagcgaattcctgccactgatcaataatgagaagaagacctccaactccacatcttttaagatgggaatggtgcgtctaaataagttggtaatgatcggcggacccaacgacgatgtgattactccgtggcaatcgagccactttggttactttgacgagaatatggatgtgattccatttattaggcgaccgattttcaccagcgactccattggcatcaggacgcttcaggaggccggcaagcttatcattgtggtcaaaccccatgttcatcatcttgcctggcacacgcgaagggatgtcatccacgaagtgatatttccatatctggactga

SEQ ID NO: 9852 - protein, 288 aa, DROSOPHILA
MRLRLQVLVALLTCSSISVSLAYKPVVILHGILSGAESMASLVREIEEFHPGTIVYNCDKFNGWYSLENAWRQVDQVRDYLNEVGKLHPEGIIVLGYSQGGLLARAAIQSLPEHNVKTFISLSSPQAGQYGTSFLHLIFPDLAAKTAFELFYSRVGQHTSVGGYWNDPQRQDLYLKYSEFLPLINNEKKTSNSTSFKMGMVRLNKLVMIGGPNDDVITPWQSSHFGYFDENMDVIPFIRRPIFTSDSIGIRTLQEAGKLIIVVKPHVHHLAWHTRRDVIHEVIFPYLD

SEQ ID NO: 9853 - DNA, 6462 bp, DROSOPHILA
tttcttccgtttagtgatcacgggcgtcagttgcttctcctcgcgctccttaagcgccatctcagccgctgatcgcttgaccacctgtggcacgcaggtgtttcgctttctaccgcgctttttaggaactttggtcggatctactggcggttttataggttcggaacttgaactggtcatgtggctatgcctattccctttggcttcgcatgaattatttgtaatgccaggcatatgcgtttcctcggtgtcccaatccgtttgtgtagatgaatcgactttttggactccgcacgaacattgtttaccgtgattggagatagcgaccttatcgttattattgctctcgtttatcgcgtcgatcaccctttgggtaagggctttgtctgggattttcatgagtaatttgaagatgtcctcgtagacgggctggaaggacttgcgctggatgtaggtagaggcactatgtggcgctgagatggatatcactcgcagggaaccgactggtttgatcaccaaaacatccgaactactagcgacgactggttggatgtgctgggctttggtcaatagaaccttcttcatcgtggccgttttacaatgcactgctcgatctcgcaatatctaccagcgataaggccgtcagctagtgattgaattcgtgggacttccaagtttaggacgatcaaaaaaaaactaattggtttttccccacgacacgctgcacggaatggcaagtagcggcactcggacgctgctcaacactgctcctaaggatggttggtgagcagtcagacaagagcactgttattgctgatagctaatgtaatgtttgttttttaagaaaagagtagttttcgttaaaaaaaactttataattatgttatggtctagaacctagagtttttaatgcttaaaaatatatagccatctttcgttgcaaaatacataaatataaaagggccatctctagctttagagaattatcggcgtttcgctgcgaatggcacatcgagtattcttgagaaaaaagatacggtggtcctccataaggaaccgggataaaaatattaaggctaagttaccaaacagatcgtgaaggattccgcatcgaagctctattgccactggtgcctgcccagcgtctatgccaaagcaagtcggcaatggactcgagtagtcggcgcagtttttctggtggaagtgaaaacgagggtggacggggcagcgactactatagatccaggccggggtctcgatacagtcgatccaggtcgcgttcccggtaattctaccctaccagcgtaatgcgatcgtgtttattagtactgtgtacccttttcagtgagcgcaaccgcagccatggaggaatcaggcaccggaactctcgctctcgaagtcgggatcgggatcggtcgcccgtgttcagaaacgatcagcatcgcggtggtcgaggaggagctggtaacggggaccccgacctttaccacagcctgatcaacgacgactacagggatcaggatgagcgcaactacaactccaggagcaactttgagaatcgtcagttccggcgacatgatagcttcgaccgtcggcatcgggaccgagatggcgagagcgatcgggagctaaacgactacgagtacgaacagcgctcccgcgacttggactcacgtgatcgtagctccacggacagggactggtatcacaacagaagtcggagcagggaacacagcagaccctggaacagaaacaacaatcacgacgacagaagcagaagcaacgagcgaaacacgtgagtataaagtatacatacacttcaggctaaataataaatcggaccgtgcaggcgccaccgagatcaccgcatgtacaacggcggtggcagcaaccataatcgcgatcgagatcgagatcgggatagggagcaagaccgtgaacgtgatcgagatcgagatcgggatcgtgagagaaggggctcctcagattacgacagcgatgaaggccacatgcgcaggaacaaataccgatccaccactgaagccctcaatattattataatcttcggtcttaccaaggaaatgaccagagcagatgtaagccaagcagaagagtggcaaatgcaactcctttaattactcatgaactaactttttttttagattatgagcgagctgataaaggtgaacatggagccagcgtgcattcgcattatccggaagcagggaacaggtgggttacgaaatcactgactttgttctttcagcgtcagacgtaagtaggtccaaaaagttggagcggcttcgcgctaatggaggcgaagtgtacaagtaccaatcgaatttaaccggccacatgaatcgaaaagaatacaatagtccacaaaaatgttacaaacctatcgaaacattcaacattttttgacgaaaacattttgtatctgcttctatccgaaaatttagattcatcacgcggtatagcgtttgtcgagtttaacaccgttgaggaggcaaagcaatggatggatattacacaggtatcagcgcaatcgaccagatccccttgaaactttgatcatcatcagcagccaaggttgttcgcaggcaatgataataaggaattcctcactgtttagcttgctttgtccaactaaaagtacttatatgtagttgcaaggaaactaagcacgagtatagtattgcttcattagaattgcccaagaaagccactcgaggagattgccagcggctaaaacttcgcgttacgaaacacagatgcaatccggtgactgtgtagagtgtgaatgaaggcatcctagcgatcggttactaatccgcaacctttccttctcctatttccatgtctggcgcaccagggcgttctgaagttaaacgacgagcgggtgagcatgcggtacagccacaagcgaattcaggactggaactgcaacaaggtaggtgcactgagatgatcatattcttaatggcgagtaatgtgtttcgcttgttccagtgtggcgtctgcaacttcaagtttagattctattgctttgtgtgcaaaacatcccgggaagacagcgaaaccaccttctcctccggtagcgagggcgtggacgaagtcagcaccatcctcaccaaaagtatacaaaccacatagactctcttgccatctcgttttgtagcttcgatcgcaatgaagtccaacagaccactgaccgccacgatttctctaccacttccccaatccacgcagagatcatgctacgcaacctggacgccctgaccaacgaagaggctgtgctcactgccctccaacttcacctaaaggatctgagcaagaccgtgagcaaggtgctaattagtcgggattccttgacgcaggcatcgcgtggaatttgttaccttcacttcgacactcttgtcgactcgatgaatgtgcacaatgccttgacagcgctggatcctccacttaccttggacgacagagttggtatgtggccttaggtgctttttataacttaaataataaccaatatttcatccagtggccattacctattgcatcgacttggaggagcagcaagcattgcccaagaaccctaaagaattggcagttaaagattcaactgtcaatagcgggaacatttcagcagtttcgccctcaggattgggtggaaactatactctggccgatgtgccacgactcgctgaatatagtgcctccctgtacgcttcgaatcccgcagagcacgcttattatgtccagtactatacggagtactacacggcagatataaacaaaaataacagggattcccatttgacggaagccaattccggagcagcggttgccctctcggccatccagcgcaagcagaagaagatgagcagtatcgagaccacgatcacagcggcggccacagctgccgcacaggcagcggcgcaagtgaaggccacattggctgctcaggtggccagtgcgcccaagggcaacgatggaaagatataccgtatgtcgccactcacttgagtatgctagcattttattatgtttcattatgttgcagccactcccgatgtgacgcagtaccagtatgatgagacatccggctactattacgacagtaccacgggtctctactacaatgcccactcgcagtactactataacaacgagacgggcgcgtatctttactgggatcagcgcaggagcacctatgtgctggccacgcccgcctccactcaggcagctctgcaggaagtcctggccgacgccgagcaaaagggggaggaggagtccaaaaaggcgaaggagaaggagggtggaaacaagcacgacaaggttaaggtggcgaagaagatcgtcaaggacatggagaagtgggccaagcagctaaaccagaaaaaggactacacagctgtggccacgccacaaccaatattggcgaacgaggtagccaccacttcgcgtggcaatcaagggggatatgctgatgtgggattctccattctcgagaagaaggagaggggcaagttaaacgactatgcgccaaacccgactgtgggtccaatgaacaagcttgtcaatgcctatggcggaacatcggactctgaagaggacaatgctgcgagttcgcaaaacacacagagttcagcggttgtaagcggcggaggaggtgctgaagagtccgattacgtggacttccataaactgacatgcctgctctgcaagcgtgccttccaatcgttggaaatactccagaagcacttgaagatgtccactctgcacaaggagaacctggccaagctcaatcaaaacactagcagtagcatcgaagaggcactagcgtaagtgaaatcgcgatgtgtggtggagtatattatcattgaattcatattctttcccagctatcgtgatcgtgccaaggagcgcaggctgaagtacggcgagagcgatcctcccccaccaaataggagcagggagcgattcgagcaggagatcaagacactgcagtcgcggcaaaagcagtctactagcgctactccagccatgcccatcagttcgagcaacgtgggcagtcgactgctccaaaagatgggttggtcggagggacagggactgggcaggaagaaccagggacgcacccagatcatagaggtaactgagctgacggcaagctataaaatgaattaagaaaattaagcattttgggttccctcaggcggacggacgctccaattacgtgggcttgggcaacaaatcgggacagatgataccgggcaacgactacaaatcctatataaagaagatgatgaagcagcgctacgagaatgcttgagaaattggtttttagccgtttcacatgtttcatttcaactaaagtcgccgtttaattcagcttttcaaccgaagcaaaaattatttccatattatatatgaagcttcttgagcattgttttcctaacagattggcgtttttttaagtccacgagcaagtgtgaccgtttagttaatagtttctgattaagcgaatttaaatcctttttcgaatgtacaaaataaaatgtaacggtgtaaagtttaaatttgcttggtgttgggaaacaactgttagctggcacttggtagccctggagctatcggtcagttatcgataactggcagtcagatacttcgggtgaacggcaaaaaagaagaccgagaatttttctattcgggtttttttttttggccggataactgattgtttctgcctgaatgcaaagagacttccagttcgggaacaagtttaaccagcttccaatcctgttacagtcgtggtaaccaagtaagatgtgcgcacatagacggttcatctaatggcaaaaggccaaatcacaaacactgcatttaattacaatcgattcgcattagatatggattctcgatatggtcacagcttctcgggcggcaacggaaacggcagcgaatcgggctacagacgctacagtcgctcccgatcccgatccaggtaggtagtcctttgtccacctggagcctcttagtggattactaccaattgcgattatttcagggaacgaagtcgggaccgcaatgagtacagacgtcgcaactcccgttcgcgcagtcgggagcggtcctcacactatagaaacgaccgcagtccggatcgcgatctgtaccgcgacctgatcaacgaggattacgaggatcagggaaactacaactcgagacagaaccttgaccagcgccacggcgaggacaaatacgatcgtcggcatgctgatagccagggtcgcagggatcacgatagcaactacgacaagagtggccaggatatggataaggaccgcgatcaccgctggaaaaactacgatcgcgtttcgagagagcgcaaccatgatgacttcgatcggggatcggagcgcagcaggtaagaaatgatacatattgcatattacc

SEQ ID NO: 9854 - DNA, 3305 bp, DROSOPHILA
cgaatggcacatcgagtattcttgagaaaaaagatacggtggtcctccataaggaaccgggataaaaatattaaggctaagttaccaaacagatcgtgaaggattccgcatcgaagctctattgccactggtgcctgcccagcgtctatgccaaagcaagtcggcaatggactcgagtagtcggcgcagtttttctggtggaagtgaaaacgagggtggacggggcagcgactactatagatccaggccggggtctcgatacagtcgatccaggtcgcgttcccgtgagcgcaaccgcagccatggaggaatcaggcaccggaactctcgctctcgaagtcgggatcgggatcggtcgcccgtgttcagaaacgatcagcatcgcggtggtcgaggaggagctggtaacggggaccccgacctttaccacagcctgatcaacgacgactacagggatcaggatgagcgcaactacaactccaggagcaactttgagaatcgtcagttccggcgacatgatagcttcgaccgtcggcatcgggaccgagatggcgagagcgatcgggagctaaacgactacgagtacgaacagcgctcccgcgacttggactcacgtgatcgtagctccacggacagggactggtatcacaacagaagtcggagcagggaacacagcagaccctggaacagaaacaacaatcacgacgacagaagcagaagcaacgagcgaaacacgcgccaccgagatcaccgcatgtacaacggcggtggcagcaaccataatcgcgatcgagatcgagatcgggatagggagcaagaccgtgaacgtgatcgagatcgagatcgggatcgtgagagaaggggctcctcagattacgacagcgatgaaggccacatgcgcaggaacaaataccgatccaccactgaagccctcaatattattataatcttcggtcttaccaaggaaatgaccagagcagatattatgagcgagctgataaaggtgaacatggagccagcgtgcattcgcattatccggaagcagggaacagattcatcacgcggtatagcgtttgtcgagtttaacaccgttgaggaggcaaagcaatggatggatattacacagggcgttctgaagttaaacgacgagcgggtgagcatgcggtacagccacaagcgaattcaggactggaactgcaacaagtgtggcgtctgcaacttcaagtttagattctattgctttgtgtgcaaaacatcccgggaagacagcgaaaccaccttctcctccggtagcgagggcgtggacgaagtcagcaccatcctcaccaaaaagatcatgctacgcaacctggacgccctgaccaacgaagaggctgtgctcactgccctccaacttcacctaaaggatctgagcaagaccgtgagcaaggtgctaattagtcgggattccttgacgcaggcatcgcgtggaatttgttaccttcacttcgacactcttgtcgactcgatgaatgtgcacaatgccttgacagcgctggatcctccacttaccttggacgacagagttgtggccattacctattgcatcgacttggaggagcagcaagcattgcccaagaaccctaaagaattggcagttaaagattcaactgtcaatagcgggaacatttcagcagtttcgccctcaggattgggtggaaactatactctggccgatgtgccacgactcgctgaatatagtgcctccctgtacgcttcgaatcccgcagagcacgcttattatgtccagtactatacggagtactacacggcagatataaacaaaaataacagggattcccatttgacggaagccaattccggagcagcggttgccctctcggccatccagcgcaagcagaagaagatgagcagtatcgagaccacgatcacagcggcggccacagctgccgcacaggcagcggcgcaagtgaaggccacattggctgctcaggtggccagtgcgcccaagggcaacgatggaaagatataccccactcccgatgtgacgcagtaccagtatgatgagacatccggctactattacgacagtaccacgggtctctactacaatgcccactcgcagtactactataacaacgagacgggcgcgtatctttactgggatcagcgcaggagcacctatgtgctggccacgcccgcctccactcaggcagctctgcaggaagtcctggccgacgccgagcaaaagggggaggaggagtccaaaaaggcgaaggagaaggagggtggaaacaagcacgacaaggttaaggtggcgaagaagatcgtcaaggacatggagaagtgggccaagcagctaaaccagaaaaaggactacacagctgtggccacgccacaaccaatattggcgaacgaggtagccaccacttcgcgtggcaatcaagggggatatgctgatgtgggattctccattctcgagaagaaggagaggggcaagttaaacgactatgcgccaaacccgactgtgggtccaatgaacaagcttgtcaatgcctatggcggaacatcggactctgaagaggacaatgctgcgagttcgcaaaacacacagagttcagcggttgtaagcggcggaggaggtgctgaagagtccgattacgtggacttccataaactgacatgcctgctctgcaagcgtgccttccaatcgttggaaatactccagaagcacttgaagatgtccactctgcacaaggagaacctggccaagctcaatcaaaacactagcagtagcatcgaagaggcactagcctatcgtgatcgtgccaaggagcgcaggctgaagtacggcgagagcgatcctcccccaccaaataggagcagggagcgattcgagcaggagatcaagacactgcagtcgcggcaaaagcagtctactagcgctactccagccatgcccatcagttcgagcaacgtgggcagtcgactgctccaaaagatgggttggtcggagggacagggactgggcaggaagaaccagggacgcacccagatcatagaggcggacggacgctccaattacgtgggcttgggcaacaaatcgggacagatgataccgggcaacgactacaaatcctatataaagaagatgatgaagcagcgctacgagaatgcttgagaaattggtttttagccgtttcacatgtttcatttcaactaaagtcgccgtttaattcagcttttcaaccgaagcaaaaattatttccatattatatatgaagcttcttgagcattgttttcct

SEQ ID NO: 9855 - protein, 1004 aa, DROSOPHILA
MDSSSRRSFSGGSENEGGRGSDYYRSRPGSRYSRSRSRSRERNRSHGGIRHRNSRSRSRDRDRSPVFRNDQHRGGRGGAGNGDPDLYHSLINDDYRDQDERNYNSRSNFENRQFRRHDSFDRRHRDRDGESDRELNDYEYEQRSRDLDSRDRSSTDRDWYHNRSRSREHSRPWNRNNNHDDRSRSNERNTRHRDHRMYNGGGSNHNRDRDRDRDREQDRERDRDRDRDRERRGSSDYDSDEGHMRRNKYRSTTEALNIIIIFGLTKEMTRADIMSELIKVNMEPACIRIIRKQGTDSSRGIAFVEFNTVEEAKQWMDITQGVLKLNDERVSMRYSHKRIQDWNCNKCGVCNFKFRFYCFVCKTSREDSETTFSSGSEGVDEVSTILTKKIMLRNLDALTNEEAVLTALQLHLKDLSKTVSKVLISRDSLTQASRGICYLHFDTLVDSMNVHNALTALDPPLTLDDRVVAITYCIDLEEQQALPKNPKELAVKDSTVNSGNISAVSPSGLGGNYTLADVPRLAEYSASLYASNPAEHAYYVQYYTEYYTADINKNNRDSHLTEANSGAAVALSAIQRKQKKMSSIETTITAAATAAAQAAAQVKATLAAQVASAPKGNDGKIYPTPDVTQYQYDETSGYYYDSTTGLYYNAHSQYYYNNETGAYLYWDQRRSTYVLATPASTQAALQEVLADAEQKGEEESKKAKEKEGGNKHDKVKVAKKIVKDMEKWAKQLNQKKDYTAVATPQPILANEVATTSRGNQGGYADVGFSILEKKERGKLNDYAPNPTVGPMNKLVNAYGGTSDSEEDNAASSQNTQSSAVVSGGGGAEESDYVDFHKLTCLLCKRAFQSLEILQKHLKMSTLHKENLAKLNQNTSSSIEEALAYRDRAKERRLKYGESDPPPPNRSRERFEQEIKTLQSRQKQSTSATPAMPISSSNVGSRLLQKMGWSEGQGLGRKNQGRTQIIEADGRSNYVGLGNKSGQMIPGNDYKSYIKKMMKQRYENA

SEQ ID NO: 9856 - DNA, 3114 bp, DROSOPHILA
aatcaaaatatgatcgctttctgttcttccatttaacttacagccatggccctggtaaatgtggtgacacctgttttggaagtggagtatatggccatcaaaggcgtgggctgcagaccagccaccgaggaaatgttcactatgagtccacctctaccaccttttgacttgtccatgtattcgagtgccgtcaaagtgctgttaataactcccacctttagaaaatattgataaataaatccctttgaaagtacaatttcaagtattaccagatttatttgtatggtcagttcaattcggcgatcatccaaaaggccacttccattgaccaccacatcgaagtgtccaagtttctctgcagtcgccttataggcagcatctatatccgatttctgagtgatgtccattttctggtagaagatttccgtatcgggatgctgttttttccactcagccaagaggtcgtcatccacaatcaagtcaaaaatggccagaccctaatcgagtcattaattagtatatattctcaggtcagtttgcttataaatctacttttatttgcttcttaagcagttcttgcacacattttttgcctatgccgccgaatccgccgagataaaccacattttttccttccaaatccatttggcactttataaattctctaaaatattccgtgcagttgttcagttggcagcaactggcaaagtactcttcataagatctacaacttacaagcaatccagttagtatcgctctacttttttgggtttatctgatgtggggcctagagatttgataaaggctatatatataaatggagatgtttgatagccgcctatatactagaaaagcatgcccattttttatggaaggtctcatatttttaaatgagagttttgtgtttagtgtttttctgttactataacaataatgaaaaataagcaacgtaacattattttctgtccgtgtggccccataaaatgtcaaagaagctccattaacttacaacacttttattttaaatcaccaaggaattgaaagagattacaatatgatgcgcacataatagaaacaataatgcggtattaattatccaactgtggcttccacatgactggcatgtccacctccgtcgtctcacccatctccagcatgaggacagttccatttttggacgtctctattgctgagaccaggttcctcgcacaatcctcggccttctgacgcttcacccggttgaacatggccagcatgggagtgtcgtaggtgaatgtcgtcttgttgccaatatcctccagtagcccagtgtccgtgaatccgggacagatggtaaggaagcctacaccagagtgggcgtaaaagtaggggttctaagggggatgacatatgattgacatatgatatgatcaaaccatttaactcatttccattctacttacagccatggctctggtgaatgtggtaactcccgtcttggccgccgagtaaatggccattatagctgtgggctgcagtccagccaccgatgatatattcactatgagcccaccctttccgcctttggccttgtccatgtactccaaggcggtcaaagtgctgttgataactcccagcttttgaaaatgcaagtaaataaggtttttaaaattgttaggagaacttcctaacttttttgcactcaccagattaatttgaatagtgagttcgaccaggcgatcgttcatcagtccactgccattgaccaccacatcgaagtgtccgaatctctcggcggtcgccttgtaggccgcgtctatatccgatttctgggttatgtccagcttgtggtagaagacgtccgtatcgggatgctggcttttccacttagccaagagctgctcattagcatttagatcgaaaatggctagagcctaatgaagtaatcatttgcagttagtttttagttttgggtgttggtcaacaacacacctttattggtcgctggagcagttcttgcacacatttttggcctattccaccgaatccgccaaggtaaacgacatttttgccggctaagtccatgtcgctgtggtgaaactattggctctttggacttcgtgtagttcagtcagcggcaattgacgaactgatctttgggaaagctaaacttattcgatcagcaagtgctaacgaccccctatcgccactgctctccgttctcagctctatctgagctttttggtcttcgatgctctcgcagagaatattatgtttatttaatataactgcataagcttggcaagtgatgagaatacaacttttaattggttaaatattctattttattattatattaatattttaccatattcatgctttgggcacatcctatctgaggtcctctaataatcaagatggaagttcattaaattttataatatttaagaaatgctggttttgcctatgctatatgcctttaagcatcagcactaatcagagctgctaataaatatgtatgtatgtgtaatgataacactttagataactgcgcattttctgcgagtttccatcgaacttagtttatatatcaatgttataatatacattaaagataaaattggtaacaattcctctaaaaatgccgtttaagccataaaactattgataacattttgactatataaggtagacataaaacgcatttaatcgttatatgattattttattcgattcctatcaaaagctctttgatattaaagcattcttcgaatagatttggagtaaagagcttagttatcaatccactttacatacatatatgtatatgtgtcagccacttaaacggtagtcaccgtctagtaatcgaatatggatgtttatcccattaagcaaaacaaagagacttcccccattagttttccgcctgaatccaggttgcgcttgccacatccgcggagacacagatctcagctggtagtgccgcccaattgcgcaaccaatggatccgtgtctcaatattaagttcactattgcaacatccgtgcggtagcgaaccagaggccccagaagcaatcgacaccaatcggatcgcggcggatcgacttgcgcatttcgaggtcattgtgcagaccg

SEQ ID NO: 9857 - DNA, 918 bp, DROSOPHILA
ctgactgaactacacgaagtccaaagagccaatagtttcaccacagcgacatggacttagccggcaaaaatgtcgtttaccttggcggattcggtggaataggccaaaaatgtgtgcaagaactgctccagcgaccaataaaggctctagccattttcgatctaaatgctaatgagcagctcttggctaagtggaaaagccagcatcccgatacggacgtcttctaccacaagctggacataacccagaaatcggatatagacgcggcctacaaggcgaccgccgagagattcggacacttcgatgtggtggtcaatggcagtggactgatgaacgatcgcctggtcgaactcactattcaaattaatctgctgggagttatcaacagcactttgaccgccttggagtacatggacaaggccaaaggcggaaagggtgggctcatagtgaatatatcatcggtggctggactgcagcccacagctataatggccatttactcggcggccaagacgggagttaccacattcaccagagccatggctaacccctacttttacgcccactctggtgtaggcttccttaccatctgtcccggattcacggacactgggctactggaggatattggcaacaagacgacattcacctacgacactcccatgctggccatgttcaaccgggtgaagcgtcagaaggccgaggattgtgcgaggaacctggtctcagcaatagagacgtccaaaaatggaactgtcctcatgctggagatgggtgagacgacggaggtggacatgccagtcatgtggaagccacagttggataattaataccgcattattgtttctattatgtgcgcatcatattgtaatctctttcaattccttggtgatttaaaataaaagtgttgtaagttaa

SEQ ID NO: 9858 - protein, 259 aa, DROSOPHILA
MDLAGKNVVYLGGFGGIGQKCVQELLQRPIKALAIFDLNANEQLLAKWKSQHPDTDVFYHKLDITQKSDIDAAYKATAERFGHFDVVVNGSGLMNDRLVELTIQINLLGVINSTLTALEYMDKAKGGKGGLIVNISSVAGLQPTAIMAIYSAAKTGVTTFTRAMANPYFYAHSGVGFLTICPGFTDTGLLEDIGNKTTFTYDTPMLAMFNRVKRQKAEDCARNLVSAIETSKNGTVLMLEMGETTEVDMPVMWKPQLDN

SEQ ID NO: 9859 - DNA, 7887 bp, DROSOPHILA
tggctgatcctcaccccagacctcgtcgatgaggttgccttcgatgggcaccagctggcattccgcggagcttagttccgtttcgatgggtttccatacgcggaacgacaacaggcgaggatccacgcccacaaagctgcccttgggcagattcttcgccagccaggcgccaatcgacggggtggcgctcagaccatcccgcattagaacccaattggagtccagctgcttctccgcctgctgatagtaacgaccgtcggtccacagcagtgcggtctccgtcgttatcaccgccgtgccagcggatccatcgaaaccactcacaaaggagcgtcgctcgtcatgctggcactggtactccgactgatgggcgtcgtccgagggcacaatgtatgccgatatgccgcaggagtcgcccacctgggcgcggagcattagctccctcaacctggtcagaatttgggtggtgctcctcttcattgtggttcctcaatggcagcaaaataactgagcgaaaaaaaaaacacagaatttgtagtccagttggggcgataagataatcaaccgtaatcgagtttcttgtatcccataaatacataaataatcgggcgaatataagtgtcacacttacaaaggctgtcaaactattgtttaaactacagggtgcaaatattttataatctttttgcactgacacattcaattttgcaattaatagcacgtcaaaaatgctgaactatattatttcatatcgcctccaagctttcagtattttttagcttttgcctaaaagggtaacactaaaagtgtagcgggaacaatttaaatatttcattaagaaacttatcccatattaatgtttttaatgtataattaaaaggagtataactcttataaagaagctcagcaacagtatttgaaaagaattcaactaagatcttaaaaaatgttgtagatgtaattaaatgtgttttttctttgtaattccttttagaatgagatgaaccttccatcggaagcttgtattggcctgccacctgttcacgttctggcggaatacattccagaccaccgccaggatcacacggaaaatgtcgagggcattgtcctgcgccaaggtggctacgtgaacgccagcgccgagatcggcgagttcgagcgctgcctgaccacagatctcctaaaccatctggtctttgtgcagaaggtgtttatgcgcgaaatcaacgaggttctgcagaaagtttacggaggagagaaacctgtgcccctgtggacggaagagagtggcgatagttccggagcagtacaggagtcctcgcttaagcgcatcctcttctcaatcaacatttccatgaaacgcatccaattgacggctactacaccctgctcctcggctgttcgattcgagaccggaatcctggagctgcagctgtctaaccgtgtgaagaacctaggcgatatgagcaatcgtaagctcttctttaaggctcacatagatttcaacttgtccctgggtcagattatacgcaatgtgattttcgacgaggccgagccggagttccagcagtacgcctttttccacactaccattaacctgaggaatgctttccaagacgaactgctcaacgaagacaaggagttgattctgctgaccctgaagagaccactggtctacgttcagccaattgccgtggacaaggcgatcctcgtgtggcttaactataagaatgcttacgagtactgggcggagaagcgtgcgaatctctgccacgagcacgctcagcacagtctccttagtcagtattcgggacagcatcagaaccaaaatatgcagaatccacaagtgttcgatcgcgtggcttttggccagattgcaggctcaaatttgtctacgctcttcctgcaactcaccgtggaggacatgggcatttgcttgcccctgaaacaggtcaacactacggtatgtatccaattaaatctgtaatataaagattatttgaaccacataaattttcttttgcagacctttggctcccgttcataccaagactttgatgccaagggcgcggttgtaatcacgctggagaacacgattatctcagcttgcaactcgggagctttagtgtctaagggaaagttccagggtctgtgcctgcgatttgccgatgattttgaaacaaatctagatgactggaagcccaacagcgctgagcccattatgaacgtttgcgttgtctccgagggaaccttcgaggtgtgttcccgcactacagcagctaagaagggtgagaacgccaagtggctgttgaatgtcaagtggcaaatggagggcgtggatattcacctggatgtgaatattggcaagcagctgagttctcttggccacactcttaccatgctcacgggattcgaagaggatgagacccaaatggaatcaccggacagcgatgaaggagatcagagctgcagagatacgtttgtgcggcgcagaggagacttcgacaatttgccagcttttgtatttgatcccacaatcgattccaagaagcgttccttcatgatggagaaggagatggccgaacagctgaagattatcaatgatctgcgtactctcggagcatcacataataccgtggcccacgaggaaagacgactccaagagctacaagccatttgctacaagtacttccgtagagatatgattcagaagtggaaaagaccatcgctgagaaggtccctgaagacctacggtcgctcgcattcttacattggatctggatcttcagtgagtggagttggcgttccgcaaacactggacaatgttagctatactggcagaagactggacacaattgcgtccaatgatgagatatctagcttgcaaagcacaccggcctcctgtcattcccgcagtgcttccttaaaacatacaacaggaggaggagtcattggagggggagttaatgctcttggacgagtcaccttcacagaggctatgcgccagacttcactgcccaatgcggacacggacacggagacagctgacaatgagcttgattggagaggggatatcacgccgagtgagattgatgttgatggcacctccgtggaaatgcgacgcaagcatggacatggacagaaacagccggaacccaacattgattttgaactggacattaaggtgcttgtgaactctggaaaatgcgtgctccatacgaaggatactggtgaggagcgaggctacgctggtggatcgggagcagctacaagtggtgtgccagcttcaagtgtaaaatctcataagcgggaaaaaagcataggcaacgattggggcagtccaactccctcgagaaggcagagggacaagagcaagctgcgctacaatgcaaatgcattgctggcggatctcaccatcttccacatcccaggattggatgtaaaacttcattatcagtcaaaaacactggccgagcaactaaccggagatcagttgccaactggacgacgaatgggcagcaaacgagcaactttgtgcgcttggatgactttacagagtataccagaggaaacaatcatatcaccccatattttggaattcctagagcagactctagaacccattccggctcggcaatcgagtagtgttccgccaactccctcccacaacacaggtgttaatctggacatactgcctgccaactatgtgacttatgcttcatttccggtggatgtaatagtttactttcatatgcaaccttctaccttcagatttagctgtctgccagtttctagagtagaatgtatgcttcagctgccaagtttggatattgttttcagttcaaagaggagcagcgaggaggagaactcagcacagccaggaggtcatacccaaccagatcagcagctacccactggaggacttagtgttacaggctgccttgccgacttcaatgtgttcattttccatccgtatggtggcaaaaagacttctaaggagacacagttttcacctctcagcgacagtgaaaggaaggattcgttgagtatcaacgtggagttcgtcaagttccacattacgcgttgcagaaaggtgtacattgagcctctgcccagttctaagagatctcttgatcaatcgcgagccgtaatacggttctctaccattgtggatattggtagtgccagttttaagtacgacatgaggagattgactgagatcctagcgttccccaaagcttggtatcgcaggaggattgtgagaaggctcttcctgggtgaccttagtgtgcagcaacagcagcagcagcaacagggaaatggagcagagacaccaactggctgcccacctgccacgccaacgcccaatgaagatgcctctagggcaaaggataacatgcgcctcgactttgatggacaaccgtcgcagcagcagcagcagctgggacactttggcgctgtaagacacttgaaaaatctgggcaaatcctctagcgccgaatcgtcgggaacgcctccctctgaaaagaaccaaatcactgcctgggagactctggtcatctttgcagttaattttaccaaactaaatgtgcaaatgaacattggcaatgtgtgtggcaatgttgtctggctcacaaaagactttcaatcggatggacgcctttcgatcggaagcacaggctacaagaacatgtatgctgggatctatctgggtggatcagccctagatgcaaagggtggtattgtgggtggtagtttcgaggtgaacaagatcaacaaacgttttcatatcaaggaggaggcgggcatggagccttaccacactatgggcctgagctttatggccctggaactccgactagattatatgggaacttcagtgttgatgacccgaattagtagcttctcggctgccatgaaagatgaatggcgcactgcttcccaagcggcagcaactccagcacatggcaaagaccaacccagagctctgatctttattcacggcgatcttacctgggaccaactgcagatcatgatcagcaagtcaacaacggcggatctattgaagatgtacttcaaattggaggagttcttcacacagcaattcaaatcctccaagagggtgttctccaatctggaacctcgcctccaggatcggactgccagcatcaagagacggcagcagcacaagaagaagccggcaaatggagagcttgttgctccacctcagattcatggcatgattggcgaaaacacagacgcacgccatcaccgccattggcagaagccattggcacaagctgtaggcctggttgtgccctcactagtgactcgtttgccacgtcatggtaatgtgttgggtggcactgtcgaacttcggggacagaacatctccctggcctgcttccacggaattaacttcaagtctaagtcctgggccctgttcagtttgagatctccatccattaactttgcaactgaggcgcgtcaaagcgaggacgaagtgctggtcacccagacactcacctcttcgttaggacagacaacggaggtgcagcagcaacagaaccattctatggccatcgtgagtcgaattacgagaaacatcattttcccgcctcagttcaagacgcttaatgagtggttccattacgcttttgctaacagtgagattgatggtaagttaataaggaataatgttgagactaggttaattgacccgccattttcctcccacccacagctgtggatcgattccccatgctggaatgcgagcgggagatcgcatccaattctatagagcgaacacgggcttctggcagcagcagcgctgccaaggcccaagaacacaatcacaaccgcgaggtcatcttcgccctgcccagcctgcagctgcatttcaagactgagcacaaacagggaccaaccacaccagagccaagtggtaagtacatataaggccatcaatttaataatacagcaagttaatcatagttctatgttcgattgcagaaaataagccagaagttttgtgcagcttcatcaccgaattcgatgaccacatttttgtgaccgtcgatgcggacgccttcttcttcctccacgatctcatcacttcctatgtgactgaaaaggagaaggtggtaagtgtttaagatatttgcttgtaaattaggaaataaaaccatttatatcaccactagatcggagctcagtcggcaagggcagcgtcgcccaatctctcgcaaaaggctaacctgaagccatatctgaccgacgagatactcaaagagaagaagggcgcctcaaacacgaacctgactgctcagggcaagcaaacgagcggcagcaagaacagtttggatccgctgcaaggaagccacacaagccttgcgaacgctgctgccaacatgtcaggagcagcgacaacgaacacgacgaccaccacaacagccacaaccttatcacctggagcggcagctggtggaccatcgacaagcgctacaaacgactccgttgatggcaagcagcagcaacaggagggttccccgcccacctttgatctcgaatcgtttgtgcgtgactggcggcactttgagtgccagacctggcacttggagccgacagttcgcctactctcctgggcgggcaagtccattgagccatatggcgttgattacatcctaaacaaactgggcttcagccatgcacgcaccaccataccaaagtggctgcagcgtggatttatggatccgctggacaaggtgcaggccctgatgatgctgcaactgctgttgatggtgcgcgagaacaaagtggagcgtgatagtggggcaagtggaagtggcaagcagcaacagcaaaaccatcgacccccaacgaattagccatggcagagtagcatctatgacagttgacaattacccaaagtccttcgatttagtctaagtagcgatgtatagatttttcaaacgtgtaaagtttttattatttattaccctggttgacctagcatgctttaagattgaaactggcggtattatgtggccagtatggcagcttcatatataatgtaaatggtttgctctcgttccccttctttttaagcgtatctgtatactctttctataggtgtaacgtcaagtgcttcgtgtaatttgctcaatttttgcgctttgtaattatcattacatcgttttgttattttagaaattactagcaacaatgagcagagcaatgtgtttaaactataagtagctctaattcaatatacacaaatacttatattattatataaaaaatgtgtaagtgtatccataagtaaattgaataaaatttcggaaatgcctaccaaaaaatttcaaaactacagtacaacgataaaaactatttattaactttaaataggataaaaaggataatataataaacatttccgctgtggtttttagttgaggatcgaaactacttgggttcctcatttatccggcgagtgaataagaaagtgttccggctaatttcgggccaactttgattgttcctccgtctgcttttggccttggctggagaccctttgaattctctaggcctcctagttgcctttttttatattttcctatcctttttttttttttttttgttattcggccgagtaaactttgcatccgctgcgcgcatccgtttatgttttcgttttgtcccgctggctgagcagtgcaaatgttttcctcggctttcttggcgcctttcaacgtttttcttcgcctgtcactgggtcttagattttttttcggaggctgtggagactgagaagactcttggctctgtctttgtaaacatttcattttccatcaaggttgcgtttttaattatctttcctttctctga

SEQ ID NO: 9860 - DNA, 5550 bp, DROSOPHILA
atgaaccttccatcggaagcttgtattggcctgccacctgttcacgttctggcggaatacattccagaccaccgccaggatcacacggaaaatgtcgagggcattgtcctgcgccaaggtggctacgtgaacgccagcgccgagatcggcgagttcgagcgctgcctgaccacagatctcctaaaccatctggtctttgtgcagaaggtgtttatgcgcgaaatcaacgaggttctgcagaaagtttacggaggagagaaacctgtgcccctgtggacggaagagagtggcgatagttccggagcagtacaggagtcctcgcttaagcgcatcctcttctcaatcaacatttccatgaaacgcatccaattgacggctactacaccctgctcctcggctgttcgattcgagaccggaatcctggagctgcagctgtctaaccgtgtgaagaacctaggcgatatgagcaatcgtaagctcttctttaaggctcacatagatttcaacttgtccctgggtcagattatacgcaatgtgattttcgacgaggccgagccggagttccagcagtacgcctttttccacactaccattaacctgaggaatgctttccaagacgaactgctcaacgaagacaaggagttgattctgctgaccctgaagagaccactggtctacgttcagccaattgccgtggacaaggcgatcctcgtgtggcttaactataagaatgcttacgagtactgggcggagaagcgtgcgaatctctgccacgagcacgctcagcacagtctccttagtcagtattcgggacagcatcagaaccaaaatatgcagaatccacaagtgttcgatcgcgtggcttttggccagattgcaggctcaaatttgtctacgctcttcctgcaactcaccgtggaggacatgggcatttgcttgcccctgaaacaggtcaacactacgacctttggctcccgttcataccaagactttgatgccaagggcgcggttgtaatcacgctggagaacacgattatctcagcttgcaactcgggagctttagtgtctaagggaaagttccagggtctgtgcctgcgatttgccgatgattttgaaacaaatctagatgactggaagcccaacagcgctgagcccattatgaacgtttgcgttgtctccgagggaaccttcgaggtgtgttcccgcactacagcagctaagaagggtgagaacgccaagtggctgttgaatgtcaagtggcaaatggagggcgtggatattcacctggatgtgaatattggcaagcagctgagttctcttggccacactcttaccatgctcacgggattcgaagaggatgagacccaaatggaatcaccggacagcgatgaaggagatcagagctgcagagatacgtttgtgcggcgcagaggagacttcgacaatttgccagcttttgtatttgatcccacaatcgattccaagaagcgttccttcatgatggagaaggagatggccgaacagctgaagattatcaatgatctgcgtactctcggagcatcacataataccgtggcccacgaggaaagacgactccaagagctacaagccatttgctacaagtacttccgtagagatatgattcagaagtggaaaagaccatcgctgagaaggtccctgaagacctacggtcgctcgcattcttacattggatctggatcttcagtgagtggagttggcgttccgcaaacactggacaatgttagctatactggcagaagactggacacaattgcgtccaatgatgagatatctagcttgcaaagcacaccggcctcctgtcattcccgcagtgcttccttaaaacatacaacaggaggaggagtcattggagggggagttaatgctcttggacgagtcaccttcacagaggctatgcgccagacttcactgcccaatgcggacacggacacggagacagctgacaatgagcttgattggagaggggatatcacgccgagtgagattgatgttgatggcacctccgtggaaatgcgacgcaagcatggacatggacagaaacagccggaacccaacattgattttgaactggacattaaggtgcttgtgaactctggaaaatgcgtgctccatacgaaggatactggtgaggagcgaggctacgctggtggatcgggagcagctacaagtggtgtgccagcttcaagtgtaaaatctcataagcgggaaaaaagcataggcaacgattggggcagtccaactccctcgagaaggcagagggacaagagcaagctgcgctacaatgcaaatgcattgctggcggatctcaccatcttccacatcccaggattggatgtaaaacttcattatcagtcaaaaacactggccgagcaactaaccggagatcagttgccaactggacgacgaatgggcagcaaacgagcaactttgtgcgcttggatgactttacagagtataccagaggaaacaatcatatcaccccatattttggaattcctagagcagactctagaacccattccggctcggcaatcgagtagtgttccgccaactccctcccacaacacaggtgttaatctggacatactgcctgccaactatgtgacttatgcttcatttccggtggatctgccaagtttggatattgttttcagttcaaagaggagcagcgaggaggagaactcagcacagccaggaggtcatacccaaccagatcagcagctacccactggaggacttagtgttacaggctgccttgccgacttcaatgtgttcattttccatccgtatggtggcaaaaagacttctaaggagacacagttttcacctctcagcgacagtgaaaggaaggattcgttgagtatcaacgtggagttcgtcaagttccacattacgcgttgcagaaaggtgtacattgagcctctgcccagttctaagagatctcttgatcaatcgcgagccgtaatacggttctctaccattgtggatattggtagtgccagttttaagtacgacatgaggagattgactgagatcctagcgttccccaaagcttggtatcgcaggaggattgtgagaaggctcttcctgggtgaccttagtgtgcagcaacagcagcagcagcaacagggaaatggagcagagacaccaactggctgcccacctgccacgccaacgcccaatgaagatgcctctagggcaaaggataacatgcgcctcgactttgatggacaaccgtcgcagcagcagcagcagctgggacactttggcgctgtaagacacttgaaaaatctgggcaaatcctctagcgccgaatcgtcgggaacgcctccctctgaaaagaaccaaatcactgcctgggagactctggtcatctttgcagttaattttaccaaactaaatgtgcaaatgaacattggcaatgtgtgtggcaatgttgtctggctcacaaaagactttcaatcggatggacgcctttcgatcggaagcacaggctacaagaacatgtatgctgggatctatctgggtggatcagccctagatgcaaagggtggtattgtgggtggtagtttcgaggtgaacaagatcaacaaacgttttcatatcaaggaggaggcgggcatggagccttaccacactatgggcctgagctttatggccctggaactccgactagattatatgggaacttcagtgttgatgacccgaattagtagcttctcggctgccatgaaagatgaatggcgcactgcttcccaagcggcagcaactccagcacatggcaaagaccaacccagagctctgatctttattcacggcgatcttacctgggaccaactgcagatcatgatcagcaagtcaacaacggcggatctattgaagatgtacttcaaattggaggagttcttcacacagcaattcaaatcctccaagagggtgttctccaatctggaacctcgcctccaggatcggactgccagcatcaagagacggcagcagcacaagaagaagccggcaaatggagagcttgttgctccacctcagattcatggcatgattggcgaaaacacagacgcacgccatcaccgccattggcagaagccattggcacaagctgtaggcctggttgtgccctcactagtgactcgtttgccacgtcatggtaatgtgttgggtggcactgtcgaacttcggggacagaacatctccctggcctgcttccacggaattaacttcaagtctaagtcctgggccctgttcagtttgagatctccatccattaactttgcaactgaggcgcgtcaaagcgaggacgaagtgctggtcacccagacactcacctcttcgttaggacagacaacggaggtgcagcagcaacagaaccattctatggccatcgtgagtcgaattacgagaaacatcattttcccgcctcagttcaagacgcttaatgagtggttccattacgcttttgctaacagtgagattgatgctgtggatcgattccccatgctggaatgcgagcgggagatcgcatccaattctatagagcgaacacgggcttctggcagcagcagcgctgccaaggcccaagaacacaatcacaaccgcgaggtcatcttcgccctgcccagcctgcagctgcatttcaagactgagcacaaacagggaccaaccacaccagagccaagtgaaaataagccagaagttttgtgcagcttcatcaccgaattcgatgaccacatttttgtgaccgtcgatgcggacgccttcttcttcctccacgatctcatcacttcctatgtgactgaaaaggagaaggtgatcggagctcagtcggcaagggcagcgtcgcccaatctctcgcaaaaggctaacctgaagccatatctgaccgacgagatactcaaagagaagaagggcgcctcaaacacgaacctgactgctcagggcaagcaaacgagcggcagcaagaacagtttggatccgctgcaaggaagccacacaagccttgcgaacgctgctgccaacatgtcaggagcagcgacaacgaacacgacgaccaccacaacagccacaaccttatcacctggagcggcagctggtggaccatcgacaagcgctacaaacgactccgttgatggcaagcagcagcaacaggagggttccccgcccacctttgatctcgaatcgtttgtgcgtgactggcggcactttgagtgccagacctggcacttggagccgacagttcgcctactctcctgggcgggcaagtccattgagccatatggcgttgattacatcctaaacaaactgggcttcagccatgcacgcaccaccataccaaagtggctgcagcgtggatttatggatccgctggacaaggtgcaggccctgatgatgctgcaactgctgttgatggtgcgcgagaacaaagtggagcgtgatagtggggcaagtggaagtggcaagcagcaacagcaaaaccatcgacccccaacgaattag

SEQ ID NO: 9861 - protein, 1849 aa, DROSOPHILA
MNLPSEACIGLPPVHVLAEYIPDHRQDHTENVEGIVLRQGGYVNASAEIGEFERCLTTDLLNHLVFVQKVFMREINEVLQKVYGGEKPVPLWTEESGDSSGAVQESSLKRILFSINISMKRIQLTATTPCSSAVRFETGILELQLSNRVKNLGDMSNRKLFFKAHIDFNLSLGQIIRNVIFDEAEPEFQQYAFFHTTINLRNAFQDELLNEDKELILLTLKRPLVYVQPIAVDKAILVWLNYKNAYEYWAEKRANLCHEHAQHSLLSQYSGQHQNQNMQNPQVFDRVAFGQIAGSNLSTLFLQLTVEDMGICLPLKQVNTTTFGSRSYQDFDAKGAVVITLENTIISACNSGALVSKGKFQGLCLRFADDFETNLDDWKPNSAEPIMNVCVVSEGTFEVCSRTTAAKKGENAKWLLNVKWQMEGVDIHLDVNIGKQLSSLGHTLTMLTGFEEDETQMESPDSDEGDQSCRDTFVRRRGDFDNLPAFVFDPTIDSKKRSFMMEKEMAEQLKIINDLRTLGASHNTVAHEERRLQELQAICYKYFRRDMIQKWKRPSLRRSLKTYGRSHSYIGSGSSVSGVGVPQTLDNVSYTGRRLDTIASNDEISSLQSTPASCHSRSASLKHTTGGGVIGGGVNALGRVTFTEAMRQTSLPNADTDTETADNELDWRGDITPSEIDVDGTSVEMRRKHGHGQKQPEPNIDFELDIKVLVNSGKCVLHTKDTGEERGYAGGSGAATSGVPASSVKSHKREKSIGNDWGSPTPSRRQRDKSKLRYNANALLADLTIFHIPGLDVKLHYQSKTLAEQLTGDQLPTGRRMGSKRATLCAWMTLQSIPEETIISPHILEFLEQTLEPIPARQSSSVPPTPSHNTGVNLDILPANYVTYASFPVDLPSLDIVFSSKRSSEEENSAQPGGHTQPDQQLPTGGLSVTGCLADFNVFIFHPYGGKKTSKETQFSPLSDSERKDSLSINVEFVKFHITRCRKVYIEPLPSSKRSLDQSRAVIRFSTIVDIGSASFKYDMRRLTEILAFPKAWYRRRIVRRLFLGDLSVQQQQQQQQGNGAETPTGCPPATPTPNEDASRAKDNMRLDFDGQPSQQQQQLGHFGAVRHLKNLGKSSSAESSGTPPSEKNQITAWETLVIFAVNFTKLNVQMNIGNVCGNVVWLTKDFQSDGRLSIGSTGYKNMYAGIYLGGSALDAKGGIVGGSFEVNKINKRFHIKEEAGMEPYHTMGLSFMALELRLDYMGTSVLMTRISSFSAAMKDEWRTASQAAATPAHGKDQPRALIFIHGDLTWDQLQIMISKSTTADLLKMYFKLEEFFTQQFKSSKRVFSNLEPRLQDRTASIKRRQQHKKKPANGELVAPPQIHGMIGENTDARHHRHWQKPLAQAVGLVVPSLVTRLPRHGNVLGGTVELRGQNISLACFHGINFKSKSWALFSLRSPSINFATEARQSEDEVLVTQTLTSSLGQTTEVQQQQNHSMAIVSRITRNIIFPPQFKTLNEWFHYAFANSEIDAVDRFPMLECEREIASNSIERTRASGSSSAAKAQEHNHNREVIFALPSLQLHFKTEHKQGPTTPEPSENKPEVLCSFITEFDDHIFVTVDADAFFFLHDLITSYVTEKEKVIGAQSARAASPNLSQKANLKPYLTDEILKEKKGASNTNLTAQGKQTSGSKNSLDPLQGSHTSLANAAANMSGAATTNTTTTTTATTLSPGAAAGGPSTSATNDSVDGKQQQQEGSPPTFDLESFVRDWRHFECQTWHLEPTVRLLSWAGKSIEPYGVDYILNKLGFSHARTTIPKWLQRGFMDPLDKVQALMMLQLLLMVRENKVERDSGASGSGKQQQQNHRPPTN

SEQ ID NO: 9862 - DNA, 10357 bp, DROSOPHILA
cattttgtacaatttttatttgtatttcccaagcaaatcatgtggaaacgagcaaacaacgggcagttctttattttccaatattgttcggtgttatcgacaaatcgtataaggaaatatagcacaattattggttgataaaacgcagctagctatatgattcttaaggcactggcctgaactttgttagtactcgaaaagttggggctatgataatggcaaagcccccaagccaagtatcgttggcattctttggggcatttgccttagatctcttggccaaacaataaaatccccctgctcataaatagaaaacaattaggcatttggagacgataaggccaaaaaacgataaaaagccagcaagcatactgtgactcacagcgttttcttggccgtgaaacaaaaaccaagaaattggtagcaattcgctgtgagcggtaattaaagcagccagttgacgatgcgcataatttttgaactttgaaacttttgttccacaaacaaatttatcagatgcaaagcaaatgcttctcaaccagttttctgggacagttgataaacccgatgtggtcaactggcattctgcgatgtcctttgtttatgatggcaagctgaaagctgctgatggctaacacagtatctggctcgttgtcttttcactgcgtacttctagtttttggcaatagcatcctagatacatactactggcttaagtgcactgcaaataaaatcgagttttaatgagctaacttgttaaatcagtattagagtcttagccaagaataaaatgcaatattgcctaatacatgtatttaatcaaatgtaaaatcaaattaagtttgccaacatatcagcgcacttttttttaagtttccttaaccattcgaaatgcgataagataatttgtgggttaaaaacgatatcgaacatttcgagcttatcaatttaaagccaataagtgttatactgacgaagtaaatcgattcgtagaccaatcacaatcgaagcatacataatccgccacaattgcaaccgaacacaacaaatttatagccgcaattaaatccttggccataaatcagggaatatggccggggtaatcaaaatgtgtttaacccacacgcagcgaacgaattgagataaaaaccaagttgacaacgaaattggcgcaaatcaaagatattatttaaacggatacggataccttggtgatccagtgcaatatggcctgctttccacgacttttccacaatcgcagcaaaaacaaattcacgcccgccgaagatgagaacaccgatacgatactcaacacacaagatagtaacgtggtgagttccgctttagtacttagtatttagtattgcacttgtctgataagtcgactgataagttcatcaagtgcttaattgagttaatcggggcggtgagagaataccataaataacaacggaacgaaatagtgaatcaaatcggatcatttcgaccaaagagatacccaatgcaaagagactagtttaataattaaatattatttatttgcttctaaaattagttaatgcattacattaccaattactgcttctgttcaatctatacgttaatccattatatatagaaatgatgatgtggaaaccctgataacgcacttttatggcacctacctacctactttattatatacaataaacaaataagaaataacctaaacccatgatatcacttccatttctgaccgattggaatatccaaatcggagtattattattatctgatgatttcatgtgtacttttatgatcggaaatgaccttgtgctccctgaataaacagggtattgaatcacgatgaaatgtgtttggagcgaaacctagtttttgtcttatcacgaattttgtgtccatgacgttcactttttaactggcttatcttaaaagcggaaaaaatagtacaagcacctgagggaaaaacacgagtggctgatttcccattggcttttgcattggggaaaatagtttcaaagctcattgagaatttgaacagatatacaaggaacgtttttttttataatccagccactttcgcaaaaacactatatacacataaacaaacaaccttttaatgaatgaatgatttagaatggcattcacgagttggtcacatgctacccaactacttgtgctaatacatctttccgaaagtcacttgactatctgcaatcttggcttttcatcaataacaaacattctgcgacgagttggcattaggtatgcaaaaatatgataagcatgcatataaatagatatgctgcggatgctggattcatcgctggaaggatgaagctcatgcataaatccaaggaaccagagcatcttgcagccggagcttcaaatgacgtataaatatgcaggatccgtcggatgcgtagctatctatggaaacatctgtatctgtcgtatttttgtcacaggagcaagaggaggaggagggggaggagaaggtggtggagcactgacatggttctaggctgaaatgaacgtgattgcacgcacaacttacacgtcacagtaattctaaataactgcgaaatgtgtttgggtcctttttacggtggttggtgagaggggggggggggtgaagtgcccccggggaggaattcgtgaaatgacgcagaatttggagccagcgagaagaatccttttaaggcagccagcaaaaaaaaaaaagaaagaagaaaacttcccctgcagagctacgttatcggtgactttatcggttgaaaagcaaaattcggggcttccgtgggaaaacggaaaacctgtcaaaatgccgtcgtttaggtcgattagcatatcaaagctgatccaaccaggcgtctggcaaattgacacgagtttatttatgcccacactaggccacccaaaacacggacttgaatatttcattagaaccgtgccaattaaagataagatggaaatgcttttcagctgagttaagttggcaaacatttcagatacataactccacaaaaagtgacgaaaatagttgcatgcaaaatagtattatattatatctatagaaacaactactctattgtatgataagcactaaaagttgcttgccatagttgtaatgactttcgaaagggtatacttagtattttatgcaactccaacttgaaaagaagctggcatgtttactactctttaggcactttcaattaaaaatgctaaaaagctgcaataaattctaggtagcatttccaaaatagaaatacttaaagcccgtaataaattcaacgaaattatgacttatgtcaggcacaagtcatagctgtctgatctattttcattttcaacatttgttgcgcaacaaaacaaaaccaaaaagcgaacataaaattacttttacgacacatacaagcagcaaccaacccaaccaccagtcgtgtcaaaagttttacatttttgaataggtcacatgtctgaagtcgaaatgaaataatatgtttataaataagaaatggaaactcgtgagatgcgctcaaaagcccagttcatcgccatcgtaagccgatcaatctgacccaattcacgatgaatccctaactgacgtgttgaaaggtcgaaaagtcgcaaggggaacccacaatggacagatttagtgcgcaccatcgagtgtaaaatgcccattatggaaagcataaagaaagaaaatcacaatggaaattggctattatcggcctatttgagggggaggggggcttaagctgacagcccagaagtgggcagttccaaggtagaaaattatgttcagcatcagattgctttttacgtaaaccgatatatgatcaaaaataaacatgacactcacaattgcaagtaaagttggtcagtaggtcagcagagctaatgaaaatttaagcttgagtgcttaacattagccaataaataaattaaaaaatatattacttatattaccaagtttaacaattgtatttcgtttatgtgaagaacgaaaactaactaagatggagctatgcatttaaaattgattataaaactgtattcaaaatattgatattttttaagaattttttaagttgttaaaactgcactcaaaatattgatatttttaaagtattttttaaattgataaaactgcactcaaaatattgatattttcgaagtattttggacagccaaaccaatttttgttagctaatttagcttgtatttgtgccttattaaaataaacagatagccagatgcagttgtattttggagcatttgtcaacgcaatataactatgaatatgtcatgaaaagtaaatattagtgataagtgaggccaatcaaaaggcttttgttgatgatttcaatgtttgcatggaaccaataaagtgttttccaaaaacgtgggtggtttttatatttgtttgtgcataaatgcgttataaataaattcaaattatattttcagcaaattggcaagtacatccgtcgcgaggagaagccactgtactcgcccatcgtcactccgagtgccagtgaggtgagtatcccagaaaccaaaaaccagagcccagagtcctcgcacctgcactttatgtacctgcctccacctgtttattggaactcgactaatatttgcaccatgcttggatgtttcttatactttcaaacgattcaaacggtggtgtacacaataatatcggcacaaaacacttgtaaatatatatatatatatatatataaaccacctcgcacccaacacacgaccacttggcaacaccaacaccaaacttttgcaccgctgtgtttgtcttgtttgactgttttggctgttttgttggatgccatattcgtgcttcaggccaaacttcagcgcctcagacagcaacagcagccgcccggctcaccgcccgcacccgccaggtggaccctgcactcggttgccgaaaatggcagcgcaaacaatggcgtccaggagcggaagttccgcaccaacaaggacaaactgcaggcgcaggatgcatgcccatccggcggcagtgcaattaatgtcatacgctcaagttcgaaattaaaaccagtcaaagagcgacggcccaccgccttgcccaccgaagtgcccagcatcgagatcgaggatgttcgggatgcaaaggacactggagatggcatggattcactgggggagcgggtgcagccgggtgctaatgcacatgtcgatgtcgtcgatggcggcggcaagtcaaaactcaaagtgaatgtgaatggcataattgatgagagcgtcgcccacgacgatgactatgacacaccctcgagcaactccatagccacaacacctgtgaccgagggtcctgtaaagtttttcattggtcacacgcaggaactaagcgcccagcaaacggatgacaccttgtcctgccagagtagcgatgccaacaacaacagtgccgccaaactgacaaatggcgtcgtgccacaggagcaaccggaacgggaaatgggcaagcagcaagcactccaggctccgccccgcgccaagagctccagcaatgtgtcactcaattatctggccaagagccagacggacagccagcgtcgccgacgtgtgtccacgatgcccgatattaacataccgccagcaccgccgttgccgccggaactcctcgtccccggaacgccgctccatctgcgcaagaaacggagcatggagcgacagcagcagcagaagcaacaggagcagcagcagcagcaggagatccagcaggatgctacgaatagtcaagtaagtaatgaggtggcttgccaaatgacatcaccggcaaactggccagaactctgcggttattccggaatagaagtcctcgaggctgtgccacatttatagacttgatgggggggggggggagtggtaaggaggtaggaagtgaccttttccacctacttgatccttgatagatgcaacattttcgtatatatgcattgacttgccatcgaatggatagactgtatggatatactaattaatgacaattattattaaatagacacaaattgaagggaaaagttaattaaagaattatttggcaaagaaagcatgccttaaataactctctcgaccagataataatttaattataataataatttattaaattgccactaaggtgaaaaattcccagttaccttcaattgtagctagttatgcaaactgaaaatcagtaattgcgtttggcattcaaatgcccagaaacttgcattcaccgacattctgtgagtgtgtctaactgtcggaaagctacactccatttactatttgatgcaactttcgtgtgggggattcacacacatacccctgaccttttattgccccaggactcaagtggggaagaatgaaacacgaaacagctggttgcaattgagccgtgcacagcccagccacacttgtgaaaacaagttaaacgttaattgttcaccaacagacacgaatcgcaaactttttggccaccgaaagagccgttcgcttggctttctgggtgctgttccatggacagcctgtggctaataggtgcttagatagctccattccaaaggagtatgttgctccagtgccgcaataacgctgcttaacgtttatattcaggtacttttgtttccagccctccaaacaacttgggtagtgaaccttaaagacaactttctagatattcttattaaagcaaatgccatttcttaggctaacaaaaccttctattaaaacgaaatacaatcgttacactatctaattccttcttttttcgctaatttcacacacaaacaccaaaaggatcaaatggcaggagctgaggagagtcacaagtccagcgattcctcgacaccgaaaacccatcgcgttgaaggtggcctcatctatgtccgtcccaattttcccattcagagcgacattgaaatcgaatctattgcaaaggacgaagggtgagtaacataaccacaacaggatggtgtccaatgccgtattagagacaaacaaataaacaaacaaacaatccgctgattattacccaatgaatccgattcacagcacacgcaatctcatacgaacggccattgagcgcaatgatttcctcaataatctaatggacaaggagcgcaaggagatggttatcaatgcaatggcaccggccagctacaggaagcacagcctcatcattcgtgagcacgaggagggttccgagatatatgtctccgccgagggacagtacgatgtcatccgtggtggccaactggtggccagctttggaccggccactgtgttcggcgagctggccattctctacaatgctccacgccaggcgtccatagagggtaagttctcaagtttggaaaaaccaaaaccaagagcaacaaaaaaaaaaagggatggtttataaatcagagggtcctttttctcagctgccaccgatgcacgcgtttggaaaatcgcacgcgaaaccttccgggccatcatgcaaatctcggggtccagggagcgcgaggagaaccttcagttcctgcgctccgctccattcctgcaggagttcgaccaaagtttgttgctcaaagtcgttgatcttttgcagcgggtaatccattatcatagctatcgttgcaatgccaaccacaaaacttagttgctcctattgtattgcagaaattctacgaaaccgacagctgtatcgttcgcgaaggtgagctgggcaacgagttctacatcatccggtgcggaactgtgaccataaagaagctggacgaacagcagcaggagcagattgtggcgaatcgaaagcgaggtgactacttcggggagcaggcactgctcaatgcggatgtgcgacaggccagtgtctatgcggatgcaccgggcacagaggtcctaatgctggacagagagtgagttcggaacaggataccttgtctcatatacgttacttattactttccttcattttcagagccttcattagctatttgggaaccataaagcagctgcgcgagaagcccagtagtcagcgcaacgatacgagtggtcgttccagcaccaagtctctggagttcgacaacgagtactcccaggtggccatctcggagctaaagaagatagccacgctgggctgcggcgcctttggacgtgtggatctggtggcctacaaccagcaggcgttggctttgaagattatcaagaaaatcgaggtggtcaagcaagatcaaatagagcacgtttacaacgagaagaacgttatgatcaagtgccgccaatcgccatttatagtacagtgcgtcgtaactcaagctcttgactcgcatcgagatataaataaagtaattttgttatattttatttcagactatatcgcacgtaccgcaatgacaaatacgtttacttcctaatggaggcctgcatgggcggtgatgtatggacggtgatgtcaaagcggcagtacttcgatgagaagaccgccaaatttatagcgggctgtgtcgtcgaggcattcgattacttgcactcccatcacttcatctacagggacttgaagccagagaatctgatgctgggcaccgatggctattgcaaactggtattgatatgcataatagtttaaaactaataagtaacatttccaaatgtgcataaaagaatgctttgcattcactactaattatgcgcgcctaagagtatgctataagtataaaaagtacagcgcagcatactttttaacagctttatatggatcttgcaacctttaacgattgaaaagtattaaaactaacacaaatattcattttcttccaggttgattttggatttgccaaatttgtgcggcagaatgagaagaccaacacatttgctggcacaccggagtacgtggcacccgagataatcttggatcgcggacacgatcgtgccgtcgactattgggcactgggaatactggtatatgaacttctggttggcaaaacacccttcaggggcgttaaccagatcaagatctatcagcaaatccttagcggcatcgatgtcatccacatgccatcgcgcattcccaaatccgcacagcacctggtgcggcatctttgcaagcaactgccggcggaaagactgggatatcagcgcaagggaattgcggatattaagcggcatagttggttcgaaagtctcgactggcagagactgaaactgaagcaattgccatcgcccatcaaaagaccattgaagagttggaccgacttgcaatattttggtccttcgggtgttgagaacgactatgagccaccggaggaactgagcggatgggataaagacttttaaaggcttcaagagaagtgcattttctaaagtttcggatattagttagtaggataagagatattgttcctaaaaattggaacacgtaccacacagcagccattacaacctcgttttaattactagcttcgaaaatacttaagtctgtacgccaaattgttacttattctttactagagttgtgttgtaagtttgttagataaactatgatataagtagatagtaaacatgaacaattatatcaaacatttatatgtataaggaccctaaacagaatcctttgacgaattcaagagtatatcttcgtttcagtatttctttttatgcatttgacaacatgtttgccttgaatgtcaaaattgaatgctcggttagctgcgcaaagaggtttatttgtattcgtagtatcaattagaaccacaacatagttttcttttccttcagccaaagcaaacatattcaatttaactgcttcacgactcgactctttgcttgccaaatgaaattcccagaaagttaggatatataaggccactttgtctttaacaggtgaaaactggaggacaaactgtgggcccctcagttggccaacataacttattacgacatccctgtcttgttttgtaacataatactcgttatcatcgccatcaatatcaatgtggctccttttcgttgtcctggatacatcaacagttgtgtgtggtttccatcacgaaaaatgcgcttattgttttccttgtgacctattagagtctttagttctatttaaggaccttttacaaggattgcttatgaaactaactacagtgctatatggatcgaattcaaatacatttgtgttcgaaagccatgtaaatacaattactttcggacacataatgcatagctttctgtacgactaataacctaataggaaaacacttcctttaatcttaatagatcatgtttaatcaatggttacccagaaacttcttttaacaaaatcgattgaaatccggac

SEQ ID NO: 9863 - DNA, 3238 bp, DROSOPHILA
acaatcgaagcatacataatccgccacaattgcaaccgaacacaacaaatttatagccgcaattaaatccttggccataaatcagggaatatggccggggtaatcaaaatgtgtttaacccacacgcagcgaacgaattgagataaaaaccaagttgacaacgaaattggcgcaaatcaaagatattatttaaacggatacggataccttggtgatccagtgcaatatggcctgctttccacgacttttccacaatcgcagcaaaaacaaattcacgcccgccgaagatgagaacaccgatacgatactcaacacacaagatagtaacgtgcaaattggcaagtacatccgtcgcgaggagaagccactgtactcgcccatcgtcactccgagtgccagtgaggccaaacttcagcgcctcagacagcaacagcagccgcccggctcaccgcccgcacccgccaggtggaccctgcactcggttgccgaaaatggcagcgcaaacaatggcgtccaggagcggaagttccgcaccaacaaggacaaactgcaggcgcaggatgcatgcccatccggcggcagtgcaattaatgtcatacgctcaagttcgaaattaaaaccagtcaaagagcgacggcccaccgccttgcccaccgaagtgcccagcatcgagatcgaggatgttcgggatgcaaaggacactggagatggcatggattcactgggggagcgggtgcagccgggtgctaatgcacatgtcgatgtcgtcgatggcggcggcaagtcaaaactcaaagtgaatgtgaatggcataattgatgagagcgtcgcccacgacgatgactatgacacaccctcgagcaactccatagccacaacacctgtgaccgagggtcctgtaaagtttttcattggtcacacgcaggaactaagcgcccagcaaacggatgacaccttgtcctgccagagtagcgatgccaacaacaacagtgccgccaaactgacaaatggcgtcgtgccacaggagcaaccggaacgggaaatgggcaagcagcaagcactccaggctccgccccgcgccaagagctccagcaatgtgtcactcaattatctggccaagagccagacggacagccagcgtcgccgacgtgtgtccacgatgcccgatattaacataccgccagcaccgccgttgccgccggaactcctcgtccccggaacgccgctccatctgcgcaagaaacggagcatggagcgacagcagcagcagaagcaacaggagcagcagcagcagcaggagatccagcaggatgctacgaatagtcaagatcaaatggcaggagctgaggagagtcacaagtccagcgattcctcgacaccgaaaacccatcgcgttgaaggtggcctcatctatgtccgtcccaattttcccattcagagcgacattgaaatcgaatctattgcaaaggacgaaggcacacgcaatctcatacgaacggccattgagcgcaatgatttcctcaataatctaatggacaaggagcgcaaggagatggttatcaatgcaatggcaccggccagctacaggaagcacagcctcatcattcgtgagcacgaggagggttccgagatatatgtctccgccgagggacagtacgatgtcatccgtggtggccaactggtggccagctttggaccggccactgtgttcggcgagctggccattctctacaatgctccacgccaggcgtccatagaggctgccaccgatgcacgcgtttggaaaatcgcacgcgaaaccttccgggccatcatgcaaatctcggggtccagggagcgcgaggagaaccttcagttcctgcgctccgctccattcctgcaggagttcgaccaaagtttgttgctcaaagtcgttgatcttttgcagcggaaattctacgaaaccgacagctgtatcgttcgcgaaggtgagctgggcaacgagttctacatcatccggtgcggaactgtgaccataaagaagctggacgaacagcagcaggagcagattgtggcgaatcgaaagcgaggtgactacttcggggagcaggcactgctcaatgcggatgtgcgacaggccagtgtctatgcggatgcaccgggcacagaggtcctaatgctggacagagaagccttcattagctatttgggaaccataaagcagctgcgcgagaagcccagtagtcagcgcaacgatacgagtggtcgttccagcaccaagtctctggagttcgacaacgagtactcccaggtggccatctcggagctaaagaagatagccacgctgggctgcggcgcctttggacgtgtggatctggtggcctacaaccagcaggcgttggctttgaagattatcaagaaaatcgaggtggtcaagcaagatcaaatagagcacgtttacaacgagaagaacgttatgatcaagtgccgccaatcgccatttatagtacaactatatcgcacgtaccgcaatgacaaatacgtttacttcctaatggaggcctgcatgggcggtgatgtatggacggtgatgtcaaagcggcagtacttcgatgagaagaccgccaaatttatagcgggctgtgtcgtcgaggcattcgattacttgcactcccatcacttcatctacagggacttgaagccagagaatctgatgctgggcaccgatggctattgcaaactggttgattttggatttgccaaatttgtgcggcagaatgagaagaccaacacatttgctggcacaccggagtacgtggcacccgagataatcttggatcgcggacacgatcgtgccgtcgactattgggcactgggaatactggtatatgaacttctggttggcaaaacacccttcaggggcgttaaccagatcaagatctatcagcaaatccttagcggcatcgatgtcatccacatgccatcgcgcattcccaaatccgcacagcacctggtgcggcatctttgcaagcaactgccggcggaaagactgggatatcagcgcaagggaattgcggatattaagcggcatagttggttcgaaagtctcgactggcagagactgaaactgaagcaattgccatcgcccatcaaaagaccattgaagagttggaccgacttgcaatattttggtccttcgggtgttgagaacgactatgagccaccggaggaactgagcggatgggataaagacttttaa

SEQ ID NO: 9864 - protein, 1003 aa, DROSOPHILA
MACFPRLFHNRSKNKFTPAEDENTDTILNTQDSNVQIGKYIRREEKPLYSPIVTPSASEAKLQRLRQQQQPPGSPPAPARWTLHSVAENGSANNGVQERKFRTNKDKLQAQDACPSGGSAINVIRSSSKLKPVKERRPTALPTEVPSIEIEDVRDAKDTGDGMDSLGERVQPGANAHVDVVDGGGKSKLKVNVNGIIDESVAHDDDYDTPSSNSIATTPVTEGPVKFFIGHTQELSAQQTDDTLSCQSSDANNNSAAKLTNGVVPQEQPEREMGKQQALQAPPRAKSSSNVSLNYLAKSQTDSQRRRRVSTMPDINIPPAPPLPPELLVPGTPLHLRKKRSMERQQQQKQQEQQQQQEIQQDATNSQDQMAGAEESHKSSDSSTPKTHRVEGGLIYVRPNFPIQSDIEIESIAKDEGTRNLIRTAIERNDFLNNLMDKERKEMVINAMAPASYRKHSLIIREHEEGSEIYVSAEGQYDVIRGGQLVASFGPATVFGELAILYNAPRQASIEAATDARVWKIARETFRAIMQISGSREREENLQFLRSAPFLQEFDQSLLLKVVDLLQRKFYETDSCIVREGELGNEFYIIRCGTVTIKKLDEQQQEQIVANRKRGDYFGEQALLNADVRQASVYADAPGTEVLMLDREAFISYLGTIKQLREKPSSQRNDTSGRSSTKSLEFDNEYSQVAISELKKIATLGCGAFGRVDLVAYNQQALALKIIKKIEVVKQDQIEHVYNEKNVMIKCRQSPFIVQLYRTYRNDKYVYFLMEACMGGDVWTVMSKRQYFDEKTAKFIAGCVVEAFDYLHSHHFIYRDLKPENLMLGTDGYCKLVDFGFAKFVRQNEKTNTFAGTPEYVAPEIILDRGHDRAVDYWALGILVYELLVGKTPFRGVNQIKIYQQILSGIDVIHMPSRIPKSAQHLVRHLCKQLPAERLGYQRKGIADIKRHSWFESLDWQRLKLKQLPSPIKRPLKSWTDLQYFGPSGVENDYEPPEELSGWDKDF

SEQ ID NO: 9865 - DNA, 4548 bp, DROSOPHILA
aatagtaatagtaaatctaaagattataataaaaaaatgtattaaactttgactctattcagcatttgaaaaagtgatgaagcatacaatcttaaaaataaaagtacatcttataagagtaccttacaaatcttatttcatttaaaatcgtaaattaatccaaatcacttaatgtttttaaaaaacattttaaaataaatattgatggaaatttagctttaaaatttttttcagtgcagatgtattattgttcctctcttcgaattttttggggtgggtaatacgcccattgtacgcctgtgcttgtgagtatgcctccccctatggggccgagcagtacggatgcgggagagctccagctgagagcgttagttcccgatcacagtgggcacgatcaccatgtcacatggcgatcatctgctgcgcactcgcagttgccagggatttcgatggatttgccacacaagtcttattggtaagctattgtttatgctagtgttttggacttactcgtctatgcttttggacagtgcctcggctagtttgcgcaggacccttctgtcgatttcggcggcgccattctcctccaggaaactggtcacggtctcaattaaggtgatttccttcaaggacgatgcacaggtaccattgccgtcgccgcaatagtcccgcaaaacctgtttagactggtccatgggaggtcctcaaatagttaactttcgcacacaataattctaacacttgacaatttcacaaaggacgctaacaattacactttttttctgtttggaaaatgaagcgcgctggaacagctgtttctggcgtcagttatcgaaatgctgccatgcgcactggcagcactgccgtacaacgggaaaaagttaacacagcggtatggcaacgctgttcgtcgatttacgttactgcaaagtcgattcttatcgatggtaaacaacatcgacggtttacgaaaattagcattcgcctgataagcaagtagaacactacggccaccagatataacgccatgctataaacgctctgtgggcacgttttcgtcagccccagccacaagcaggccaacttcagtcgggggcagtacacatacagaaaatagagcagcgcaacagagaaaaagctcccccctcgaaaaacctaacaatgtttgctacactgaaaaacaagatcaaggaggaaactggcgatgatgtggtccaatcagccaatcaacgttatcccggcaacaacaacaacaattaccggctacgtagtcgccgcgttagcattaattccaactcagctgatgatgtgggcggtggcggattctacaatgaggtaaactgagcgaaaaaaaaacagtctatttgtgtatacttacacattaaacaaaaacacggataaacaaacaccttcactcttttcgcagtcggagcaattgtgcgagctgcgaagtcagtgcaacgagctcaccacgaagctgtccaccgtcacgcagggattgcagcagctgcaggaggagaagacgcgcgtggacaagaccaacgagattctgctagagagtgtgcgtgtggcccagacgcagaaggacatatactgcgaggagcaggagaagattcagaatctacagcaaatcgagattgacaagctgaagaatctgcttagctttcgggagcaggagtcggtggatcgcatgggtctcatgcgccagcagacccagcaaatcgagtccttgagcgaggaactagaacgtctgcgtcccattgaatccgtggccgaagatttacgcgacgaactagagcaactgcgacattctacacagcaggagaagaatctgctgaccacaacactggcggctgtacaggaggagaaccggcacctcaaaaagcgcatgaaaatcgtcgaggagtcgcgactcgagtctctgggcaaactgaactccgagcaacaagtgcaagcccttatccgggaacataaactgctggaacagcacttagaggaggcccatctgcagttgtcggacatcaaaggctcgtggagtggccagaatctggcgctggaaacccaagttagtcgtctatccaagcaagtggccgaagagaccaccgaaaagcgaaaggcccttaaatcccgcgacgatgccattgaaagccgcaagcaggtatcattcgaactcgaaaaagccaaagatgaaataaagcagcgggacgataaggtaggttagatagtaatacctatgtgccaatacttatgcactttaattgcaggtcaagctgctggaggaggaaatcgatgaacttagtgtggccctgaaagagtgccgagaggagaacgagcagcaagtcctctttgagcgcaataaatctgtgagtatgcctcccgattctgacgatttccattgggacttgtaacactaatttaaccaacaatgcagtactaactctaccaattaagctcctggtttacttggaattttccaaccacacctattatgtagtttttgattgtaaatgttttccttttcgtattaaactgatttaatcgttggcaaactttttggtaaactttttccttcaataatgcacgcatatatatgtttaccctcaatatccaaaactgattgatggagattttgtaaaccaataaaccgaatgttctcagcaaaatttggaaacagaggtaaaagatctcaagactcgtctcacggcagcggatgacaggttcagcgagtactcctcgaatgccgagcaggtggcccaaaagctacgggttcaggtgactgaaaagcaggagcagctggacgaaaccataatgcaactggaaatcgaacgagaggagaaaatgactgcaatacttcgcaatgcggaaatcgcccagagcgaagacattttacggcaacagctgcgcttggagcgcagcgaagccagcgacctccaggagaggaataatcagctggtgagggatatatccgaggcacggcaaacgttgcagcaggtcagcagcacagcacaggataatgccgacaagttgaccgaattcgagcgagttcagttggaaataatcgaaaagaataaggttagatttgttatgaatggttttggcaaattttattaaccaattttctgtctagacaataaaaacactgaatcagcgtttgattgacttgaaaaaaacagtgcagaaggaactacgcagtgcgcagatatccacggacagtgaatctcatccgacaacgacaccaggtcacagaatctcaagttcatcgctggaggcattttcaactggcgacaagggaaattgcgtcataatggacgaagttaattttcaatatttgaaacacgtaattgttaagttcttgaccagtcgcgaggtatgcaatttcatctgtttcctgtataattaattcgatttcatgtttgtttctttaggtggaagctcgccatcttgttcgtgccgtatccacattacttcaattgacaaccgaggaggaaaagctgctacacgacacattgaattggaagatgagttggtttggcatgaaaccaacttaagtagccacagcaatacatcacatttgtactctaatctatagtcaattcataacgttcgtgtaatatgtacataccaattgcatacgcagcactgtgttattttgtttaccaacaacattccattttgttgaatagtatttatttctaccgttgtgatttttataataaactaacatttatgtaaaatgccgtttttcatttagtaaatcttagtcatccgtgcatttgtcttgaaggaaagaaagactattcaactatttgaaagactattcaaatccatatcattttttataaaatcgaatttaccatcgttaggtagaatgtgtgtataatacatacattttactttacacgatattaacttccactctacattacctggtggcgccatctaggagtcccggttagacaattaaaaaaccattaataaaagtcaatatttaatttttaaaaatactgcattttacaattaaaaatattgtttgttacattttacgttcactaaaattaactataaatatgaatttacttcaatttgtttattgcaaagacctacgtcgtatgaataactaactattcatttgtattatctatgaataaatgatataggaggattaaagattaaacaaaaaacacacgtattaatgaggcactttttggtgtttataacaattaagaagacagttcaattagtcgcatattcgtcaatattgcttcataatatagttatctatttacactttttaaactaaatattaaactaagtctaggcgttaaatgcatttaaatcaaaattgcgtacttaggttttaaccaattgtgaattttctgtcaggtttcggaaaatttggcacacggaatttcaaaagactgtctcacctatcgaatattacatcatttatacctaaggtaattgctaataatctgcagtctattgttgcgtatggtagctgcaaagcattgtactgcaatctatttcgggctatctggcaaaatgaaa

SEQ ID NO: 9866 - DNA, 1997 bp, DROSOPHILA
aacactacggccaccagatataacgccatgctataaacgctctgtgggcacgttttcgtcagccccagccacaagcaggccaacttcagtcgggggcagtacacatacagaaaatagagcagcgcaacagagaaaaagctcccccctcgaaaaacctaacaatgtttgctacactgaaaaacaagatcaaggaggaaactggcgatgatgtggtccaatcagccaatcaacgttatcccggcaacaacaacaacaattaccggctacgtagtcgccgcgttagcattaattccaactcagctgatgatgtgggcggtggcggattctacaatgagtcggagcaattgtgcgagctgcgaagtcagtgcaacgagctcaccacgaagctgtccaccgtcacgcagggattgcagcagctgcaggaggagaagacgcgcgtggacaagaccaacgagattctgctagagagtgtgcgtgtggcccagacgcagaaggacatatactgcgaggagcaggagaagattcagaatctacagcaaatcgagattgacaagctgaagaatctgcttagctttcgggagcaggagtcggtggatcgcatgggtctcatgcgccagcagacccagcaaatcgagtccttgagcgaggaactagaacgtctgcgtcccattgaatccgtggccgaagatttacgcgacgaactagagcaactgcgacattctacacagcaggagaagaatctgctgaccacaacactggcggctgtacaggaggagaaccggcacctcaaaaagcgcatgaaaatcgtcgaggagtcgcgactcgagtctctgggcaaactgaactccgagcaacaagtgcaagcccttatccgggaacataaactgctggaacagcacttagaggaggcccatctgcagttgtcggacatcaaaggctcgtggagtggccagaatctggcgctggaaacccaagttagtcgtctatccaagcaagtggccgaagagaccaccgaaaagcgaaaggcccttaaatcccgcgacgatgccattgaaagccgcaagcaggtatcattcgaactcgaaaaagccaaagatgaaataaagcagcgggacgataaggtcaagctgctggaggaggaaatcgatgaacttagtgtggccctgaaagagtgccgagaggagaacgagcagcaagtcctctttgagcgcaataaatctcaaaatttggaaacagaggtaaaagatctcaagactcgtctcacggcagcggatgacaggttcagcgagtactcctcgaatgccgagcaggtggcccaaaagctacgggttcaggtgactgaaaagcaggagcagctggacgaaaccataatgcaactggaaatcgaacgagaggagaaaatgactgcaatacttcgcaatgcggaaatcgcccagagcgaagacattttacggcaacagctgcgcttggagcgcagcgaagccagcgacctccaggagaggaataatcagctggtgagggatatatccgaggcacggcaaacgttgcagcaggtcagcagcacagcacaggataatgccgacaagttgaccgaattcgagcgagttcagttggaaataatcgaaaagaataagacaataaaaacactgaatcagcgtttgattgacttgaaaaaaacagtgcagaaggaactacgcagtgcgcagatatccacggacagtgaatctcatccgacaacgacaccaggtcacagaatctcaagttcatcgctggaggcattttcaactggcgacaagggaaattgcgtcataatggacgaagttaattttcaatatttgaaacacgtaattgttaagttcttgaccagtcgcgaggtggaagctcgccatcttgttcgtgccgtatccacattacttcaattgacaaccgaggaggaaaagctgctacacgacacattgaattggaagatgagttggtttggcatgaaaccaacttaa

SEQ ID NO: 9867 - protein, 611 aa, DROSOPHILA
MFATLKNKIKEETGDDVVQSANQRYPGNNNNNYRLRSRRVSINSNSADDVGGGGFYNESEQLCELRSQCNELTTKLSTVTQGLQQLQEEKTRVDKTNEILLESVRVAQTQKDIYCEEQEKIQNLQQIEIDKLKNLLSFREQESVDRMGLMRQQTQQIESLSEELERLRPIESVAEDLRDELEQLRHSTQQEKNLLTTTLAAVQEENRHLKKRMKIVEESRLESLGKLNSEQQVQALIREHKLLEQHLEEAHLQLSDIKGSWSGQNLALETQVSRLSKQVAEETTEKRKALKSRDDAIESRKQVSFELEKAKDEIKQRDDKVKLLEEEIDELSVALKECREENEQQVLFERNKSQNLETEVKDLKTRLTAADDRFSEYSSNAEQVAQKLRVQVTEKQEQLDETIMQLEIEREEKMTAILRNAEIAQSEDILRQQLRLERSEASDLQERNNQLVRDISEARQTLQQVSSTAQDNADKLTEFERVQLEIIEKNKTIKTLNQRLIDLKKTVQKELRSAQISTDSESHPTTTPGHRISSSSLEAFSTGDKGNCVIMDEVNFQYLKHVIVKFLTSREVEARHLVRAVSTLLQLTTEEEKLLHDTLNWKMSWFGMKPT

SEQ ID NO: 9868 - DNA, 4349 bp, DROSOPHILA
aaccaaggaaccaaagaaccttttttatattcgttcgttggaccctgctatacatttcaaggttgtcttggcatctgctgctgcttttgttgctgctggcacataccacacacatatatatatatatatatacatatatggccacacatatgtacacctcgttctgtgtgtgcttctttcattaccaacttttagcagagcaacaacaacgcacaacaacatcagtcaacagaacttcaaacgaagtcagtcgtctgcgcatgcgcaaagtcgcagctcaaaatgaagatgaagatgaggatgaggacgaagctgggaatggagaccacgaacggagcagcaggtgggcagggatgggggttcttcgacaggggccccttttggatcttttggttaaaagtcgcaactccatcttcatccaattgttgggcgaacgacaccgacacacataaaacttgatgtgatgcgtctgcgtctcggaatcctctttaaattaagaaagatgatttgcagatttgaatgcagacgcggacatggggcagcatgatgtaagcccaccgagaaatttttatttatttattcctcggcggccgctggctttcttggagcgagtgcaataaaattccatggcacacactttagttttttttcttcagttttcagtttttagagcctaagcagttaatttacgattattggctttcatcttcgtttcgaccaagccaaaataaatcccattgacttgtttatgatttgcgctttggccatggtcagttcgagccgttatgagatatttctgggatatggggattaaattctattattgaagagttttacgatcgattgcacatgggatctctttgaaagaacttaggtgccttaaaagatcgtatttaatcgctacaaatattgtctactcatgtttccaagcaatctgaaacattaatcccctattgtcccttaataatatccatcatcttatttacttattacgtttattaatcaagagtttccttttttttgtggtggttgtcatacaattaaagcatacaatacatatatatttatatatagattaatgtcttagctcctttaatctctcgctgcatttcagcgcggtcatccattggcatcgaggtcctcagagagaagcgtcattttcggacatgtccggccggctctcgaaaatggccattcctcagtggaacccggatgcccggctggataacacctcgacccaaacacacacacaacttaggctagtggcattcgtgggaaaggagatgcctagttattggccgccattggcttgccgaggacacgcatggcattggagtagtccgaatcgatctgcggaatgatctgctgttcgttgggccgcagggtgcgtatcagatcgttgagtgacagggaggattggggggtcagctcctccttgggctgcagctcctgggagctggccattttctggaagtcctgggcgatctgcttgatgcgctcctcgatggcggcggctggggattcagtggagctgggcatcgccaatggttcgttggccttgataagatccaccggcgtctcattttccaagtcagtctcgccctcagctccatcctgctcgtgctctccatccgcctccgcatcgtgttgcgagctctcgttatcctcagccgccgcgggagctggtgccgagtccgcatccgcatcctcctgctgcaactgctgctgtacctcttcgatcgaatgcacctcggggtggagttcgttgtcgctcagtgggaatacgtgctccttgatatcgccatcgttgtcgttgctcagctcacgggcatgctcctcgaagttgtcgtgctcgtcatgctcctcttcgccctcggcctcatggtcatcgtgctcctcgccatccaaatccgcttcctgatcctccacatccacgtcagtggaatccgtatcgggcagcgagcgatcatggttcagcttaaaggacataaacgagggttgctgctgggagctggaatcatcgatcagtcggtggccaacggctggcgaagatttggccttggcagcggtgtacattgctccactggtggacatcagcaggggcaagggtgtggtggtggcggccacatgcaggttcatcagggaggcaggagtccttggggtggtggaggtgatgggacgtctagacggcgcacaatggacatggagaaataacaaaagggaatttagtttttctatctctgattcctgggcggttcgtgggctgggttagtgcgaaagttgcttagcctaaagttagttagttgagcacaattcatcatgacaacatcaacaacaacgacagcaacgagagcgatacaacaactaaggaagctaagccccaaaccaccaaacaagatacattttcggcgctcatatgggatgatatgactcgcaaaagtgtgtgcaatcgaaattgttttgaaaataggaattaggatagatcctaactaggagtcctgcatttaaagttttgaaagttttagcttgtttcgaaactttaaaagtatctttttaatacaagtttttggatcggtatctaaaataaagtatctaaagtgaagtatctaaaaaaataaagtcaatgattgcacaaactttcgcgattgtaaaccaacccattggcgtctacaaggcagtgttcttcttgtcgtttttttcggatcatataattttcaatcaggatcgaatggcttttttgggctaaccaacttttcggtttcggcccatagaactttgagtggcgttagtaagaagtcgcattagtctttagatgtacatatgcatatagattgtgtgtgtagttatggtagattggtaacgatttggggtttagctcacctatttgttcgttctttttgcaaattctgttttgggaatcgaaatcggattcgcactttgtcaatgtgtgtgtgtgtgtctaagtgtaagtgtgtgtgtgtgttcgtttatggtcaactaaagtaacttgtttttaatcacgttatccttgcgtaatctcttgatctgggttgggtttttagtatcaacatttatctggtataaatatgttttcgtttgtctttacttaattagggacatttgtttaagcgccaccggcgggcagctcgtatagcgaattaattaacgttaattatagcataatttgtttattgcattattatcattattcttagttcctcctccaatcagtgctcttaatatctgttcgatttgcgtgtggttgtgtagagtggtggagttatgtggagtggctccgcggtcaagtgtccttacccctgcgccgacgagacggggatgctgccgtagttgtagtagtagcagcgggtctgctcacaaatgaagtccttcacggccgagcagtcctcgggcatccacttgagcgtgggctgcttcaggatcacgcatcccttctcggcgccactgctgctgtagattggatcggtgaaacagaaaggatatcgatgtagatggtcatagtcaagggagtacagggcacagaagaaagaagtaatcacttatttttttctctgcatcagggagctacatcctatatgatagtttgtcatccttacctgtcgcgagcggtgcgctggggtgaggtgttgctattatgatcgacgggatcgagcagaccggcctggatggcgtccgccgagttttcgaagaaatcaaaagtggcgttaaacggcagaccagtgctcatccataggaacatgcccgtgcccaggcgattgccggaggtccagaaatcgtagttgccgtaaccggcattcttcagatacgtggtcatcgactcggccttctccttcgtctcaaaggaggccagttgcaggcccagggagcgacagtactggtaggccaggaagtagttgagctccggggagtagggattcattcggctgatgaagtactgcactccatccaggtggattgtcgtaatgcgttgacctatagaatatgaaggtaacatggtttatgattcaagatacttttaatttagatcttcaatagtattatagacatctgtaaataccaaaggcctggtcatatgatggtaccacaagtggattagaccttaggttaatgaacctacccatatctgcggattccagacgcaattggaatcgcaatgcgtaaccgaaacagcgaaaacggtaacggtttcaactgcggacatagcattcgtaatcacagaaacatcattaaataggattaccaaaaaaagtggctagccatcgttgggccgccagtccataaaaacgaagaacaaaacgaagaactttggagccccaaatcggacgcatgat

SEQ ID NO: 9869 - DNA, 1651 bp, DROSOPHILA
actacggcagcatccccgtctcgtcggcgcaggggtaaggacacttgaccgcggagccactccacataactccaccactctacacaaccacacgcaaatcgaacagatattaagagcactgattggaggaggaactaagaataatgataataatgcaataaacaaattatgctataattaacgttaattaattcgctatacgagctgcccgccggtggcgcttaaacaaatgtccctaattaagtaaagacaaacgaaaacatatttataccagataaatgttgatactaaaaacccaacccagatcaagagattacgcaaggataacgtgattaaaaacaagttactttagttgaccataaacgaacacacacacacacttacacttagacacacacacacacattgacaaagtgcgaatccgatttcgattcccaaaacagaatttgcaaaaagaacgaacaaatagacgtcccatcacctccaccaccccaaggactcctgcctccctgatgaacctgcatgtggccgccaccaccacacccttgcccctgctgatgtccaccagtggagcaatgtacaccgctgccaaggccaaatcttcgccagccgttggccaccgactgatcgatgattccagctcccagcagcaaccctcgtttatgtcctttaagctgaaccatgatcgctcgctgcccgatacggattccactgacgtggatgtggaggatcaggaagcggatttggatggcgaggagcacgatgaccatgaggccgagggcgaagaggagcatgacgagcacgacaacttcgaggagcatgcccgtgagctgagcaacgacaacgatggcgatatcaaggagcacgtattcccactgagcgacaacgaactccaccccgaggtgcattcgatcgaagaggtacagcagcagttgcagcaggaggatgcggatgcggactcggcaccagctcccgcggcggctgaggataacgagagctcgcaacacgatgcggaggcggatggagagcacgagcaggatggagctgagggcgagactgacttggaaaatgagacgccggtggatcttatcaaggccaacgaaccattggcgatgcccagctccactgaatccccagccgccgccatcgaggagcgcatcaagcagatcgcccaggacttccagaaaatggccagctcccaggagctgcagcccaaggaggagctgaccccccaatcctccctgtcactcaacgatctgatacgcaccctgcggcccaacgaacagcagatcattccgcagatcgattcggactactccaatgccatgcgtgtcctcggcaagccaatggcggccaataactaggcatctcctttcccacgaatgccactagcctaagttgtgtgtgtgtttgggtcgaggtgttatccagccgggcatccgggttccactgaggaatggccattttcgagagccggccggacatgtccgaaaatgacgcttctctctgaggacctcgatgccaatggatgaccgcgctgaaatgcagcgagagattaaaggagctaagacattaatctatatataaatatatatgtattgtatgctttaattgtatgacaaccaccacaaaaaaaaggaaactcttgatt

SEQ ID NO: 9870 - protein, 283 aa, DROSOPHILA
MNLHVAATTTPLPLLMSTSGAMYTAAKAKSSPAVGHRLIDDSSSQQQPSFMSFKLNHDRSLPDTDSTDVDVEDQEADLDGEEHDDHEAEGEEEHDEHDNFEEHARELSNDNDGDIKEHVFPLSDNELHPEVHSIEEVQQQLQQEDADADSAPAPAAAEDNESSQHDAEADGEHEQDGAEGETDLENETPVDLIKANEPLAMPSSTESPAAAIEERIKQIAQDFQKMASSQELQPKEELTPQSSLSLNDLIRTLRPNEQQIIPQIDSDYSNAMRVLGKPMAANN

SEQ ID NO: 9871 - DNA, 6426 bp, DROSOPHILA
tgacctgatacggcagtagatggcctgaggattggggacgagctgctgcacctgctgctgcagttggcgccacggggatgtcgatgcaatgctgcttgatatgctggccacgtactcgctcagccagttaaatctcatcgctcattgcgtccggccaagggcaagatttttggcgagaaattcttcaccaaaaatggacatgcagcgcaatttggcagcgaggaaaagcggaaaagcggcgataacggtgctcgggcggttacttaaactatttcactaagtggatgtgtttcttaatcggtagtttaatacttcaaaacgtttggttacgagcccgcgcgccgcctaatcggctaatctctgcattttattcgaaaactttacgcgttttcgactttcgggggcagcagctagagatgggcaactggcgtggtgcgtggcaggtgcgtgactcacgctgactcattcacgatttctaatcaacctgtccggtgcgccgtgcaactacaaagcttaaattatctaattggcactcgaataaattgataaactcttttctgccattcatcgttcgctggcaagctaccattcgtgagaatatatcagtccatctctatcgctcagctgttggacaaagtgcccagcggtaggggtactcttgtcactgtttttataaaatcttaagttttttttgaaaacttaatctgaaatataaagaattacagttatgaacatttctactttttgaagaatatcaatactttgttgatcatagataataacaaaattactaaaaactactattagaaattcacttttgtacaagacatattctaaccttaaaattctaagcagaatgattgaatggaattttaaaagtttcccaataagagtatcttgatggcttaaatttgtgatttgagcgaagacccctaatgtcggcatgctcttctcgaaaaataccagaaaatactggagaaaatacaggggccgctctcttctcaccgaatatgcagtctgaggttttttttattttgaataaaatttaaagtcactagtttctatgaaaataagcacataattagcctacgaccgtgtgattcgagtgcccgagagccagccgcccgtccccgaccgcccaaacaccgagggcaacccaaggagagcccccaaacgattgcaggaaattaatcaacggcagacgacagcgtgccgcaaaacccaaaagagagcgagtctcagttcgaggtgcatgcagcacgttgtaattaggttagcagcatacagcagcaccacataacacgataacatggcacagcagcagggcatggactcggccctgttcgagcggcgactgcggccggtatacggtgagtgtgttgtccgtgtccacggcggaatgaggcgctccatgtgccgggtccacagtctcacagactaacatcccaatcctttgcagacaacctggaggtgggcaacaatcgcaaggctctgcaggaatccgagaagttgctacgcaaacatcccaacctgctctgcgcgcgggcattgaaaggcctctcgctcctgcgactgggacgctatgacgaaagccacggatgcctccagaccgttgccgaggagaagcccacggacgactccacgctgcaggtgctgtccttctgctaccgcgaaatggaacaacgtacgtatgggtaaaccaccggcagggctgatgtactgagcccacgtggagccaccgtttgctggggattaggttcagtcaaatgcaagattgataacgtactaagcatggtctaggaggtacattacctcaagtagaagttatttaggagtatgatataaccaactagccataaactcttaaagcacgaacctagtctctcgttctaacgcgatgaagaagggcaccagccatcagaaataactaatttgttcacaagtagctcctgataggctataaattattagtttcatttatgaatttgacttgtgaagcacacttttaagttatgaagaaccttttgtaagttaatatccaattttaaatctaaaaacgaaatgcctgtgtgaggcaaggactcattgtatgtatagataataattaaggatttagatttctcctttcaaatgtgtaaaggttacaggcattctagaattgaaattttataaaaagaatagcttccttatccatgagttaaatgcttgtatatgtatgtatatgtatatacaaaatattttaaagtatagatttaaagataatattaatatttacttaagttatttaaatacgaaaccatggtcgatcaaaggatacaatttgttgagcttttttaaattcgattgacgaatacaaagcaacatttttaagtaagaatgtttcttagccacatctgtgaatcccctagagacgcccctgctacgcacacgaagtggccacaattcatattttcgtattttcttggcacgcgcacctcgcccgactaattaaaatcgcattctcttagtcggacgacgagtggcaagtgcgtgccaacgatctgaatatatagatacctgtacctgcgaaagttgaaatcgctaataatatataaatatcggcctctttgcagtggacaaaattgtggagctgtaccagcacgctgtgaagcagaatccgggcaacgaggagctcctcgcccacctcttcatctcacatgtgagggtggaggactacaaggcgcagcaggcggtggccctgcagctgtacaaggcgcagccgaaaaatgcctactacttttggtcggtgatcagcgtagtcttccagggaatccgtggaccggaatcggcgctgcccgagaagcggaaaatctacttgggactggcgcaacgcatggtcgacaagcacatcaaggagggcaaaatggagacggaacaggaggccttcctctatctgcacatacttaagctacaaaacaagtaccaggaggcgtgggaattccttactggtgagctgtgcgcgaagctgtaccccggtgctccagtcagcatgaagttcgagctgctcaaggagctgggaaactggcgggaattgaatgagctgctgcagcagctgctggacgcagagtgagcttaaacaataagttcatatgtataactacgttttctaagttttattttttatccccaagtcgtgatcgttgggacttctacaaggagtatatccaaagctcgttcgagctgctaaaacttacgccgcagggcgtggagaacggggataaggactctctggccaggtgtcaggagttccttcagcgcatcattgactcctcggagcgcaagaaaaggggaccctatctggcgcggttggagctacaccaacgcatgcgagcggagcaattgccggcggaaaaactaatcggtgactttgacgagatggtcattgagtacttccgtctgttcggcgacaaatcgtgctgcactcacgatatcgccttgttcttgccttcgatcagcatgaaccagaggcaagcgctagccagcaagttgttgttggagagcggagtaacctccacgtcgcttccaaaaaatgtaagtacgcaaaaattataaattcaactttgagtctaacgattgttggtatatgattattgtagaaagagcagttgcaaaaacatctttgcgctctgcaaatctctcgaatgtgcggatcccacatggatctgcctgcggaccacctgcttgccttctatacggcgctcaagctgcactacgagcacggcaggactactttcggtaagaagttgctggctacggaaatgggaccatcggatgcatacgcactgctggcggcaaatgtaatgtacgatctgagtaggcgggaaaataagtcggatcacctgttcgaggcgctgtgcctgctgcagtatgttctgcgaaacagtacgagtaacttccacgtgaaactgctaagtctaaagatctaccatctgtttggctgccaagtgggcgcacaggagatgtatgagtatctggacattaagcagattcagctggactccatgggctatgtgcactgccaactgttggctcttggaggtcgcttctcgggcaatcgtaacgtgtacgatgccaccctaaagttttttacgaacagctataaggaaaggctggaatacattgcgttaacatatcgcttttgcacgttttcaaaaatggaggagttcatgaacttcaaggagcggttaaccaacagcttgcagtacgtggcctgctcggtggaggcgcagatctgtgacttggttagttgctatggcaatatcacgcagaatctatccgcatatgtggcgatgagtattgagccggcggaggaccggatcgcttggcatgagttgagcgacaatcgcgacttaggggccattatccgatgggatccgctacatgaggtagacgctgcggaggagcgcagggagtcgttcgaccaggaagttgaggtgcttcaagtacgttcgctgatgcttcgactctttgcctctttcatcgacttgtaccacggcgcgggcttaaaggattcgccagcgggagcagagacggccaccttggagctcctgcgggagtcctggacgggattattccagagattgcgcgtgatgaactacaagccgttggcgcaaaaatttctagtcaatctgctgcccacacgtcttcacctgctgctcgacatgccatacgaacgtttctttgacgaccttgcccagttggtccttgacttgcagagcgggtcggcaaagctggccgagcagtgcaagcgggtgggtgacaatgttattgcgactatggagctgtgcgtgcagaccatcaacgagagcaacgaaagcaacggcattgacggtctgtggaagcggcgaggtcagcagcagaaagtggcagccagtttagaggtaaaatgttggtagtaaaagcaggtaatcttaaattcaccaatgttcttataacttttccagatgctatcgctgtacgccttccttctgtccgtgttgaacgacaagctgcaggtaagctcaaagaccaagaccaagaagaagccggtggaaaacaaggtggatggaccgcagccgatcagcgagaaggagcgcagccagatgttgcaggagctgatgcgacagctgaagcacaagtttgaggcctgcgacacggccatacgtaagtggctctagacaaatcgcccaaagataaactaaggtatgattctgcaatccttaggctcctggaaggcgcccgttttgccacgcgacctcagctcctttatgtctgacatgtcgctgaagccggaggtggaagccacgctcatcggcgacgtttcggccacctttaaggactcgcacgagctgatggtcaccgagctgcgcaatctgctgaaggacaagatacgcatggtggccaagtagatgcttctttgctgtgcaaaggccatcagccagccagtccggtcatcgttgcccccacacaatccaagttcatagtttgttatttaattttgttaacggatacaaccgacctcataatcctcctacactacaattatctcgaacaccagcgccaagtcagcacttatcaatcacttttcggcatttccctcgtacaacacataaaagttgtaaaattttgtaaaacaaaaattagaaaagaacaaaacaaagaaaaaagattgcgtaccgctttgcaagtaagtcaagtaaaagaataaattgtaaaaatgtaaacagtttgtttttttttttagaatgctttttagttagtttcatgaaatctttctagcaaactttatataacaaaggtcgtatatacaaagttttaggctttaagcaaaggtaaaatgtcgcgatcttataaatattatattattaagcattagctacagtaatccccactttaaaggtacttagataggcagtcagtcgtggatcatttatatgctgttgcgtttgcagatgcgccacgagattgtgaatgcgagcgaagcttttgttgcagagttggcatctgaagtaataatagcaacgtgataagttttaggtttgatttagtttaaaaccgaaaccacttacatgtggggtttttcgcccgtgtgcgtcttgtagtgcattttaaggacactggcatatgtgaacttctttccgcaggtcttgcaggcataaggacgctcatttcgatgggttctgtggaggaaatacaattaattagctagtctctacttgtagttaattaatagaggttccaaaagatacagaaatgtttttactggaataattatgtattctttgcttacctttcatgcttaactagggaagtgcgatccgcgaagttgcgttggcaatattggcaggtatatggtttagctcccgtgtgctgccggatgtggcgcttcagctggtagttgacgtggaa

SEQ ID NO: 9872 - DNA, 3156 bp, DROSOPHILA
ctcaccgaatatgcagtctgaggttttttttattttgaataaaatttaaagtcactagtttctatgaaaataagcacataattagcctacgaccgtgtgattcgagtgcccgagagccagccgcccgtccccgaccgcccaaacaccgagggcaacccaaggagagcccccaaacgattgcaggaaattaatcaacggcagacgacagcgtgccgcaaaacccaaaagagagcgagtctcagttcgaggtgcatgcagcacgttgtaattaggttagcagcatacagcagcaccacataacacgataacatggcacagcagcagggcatggactcggccctgttcgagcggcgactgcggccggtatacgacaacctggaggtgggcaacaatcgcaaggctctgcaggaatccgagaagttgctacgcaaacatcccaacctgctctgcgcgcgggcattgaaaggcctctcgctcctgcgactgggacgctatgacgaaagccacggatgcctccagaccgttgccgaggagaagcccacggacgactccacgctgcaggtgctgtccttctgctaccgcgaaatggaacaactggacaaaattgtggagctgtaccagcacgctgtgaagcagaatccgggcaacgaggagctcctcgcccacctcttcatctcacatgtgagggtggaggactacaaggcgcagcaggcggtggccctgcagctgtacaaggcgcagccgaaaaatgcctactacttttggtcggtgatcagcgtagtcttccagggaatccgtggaccggaatcggcgctgcccgagaagcggaaaatctacttgggactggcgcaacgcatggtcgacaagcacatcaaggagggcaaaatggagacggaacaggaggccttcctctatctgcacatacttaagctacaaaacaagtaccaggaggcgtgggaattccttactggtgagctgtgcgcgaagctgtaccccggtgctccagtcagcatgaagttcgagctgctcaaggagctgggaaactggcgggaattgaatgagctgctgcagcagctgctggacgcagatcgtgatcgttgggacttctacaaggagtatatccaaagctcgttcgagctgctaaaacttacgccgcagggcgtggagaacggggataaggactctctggccaggtgtcaggagttccttcagcgcatcattgactcctcggagcgcaagaaaaggggaccctatctggcgcggttggagctacaccaacgcatgcgagcggagcaattgccggcggaaaaactaatcggtgactttgacgagatggtcattgagtacttccgtctgttcggcgacaaatcgtgctgcactcacgatatcgccttgttcttgccttcgatcagcatgaaccagaggcaagcgctagccagcaagttgttgttggagagcggagtaacctccacgtcgcttccaaaaaataaagagcagttgcaaaaacatctttgcgctctgcaaatctctcgaatgtgcggatcccacatggatctgcctgcggaccacctgcttgccttctatacggcgctcaagctgcactacgagcacggcaggactactttcggtaagaagttgctggctacggaaatgggaccatcggatgcatacgcactgctggcggcaaatgtaatgtacgatctgagtaggcgggaaaataagtcggatcacctgttcgaggcgctgtgcctgctgcagtatgttctgcgaaacagtacgagtaacttccacgtgaaactgctaagtctaaagatctaccatctgtttggctgccaagtgggcgcacaggagatgtatgagtatctggacattaagcagattcagctggactccatgggctatgtgcactgccaactgttggctcttggaggtcgcttctcgggcaatcgtaacgtgtacgatgccaccctaaagttttttacgaacagctataaggaaaggctggaatacattgcgttaacatatcgcttttgcacgttttcaaaaatggaggagttcatgaacttcaaggagcggttaaccaacagcttgcagtacgtggcctgctcggtggaggcgcagatctgtgacttggttagttgctatggcaatatcacgcagaatctatccgcatatgtggcgatgagtattgagccggcggaggaccggatcgcttggcatgagttgagcgacaatcgcgacttaggggccattatccgatgggatccgctacatgaggtagacgctgcggaggagcgcagggagtcgttcgaccaggaagttgaggtgcttcaagtacgttcgctgatgcttcgactctttgcctctttcatcgacttgtaccacggcgcgggcttaaaggattcgccagcgggagcagagacggccaccttggagctcctgcgggagtcctggacgggattattccagagattgcgcgtgatgaactacaagccgttggcgcaaaaatttctagtcaatctgctgcccacacgtcttcacctgctgctcgacatgccatacgaacgtttctttgacgaccttgcccagttggtccttgacttgcagagcgggtcggcaaagctggccgagcagtgcaagcgggtgggtgacaatgttattgcgactatggagctgtgcgtgcagaccatcaacgagagcaacgaaagcaacggcattgacggtctgtggaagcggcgaggtcagcagcagaaagtggcagccagtttagagatgctatcgctgtacgccttccttctgtccgtgttgaacgacaagctgcaggtaagctcaaagaccaagaccaagaagaagccggtggaaaacaaggtggatggaccgcagccgatcagcgagaaggagcgcagccagatgttgcaggagctgatgcgacagctgaagcacaagtttgaggcctgcgacacggccatacgctcctggaaggcgcccgttttgccacgcgacctcagctcctttatgtctgacatgtcgctgaagccggaggtggaagccacgctcatcggcgacgtttcggccacctttaaggactcgcacgagctgatggtcaccgagctgcgcaatctgctgaaggacaagatacgcatggtggccaagtag

SEQ ID NO: 9873 - protein, 948 aa, DROSOPHILA
MAQQQGMDSALFERRLRPVYDNLEVGNNRKALQESEKLLRKHPNLLCARALKGLSLLRLGRYDESHGCLQTVAEEKPTDDSTLQVLSFCYREMEQLDKIVELYQHAVKQNPGNEELLAHLFISHVRVEDYKAQQAVALQLYKAQPKNAYYFWSVISVVFQGIRGPESALPEKRKIYLGLAQRMVDKHIKEGKMETEQEAFLYLHILKLQNKYQEAWEFLTGELCAKLYPGAPVSMKFELLKELGNWRELNELLQQLLDADRDRWDFYKEYIQSSFELLKLTPQGVENGDKDSLARCQEFLQRIIDSSERKKRGPYLARLELHQRMRAEQLPAEKLIGDFDEMVIEYFRLFGDKSCCTHDIALFLPSISMNQRQALASKLLLESGVTSTSLPKNKEQLQKHLCALQISRMCGSHMDLPADHLLAFYTALKLHYEHGRTTFGKKLLATEMGPSDAYALLAANVMYDLSRRENKSDHLFEALCLLQYVLRNSTSNFHVKLLSLKIYHLFGCQVGAQEMYEYLDIKQIQLDSMGYVHCQLLALGGRFSGNRNVYDATLKFFTNSYKERLEYIALTYRFCTFSKMEEFMNFKERLTNSLQYVACSVEAQICDLVSCYGNITQNLSAYVAMSIEPAEDRIAWHELSDNRDLGAIIRWDPLHEVDAAEERRESFDQEVEVLQVRSLMLRLFASFIDLYHGAGLKDSPAGAETATLELLRESWTGLFQRLRVMNYKPLAQKFLVNLLPTRLHLLLDMPYERFFDDLAQLVLDLQSGSAKLAEQCKRVGDNVIATMELCVQTINESNESNGIDGLWKRRGQQQKVAASLEMLSLYAFLLSVLNDKLQVSSKTKTKKKPVENKVDGPQPISEKERSQMLQELMRQLKHKFEACDTAIRSWKAPVLPRDLSSFMSDMSLKPEVEATLIGDVSATFKDSHELMVTELRNLLKDKIRMVAK

SEQ ID NO: 9874 - DNA, 33665 bp, DROSOPHILA
gttgccggtggttgctaccgtgttgcatcagcataattgcaaatttttatgattatgacactttgggcgcaaagtgcctttgccaatggcaactaatttctgcagccatctcagtcccagtctggtggtcatctacatggggctatgctccacttaagtacttcgagtgggcttttgcgggacattttggcaagcggcttgatttacaattatgctggatttgaatttggatcccaagtggagtcactgaccagcccgagagtcgccagtttcggcctccattcgtcaatgctggtcccattttaagtagaggaagtgttgtgtaatgggaggacatagttaagtggccataagtataatttgagtatgtgtttcctcggcctttcaaaaacagtaggaaaatatatatatttttataaatttctttcgaaagaagttgaaaattgaattaaccacgttaaatttactttccatatactttttccgtacactcagacaggaagaagtatttctaaaatatatgcttatttaagcatacttaccttccgaagtcttgtaattaaactctaacatgtatttaaaaaatttaaagtaaatttaaaatttaaaaatttattaaatttaaaaataatgttacaattggtttttttatattgtacacagtaagttgccgtttaaagtggcagtcgtggtgagtacaatcaagcagtcaaaacgaagcagttctcttaggcaaagcagtgggaaggggaaatcaagcagtggaaggggaaccaagcagagttagcaatagaagcatttatggataagaaacccaccacacgggtgctctctctctctctctcctcgcttttccattcgtgattttccgatgaaggacgtcggattctccgaaccatcttcgttggccattcgccaattgggaaatctgtgcacaggactcgcagtgtcgcgaatccttcgactcctgctgcagtttacattgcgttgtccgtgcgtaaggacgtgcgtagatcatcatttcaattttcgcagtattacgagcatcggaaataacagaaaaaattgtttaaaaaaaaatggttgaactgcactgaaaccgcaggactgaacccaatttttgctgtggcgtgcgtgtgtgcgagatgcagtttttgtgtttctgacatagcatttaccaaaacagaaggcggaaaatagggaaaaggatccgacgaaggatctgcgatagtcccaaactgtgtgtgtgtgggtaaggctgttgcttcgtcgccaccagtgcatgtgtgtgtgtgagtgcgagtgtgtttgtgcagtcacgtgttctaaggtgattttaacgagctccgtgatacgcgaaatgagataaggaacgaggaagcagcagaatcgggaggagtgaacggcttaggcgggcacaaaaaggagcaacaagaagccacgcagccaaagccaacaaccaaatccccattcgccaggacaggatacttgctcggtgcgccttaaaggattctctgataaatcaaccgaaaattgcataaaataaaattgtttgccaaattgtgcgcagcgagagaaccaaaaagcaaaaaaaacaaaaccttatactcacatgtgaaatatgactagccagttgcattgaaagtacaagaaaataataagagagaaaatttacccaaataacctgaaggtaggaatacattataatctctttgacacaaattgatgctttgggatatgatgtcaggaagggtattgggatatgattacgaatatttagactcgtatactagaaacgcacaagagcgtatgttatttaaaagaaaaacagttttttaacatttgaaatttgaaaaactaatattttaattttgcttcacaacagagttgtagaaaaatagttgataaagtttataattgagaatattatttgcaagggaatgcaaataacgtttgagtaacagctcataagccagttcagcgaaagcatcaacctttcacgaactttgaagcatcctctgcgcttctgtaatttcatatatcgcaatctgcgacgtttaattttgatgcaccatgtccctgctcctggcaaggcaatttgaggattccgggggtttcctttcacatcccagccagcggaagataagccggaagatgtacagaagggcgtgcccgtctcatccaacaggcaaacaaaacttgtcaattgccagggagcgtgtctccgggacctcgggctcatccttttttggtaaacatttcccatagttgctggggaactaggcaacaatgtcttgagctcagtcctagctgcttcgatttgcccattttttgttgatggaaaatgtcaactgcctggcagagttttcatcctcactttcgagcaacccactgactaggcaaaaattgtatttagtgggacaatcaatatcggatgagggaggggcagtcagttgggcggcagtcaaacatttatttgattgactgattgatatgtgaaatgatttattgccgccggaggaggaggaggaggaggaggaggaagaggaaaaggcgaaggcgaaggacgaagaaaagtgctggcaagtgtccacaaacagctgagtcggaaaagttccgaaacaaaacgagaaaacctttaaccagccgagcaggaacatttatttcccagtctatctctgcagttttccatatcctgctctgtttttgcagtggaatttccacagctctgtaaaaatggctcggaccaaactttttcgcacgctttatgggagaataaagtaaataatgaaagctatttagcacagccaaggggcacattaagtcgtcgccagccttttcggattatcctgcgaccggcttaaaaataacaataggaccaagcaaacagatgcacactgtaaaaaaataaactccggcaggatttttgagttaaaaataaataaatctgttaaaaggagttattacacattttgactaactctcctaaaagtaaagtgcttatttaatgagaaggaatataaaaggcgtataaactttatgtcatacttttccagaaatctacgaaacttttgtcataagtcattattaaagggaaatataaaaattttccgaattattttactagcttattttcatctagtttgtcacccattaccaaagttacagtataatgagctcccttttggattcgtattattttacatgcataagcttaaaaatttggctaacccagagattatgaattccaaccaaaatcaaatcctttgaaatagcacaatgtgttcaccgaacttcctggcgcttagttcaaattttgaatattgtcatagattttattcaaataaaacggacagcataatattggcattgataaatggtgtgacagctcttcgtattatattttggccgtgtaatatccgtcgagagaggtaaactgtggccggcgtttaatgagctgtgtcctgatctgagcctcggatgaccggcggctcctttcgccagttcgctgttgagctggagaaatttcagccattttttactgccacctgcaacggtgtcgcattcttctctcgaccaggtatttctcttatagcctggatcttttattttcgttcttttttaactatttggtggcgctgcaagtgctgtggcttatgaaaaagaacgctgagcggaggcactccgaaattcgggcgaaaatgcgaaaaagaggaacctaactaggcgtgggtgttaattagtttttcggcaagtgccccgaaattctgttttcttattagttttcacttatttgtttaagctgattatgtgcgtgtatactcaaccaatgagttgtgctaatcctaaaggaatttgctcgcaaatttatggcttcgttatcccacttgagctttgatctacaaaagctggttaaatggccaaggatttattcaattagtattggcataactgaattagtcttggtttctgccttgcatttaatatttattgcataaatagatgtttatccaatcatgccccgattttatttattagttttctgttaacaaatagatgagaatttaaaatggaataataaatccaactacttaccttatcctgtgtaaatatgaattttgatttatagacaaaaattgtatatcataatttatataatttcgataaaaaagctttactttgtttaagtggatcatggtatattatgtatttatatttataatttgagatagaggacaaaaatcaaagagctattttttttatgtgccaatttcttggaatcgaactttaaagcgacttgagatttccgtcaaattttaaaagcagacagacttctcgcgaaaaacttttgcaccactcctagttttaattcttatctcttgtgatatatgaatggatagaactttacaaattttttactgtcgggaggaaaaaatttttttccgccgcatcacaaatcttgcaccgactcaaacttcgccccaacaagtacgaaaacatgggcaaacacaagaccttggggctattgaaaaatatctcatatgcaaatccattgttgttattggcatagtcactagttctccaatttcaaggatctcgagtggctccctcgactgcggcagtgtgtgtgtaatctagggcccctttttctactttttggtgctaaaggcgcatctcaagtgcaacatttgccaggggtaggagaagtatctgtacctagcatatttgttgttcctttgcggctgcgaaaatgttgtggcatgtggaaatttatttcataatctctgcaacaaaaatccaaaacggcacaaaaaaaaaagaaatggggaaaaacttttgcatatgagcgggcgcatcgggatagggaaactacgagtagctaagcatgtaatttatatccttgaatggtccctccttttccccctctacaaactcacttcagttttggggcttctcctgggtttttggtatctgcatcatgcagttattgccgatgcccaggagcgtgggcaggaaaattatgaaggagaatatcgggggcacctaccacgccgcttatgtttttatataacttatggagcatgaacttcttttagttataatgttaatcagcatattcttatacaaaatacagttatataatacatggaatttaaaaaaaggatataaattctgtagcaaaatatcggggattcgcaattgtttagcaactgcgcctctgcccatattgcaaaatattcctctttctgtggcggaagttttgctagttttctggtattggactgagcggtcataaatttgtttctgctcctgttgtggtgtctgtcttttctgctcctgcattgcttcacttcggtgcaattttatttgaccacataaattgtttaccaattttcacaagttctgtgcaactccatcgccatctgtgtgtgtgtgtgtgtgccttgccttatgcctttgaaggcttaaagcggtttaatcggtcccttccactcagcaaacccattttgatttagcttgcattggccagcaatctatcttggtggttttaaaaatgtatttacttgccattgtaatcgtagttcgtagttgtttggtaatcgagcaatctgtgaaaggcaacagactcaacagcagcagatgtcatggcaattgttagggatgactggacatatttattgctatgattgttttgcaaattgctctaaatgaaggaatcaggattattgtgattgcatgactctctcagaatttatatacttcacttttgaaatgaaaaatcaaaatctcccacacgaaattgcgttgtatgaaatgaatgagaggaaataattgactttttatcatatcaacctttggggattttaatcaaatttttgctaaatatgtaagtaaacaaatttgcctagaaaagggatatgaacacactattaaatatatattttatttccgaactcttttacattttgcatttttccaagtccggaaaatcgttaagctcattcagactcccgattacactcgtttcgagtagaatgcgaaaatgaggactaagaatctgtttccttcacttcgttagttaactttcctccagatgcaattaacgaacggcacaggggtttaagggcagctgatttttattatatccttcttttcggttttcttgtctgctggaatagagcaaaggaaaaggggcagaacgtctggaagtgcagtttgcggcttatcgcattggtagcagacttggcccctttgtttgtcgcactccgtcgtttcagtttgtcaatgcataaattaaaaagttgaaagttttacccaattctccgcctttctgggttagttttgtgctgaccttaatgaagccaaagcaattaagacagggccctgcaaagttaatggactgtacacagaatggccatttggtggagtctttgggccatgtgagcatcacaggatattcgcctacgagatctccttggcctgacttttttggccccgatactgtaatacaatttgctgccataaaatattacaacttgttaaagttcctccatcgaatgcctcggccaggggattattataatccgattttcaacttgaaatgtgcttcgaaaaaagagcaaagaatttatggaaaaatgctatgctcacagtcttgaaggcagcagcatttgatgtgcagttagacaacaatgtgtttttcggacacatccccatccccatccccattcccgttaatggcaaacttttcactcagactttttggctatgtatgtatatatgtgtgggacgaagaaaatcgctgcagttttctttatagttattacgttatacagtttcccccggttcctttccttctgattacgaaattgctttcaatactttcggccaaagtagtgactataagaaactcactttgcaacacctgccccacggaaagcagtcggcccagttggttgcattggccaacgagagttacgtgttgcaggcaaagtttaacgcattaagaaccgatgttgttgtctggccacatttcggcattttgcggttgggtcttaaggcgtcaaatggcttaaaatttcactacccattagttttccatttttaaagaaaaagtacgcctttatattgggaaagaaactacatttttgtttatttaagcctagcaatcaatacttctaaaaacgatccttaccttacgaaattcatctcacaccgtcctcatttcagataccatacgacaaactagcaacatgcggtttccacagaatgcctatcaaacggcattgaccacgattcttctggcactcacattaggtaagtagatttaacattatttgtaatttgatttacatataaaatgaaaatctgttaacggcaattttcttgtttatgtcaagatttgaagcgcagcggtgtatttacattattagctttttaataaattcagtcaaattaataagttaaaattaatttcatataacacagaacaatgctctcctgatggaaaaacttgtgttataaaaatgtgaaataatcaaattaaattgatgggaaacattgaaatgcaattatgatggggaaagacataaaaaattaaacatgtatgtgcattaactttgtttttaatttcagcctgtgaattatgatttacagcccaaatgataattagttctgattaaattcgatgtcatagaaatgaaactgattcgaacttatgacactacgctaatatagaacgctttaaatttatttcatgaaaatcgatatgaatattttattgaaattcgtttaatagccctaattgtagttaagtcgagaatgaataccagattagtggatataaaaagtaagcctctttggcggaggttgtgaaactgaatctatactacacttcattcaactaacaaacggaaacttaatttactgcgatttaattttcaaaatccgtttcagacctgtccgcatttaaattacacatgcatacaaaataaccggaatatttatcaatatttaactgtgcaaaaaaatgaagcataaattatgctaataattttcacaaacacactacgagctcatgcgccaccacataattctaaaatttgatttagagtgcggccacattcaaatctcaatactttaagccaataactcatgctgtcatcgtcttctgctcgtctttgagcaaacatacctactatataggattatatctggccgcgctttacacacacttcaaatttttattgcctcgtctttgcggctttcgccgccgttggaggtctcattttatttaccatcgcacataaatttcaggaaccgcacgcacagtcgaacgaacgtacacataaatatttcagcatctgctgggagaaggcatccaaactgatttattcaataaatcacacaagttgctgccaccaccgccattcacctggccttaacccttggacgtgcgccgcagattcgagtcctatctgcatcttcggcccagtcaatcgcttccaggagcagactgccaggacatatgtcaatgaagcggcgaatgtatcacacaaacgcatttgcctttggcccaagtcgtaggcatttctctatgggcaaaaccggggtctgacagttgatttttcttcaatatatataactatatccatcgacccctccacatcaacagaaacttaaatgacggcgaatacatcaaacgacatttaagcccttcgcgtgactgaaattttcgactctttgtcacttggagcgatctggatttgggcctgttatccttttccacagctccatccattcccgtttcccagctcctcgctgccacacgacatctgtaggtgtatgcgaggactcttgataaatgccttcaacgtgcctggcatttgtttcgtgtagcatacctttttgggcattatttagtagtatgtcccactactacttgtgtgtaggctgtgtaggcctgtgtggatgctgtgacaagtgactgtctggcttagctttccctatatcccctgcaggctgtagacaaaataacgccagcttaaagctgtgtaaaaatgggattacaaaagttaggctaagaatgataaaggtaaaaatagtcagcaaagtagcataaatgtacacgctgtctaaataatgttatgttagttgctaagaatagaacctgcagacggcatactttaaaaaaacttatttataatttcctagcattatttttgtaatgcattacttggttaaatttaacttatttttgttttatttcgatataccatatatatgggaatttaatttgtgttttgcaaaagagtttataaagctctccactttgttcttaatcacaaaggttgatgaccatttattgtcctttacttggactcgccaaaaaccttcttcgtattttcaaacataagccccattgaaccgtgattcagtgcacacaagccgtgcatcgaaggaccagaccgcccacgtgtttcgattgagccttcaatgggcggtaggcggtaggacattagccatgcaaaaaggacgaaggacaaaactctgcccacacctgcgccgtctgcgtctggccatacgttcagtgtcgcacaaaaacgtttattaacctgccattatcgagctgggcccaagtgcactcgctgtagacgacgacattgtaccccacatcagggaccttcagaaatccacccacagaacagagctcccagaacacccacaattcacgggccctgataaaaatctccaacacgcacaacaatcggggaaacagcaaaatgtttttgtactaccgttttagaggtttcagatgggggattcagttccccttcgtggctgagtaccgagcttagtagtacacaagtggctaattagtctggggctacgtaaatcggccgtgcacttgatttacttttaataaccacatgccgagagtgcttgcaaatttgtgacaatattatttccacttcagtttgtttcaaaactcgcgttaatgtcttaatgtttggggaaattgtcatttatttggggctttcttcaaacttgccgttggttggtgggtgaaattagtgattattgggcgcaataggttgtaatttgtattagccgcaaatgtgatttaaattgcaagggtccggaaggtcagctaaatggaaaggtgtggctttcccagactttattgattttcttccatcggggttactagagtcatagtggtttgcccattagtcaaggaaaaacaataaattgtgattgatcagctttgggctaatatatattaatattaattggataacccatacatatcatgccgtatttggatttatttaatgtctcgtgtcgtccgaatttaatcctactgaaaccatataaaacaccttaatttcaattcaagaaatcaattaatcgcttttctacaacaacagcacacagaatacaaacgcttcaagtggcagcttcgctccctgtctttaattaaagctcaatcgaggcaacctctttggttggaaaatcaattcctgtatatattatcgaaccaattacagtgcattccgtggcgtagaattcctgatccgatgtcatctcgccaaccacttttccactcgagacgggccaccgctcggttttccccccttaaaggatgcttgactcggcttctcctttcgcttggcatacttaaaactaacaggcaaatcaatggacgaggggaacggcaaaaaatatgaaatagctcagctctgccagagtgttaggaatttcgattttgagtcctcgtttacaaaaaaatcatagtcaaaaccaaaccaaaaacgagagtatacgaaaccaacaaacaaacggaaatcatcaaatttaagattttaccaaaacttcgattaataataatagatcgtacgatatatgaaaacattatattctttgtatttctacaggaatatttcgttactattagcagtaataatgatacctaatattagctctagcggttgagcttatttacaagaacaagttatgtaaaaaagatcgcactttttatgcaaaaatgttgcattcaaattgagattgagttttttcccccagtgcacctttggaagccccaaacaactattattgatgcaggaacctgtgtggggcgttggtaggaaggtggttggatcgttacataaaatgcatgaaaatctcgattcggctaagagcaaaaaagcggttcaaaaacgtggagtaggggggcggggatgaggaaacaaattgaagctttagccacgactgacaaactgcagctgtaacggccaaatgcttttggccattttatttttcattttcgcttcgttttcgttgtcaagcggatgggatgaagcttaacaatttttatggcgacgtcccatcgaaagaggggctgcaaaatatggctgcagccatgggttaagcggcttaattgctctggtaaggtcaattcggggatgcaaaccctcgaaaaggaaaactatttccatggcatgtgcctgcgggtgagccatgaagaaatttgcataataacaggaaacaatctcgcctgtgtgcgagtgcgtgccctgtgcgaccattagggtttccaactgaccccggtcattggcatcggttgaggcctgggatcccaactatgcaccggaaaacgaagtgttagtttgacaaaatgcagctggaatgccaatggagctgttggctactaaaatgtttcctaattttatcgtagttatctggaaaaactagatatgtgaatcattttgtcatattatttttttttttaacgattttctttaattaaaatttctagcactataaatagaattgattgtttgcactttatgtttgtagaggctctaattttttggactaggtttaataaatagatgatagttctgtttgtaaccacgtccgtttataatcctatcacataaattgaattttagatttaaaatcatgtacttttttaccaaataccagtacagataagaccttattaagcccttgaacttcaaccatgtatccgagagcgaatttcaaaggggcgagttcataaaggagattatataaatcatatttaagacccctgcggcacgttattgtttttaaaacacactaattatctggattgccctcgggctcgcgacagatttgcatgctcgagaattttaatatacatacgcatgtatgccagccagtatatcctgtgctgttatggttggtgttagtgttgatattgttgttgttgctgttgcccgatcctgctccttgccatgcttgcaaatagttaataatcgttattaatatcaacgtgggcaaaatggctggcgcacaacaccaaagcgctgcatatgaacacagactggggcgtagagacaacaattttcacctccattatgcaggcagcatgccactaagccgcccacgtgccgcggcccattttgccgcccaatcaggctttacaaaaacggattataaagtaaaattacgcctacaggcgaaattttaattaaattatgacctttcccctatttgaaacaataaacaaaattgtaacgaatagggtttgtgtagtatacattcatttccggtgtaaattcgcattgagtaccatttgaggaatttcacaaataatggttgcattgtgtaggtttttggggcattcacttactgattgatttaacttggactctgttaagtgggtcaagtgctcgtatcccagaagtgtttctgctcacaagcagttttaacttgactttcaataaatactaaattgttttacataatattgcagccagttttgttgcaaacacagtcttttcactctgtactttgccctgtgcctgaagtcgcaagtaaattccttcggaagctgcccctttttgactgccactacgaaatgcattgcaattcataaccctgagagcgaaaagggtctcgattcgggcgcgaagaggtggtgctgcatatttaatggccatatcgccttcacatgtgcaactactggcgttcccgagtcggggcaatcaacaaacggcagaaaacgtgaccaacgccccgaacctttcaccttcgacctcatgcctctcacctgcagacataaaaacttaatgaaagcgttttccatgaatacttgccattaaacaatttacgagacactgcaacaaaacaacaacgctcgagtggcaaattaataaacttgacagcattccctgccctttcttctgcaaaacacctcgtaattgctgcgacaactaggaaagtaatcaaagttattgattaaaaaattcccacttccaatgccatctccatgtcgtactgtcgacatgctttggcttcgttgctaacaaaagttttatagctaaaaattattgcacatttcgtcgtggcggatgctttcactattgttgtgacctcaaataatgaacgtgcaacggggtttccaataaacacgtacgtatcgaatggcactggcggggtcacagggaaactttccggagttctggcattcaccaattgcaattgacattccaggggagttggggcttggctcgatttatcggaaagtgtggcaagtgagctccaagaattactgtcaatttaattgataccatactttattgttattggcaaagggtgtattcatttaagctgagtagctgatgtcaagtgaaaataagaaaatgtaattaaaaatttagtaggcgcattagtaatttattaaaacatttaattgagttgtaaactatttagacaagcaaactgtataaactgtataacttttgtcatatattccaaattgcaaccacacttcactttccacaagttctccgccaaggaaccacatgaagccgcaaatcaatgaatataacttcacacaaaactcaattttcaacaagttttccgcattctaaacacatttttcttgcgcccctcctcacaaacgattcgaagcgacacaatgtggccgacaccaaaaacctcgaaagccgagactgaaactcgaaattaaggccaagacgtcatgataaaaacttttgtccctttcttgtgtatgcttcctcctgattttatttgatttttttttttttttttttttttgctctggcagaggcggtttcttgcctttcacacgccaacttgaacttgacgcatgtttgttggcaaacaatccgacatctcacgccccaaactcaaacgggctatgttttatactcattaaaatgcgcggcatcgggtcggtgccatcaacgaaagttaaagccggagggccaaggatgtggcaaagacattctgcgggtggccagaaggacctgacctgacctgaactgaactgaactgaactgagccgaactgaaatgccgtttcggcatctttgaacggcagccaaacaaatcttatttaatttggatttggcgccttcgcacgccaaccagtcagcgaagttccattagactcgacggagatggcatcgtgaggggacataccaaattgggctaaagtgttttatccacaatagatttaaatgtaaaaagctatcatttctaaaatattctcatttcatgtaggatgaaaaaaagttttttaaaggacacataaaacacagcagttggtcaaaatttacttaatagaatataacatgaaaacaaagttgatatataagtttgtgtattcaaaaatatgaaagggaaattgctaaaacaccagctaagtttaggatgatataaaatataatatatttcgtttcgacatatggcatttgtgtcagtttcctcgatctaacttgtgtctaactagctcaaatagtctgaacacgttttacggtattggattagcatcattaatcactttgcattctcatcttagattagtccgaactgatatttatccgacagctggccatgccaatcacgtcacgttgccatcgctgacggaaatccttttcgtttcgtcctcgaaaggacacagctgttgctccaggaatctcaagtgcatttgaatggcttgctaacttgccgcctcaccgaatcgccgatcgccgggctgctgtttgccaaagtgttaaatgtcatgaagggaatgcgcagctgggcctttgaatttatggaatttccacagcgcatttacatttactacacgccatatttattatttatgctcgccctgtaggggggggggggggtctcttcaaaatggaggaagaggcagccaataggcgggctgacatgacgcgttttccactgatgtctgagtcaaagtgcccttcttgccatcccattggcgcggcatttccgctttttatacgctgccaaagtttttcctttgcttgtcaaatatttcatagctgttgcacacattttcgctggagttttgcattttctatatagtttcggaggcgatgtaatatataaaaggtcaccgggtggacgtggacgggatgaacttccggtttgctttcgaaaagtttaaattgaattaacgccaaaaattatgcagctacagttggccattttattattctcggcactccgtaaaatgagtgcttccagcacatgcatgcctggcatgctaattaaagccaaattgattttccacagctcgacaggggcaagccttaaagtccaactaaattagccatcaattagcagtcatgacagccatatatttggcgaaaaaaggagttcagtgaataaattatgctgctttaaagtagttatgtataagtattgactagctaagataaacttaaagatccttaaatgggaaagggatctttaagttctaccccttgtctttgcaagaattccaactatttaatgctattaatttttctaaactttcctatactctttactttacgaattctttgcccatcctcggcataaaatatccagccgagtattccaaatcccacagctagaaatacaagtccccgaataacatttcaacaacattaataaattagttcaagtaattgaaactttgcggttgttcaaaaagagaatggaaaagtttttttttattgttgtttgctatcagaaggacaaatggaattattgtgaaaataagcagaaatcgctttgtgacaaatcgttgagatgccccaaagaccggtctcaattgttgttgacaatgctttcgggagttgataaaagataatataattccatagtctggcagcgaagtgagtctagggactgaaaatgatttttctaaatcaatatgtaccaagaaaaaaactgtttgacgagccccaacctctcaggtgtcgattaacaagtgaccaattagactaattcgcgcagtcaatagagtaaagttaattaagcgtctgcccagtccgcccgcctgttcttatcaatttcctagaaaaaaaaaaacaattaatcatttatacgctcattatactttaaaactggctaatttcaacttaatttgagccggccaaacgaaatcgtcgagcgccttttcggccggggaatccagtcgacaggacttcccctttcctttgcatctccttttcatggcagtgggtttaattgagctggcttcaattgtgcttgaaatttgcacgattagcgaaacgttccgtcgtcctggaattgaatccagggttaaccggaatgtgacaagaattttggctcggcgcagacactgtgcaatgaatcataagcttttatcgcacaagttttaattaattgcaatgaaacctcaataaattgtacaaggccgtgctaagcactttaattcagtaaaaaaaaatagcacaatttaaaagacaaaaaaattgttaactattatgtttagcactctgatggtttcattcaagttccaagaaaattagcaacttctgttcgtctttcgcaattaccgcaattaacatttatgcgggtggcctcaaatggcagaggagactggcttccactcaaaaaacccgttaggtaattaagtagaaaattgcaaaaattaacaaaagcaaaaaagaaaagcactaaatcgagagagcaatgagtttgccctggcctgctggagattttggcgtggcaaagtcttagactgcttagggaaaattaattaaaaataaacatggcacacgcttgtacttaaggaatgccaacaaaaatagaccgcaggcggctgagaaaaaaaaaacaggaaaaacaaaaggagacgtggaggaaaaacccatatccagacaaataagaaaaatgaaagccgggctagccaaattccaaacaaaagctcacgaaacattttgcgggcacaaatccgaggcgataagaaaataagtaacaaagaacgcagtgcaggacgagagaaatgaaggaggaggagagtgcaggaaaaaggacctgaccaggacatagaaagcgccaagagtatttagtaattacgtcaaggcggcgagtgaggagcgattagaagggagatcccctagctaggtgaaaattgcattaaaaatgttctagtaggtggcctaagcttcttctacactctacgcaaatcatcagtgcaaggtgtagtttttttttttttttttaacaacaatacatcaaaataaaacatgtttatccaatctttcaatttgtttacaagacatacgtttcattcggattctaaataacattgggtacatttattttatagtgtttcggaaactgaaagaattcaatttatgcatgctattagtatattttaaggaaaactataactttaaacataaatatttttttagttttccaatgttttctaccgtgtaatattccgaacatgcgagcaaatgaaatacagctgttccatgggcgagaacaggcatagcaggtatgaccatgtgggcggtgggtggtaaattggaaaaggtggattgggaatggtgggggttccatggggcagacatatgaaaactttagcactcaggaaacaggaaactattgttctgcggtgtctgcctcctggcttcgatggtaattgtccggcctcccaaaagcagacccctacccgccaaccaaaccggcaaaacaccacgttgagccacgtttatttggtaggccaagcaatgtcaaactgcctgatgtttgatgcatgcatatatctaggcagctatgtatatatatgtggtagttggatattgtgtttctggcaggtaatttgcgtttaatttgctggtaactttgacccccttttcattgcggcactgggaaaaagtgcatttgacattacccattcgggtcaagggaaaatattgtagtagactttttatgccgaataataatataaatgaattatttgcacaaatgattcttgtatctatacgctatcgatatcatggcatatataaaacttattaatgcgataaccactaacctggtttaactcaactctgataaattaacccagtggatagtgggaggtaagccattttgttgctaccttaataaagtttaataaagcgtgtgaccacttaattttcgattaatactttcacagaaatacaacaaaaaccgcatggaaattccataattttaatacaagctatctaaggtcaagaataagtaaaagaaaaattctaatttgtatgtatatgggaaaatctacttagagaagcatattaaaagccgtgtagaaaagagacggacataaatcgaaagcattttgcatcaaacgaggaaaataataaaatattaaaataaatcaagaggaaaaacataatacgaaggaaacaacatacgaaggatattcgcaggggaaatatgatatttataatccagaaagtaaagcaaatttctaagagaatattgcaaaagctttcgcaaaaatatggctcggttgagtggctataagtgggcaagtctaagatgggcaataagagctgattttcagattgatttgctcatttcttatataaatattaatataattacaagccatgaaaagcgaattaaggctgtcatttcagagccagacattcgtctttcaataagttgccctctgccacatcccctttgacagtagagaaaactctggttcggatttttccattcgggttatttgtgtcattgaactgcagcaggcaagtggaaattaacgcaggccgctttaatttgcaatttcaattcatttggatttatcacagtcccccccccccccctcgactatcttgcctgctgatttctagacaataaagcccgattccgagtgcatgtcgagcaataatatattaaaagggaaggaaggatcctcccttcctctcgcacaaaaacccaaacccaatcgatacaccctcggccacaaatcttccccccacccgtcgcgtgtgcgaaccaaattttggctggcaatcaaaacgcattgccaatcaattgatttacacaaagcctcccacccgctaacatgtctgatttggcaaatagctgtcattgggttatcataatgtcactcacagcgttttcggcagacatgccatccaagtctgttcttctgtcgaactactctccccaaaaccgtttttaccctctattcatctagacagtattttagtttcagaaaaagggtagatatttacccaaaggactctgtatagtagaattaggttggcttaatagtccacccatacagattttcaagttgaatgggtatttctgtactaattttttttttaatctatagtaaaagtgaggccaagcaatataattaaaataaaccttaagttaacctcaatgtgtgtaatttataagttattcgagttcaagttctctctccaagttctcttctatttagatttcaagatgcattaaaaatgcaagcaaagtgacaaagtttatagcttcggcttttaagccaggccaaataaattgaccgcatctatctttgatgctgtcacctttgttcagctaattaaactaatgcaatcctcgaccgaaaatcaacagccagagtgttaagtcaagccaaaatgtacgttgaaactgatgttctgggctctggactccgggccggacttgcttttggcccggacaaataggataacaaaacatgacaaaacaacaaaagccactgaagcggctggcgtagcagttccgcaaaagactaagttaaatttataggcatcgagggcaggaattgcaacttccgcccaaaacacacacacacacacgtacatgtctgagggaattccccagattctgagcactggcaacttcatttcacagtagctggcaactttagagaagtttgctccacatgaaccgacgacaaggccaagataaaatataaatggtttcggtttacttgcgagtgggcggacacacacaccctacatacatacatcgagtgggtcctgggaagcggaagtgccactgatagccgtcacatgctggagatttacttattaatgcccgagtcccgagtcctgagtcctcggccgacatcctgtttagttggtggaggggtcccttgctttgttttgaagtcgcttcattggcccctctacctttttttcgacagctcctctgttgactctcgacacccttctgtgtattcgggacgtaatttgtgccccgaaggaggtcgcaggacaaaggacactgcagtcagcagggacaggctgttgcttcgtgcttttagtgactttgacagttttatacgatttatgtcacggtaaattaaaaattacgcgtgcttccagtcttacaagcaaactcagttttggcagaggagggttagtcctgaggttggatatgtttgcgtgcttcggggttgggataagtccattgagtgggtgagattagaaaataaagatatataaactggcgatggggttgcttgataatgtttctattttgctgatatgtggaatactttcattggacagagatttatgagtaatttgataaatggttagtatttgcataactgtctgttttatggctcggacagaaataaaattctacacaggcgataagaaatatagtaaattaattagtaaatgtttctgaataaaaaaacaaaatttatatgtggcatacttaaataaagcatggcttttggcttgcaagctgaaatggaaaatgttctatgtccaaccatacatatatcgtccatctaaagcttcacttattctattcaacaactcgcaaatctgtgttgcacatttttcccattcacaaacccaatcgtttttcattccccgtgaaataggagctaacaaaaaatgtataaaatttcgccagcaaatctggaacgttaatctcttcgttaaactcaagttatttacaggtcaacaagtcagcagctctttttgcacgggaaacggcaaaaatacaaaaaccaaaccttgaacccatccagttcagcaatagagttccctcggcctaaacgaccatttaacagacacttgtgtggcccattttgtccgccttgccgcgacaaattgtgtaaaaaataaaataggttgctggacaaaaattgcagagaaagccggaaaatttaacaaatcctcaaataatttgaacgtctgggcgcaccaccctctatgctagtgtgtgtgtgtgtttgggggcgtggcaacacggtgacagtataaatttccacctgtgctccgtgcaaggaaaaacatgctgccactgcaattttcgcctttcgcattggaaaatgaatgcaaaagcgagcaaaaatcatcaaaaaaagaagagaaaacctggtatttcacccagccacacacacacaagtgagatcgaaaaaggataataaaaagctcattgcaacaaattcctgcacaattttctggtgttagattagaaacggtaggcgagggcttttgaatggagccacctttaaaaggagaccagacaccacatgaaaccctggtcctccatttttcgactcattccggaggccagcatttttacttttcctattttcttttattatttagcccagctatgcgagtgtgcctcactttcagctgtttgatccttgcactttttcatagcttttcaccctgcaacctccttgttccacccaactatctattttccttttatactttttttttcgtacttgaacatttcccacgttgctttacacttgggcacttgttcgtgggattttatgagcttagttggcgatttagcgatgcttgtcttatttagtttttaaataaatggccaaggatgttaagttggctttgggcttggcgctgttaagaggaacttgttggatttcttatggcggcaacctttatctgatttttaagatttagaaggcattcgctagacttaaaagtcaagaaattactaaatattagtaggtgttcgttttgttttatctatattgttgtatcttaacgatgaagatatgaaatctcttgtcgttccgcaatggttgttccgttcagcgaatgtgctctcaattaccaaacggaagacattaaattgtaatatagcatccaccaaaagccaaccgaaaagtggaaaatgtgccattaaaagccaaacaccacgaagccaactctttaagcgtaaacaaaaaaggagggtgggccagactgtcacgggtttttgtgcttaaatttcataatcaacacaaaggacaggcgcagacacagatacagactgagtcctggatgtcggcgttgaatggctccagcgatccggcagaggggaaaaggcgacttggtcagaattggtggttctgcgattgcaaggactacagctcatgtgcctgtgactgacggagtgggtctgtgttagtgtttgtgtttgtgcaggacaaacaacaacagcaggagcattcattttcgctaaaccagaagaagtgacataaaaatgcattaagctgaaattgtcaacaatttttcaagccacccccaaaggacgaaggagcatcagcatcaacatccccgacgcgttggcgtcatgtccgcctgaataaacctccctctgttttcgaaacgggaggctgataaccccagatggcagtcaaatctgactgaataatgactgcacaatgtcgagatactaatagtgctggatgggtccaaaaagagcggagtgggcaagctgggcatcgtattgggtttcagcgaaataggattttacataatgtcagcacaaattatgatgtatttggcgccagttatccccatgatatttccgaggtcgaggggctaagtgctgaacaaccccaagtttcctgctaatagaaaattaaaatgccagtttgcagtcttggcccatctgttgcatgggtgtaagtgttactcaaaagccaagctccataaacttgtactttgaaaactttccttcacttggctaagatactcatacttaaatagttacttgccggttccttcgtgtaaactgtgtggtcagtcaggcaaattgtgctctccaactgggagttcatgtggaagagaaattatgggctagatggggtcatagtcctggccaaactttcagcttacttttgcatagttttgctcttttcaattagctggccgtaagtttccgaaatatgctttgacagaaagtgtcataatttcagcagcagagagctatgaaaggatattctaaggttgaaattcaattcattctgaacaaaattcaagttaacatttcacaaaatagtcagcaggtgaagaaaagccaataaaatataaattggtatttataatatttttatggggtcatatttgagcattaaaaaaaagagaaatattattgttcgtttatagcgggaaaatgggtaaaaggttatgtaatatttattttaccatttatgtttttctaaatgaaaatttaaaagttaactatatatactttcaactagggcacacgtccttggaaaagagttggaaaagggaggtgcacaaaagtcatgtgcaccatccaattcgattatatgatgtcgcctaatccaactgaaatccttggcctgcacaaatgtaaccaacccgcagagcaatctgttaaccgaagcgacacttggagcactcccatctccagatccacatggtggtgtaattctacccgggtgtaaatcagagcgctgctggacatttgcttgacactcgagtctggtcggcacttcttaatatatgccatgcatgttgcataaacaagatttaaacaaaaggcagcggcagaagcaaatatttgccgccgcgtgtcgccaacaatgaggttggatgctctccaaggatttggtgtagagtgtgggctggatggccagggtggccgtgatgccctgctgaatctgccttttcactgccacactgtgatgccgagtgcggtctcgtttttactttgtgtgcctctcacgttgtgctcgttattcatatttattgcacacgttgtggggacgtagttccacctcctccgtaggaatcctgcgggacctcccgcatccccgttacctcggccatccgacaaatggacgggttgcatgtgcattgtccttgcgagcgcttggtggccagaggttcgggggcctcataggcgtactcctcgtgtctagctgtaaaaactttgcaattacagttatttgatgggattcacaaagcacctcccacggtcgtgctggcttgtttggacattcatttgttgccggattgttgcaaccttgtctatttagtgtggcatgaaatggaagccacagacggcagaaggcgccaaatgacagagaaacagcaaaagagaggctaacctaatgaaagggaattgagttgatgtcgggggaaatcgctttataattgtaacttgactcgaacataggtagtagaatgggttccgaaagctgtgtaattggataaaaatgagagtttccatatctaagatggcccttggcccatgacaggtgtaacagggcccgcgagaaaattgtgtttagattttatatatattttaaggatacgctacaaattcatttgttctaaattgatttttaaatgctgatatacatttttaaatcccatctgacatttgcattaagcatttaactgccgttaagcgtttatcctagatattaaaaatcaaataccttgtctccgagtctatggatgtgtgacaaatgtttgatggccactcagcagcgctaaattttttacaacatggacataaaacaaattttaatttcatctcacataatcaggcaacaatttattcatattttattggtgaaaaacaataaatgcaagcaggtgggagggagtgggttgaacatacaacggctgtttttgtctttgcctgttataagctgatttatattgccagtctgggaccaaaaataaaaatatcgtgacagtaaaacaggaaagccaacatacgtagaaatgtcagacatatcctgaaaatatatttttaaaaatacgtatgggcgcgcatatgggtatgcgagtgttcagtcagttagagatttgtggcataaaaccatgccgaaagccatgtcaatacgtgatcagactggatattaaaatttctaaattcaatggcggttggtcgatatgaagttactctttcgactaaaagtaaattaaaaaacaaatacatgaaaactatttgaaaaggcaagaggaatgaaaatatgtaacatttaaatctgtcatactatttgtatagtcggatttcactttgaatttctacatttccgagattatatattttttatgaatgccgctaagaatttcaagtatcagctcaactgaaagggtaaaagcttggcctaaaatgtcgtgggaattgtcgagtcaataaaatccgcttgggatttatttaataaaaattccaaataataaaacacaaaatgtgcgtaataaattatgcacaacgacctaaaccaaaacgaagaaacgttgttaaaaaaattaaatgataataaaataaaagcaaggagtgaattaaaaatgcgaatcgcgatgattttttatcgcctccggatgatttctattagacacggcccacgggacttgtttgtttagtcccttttcgggaaaagcctggcagctttaaataattaaatataatttgtttttagtctcttttttccatttggcgtgttattgtttcatttcagagatgaccgcagctttacgggatgtccgggttcgagttccccacgcggtgaggcgcagtgaaaaggccatactgaaatgcttctacgatatcgaggatgacagtctgtactcggtgaaatggtataagggcagaagagagttctatcgttacacaccgaaggaaacgccacccatgaaggtctttcacttcccaggagtgaaagtgagagtaagtttaaattaaagtttaaattatattcaatgaaccaacataagcaaatcgcacttcagtttgtattgaaagtcatacaggcaattattataagcatattgtaatacgtaatcttaatcgtgctttagcattttgcgattcaaataactttaccaaatcacactttttttgttagatattgtaataaatctggcgtgggaaactgtattatggcctttgatttttattttagttttctcatgccaattgcaaagccaataaaagagcggacgaaacaggagcaaaaatcgaagccaaataaattaaactaaaccaaacgggttgcggcttaaacaatgtaaaacatttgcatttccagggcattcaaatcgaacgaaacgctacagttaacgaggaggggcagacacatgtgaaatttcaatgcgcaatcaaatcaaaacacggtttttaacttccgcttcatggcagttaggagccggaaaaacagaggacccgtgttctgaacttttgcattccctattccctttcgggtctagatctatgttttttagttttggaaacgctccaagcattgccgggaatatttttcaataaatattggcatttttaaattggtttcaaaattattcaggcgtataaagaaacacgttggcattttatttatttgcttaccgcttttgtgtgtttgtcgtatttttcattctaatttctgtatctcactcatgtgacaaaaaatacgaccaaagttcattcctttatttggagagttatcctttattgaaactagtgaaaataacggcagaatagaatcagttgtcaatagaaaaaggaaatacgcaaaaaaagtgaactgcacaatatacagtcgaaaatttataaaaatatcgaagccgtattcaaatgcctgccagcaagtttattttcaaagtgtgaatacttctgatgcaacgattctgtgtgttttaagcaagacatatggtttccagtgaatggttaagttgttattgatatcaaaatctagtttcgacattgagtacctatttgtacgtaataaaacaaatattaaattataaaacattcctagaagaacgataaatattttggtaccagcatcaaaaaacgggttcatattttaaactatattattaaaagcccctattaaatatgagtaaaaagaatataaatggaagccggaagtaatccaacgagatacgtttgttgaaatttttcatctggccaacaagaacgatatgtataaataaatatgggtagaggttcgctcaggacagttaaaaaaatatatacgttttatatcatcctccactcatggtacctgtatttttgttaactttttttgcagcgcgtgtcctcgaacgagagccaagtggtcctcgatgcggtaacaatggctacatccggtaaatacagttgcgaagtatcggcggatgcgccctcatttcatacattaatagcggcagcagaattggaagttattggtaagtgaaaaatgcattcacgtaaaaataagttgagaaacatttccgcttatattgtcgatgggggtatctgaatctggtgaaattggttaaagaggttgcatggaatcgataagccaagatgctttaagttagcttgagcgcagatattcaactaatttcggtgctcagaaatatgaatgctcaacaaaattaattttcatttcgagtgtctctcaagtcgaacaaaaagtcagaaaagtcaagctttccccaggcggagtcaaagacagagacaaacttgccaacttgaccaactgtcgtattcaattggccagaccaagaccaagaagaagaccatacggaggactcgaaatacttgtgtggggattgtggacataaaacttaaaaataaactccaagttcgaatgttttggcagttaagcagacaaaatacaaacaaatttgagggtaaacgagataaagatgaagacatttaagccggcaaacaaagtgaaagccttgagagcaaacattttcccaatgccaatggagacggtcaataaactgccgaaccgactgtgtgggttgtttgggctaggaaacgttgacgtaggtgagctcaaattggcttgacaaacttttgaaagtgtctatttcatgtatatgtgtcacatggatgcggctctgagtctgcaggcttccatttcgattttcaaggataatggacagctcgaggaattaattttttttttttttaggactgatgagactctgagactgatgcactttgaagaaagtttcctcactttcctcacttgttaggcattcaagatttcaatagatttagatttcaatctattcatcataaaaacgttgttagaatagaaaatatagaacttaaaaaagaatttcggcttagctgatgactcgtcataattagaacataattaaatttttttgtgtatgtgtacgtgttttcgaatttgggtctttgctttgggtctcatcacaacacgaaattaaaattccaattctgcagacctggagagttcgtaattatttcaattatgaaatggtcctcgacgcacatacaaacacacagtcgcacatctgtgggatattgattggggaaaacacacacccacacatgcattcacattgacatccacattacattacacatacccactcggcaatctcaattgacaggacgacaggttgggtcagaagttcgggccggattctggttttccgattgccgcagagaatcaaaaatatagtgacaatcgatccggtttacctttgaactgatgccatctcatttttgcctattttccacatctctgtttacttttttcgtccttgcagaaacgccccacaatgcgccattcataacgggcatacgtcctcgataccgggtcggcgacatattgcgaggtaattgcacatcgcgacactcgcggccagcggccaatctcacatggacagtgaataatgaagaggtgagtgtcgtgcccaaccccccattaatggtgccccaccccacaaaaatcccgcgtaccaacacccctgaatgcgcccgaaattatgcaaacacaattttcttgttttcaagcgttggcatctgctgggaatttatgcgcctgcttttcaatgggtgtgagaggggtgcaaggtccccctgtaattaccagaaaaacatacgcattcgcggatatcaactcaatggttttacgcccatgaaccgcccacatttcggtagcgtcacattttaggtgtagttttttgcttaacctaaccatatccatatccggaatacagggaatatggaaatggaccgcgaaaatcggcagaattaagaggcagaggaaagtcctcttgaatcgtgaacaactttcagcgttttgcatattacaattcggaattatttttgccctcgtcggaatacagaaatactaagaaggccaggagagctatagatggctaatataggtttttattttattatttcggatgtaaaaatatataaatctttacacagtcaaaaaatatacctcatggcacaaaatttatttgtctctatcctgcgaagcaaatcccgacagaaacatacaaaaaatatataataaaactaagctaaataattagcttacatatcctgatcaagcggaaaagggagtgaaagagaaagaagaggcagccgagcgggacagcgacagtttcaccatcactcaacggcaaacaatgcttattgatgctgcataatacaagccacagcggaaacgcggaaatgggtaacaggcggttgagaaaacaaggctaacacgtacactgacgcacaacacatacgtgcatgcaacacacacacacacactcacacagcctcaacgcatataccgttaaaccccacacctacacagaccacaatggggcgatagttgaatggaaaagcgaatgccaccgtactggtagtcgaattgagttgagttggccacgctcggttgattggatctgcgaagcccaggctttcactacattccacgccactccaacccgaaccccgctcgttggccacaaaatgcgcttaaacaataagccaacaaagacataccgccaaaaccaggcaacaaaccatctaaataaacgcgaaatagtgcaactagccgaagtttgacgcacaaaaagaaaaaatctccaattgctcttagcgattttaaagtgaaaacggggatagagggcaatctactttaccagccatgaagtcaatcaaagtcaaagttctaaaagccagaacacgtcaaagataatggctctcaaatgccagaacctggacaagtaaaagtgatttcgatttgcatttaacatttcagttgtgccttctaaaacagagcccagaaacccaataagcccacgaaaactgagtttagaatttataatctattattgttactacttatttacttaaaaccttaaaaaaaccatataagtataaaaaataatcccaatataaatcccattttctccaggtaaatcctgccctagtgcgacaccataaaatacttcgtgatgctcgtaatgacatggaaactgctgtcgtgggcatccactttgtggtcaccgatcaacactttgataatggaaagctaaaggtatgatttttagataccatattttttgccatacacactaacaaatatttttgaaatcaaacagctccgctgcagtgcccaattgcacgatgtctattggaagaccaccgaaaagattatcctcgaaacagatctttttccaaaacacggaaacggtgccaatggaaatcatgtaaatcccgacgatttctatgatcaatatgcactgcacgaggatcatttgcacaataagaagaacagctatctgacgcagctacagggtgagttgaacagcctaatatctttagtgaaacaacacaactacagtacacgaacacttgagcaaaagataagaaagatccaataattacagccgaactttagaagcattttttcctaagtctcaatacctaaatattcatgcattaagctacagaagaagttcgtctgcagttagatggaggaagttccagaatacatcgaatacatgtcctgcatttctgtctgcatttctctctatttctcgctagaattctttttctatcattttgtaccctcaggcgaagaagacgacggaaccgagggcggattaggggatggaggagccgcttggcgtggcgccggttcgtccagttcccgcctgagtccgagctcaagtcaatcctgttggatggtcggtggatcgctaatggcggtgctcagttggacgctggccaggcaattagtgtcgccgttgcaggcgatgatgacaaagaccggcggtgcaacgtgcaacatgagcggaaggtgcgccagccggcggacaagagcccatggaatgcgggtcagcgcaacaaagcaaaagcagaagcaaaggcaaatgcagcaggagcatcgcaagtcctgcctgcgggtgtcgaaaagcagctggaaaggacgtggatatgtgtgtggatgtggattcggcaggatcaacagcagatgtatcaggcaattaacatgattcaattgtcacacaactccagtgccattcgccaggggtagaaattaaagtggagtccagtgaaagctatagttagaggatgttggaggagagttcagcccaaggccaagacccagaagcaactgcaggatgtatctaaagtacttacactaacaagacaccagacactcgtttcagctagctcaaagtaacttcaaatgcatttaggggaagaatacaaagcatacagagacaatgtaaaccagatacgcgatatacaagcaaaacgccagttcatcataaatgcaacgatatctatttgtttgactttcctaggatggagatggtcaggaggttaacgcttttgacagctttcaaaaataagatttcttgtatttctcataatgctaatttaattccaaaacctctccagagataatttcccaaagcaaatgaaaaatgttgtgctaagcttttaaatttaggttctctatacatttatatttatatatcaaagtcaagattatttataaaacctataaatgatatttatatatatatatgtatatgttctatataaaaacaaaattataacatattgcgcctaaatgtatttgccccaaaaagagaacgaaacatagggcaagagtaagcaattaggtcttaagtctaaatattgcctatatatgtaaaagtatatatgtattgtaattgtatatattatataaaagaagcgaaacacaaaggtcgagacatgtatgatataagaatttacggtagataatcaaaataaaaaacgaaagcgaggaataaaagggtattttatttgatggaaactattgcagctaaggcatattgcaactaggtttttcctctttcagataattaacttaaacatctcatttaaataattcctaattaaaacaaaaaacaaattgttttcttccgaatcaccacttaattgctaacgtaattagatttctccctaaaccttcatattcaccatttttccgcacaataacataataaattgctccacatttgtcagtttctcaagaaacaaaaaaattccaaggaacaggctactggcccctggctttgatgatctcggggcattctcttataataaatggccagcaataaatgcgagctggaattggggactcaaaaggacatctcgcaccggccattagcctctgctgttgtccttgttgctgccaaacaattagcataactaaaacgctcaattaagcgcctaaaatgctcctgcagaaggacccccgatcctttgtccaaagctcctgtctcctttgggctaatgcaattttcacctggctctttttattacacacttcttcgctttccctttcccttttctttttattttttttttttgctggccctccttttgcattgtgaattttccttggtttctctcccattgtctgtcgccgcgtaatgtttatttttaattatattttttcgtccattgctgtttttgcccggcgcctccatttggtggtttcatttttgtgcatgtgctctttggtttttgccagcagtcggtgggtgtaataaacgttaatgacggttgaccacaaagagaaatggtcgcacttcattcttggtttatcggggcgaagacaattctccgtcttacaggcattaaattttagtggctccttcttaattggaatattgttatcagctgtttagtggcttaattatctcaacaaaaaaaaaacctatcacgaaatcagctggagttgaatcatgctcttattcaggcgaagtacgaaaatcgtttacc

SEQ ID NO: 9875 - DNA, 2763 bp, DROSOPHILA
aggacgtgcgtagatcatcatttcaattttcgcagtattacgagcatcggaaataacagaaaaaattgtttaaaaaaaaatggttgaactgcactgaaaccgcaggactgaacccaatttttgctgtggcgtgcgtgtgtgcgagatgcagtttttgtgtttctgacatagcatttaccaaaacagaaggcggaaaatagggaaaaggatccgacgaaggatctgcgatagtcccaaactgtgtgtgtgtgggtaaggctgttgcttcgtcgccaccagtgcatgtgtgtgtgtgagtgcgagtgtgtttgtgcagtcacgtgttctaaggtgattttaacgagctccgtgatacgcgaaatgagataaggaacgaggaagcagcagaatcgggaggagtgaacggcttaggcgggcacaaaaaggagcaacaagaagccacgcagccaaagccaacaaccaaatccccattcgccaggacaggatacttgctcggtgcgccttaaaggattctctgataaatcaaccgaaaattgcataaaataaaattgtttgccaaattgtgcgcagcgagagaaccaaaaagcaaaaaaaacaaaaccttatactcacatgtgaaatatgactagccagttgcattgaaagtacaagaaaataataagagagaaaatttacccaaataacctgaagatgcggtttccacagaatgcctatcaaacggcattgaccacgattcttctggcactcacattagagatgaccgcagctttacgggatgtccgggttcgagttccccacgcggtgaggcgcagtgaaaaggccatactgaaatgcttctacgatatcgaggatgacagtctgtactcggtgaaatggtataagggcagaagagagttctatcgttacacaccgaaggaaacgccacccatgaaggtctttcacttcccaggagtgaaagtgagacgcgtgtcctcgaacgagagccaagtggtcctcgatgcggtaacaatggctacatccggtaaatacagttgcgaagtatcggcggatgcgccctcatttcatacattaatagcggcagcagaattggaagttattgaaacgccccacaatgcgccattcataacgggcatacgtcctcgataccgggtcggcgacatattgcgaggtaattgcacatcgcgacactcgcggccagcggccaatctcacatggacagtgaataatgaagaggtaaatcctgccctagtgcgacaccataaaatacttcgtgatgctcgtaatgacatggaaactgctgtcgtgggcatccactttgtggtcaccgatcaacactttgataatggaaagctaaagctccgctgcagtgcccaattgcacgatgtctattggaagaccaccgaaaagattatcctcgaaacagatctttttccaaaacacggaaacggtgccaatggaaatcatgtaaatcccgacgatttctatgatcaatatgcactgcacgaggatcatttgcacaataagaagaacagctatctgacgcagctacagggcgaagaagacgacggaaccgagggcggattaggggatggaggagccgcttggcgtggcgccggttcgtccagttcccgcctgagtccgagctcaagtcaatcctgttggatggtcggtggatcgctaatggcggtgctcagttggacgctggccaggcaattagtgtcgccgttgcaggcgatgatgacaaagaccggcggtgcaacgtgcaacatgagcggaaggtgcgccagccggcggacaagagcccatggaatgcgggtcagcgcaacaaagcaaaagcagaagcaaaggcaaatgcagcaggagcatcgcaagtcctgcctgcgggtgtcgaaaagcagctggaaaggacgtggatatgtgtgtggatgtggattcggcaggatcaacagcagatgtatcaggcaattaacatgattcaattgtcacacaactccagtgccattcgccaggggtagaaattaaagtggagtccagtgaaagctatagttagaggatgttggaggagagttcagcccaaggccaagacccagaagcaactgcaggatgtatctaaagtacttacactaacaagacaccagacactcgtttcagctagctcaaagtaacttcaaatgcatttaggggaagaatacaaagcatacagagacaatgtaaaccagatacgcgatatacaagcaaaacgccagttcatcataaatgcaacgatatctatttgtttgactttcctaggatggagatggtcaggaggttaacgcttttgacagctttcaaaaataagatttcttgtatttctcataatgctaatttaattccaaaacctctccagagataatttcccaaagcaaatgaaaaatgttgtgctaagcttttaaatttaggttctctatacatttatatttatatatcaaagtcaagattatttataaaacctataaatgatatttatatatatatatgtatatgttctatataaaaacaaaattataacatattgcgcctaaatgtatttgccccaaaaagagaacgaaacatagggcaagagtaagcaattaggtcttaagtctaaatattgcctatatatgtaaaagtatatatgtattgtaattgtatatattatataaaagaagcgaaacacaaaggtcgagacatgtatgatataagaatttacggtagataatcaaaataaaaaacgaaagcgaggaa

SEQ ID NO: 9876 - protein, 427 aa, DROSOPHILA
MRFPQNAYQTALTTILLALTLEMTAALRDVRVRVPHAVRRSEKAILKCFYDIEDDSLYSVKWYKGRREFYRYTPKETPPMKVFHFPGVKVRRVSSNESQVVLDAVTMATSGKYSCEVSADAPSFHTLIAAAELEVIETPHNAPFITGIRPRYRVGDILRGNCTSRHSRPAANLTWTVNNEEVNPALVRHHKILRDARNDMETAVVGIHFVVTDQHFDNGKLKLRCSAQLHDVYWKTTEKIILETDLFPKHGNGANGNHVNPDDFYDQYALHEDHLHNKKNSYLTQLQGEEDDGTEGGLGDGGAAWRGAGSSSSRLSPSSSQSCWMVGGSLMAVLSWTLARQLVSPLQAMMTKTGGATCNMSGRCASRRTRAHGMRVSATKQKQKQRQMQQEHRKSCLRVSKSSWKGRGYVCGCGFGRINSRCIRQLT

SEQ ID NO: 9877 - DNA, 8175 bp, DROSOPHILA
agcacctgtacctctgcatttcaattcataacatggtttccatttgaataacaaagatgcttgagaaacacgatgggcttttagcaagtctggatatcatcaaagtgtaaaatcatcaagctttgatgaattattccccttcggtacatttccaattgagatttcttcaaggaacagaaatatatgtgcatttttaacagctgtgcatctgaagatgaaacgaaatgctacaaattcagcaaaaaattgtaaattggacaatgttggaaataaaaactggaaaaatagctggcaacttaccactcacactttgaaatcaatcaaattaaaatcccatccacaaagtcatgtaattatatcacaggagtacgctacacataagtatgttctgagtttattattcatcatattttctttttagtggggaaacatatacatatgtatgtacacttaacaaatacagttaacaaaaggctaatacgtatgcagtaataattttaatataataaaacgactctgctccttgacaacagaaatataatttctcaacttgctctaatagtagaccataagcacaatgatctctttgtcatgtttacgtatagtaatattaagttgcgtcatttaaaaataatgcacacttacagctatatacagtttggaactatgtaatttataattagcaattagatttctcgtttccttttacgtttctcgtaactatttctgttttgtttttcttttgtttatttgtgatagaactctgcgacatagtattttgtacagcatcctttaaggatgcgctccaaggtgacccgccgtccttgccgtgccttaaaattttaaaataattaatttacacaatacacagagttgctcagtcttcaggcgtgtgtgtttctgccgcgggtctcgagttagcattggtcatctaattttcccagcgaccaagcgcaacaatcatccaatccacatttcacacgattccagaggaatcaatctaatacgaggatatgcctatgacgggtgagtactgcaagataaattaagataaattataataagtataccgattaatattatggaagggaaattaaatcatttgcgggtgtgttaaacccaatgcttatcattatacttggatttttatggtaattaataattggagacccacctcctcatccatgacactggtgtggtcgtagatccgcgccggcagatttttgcgcaaactgaagtgatcctctgtggtggtggtcttgcggtagatggggttctcgaagttcatcgagttgatgcgtcgcttgctgcagtagcggtagccaatgagcaggagctgtcagggcaccacataaattgattagttaattgaataccccgaacgtcgccacatctctgcccaatcaacttaccaccgatagcaggacagcgaatccactaagactggctatgaccaccagtgcaataaagccggaatccggctgctcactgggcgttgtggtcttttcgatttgagtatggtttttcactggacgctggtcggcaactgcggaaaaaattaagtcggaattagacaaattttcaataaaataatagatgaacaaaaaacgatcgaacaaatatgaacacaactgccacaaacttatattagtttataaacatattcaaacgtgttatgaaatatgtaacaataaaaacaacatacgttattaacaaatttttagagctaacaaataaattgaaatagttgaaactgtgaacatgctacaaaaagttcaaaaattcttaataattgacacacaacattaaaagcgaattaaatcaggatctaaaacaatccttttcatagcatgctaaatttaatgttttgaacaactacgacatttttccaaccctttaatacagattttgtcgcactatgacagggcttaaacgctacttcaccttcggcaatgataaacaaaagggaaaactgtataaaaaggcaaacggaaatcattgcaataaagaagcagagcaaaaaaaagggaatcaacatcaaaatccaagccgcttagaatccccctcaaatcctccattctccacagcagcgaaggaattttcaatcaaatcgctcaaagtgcgcatttaggcgcaaataaacacttaaacgcgctcgcgcctttgatggcgctaacttttatgcgaaagaagcggcctgccgccgacttagattgggaatgaaaatggcaatgggaatgggaatggtaacctaatgacatcgtttgcgcagcgcatttaatgggatttttgtcaggcgtcgcgggtggacttctttcagtttcctagtcaaaacattaaaagttatcaacattaagttgagccgcactttaaagcaaacactcctctgggtggaggcgtcactcgaaaccaccgatattaacctcatactttgcggctggggatgatggaacaggatgggatgccggttttggggtggtgcttgatggcttctctttagaggtttcaattgcagtgttgtgccaggcgagggcctacttgcggttggcggcaatgcaagtggctcaactgcgttggcatttatgaaactgtcaaggatatatgggtatatacctcttccgagctcctgatgatgattaatgtgggccatgacaaagccaatgttgtgggttggctgcatccgcacaaaaggggctctggtggcgtgcggatcttggggagcagtttgattaatacgcttgcaataaatctgaatcagaatcccacgaaagtgttgataaacagtgcgtgaatcgagaaaaaaacagtgacagggtagacgtcgaacttataaattgagaggaagtcgctgggttgtcaacccatccgaaaggataactatcaagctgctcgagagtcttattaatcaaaatttacgttgacgtagcgctgattaagttttcgtcgcttccgttttgtcagttaaaaatctaaagttgagcgacggtaatgtgtgtgcaagtcgaatgtgttttttgggacatctttgaatgattggcgtgtcaaaataaatttaaatcagcttaacatatttatcgggatatttcttcaactttaagttgaagacaaattgacaaatccacttatttttatgtatgacaaaacaattacaataaatatatgtgtggcaaacgtgataaaattattctttgagcattcaaagaaattgttagacttttttataatgtattaaacatatatttaaatgtggaacaaagaacaacaaaaacaaaaatgactttcgaggacaaaatgggcacaccacttagatggggtggacccctttttagggtggaccacaaaaggacacataaggacatgacacataacgagttggtcactcctaccgaaagtcgtgggcaacaggggtagcctggtgctcagctggagatcatcgttaatttcaatccgaatgtcagcatgtcccacctggacacccgtgggcagccgcctcctcggggattttggcctcggtttcgttttgcgggctcgcgggggtctcgtgactggaggcaaataaagtgctacatgcggatgcaagtcatgccggattgggtaatcgggtttgggggttaattagtaagcataaaatcataatcaaagccatgctggttaagttaaaagcaaaatggctaaagagttactaaaagttctcgagtacttacgatcctcgacgcacatgaggccatcgaccatcagcttcagaccggtgggacaggcgcaggatatgcgaggactcctctcattgatcctgggagctggcaggcagagatgagaacagtggccattcaccgactggcagtgattcacgccatccggctggcggtaaggatggtacacgtgcaccaccattggatgctggagctgtaaagaaaattaataattaatctataagtataggttttgaaggagcgtttgcggtttcacttataagttattatcatcatccaaagcaacttaccatatgcattgctgtaacgggctccacatcctccccggtgaacttgttcgccttgaagacggcctgtttgtcccagtcggtccagtagacattgtcctcgaaggtggtgatcgagaagggatgtcgcaggtattcgccggagtagagcacctggctcctttgcgagccatcatagttcgccgacgagataacgttaagcttgccatctacccagtagatgcgtttcttaaccaggtctaaggtgataccattgggccacttgacgtcatagctgatgatggtggtgcggtgggagccatccatacccgccctttcgatgcgcggagaggcgccccagtcggaccagtacatccagccctcaatgggatccaaagcaattgaacgaggaatgtccagggagtcctttaccaggaccttacccatgctgccctcgaagttggtcagttcgatggtgcacttgtgggtgtccgtaaagtagacatggttatagatccaatcgacagccaggccatccgaggtcaccgaggatttagtcaacactaccgtcttttcgtttccctcatcaatcggtgctttatatatactctgggtggtcacatcgctccagaagatcatacccgtgcggaacacaaagtccagggcagtggctgcctttgtactattcacaatggaggtcatttccatgtggtcgagtgctatcttgcggatgtcatggcgtctggccaggagcagggaggcgtgtccctcgctggccttgcatctggtgtgatttttgggatccctcatgtagcccgcttcgcactcacacttgaagcctcctatttcgttcacgcatatctgagagcactttccgggaacttcgcactcattgatatcctggcagttccgcttgtccggagacaacttgtaaccctcgtggcattcgcagtggtggcccaccttcagatcgatgcactggtgcatgcagcctccgttcttcgaggcgcactcgtttatcccgcactttcctgccggctcgtcctcgccatccggacaatccttcctcttgtcgcagaccttcgagagtggaacgcactgacctccaccgcagtcgaattcgctggttgcgttgcatcctccttggttgatccccagactcagactcaatccgcaatcccgttcgtcgctgccatcggcgcagtccttgtcgccgttgcaggtgagatgtcctggaatgcagctgcgatcgccgcactggaactggtccgcccggcaggtgacgttcttgcagttggctgtgtgctcatcgtcgccatcgggacagtcgcggtcaccatcgcagagccagctgtgatgcaggcaggtgatgcgatccttgcactggtattcgtgcgataagcagggcgtggtcgtcttggtcacattcgcacaggactgaaataaaaagaaacgagaagtttttataagtgttgttcaatatgaaacattccattaatttaaatacttcttcgtgtaagttattgaatgtgctgatatcactttaatttattttattcaagagtaatttgcgcaaaagtattcgaacaatactgctgaggagtccaggatgcacttcaacttaaatagcttaaattgctgacattttccttttgtgggaaaggtgcaaaataaaacgagggttaggctgcggaaccaggcaaagtttccggccctcagtttggcaagttctcctgcggaaaagtatgcaaggggggggggggggggaaatggccgcacacaggggaaattatgcaccccctgagcatgcaaaaatgcaattttatgcgtgccatgcgttgacaacaaaagctgccaaagctggcagggcgctgagttatgcccaacatggccataattcatgtggcttaggcgagcaccaaaaaacgaaaggatgtttcaaaggcaggggcagggttttgtgtctgggtctcggtttgagtaaggataagggtaagtttctctgcggactagcaaggaatggaaatttatggctggcattattcactcacccgctcatcggagccatcggagcagtccggatcaccgtcgcagacccaccgcttggcgatgcaggctccattcgtgcaggtgtgctccgccacggagtcgcagggcaccactgggcactccttctcgtcggatccatcgccgcagtcgtcgtcgtggtcgcacttccatcgcttctggatgcaccgtccattgccgcaggtgaactcgtcggcacgacaggtctggtctgcgaatttatcaaaaatatttaggcttaactcgccacaaagggagttgcaacaaatacgaggcaaacaatagaactcaaagccaaaatgaagtgactgggaagttatgatgggttggaaatgggagttactttatggcgtggggctagagctggaaaatgaagtttaggtaagttgaagttacgatgcacttcgtaaaacgagaaacttccaagaaatgcacaagtaaacaataaaatatattttcaaatgatgtggaaccttttaattgaactttctaacaaagaaaataaacatacacaaatcaaatacgaatgcagtgttattctaccgttttcccacatctggattctaagtacagtaagaaatgattatccgcactccattcggggtcatcggaatccttgccacagtaagctgaaagctcgaatggcaggcaactaaaaaccaaaagccaaatgaagtgcggttgcctcaatagttggagtaagttagcaatgaggtttagttttcagagggtgaatggggctagctcagatgccagttgaatgcggaaggcagctactaaaattgtatttgtacatccagggaaaccttaactagaactcaatgcatttgtcttaactaaagttgaatcgaagcaagtaaatatagataaatttaaactgctccagtgggtagaaaacaaatatataaaacacttgaggtagaggaaaaaattctaagaaatctaaattaaaataagcatttttaagaagcttggtaaaaaatgcagttaactaaagacagattgtaggaatttcagatggaacaagaagaatttctctactccaacttaaagaaggaaagactggtggataattcttactgcagttgtgctcgtcggagccatcgctgcagtccttgctctggtcgcacatccaggccaaaggaacacattgcccctcgccactcttgcaggcatattcatccggtgaacaggttcgagctcctaacgatatcgatgtgcagcgtttattaaagatgggcgaaagggaagagaaagcatcggattgtagttgtcattactttcgacacatcacgcatacgccatgtttaaccattgatttatcgctaacatatacataggggaaacattgccaaatatttggctttcgaacatatctagcaacgtatttaatgcagtgacaccttttagtacatcagaactttactaaagtaaaacatttctacatgtgcctaacaaaaggtaaagtctcctggcaaggagcttacaagtcctaacgctattttatttaagaacaaatcaagttgctcttgtagaagctcgactgtacttgaaccctgaaagcgacaggcatcctgtggcagcagcacacttgtctgcgggtgggtattaaacgaatttcatgcgatattgccgtgccccagcgacaacgcgtcgtatacttgttgtcaagagccgctgggaatgagtacacaatacacccgcgcactcgcaccaacacacaagcacacaaacacatgcatacgtacagcatacacacactcagcactctcactctcaatgacttgattaaacttctaagcacaatgggggggaggggcgaaaattgttgcgaaaattatgcaagcgcgccactccattaagggtgcgtatgagttatgcggcaagttggttagtgaaagcgattaaacggcacacagtgggtgggtgggcagtgtgtggtatttgttattgctttgtttcgtatcgattgcaaggacgtagtggttctagttctaagcttactgcagtgcgcctcatcggacttgtcgcggcaatcgttgctgccatcgcagagccagctgcgcggaatgcactggtcgaccgtttggcatttgaactcgttgttgggacaggcgttcactaaacacaca

SEQ ID NO: 9878 - DNA, 2379 bp, DROSOPHILA
atgtgcgaccagagcaaggactgcagcgatggctccgacgagcacaactgcaaccagacctgtcgtgccgacgagttcacctgcggcaatggacggtgcatccagaagcgatggaagtgcgaccacgacgacgactgcggcgatggatccgacgagaaggagtgcccagtggtgccctgcgactccgtggcggagcacacctgcacgaatggagcctgcatcgccaagcggtgggtctgcgacggtgatccggactgctccgatggctccgatgagcggtcctgtgcgaatgtgaccaagacgaccacgccctgcttatcgcacgaataccagtgcaaggatcgcatcacctgcctgcatcacagctggctctgcgatggtgaccgcgactgtcccgatggcgacgatgagcacacagccaactgcaagaacgtcacctgccgggcggaccagttccagtgcggcgatcgcagctgcattccaggacatctcacctgcaacggcgacaaggactgcgccgatggcagcgacgaacgggattgcggattgagtctgagtctggggatcaaccaaggaggatgcaacgcaaccagcgaattcgactgcggtggaggtcagtgcgttccactctcgaaggtctgcgacaagaggaaggattgtccggatggcgaggacgagccggcaggaaagtgcgggataaacgagtgcgcctcgaagaacggaggctgcatgcaccagtgcatcgatctgaaggtgggccaccactgcgaatgccacgagggttacaagttgtctccggacaagcggaactgccaggatatcaatgagtgcgaagttcccggaaagtgctctcagatatgcgtgaacgaaataggaggcttcaagtgtgagtgcgaagcgggctacatgagggatcccaaaaatcacaccagatgcaaggccagcgagggacacgcctccctgctcctggccagacgccatgacatccgcaagatagcactcgaccacatggaaatgacctccattgtgaatagtacaaaggcagccactgccctggactttgtgttccgcacgggtatgatcttctggagcgatgtgaccacccagagtatatataaagcaccgattgatgagggaaacgaaaagacggtagtgttgactaaatcctcggtgacctcggatggcctggctgtcgattggatctataaccatgtctactttacggacacccacaagtgcaccatcgaactgaccaacttcgagggcagcatgggtaaggtcctggtaaaggactccctggacattcctcgttcaattgctttggatcccattgagggctggatgtactggtccgactggggcgcctctccgcgcatcgaaagggcgggtatggatggctcccaccgcaccaccatcatcagctatgacgtcaagtggcccaatggtatcaccttagacctggttaagaaacgcatctactgggtagatggcaagcttaacgttatctcgtcggcgaactatgatggctcgcaaaggagccaggtgctctactccggcgaatacctgcgacatcccttctcgatcaccaccttcgaggacaatgtctactggaccgactgggacaaacaggccgtcttcaaggcgaacaagttcaccggggaggatgtggagcccgttacagcaatgcatatgctccagcatccaatggtggtgcacgtgtaccatccttaccgccagccggatggcgtgaatcactgccagtcggtgaatggccactgttctcatctctgcctgccagctcccaggatcaatgagaggagtcctcgcatatcctgcgcctgtcccaccggtctgaagctgatggtcgatggcctcatgtgcgtcgaggatctcacgagacccccgcgagcccgcaaaacgaaaccgaggccaaaatccccgaggaggcggctgcccacgggtgtccaggtgggacatgctgacattcggattgaaattaacgatgatctccagctgagcaccaggctacccctgttgcccacgactttcgttgccgaccagcgtccagtgaaaaaccatactcaaatcgaaaagaccacaacgcccagtgagcagccggattccggctttattgcactggtggtcatagccagtcttagtggattcgctgtcctgctatcggtgctcctgctcattggctaccgctactgcagcaagcgacgcatcaactcgatgaacttcgagaaccccatctaccgcaagaccaccaccacagaggatcacttcagtttgcgcaaaaatctgccggcgcggatctacgaccacaccagtgtcatggatgaggagtactcacccgtcataggcatatcctcgtattag

SEQ ID NO: 9879 - protein, 792 aa, DROSOPHILA
MCDQSKDCSDGSDEHNCNQTCRADEFTCGNGRCIQKRWKCDHDDDCGDGSDEKECPVVPCDSVAEHTCTNGACIAKRWVCDGDPDCSDGSDERSCANVTKTTTPCLSHEYQCKDRITCLHHSWLCDGDRDCPDGDDEHTANCKNVTCRADQFQCGDRSCIPGHLTCNGDKDCADGSDERDCGLSLSLGINQGGCNATSEFDCGGGQCVPLSKVCDKRKDCPDGEDEPAGKCGINECASKNGGCMHQCIDLKVGHHCECHEGYKLSPDKRNCQDINECEVPGKCSQICVNEIGGFKCECEAGYMRDPKNHTRCKASEGHASLLLARRHDIRKIALDHMEMTSIVNSTKAATALDFVFRTGMIFWSDVTTQSIYKAPIDEGNEKTVVLTKSSVTSDGLAVDWIYNHVYFTDTHKCTIELTNFEGSMGKVLVKDSLDIPRSIALDPIEGWMYWSDWGASPRIERAGMDGSHRTTIISYDVKWPNGITLDLVKKRIYWVDGKLNVISSANYDGSQRSQVLYSGEYLRHPFSITTFEDNVYWTDWDKQAVFKANKFTGEDVEPVTAMHMLQHPMVVHVYHPYRQPDGVNHCQSVNGHCSHLCLPAPRINERSPRISCACPTGLKLMVDGLMCVEDLTRPPRARKTKPRPKSPRRRLPTGVQVGHADIRIEINDDLQLSTRLPLLPTTFVADQRPVKNHTQIEKTTTPSEQPDSGFIALVVIASLSGFAVLLSVLLLIGYRYCSKRRINSMNFENPIYRKTTTTEDHFSLRKNLPARIYDHTSVMDEEYSPVIGISSY

SEQ ID NO: 9880 - DNA, 5482 bp, DROSOPHILA
gattcagtcgttgattccggcaattctgtagtgcttggattgatttctatttctgtggtagtttttattagttctttctctgaaaattcagaacttaaagtagtcgttgattccggaaattccgtagtacttggcataaactctgttgttgttgattcctgcaatcctgtagagctctgaatggtttctgtagtagtttcttgccatcctgtagataaatctggataaattaacgttgattcagcatattcagtactgtctgaattgctttctgtcgttgaatctgcagcttctggactcgaagttgttgtggaatatagggctactgattcagtggcatctatagcatctgtgctggtgacttccggccaagctgttgtcgtggaatataaagtatccgtggttgaagttacataactagattcggtggttgaataatccaccgccgtagttgtagattcctcagtggcacttttctccgttgtagtagatacttccccagtgaagtagccagtagtctcctgcggattggtggccaccgtagttgtgtcccaaaaatctccatcgaacggattggtaaaatttacgatgcgcggcttgtagggtgtgtagattttggctttgtaaggcttgtggttcttgatgtattccttggctatgctaatccactcctcgcgaccgagaatatcgtttaaatttcggcttgaggccacaaaatgcgccattaaaagaagcaaacagaattttctcattatgatgctgataccttcggttgacactttcgactaattacctttggcgactgcagtgcaatataaacgcaagggtctacctacgtttcaacgcgtattttagctacctgctttcttggcaaaaacgttaattagccctaatgaactggaaaattcaaatgttgccgccagggctgcaagcgcttactttatttgtgctggcaatgccgtaggtaatgccggccgcttaacagctgagtgtttttcggggaagaagaagaacagcgtgtttgcagtccgcgtttttgtgtaaaaattgtgaataattatattatttgcagttttcttacgttttaaagaagaatttagcaatcagaaggtcctgtaacaattggtaagtcggtaaaaacaacaaaaaacaagagtagcataagtttcgagtcaccgtgaaagttttaaattttctaagacgccaccggcaaattttgaatgaaagtattgatatatatatttattttaggaaaaaccatggattccgatttgtacgatgagtttggcaactatattggccccgatttagacagcgacgaggaagatgagcaaagtatttatgggcaacccgatgtgcaggatgacccagaggtataaacgtgcaaaaaataaaataaaacttataattaatttatggtgtttcatttaaaggacgccatggacgaggacgaggtggagccacaggaggacgaggacaaggaggtgaccgccgtggttttgcacgaggacaaacgctactatccgtcagcagttgaggtctacggcccggatgtggagaccattgtccaggaggaggacgcccagccgctggacaagccgcttatagagccagtgaagaagctcaagttccagatcaaggagcaagacatgcaggagaccacctacgacatggagttcatggccgatctcatggacactccgccgcttattcgcaacgtggctttggttggccacctgcaccacggcaagaccacctttgtcgactgcctcatccggcagacgcatccgcaatttgagaccatggaggagcgccagttgcgctacacggacaccctgttcacggaacaggaacgcggctgcagcatcaaggccacgccggtcacacttgtcctgcaggatgtcaaacagaagagctacttgctgaacatcttcgacaccccggggcatgtcaacttctcggacgaggccaccgccgccatgcgaatgagcgatggtgtcgtgctgttcatcgatgccgccgagggcgtcatgctcaacacggagcgactgctcaagcacgcggtgcaagagcgccaggctatcaccgtttgcataaacaaggtgagggtttggccttaaggtgacactaaactttctaatggtttcctctgacgtgcagattgatcgcctcatcctggagctgaaattgccgccccaggacgcctactttaagttgaaacacattgtggaggaagtcaatgggctgctgaggtgattacgtgattcatactcaacactaatgattttactaatgtgtaattttcttacagcacctatggcgctccagatgacaatctcttagtttcgcctattttgggcaacgtgtgcttcgccagctcgttgtacggattttgtttcactctgaaatcctttgccaagctgtatgcagacacctatgagggagtggcttacctggactttgccaagcggctctggggtgacatgtacttcaacagtaaaacgtaagtgctgcctaaatatccaaatcatttgctaataccaactattttaataggcgcaagttctcgaagaagcagccgcacaattcggcacagcgcagctttgtggagttcattttggagcccatgtacaagctgatagcccaggtggttggcgatgtggacaccactttgtcggacactctggccgagctgaatgtgcgcgtctccaaggaggagatgaagtccaatataagaccactgctgcgtctcgtctgtaaccgcttcatgggcgactgcagcggttttgtggatatgtgcgtggagcacattaaatcccctttggaaaatgccaagcgaaaggtggaccatatatacactggacccaaagagggtgacatttaccgggatatgatatcatgcaaccaatacggcactctgatggtgcacagttccaagatgtatcccaacgacgactgtaccttcttccaagtgctggcgaggattgtctctggtactctacacgctggccaggaggtgcgtgtcctgggagagaactacaccttgcaggatgaggaggactctcgcattctgcaagtcggtcgtctgtgggtatttgagtctcgttacaaggtggagttaaatcgtgtacccgccggaaattgggtgctcatcgaaggcatcgatcagtgtatcgttaagacctccacaattgtggatattaatgttccagaagacctctacatattccgaccactgaagttcaacacccagagcattatcaagattgctgtggagccagtgaatccatccgagcttcccaagatgttggatggcctccgcaaggtgaataaatcctatccacttctctccactcgagttgaagaatccggcgagcatgttattctgggcactggcgagctgtacttggattgtgtcatgcacgatctgcggaagatgtactccgagatcgacatcaaagtggcggatcccgtcgtggctttttgcgaaacagttgtggaaacgagttccctgaaatgtttcgccgaaacgccgaataagaaaaacaaaataaccatgatctcggagccactggagaagggactggccgaggacattgagaacggaaccgtctgcataaactggaacaaaaagcgcatcggcgagttcttccaagtcaactacgattgggatctgcttgcggcgcgttccatttgggccttcggtcccgactccacgggtccaaatatcctggtcgacgacaccctgccctcggaagtggacaagaacctgctgaccgcggttaaggattcgattgtgcagggcttccaatggggaacgcgagaagggccgctgtgcgaggagccaatccgtaatgtcaagtttaagattctcgatggcgtcatcgccaacgaggcgttgcatcgaggcggtggacagatcattccaacagcccgtcgtgtggcatactcggcgtttttgatggccaccccacgtttaatggaaccatatctatttgtggaggttcaggcgccggcagattgtgtatccgctgtctatactgtgctggccaggcgcaggtaagttttgctgctcatgtttccgtaagagaatgcctctaaattttatataatctattttgcagaggccacgtaacgcaggatgctcccgtatcgggttctcccatatatacgatcaaagccttcatacccgccattgattcatttggatttgagacggatctccgcacgcacacccagggccaggccttctgcctttcggtgttccatcactggcagatagtgcctggcgatcccctggacaagagcatcataatccggccactggagccgcagcaagcatcccatttggccagagagtttatgatcaagacgcgtcgcaggaagggtctgtccgaggacgtgtccatcaacaaattcttcgacgatcctatgttgctggagttggcacgccaggatgtgctgatcaactacccgctttagacttcccacaaatcaggaatcgggaaaacaaataaaacatttagacatactttccgaatttcaattgcgaactttaaagggagtagtgtttttttttactatatttactaaatatttatttgaagccttttcgggacaaataatttacaaaatagtatacagaaaacagctacagttgtgatagtttctaggactttactcgccattgccgttctgcaggacctccgactcgtagccttcctgctcggcctgctcgtcatcgaactccacttcgtcgtcggcggtagcctcctaaaggaggaaaccaatggaaatcgtttttagagatactttgcaaggatatggagggatcgctaacctggtactgttggtactcggatatcagatcgttcatgttgctctcggcctcggtgaactccatctcgtccatgccctcgccggtgtaccagtgcaagaaggccttgcgccggaacatggcagtgaactgctcggagatgcgcttaaagatctcctggatggcggtcgagttgccaatgaaggtggcggacatcttgagcccacggggcgggatgtcgcagacggccaccttgacgttgttgggaatccattcgacaaagtagctgctgttcttgctctgcacgttgtacatctgcgtgtccacctccttcatggacatgggtcctgttaattattgagagagcgttgaaacaaaattgccttcgtacaatcttcctgtgcgcatttaaacatttacatcaaaagacaagttcgctttgatgcgccggcggaatccccaaatccctgaatatgaaatactaaatggcttccaagttctgcctgcgcacctggccgggcacctgcactgggatctcagctcggagcttgggaatggaaacagtgaaaaagtcccaggaggtaactaaaaaagttgtttaaattcctgctcgctggcattttttccgcacatttttgtgattaattattttgcaagtatttctgg

SEQ ID NO: 9881 - DNA, 3053 bp, DROSOPHILA
ggaagaagaagaacagcgtgtttgcagtccgcgtttttgtgtaaaaattgtgaataattatattatttgcagttttcttacgttttaaagaagaatttagcaatcagaaggtcctgtaacaattgatggattccgatttgtacgatgagtttggcaactatattggccccgatttagacagcgacgaggaagatgagcaaagtatttatgggcaacccgatgtgcaggatgacccagaggacgccatggacgaggacgaggtggagccacaggaggacgaggacaaggaggtgaccgccgtggttttgcacgaggacaaacgctactatccgtcagcagttgaggtctacggcccggatgtggagaccattgtccaggaggaggacgcccagccgctggacaagccgcttatagagccagtgaagaagctcaagttccagatcaaggagcaagacatgcaggagaccacctacgacatggagttcatggccgatctcatggacactccgccgcttattcgcaacgtggctttggttggccacctgcaccacggcaagaccacctttgtcgactgcctcatccggcagacgcatccgcaatttgagaccatggaggagcgccagttgcgctacacggacaccctgttcacggaacaggaacgcggctgcagcatcaaggccacgccggtcacacttgtcctgcaggatgtcaaacagaagagctacttgctgaacatcttcgacaccccggggcatgtcaacttctcggacgaggccaccgccgccatgcgaatgagcgatggtgtcgtgctgttcatcgatgccgccgagggcgtcatgctcaacacggagcgactgctcaagcacgcggtgcaagagcgccaggctatcaccgtttgcataaacaagattgatcgcctcatcctggagctgaaattgccgccccaggacgcctactttaagttgaaacacattgtggaggaagtcaatgggctgctgagcacctatggcgctccagatgacaatctcttagtttcgcctattttgggcaacgtgtgcttcgccagctcgttgtacggattttgtttcactctgaaatcctttgccaagctgtatgcagacacctatgagggagtggcttacctggactttgccaagcggctctggggtgacatgtacttcaacagtaaaacgcgcaagttctcgaagaagcagccgcacaattcggcacagcgcagctttgtggagttcattttggagcccatgtacaagctgatagcccaggtggttggcgatgtggacaccactttgtcggacactctggccgagctgaatgtgcgcgtctccaaggaggagatgaagtccaatataagaccactgctgcgtctcgtctgtaaccgcttcatgggcgactgcagcggttttgtggatatgtgcgtggagcacattaaatcccctttggaaaatgccaagcgaaaggtggaccatatatacactggacccaaagagggtgacatttaccgggatatgatatcatgcaaccaatacggcactctgatggtgcacagttccaagatgtatcccaacgacgactgtaccttcttccaagtgctggcgaggattgtctctggtactctacacgctggccaggaggtgcgtgtcctgggagagaactacaccttgcaggatgaggaggactctcgcattctgcaagtcggtcgtctgtgggtatttgagtctcgttacaaggtggagttaaatcgtgtacccgccggaaattgggtgctcatcgaaggcatcgatcagtgtatcgttaagacctccacaattgtggatattaatgttccagaagacctctacatattccgaccactgaagttcaacacccagagcattatcaagattgctgtggagccagtgaatccatccgagcttcccaagatgttggatggcctccgcaaggtgaataaatcctatccacttctctccactcgagttgaagaatccggcgagcatgttattctgggcactggcgagctgtacttggattgtgtcatgcacgatctgcggaagatgtactccgagatcgacatcaaagtggcggatcccgtcgtggctttttgcgaaacagttgtggaaacgagttccctgaaatgtttcgccgaaacgccgaataagaaaaacaaaataaccatgatctcggagccactggagaagggactggccgaggacattgagaacggaaccgtctgcataaactggaacaaaaagcgcatcggcgagttcttccaagtcaactacgattgggatctgcttgcggcgcgttccatttgggccttcggtcccgactccacgggtccaaatatcctggtcgacgacaccctgccctcggaagtggacaagaacctgctgaccgcggttaaggattcgattgtgcagggcttccaatggggaacgcgagaagggccgctgtgcgaggagccaatccgtaatgtcaagtttaagattctcgatggcgtcatcgccaacgaggcgttgcatcgaggcggtggacagatcattccaacagcccgtcgtgtggcatactcggcgtttttgatggccaccccacgtttaatggaaccatatctatttgtggaggttcaggcgccggcagattgtgtatccgctgtctatactgtgctggccaggcgcagaggccacgtaacgcaggatgctcccgtatcgggttctcccatatatacgatcaaagccttcatacccgccattgattcatttggatttgagacggatctccgcacgcacacccagggccaggccttctgcctttcggtgttccatcactggcagatagtgcctggcgatcccctggacaagagcatcataatccggccactggagccgcagcaagcatcccatttggccagagagtttatgatcaagacgcgtcgcaggaagggtctgtccgaggacgtgtccatcaacaaattcttcgacgatcctatgttgctggagttggcacgccaggatgtgctgatcaactacccgctttag

SEQ ID NO: 9882 - protein, 975 aa, DROSOPHILA
MDSDLYDEFGNYIGPDLDSDEEDEQSIYGQPDVQDDPEDAMDEDEVEPQEDEDKEVTAVVLHEDKRYYPSAVEVYGPDVETIVQEEDAQPLDKPLIEPVKKLKFQIKEQDMQETTYDMEFMADLMDTPPLIRNVALVGHLHHGKTTFVDCLIRQTHPQFETMEERQLRYTDTLFTEQERGCSIKATPVTLVLQDVKQKSYLLNIFDTPGHVNFSDEATAAMRMSDGVVLFIDAAEGVMLNTERLLKHAVQERQAITVCINKIDRLILELKLPPQDAYFKLKHIVEEVNGLLSTYGAPDDNLLVSPILGNVCFASSLYGFCFTLKSFAKLYADTYEGVAYLDFAKRLWGDMYFNSKTRKFSKKQPHNSAQRSFVEFILEPMYKLIAQVVGDVDTTLSDTLAELNVRVSKEEMKSNIRPLLRLVCNRFMGDCSGFVDMCVEHIKSPLENAKRKVDHIYTGPKEGDIYRDMISCNQYGTLMVHSSKMYPNDDCTFFQVLARIVSGTLHAGQEVRVLGENYTLQDEEDSRILQVGRLWVFESRYKVELNRVPAGNWVLIEGIDQCIVKTSTIVDINVPEDLYIFRPLKFNTQSIIKIAVEPVNPSELPKMLDGLRKVNKSYPLLSTRVEESGEHVILGTGELYLDCVMHDLRKMYSEIDIKVADPVVAFCETVVETSSLKCFAETPNKKNKITMISEPLEKGLAEDIENGTVCINWNKKRIGEFFQVNYDWDLLAARSIWAFGPDSTGPNILVDDTLPSEVDKNLLTAVKDSIVQGFQWGTREGPLCEEPIRNVKFKILDGVIANEALHRGGGQIIPTARRVAYSAFLMATPRLMEPYLFVEVQAPADCVSAVYTVLARRRGHVTQDAPVSGSPIYTIKAFIPAIDSFGFETDLRTHTQGQAFCLSVFHHWQIVPGDPLDKSIIIRPLEPQQASHLAREFMIKTRRRKGLSEDVSINKFFDDPMLLELARQDVLINYPL

SEQ ID NO: 9883 - DNA, 7085 bp, DROSOPHILA
tttgtcttgaaggaaagaaagactattcaactatttgaaagactattcaaatccatatcattttttataaaatcgaatttaccatcgttaggtagaatgtgtgtataatacatacattttactttacacgatattaacttccactctacattacctggtggcgccatctaggagtcccggttagacaattaaaaaaccattaataaaagtcaatatttaatttttaaaaatactgcattttacaattaaaaatattgtttgttacattttacgttcactaaaattaactataaatatgaatttacttcaatttgtttattgcaaagacctacgtcgtatgaataactaactattcatttgtattatctatgaataaatgatataggaggattaaagattaaacaaaaaacacacgtattaatgaggcactttttggtgtttataacaattaagaagacagttcaattagtcgcatattcgtcaatattgcttcataatatagttatctatttacactttttaaactaaatattaaactaagtctaggcgttaaatgcatttaaatcaaaattgcgtacttaggttttaaccaattgtgaattttctgtcaggtttcggaaaatttggcacacggaatttcaaaagactgtctcacctatcgaatattacatcatttatacctaaggtaattgctaataatctgcagtctattgttgcgtatggtagctgcaaagcattgtactgcaatctatttcgggctatctggcaaaatgaaacttaacgagatcgaataagtccttcaggcatggacgctctctctaagctatgattaaaattagttaaagccttaaatgaccaattaaactcacatacatatttacaaatcagttgtagcaattagaattgggaaaataataaaaaaaaagttcataaaacgaaaagctttgcaaagaagtgatatgttgctcctcctctcaatttacatgtaactctcaaaatgttacgtaaatccccgactcggcgactgtactggtgatggcggaggcgggagcggcgagaagtacgtggagctccgcgatgacggcgatggcgggcaggaggattccggcacaatgcgcacatcgctgtggtaatgggagcgtggtgtcggcggcggcggatacggctcactatcgtagccatattgcaagcaggcggccgccgaactggaagaatgctttgtggctcccccattactgttattgctgttcgatttgctcgtataattcgagtcagactcatcacaaatgtccgttgagcagggtgttggcggtggaggctgattgatgatcttgtagtgcctgtacgggcgacgcgatctggttgctggcgacggtggtggattgattggatacgccaccatactgctaccattcgtcgttgagcttgaggcgcctgtgatatgattgcgatcgtaggaattcatgctgttgcgcgagttcagcgtagacatgcgtactgcatccgcaaccgaagcgattttggaaaccctttgcgatttgctcagcgtcgagggtgacaatggatcagtggcctggtcatccttaggctctgttcgactctttccaatacgcgtgcgacagaactgcagcaaatagacaatcgaaaatatggtgatcatggtagcgccaatcaaaatcataaaggcacgtttgtcggtagcaggtgccatgcggcgttgcaggcagatatccgaggattcatcagctccatcggcgcagttctcccatccatcgcagagcagtgcggccgagatgcagagctaaaagattttcaaatgagttaaagcaattcagctgtttgtggtaactaacaacataccttgttaatgggacactggaactcccctggtcgcttgcaacaatcggcttcatcatgaccgttggcacaattggtggtgccatcgcacaccagcgacttgtcgatgcactcgcccgactgacagctgaactgatctgcccggcaagtgggacaacccacctcgtctgacttgtccggacagtccttctgtccgtcacaacgccacgaggctgggatgcagtctttgttcacgtcactgattcccgatacgggagctgcgcacgtaaaatgatccgggccacaggcgggaaaagcgccacagttctccttgtcctccagcaacattagatgctttgggcaggagcagacgtcgcgggttctagcgattccttcaccgctggcaatacagatgtgcgagcacttggttcggctgtgcatgcacgtgtgatttcgcaggactttcggatctggcgtccaaacggcccggatatcggtgatctgaggtaggcgctgcagttcagcagatcgtctttcgccattcaccgtgatacgttccacgccggttttatcatccagccagtagacaaagccacccaaggcagcgatgttgatcacttgcgaaatgtgcatagaaacaagtgtttttctaggggagcaaacacaatgatattcaaatccaaaataagtataattttccttaaaacttacttgttttttccgttgatgtcaatggcatcgatccgcttgccatgtgcatagtaaatcatatcggactgctgatccaaagctaaggcagttacgccctccagtttgtaagccagctccacgcgctcattgccatcaactcgggcacgtattatagcctgatggctaccaacatctgtccaaaagagcaggcgcttcatggcatgcactgcaatgttgcgaggcttctctgaatctcccgtatcgatgacgccaacggattcgcccaggaaactaaagatacaaagtattattaaacccatttttgttattctaatgggtatattagatatttacctagtaacgttgatgctgttagactgggagcaagtccagaagagcagacgcccaataatgtcgatggccaggtcaaaaggctggccggaattggccaataagctgactttggtcccattggcaagtgatcgtttgatgctgtgacttctgccttcaatctaggtttgaagttatgcaattattaaagttatttcttcaataagataaactacaagcttacccaataaatatggtgagtgatgggatcatagtccacagcacgaatattcttgccagaaacgggcagtggaatatttgggcaatccgtagtgttcggtagcaatcgcccaaaacagttcctctgactgaagataatgtagtttctgggcggaatacatgagacgccgtccttggccaactggtagtgagtgggacaggcgcaggtcatgccccgtcttccgggttgagccaagcagagatgtgaacatcctccattgttcaccttgcacggattaacacctgtctggcgtttatcgttgaacaccagcagcgaggtgatgtacgtcatgcccgagtgcaccaggctgcgattctgacccgtagtcttgtgcacacgctcaatgtctccagtgttccagtcgctccagtacacatagtcttggtacaaggacaccgcatacggctcatccatatcgctgccaaccagtatctgccgcttcttaccatcccaatcagcactttcgattttagctggccgcgattgggtggcccagtacagacgtcttgtctcctggtcgaaggttagtccggcggcatgattggcacccgctacgatggtctgcaagtcagatccgtccattgccgctctgcgaatcgaatctgtcggcgattccgtccagtacatatagcctcgtcgcggttctaggaccaaggaacgtggctcctccactcctttccacagaagcacccgccgactgctgccatctaggcgagcaacttcaatgcgacgcgcttctgcatctgaccagtaaatattattggccaaccaatcgacagcgatgccatcaggaccaattagacctgagtccacaattcgctgaacgtacgaaccatttaaaaaggctcggaaaatacacttgctcttctgatctgtccagtaaatccttcgctcagccacagaaacatccagagcatgtgcatcccgcacatccttgaacggtatccgctcgtcgttgtggttaccctcgttgtactctatagaaatccgaccaatgtgctcctggcgtgagaatagtaggaaagcagctggcaccacacatgttcgcttgtcgttggccagctcgtaatcaatggcacaacggcaaacataatccctgggacgattcaggcagagatgcgagcatccaccattacgcacggcacaagcattctgtcccctcacttcccgcaaacgtgtcacctttaggcccatcaaatccggatactgatccacaaccactatccgattgttgcctgttatcttgtgggcgcgatctatcgatcgacgttgccagtctgtccagtataggtaatcatccaggatgctcaggccaaacagatgcttcagattgtcgctgatcaccactcgtcggccagacccatccatgttggccacctcgatcttgtccgtcttgccatcgcaccagtagatggccttggcctcaatatccaaggcaatgccattgggccagcccagattctcggagaccagaaccacacgctcggatccatccagcgaagcgcgctccaccttgggcttacgctcgttccagtcactccagaacatccagcccagcgaaggagccactgcaatggctctcggctcctccaaatgctcatagatcagcacttttcttgccgtaccatccaggcggcagacctctattcgatccgtcaccgtatccgtccagtagagattgcgagccagccaatccaatgccaaaccatcgggatgcctgacctccgaggtcacaaagtcagtcacaccggtgccatcggcatgagctctcttgatcgtgtacgtctccacatcggaccaatagatatgctcctccactggatcgtaatctatggctattgcgtacttaaccttccccaaaggcagcgggaatatagtgtaatccggtgagtccagggatatcttactaatctgcgttcgctgcacaatgaacatcatctcctgcgaaccattggcacacgtatttgcagagattagcttcactccagtgggacaggcgcaactaaatccttgcgagtttgtcgccagcaggcagagatgtgagcaatttccattgttgtgagcacagggattatcctcataaggctggagtgagggatcccatgctctgacagagttcggtgccttgggcgtgtctattagctcctttagttcacgggtttgcagatccaaagcgttcagggagcccctctgccaatccgtccagtacaaacgatcatcgtagaaggtcaaactaaatggatacttcaggttgttgactatcgttcgccgactgcttccatctagtctcatcacatcgatgaaatggtgcttgccatctgtccagtagatgagctcgttctttaggtctactgccaatccgttgggccagaacacatgctccttgaccaatgtcatgcgtgacaatggatctccgtccatgctggctcgctcaatcttcggatactccccccaatccgtccagatgagcaattttcgagcaggaaccacggccaccgctcgcggctgatccagatctgtccagaacagcaccttctggtagcgaccatccagcgtggccacctcaatgcgattcttttcgccatccgtccagtagatcttgtccgtataccagtccatggccaggccctcgggcttgtccagacccgtggatatcacagtttgcttgggcgcccgcaatagcggctgcagtgcggatgagttcgtttgcgcacactcaatgatctcccgtccggaatccgtccagcagaccagattcttagcgtagtagaaatcgatggccatcgcctcggccagatccctaacgatcacatcgatctgaggtccgcccgttggcctcgtgatgttcgccacctggatgtcgtggcgcgtggtaaagagcagggtggccggcgtattgacaaacgcactggctggcgggctggcgatcagggatgaggagctgggcatgtgaactgcaagtaaatgggagtatatataaactgggttagtagtgcaatatttatgatttaaacacattgctctcgcacttattttaaagaatttatagctaacagttctagttcggtttctttctttctaagcaacttttaattaatattcaagcatgttgccttcgccaccaactattaaataagcaacaagattcgcgggctcaagtggttaacaatatggcagagccggaattgttggcgtagtaaatggtaaatgcaatcgcaactatacgcccaggcaggtcggtctttgtttaccatttatgtgcctgaacatgtgcatatggatgtggatgtgccacatatgcgagtgggtgactggttggccaagttcgtcggctgggtggctgcagcactccgagcttctgttcgctgcagcgctgatctaattgcgtatgaataagctcatggaggcgcaccatgtggaacaaatttcagccgcttgcctactgcactgccactaaaataataatttgctcatgaactgcgtaactttaatgggcggctgcgaaaaatatttattaaaaaatgcttaaaagcagtggttgtggtggtctgcagcaacaagtttaaaaaccaattaaaaaacgtatgcagattgggaacttaataaaaggcttataaaataacaatttccttttaaaatatggaataaaatatgcttcaaaataccccccattgaatatttaagcaattcaagtatttttactagaccattttgaagatgggtccactttcagctgctgaaaatgttgacccacaaggcaacaggagctgagctgcgcgggatgcaatgcctgccccacccccgttccctgccatcatccgacctgtcagcgcgtcaggcatttgcaatatttatgcaaccaggcggaggagccagcaggcactcgagtaatccatcaagcaccgagggcttttggcggcaggtggggggtgggtgggtagaaactgac

SEQ ID NO: 9884 - DNA, 4839 bp, DROSOPHILA
atgcccagctcctcatccctgatcgccagcccgccagccagtgcgtttgtcaatacgccggccaccctgctctttaccacgcgccacgacatccaggtggcgaacatcacgaggccaacgggcggacctcagatcgatgtgatcgttagggatctggccgaggcgatggccatcgatttctactacgctaagaatctggtctgctggacggattccggacgggagatcattgagtgtgcgcaaacgaactcatccgcactgcagccgctattgcgggcgcccaagcaaactgtgatatccacgggtctggacaagcccgagggcctggccatggactggtatacggacaagatctactggacggatggcgaaaagaatcgcattgaggtggccacgctggatggtcgctaccagaaggtgctgttctggacagatctggatcagccgcgagcggtggccgtggttcctgctcgaaaattgctcatctggacggattggggggagtatccgaagattgagcgagccagcatggacggagatccattgtcacgcatgacattggtcaaggagcatgtgttctggcccaacggattggcagtagacctaaagaacgagctcatctactggacagatggcaagcaccatttcatcgatgtgatgagactagatggaagcagtcggcgaacgatagtcaacaacctgaagtatccatttagtttgaccttctacgatgatcgtttgtactggacggattggcagaggggctccctgaacgctttggatctgcaaacccgtgaactaaaggagctaatagacacgcccaaggcaccgaactctgtcagagcatgggatccctcactccagccttatgaggataatccctgtgctcacaacaatggaaattgctcacatctctgcctgctggcgacaaactcgcaaggatttagttgcgcctgtcccactggagtgaagctaatctctgcaaatacgtgtgccaatggttcgcaggagatgatgttcattgtgcagcgaacgcagattagtaagatatccctggactcaccggattacactatattcccgctgcctttggggaaggttaagtacgcaatagccatagattacgatccagtggaggagcatatctattggtccgatgtggagacgtacacgatcaagagagctcatgccgatggcaccggtgtgactgactttgtgacctcggaggtcaggcatcccgatggtttggcattggattggctggctcgcaatctctactggacggatacggtgacggatcgaatagaggtctgccgcctggatggtacggcaagaaaagtgctgatctatgagcatttggaggagccgagagccattgcagtggctccttcgctgggctggatgttctggagtgactggaacgagcgtaagcccaaggtggagcgcgcttcgctggatggatccgagcgtgtggttctggtctccgagaatctgggctggcccaatggcattgccttggatattgaggccaaggccatctactggtgcgatggcaagacggacaagatcgaggtggccaacatggatgggtctggccgacgagtggtgatcagcgacaatctgaagcatctgtttggcctgagcatcctggatgattacctatactggacagactggcaacgtcgatcgatagatcgcgcccacaagataacaggcaacaatcggatagtggttgtggatcagtatccggatttgatgggcctaaaggtgacacgtttgcgggaagtgaggggacagaatgcttgtgccgtgcgtaatggtggatgctcgcatctctgcctgaatcgtcccagggattatgtttgccgttgtgccattgattacgagctggccaacgacaagcgaacatgtgtggtgccagctgctttcctactattctcacgccaggagcacattggtcggatttctatagagtacaacgagggtaaccacaacgacgagcggataccgttcaaggatgtgcgggatgcacatgctctggatgtttctgtggctgagcgaaggatttactggacagatcagaagagcaagtgtattttccgagcctttttaaatggttcgtacgttcagcgaattgtggactcaggtctaattggtcctgatggcatcgctgtcgattggttggccaataatatttactggtcagatgcagaagcgcgtcgcattgaagttgctcgcctagatggcagcagtcggcgggtgcttctgtggaaaggagtggaggagccacgttccttggtcctagaaccgcgacgaggctatatgtactggacggaatcgccgacagattcgattcgcagagcggcaatggacggatctgacttgcagaccatcgtagcgggtgccaatcatgccgccggactaaccttcgaccaggagacaagacgtctgtactgggccacccaatcgcggccagctaaaatcgaaagtgctgattgggatggtaagaagcggcagatactggttggcagcgatatggatgagccgtatgcggtgtccttgtaccaagactatgtgtactggagcgactggaacactggagacattgagcgtgtgcacaagactacgggtcagaatcgcagcctggtgcactcgggcatgacgtacatcacctcgctgctggtgttcaacgataaacgccagacaggtgttaatccgtgcaaggtgaacaatggaggatgttcacatctctgcttggctcaacccggaagacggggcatgacctgcgcctgtcccactcactaccagttggccaaggacggcgtctcatgtattccgcccagaaactacattatcttcagtcagaggaactgttttgggcgattgctaccgaacactacggattgcccaaatattccactgcccgtttctggcaagaatattcgtgctgtggactatgatcccatcactcaccatatttattggattgaaggcagaagtcacagcatcaaacgatcacttgccaatgggaccaaagtcagcttattggccaattccggccagccttttgacctggccatcgacattattgggcgtctgctcttctggacttgctcccagtctaacagcatcaacgttactagtttcctgggcgaatccgttggcgtcatcgatacgggagattcagagaagcctcgcaacattgcagtgcatgccatgaagcgcctgctcttttggacagatgttggtagccatcaggctataatacgtgcccgagttgatggcaatgagcgcgtggagctggcttacaaactggagggcgtaactgccttagctttggatcagcagtccgatatgatttactatgcacatggcaagcggatcgatgccattgacatcaacggaaaaaacaaaaaaacacttgtttctatgcacatttcgcaagtgatcaacatcgctgccttgggtggctttgtctactggctggatgataaaaccggcgtggaacgtatcacggtgaatggcgaaagacgatctgctgaactgcagcgcctacctcagatcaccgatatccgggccgtttggacgccagatccgaaagtcctgcgaaatcacacgtgcatgcacagccgaaccaagtgctcgcacatctgtattgccagcggtgaaggaatcgctagaacccgcgacgtctgctcctgcccaaagcatctaatgttgctggaggacaaggagaactgtggcgcttttcccgcctgtggcccggatcattttacgtgcgcagctcccgtatcgggaatcagtgacgtgaacaaagactgcatcccagcctcgtggcgttgtgacggacagaaggactgtccggacaagtcagacgaggtgggttgtcccacttgccgggcagatcagttcagctgtcagtcgggcgagtgcatcgacaagtcgctggtgtgcgatggcaccaccaattgtgccaacggtcatgatgaagccgattgttgcaagcgaccaggggagttccagtgtcccattaacaagctctgcatctcggccgcactgctctgcgatggatgggagaactgcgccgatggagctgatgaatcctcggatatctgcctgcaacgccgcatggcacctgctaccgacaaacgtgcctttatgattttgattggcgctaccatgatcaccatattttcgattgtctatttgctgcagttctgtcgcacgcgtattggaaagagtcgaacagagcctaaggatgaccaggccactgatccattgtcaccctcgacgctgagcaaatcgcaaagggtttccaaaatcgcttcggttgcggatgcagtacgcatgtctacgctgaactcgcgcaacagcatgaattcctacgatcgcaatcatatcacaggcgcctcaagctcaacgacgaatggtagcagtatggtggcgtatccaatcaatccaccaccgtcgccagcaaccagatcgcgtcgcccgtacaggcactacaagatcatcaatcagcctccaccgccaacaccctgctcaacggacatttgtgatgagtctgactcgaattatacgagcaaatcgaacagcaataacagtaatgggggagccacaaagcattcttccagttcggcggccgcctgcttgcaatatggctacgatagtgagccgtatccgccgccgccgacaccacgctcccattaccacagcgatgtgcgcattgtgccggaatcctcctgcccgccatcgccgtcatcgcggagctccacgtacttctcgccgctcccgcctccgccatcaccagtacagtcgccgagtcggggatttacgtaa

SEQ ID NO: 9885 - protein, 1612 aa, DROSOPHILA
MPSSSSLIASPPASAFVNTPATLLFTTRHDIQVANITRPTGGPQIDVIVRDLAEAMAIDFYYAKNLVCWTDSGREIIECAQTNSSALQPLLRAPKQTVISTGLDKPEGLAMDWYTDKIYWTDGEKNRIEVATLDGRYQKVLFWTDLDQPRAVAVVPARKLLIWTDWGEYPKIERASMDGDPLSRMTLVKEHVFWPNGLAVDLKNELIYWTDGKHHFIDVMRLDGSSRRTIVNNLKYPFSLTFYDDRLYWTDWQRGSLNALDLQTRELKELIDTPKAPNSVRAWDPSLQPYEDNPCAHNNGNCSHLCLLATNSQGFSCACPTGVKLISANTCANGSQEMMFIVQRTQISKISLDSPDYTIFPLPLGKVKYAIAIDYDPVEEHIYWSDVETYTIKRAHADGTGVTDFVTSEVRHPDGLALDWLARNLYWTDTVTDRIEVCRLDGTARKVLIYEHLEEPRAIAVAPSLGWMFWSDWNERKPKVERASLDGSERVVLVSENLGWPNGIALDIEAKAIYWCDGKTDKIEVANMDGSGRRVVISDNLKHLFGLSILDDYLYWTDWQRRSIDRAHKITGNNRIVVVDQYPDLMGLKVTRLREVRGQNACAVRNGGCSHLCLNRPRDYVCRCAIDYELANDKRTCVVPAAFLLFSRQEHIGRISIEYNEGNHNDERIPFKDVRDAHALDVSVAERRIYWTDQKSKCIFRAFLNGSYVQRIVDSGLIGPDGIAVDWLANNIYWSDAEARRIEVARLDGSSRRVLLWKGVEEPRSLVLEPRRGYMYWTESPTDSIRRAAMDGSDLQTIVAGANHAAGLTFDQETRRLYWATQSRPAKIESADWDGKKRQILVGSDMDEPYAVSLYQDYVYWSDWNTGDIERVHKTTGQNRSLVHSGMTYITSLLVFNDKRQTGVNPCKVNNGGCSHLCLAQPGRRGMTCACPTHYQLAKDGVSCIPPRNYIIFSQRNCFGRLLPNTTDCPNIPLPVSGKNIRAVDYDPITHHIYWIEGRSHSIKRSLANGTKVSLLANSGQPFDLAIDIIGRLLFWTCSQSNSINVTSFLGESVGVIDTGDSEKPRNIAVHAMKRLLFWTDVGSHQAIIRARVDGNERVELAYKLEGVTALALDQQSDMIYYAHGKRIDAIDINGKNKKTLVSMHISQVINIAALGGFVYWLDDKTGVERITVNGERRSAELQRLPQITDIRAVWTPDPKVLRNHTCMHSRTKCSHICIASGEGIARTRDVCSCPKHLMLLEDKENCGAFPACGPDHFTCAAPVSGISDVNKDCIPASWRCDGQKDCPDKSDEVGCPTCRADQFSCQSGECIDKSLVCDGTTNCANGHDEADCCKRPGEFQCPINKLCISAALLCDGWENCADGADESSDICLQRRMAPATDKRAFMILIGATMITIFSIVYLLQFCRTRIGKSRTEPKDDQATDPLSPSTLSKSQRVSKIASVADAVRMSTLNSRNSMNSYDRNHITGASSSTTNGSSMVAYPINPPPSPATRSRRPYRHYKIINQPPPPTPCSTDICDESDSNYTSKSNSNNSNGGATKHSSSSAAACLQYGYDSEPYPPPPTPRSHYHSDVRIVPESSCPPSPSSRSSTYFSPLPPPPSPVQSPSRGFT

SEQ ID NO: 9886 - DNA, 3298 bp, DROSOPHILA
taggatatcttcgtccatgcttggggcggggttatcggggatggggaaagtgcagacacacggggatctctggagaaacgtgactatttggctgcgatggttgttaaatgcgttatgaccacagggggactctttggattagtcgcaatgcacatgcaccactatcgcgtacatttctggaaaggaaggggcaaggggaaacctcgattagcacacacacagtgggagaaagacaggtggccgggggctttggtttcgtgcgctctggtgacaacgcccactttcccaaaagtgggctggtctcttctgatcagaacatcgcttccggagcagacacacctgcaggaacactgttgcgcggtggccttccatcggacgcactgccgcctttcgtcacggcattccccgcctgctgctcatcaaatgtccgccgttttttctgcgcctaatatagtttaattcgccaattgacttaatttatttctattattgttgtctcggtacagcgataccatcgatgtttacacaaatttggcaataatcgatatccccaactggggaaatcatcgattacttgctttcttgctgtaaatatccgcatctggcaacgcttttaacaggttttaaaatgtcaagcgttatttccgttactatccccaaacatttttttaatttacccgaatatctagatcttcttgtttggacataaaggtctggttattgttcacatcaaattgctgaactcctctaaagttcgtttagtgcccaattaacccgtgaatagttttaaatttccaaaagattcttgtttattcctctttaatttgttatctgtaaatatttaagcaaagcaatgcattgcattactttcgtttaactactctaatttagcagcattataattaagaaaagacttttatttaagaaatggacgcaaccaacgccaagtccacatcacaaactgcacagtaaattttgccataaatttcggattccccgcttaaaccacgggataggagcactcctcagcaatgaagcagtagtttttgccgcgaggcaggcggaagtagcccttttcgccccaggtgtcgtcccaggagttcttgacgatccagtaatcctgtcctttctccgatccgtaaccgacgaccagaatggagtggttcggctcgcccttgttgcactcatcgtcgttatagatgccaccggcgtagttcttaagagtctccaaaccattcaccgaacaggcaactggtcccagagtggccaccaccttcttcagctgctcctcgtccttgggcggaatagcggcgaatccctggagggtggctccggacttgctgccatcgtacttgcacgtgcccttgttgtcaatgtagggataggccccctcctgggacacacccttttgcacctcatcgatgaaacagaatgcggcctcctggaagccaccatcgcagccattcaggccaaagtcctccaccggaccacagtcgaccagattctgctcagagagattgggcaggctgccggtcttgcggaaggtgtgtccctcaatggcaccagtggtggcaaaggcccaacaggagccacaggtaccctggaatttgactggtgtgacaccgccatgctcgcgccaatcgaaggcatccgggatgggcttcgcaggcaggttgaccaacttcaaactggcagcagctcgagccctgggtgcagatatagaattgataaaatcctatgccggctgtgcaaatggtttgttagcacttacttagcctccggacttctcttcagaccggtcaattgactaaggaactcagagtgggtcagatcggcgaaggcgttcacggcctgcttgaaggtgtgcactccttgggcaaaggctgcgtttccggcttccaccaggttcttggtggaagcgaaggcaccttcatgaagagcgcgatcagcggcggagagataggtctttccagattggctctgcaaatcggttgaagttttacttctacctttgaaattgatcaatgctgcctatctcaccaagaagtcaccaaagtcctggacgtttgagagcagcggcaccttgggcacagccttggcaatgttgcccacggcattctgaacggcgccggccacattttgtaaagctccacccactcgattgttgcccaagcctccgagtccacctccaaatccgcctccgagtccacctccaaatccgcctccaaatccaccgcctccgaatccctggccagagaccacagccaccagaagtggaagaaccaacagaagcttcatactgatctgccaaaagacgaaactattagttccgactggttttgtagtcgaagggtgaaacggcgatgcactaattatatttgattgcatatgatcggcttatcagccgatttgcttgtctattgcaaatacgagatactattgcacaaatttttctgatgcgagtaatcgcaagtaattcccaatagactaacctaacgcgctcgcacggtccacacaaatgtttttgtctcgaccgtcgatcggggcttatatagccattagactagtaggtttcaggctataaactggccaacctcgcccccacccgatccattcaaatccataaatcccaagtccagtgattcggaattatacagaaatcgaaacgcgttgattataccatgcatatcgtatacgagtatgtgctatatctgttttgatgtgtgcgatccgaccgatccagcgatattcgccgtgtggtttgggaactcgtctcggttcattagcgccatgcaagatggttcggaatatgggagagtattagaatttaatctattttggtccagattgggtgtgtttaataaagtggataaatcttgattatttgacttttatgtgatagaacgattacgcatttgggctgctttctatctgaatgcattcgtatatttgatcgcacggattctcgtttgcaattaacacttttaatcacttctcaagtcactttttgataacgtatgctttcaggaaaaaccggaactcgacgaaaacccgttgttaaattcgtgtaaattaggtattacgtgaagtgcatggagtatattttgaagcttaaaagcaaaacccgcttgagttccgtttccaattaattataacaccgttgagtgacgatctgtatcggttcaagcgattattaattatgtcaatcaacctttgtggacgatggacttggatccacttttttggggccatcccaattcccgatcttttatagcctacccaatttgtaatagtgtcg

SEQ ID NO: 9887 - DNA, 1173 bp, DROSOPHILA
atgaagcttctgttggttcttccacttctggtggctgtggtctctggccagggattcggaggcggtggatttggaggcggatttggaggtggactcggaggcggatttggaggtggactcggaggcttgggcaacaatcgagtgggtggagctttacaaaatgtggccggcgccgttcagaatgccgtgggcaacattgccaaggctgtgcccaaggtgccgctgctctcaaacgtccaggactttggtgacttcttgagccaatctggaaagacctatctctccgccgctgatcgcgctcttcatgaaggtgccttcgcttccaccaagaacctggtggaagccggaaacgcagcctttgcccaaggagtgcacaccttcaagcaggccgtgaacgccttcgccgatctgacccactctgagttccttagtcaattgaccggtctgaagagaagtccggaggctaaggctcgagctgctgccagtttgaagttggtcaacctgcctgcgaagcccatcccggatgccttcgattggcgcgagcatggcggtgtcacaccagtcaaattccagggtacctgtggctcctgttgggcctttgccaccactggtgccattgagggacacaccttccgcaagaccggcagcctgcccaatctctctgagcagaatctggtcgactgtggtccggtggaggactttggcctgaatggctgcgatggtggcttccaggaggccgcattctgtttcatcgatgaggtgcaaaagggtgtgtcccaggagggggcctatccctacattgacaacaagggcacgtgcaagtacgatggcagcaagtccggagccaccctccagggattcgccgctattccgcccaaggacgaggagcagctgaagaaggtggtggccactctgggaccagttgcctgttcggtgaatggtttggagactcttaagaactacgccggtggcatctataacgacgatgagtgcaacaagggcgagccgaaccactccattctggtcgtcggttacggatcggagaaaggacaggattactggatcgtcaagaactcctgggacgacacctggggcgaaaagggctacttccgcctgcctcgcggcaaaaactactgcttcattgctgaggagtgctcctatcccgtggtttaa

SEQ ID NO: 9888 - protein, 390 aa, DROSOPHILA
MKLLLVLPLLVAVVSGQGFGGGGFGGGFGGGLGGGFGGGLGGLGNNRVGGALQNVAGAVQNAVGNIAKAVPKVPLLSNVQDFGDFLSQSGKTYLSAADRALHEGAFASTKNLVEAGNAAFAQGVHTFKQAVNAFADLTHSEFLSQLTGLKRSPEAKARAAASLKLVNLPAKPIPDAFDWREHGGVTPVKFQGTCGSCWAFATTGAIEGHTFRKTGSLPNLSEQNLVDCGPVEDFGLNGCDGGFQEAAFCFIDEVQKGVSQEGAYPYIDNKGTCKYDGSKSGATLQGFAAIPPKDEEQLKKVVATLGPVACSVNGLETLKNYAGGIYNDDECNKGEPNHSILVVGYGSEKGQDYWIVKNSWDDTWGEKGYFRLPRGKNYCFIAEECSYPVV

SEQ ID NO: 9889 - DNA, 3244 bp, DROSOPHILA
ggtagttgacgtggaagctcttgtggcaaatcctaaaaagagccacatgactgagacatttatatacacaaaaaagtggtaagtacacctactcgcactcgtaaggccgctcatcgttatgccttcgcatgtgggtgtccagcgtgctcttcctgggatatccattgccacagatagcgcacacatgcaatttacccttgacggcaccagcaggagcaggtggaggagtagatgcaggcggaggataaggagcaggaagcatttccaccgttagaactgtgggcctttccttttccgccgggccatgtggcgtttcttcaatgggatcttccgtagaccaaactccctcttcaagcacctcatcctctggtggttcaagctgctcagtctctatcggtggcggagttgaaggtcgcgtttgctgcaccacctccttgactaccccttgctcgactgcatcctttatcacgtattcccggagaaattcattggagcgctggcatatctgtcgaaatttgtgggccagagttagaaatgccttgcatctgaggcagattctggtgggcagcacttcctcctttgccgttgcccttatctatggatgagatattacttgaaattaattagaaatatcaaggaaaacgaaaggatcccacctgaattccactcaaactttcgattttgtcacagagggatacgccaccgggcagcctatcgtccgctgtctggaaaatagacaccatgtgggcttcgccatcctgcaggcaagtcctgcacagggtcatcatgttcaatcgtatctccatttgaaccaaacgagttggccgacaaaaattaacgatcaaaataactctgcttcctcttcgctgtttggccagtcaccgatatttatcgaagggccgattgccattcgccccggagccgcacaaattttaattgtttggtcagtaaacaaacaaaaattaaatatttcggaatttgtacctacaataacagaagaatgcataccaacgtggatagcagggaccttaagtgtcgcatctgcttggtgcagcctaaggatgagtctctcatgcccacggagcccgattttccagataaaatcaaacgctgcacaggagttgaagtgggtttttgaatatctatattatgatctatattacccattaaaaacctacccacagttgagtgagagtcccgactggcccaatcgcatctgcaccagctgcgccctgctgctcagagctgccctcaaactcagatccctttgccagcagacggagaaggatctgaaggagcagaagctgcaggagataaacatagagattgttcacgatgagcaggagacgaagaagaaaactgaatcaagagacctgtccaagaatgaggctaccggtagcgacagcgagttggagtacgagtacctagactcatacgatgtaacgctggagagcagcgaggatgtggcctgtagtgccgatgaattggtcagcatagagcctgccatctccgctccagaggaatctgtctattcacttagtcccaaaccggtaacttttgaagacgaggactccggacaggctgcttcctttacctgcaacatttgcaacaatgtctactcagagcgcgtaaagttgaccaaccacatgaaagtccacagcgcgaagaaaccacacgaatgcgagtaagattttgatttgaatttgttcccatcgtatcctataatcgcataatcccattatcttgtagaatctgtcacaaacgttttcgccagactccgcagttggcgaggcacatgaacacccacaccggtaatcgtccctacaaatgtgactattgcgactccaggttcgccgatccctccactcgcattaagcatcagaggtaggtaaaaacatatagggctgtcataactagaataaaagagatatatttctgttaatcagctttaatgtcaattaattgttaacaagtcttgataaaagttacttcaaatctaaatcttaagacatccacggaagtttctaacgttaaatacactttaggatccacaccaacgaacgaccgtacaaatgcgagttctgcagcaggtcctttggctactccaacgtcctccgggttcatctgaaaacccataccggtgaacgaccatttagctgccagtactgccagaagtccttctcccagctgcaccacaaaaacagccacgaaaagtcacacaaaaggacgaaagaggtgaaatgattgcagtgactaagaggaaacattgaggtgcaaattaaataagtttctcgttgaaaattgtacaatatattaatggataagttctaagccatagggcaccgccattaaaatttgtcatttttccttatttaattttttataagaagtaaaaaacaaattgtacaaaaaaatatatcctgtgtacatttatttgcttaatggaagaacttaaacaacggcttactaaatacttagactaaactttgcataagaactaaaaagaacatgtcactctttggggagttcattgagaaactccggcgtttcccccttgacatcttctgctttggtgctctcttctgcgtcatttctccaggtgatacgtctattatgcgtttcccgatgcaaacgcaatttgtaggccttcacaaatcctttgccacaaagatcacagctgaaagagaatagctattattgcaggataatgaagtagtaaaatatgttgatgcttacacatgcggcttctcccccgtgtgaatcatcttgtggaacttcaggttgtccgagtaggtaaacgttctggagcaaacgtcgcacacgtagggacgctccttagtgtgaattctggagagaaataatgtcagtttaatttactttcaactgtttcgaatatttctcacctatgatgtttggttttcgtggatcgatcggcgaaggcagctggacagtagttgcacttgtatggtcggttccccgtgtgagtgttcatgtgccgtaccagctgttgattctgcacaaagcctcttccgcagatcctataataacatcctattagccatagttactatttactttcaacttttaaacctactcgcactcgtgtggtttaacaccagaatggaatttcatgtgctcggtgagacgcgcctgagtcggatagatatttccgcacacatcgcagatgtatgtgctcagcttgttgcgcggctttctgcccaccttctttttgaaggtttccact

SEQ ID NO: 9890 - DNA, 960 bp, DROSOPHILA
atgcataccaacgtggatagcagggaccttaagtgtcgcatctgcttggtgcagcctaaggatgagtctctcatgcccacggagcccgattttccagataaaatcaaacgctgcacaggagttgaattgagtgagagtcccgactggcccaatcgcatctgcaccagctgcgccctgctgctcagagctgccctcaaactcagatccctttgccagcagacggagaaggatctgaaggagcagaagctgcaggagataaacatagagattgttcacgatgagcaggagacgaagaagaaaactgaatcaagagacctgtccaagaatgaggctaccggtagcgacagcgagttggagtacgagtacctagactcatacgatgtaacgctggagagcagcgaggatgtggcctgtagtgccgatgaattggtcagcatagagcctgccatctccgctccagaggaatctgtctattcacttagtcccaaaccggtaacttttgaagacgaggactccggacaggctgcttcctttacctgcaacatttgcaacaatgtctactcagagcgcgtaaagttgaccaaccacatgaaagtccacagcgcgaagaaaccacacgaatgcgaaatctgtcacaaacgttttcgccagactccgcagttggcgaggcacatgaacacccacaccggtaatcgtccctacaaatgtgactattgcgactccaggttcgccgatccctccactcgcattaagcatcagaggatccacaccaacgaacgaccgtacaaatgcgagttctgcagcaggtcctttggctactccaacgtcctccgggttcatctgaaaacccataccggtgaacgaccatttagctgccagtactgccagaagtccttctcccagctgcaccacaaaaacagccacgaaaagtcacacaaaaggacgaaagaggtgaaatga

SEQ ID NO: 9891 - protein, 319 aa, DROSOPHILA
MHTNVDSRDLKCRICLVQPKDESLMPTEPDFPDKIKRCTGVELSESPDWPNRICTSCALLLRAALKLRSLCQQTEKDLKEQKLQEINIEIVHDEQETKKKTESRDLSKNEATGSDSELEYEYLDSYDVTLESSEDVACSADELVSIEPAISAPEESVYSLSPKPVTFEDEDSGQAASFTCNICNNVYSERVKLTNHMKVHSAKKPHECEICHKRFRQTPQLARHMNTHTGNRPYKCDYCDSRFADPSTRIKHQRIHTNERPYKCEFCSRSFGYSNVLRVHLKTHTGERPFSCQYCQKSFSQLHHKNSHEKSHKRTKEVK

SEQ ID NO: 9892 - DNA, 4845 bp, DROSOPHILA
agcctcaatggatgaggatataaccgccaacccgcccccaagcagcgaagaggaccccctggccgaggagcgcctaggctttgtgcgggaagtgggcgcgcaggctgtttggagcctctcctcctgcaagccgggtaacttttggtgtaactacgtgatccttacatattctacaattttctttggccttcaggatttggtgtagagcgtttgcgagacaacatcatggatacttattggcagtcggacggtcagcttccccacctggtcaacattcaattccacaagcgtacgaacatcagtcagatttacatatacacggattacaagctggacgagagttacacgccatcaaggatctccatacgatctggaacgaacttcaacgacttgcaggagctgcaggtgatggacctgaccgaacccaccggctgggtgcagatacccattaaggatgggaacgtcaagtccatacgcaccttcatgcttcagattgctgtgatctcgaaccaccagaatggcagggacacccacatgcgccagatccgcatccatgcgcccgtcgagggcaagcactatcctctggaactgtttggcaagtttggaacggtcgactttcagaagttcgccaccattcgttagggaaaactttgggatttatcgaagtcttttatttttatgtatttttcggggtatataactgctaaaatacaacatttaaaacattactttagtaattttatgcatatttttggtgtttctaattaaatgcccgtcacttgtatatatataattcgaatgcaaataaatatataccgtcgtctaagcttaagtacaaattaacaaacacagtggaagtgtaagagttattattgttactgttttatcgcgatacaaatgcaaaatgtgaaaatggaacgccaacgaaagagtgcgagaattattgcatcgttttgtattgtattgcactatctcgaggattgtcgttaatgattggtgattatgtgttcgatttccttgcagctttcaacgtcttgtagtgatccttctcctcgccggtctcgggtggctcgctttcgtaggaggccttcatcaaaagatcctcgctcagcacctccgccttcaacaggtaggacaccacactaggcaactgctcgtatggacagtccaatcgctgccatttgccaaaattccgcagctgggtgcccaaatgaaggcacttctcaaagtttatgtatccgttggccaatctgcaaacggatttgaattcggttaatctcgaaacagagctcatttatgcacaaacaaactcactttgtttcatggctctcgttaatggcatgcaaatctttgaggaacagcgagaagaatgggatgatggcacgctcaatttcgttggccatttccctttccgaacgccaaacagctgccttcatggtggatctgtagttaagaaagttcgaactgggatccatttgatgctccaaaccctcgaactttgtcgtctgcactttggcccactataaaaaatagtagtaaaatcagacttcactcgttttacttaacgaaaactcaccgttttctttaggcgagctatggcagtaagattcaatgctgttagaatggccatcaagctgttgaagttgcctgtgttaaagcattccagagctgtttccacccagaagtcgatcatttgtgctctctgggactttttgcccaactaggaacgaacgaatcatattttttatttgattaatggttaattttttttttagtactcacctttaatatttccgttgcagtcaagtagcttagctggttgaaccactgcacgtaactgtcgattgtcacctggctgatgcaattcgaacccaaggtgcccgccttggtttggcttatgcaggtcttcagctcatccttttcgaggatttccacaaactcctcaagacgtatttgtgacagataggcgtactcgatggcataaagttggtgagccaactcgaaggcactgctgcagttgtttagcacattgtctgttttgtagacattggcggcaaagcgtttcagcgacttaatactgctctgacgtcccaacgagctggccgacgattgcttggtaagcaggttatttagttgacttcgtccattttcgtccttttgcgccaaagcttggggaattccatccaaaaaagctgccaatccttttacattacgcttattttccagctcctgcaatagcagttcatggctaaagtccccgggacaggtgtctagccattcgttcaaaagtcgtaacacgttttcctcctcattatcaatcttggcaatgattttggaaagcagctggtgtggtggtgaaaacaagcgggaagtggtcagaaaggcaaaccgcaaatccttagtattattattgataagcaggttgaccaccgaatccaggttgcccttcttgggtatgtctttggcgtaaactggcgctgtttggcaatcgaatggctctgtgatcttcaagtgggtgttctaatttaggtaaattattagttatttagcgactggcaaatccgttcaaacttactaggatagaaaccgcatccgactcatctgcggagctgggaatgtcgcagtacaaagagtcggttaaggtgtcacgtggatgtgaccagggtgcactcatcgacacgctgtggaagaggccatcgtgcccggagtcgcagctgcttatattcgagcttttgtccccaatagtggtggatgatacagatccgatgacctgatcggatccagtaatagcagagctgctggacataagggaagcattcgagaaggtttggttcagctgccggcccaaaggatcaactggacgctcgtccgagtctgtggcctgcgatgcgaacgtggaattcgaagtggttcggtatttgagggcattctcgggagtggcacgcgccaaggccgactgctgcttgacaggatgccagatctctttctggtgcgactgatggttaaagttttccttggtctccacggtgcgttcgtctaggatttgtccgttgcgcgagaccagcacctcctccgtggtggtcagagaggacttgacggtcaacgaggtctctacctcgatgggctgttgggccaatccggcgcggaagagcaattgattcaggtgctcaaccgatggcatctgcccctccagcaaagctgcctttatggcactggcatcatccgccggcagcccatccagcttcaccggcactccgttgaccagcaacacctcctcctgctgcagcgaggatgaggtttcgcagtccacgatcttgacatccttgccgaacagggactccacagcgtttaggatatcttcgtccatgcttggggcggggttatcggggatggggaaagtgcagacacacggggatctctggagaaacgtgactatttggctgcgatggttgttaaatgcgttatgaccacagggggactctttggattagtcgcaatgcacatgcaccactatcgcgtacatttctggaaaggaaggggcaaggggaaacctcgattagcacacacacagtgggagaaagacaggtggccgggggctttggtttcgtgcgctctggtgacaacgcccactttcccaaaagtgggctggtctcttctgatcagaacatcgcttccggagcagacacacctgcaggaacactgttgcgcggtggccttccatcggacgcactgccgcctttcgtcacggcattccccgcctgctgctcatcaaatgtccgccgttttttctgcgcctaatatagtttaattcgccaattgacttaatttatttctattattgttgtctcggtacagcgataccatcgatgtttacacaaatttggcaataatcgatatccccaactggggaaatcatcgattacttgctttcttgctgtaaatatccgcatctggcaacgcttttaacaggttttaaaatgtcaagcgttatttccgttactatccccaaacatttttttaatttacccgaatatctagatcttcttgtttggacataaaggtctggttattgttcacatcaaattgctgaactcctctaaagttcgtttagtgcccaattaacccgtgaatagttttaaatttccaaaagattcttgtttattcctctttaatttgttatctgtaaatatttaagcaaagcaatgcattgcattactttcgtttaactactctaatttagcagcattataattaagaaaagacttttatttaagaaatggacgcaaccaacgccaagtccacatcacaaactgcacagtaaattttgccataaatttcggattccccgcttaaaccacgggataggagcactcctcagcaatgaagcagtagtttttgccgcgaggcaggcggaagtagcccttttcgccccaggtgtcgtcccaggagttcttgacgatccagtaatcctgtcctttctccgatccgtaaccgacgaccagaatggagtggttcggctcgcccttgttgcactcatcgtcgttatagatgccaccggcgtagttcttaagagtctccaaaccattcaccgaacaggcaactggtcccagagtggccaccaccttcttcagctgctcctcgtccttgggcggaatagcggcgaatccctggagggtggctccggacttgctgccatcgtacttgcacgtgcccttgttgtcaatgtagggataggccccctcctgggacacacccttttgcacctcatcgatgaaacagaatgcggcctcctggaagccaccatcgcagccattcaggccaaagtcctccaccggaccacagtcg

SEQ ID NO: 9893 - DNA, 2430 bp, DROSOPHILA
acaacaataatagaaataaattaagtcaattggcgaattaaactatattaggcgcagaaaaaacggcggacatttgatgagcagcaggcggggaatgccgtgacgaaaggcggcagtgcgtccgatggaaggccaccgcgcaacagtgttcctgcagaaatgtacgcgatagtggtgcatgtgcattgcgactaatccaaagagtccccctgtggtcataacgcatttaacaaccatcgcagccaaatagtcacgtttctccagagatccccgtgtgtctgcactttccccatccccgataaccccgccccaagcatggacgaagatatcctaaacgctgtggagtccctgttcggcaaggatgtcaagatcgtggactgcgaaacctcatcctcgctgcagcaggaggaggtgttgctggtcaacggagtgccggtgaagctggatgggctgccggcggatgatgccagtgccataaaggcagctttgctggaggggcagatgccatcggttgagcacctgaatcaattgctcttccgcgccggattggcccaacagcccatcgaggtagagacctcgttgaccgtcaagtcctctctgaccaccacggaggaggtgctggtctcgcgcaacggacaaatcctagacgaacgcaccgtggagaccaaggaaaactttaaccatcagtcgcaccagaaagagatctggcatcctgtcaagcagcagtcggccttggcgcgtgccactcccgagaatgccctcaaataccgaaccacttcgaattccacgttcgcatcgcaggccacagactcggacgagcgtccagttgatcctttgggccggcagctgaaccaaaccttctcgaatgcttcccttatgtccagcagctctgctattactggatccgatcaggtcatcggatctgtatcatccaccactattggggacaaaagctcgaatataagcagctgcgactccgggcacgatggcctcttccacagcgtgtcgatgagtgcaccctggtcacatccacgtgacaccttaaccgactctttgtactgcgacattcccagctccgcagatgagtcggatgcggtttctatcctaatcacagagccattcgattgccaaacagcgccagtttacgccaaagacatacccaagaagggcaacctggattcggtggtcaacctgcttatcaataataatactaaggatttgcggtttgcctttctgaccacttcccgcttgttttcaccaccacaccagctgctttccaaaatcattgccaagattgataatgaggaggaaaacgtgttacgacttttgaacgaatggctagacacctgtcccggggactttagccatgaactgctattgcaggagctggaaaataagcgtaatgtaaaaggattggcagcttttttggatggaattccccaagctttggcgcaaaaggacgaaaatggacgaagtcaactaaataacctgcttaccaagcaatcgtcggccagctcgttgggacgtcagagcagtattaagtcgctgaaacgctttgccgccaatgtctacaaaacagacaatgtgctaaacaactgcagcagtgccttcgagttggctcaccaactttatgccatcgagtacgcctatctgtcacaaatacgtcttgaggagtttgtggaaatcctcgaaaaggatgagctgaagacctgcataagccaaaccaaggcgggcaccttgggttcgaattgcatcagccaggtgacaatcgacagttacgtgcagtggttcaaccagctaagctacttgactgcaacggaaatattaaagttgggcaaaaagtcccagagagcacaaatgatcgacttctgggtggaaacagctctggaatgctttaacacaggcaacttcaacagcttgatggccattctaacagcattgaatcttactgccatagctcgcctaaagaaaacgtgggccaaagtgcagacgacaaagttcgagggtttggagcatcaaatggatcccagttcgaactttcttaactacagatccaccatgaaggcagctgtttggcgttcggaaagggaaatggccaacgaaattgagcgtgccatcatcccattcttctcgctgttcctcaaagatttgcatgccattaacgagagccatgaaacaaaattggccaacggatacataaactttgagaagtgccttcatttgggcacccagctgcggaattttggcaaatggcagcgattggactgtccatacgagcagttgcctagtgtggtgtcctacctgttgaaggcggaggtgctgagcgaggatcttttgatgaaggcctcctacgaaagcgagccacccgagaccggcgaggagaaggatcactacaagacgttgaaagctgcaaggaaatcgaacacataa

SEQ ID NO: 9894 - protein, 704 aa, DROSOPHILA
MDEDILNAVESLFGKDVKIVDCETSSSLQQEEVLLVNGVPVKLDGLPADDASAIKAALLEGQMPSVEHLNQLLFRAGLAQQPIEVETSLTVKSSLTTTEEVLVSRNGQILDERTVETKENFNHQSHQKEIWHPVKQQSALARATPENALKYRTTSNSTFASQATDSDERPVDPLGRQLNQTFSNASLMSSSSAITGSDQVIGSVSSTTIGDKSSNISSCDSGHDGLFHSVSMSAPWSHPRDTLTDSLYCDIPSSADESDAVSILITEPFDCQTAPVYAKDIPKKGNLDSVVNLLINNNTKDLRFAFLTTSRLFSPPHQLLSKIIAKIDNEEENVLRLLNEWLDTCPGDFSHELLLQELENKRNVKGLAAFLDGIPQALAQKDENGRSQLNNLLTKQSSASSLGRQSSIKSLKRFAANVYKTDNVLNNCSSAFELAHQLYAIEYAYLSQIRLEEFVEILEKDELKTCISQTKAGTLGSNCISQVTIDSYVQWFNQLSYLTATEILKLGKKSQRAQMIDFWVETALECFNTGNFNSLMAILTALNLTAIARLKKTWAKVQTTKFEGLEHQMDPSSNFLNYRSTMKAAVWRSEREMANEIERAIIPFFSLFLKDLHAINESHETKLANGYINFEKCLHLGTQLRNFGKWQRLDCPYEQLPSVVSYLLKAEVLSEDLLMKASYESEPPETGEEKDHYKTLKAARKSNT

SEQ ID NO: 9895 - DNA, 3424 bp, DROSOPHILA
ccggcaggtgaggcaatcagcacgggtccattgtgctcgcggtccagcaagatgcagagataggtctcgcgggtgatgttgatactgcgtgccaccatgaccttgttgaccaaaattcccgatttgggcgtttgtttcgttatcagtcggtttccaatcatctgctgggtaagcgaaagcacctcgctcttgctggcaaaatgttaaataattattagtataagctggtcttatcacttgtgtttttaaggtacactctggctttcacaaacttttatcattttcaatatgggcagaatgataagattaatcttatatacaaatgatattgtagaacataaataatattaattttttagataaaatgtgaatgtgaatagccggaatagacctaatctataatacttggtggtgatatggacgccgcctttgaatccgttgtcgaaagttcccttgccacgcccaccggcgagaatctgcgccttcaccacgtattccgggcactctgaaacacagaagcacagcatttaacaccaattagcccagggattacataaacaccggcatggttccgtcctccacttaccaaaagtcttgacgacctcggcatctgccttggagttattcaagaccttgaattgctgtatggccactccatacttctggaggagatccttgctctggaactccagcagattcaggttgcgcacgggaacctatcatcgaaagataaacaaagccaagacaaaggtcacttcaacttctcttttcgaagagttgatatattatagaggaatgtgagtgcgaggaaaccttatgaacgatgtgacgggctgtggtaactgctttcagtaggaacgacatcttggctgatctgcggtggtaactgaataccttggctaacttggtattaatttattttcgtaactttgtcggtaaatttagtttaaaaacacaaccgaaaatcgccgccgttccacgatgcttatcactgcacaatgtgaccaagaagcacgactactttccatggtgataaaaatataccaaatgccactgccatcttgaactagttctcgcgaagcaatggtcttactgttgcagtcagctgaaaatcagctgtcgttgtgtactttttttcttcggctaatagtcagcgaagaatgacgaataacacaaattgaatgaaaaacctgagtgagacggaagccgaagtcaccatgcaagaaaatgtagtccacgaatcattgccccagatcccggtggccacttcggtgagctgttgcttcgttctggctgttctgtacgtgggtagcctctacatctggagcaccaaacacaaccgggatcatccaaccacggtcaagagaagattcgccagtgtgtccatggtgatgctggcagccccgttcttcgtttacttcttctcatcgccggagctgctcagccgggtaccatttcccaagctgctcggtttgcgcttggagggattgtggcaggctgttgttataccatacagcctgacggtgctgctcttcctgggacccatctttgtcaacatgcagaacgagtccgtgcgctcctacttcggtaatagttaaagcccctctgcctatcagccccttctcactgcttgatttgaattgcagatctggactactggaggggatcatttggcagcatcatctgggtgcgcaaccatgtgatagcaccgctgagcgaggagttcgtgttccgagcctgcatgatgcccctgatcctgcagagcttttcgcccctggtcgccgttttcataacgccgcttttcttcggagtagcccacttgcatcacatagccgaacgcctgagcttaggcgtggagttgagcactgccctattgattggactgttccagttcatctacaccacgctatttggcttctattcggcctttctatttgcccgtacaggtcatgtgatggctcccatcttggtgcacgcgttttgcaatcatatgggtctgccggatctgcaggatctgtggcagcaggatctctggcgacgagtagtggccattattctctacttagctggatttgttggatggatgttcctggtaccactggctaccgatccgtcgatctatgataacaccctttactggaatgcataattaagttaatttgtatgtatcaaccgctgccatacgtcggttcattcatgtgtacataaatattcgtgcatatattatgtttatatgtaaattgcatatcccattcgagccaattccgcgcacaaaaaaaagacttccgatgaaaaagaaaaaagaaagtacagataaatgtatacctaatagtaagtcagttgtactgttttgttgttcgagagtacttttattacaactacttttgtttgcatttgtttattaaacaatttcttaacatttataaatattatttattattattattaagaaagaaatatgaattcaaatttaggcggtattattggttccgcgcaatcactagttccaacatatcggtattgggcagctggtcacactgccactcagacccacataggcttatcgatagggcccgataggcccagacaagtaaattttggtaaatatgtgatgatttaaaacgacgcacaacaagcgagcatctaaacgacccgaaaatcgagaggtcagcgccaggaggcccaatcggaggtaatcccgcagagcggcgacccgtgctagaactgggaaaacagatccgcgttctggtgacgtttgtggtctttgcccaggactacgaatgatagtaattatagaacaattaagactaacctcaaccccccggggtcatcctgggacacttgcaggccgcgcggaagaccacgtcaacgcacacgcaaatagaacccaaatcttaagcagaaatagcaacaacaacacaaccacccacccaaccgcacacagaatgtattgcctacaatgcctgctgcccgtactactgataccgaaaccctcgaatccggccctgatggaaacgcacgtgatgttcatagtcctctacctggtcggattcttcctggagcgaaagccctgcaccatctgcagcctcgtattcctcacagccgtatccctgatatgctacagtggcgtcgggaactgcatattttggggcaactgcgagggccatcaatgtgagaatggctagagggtcagcagtgcgccgcttatctttcactcccacacaaagaaagcccccgtagtcatagtcaacgaagataaagtgctaataataactacctttttacggaattacgttcgcgttgttacagctttacatcctcgaagatcggagaaagtcagaggagcaggcggatataagggattagggatagcttgactaagtcggtaaaatcaagtgatcagtgatacaagtgatgagtgagt

SEQ ID NO: 9896 - DNA, 1365 bp, DROSOPHILA
gtgaccaagaagcacgactactttccatggtgataaaaatataccaaatgccactgccatcttgaactagttctcgcgaagcaatggtcttactgttgcagtcagctgaaaatcagctgtcgttgtgtactttttttcttcggctaatagtcagcgaagaatgacgaataacacaaattgaatgaaaaacctgagtgagacggaagccgaagtcaccatgcaagaaaatgtagtccacgaatcattgccccagatcccggtggccacttcggtgagctgttgcttcgttctggctgttctgtacgtgggtagcctctacatctggagcaccaaacacaaccgggatcatccaaccacggtcaagagaagattcgccagtgtgtccatggtgatgctggcagccccgttcttcgtttacttcttctcatcgccggagctgctcagccgggtaccatttcccaagctgctcggtttgcgcttggagggattgtggcaggctgttgttataccatacagcctgacggtgctgctcttcctgggacccatctttgtcaacatgcagaacgagtccgtgcgctcctacttcgatctggactactggaggggatcatttggcagcatcatctgggtgcgcaaccatgtgatagcaccgctgagcgaggagttcgtgttccgagcctgcatgatgcccctgatcctgcagagcttttcgcccctggtcgccgttttcataacgccgcttttcttcggagtagcccacttgcatcacatagccgaacgcctgagcttaggcgtggagttgagcactgccctattgattggactgttccagttcatctacaccacgctatttggcttctattcggcctttctatttgcccgtacaggtcatgtgatggctcccatcttggtgcacgcgttttgcaatcatatgggtctgccggatctgcaggatctgtggcagcaggatctctggcgacgagtagtggccattattctctacttagctggatttgttggatggatgttcctggtaccactggctaccgatccgtcgatctatgataacaccctttactggaatgcataattaagttaatttgtatgtatcaaccgctgccatacgtcggttcattcatgtgtacataaatattcgtgcatatattatgtttatatgtaaattgcatatcccattcgagccaattccgcgcacaaaaaaaagacttccgatgaaaaagaaaaaagaaagtacagataaatgtatacctaatagtaagtcagttgtactgttttgttgttcgagagtacttttattacaactacttttgtttgcatttgtttattaaacaatttcttaacatttat

SEQ ID NO: 9897 - protein, 290 aa, DROSOPHILA
MQENVVHESLPQIPVATSVSCCFVLAVLYVGSLYIWSTKHNRDHPTTVKRRFASVSMVMLAAPFFVYFFSSPELLSRVPFPKLLGLRLEGLWQAVVIPYSLTVLLFLGPIFVNMQNESVRSYFDLDYWRGSFGSIIWVRNHVIAPLSEEFVFRACMMPLILQSFSPLVAVFITPLFFGVAHLHHIAERLSLGVELSTALLIGLFQFIYTTLFGFYSAFLFARTGHVMAPILVHAFCNHMGLPDLQDLWQQDLWRRVVAIILYLAGFVGWMFLVPLATDPSIYDNTLYWNA

SEQ ID NO: 9898 - DNA, 3190 bp, DROSOPHILA
acaagccagaggatgtcgtgctatatggcctcgaggtgggttaaggagaaaaacactcttattcgaaaacattaaattcaaaatttcaacagtcccacatttgcgtggagcagaccgccatcgatctcctcgagcaaaacatcaacgtatacatagtggcggactgctgctcctccaggctgaaccaggatcgagatctagccctggatcgcctgcgtcaagcgggctgtgtgatcaccactagtgagagcgttatcttcgacttggttcgagataagaacaaccccaagttcgatgtggtccggaaattggtgaaccagccgtcggtggatatggaactcacgcgcaacgggagcggagtgccagcgggcagtgccaagctgtgagatagcccctcctgtctaaatatctgtttgttataaagccaattgcatttataaaaccatcatgcagaattgtgcttttcaaggatacgcggatgggaaatgggccgaatgggccgaatgggagcagcacccatttaagttgtcatttccgtaacatattccaatggccccgcacaatgggcgagtccatatttgaatttgccgtttaacaatagccccaatggcttcccttccggtgagttcccccactttgccccatttccgctgggttccttattatgcggatgacaatgcgtattttatgccgcctgtcggcattgattataaagctgagtgctgttcggtaaccttttatttgtgcagcagtgtgggatgaggaaatcatcatcattccacatgacccattcaggggctctgtaagcgcaatgtctaattggacagacccttggatgaagatgctgaagcgctctatgaactgtagcccaacagctctcaatatgagttctaccaggggaacgttttattggaacaacaagacattacctcaccactcattttatggaaaaaaccgccgttttataagttaagattaacataacatcaaagtcactcggtcactcttcaaccttcggatggaagccggttgcatctgcggtgtaagtcacgcgaatttgcttgccatcttcgccgggaaggaagtattcgccctggatgccgttcacattgccttgagctttcacttggatcccattgctgaccgtgatctcatgctggaactgcccagctccatccaggttctggcggttctccgacttcagaagttgcgcctgcagatcctcctcactgcagctggccaaaacgacgaaaagggcaaagataaggctctgaaattgagaggtggctgattatccaatagtctgtttgaaatccgattaaactcacatatttcagcattttggagcagcttcttgaaatgaaacaatgcccgtcggccttttatactatactccgaagctgcctagcccactaaacgggtttcaatcgcatctgctaatgaaatgactgagattaaccagacagccatgaatatgaaatttgcggctactcaatcgagtctgcttctggcaccagaagcaggccagcctcccccaactaattgattgcgattttgttaacccattttgctactaaaagaacatttaatcatcaacaatgaatttgaaaactatgcgcccgcggccttcggaaggatttcttgtgcaggcttggaatcccagtctctatacctaatttctggattgctcagaatcttggccacacccttcagaaagcttggcttactgatagtggtttttctcacagaatcgttgcttttcttttccaaggcatgcggtataagtgaggaaaaatttagagatgcctcgttagtaagtgtcccatctgaggattcaattggcaagagagacatccccttatttcgcttgttgttgaacttctcgagatatttcttggcacccaaacgggcggatgtctttaaagcattcatatcccaggacactcccagcttggatttgatctcctcggaggcagtcttgtcgttcgaagagaacagcgtttggaacatcttcttcagctcgaggtccttgggatcttgtagcgatcggactgcccgcggatcaatctgcccaatggaattgtcttggcttttggtttccgcctcccgcttggaatccttgttcagctcaactaagtcgtttaacgacaatttggggtccaagttcccttgcagctgctggaaatccatttcgggcgcatccttcggcaggtagccgcggcttttcaggtaaactagcggcgactgccagttgtcgatgaggttcttaacaatggtgtcaaccgaattctcatacttaactacttttaaattgcgatcagctgcagcactataaaatagacagatgtataagattaaagaaatcattttaatttaaattgtgagcctgttatcgatgactttgtgaaacggctacactatcgatataaattgttattgacagctacgtctcagcagccctggatctaaatcagctgttgtgttgtaagcaaacgtaaaattaacaaaatcctacaattattttgttttttattgaatttcatagcctttcaggtttttggttgatcgcacaggactgcaacgctattatggtcatcaccaacaacacaacactgcccgaggagtcggagctgaacgtccaggagctaaatctatcgtcggcggccttacgggcaggcgccttccatttgggcaagcaatgcgagcaggccaataatgttagtacatccagattgcaggggaatcctcctgatagtaatgcttaggtgaaaagcgccttaaagtgaagctgggagccgctgcctctttaaaatccgagcggcttagttatataacctaacctcaaaaagcaccttccccgtttgtttaccttttccttcgtgtaatttcaggagtttatgctgtgccggcaggagctggatgacccgcgagcctgtttggcggagggcaaagccgtgaccagctgcgccctggacttcttccgcaaggtgaagaagacctgccatgaggagttcacgcagtacgccacctgcctggataagagcagcggtactatggctttttcacagtaagcactccgtaaatgttgaatattccaatcatgctataccaatgtccatccatactttagttgccgcaagacccagggagtgttcgacaagtgtatcaaagataacttcgactgggatcg

SEQ ID NO: 9899 - DNA, 714 bp, DROSOPHILA
atggatttccagcagctgcaagggaacttggaccccaaattgtcgttaaacgacttagttgagctgaacaaggattccaagcgggaggcggaaaccaaaagccaagacaattccattgggcagattgatccgcgggcagtccgatcgctacaagatcccaaggacctcgagctgaagaagatgttccaaacgctgttctcttcgaacgacaagactgcctccgaggagatcaaatccaagctgggagtgtcctgggatatgaatgctttaaagacatccgcccgtttgggtgccaagaaatatctcgagaagttcaacaacaagcgaaataaggggatgtctctcttgccaattgaatcctcagatgggacacttactaacgaggcatctctaaatttttcctcacttataccgcatgccttggaaaagaaaagcaacgattctagccttatctttgcccttttcgtcgttttggccagctgcagtgaggaggatctgcaggcgcaacttctgaagtcggagaaccgccagaacctggatggagctgggcagttccagcatgagatcacggtcagcaatgggatccaagtgaaagctcaaggcaatgtgaacggcatccagggcgaatacttccttcccggcgaagatggcaagcaaattcgcgtgacttacaccgcagatgcaaccggcttccatccgaaggttgaagagtga

SEQ ID NO: 9900 - protein, 237 aa, DROSOPHILA
MDFQQLQGNLDPKLSLNDLVELNKDSKREAETKSQDNSIGQIDPRAVRSLQDPKDLELKKMFQTLFSSNDKTASEEIKSKLGVSWDMNALKTSARLGAKKYLEKFNNKRNKGMSLLPIESSDGTLTNEASLNFSSLIPHALEKKSNDSSLIFALFVVLASCSEEDLQAQLLKSENRQNLDGAGQFQHEITVSNGIQVKAQGNVNGIQGEYFLPGEDGKQIRVTYTADATGFHPKVEE

SEQ ID NO: 9901 - DNA, 3549 bp, DROSOPHILA
gccaactaaggttgttgttaaacatagtcatcgaaaggaggtttaccattaggatatttgggtcaaatgtgtatataatatataatcctctttcagggtagattttggttgcattagcctgctctgcttgtttatgatttgataataagggtgctcctaaaatgccttcaacgttcgttatttaaagattagtaacattagcagtttaaactctttacttcgattttttctgtccctatccaatttaatcttaaagacctctgtagagaatcgtgctcgtattccacatttattctaagttttcatccgcagcagtttttcatattgcgttcggccatatttttacgccatgtttggtttgattgcgcaaaaatttcaaattaagttgcagactgggcgaaagagagggaagatggcgagcgagagagagagagagagagagagatggaaaccgagtctggcgctgttgaaaaatcccaagctgtcgtgagcaacagaattgcatcacgtacatgggcaatttgccagtggaatacatacaatacaaagaacacacacacacacacattaaagctctgtgtcgaccaggaaaagggatggccaaaatccttcctctcctcttaccaagccatccctatctccgcttccctgagcccgctggcttttttggcacaggttttctcctcgagaatttgtaaatcgcagcgagaaacaatgccgggcataaactaaataaatgtgaaatattttatacattttcctagtgggtcagagagggacagggtgttggaaagtgagagggacaggcggggtgtgtgagagagagagacagctattgttgcacaataacagattacttttcgtcgcttagttcccttgctgcaattaatcttagctcatttcttccgccaagttcttgctttccctctctctctttcccttaaatgtatccatcccgttttcgtcctattgcgtcctcactttctttttttggccactttcacttacccacaacaatcatgtcctcgtgaccggaaaccgtctgaaacgaaggcgcctcgccggacacctcgcagcgatatcggccagttgactgaaggctaactgagcgcaggacaacgaccacgtccgtcgagttttgtaactgcaagaaaaccgcaaggaaaatagggtcactaagtgcagagacaaaagtgaaagcgcgtaaacaaacagaaacagtgtacaattcctaagtaacgtacataatagtacaacaatttatctttataaatataaatatcaaatatatcttttgatatttgcgggactgttaaagtggggttgtcaattatctgatacaaacttgtagatactcggcgtctctagaataccattcaatgaaacagatatacgaatacgggacgtcattagtcgaatgttatattgaaatctaggattgtttaatttattaaatataacttaaaataaatttctaaaaacaatgtaaaagtccagtgcaaccattgaaaatatttctaaaataggaaaaacaagattttttattgcagttataaccagtaatctactctgattaatattgaacttaaaatttaattattgttatacatctgaaaatcagttttttaaaatatccagcctgaatttaagttcgcttttggagcattttcgtcgacatcatccgcgtcctcttcatcgaattcattctcttcgtcgtcaccatcttcctcttcttcttcataatcatcatcatcgccatcgtcctcatcgtcttcctcaaccaggatcacgtcggtcagggcatccagcatctcgcccagatcctcgtccttcactggcatgacttcgtttaaggattcagcagtgggcgacacgtgaaagctttgcatcgaatttttgaatttaaaggcatcctcgagatgcagaatgcttagattctccttgttgcttaaattaatatcaactggatcgctcgtaggctggcgaatttggtcagcaatcaagcggatgacgtcctcttcatcgatgggcggcgtcgactcctccagcgattgcaccaactttgatttcttgttgctcatttcaaacactgccaaaatctaatcaaataatttcctatatttcctaaattatgaattcgaaagttttaaacctaacaacaatttctatgggacatgattctataaaaaagggatggttgaatctgaaattattatcttacccagcaaaaagaaatcgtatatatttactttttaatagatttgtaataatacgtaatatatttatgatattgattttactattttagtcgtattttataaatcatgtggaatcacttacctcaacgtccactcctggcagcggaaaaacctggcccggcggcatgtccctgggcacatagcggtagaactcaaagccatccttgtaccacttgaccgagtacagtgactccccgtccagatcgaacttgcacccgagcacggcatcctcgtggcgcataatgtgcttggggattttgatttcggtcattgtcaggcattccacggattctggatgacaaaaagcggaggaaagacaaagagttatttgctagaaactcagacgtagtatgtgccactttaataggtccttagtcgtgggctggtttagcggtttcaatgccagtggcaggacataaataacttgcagcaagtgcataaaagtcaaggaaatcgaaggaaaggcctccccaccccgtccccagactagaacaatgcgcttttgttttgccaacacaatggttagttggctgggagagaaagtgaacacgactaacttgagcaacgtgtcctggtttggaaagttctttcccacgcaaagatgctgcctgggtggtggcggtggaaaagctcttgggcctcggcaaaatataactcagtactcgagacaatgctgcagagaaatgaaaagttgccaacttatttaacagcccaagacaatgacggaaaactgtgtgtagttcgcccgctcacagctgggagggcaatttgggtcacgcaaatcgagatatgaaattaatattgcaggcctgaaatgagcagtcggaaagtggggcaatccgcgggagagaagtggattgtgatgcttaagccatcccagaggaaatgaaggatgtgcctgattctgcacagaactgcatatctatacggcttgaaatgcttatttaaaaagtttagaaacataggcaaaggactgaaaaatgatttatttatctgaatttaatttatttaataagttcatccttcaggtgaagttgtagcattctgaacaacctagttaatatttatggaaatataactgacattcctatgccacgagaaagtgtgcttaaatttagttcattgaaaccatttatttgagagccatttcataacatgtcatttaccgaaaagctctccattcattaaattgtatttatttcctattttcataggcttttctcaactcaatctcaatttgcatgacttgcgtcacagaagacaaaagggtaaattaactaaggcctttact

SEQ ID NO: 9902 - DNA, 776 bp, DROSOPHILA
aatccgtggaatgcctgacaatgaccgaaatcaaaatccccaagcacattatgcgccacgaggatgccgtgctcgggtgcaagttcgatctggacggggagtcactgtactcggtcaagtggtacaaggatggctttgagttctaccgctatgtgcccagggacatgccgccgggccaggtttttccgctgccaggagtggacgttgagattttggcagtgtttgaaatgagcaacaagaaatcaaagttggtgcaatcgctggaggagtcgacgccgcccatcgatgaagaggacgtcatccgcttgattgctgaccaaattcgccagcctacgagcgatccagttgatattaatttaagcaacaaggagaatctaagcattctgcatctcgaggatgcctttaaattcaaaaattcgatgcaaagctttcacgtgtcgcccactgctgaatccttaaacgaagtcatgccagtgaaggacgaggatctgggcgagatgctggatgccctgaccgacgtgatcctggttgaggaagacgatgaggacgatggcgatgatgatgattatgaagaagaagaggaagatggtgacgacgaagagaatgaattcgatgaagaggacgcggatgatttacaaaactcgacggacgtggtcgttgtcctgcgctcagttagccttcagtcaactggccgatatcgctgcgaggtgtccggcgaggcgccttcgtttcagacggtttccggtcacgaggacatgattgttgtgggtaagtga

SEQ ID NO: 9903 - protein, 251 aa, DROSOPHILA
MTEIKIPKHIMRHEDAVLGCKFDLDGESLYSVKWYKDGFEFYRYVPRDMPPGQVFPLPGVDVEILAVFEMSNKKSKLVQSLEESTPPIDEEDVIRLIADQIRQPTSDPVDINLSNKENLSILHLEDAFKFKNSMQSFHVSPTAESLNEVMPVKDEDLGEMLDALTDVILVEEDDEDDGDDDDYEEEEEDGDDEENEFDEEDADDLQNSTDVVVVLRSVSLQSTGRYRCEVSGEAPSFQTVSGHEDMIVVGK

SEQ ID NO: 9904 - DNA, 9577 bp, DROSOPHILA
ggcaactgtgccgcagtgccccaatgctgacgagctgagcgggaaattggtgaaaaagctgtgtcaaaatgacgtgttttgcgatagtgttgccactgacaacagccgcagggctgccaactcgatgggcatatcccactaattagttgcaaaacgggcaggcaatctcgtgttgattagtaagatgcaagcctagagcaaacgccgatttagcaatctcaacggcttgcccctacaaacaacaaacagcatttgtcaaccctggcacgcagcgtagttagcaacactgctttttagccaaaaaaaaaaaaaaataaaaaaaatgaatatggaaagagaccagtgctttttaaagaaattcgaagtcagtgggccgcaaggggtcgccaaagactaaacagacgcacctgctaccacccaccgccccttgtcgctcgtccgcatgaccagaacaacaacaaatgctgcaaaacacccagtcagtggtccaatgtctcagtttcagttttagtctcaacttcatccccatttcccaatcaattgcagatccgtgcgcacacatttccgtattccggtctgtttgcgagcaatccgcatccccgtgcccaggaacctacgtaaatgccgcgagcaaaggtttgagccggaggagagctactgacgacaggcctgtcaagtgcagcaggagtccaaactgatgcgcaataggtgggctcccctgtgcctcaaaccgtctggaagtcgagaggaatcgttaggaatcggcggaacagcctgcagagcacttgcagtcgcggtggcaaccacacggcggctgggcagctgggctacctagaaacatcgcgaagagaagaaacagtttgtaagcagttaatgggaatgcgagatatacccgtttactaaaacaaacattcccctcttctcacacgccctaacagattcgaggaattcgaatggcatttgtttttctccttcgttgcatgccaccaaacgaaagaagatgaacaatgaacaaacgccgtcatcatcggacacaccggcggatcgtgtggcatctggtggagcagctgccaaactgccaacgatcataccggacacgcccatcgtctcgattgccgctggcacgatgagcgagagcaccacgacgaccaccgtcaccaaaacaacgccgacgccgttcccacaggagcagcttatgaccatgatgtcagaccatgtggcgaaggcagacgcgcagcttgacgaggcctgtaggaaccagggggccaaagacgaggacagccaaggagcggcaccagtggctgccaaccatgtagccaccagcggcagtagcagcagaggcaatgaccccaagaagtcatcatcccctagtaatagccatagctctggtaaccacgcagccacggcagacgctgccaaaggatccgcagcagaagcagcagcaggagatacgtccttctcgcaggtctttgccatgctaaaggattcgcccagcgctgaactgtcgcgaccaaaccgcagggtactccagtacggagccactgccaagggcaagacccaggacgatcagaatgtcggcaagcgacagaagaagaaaaaggtaagtgcgctctggctgagttgcatcttaaggtggaaatatagtgcatgttaagcagaaaccgagttaagatattgttttattaagaaaaaggtatagttatgtttgttactcgcaaaatttcacatttgtgtacgttctggaggctccaaagctctatggtgtttggactccatatcttatgcatggccaggcttgaatagagctctaccagggcgactaagttgagaaacaactaagtaaacgtaaaatttgaaactaatttcgattttgggtggaattccagtattggacagcaagttgtccgatctttacgttaccaccaaaaccaaggtatacataaattagatataaatattgtttatttgcacactaagctataaactaaaatagattcttacgcttgcggtccattaaagttgtcgaaaatgaaaatgccgaaatccccttaaaacatgacctttggaaaaaactttaagtgagccgattactcactcacaaacactgttttatcgaaaaccgaattttattaaaaaaaaaataaatattgacagtcaaattgcatccccctaatgaatacatactcacatacatacatatatgtatgcgaatagaagccaaagtaccgtttacgaagttaatggcaaagaattcgaaaatgatgtagaaatagaccaagcatactgttatctcgttctgactgactgggattgtggctttcgaaatagtgccgttacatttggtcccatcaagtaatcgccacacaggaacttcaatttctgatcgcagtcggttttttgaccagcgccttcgataattattgaaatcaagaccccgaatcgggcagaaggaacggataaaaccgcaaagcgtttgtttatcttataaaagcattggtgacatccgcggcattaaccacgaaaacttctcgcctattcccgttattatttcagttattgttttttttttttttttctgttttcttgtgttcgtgtgcaacaccatatagtacacatgtgtgtgcgtatgtagagcgtttacttactggaaccgtgtgccatttaatacttctattgctctgcggtcggtacttcatcagttcgcataaggaactcagaagggcatgtgtttggaataagtggagctccgaattcttttgtttttttttttttaggttaagtcgcagcgattattgttttacacgcatatgtgttcgtgttgatgacccgaaaaattgcaaaactaattgccaaatattgttcttcgacgcttttgcagacaaaatacgatacctgggaagatagcgattttaatgatctggacgacgcatcattgaagaaacttctcgaagaggcctactggtatcgaaatcctggcgacaggaagaacaagagcgagcgatttctggtaagttttggctcatgtatgtgcaacatatatatgtgtgtataaatatttctgcttcacgtcttttacgcctgcagcaaatgctcaaaaaggctgagtacgacgaagagatctcttatcgtgccatcaaatcctgcctcacaatcaacccatccgcactaacgtccagtgcagcaacaggctcgagcggcgggagcagcagcagtgcagggcacaacagcagctataattccaccaatcaccggtcaacggatcccggccagcggcacaagcagggcggctccctgcaggatctcgttgaggcggcgcaccgcagcgaactggccacaacctcggcggcggcggcagcagcagcgacagcggcagcaacccaacgtttcaactgtgattaccagctgagtggtcgctccaatcgccggcagcagcagcagcaacagcagcacaaccaaaacgccacctcctccgcatccgcatccaaaaagatcaagaacttaaacgtctcgggccggcagcgcgaaggaggcagcctgcccagcagtgttaactttgagccggcatcgtctgccatggaagccaagcagaataagcaacaggctcagccttcgacagaagctgcaggtggctcgttttcggggtcggtcggtaacaagcaccaccaccgcagcagcaccggcagttgcagcagcctgataactcaatcgcgcgatacggaggcaaacaatcagttcgacttggacatggacgatgcgacgggtgttggtgccagcgccgttgtcggtgccagcggcgaccaagacgacaacatgttggaggtaagcgatgccaagtattggagccatttactgtcgattagataatctttcacatagtagattgatttctatctaaatcgactaacgaacgagtttgtaagagacaaacttcttgcatcgacctacactctgtgattaatctcgtgattttgggatccgcgcagatggggctgtgtacatacatttctaattcccccgctttcaatttcatgtacagcaattggatcctcagaacccctcgatgaagtttctgattgacgccctaaacgacacgccattggaggccaggtacaccggtgccggcaaaaagttcctaatcgacgaccggttgcatttttccgtcctggagctgtctgccaggaggaagctgcagcagcaggcacaatacctggccgccctcaccggacaatttggtctcggcctggaggaggagaagcgcaaggtagaggccggctacgtgtcgctcaacgacaactacacggcgtgctcctcagtttacggcggcggtgcaggttcgccagctgccgtggagggcagcaagccctctacctcctcctcggccgtgtctggcggtagcaactgcggtgcctcctctgacgcactgtctagcgatctgcgacctgcgaagattggacgcatggtccccgccgcagcggcagtggcagctgcgccaatgggtggcaagacgactactgtgagtaaacataagggttataattacagaactataagtgcagcttgtgactcttctttcgactgctaatacaaactccgagaattctaatgtttacaacatcattctttattttttttttgttttattacagcgacagctagacgagaatggaaatgcattgggcgatggtttcgggggcagtgcagccagtggctccagtggcgccagtggcgccagtgctgccgccagcagtagcaacggcaacggtaacgcaaaccagttcacagctctaataacccccacggtgggatccagtgtacccacctctactgtcgctcaccgtcagaatagtgtctccacgctgctctccacgggcaccaacactacaacaacggccatggcagcggcggcggtggctgcatcctacagccagttgcaacaggcaccggtcggaggcgcggctggaacggtttctgggatcggcattggcatgcagcagcccaccaagcagaagacgaagaagaagtcgcagcaggagcgcaacaccaccaccgtcgatgtggagtcggttgccggctataggggcaatgatcctgttgagcagctcgtcaagtacattgaaaacgatgtcaacggtggcggaaacagtgccgctggacagcgcaagaaggagcgcaagaagcaaaacaagctcaagaagagcaactcgttggaggagctgcgcacctgctcaaaaatggaggtggacgatttgaagcgccagtcggcgaccacggagatgatgcgacataagaagggcacgaacaatgcatcctcgggcggatcgtcgtcgacggcctctggttcctcaaacagtggcaagcacaactcggcatccgtggcggatattaacaaaaactgcaacaaggagcagcaacagcaatcgacgccgacggtgcaagtgcgcaacagcaacaatccaggaacgcagcagcggaagggcgagcgtcggtcctggggcaccgaggagttgcagtacctgggtgaccaccaggaaatatccgctgcctggtcggagctggagactgtgggccagaaggagctgccgctggcgctgcccgccttggcgcgcatgtccgaactggatgccctgaataccgtcttgtcggagaccgctgagttccatgtggttaccaagaagaagaaaccaaagaagcagcgtgctgttaccatggacgatgcggcggtggctgcagctgccgtcacgggcggcaacttacagcgcatgcagcagatcaccaagtccgcgtcctccaacatcatgtcccagcggatgcactactatactccgtacaacagcaacaatggtggaggcagtgtcaactataagcaacagcagcaacagagccaacagtaccaggagcactaccaggcgccacaggggcagcaccaccatcaccaccatcatcatcaccaccatcatcaccatcacagcggctcggcggtttcgaatcaggtggatagctcacggcgcaagtccacgtcgtctatgcccccatcggagaaatctgactccagtgatctcgactcggtccactccctgcccatccagacggggaagaagaagagcctaggcggtggcaacaacaaacaacggggggcgccgtcagccagtcaacgccaggccaagcaaaacaacaatgctgcagcccccatttcgtatgcggatatcgcccggaacaagcaggaggctctaaacaatgccacggccagcgacaccgagttggagctgggcgacaagatgcagatcaagagtggcggcaaatccaagtcgcgacccgatttcccggagctgccaggtgctgttacggcagtggctgccagtggaggtgcagccaatcaggcgacggttgtcagcagccaaaatacgccaccatcctcgtccagttccatcagttattcgcagagtctcaatgcaacgccgcccagcagcagcagcgatgcggagtccaccaactcgccggagctgctggcgcaggtgcagataccggcttacagcatgatcacgccaactctaacagcctccatgatcagcagtgtcagcagttctgtcgccagcacctcttccacatcctgctcaccgccagctctgcagaaatccaagagcgtggagcacgacaccagctacagctgcaatagtagcaacttggatcaacagtatccggcactagaaaagaccgtcaagcggcatagcaccaacaacgtgtctgtggccgtcgcagcctccacctcggcatcggcgtcctcctcgttgtacaactttgcagcggcagccaagcagcagctgacagagaacacccattcggccgtatcgccgccggcagctgtaacaactacctcaaccgcagtcgcagcctcagctccagctccaactacagttacagttccagctgcagttacagttccttgttattcctcatcctccacacacggctcgactcaaacttcaacttctactgcatcgtctgctatagcagctttaccctcgggcaaggccaaggccaagccaaaggagctatctcccagcagcagttgcagcaagaagccaacgaagcctagtcaagatgtgccgtcaatcagtctgtccatttccaccacgccaagggcgacgaccagcaccagcactactactacacaaaagaccacggctgccacgcagaccgagggagccaaaaagctaatcggcgggatccacaagctgcccagtagcagttgtattgcgaagggagccggagccgttttggaggccaccgccggcaggcgtgctgttatcatactcaacgatgatcgcgaagcaggcaggagcaacaatgagttcatattcggtgatttcaacgaggatgagctaaaactcttcgacgacaacttggatgatgaggaggagggccagcacaagcagtcttcaaacaagaaacagcaaactgaaggggaatctgatgtgacccaagatgacaccgaagacgtggaccaagatctggacaaggaactggaatgcctgggacgacgaccagagaagaagcaagagcgacagcaggatatcagcgccagcagcgatcagcatctgaatgattctggtgcggcttcggatgcagtcaacagctcagccagccttgacatgctctcaatttctgcagaggcggcacaatcgtcacctaatgcgggggcaaccgctacctcatccagcgtcgccagtcccattaactcgtccacgccctcgggtgcttcgtccgcatcggcgagcacgtccacctcatcgtcctcggtctcgatttcatcatcgtcgggcggcaacggtgccgcttgtcttgcatccgtttccggtatgcttggtggagtggccaatcagtccggggacagcggcatctatgctgccgccaacacgtctattaaggagcacgttaacactttcctaagcaaggccagcagcagcgaggagacgctgccgagtcccaactccatatcgatgcaacagctggaaacatgcaacgacatcgaggcggccatcatagccgcagcccgtgctgccgctgctgcccggagcaccagctgcagtcgcagcaactctcaggagcaggatgccttgcagccgcaggtcaagaccaaggcgactcccaatccggaggcgaagatggttctgcctgtgtttgtgacctacaacaacaacaacaacgacgacgatgacgacgaggaggacgacgagagcctgcaagaactgagcttcatggccgaccttaaggcggatgcagccacggaggatattgcaatgcagccgccaccgccttcatgtccggcgatgatgaccaacacggaactaatcgtcgactacatcgccaaaagtgagtactcgggttggggtttcctttttggttttttttgctatgctatcaactatcagtatatcagtattcacacacctttgtgcgaacagcaactattgcctcattattaacattttgttgtacacttttgcagcctggaatgccattgccaacagtaagtacgtaacgtactacaacgagcaagagcaggagcaggagacctagaaaccacacaaacagcaatcgctgcagcgtcagcgaaatcgaaatcagcaacatcggcgtcaatcacaatagcaacgtcagcaatatcggcagcaatctaacgagagcatccaacgtcggctgaaatcaggagagcagattggttggaatagagtgttctaaaagttaaaattttttttttttttgctgggctattgtttatatatctaccgatatcgtacacacactatatattattgcaataatgatacgctttaatgctaattaatgtaacgagtcgatagccgaactattgattaacttttgcaagcgcggcagccgaggatcagggtagacatctaacccatggggtcaccgttgtcaagaagtatcttcaggtgtttccagtgtgagtgcaggagtacaggatcgtgtcggctagggttccggtgccgcatgcctaataggttaactgttgcagaaagaaaattttatagagaaggagagcgttcagctgtgaataagaaggaaatcataactaaatgaagtgatcttacgaaagcttcaagtgaatatttatttaacataagttgaccgagatttaaacgtttttttttttttcgcctcaagaagcgatggtcagatagtgatgttcaatcaagcatttggatctgcttttgttaatttacaaccttctggatcccgaaaacgcaacgttttaccattactattactattattgtactttaataattattatgcaaacgttttttcgtcattgtttcatatgcccaatttttgggcgcgttgtttggaggaaatcctaatcctagatattaaaccgagtcaacgtcgcgtgtacatagtggaccagaagtcgtgtgggcagttcgatctctgtgttatggattagtggaaacagaacaaatcagaacaggatagaacagagcaaaacagaaagccccacggaagatatttgatatgtgtgtatgataacgactatttaaagtaaactatgtaa

SEQ ID NO: 9905 - DNA, 5736 bp, DROSOPHILA
atgaacaatgaacaaacgccgtcatcatcggacacaccggcggatcgtgtggcatctggtggagcagctgccaaactgccaacgatcataccggacacgcccatcgtctcgattgccgctggcacgatgagcgagagcaccacgacgaccaccgtcaccaaaacaacgccgacgccgttcccacaggagcagcttatgaccatgatgtcagaccatgtggcgaaggcagacgcgcagcttgacgaggcctgtaggaaccagggggccaaagacgaggacagccaaggagcggcaccagtggctgccaaccatgtagccaccagcggcagtagcagcagaggcaatgaccccaagaagtcatcatcccctagtaatagccatagctctggtaaccacgcagccacggcagacgctgccaaaggatccgcagcagaagcagcagcaggagatacgtccttctcgcaggtctttgccatgctaaaggattcgcccagcgctgaactgtcgcgaccaaaccgcagggtactccagtacggagccactgccaagggcaagacccaggacgatcagaatgtcggcaagcgacagaagaagaaaaagacaaaatacgatacctgggaagatagcgattttaatgatctggacgacgcatcattgaagaaacttctcgaagaggcctactggtatcgaaatcctggcgacaggaagaacaagagcgagcgatttctgcaaatgctcaaaaaggctgagtacgacgaagagatctcttatcgtgccatcaaatcctgcctcacaatcaacccatccgcactaacgtccagtgcagcaacaggctcgagcggcgggagcagcagcagtgcagggcacaacagcagctataattccaccaatcaccggtcaacggatcccggccagcggcacaagcagggcggctccctgcaggatctcgttgaggcggcgcaccgcagcgaactggccacaacctcggcggcggcggcagcagcagcgacagcggcagcaacccaacgtttcaactgtgattaccagctgagtggtcgctccaatcgccggcagcagcagcagcaacagcagcacaaccaaaacgccacctcctccgcatccgcatccaaaaagatcaagaacttaaacgtctcgggccggcagcgcgaaggaggcagcctgcccagcagtgttaactttgagccggcatcgtctgccatggaagccaagcagaataagcaacaggctcagccttcgacagaagctgcaggtggctcgttttcggggtcggtcggtaacaagcaccaccaccgcagcagcaccggcagttgcagcagcctgataactcaatcgcgcgatacggaggcaaacaatcagttcgacttggacatggacgatgcgacgggtgttggtgccagcgccgttgtcggtgccagcggcgaccaagacgacaacatgttggagcaattggatcctcagaacccctcgatgaagtttctgattgacgccctaaacgacacgccattggaggccaggtacaccggtgccggcaaaaagttcctaatcgacgaccggttgcatttttccgtcctggagctgtctgccaggaggaagctgcagcagcaggcacaatacctggccgccctcaccggacaatttggtctcggcctggaggaggagaagcgcaaggtagaggccggctacgtgtcgctcaacgacaactacacggcgtgctcctcagtttacggcggcggtgcaggttcgccagctgccgtggagggcagcaagccctctacctcctcctcggccgtgtctggcggtagcaactgcggtgcctcctctgacgcactgtctagcgatctgcgacctgcgaagattggacgcatggtccccgccgcagcggcagtggcagctgcgccaatgggtggcaagacgactactcgacagctagacgagaatggaaatgcattgggcgatggtttcgggggcagtgcagccagtggctccagtggcgccagtggcgccagtgctgccgccagcagtagcaacggcaacggtaacgcaaaccagttcacagctctaataacccccacggtgggatccagtgtacccacctctactgtcgctcaccgtcagaatagtgtctccacgctgctctccacgggcaccaacactacaacaacggccatggcagcggcggcggtggctgcatcctacagccagttgcaacaggcaccggtcggaggcgcggctggaacggtttctgggatcggcattggcatgcagcagcccaccaagcagaagacgaagaagaagtcgcagcaggagcgcaacaccaccaccgtcgatgtggagtcggttgccggctataggggcaatgatcctgttgagcagctcgtcaagtacattgaaaacgatgtcaacggtggcggaaacagtgccgctggacagcgcaagaaggagcgcaagaagcaaaacaagctcaagaagagcaactcgttggaggagctgcgcacctgctcaaaaatggaggtggacgatttgaagcgccagtcggcgaccacggagatgatgcgacataagaagggcacgaacaatgcatcctcgggcggatcgtcgtcgacggcctctggttcctcaaacagtggcaagcacaactcggcatccgtggcggatattaacaaaaactgcaacaaggagcagcaacagcaatcgacgccgacggtgcaagtgcgcaacagcaacaatccaggaacgcagcagcggaagggcgagcgtcggtcctggggcaccgaggagttgcagtacctgggtgaccaccaggaaatatccgctgcctggtcggagctggagactgtgggccagaaggagctgccgctggcgctgcccgccttggcgcgcatgtccgaactggatgccctgaataccgtcttgtcggagaccgctgagttccatgtggttaccaagaagaagaaaccaaagaagcagcgtgctgttaccatggacgatgcggcggtggctgcagctgccgtcacgggcggcaacttacagcgcatgcagcagatcaccaagtccgcgtcctccaacatcatgtcccagcggatgcactactatactccgtacaacagcaacaatggtggaggcagtgtcaactataagcaacagcagcaacagagccaacagtaccaggagcactaccaggcgccacaggggcagcaccaccatcaccaccatcatcatcaccaccatcatcaccatcacagcggctcggcggtttcgaatcaggtggatagctcacggcgcaagtccacgtcgtctatgcccccatcggagaaatctgactccagtgatctcgactcggtccactccctgcccatccagacggggaagaagaagagcctaggcggtggcaacaacaaacaacggggggcgccgtcagccagtcaacgccaggccaagcaaaacaacaatgctgcagcccccatttcgtatgcggatatcgcccggaacaagcaggaggctctaaacaatgccacggccagcgacaccgagttggagctgggcgacaagatgcagatcaagagtggcggcaaatccaagtcgcgacccgatttcccggagctgccaggtgctgttacggcagtggctgccagtggaggtgcagccaatcaggcgacggttgtcagcagccaaaatacgccaccatcctcgtccagttccatcagttattcgcagagtctcaatgcaacgccgcccagcagcagcagcgatgcggagtccaccaactcgccggagctgctggcgcaggtgcagataccggcttacagcatgatcacgccaactctaacagcctccatgatcagcagtgtcagcagttctgtcgccagcacctcttccacatcctgctcaccgccagctctgcagaaatccaagagcgtggagcacgacaccagctacagctgcaatagtagcaacttggatcaacagtatccggcactagaaaagaccgtcaagcggcatagcaccaacaacgtgtctgtggccgtcgcagcctccacctcggcatcggcgtcctcctcgttgtacaactttgcagcggcagccaagcagcagctgacagagaacacccattcggccgtatcgccgccggcagctgtaacaactacctcaaccgcagtcgcagcctcagctccagctccaactacagttacagttccagctgcagttacagttccttgttattcctcatcctccacacacggctcgactcaaacttcaacttctactgcatcgtctgctatagcagctttaccctcgggcaaggccaaggccaagccaaaggagctatctcccagcagcagttgcagcaagaagccaacgaagcctagtcaagatgtgccgtcaatcagtctgtccatttccaccacgccaagggcgacgaccagcaccagcactactactacacaaaagaccacggctgccacgcagaccgagggagccaaaaagctaatcggcgggatccacaagctgcccagtagcagttgtattgcgaagggagccggagccgttttggaggccaccgccggcaggcgtgctgttatcatactcaacgatgatcgcgaagcaggcaggagcaacaatgagttcatattcggtgatttcaacgaggatgagctaaaactcttcgacgacaacttggatgatgaggaggagggccagcacaagcagtcttcaaacaagaaacagcaaactgaaggggaatctgatgtgacccaagatgacaccgaagacgtggaccaagatctggacaaggaactggaatgcctgggacgacgaccagagaagaagcaagagcgacagcaggatatcagcgccagcagcgatcagcatctgaatgattctggtgcggcttcggatgcagtcaacagctcagccagccttgacatgctctcaatttctgcagaggcggcacaatcgtcacctaatgcgggggcaaccgctacctcatccagcgtcgccagtcccattaactcgtccacgccctcgggtgcttcgtccgcatcggcgagcacgtccacctcatcgtcctcggtctcgatttcatcatcgtcgggcggcaacggtgccgcttgtcttgcatccgtttccggtatgcttggtggagtggccaatcagtccggggacagcggcatctatgctgccgccaacacgtctattaaggagcacgttaacactttcctaagcaaggccagcagcagcgaggagacgctgccgagtcccaactccatatcgatgcaacagctggaaacatgcaacgacatcgaggcggccatcatagccgcagcccgtgctgccgctgctgcccggagcaccagctgcagtcgcagcaactctcaggagcaggatgccttgcagccgcaggtcaagaccaaggcgactcccaatccggaggcgaagatggttctgcctgtgtttgtgacctacaacaacaacaacaacgacgacgatgacgacgaggaggacgacgagagcctgcaagaactgagcttcatggccgaccttaaggcggatgcagccacggaggatattgcaatgcagccgccaccgccttcatgtccggcgatgatgaccaacacggaactaatcgtcgactacatcgccaaaacctggaatgccattgccaacagtaagtacgtaacgtactacaacgagcaagagcaggagcaggagacctag

SEQ ID NO: 9906 - protein, 1911 aa, DROSOPHILA
MNNEQTPSSSDTPADRVASGGAAAKLPTIIPDTPIVSIAAGTMSESTTTTTVTKTTPTPFPQEQLMTMMSDHVAKADAQLDEACRNQGAKDEDSQGAAPVAANHVATSGSSSRGNDPKKSSSPSNSHSSGNHAATADAAKGSAAEAAAGDTSFSQVFAMLKDSPSAELSRPNRRVLQYGATAKGKTQDDQNVGKRQKKKKTKYDTWEDSDFNDLDDASLKKLLEEAYWYRNPGDRKNKSERFLQMLKKAEYDEEISYRAIKSCLTINPSALTSSAATGSSGGSSSSAGHNSSYNSTNHRSTDPGQRHKQGGSLQDLVEAAHRSELATTSAAAAAAATAAATQRFNCDYQLSGRSNRRQQQQQQQHNQNATSSASASKKIKNLNVSGRQREGGSLPSSVNFEPASSAMEAKQNKQQAQPSTEAAGGSFSGSVGNKHHHRSSTGSCSSLITQSRDTEANNQFDLDMDDATGVGASAVVGASGDQDDNMLEQLDPQNPSMKFLIDALNDTPLEARYTGAGKKFLIDDRLHFSVLELSARRKLQQQAQYLAALTGQFGLGLEEEKRKVEAGYVSLNDNYTACSSVYGGGAGSPAAVEGSKPSTSSSAVSGGSNCGASSDALSSDLRPAKIGRMVPAAAAVAAAPMGGKTTTRQLDENGNALGDGFGGSAASGSSGASGASAAASSSNGNGNANQFTALITPTVGSSVPTSTVAHRQNSVSTLLSTGTNTTTTAMAAAAVAASYSQLQQAPVGGAAGTVSGIGIGMQQPTKQKTKKKSQQERNTTTVDVESVAGYRGNDPVEQLVKYIENDVNGGGNSAAGQRKKERKKQNKLKKSNSLEELRTCSKMEVDDLKRQSATTEMMRHKKGTNNASSGGSSSTASGSSNSGKHNSASVADINKNCNKEQQQQSTPTVQVRNSNNPGTQQRKGERRSWGTEELQYLGDHQEISAAWSELETVGQKELPLALPALARMSELDALNTVLSETAEFHVVTKKKKPKKQRAVTMDDAAVAAAAVTGGNLQRMQQITKSASSNIMSQRMHYYTPYNSNNGGGSVNYKQQQQQSQQYQEHYQAPQGQHHHHHHHHHHHHHHHSGSAVSNQVDSSRRKSTSSMPPSEKSDSSDLDSVHSLPIQTGKKKSLGGGNNKQRGAPSASQRQAKQNNNAAAPISYADIARNKQEALNNATASDTELELGDKMQIKSGGKSKSRPDFPELPGAVTAVAASGGAANQATVVSSQNTPPSSSSSISYSQSLNATPPSSSSDAESTNSPELLAQVQIPAYSMITPTLTASMISSVSSSVASTSSTSCSPPALQKSKSVEHDTSYSCNSSNLDQQYPALEKTVKRHSTNNVSVAVAASTSASASSSLYNFAAAAKQQLTENTHSAVSPPAAVTTTSTAVAASAPAPTTVTVPAAVTVPCYSSSSTHGSTQTSTSTASSAIAALPSGKAKAKPKELSPSSSCSKKPTKPSQDVPSISLSISTTPRATTSTSTTTTQKTTAATQTEGAKKLIGGIHKLPSSSCIAKGAGAVLEATAGRRAVIILNDDREAGRSNNEFIFGDFNEDELKLFDDNLDDEEEGQHKQSSNKKQQTEGESDVTQDDTEDVDQDLDKELECLGRRPEKKQERQQDISASSDQHLNDSGAASDAVNSSASLDMLSISAEAAQSSPNAGATATSSSVASPINSSTPSGASSASASTSTSSSSVSISSSSGGNGAACLASVSGMLGGVANQSGDSGIYAAANTSIKEHVNTFLSKASSSEETLPSPNSISMQQLETCNDIEAAIIAAARAAAAARSTSCSRSNSQEQDALQPQVKTKATPNPEAKMVLPVFVTYNNNNNDDDDDEEDDESLQELSFMADLKADAATEDIAMQPPPPSCPAMMTNTELIVDYIAKTWNAIANSKYVTYYNEQEQEQET

SEQ ID NO: 9907 - DNA, 2690 bp, DROSOPHILA
aatgtattttttgtttgcaaacagtaagctccgctgtacgatgatgaggaacaaatgtagaaaatcctttttattaatttgttttatattgttatgaagttattcatgtaaaactttttcttggccttgggcaggcggaaatgaaatcgtgtatgggccgcagccaaagtcgaaactaattttaatgccactagctatttattttaacactaattaatatttactttttatgcgtatttaaaaaggaataataatacaactaatacttaaacttatgtatatctatacaaacagaaaaagacttttgactgctgaaagggaaatccactgttcttttagatttctttttgcaaagtcagatgcacgacgagcagtccgactctaaaatctctacaaattgtattgcacttctaaccacactagaaccatttcgaatgcatttgcttcttatgcctgagcctggcttgaatcgactcgtctaactgccatcgatcttacttttaactttgttcattagtcactttttagaccgctcaactgttcgatgcacctgcctgcaccttagtccctaaccacaaccacactcatctcgttttataaataaagcgaccgatcaatcccacgctggtatcttataatttattgtgtacatccgctggctctcacttgtttccaaaactgatattactttaacatccgcaaggtatttcaacacgattgactttagatagcgaagtgagggtaaaaactaatagagcataatccaactgaaccgccattataaaatgattccgagcagatcggtaattcgggggatcaggataaaataaatatgtatatgtatgtgcgtgtcggcgcagttgtgcccttggcgcaattcgctccggaataatgaatattaatgagatctaaacattattatataaaatgtaataaagttattgaacatgattatttaacaaagtcttagttggttttattgcaagttagctttagttactctactggttatcttaagggaggtagtctctctacatttggaaatcgtcacgcatgtcgttgtagcggagtacatgctccttgatcttggagccatccacccaggtgacaaagtcctcgaggtttctggagaccagaaaagcaggatccttaatcatttccggaccaacacgcacatgaccatgctctatgaggtctgtggccgctttcaggtgctccgacattcgaactgccaacggaaaatggttatatgaaaatgaagtgcttattaagggatggtactcacgtttcaccatgatcacgggtagacgacgtcggcaaaagtggctggcagatatcttggccgccgtttccaaagtaagctgatcattggaaactcccatggcgtgcagcttgtttaggagcatggtggtggcctccgtcttgaaaggttctgaagcatccagcttagctatcctctctgccagttcccgtatctccctggacaacttgttatacctaaaaattaacaaatttaatggggatttaaatacgtgagcaatttggtctcttacttggtgtagtcctcccttttttgaatgtgaaagcgcctaaggattttgttctccttgccgccgttgtccactttccaggtgatgaagtccacctttttaagcagcttctgctcatgaaatttgagtttacgaaccatttttatttatattattttgcaaattaattttttgttgacgaactactcgcacatgtgctgcgcagtgtgaccagagcacgcacaactgcagcaccataaaaacaaacagctgatttgtgcgtcttcaagcggcttctgtataataaaatttagatagttttttaaaatcgtaattgctgcaatggcagcctcaatggatgaggatataaccgccaacccgcccccaagcagcgaagaggaccccctggccgaggagcgcctaggctttgtgcgggaagtgggcgcgcaggctgtttggagcctctcctcctgcaagccgggtaacttttggtgtaactacgtgatccttacatattctacaattttctttggccttcaggatttggtgtagagcgtttgcgagacaacatcatggatacttattggcagtcggacggtcagcttccccacctggtcaacattcaattccacaagcgtacgaacatcagtcagatttacatatacacggattacaagctggacgagagttacacgccatcaaggatctccatacgatctggaacgaacttcaacgacttgcaggagctgcaggtgatggacctgaccgaacccaccggctgggtgcagatacccattaaggatgggaacgtcaagtccatacgcaccttcatgcttcagattgctgtgatctcgaaccaccagaatggcagggacacccacatgcgccagatccgcatccatgcgcccgtcgagggcaagcactatcctctggaactgtttggcaagtttggaacggtcgactttcagaagttcgccaccattcgttagggaaaactttgggatttatcgaagtcttttatttttatgtatttttcggggtatataactgctaaaatacaacatttaaaacattactttagtaattttatgcatatttttggtgtttctaattaaatgcccgtcacttgtatatatataattcgaatgcaaataaatatat

SEQ ID NO: 9908 - DNA, 634 bp, DROSOPHILA
atggttcgtaaactcaaatttcatgagcagaagctgcttaaaaaggtggacttcatcacctggaaagtggacaacggcggcaaggagaacaaaatccttaggcgctttcacattcaaaaaagggaggactacaccaagtataacaagttgtccagggagatacgggaactggcagagaggatagctaagctggatgcttcagaacctttcaagacggaggccaccaccatgctcctaaacaagctgcacgccatgggagtttccaatgatcagcttactttggaaacggcggccaagatatctgccagccacttttgccgacgtcgtctacccgtgatcatggtgaaacgtgagtaccatcccttaataagcacttcattttcatataaccattttccgttggcagttcgaatgtcggagcacctgaaagcggccacagacctcatagagcatggtcatgtgcgtgttggtccggaaatgattaaggatcctgcttttctggtctccagaaacctcgaggactttgtcacctgggtggatggctccaagatcaaggagcatgtactccgctacaacgacatgcgtgacgatttccaaatgtagagagactacctcccttaagataaccagtaga

SEQ ID NO: 9909 - protein, 200 aa, DROSOPHILA
MVRKLKFHEQKLLKKVDFITWKVDNGGKENKILRRFHIQKREDYTKYNKLSREIRELAERIAKLDASEPFKTEATTMLLNKLHAMGVSNDQLTLETAAKISASHFCRRRLPVIMVKREYHPLISTSFSYNHFPLAVRMSEHLKAATDLIEHGHVRVGPEMIKDPAFLVSRNLEDFVTWVDGSKIKEHVLRYNDMRDDFQM

SEQ ID NO: 9910 - DNA, 24515 bp, DROSOPHILA
tacagcatctgcactttactgataagaatgcaattccaagataaagcgcacatttgtaaatataaattgatttgagtaaacatatatggcacctaagagtatgcaatgatatatgttagttaaaaaaatatattaaatgagcttactatcatttcaaatcctcattctactttcgaagatttagaagactttatctatgcagcaatttcttggcccagattggaatctactgacacaattttggctggtgacagaactctctattcgagaatgtacccagttcgtccagcttcgtttggctccacaccacgcgatccgatgtgatctgcataaataaacaccctgctttcggtgtttcgaagtatatcccagaaaataaggttcaattttaggtattctcgtttaaatgatttactgtgacgagatgagaaaacactctcaaagttcagaacatcagcgaaagaatcggacaataaaagtcgtgaagagacgccgtcgaaatattaaattctcaatttatcagttggctaagctcgaacaatgcgactgactggcatcgaaaagggggccttggttgtttcggttttggccaggccgaataatttattgactctgccacctttcgtccaaaaatggctatccattattgcaaaaaactcgctgtgtagcttgaaatggaagaaagatctgccagttattttgataacatgcagataagatgggagctttaaagttatgaatttaaatacatatatgtgcagaaatcagattgcaggatcctcatgtaaatacacaagttataaaattgctaaattaatcataaaatgcaaatgcattttccatatagtttcactttcgcacaagccatgtttggacttgaatactactccccttgcacttgctgattatcgcataaatctgctaattgctttattggcttgcacttaaccatggttttagccgcaatctcatctccatctccatcttcgtttccaattgcagtttctttcgagtgcagagtagcaaaacaaaacagacatggatgccatcaagaagaagatgcaagcgatgaaagtcgacaaggacggagctctggagcgcgctctcgtctgcgagcaggaggcacgcgatgctaacacccgcgccgagaaggtgagtcaaccacccacttccctaaaccccagtgcactgaacaaaacaaaagtttactttcaacattaatttacttgccaaaattaccaacaccatatgataaactaatgaatcaaaagcacctcattctctaaatgaaaaagttatacaaataatttcaaacataaaacaataaaacaaaacaagtcttggcttataccaaatgaattttaaaatgtttttttattacattatttaaccacaaaatagtagttttcaatagacaagaatttgttttcggtgcaagcatgcaatgatacaatggatggctatcatgcacaacgaattgaaaagcatttaatctaacaaagagcataattgccggctttcacacaacaccataaatcttgttagcacatgcaatttttgtgtattattatgatttggttttcaaataacattggatttcattcgcttgaatccgtaggccgaggaggaggctcgccagctgcagaagaagatccagaccgttgagaacgagctggatcagacccaggaagccctgaccctggtcaccggcaagctggaggagaagaacaaggctctgcagaacgtgagtttatcttccagaaatatttaatattttaaagtatgtcctaagctatgtttaagtctagctcccaatattttcccttggttttaaaacatttttagtaatcaaataaaagtaggacttttagaaacttaattaagtaatttcatatcttttagttccttatattatatttatttatttttcattactttgccattttatatttgagttttaagcatgtttttccatttcttttgtatctcaagcaaaatgaacacccatacatatatgtgaatatatatggaaatcacttcactttcatgttattttattctggcagctcaaatttaagtttgacaaatattgaaatggatatagaaaatgccactgagcgcccccaaaactactaattagttaagtcacttaagaaaatgtttgaaacacaaggaaaacattccattaatcatttgaaaatgtagtccgacatttgtcagatttcgaatgtccagaattttaagccatttcccctgaaacttaccataagccattttagttcctaagcaaaatacgtatattttgaatgctcctgctcaatattttgaaatgcattcaaggcaagaaatacacataaatttataagaggcgtttatgaagtgacttggtgacagctggcggtttcttttgggtggggattgcttggaaaaatgggacagcggcaatttaacgccaatttcatggcagcttgaaatcggagaaattgtttgggggaaacatttattttgtgtgttctccggcattccaaaaaacatcataaatttctttttttgaatttcaaacagagcagtcagcaattgaaacgtagcacgctctctcatgctctcttttctctgggttggcaacgcctgtgcagagaggcgctatttttaaattcgttgaaaatagccagcgcaagatatcaaataacgcactgaatttttcggttggcttgccaaaaaaaaaaatggttctcgcaaaaaaatacgcgtactctctatttccctgaattagatttgtatctagaacacttttcgtagttggtccccagtgtttccaaaaagaattcgaattgcgattcgtcttttgattgccacattttaggaaagtatttcaaggacatttggcatcgtttcaaaaagatctcagcaggtaaagcgcttggaaaatttatcgctgggagtggatccacaaggtaactacttatcagacaaccatattcacatggccaaacccaaagtcccaaataaatatgacaaagcgaacggatgcctctgactaatattgaaaaataaagaaaaaacagagataagcaattaaatgaatcaaatgctgaaaatgttctccttctgggagaaggaaatctgcggaagagagtaacaaaaaaaaatgatatttctaccaccccctctttctttctctctctctctatctcgctcattgggtgggtggggatccatattggatcctatgcggatccatattgctgactcactcgcacacgtgccacacgcagagaaagagagcgagcgagagtgcgagagcgtctaatggggagcgagatagtgagtttccccatgctcatctaacggtgagcgcatggccccaaaattcaagtacaacacaaacacaacacaacgaggggccgaggaaaaagcagcagaaaagccagcagcagccgcccgctcataaatctagcaagaaaaacctaattaattcaattaattactaccaaaatcataccggcatacgttaaataaaaacccgttcggtctaattaaaatttaccaaaaatcactgctttcatttaaagcgattttaagtgaaattctagtgatttgtataattacataaaaagtgttgcggaaattgactctctctatctttctctgcaaattttcacgcgccgatgaaaattcgcaaaagatctgtattaaatcatcaataaaaatagcgaaactaacggtgcaatgaatccagctgtttgaaatccgcaacataaaagcaaaaaacacaaaactataaaacaacacgcaccgaatcacacggaaacaacaacaacaataggcattgctcataattaatatgtacgagaaaacattaaacataggaactgcgaaagttaataatgcatatgaatggcaaaaagtgagatacaacaacaaaccccaaccgacaacaacagcagcagctgcagttaaacctaaaccacaacaacaacaagttcaaaaacagaaaaatgcaacaaaagccgcgccagcaacaactacagctgcaacaacaacagcaacagtgccaccgttagccggcaacagcgttaccgttaagcaaggccccaaaatcaaatttgttggcaacgcggcgcgccgccaatcgttggcccatcaaatcaagcgagcacatcggcatttactgaccagtggcggtcaggataagcagccgcagcaaaagcgtaaacagtttatctattctttaatgcgaatttcaaattgccaaaatctacacgcgcacaccagctgcaagtgcgctagcagtcagccttggacagtgcgcatgtagttggcaatgcaaattccacatgatcagcaagaaatgcaccgttgccagcacttccaagccaattggtattttcggcatattccagactggtcacactgccccatccagcaacagctggttccagtaaaaaaaattcacgtagcaattttggccacaaattacccaaaaattaaagtaaattattgcattttgtaaatattaaggaattaacgcaacataacagtttgtaaatatacacaaaataccaattggaagcagtggtcaacacggtcaacacgaccctaaacatagtcaatcgaagaaaaacccattttaacttttcagaaaaaacacaagtgcagccgcagtcgggcaaaacagttgccaaaccgaaacagaggcagcagaaacaattgttcaaaagtgataaggcgaaggagaagtccagcaggcagcagagaaagcgagccggcaccaggagcactcgcaatccgaggacgcaatcggaatcttcgggcctgtcatcccgttggtgttccatcgaagagcagttgaacctgctggacgacctgctctactactgcgatgaggaggccgaactgtatctagcccagctgtacgaaaggttcgagacactccggcgtagcaggagttcctcgccagtgagcgatttctggagcgattccgacatggagcacgatgactccagcaccagtggcactggcagccatacagccagcaataccagtctagttcccgcctcgctgaagcgtcgtggccaccagcatcatccgcgattctcgggcactcgccgtcccaatgtgcccaatgtccaggagattctggccgcactctatcgtggcgactcaaagagcgccctgtccaatctgagaggagagacgcaaccggaggaggagcaaccacagcagcagacggaggaggtgctgccacccagcagaagcactttaagcctgcccctcagtgaatcggtgaccaattccctgggcagcaacagtcccacgcccacagacgaaagcagcgtgcaagatgagggggccagtaatccggcagcagctttaatagctgaggatgcagccccaccagcaggcacaaccacgtccaagagcaagaaaaagaagcgggagaagggtgaaaggtcagagaaatcggacaaatctgagaaatccgaccggaagaagaaatcttcaggcaagaaggaacgcagcaaacgatccaatcccatggagcaaagcagcgacagcctggccaccgatctcagtgccggggccatcgatgagggcatcgcactggccgacgacgatgacaaccaagcggcggaatggtccaagttgcgatgcaccagcgaggcggccgagattgtggcggagcgggaggctcgacggaacaagggacgttgtgcggattatccgggactcgcctttggcagatccatcttcagttcggacaccatgatgaagttcaacatcatccgcaacgagctgcacaacatcatgaacacacaactcaaacgggtaattaatggtcgagagacttggagttgtttgcacattccttactaatctatatattcttcaaattaagcgaagaagccaccttgttgtcgttgctgttgtgctgcgaaaaggggactccaaagtttggttaggtttttttttagcaattgctccaatttgttgctgtcgtttttcgcattgcaaaacgattacgtcgtcgtcttcgtcttttcgcgattttcttgttgtgccttaacccttggctggccccagggtctttactcggccctcgtgtattcttttcgccataggtaaagattaagctgcggtatttcttgacccacatcgttcaaatcacttatttctctcacctttcactaggcagaatcgatttgcttatgaatgttgtttgaatgtttttaatagtgcgtgagtttctagaaatagaaaaactttaactacgagtttaccaaacaaaatttagacaagcattctatcttaaaagtattccattaatttgggcaaatatgtttatttgcaggcaattgtttaattagttacgcaattgctggaatatctaacggtactcgccggccacctgttgccctccccctctatcactctctatatcgcctactgttgtgcgggtggtagaaagagagcatccgataagaccgctaaatggtattagtgctttttcattttttttttttaattttgctcagtgcgctgaaaaaggcaacacagtttgaaaagccaaaaggaaaacccggccatttatggccaaagcataaaacagtgcagtgccgcagtgccgcggccaagctcgatttgccaaaattggccaacaaattaattattaaacgccgatactcggcacgaccttccactattatttacttttaatttctcttcaatgtcgcccggctaaaaatgggcgagcgctcattgtttgcattatcaaaacaattacgccatcgccgggaagttgggaataatgtgtggctatagctacaggtggttgagctgttcaaagaaaagcagttagcataacgctattactcattacgttgcgcttacgttgtttgctgataagcgtgataaagcgccggctttgtgttttccgtttgccgtagtggaagcaattagtggaacgagtgggagggggagaggttgcgttggcacacacgcacgcacacacctgcccaatcgccttactcatcttcctcgctgaccattttacatgcccgatttttgcataatattacttgcctggaaatgacaaaaatccaaaatatttcttcactaattaatgccaaaacaacaacaatgtcgacatggacagaattttagcggcttttaacaggttttccagtcgcacacacacgcgtcaccatgcacacacacgcgcaccgttttaggcgaggcagcacagacagactggaaggcagtagctgcagcggcagcagttgtcccgctcgcacaaaccaccaccgccgcttcgacgggcgattcgatggattcatttccagttacgtactcgtcgcagtcgcgtcgtcgttgcctctctctgcgtttttgtgtttttgccaccaaatagcaatattcaatatttaaacgtagcatattcgcctgccagttttgccatcaaacactgccctttaagttcaatcccaagccagggtaaaagcagttgaagttgaagctatcgaagaaaaaaccggtggttcgttcactctgtgtgcgagtgtgtgtgcgtaccgagctctttcctttcggtctgtgtgtgcgtgtgttccattccaaattgaaaatttaatttggtgtgctgtccgaaaaggcagagtgcttcttcagtcaagaaaaaatcgagctcaagtgcccagtcaacataagttaaaaagaaagaaacacccacaacctctgtgctaaagccaagaagaaaaaaaaaaccacaaaaatgacgaccagcattccacaaggcactctcttggacgtgctgaagaagaagatgcgccagaccaaagaggagatggagaagtataaagacgagtgcgaggagttccacaagcggctgcagttggaggtggtgcgccgcgaagaagtaagctcagcaccagccacttacttaatttgctaccccttggtttgggcaaacaaacgactgcgtgacctgtcttccgaattttgcataaatcctacctaaatgacgggaaaaaagactagatagtccagcgcatttctttcgccccctctctctctctcgttctctcttttcttttactttttcgtgtgtgtaggagcgggacaacgcatgtgtatgaaaaggtggcgctctcttgttttttgagctctcccaacggctctctctcttttagctgttgtttttactctttgtgaatttttccagtctggctgttgttcttttcgtggtgaacgaattttcgggctcagatacagggtggttccggccccgtccctcttaactctatttttgggctaactgttcttatcgctgaccaaattcattcacctttcgaattgtgtgttatctcccgcttgacagcacacacacacactcgagcattagcataaaacacacacacggtcagcagtcgctctcccatttacataaggccaaaaaggaggaaagaaatcttttgaaaattgagcgattcggttggccttctagctttctgctttctcagcgacaaaaaaagaacagaaaaacaaaaaccggctttaagtccggcaaagaagccacatcgtttagctagcggtgttctaaattcgattaattatgatttttacgccacggccatcaataagtggtttaattctcctaatgcctttccagcttttttgcccgatggctctgccttgttcctaattcaattctaattagacaattgagtgcgcgggctcctttaagcgtgtgtgtgtgtgtgtgtgtgtgtgtgtgtatgcatgtgcgcatatgacgtcattgctgagggagcataactttgagaacagttcaaactccatagcacgaacttccctttattctcgtgttgaagactgttaaataaaacttctttattctgctcgaagttcgccctgagcaagcttcactgtatttttccgttccgaattcgaattgattttaaatttgaagagattctaaagcgtgatttcactccctcgttgacttttttccacgctgccagcaagtgattgacgtttcgcttccccctttaaaaaacgaggaaaatgaaaactaaaacaaaacataatttgcttcttttcggatttctatacaatgctttcaatgtcactctgccgctcatttgcccccctatttccatcattcacctcccctcactttccccttctgcaattgaacgttgataatttcaatgcgcgcattgtgacaaattggttttgatttgtgtgctttgcctcttgccagtttcgtaattcggagattacagcatatgacgccatcgctccgccctttccctccccctctctctccgctcaacgggccccatagacaaacggaatttttaagaaagaaatattttatgcttgagagcatcgtctttaacacagtgttttacattttcatggcttatttttcggctcataattaaaaatgcatcatcacaatggaaacacgccctacgtgtaccgctccaataagtcttttttgtttttgtttctggtgttttatttttcggttgccagggcaataaaacaaaaacgaaaaacgcaaaacaagtaaatttcaaggtgtgtgtgactaagccgtcaacaatttctggtaccatttctcggccacagttttgcattggattttatggagagtttctttcggcatttcaactatattttttacttatattttttgcactttgccggtaatttttcatacattccacaacaattggaggccacgctctcggacatctctgtctcgctctctctctctctttttgaaacgtgttctgtcaccgcttttctttgcccactgattttcccccctcccctcgcccgttcttggcccgttaataaagcgtttaatcttcaatacgttttgttaatgagctcgaaaaagagacagggagagggtgagaaaaggagagatggctgaaactcccgctacaaaacgaaacccaactggaatccactcttcaacttctttgctttgctgctcttcgtttttttattttggatacccttgataaaggggtataacctaagcgtaatttgactcttcttcagaactaataacagatcaagttctaacataaaaacgatcaaaaccgattgattatctttgcacactccattataacatggttctttttagacataaatatcggtgacttcagaattagctctgtattgaactttcataaggaaattttgtacgaatgaatatttgatttggcaagggtatataagctgcgatctctgccttcacttttaatttgattttttggcattttttcttgtgctggctcttgggcttcatcggcggttttgttgttcgactttcgtgtttggaaagctgcgttgcctgctcccccaattcgaaatgctttttatcgctcatgtgtgtgtattttgtacgatgacgtaacccaacacggttggttccaattcataatcacacgatactttaacgacccgcactcacatcgttcatttggttctaggcgtcgtcagatggtcagtggttcaattgttcagttgttcattcgctcacttagtcattccatgtacatatcagtagctctatatccatctctatctccatgcccggcaccatatcagtcattgagcatggatttggacatggacatggcatggaacttagaactggcaccggactgccttgtccaattgcctttgagccgtttacgattcaaagtttgattcgcctctaattttatatacttttttcaccatttttgggcgggtgcttaccgcgctgttttcgcttttcatcgttttgacgtgctgtggcctctataaggccataaagcagcgaatattttccgttctttaatgggtatagtattttagacggtgggaaaactctcgatcaagcttaatcgatgacgtcacgggccgtgaaccttgtattggcttcatttttggacttagtagccatatcaggtagtggtgttgttgaacttttgtttaactttgatggcgagtatcgattgcatttagccagcaaagcaacacgcaatcattccttcgcttaagggcgtttttggggggtttgctttgaccttgcttcgacgacggaaacagcgacaacaacaacaactacaacgaggtggaaaaagggaacttttctttacaggtggaagccgcaactgaaaatgggatcaacggtcgacattttagggaaaaattaggtttaccactttaagtactatgaacaggggggttaaagagagcgcaaatgcaggagtgtttcatcatagcagtcttgttttactaaaccgaaatgaggatagtatgtttttccaaaccaagcgtagcaaatatttatttatgtgtatttcttgccccaaaatatttaaggtttagcaccgtaagacgtaaagtaaacattaagattttagcaataagtttacagcgaatggatatgctatatctggttctttcgaccatcgaacgtttgtcttataggccgaatccgaggttgccgctctgaaccgtcgcatccagttgctcgaagaagacttggagcgctctgaggagcgtctgggctccgccacagccaagctgtcggaagcctctcaggccgccgatgagagcgaacggttagtaccacgttaccatctaaagtccctgtcccccaactaccccatctatgatctcccccactgtacccgaatatgtaaaatacttcttaagttcacagagaattattaagttcaagttacaacatatatattttaatcgcatctgtatatcgtttcgcaatgctgcgacaaattcaggatacgaaaagcgcttgagaatcgcacaaatatggaagatgacaaagtagctctcttggagaaccagttagcgcaagcaaaattaattgcagaagaagctgataagaaatacgaagaggtatagtctacgaattcatatagtctacggaatttggtctccgttttagggcattagggttattaggttctgctcctttgaggttaggttcacttggtcaacatttgcgttactaattaggtttttgggtctatttaactatctgcgctctctattttctaatttctacctaaccgactctgcaacaacgacaataattgtcgttataataatggtcacttttataatgataacaataatgatgatgtatctaagttagcgtgtaagactttctgtaaacagcatttagttggcacagttcaaagatgtcgacccgccgctggaactggaacaccatggatctgctctgaattattgtaaaaactttgtaaaattatgtatcagacagcatgtcctacttaagcttatggtagtctattagtcaaatggctgttaaacaattatgtctaaaaaaaaagatgaaaaatcccccagtgattgtaatgagacgaaggctaaagtgtgtttggttcttggtctaaatccgttggcttaaatacctcccaaaatatcagctaccaaattggttgcacgtccatttcgcttcgaagaagccaaacacagtttaagcctcttgcttaaccctttccgtctcccctagtgtcccctgccccctgtaaaaacttgttaattaagtagaagttccgaattgttaactcaactggcaacaacaaatttctgtctcttttgcaacaacaaccacgaccaactacaatcaaacttcaatattcacaaaccaaaaatgtatctctcaatgtgaatgtttgtgtaaaacatctgtttgtcgtaacaattgcaacaactacaacaacaacaaccacactgaacactcaacgatgtggacgatgacgtcgaatgaatctcgtgataacttttcggctgtaccaactgcaattccactggggaacggcaaatcatcgctaaccacttggtcactgtcttctatgggcatggtcgtcgcaaccgatggggtctatatactctaccatccacactatattatatagtgctcgcaaaattcttgagaaccgcgcccttgccgatgaagaacgcatggacgctctcgagaatcagctgaaggaagcgcgtttccttgctgaggaggctgacaagaaatacgatgaggtgcagctaaaaaccaatttgtcttctattaagctaagcaacaataacaacaacagtaacagtaacaatattgaaatcagtaaatcagaatcatgcaatgccagcgatattggtggcaccaacaacaataacgcatccagaactattgcatctgctgctgttggtgaagagacttccaccttgtcctccacaagccacgaacacaacaacaatcccaacaacgacacctgatctggttcctttgtcaagcggatattaaagtaacttgaatttgaattgaatgattgataaagggttaaccgaaacccgaatcttggcacaggaatcagccagtgcgttgatgcaaaacttgtgcttaccacgacgattacgaatgatgcttgagggcagttagagcttagatctagacctagatcatgcacagcccgcccgcccgcctgaccatatgcaatatatatacgtgtatagattatgacgatgataatgatgatgataatgatgatgtattagtcgatgtacatatgtacaatgtaaatccaatccaatgaactttcgattgtaatggagtttcgtgtgtattttaatgtgtaaaataccaatggcaatatgtaaagtaattgttaagcggtccatacaatgtccacaagtactctattaattgtcctcaatgctcttccacgtcaaaaagcttgagaagcatatcgccactgaaaattgattgttaaaagtaaatcgtaattgggttagtttcttaaattgttctttttatttccattcaatttccaattacataattgtaaagaaaatgtaatttatactcacgttaaatgcatagagaaacacaccttaagtttaaaattaacccaaggaaatatctaattttggaataatatttttgcaaattattgtttatatacataacatattatatactacaaaaatatataaatacaaatatataattgcagcataaaactaatttgatattattgaccaatgagttggagcagataatatttggttacttcatgatgttgtacatttataggttgagatatgagtaatgggtgtgtaaaagtgtagccatgatgtagggtgcttaattgttaggcgaatattggacaaattactattgggaaatagttgaattcagatgtgtaaagctagaaaattaatgtatctaccaaagattgggactagggcttactgctttgatggattgccagcacatttttgagtgtaaagattttagtcattttctataccctataattcttgccattcccaatccaaggggtggcctaaatgcctacgtgttcagcacgtcaatcggatcgaaaaaatataccaactgataaactacatgcacagataagccccatttctgcagtgttatttcttcgcctttgctaccttatctttttcgcagaaactaaggcaaaggcaacgattgtatgtgaagtacgaaagcgtgaaagtacaaaatggaatccataactgggaccgaaaggagggggtaaggttttgtttaactgccggcgataagaggaggaggccactccccaaacggggcagattggattcgagtagatttcgcacgttgggccctgacataagcgcctaaaaactctggccaaaacgatcgatgatgcattgtgcgagagggaggtgatcacttttgaccctcagacgtaggccaatggaaagtgccgtgagtcagtggacaggaatgtgcgtggagcaactctgtttcagctaaaagatctgacggcactttagtcacttggccatgcctggtgcattggcgtcgtgattcattgggagctcttaaacataccggaacatatcagcatgaggaggaaattaaaatcagttttggctaacaaggctattaaagtttattggcattgcccttaaatgggtcaagttattttcacattttttggtcagattattatctgagatttttactggtttctgaattagaataggaaatcagtgaaatagttaatttaaagatttctatatggtattgttaagcctttaaagctagcgatagtaacttcctttggctgagatggttttatatataacaatttagagattttatggtatttggtttccagaaaatgtacaacaaatgtgaaagttgcaaatattataaatatcccgacagaatatgttatgctatgtaaacagattgagtacaataaataatagtatggatattgaagagccacacgacaagcacaagttttatgggataaacaattgaaaaccacacaataacaataggctacacaaattgttttgttcaatactaaaatatgcaaaggcaccacataaaagacaaaagaccataccaaaacatttataataataccattaaaaactaataaatacttcatttaaagcttctatgtttcatttactaaacgaaatctgtgtaaaaactatgaaattaaatacattttctatatgttctcctgtacacccgacgttccctgtattataccaatcaatcgacaatgaaacaatgaatccatatgtaatattatatgagaaaaggttgcccgtaaattggccatggttgaagccgatttggaacgtgccgaagagcgtgccgagcagggtgaaaagtacgttataagtccagatctaaatatatattgttcgaattgtttgaagcccgttttaatgtgcctaataacgaaaacaatgttgaaactgccgcaacatcctaacctcataaaaagccccaaaagtatatatacttttgcatttccccccgttgagtttaaaatttgattttgttcttgttattttctagctagctagcttttgcccatatgtttataatgtttggttaaaaatgtgaatatatcttagagaaaaccacctacctaatgttttgtataatgaaagcatgctaaatctcaattttagtttagatcaaacagaagcacaaacatggcagcagccaaggcgatcagtttgaatgttctctgaaaatttccgttcagtttcactggctgttaagcgcagtgaactccacttgaggtgggaataaagctgcaatgatctgaagttgcaggtcaatgcgctttatcaaccgctctccaagatcggagcaacgaaatgacagagaatgttcagctccttagctcaactgctctgtggccatggatcatgaatgtaaccagcacagtattcacattttttgccaatctgctgctttaagccagacactaagaaactaatctcgaaaactgttttttctatgccatccataaccctatgccaaaccaatacaaaaatgtgtgtatttaacacaatgctaacaccttgccacgcccccgctatgccacgccccccgccttgcccgcctgcgacgagaaaaggtggccagaaaactcgtgctcatggaacaggatctggagcgttccgaggagaaggtcgagctcagcgaaaggtttgtccacactgccaagcccccacatcttcagcctactattcgctgtctttcaagtgtctactaactgcatttcgttgaatatataaaacacgttcgtttctgtttttgcgcgcaatttatgcccgggatggacaaatatttatttataatttccatagatataaataaccgaataaatgccaaagcgacagcgaactgaaaaagtgaaatcgtttcagttgcgccggtccaaagacaattgttattattattagaaaaatatttgccagaccttcgcatcatgatttgacggtttctcgtctcttggccaagacaacttaactcatcgcctccatcggcaggcagtcacaagatcttttttcgaaagtgaagtgctgtcagcttggagttggtcaaccgtctgtttttttttttttggctttgctcgggcataaattgcgcttgaaagaaacctttatatttgacaattgcatgagttgtgctattcttttttatacccaaacgatctatggagcaactatttaattatcaacttttttttttcgtttctcgcgtgccaacagcaaaattgtggagcttgaggaggagctgcgcgtggttggcaacaacctgaagtccctggaagtctctgaggagaaggtcagtatatccataggttgactaaccaaccagctatttactccattggagttgtatttaaaccaaacgatttaaacaaaccattcttaaatatttcaattgaatacccaaactccctacccaatctcaaatccacgccccaaacaaattgcccacgaaatgaacaaacaacaacgataaaaatgtaggccaaccaacgtgaggaggagtacaagaaccagatcaagaccctcaacacccgtctaaaggaggtagatacgatataaaaaaacgtcaatctgcgcaccaaaaagtggcccaaatgcaaaggggggagcttcccagcccgaaatccatgcgaattgggtgtccaaaccagcgaatatatacttatcttttgttgttgttcttcattttgttgttgtttttttttttaagttaatatcaatgaatgaagggatattcgacgcaatttcccctttcctaagaagggattacttcaattgtattcgtactaaatccttgaaaatgtctaccgacatgaaattcgtttatagctcaagcaaaactactcctttgcccatttttttttattactaattaatattttctgttctttttttcatatatttgttcataatgttgccgctaaaaaacgccaattatccaatgctaatttgcgcacctgctggatgtttaccacctgcaaactgatttgtttttgcatgaaaacttaatctatgttttataaaatgcccataacacaaaacccaactgcttgtcaaaaccgaacaccaaaaaaaaaaaaactgaaacccataggccacacaaaaagaggagacctttgagacgcaaatcaaagtattggatcattctctgaaagaggtattattgataagtatatgctgtggtctcggtgaatctctggtgttggtcgataattatgcgaagctaatatgctacaatatatccactaagctaacttagattaagcacttaaaaataaaaactaaacagaaaagaaaatattgaattgcacaaaacgttattctcaattttaaatttactgtacatattcgtcaattcgacatttaatattttcttttatgtgacaaatacaacaaacgctttgtgaaaatacagcaaatgaaacggaattccgcaagttatgattatgagtttaagatcaatagatcgatatagatcgatatttcgctatatttagagcgtacatcatgggcaagtatctgtgaatccatctttcgcataagacgtgtgtgtgtacatttgttcaaaattgaaaacaactttttgtgcattgattgcaagtgagaaaacccatagtaaaacccatagaaaacgatcagtttagttttcaactacaattacaaattgcaaaatttacaaacctagaaactcctaaaagctaatgcctgattagcggcaatcgaattaattatcgctatgtagacgatcgaaattaattcactgagatatttatttcggtagatattttacccaagatcctcaaaaactcacatccttgcagcaacacacacacacacacacacacacgcacacagacacccaatgtacgtgatattgatcttgatctattgtcataaactataatttgttgtattttcctcgacgtctaggcacgcgtcaatcagaaatattacgaacaggagctcatacagttcaaattaaatgtagaagctgtaagtcgccgcagatttgcgttggcgtagagattatagattccgtcgaattgcgatcttaacagcattttctgatttcctgttttatatgcagtgactgccgtagcctccaccagtaatcgttgctcttatcattcccctaatgatatttaatttgtctgatttaggatttgtctaaaagccctaaataaatacacacaagcgtcagcagtttgtaagcattctagtttaatcaaacaaaaaaacgatatagtttctaagttttttagttgattgtttcattacacttttattaactagtttcattttggcatttgtttattgactaatctacatttgccatgctcattttatttattacgtttttctgctggttttggtagcatatttgggaagcttcttggcttgattgaacttaagttctgaatgagtttcgcaaagtaaaggttttaccattcagaatttatgtttttgcaatcgggcaagagatgaagttcgatgcatttgactgcttcaacttttgcctgctattgtagccactttttgcagcttgctatccagtgaatattaagcacttaactaacttaattattttacctctttcccttcctcaatcaatcaaatcaaaaggctgaggctcgtgctgagttcgctgaacgctccgttcagaaattgcagaaggaagtcgacaggctcgaaggtatgtccgtcaaagattttatacaaattttactgagaatgtaggagaaatagctcagaaattgagaaatattcaactatttttaaattaaagtacagaaccaaagttttattgttgtttattatgatttgtagtagattaagtaggttcaaaattacattccttattccaaatccagtaccaattgtgatctagtgagaactttttatgtacctcgattttgtatttattatcatttaatgcaacatattttataatttgattttctaatttgtttacttttcatatataatttcgttgttattgttattgtgcttaacaaaatacaacttgcgctgcttgctaaaccacttgttgcatgacctgacccgccctgccccatcgcaaaaaaaaaaaactgaccaaatatcgaaaccagatgacctgctcaacgtgcggggcaagaacaaactgctgcaggaggaaatggaggccaccttacatgacatacagaacatgtaaacaactaatttgcttatgtaaattaactaaactgcctgctttgacgtcaaacaaaaaacacccacgcacacacaaaactggcgctttccatatctaaatactagcgaacatatctcgactccactccacacaacaccgcccaagacacgccacgcccaccacccatatgagacaagatccaaggacgccgacagaagtgtcttccatgcggatgcgaaagccatcttcgaacgccaagcaacgggagagttaatcaaaaaatagcgttaaacacactctaaacataaacataaactcaatggagatcagatgaaagggcagaaactaaagcaaaacattctcgtagcacaagcgcattccaattcacgattcgattccatttcgatattttcgattacgtcgatattttcgataccatttcgcaaaattcgaacggttgactggcagctagcgccattttactatactgttgcaatactatttcgttgaatctaaatttaatgattattcaattgattttacttctgcttttgctacccctaccttgttttgttttattttaaaccttaaattatacttgaccttgtacttttgtatttgacgagatgacaacttggacaacacacgcattgccgccttctttttagtttacgtgtattaaatagagagacaatcaatcgctgttatttatatttaaagagtaaattctatgctaaaactttgtattttgtccccagcttaactgtattaataatatgctaatgtttaccttgtttataaatatttaaacgaattgtcgtgtttgcaaaacgttgtgtaatatttgcctacttttaagttgccgccacgcccaccaccacaaactatagccactctttcgatatagttttcaattccacaacaaaaaagacaattttagctagcgcacatcattccaattgcgaatcgtccaccggttcagataacttttattaaacaaaaaaaaaaaacaaaaacaaaaaaataaaacaaaatccaatttccacacaacactaactaaaaaattttctgattctgaatgccgtgacacccaaatgaagataaaacgaatgctgcaacaagaaatggcattaaaaattctaatttgatctatttacgatttacataaattaattatttatactttaatatatacctatacaatacatatactatacaatacataccatgctgctgcaattgcacaaataaagtatttttcgaaaaacgtatgccccgcccatcgatcgtccagcgtttagtgttcgccccaacccgactctgtacgtgtgcccgccccacccgcatttggccaccactggaggttctatcgccctgctctctctctcgaatctgctctaatccgactttctaaccccttgaaccaccaccaaaccacgaaatcacgaaacaaccacacccattcgccacgccagacgagatgatcaaagagatcgagcactatgccctcgtcggcgaccagctggactggaccttcgtggagatgatgggcatgccgccattctacaacgagcgctaccccaagccgcccacaccggagctcaccgaggaggagaaggccgccctggaggccgctgccattgccgaggccgaggcgaaggctagggccgaggagctggctgccctcggcgaggaggcaggcgcagaggctggggagggtggtgcaccggcggagggcgccgctcccggcgagcctggtgcagcaactgagcccggcgtcgaggcaccaccggccgaacccgagaggatccccacgccgccaccaccaccaccattcgagtactccatcgatttgcccccagagggtgctgaggtgccgtacgttaggaacgcggagccaggagactttgctccgcccgccgaagcagcaccagctgaaggagccccaccagccgagggagcaccagcagcggaaggagccgcaccagccgagggagcacccgctgcagagggcgctccaccggcagaaggagcaccagcacctgcacctgctgagggtgaagctgctccaccagcaccggctgccgaaggggatgccgccgccgcacctccaccaccgccggctgagggagaggctgctccggcaccagccgagggcgaagcaccacctgccgaggcggctcctgctgctgaagcaccacctgcttagaaaccccgaacatgttttattgcgatcagtgaaaatagatgaaaggatctctagaaggatctcggcgttcaagaactggccaaagtgttttccttctcactaactattcaagccccaaactcccgaaatattaattgataatccgaaaatgtaaataagctacggtgtatataatttgaagtgttcttttcccacgagaatgtcattttggtgtttcgcgccttgtgagccccttcgcttgcaactcctacccgccatcgaatccctctgtttcccacccaagattattcagtttaattttcaatttacgcttctattccgtttcacgttttattttatttttctctatactctatcccccgtcaccatcgcttgtattgcttttctcacaaacatcttcgcataccgatcctgaatcgccataaccagacgacctaatcgttgaaaaagagcgctattgcatgattggcgacagcctggacgaggccttcgtggacctcattaagggtctggagccgttctggaatccgcgcaaccctaagccgccgactcccaagctcccgacgcccacgccagaagaactggccgccatggaggaggcacgagctgcggccgaagctgccgcagctgcagaagcggaagccgcagaagcagctgcagcggctggcgaagccggaccagatggtgcgcccgctgcacccggagaggaaaaggcaccggccaaggaacccactccgcccaaggagcccactcctccgccaccaccaccaccgccattcgagtactcgatcgatctgcccccagagggtgccgaggtgccctatgtcaagaactacgagccaccaccacccggatccgagccagagccagtgccagccgctgaaggagaggctgctccggcggcggagggtgctgctcctccggctgagggtgctgctccacccgcagaaggcgctgttcctccagctgacggtgctgctccgccagctgagggtgctgctcctgctgctgaaggcgctgctcctcctgctgatggcgccgctcctccagccgaggctgccgcagctccagctgatgcagcggctccagctgccgaggctgctccagctgaagcacctgcagccgaagccaccgccgccgaagctcctccagctgaagcagcgcccgccgaagcggctccagctgctgctgaaggcgaggctcccccagcttaggaccagctcgccacatccgcgccagaaatcgctgctgcacttcgacgaaagagaaaaccactgctaccacatgctgccctgcttttaaaaaacctagttaagagcacgttttttatttttgaaataactcaaaacgaaattgaattaaacattcagttagccaaagcattataaaaacgaaatgctgcttttattttctgttcttgcaaactttttgatttcctttaaccacacagctagcacaactttgcgaactcaactgctggctattatttatttattttatccgaaaccgaggtaactatcattggttattttttaagttataagttttttgtgtaaaggtctcagtttgtgtcaggttttaagtgtaattttaatgattttcaatgaatttatttttattaattttcgttccttactcttgcgttcttttatgatttcccaaacaacaacttgaacagacgacctcgtcctggagaaggagcgctacaaggacatcggagacgatctcgacaccgccttcgtcgagctcatcctcaaggaataagcgacaacccgaccttgacggaccctcgcacccagaccaaaatcgatccgcacagctatatttttgggcggcacacctttcgattgtttgttactgtagtcgcataatcgtaggcccactgtacttgtatctagtagcctgcacttttgatttgtgtgttcgtagatggatagtttgtagattgattttgatcgcggaccaattagagggaagcatcgatgtaattgtgtatttgtttgactcaaacgttttttatttattatttgtatccaaactaagcaataaagcaatcaacttaaaaacataaatccctataaacttgtcacatttattttgtttattccacctgctgcagacgaggtgagcaaaggtaaggaaaagtacaaaaccatcgcccaggaactggagtacgccgatctcaacaactactaagggaatgaaatccacttc

SEQ ID NO: 9911 - DNA, 1739 bp, DROSOPHILA
agtttctttcgagtgcagagtagcaaaacaaaacagacatggatgccatcaagaagaagatgcaagcgatgaaagtcgacaaggacggagctctggagcgcgctctcgtctgcgagcaggaggcacgcgatgctaacacccgcgccgagaaggccgaggaggaggctcgccagctgcagaagaagatccagaccgttgagaacgagctggatcagacccaggaagccctgaccctggtcaccggcaagctggaggagaagaacaaggctctgcagaacatgacgaccagcattccacaaggcactctcttggacgtgctgaagaagaagatgcgccagaccaaagaggagatggagaagtataaagacgagtgcgaggagttccacaagcggctgcagttggaggtggtgcgccgcgaagaagccgaatccgaggttgccgctctgaaccgtcgcatccagttgctcgaagaagacttggagcgctctgaggagcgtctgggctccgccacagccaagctgtcggaagcctctcaggccgccgatgagagcgaacgtgctcgcaaaattcttgagaaccgcgcccttgccgatgaagaacgcatggacgctctcgagaatcagctgaaggaagcgcgtttccttgctgaggaggctgacaagaaatacgatgaggttgcccgtaaattggccatggttgaagccgatttggaacgtgccgaagagcgtgccgagcagggtgaaaacaaaattgtggagcttgaggaggagctgcgcgtggttggcaacaacctgaagtccctggaagtctctgaggagaaggccaaccaacgtgaggaggagtacaagaaccagatcaagaccctcaacacccgtctaaaggaggctgaggctcgtgctgagttcgctgaacgctccgttcagaaattgcagaaggaagtcgacaggctcgaagacgacctaatcgttgaaaaagagcgctattgcatgattggcgacagcctggacgaggccttcgtggacctcattaagggtctggagccgttctggaatccgcgcaaccctaagccgccgactcccaagctcccgacgcccacgccagaagaactggccgccatggaggaggcacgagctgcggccgaagctgccgcagctgcagaagcggaagccgcagaagcagctgcagcggctggcgaagccggaccagatggtgcgcccgctgcacccggagaggaaaaggcaccggccaaggaacccactccgcccaaggagcccactcctccgccaccaccaccaccgccattcgagtactcgatcgatctgcccccagagggtgccgaggtgccctatgtcaagaactacgagccaccaccacccggatccgagccagagccagtgccagccgctgaaggagaggctgctccggcggcggagggtgctgctcctccggctgagggtgctgctccacccgcagaaggcgctgttcctccagctgacggtgctgctccgccagctgagggtgctgctcctgctgctgaaggcgctgctcctcctgctgatggcgccgctcctccagccgaggctgccgcagctccagctgatgcagcggctccagctgccgaggctgctccagctgaagcacctgcagccgaagccaccgccgccgaagctcctccagctgaagcagcgcccgccgaagcggctccagctgctgctgaaggcgaggctcccccagcttag

SEQ ID NO: 9912 - protein, 566 aa, DROSOPHILA
MDAIKKKMQAMKVDKDGALERALVCEQEARDANTRAEKAEEEARQLQKKIQTVENELDQTQEALTLVTGKLEEKNKALQNMTTSIPQGTLLDVLKKKMRQTKEEMEKYKDECEEFHKRLQLEVVRREEAESEVAALNRRIQLLEEDLERSEERLGSATAKLSEASQAADESERARKILENRALADEERMDALENQLKEARFLAEEADKKYDEVARKLAMVEADLERAEERAEQGENKIVELEEELRVVGNNLKSLEVSEEKANQREEEYKNQIKTLNTRLKEAEARAEFAERSVQKLQKEVDRLEDDLIVEKERYCMIGDSLDEAFVDLIKGLEPFWNPRNPKPPTPKLPTPTPEELAAMEEARAAAEAAAAAEAEAAEAAAAAGEAGPDGAPAAPGEEKAPAKEPTPPKEPTPPPPPPPPFEYSIDLPPEGAEVPYVKNYEPPPPGSEPEPVPAAEGEAAPAAEGAAPPAEGAAPPAEGAVPPADGAAPPAEGAAPAAEGAAPPADGAAPPAEAAAAPADAAAPAAEAAPAEAPAAEATAAEAPPAEAAPAEAAPAAAEGEAPPA

SEQ ID NO: 9913 - DNA, 3531 bp, DROSOPHILA
gatcttctgaatgcgcggctcgtcctccaccttcatgaagggcacatggttcatcagatagttgatgcaacccttgccgcccagatacgcctttttcagatcggtgcgctccagctccgattccacatactccttttcatagttgttgatatcctcctcggtgatgggcttgaagattttgctccacaactccagccacgacgacagcttggactcgctctcatcgtcgtcgtcgatcacgccctgctcgtcgtacagcgcccgcttctgcgtgtcggtaagcacctggtagagcttcgatagcaccttgaacttctcggtggactccgccttctgctcctccggcactcgatcgggatgaacgagcagcgagagcttgtggtatgccttcttcacctccttctcgccggcgccccgggccagctccattagcttgtacacatcgcgcgtcccaaaatacttttcgcacagctccagcgtcgacattgctaatttcgtattttgtatttttatttttcgcaccaacactaccaaacgcaaaatgcgccaaaacgccgcgccagtgtggcggtgcgtggggcagacaaaaattcctttgtttaatggtgcgaaaaaatctttgattttcctgtttacagcaatttggttattatttaacaagtaaaatggtattctatgaattttgttttaactattgataatttttgagagcctgcgtgataagtaacaaaaataaattggagaattgaacatttcagtgctgcacaacattgcatggttggtgtcccaactaaaaagtaacccgtgttaagaacgtatgagggtggcatccctcaaaatccatggcgagcagtgttaccgtactgcgaaaagtgaccttaaacccatctcaaaaaatataccaaacgtgtatttctcagcaaagttaccactgggcacactacacactatataacgagacggaagtcggaatcgtttcttttccgttttacacgtctgaagagaacagacatggtgagcatctcgatcggataaaataaattatattactatgtgatgtgtcaaaaagatggatgattgcaagttaaataattgattagtttggaaacagtagcgttataatcactctaaatgtaactaatacaaacaaagcgtaattttaatgcataatttgcacttgcaacatccacgtgttcacctaacctcaaagtgcagaaacgcattgtgctaatggattttctccattcattttgcagtctcatcgtaagttctcggcaccccgccatggctccatggccttctaccccaagaagcgctcagctcgccatcgcggtaaggttaaggccttccccaaggatgacgccagcaagccagtccatctgacctgcttcatcggctacaaggccggcatgacccacattgtgcgcgaggccgatcgtcctggctccagtaagtaccagcatccacctctatcaactaacaactactttccatgatgagtatactagaagatttatggttagaacacatatgattaaccgtgattatctcaactagggcggactgaccaagcccactctgtagatgatttctcttagggaataccattactcggtattaatggcttttctttctcttgcagagatcaacaagaaggaggtggtcgaggccgtcaccgttctggagaccccgcccatgattgtggtcggtgctgtcggctacatcgagactcccttcggtctgcgtgccctggtcaacgtttgggcccagcatctctccgaggagtgccgtcgtcgcttctacaagaactggtatgtatccgaggaccacgtggtcgttcttcctactccatttgtcgccattttctttgcaccgggtgtacacacacacaaaatggcagccgacacgtgctttctactcgagtctggatgatgaaacgatggtatctgaatgagcaaattattgttgagaagccttttaccatctgctgccttccttctgatcggcctcttagaaaataagcgattgattttgctgcaatacaatatctattgttttttgaagtataaatcaaccagtgcgctgttttgtgtgtgtgcgaacttccgatcaacagtgattccctcgtgtaatatagacccctattaaatgtaaaacaaaatcataaagttcttcgatcagcttgctgagagagcttttcaaatcgctaaacgttgtgtgagctgtcaggttaatcttgatcatggggcgcacaagcaagcccctggttaattgaaattgcctgacgagtgagcatgacaaggaagactgcatctccgctcgccattcgtttgcgatgaggcgcacttcctgttctatctcgccccacataaacagcgcggctaagaagttggagttgttgcgacaccccaatggattgctacattacgctcgtttctgaccactgcgtctccaacttgaccatcgtccatatcaggtacaagagcaagaagaaggcattcaccaaggccagcaagaagtggaccgatgatctcggcaagaagagcatcgagaatgacttccgcaagatgctgcgctactgcaaggtgatccgtgtgattgcccactcgcaggtaaatatcaatttcaattatgtattccatatttcccgacgtccttggccttgttgcgccactggtgctgggtcctcgggctcggtgcctttggtgcgcctggcctaaaaagcattcgcgctgtggttttcaatgcacggtttagggatgcaacgtcgcagagcaatctgcccctcgggtggcgggacttgatatattccagtaacggtgcggagccgttcaggcgatgatagcgcggttaaaccatatcacgtacagtcccaatttccaataccacaaggtggatgaaactaacctgttgtgtactttttctctatttgcctgtagatccgcttgatcaagcagcgccaaaagaaggcccatgtcatggagatccagctgaacggcggctccatcgaggacaaggtcaagtgggctcgcgagcatttggagaagcccatccaggtcagcaacgtcttcggccaggacgagatgatcgactgcgttggtgtgaccaagggtaagggtttcaagggtgtcacctcgcgttggcacaccaagaagctgccccgcaagacgcacaagggtctgcgcaaggtggcctgtattggtgcctggcatccgtcgcgtgtgtccaccaccgtggcccgtgccggtcagaagggttaccaccaccgtaccgagatcaacaagaagatctaccgcatcggcgctggcatccacaccaaggacggcaaggtaagcaccagtacccattattcccaccattccactttaatcgggctgtagaagaaatctgtttttgtgatgataaaaccttaaaaataatatcgacatcgaaacaaaaaaaacttgatgaaccatgatatttataatgataggactgataacagatcttcagctacataagattaaatcctgaatccccctgccgcaagac

SEQ ID NO: 9914 - DNA, 980 bp, DROSOPHILA
agagaacagacatggtgagcatctcgatcggataaaataaattatattactatgtgatgtgtcaaaaagatggatgattgcaagttaaataattgattagtttggaaacagtagcgttataatcactctaaatgtaactaatacaaacaaagcgtaattttaatgcataatttgcacttgcaacatccacgtgttcacctaacctcaaagtgcagaaacgcattgtgctaatggattttctccattcattttgcagtctcatcgtaagttctcggcaccccgccatggctccatggccttctaccccaagaagcgctcagctcgccatcgcggtaaggttaaggccttccccaaggatgacgccagcaagccagtccatctgacctgcttcatcggctacaaggccggcatgacccacattgtgcgcgaggccgatcgtcctggctccaagatcaacaagaaggaggtggtcgaggccgtcaccgttctggagaccccgcccatgattgtggtcggtgctgtcggctacatcgagactcccttcggtctgcgtgccctggtcaacgtttgggcccagcatctctccgaggagtgccgtcgtcgcttctacaagaactgttcttcgatcagcttgctgagagagcttttcaaatcgctaaacgttgtgtgagctgtcaggttaatcttgatcatggggcgcacaagcaagcccctggttaattgaaattgcctgacgagtgagcatgacaaggaagactgcatctccgctcgccattcgtttgcgatgaggcgcacttcctgttctatctcgccccacataaacagcgcggctaagaagttggagttgttgcgacaccccaatggattgctacattacgctcgtttctgaccactgcgtctccaacttgaccatcgtccatatcaggtacaagagcaagaagaaggcattcaccaaggccagcaagaagtggaccgatgat

SEQ ID NO: 9915 - protein, 125 aa, DROSOPHILA
MAFYPKKRSARHRGKVKAFPKDDASKPVHLTCFIGYKAGMTHIVREADRPGSKINKKEVVEAVTVLETPPMIVVGAVGYIETPFGLRALVNVWAQHLSEECRRRFYKNCSSISLLRELFKSLNVV

SEQ ID NO: 9916 - DNA, 4370 bp, DROSOPHILA
ccgaaaggtcctccgcgatgctaagcaaatccccttcgccggcggcgttagcattgctggcctcccggtccagcatgtccataatgtgctgatgggatcgctggcatgtcagacggaacttgtagcagagccgcaggcagcgcacgcacttgctgcacatcttgtccgggaagttgtcatctaggctgacctgtttgggttggaataatttaaaatgggcaaaccaagcaggattcacacttactggaatgcctgcgcaaatgtgcagcatttggtccagtcgcgtgcttgccgtttcgctgaatatgtcgtggagcagctcctcgccctcgctgggattgttcaggcaaacgcggcacaccacccacttctcgttggactcagttttcatggctaattcgataaaacaatcacttcggttgttgcagaagattcaaacagctgaatttaagcgtccacggccactggccattcacagcgaaacgcgcccgccaaagttgatacggtgaatgcacgttatgaacgactacatggagcgtacagggtacatagctgtatgtgcactttttaccaaacaaatgttttaaataatttttttttggtagaaaataatataaaaatgcgcgtcattttattaattttattttcaatttacaaatattgaaggaaaatggttttaagttcgtttatataataaaaaggaaaagcactattctatcaaagtagttttgtttcagtacagtaatgaccacactgtcttatggaacgatggaactttacatgagcttgacatataatattgtattaaactgcttaatcaagcttttatatatttaaattgtaaaacacttgaattccaattttactgatttatttaactgcccacaaaatgcattcgtattcttaattatatatttaatatttgaagtagcgaatggaatacccttagcgtcgactgtggtcaccctgtgtggcgacattcgcattgcaacgcgtgcacttcgctccagactacaatctatttttttggcgtcgtcttcgtccagcgagcgtgttattataaatattatagcggagggtaagtagcctcctggaagagatccatctcctattcgcgacaatgagagactcggcagcacatgcgagtccggcggcagcggcaacgagcacgcagaagtggatcgtttgccgggtttgcctgcagcagcccaaggagcccatggccagcattttcaacgacgattcggaaaaggatctgacccacatgattcgcgagtgcggcggagtgcccgtaagtttgtcccattggaccccgaaccatataacaatgcaatttccttggcagatcaaacagttcgatcactatccggacaagatatgcgagaagtgcttcaaggtgctgaaaatggcatttaagtttcgagagacctgccaaagatcgtacggccatctgcgccagttcgttggacccgtagaggtggagcagcgaccaccggagaaaaagggctcagagacagccaccaagctggagccggatgtcgatcccgatgaggcggagcaggagccagagcatgacgaggaagacgaggatgtggacctggacgagagccactatgccgaggcggacgatgccgccgaaacgcagggtggtgtcttccatgacgagattgaggatggtatcctcgttgagctggaaaaggatcggattgtgcacgtgaagaacgagcaggtggaggaggacggcataatcgaggaggtttatgacgtgtatgagacgtacgagggcgacctcatcccagatcagggctatgaccacgagatggccgatcaagccctgtccgagttatctgccgaaatcgaatacctggaccaggtcgagcatgatcagttgaccgaaagtgcccacgaggatgatgcggaagtcgatctgaactcaaccgaagaggagttcgttccctcaaaaagcgttcgcgcgtccatccatgcgcggaatgccaccaagcggagagtgaatccccgcaggtcagctacatcgacggcctcggtggctgtagaatcgagtacctccaagacaactgaccgcggcaatccacttaaggtacggcggggtaacagtgattcggctggcagcaaaatgagcatcaaatccgagaaggacatctcgattggcgaggtgctggcgcgcaagcattccggcattaaaaccaaaggcggccacaagatccttcttggcgacaagaaggagttcaagtacatctgcgatgtctgcggcaacatgtatccctcccagagtcgccttaccgagcacatcaaggtccactccggcgtgaagccgcacgagtgcgagtaagtaacttcacagtttttactgcgtgttcactatgttctttggagtgttattacgattttagctcatatatccgtctaattcgggtataatgattgtgtggaagtaattaatcattttcaataagccttcattaacttaaaatctcatttttcaggatctgtggtcattgcttcgcccaggctcagcagctggcacgccacatgaacacccacaccggaaatcggccgtacaaatgcagctattgcccggcagccttcgccgacttgtccacgcgtaacaagcaccacaggtaagttggtgagctccaatccaaacccgatttgattgaataattacccgtttgcagaatccacaccaacgagcgaccctacgagtgcgatgtttgccacaagacattcacttacaccaacaccttgaagttccacaaaatgattcatacgggagagaagccgcacgtgtaagtttcgctttccccctggcggttacagtccgtattctctagcacgaactttcactgtttcacagattgtttatgcatacactagcttcagaaccagattgagttttttttttgatatagagagatggaaatcgtttataaaaatatactttttattctataagaatgtacaattcacagtggaaactattttgaaagagccatgctgtttcaaaagattattgtttacgaatattacgtagtatattaatattttgagtttagttgattgtttattaggtgcctgaggcgtaaataacattagataaacagggaatgaagtattagtgtttaaatattataagttataaggaagacataaattaatcaaggattctaatcaatttaaaacacgtttgctctctctctttagctgcgatgtgtgcggcaagggattcccgcaggcgtacaaactgcgtaaccaccgggtcatccacgagaggcgcggccagtccgcacgggaatccgtagccgggctggtgtcctacgacacggccaacatcgttggcctggatatgtaaatttcgagcgaggactccacgtcgtcccaaagcgacactttacactttaagcagaaacacgcgtgtaattacacatctaattatattgatgaaatttaagcctagcctaattatgcggaaataaattaagaatagccgcgcatatggtcttggcgtcggtctcctccggatagagctgcagtacggcatgcacctggtgcggtgggaaaaggctgcccaggtgatagcgcagcaatcggcgctgctcctcccgcggaagctgctgcgaggcgtgcagctcctcgttgatgcgcgaatcggaggcagacagatgggcgaagttgtgagcgggcagtggcagacccagtccctgatccgtgaccggggcggatggcgtgcgcgtcagatactggtggtgatagttggtgctggagttggactgttgatgctgctgctgtgcctggtgttgttgttgctggaggggagcactgtaggtgggcaccagcaggcggtaggcgggcggcggttgttggcgctgcagcttcttgtggcgattgggctggctggattccacggcaccctctgaaagatccatttgagcggagaagccctgacatacctgctcgatggtatttgacttggtgcgccccagcggctcccggctaatcagtgagttgatcttaacattgttattattgccacccggactgaccaactgttggccaccgttcgtgtgcaggggcgcgctgtgggaggcctgcagcgggaggcgctgcagcagtggcgcctgattgtgatgccggaacttgcacttctggccgtaggtgcacttcttgccgtacggacacaactgctgcgcatccgccattttctgctgcgtctgcgagcacaggaagaggtccagatttggacccgatctgcccagcggatcgtcgggtggcatgaagatgtcatttacaaaagagtacatcaacaggcgctcctgcaccacgcgcctaaactcgttactctccaggatcag

SEQ ID NO: 9917 - DNA, 1686 bp, DROSOPHILA
ttcgctccagactacaatctatttttttggcgtcgtcttcgtccagcgagcgtgttattataaatattatagcggagggtaagtagcctcctggaagagatccatctcctattcgcgacaatgagagactcggcagcacatgcgagtccggcggcagcggcaacgagcacgcagaagtggatcgtttgccgggtttgcctgcagcagcccaaggagcccatggccagcattttcaacgacgattcggaaaaggatctgacccacatgattcgcgagtgcggcggagtgcccatcaaacagttcgatcactatccggacaagatatgcgagaagtgcttcaaggtgctgaaaatggcatttaagtttcgagagacctgccaaagatcgtacggccatctgcgccagttcgttggacccgtagaggtggagcagcgaccaccggagaaaaagggctcagagacagccaccaagctggagccggatgtcgatcccgatgaggcggagcaggagccagagcatgacgaggaagacgaggatgtggacctggacgagagccactatgccgaggcggacgatgccgccgaaacgcagggtggtgtcttccatgacgagattgaggatggtatcctcgttgagctggaaaaggatcggattgtgcacgtgaagaacgagcaggtggaggaggacggcataatcgaggaggtttatgacgtgtatgagacgtacgagggcgacctcatcccagatcagggctatgaccacgagatggccgatcaagccctgtccgagttatctgccgaaatcgaatacctggaccaggtcgagcatgatcagttgaccgaaagtgcccacgaggatgatgcggaagtcgatctgaactcaaccgaagaggagttcgttccctcaaaaagcgttcgcgcgtccatccatgcgcggaatgccaccaagcggagagtgaatccccgcaggtcagctacatcgacggcctcggtggctgtagaatcgagtacctccaagacaactgaccgcggcaatccacttaaggtacggcggggtaacagtgattcggctggcagcaaaatgagcatcaaatccgagaaggacatctcgattggcgaggtgctggcgcgcaagcattccggcattaaaaccaaaggcggccacaagatccttcttggcgacaagaaggagttcaagtacatctgcgatgtctgcggcaacatgtatccctcccagagtcgccttaccgagcacatcaaggtccactccggcgtgaagccgcacgagtgcgagatctgtggtcattgcttcgcccaggctcagcagctggcacgccacatgaacacccacaccggaaatcggccgtacaaatgcagctattgcccggcagccttcgccgacttgtccacgcgtaacaagcaccacagaatccacaccaacgagcgaccctacgagtgcgatgtttgccacaagacattcacttacaccaacaccttgaagttccacaaaatgattcatacgggagagaagccgcacgtctgcgatgtgtgcggcaagggattcccgcaggcgtacaaactgcgtaaccaccgggtcatccacgagaggcgcggccagtccgcacgggaatccgtagccgggctggtgtcctacgacacggccaacatcgttggcctggatatgtaa

SEQ ID NO: 9918 - protein, 521 aa, DROSOPHILA
MRDSAAHASPAAAATSTQKWIVCRVCLQQPKEPMASIFNDDSEKDLTHMIRECGGVPIKQFDHYPDKICEKCFKVLKMAFKFRETCQRSYGHLRQFVGPVEVEQRPPEKKGSETATKLEPDVDPDEAEQEPEHDEEDEDVDLDESHYAEADDAAETQGGVFHDEIEDGILVELEKDRIVHVKNEQVEEDGIIEEVYDVYETYEGDLIPDQGYDHEMADQALSELSAEIEYLDQVEHDQLTESAHEDDAEVDLNSTEEEFVPSKSVRASIHARNATKRRVNPRRSATSTASVAVESSTSKTTDRGNPLKVRRGNSDSAGSKMSIKSEKDISIGEVLARKHSGIKTKGGHKILLGDKKEFKYICDVCGNMYPSQSRLTEHIKVHSGVKPHECEICGHCFAQAQQLARHMNTHTGNRPYKCSYCPAAFADLSTRNKHHRIHTNERPYECDVCHKTFTYTNTLKFHKMIHTGEKPHVCDVCGKGFPQAYKLRNHRVIHERRGQSARESVAGLVSYDTANIVGLDM

SEQ ID NO: 9919 - DNA, 6446 bp, DROSOPHILA
atgattcgctaactaattcgataatatgtagttgtatgttgtgcaataacgcctaaaatcaatacgtacaatgcaatatgctagcaacaaatacgatcttgccaccgaaagacacattctgaattgacaaatgacctaagtgagtgtctgatgaaatcacttaactggctctgagtaaatgtataacagttataaaatctagttcatgttacgtctgtgcattgagatttgttcggtggatgttatatatatatatattattttataaggtatttttatatatatctattatgacatcagctattacttcagtagaaaataacaattaatccgatcttaaagcattcgtttttcgaaaattaaattttcattagagcgcacacaaaacacggtttttatatttcaatcaattttcgttaaaccgccgaagaaatatatgtctagaggatacagcacgggttaaagcctttaaggccactcattataatcttttcggctaatagcaaaaagcgattagatttctctgacattcagaatcggcagacctatgtggttttaacaatccgtaagttaggtaggtagggttaagggttaatttaactttaaaggctacattcggaaacgatcgattataaacaatataaatttgttgtcaatttgtaagtaccaagtctacgtaataggaaaaatgcctaaagtaattgccttatgtatgcttaaaatttactataatgcaccaagagatttcactttcagttttatcagcgctataaatatacccatatcagtatccaattacaattacaatcattcagatatcaacatacatatgtatatgcgcgtactcgtttataataactccaagcggacaatcatgtatgcgatacctatagtccaacattcatattcgaattatttgctatgcactttacgaatattcattatatatcattttgagtgtgagtccatgcgaattcttgtccctcataatatttttgatttaagtctgctggattgagctcaaaaatgctggatccaccgatgccaccttggccgtaagaaacgcgtgcatgcagaacagcagactttgcaggacttggcattccagctcctgcaggatattaaactttttatatattatgaaattatggtatacttgtatctttagcttaccttggtttctattgcacggctatcgtgatcctggaaatgcaacttcagcttcgatttaccatcatcactggagcccctcagctgggagaatttatactgccaaactgtggcggattcggctccttcggttaatgaaaaaccagcttgccagtccagcgtgagtccaccactttttccatgatgcgacacggcaaaggtcttacgctgaggaaaattaacatataattagagagtgaaggtatgcgatataagtgtaaacctacgcccagtttgatgacacttgtcacaatggccgcattccagctgttttcgattctcaaaagctcctgacgggtttccacgctcaaatagcgcggttcatgacccgaactttgcagcaggaaacaatgctgacgactatccacggtctccgattccttgacaatgcggaacatggtctggtagaccttgtagaccaccaaagccttactaatgccagccacatttagctaataatttaatagaaaaaattagttaagataatcgaaacttatcgcaattgattgctactcactggtggcgtttcaaagagcatcacttcagtgcctttgagcagtagaaacctgggcttgtagctctgccacgatatattgttgttaatgacaccttcattcacccagcccatgtactcaatgcgctcgcccacagcaaagtttctattatatagcttcatctattggatacacaattgattaaattatgaatatatatgcctttaactctcctacctgtaaatgcgtcaggcccacaacattgtctgttatcaatttcagccactgactaagtatggccagttcgtcacagtgtatgacacctgtggaaattccattcagaccgcgaacttcgaaggcattttgtcgcagcttgtcggtgccatagatgtacctcgtcacatatgccatcattagaggtactgcaaggtgtaaatatatgaattgattagcatttctgtacgtaagatttgagatacatttctgttatcttaggacataatcaatgaacaatttgttaacctatttataaataaggctcaccggcaaccacgtcggtccagcgcttctcgggctccgagcaaattgacatggggcgactacaactgcgactgatggttccactattgacggatgacttgtagccctcgtcagccttcagttcggcacatgtgacatcgttgtccgagtcgggtgtgtccttggtcactgggatgttgaggagggttattcaatccttatttatcgtgctatgctagcccactgctactcacgttgtttctgaaggaaaggcgtggctgcgcgataatgcttaacagtgagcacaacaatatcgccagcgtttctcaatatattgacggcatcatcgtgaggacatgccgtgatgtattctccgttgaccttgatgatggcatcgccaacaaatagttggcccgttatgtccgcagcctgatccttatagatacgcgatatcaaaatgggtagtttatgctcggcgccaccttttatgctcagtcctaggccgccttgtttttggcgcgtaatttgaaccatacgttcctgaaagatgaattatttcataaataagttaaatgttataggggaaaatatatatatacctttgattccatgggtggtccattggggtgacaactacttggtgttaccacttccagcttctgcagcgaaagcaactccatggtaagattaagtcgaagcggttctggtctgctcttgccatcgctcacgtgcaccattccagttcgcacctaaaatattaataatttaatatttaatagatatacatttataaatatgaagaatctttgcgttaccttcaggttttggtcgagtttttcttctataggcgtggccatggtgtcagagagcttcataattcctgaaatcattcagagaagagggatcttgagtgtgatttatgatcttaaatgggaaacgtgcttaaagtgataggatttaaaaatgaattatgaaccaaaataaaataaaaatccaggaactctagagatttctagagattagtttgctataataataacaaaatgtatcttcaagatatcttgactatacttaaagctcaatcaatatttctagaggcgttaaattaaatgcgttgattgattgaatggaatgaataatttagagcaaagggtctgaaaaggttgaaatgttgcctgatttgtggcaataacgggatgtctacccttgttaccaaatcggatggccgccaatcaagttggcccagtgtaatcaagcgatttctgagaacttttcgtttttttttttttatttttaaacataatcgtggccatggcaatggactgcgaaacaactgcaatcaaatcgggaagccggctccgtggcctttatcgattgccattttatttttccactgagcagacagcagtaaggcgaaagcaacgcaattgcaatcatcgcatatcgaattacgtttgcacactggcccaccgatgagccgatagttcaaggtgaactgtgcaattgccttaattaaattacacatgcaattagaaacaattaagcgtaatcaggctgccgcaaaatgtaatagaaggcatatctagatggaaacgatacatgggcataccttggccaagtgcgttttctacgaactgatgccacggcatatgttttccattaaagtggaaaataaatatgctaccggaaaactagatatgagtgaaaacacattgaagtgtgccccatctgcagacgttgtttgtggttttccctggtgctgagtgccgaagtgtggccgcaactgctcctcaggaatgggagggtggaatatgtattttggataaccacttgtgctccataaataggtgttttgcctagggggggttgagagttcttgaaggggggggggggagggttcgatttgagcgccaaatatgtgcatatggtgccagctaaattgccatctgagattgagaaattctgaattcgaggggaaacactttcgctttaaacgttttctgcgatctgattcatggtcaaagtgaattcaattgttattattgttaattaaaaaaattattatatatttttaatgaaattatgaaaggaataaaatcataataaaatgtttaggcctaagcttacgtgtcatcaacaatgagtttttgaaaatataataaaaataaatatataaaaacggaattattttactgaagcaacataaaataattataattaaggtaaattatacattccaaaatctatacaaaaatagatctatcaacccagaatgttctatattgcctgcaagagtttcgcagagtgcaaaaagtgtcgaatatttggaccatgaattcctgaatccttggcattccgcgtgtcgtagcaattagctgctggtcaggccaccgacttggcggaacacgcatacgctccgttgtcccgggttacctttgattatggctttattattacgtgtgcacgctgcgctgcccttttgggtgcgtgcttcagagccgtaaaaccgtgaagctaggcccagagtactctggtttttttttcggtggggaggtgtccaggagtgcaggtccttagcttcaaaccaaacaagccaacatgttcggcgtgaggccttggacaatcagctgtgccacagccacgaaaagagcagcagaagcagcagcaggcgaaacgtttcgggctgttttgcctgaagtttcagcgattgaacttttctttttttttttgcagctctggctgtgaagtaaaacaaacacacgcacaccctcgcataaccgatacttttgctgcccgaggcccaaaaacgttgattattaatttatgtgtgtgtttgctaaacaattctaccgcacccagtatatcggatcgactttgggggattacctccttgtattgacagatgtacttatgcttgcccgcacacatatacatatatatatgtatatgcgtgtgtataaatatatgcagtttatgtgtagttgcgacccgttttcgcgttttcaattgggtcacattttcacatattcgatatcctgaatagaggggcttgaactcgcgatttggccaaatcgtcactcacaaaagtatgctaactttccgttctgtttgtcacacttttgcccacttcaggccaaatgtacatgtacatgtatatatataaactggctggctgtactcccagcgtggagctgactccttcggcggtccagagcacaacgttcccagagcctcagcgcgagtgaactgagagttccgttataaacacttcgctagcggacagtaaacagcaaaagcggcacgcagtcctctctcgccgcgctctcagcagcgcagctttgtgcagcctgacgggacatatgttttggggtggcagagttgcctccagatgtgaagcttcagccggtgcctctttctttccgagtttcagcccccaaaagctttggtgaactttagtgttggaaagctatatgttactcagtattatattttctaggtggcgctcttttgtatggggcttcatatcttgtagttctcacaacagacgtgtacttgatgtgtggcgtatgcgttatgtagaattattgtaaaattatttgtgacaccttgtagtacttaatataataattataataaaatatatagcagaatttgaagtattaaagcgtaaatgactcaagttaaatggtttaacacagaaatgagtgtgcatagacctctacattttgttttttcaaaaaaggctaggaacaaattgagaataacatttcatttcaagattccaaagtggattcaaaatcgaaagtctatttaatgaaaactaacgcaaataattagtttggcgtcaaagcaataatttagccaaaaacgatctcataaatctagcaaatggatgccgaaattgaataattcccaggtgcctcgcattcttcacaaaaatctgttgctcacctgcaaataatattccgtaaggtcgacgtattaagtcccatttctatgaaagtgggacggagtgctcgttaaatgttaattacaacgctgaatcagcggcgttaggtcattaaaagttttgcgcgcctatttttgttgtgattgttaaccaaaatacttggggtcagggtaacgtttgagtatttgtttttcaatcccatccttcgccgggctcaatgataagcccacgaataagtggtgttcaaacacaatggtcggaggtaaagttaatta

SEQ ID NO: 9920 - DNA, 1888 bp, DROSOPHILA
gaacgttgtgctctggaccgccgaaggagtcagctccacgctgggagtacagccagccagtttatatatatacatgtacatgtacatttggcctgaagtgggcaaaagtgtgacaaacagaacggaaagttagcatacttttgtgagtgacgatttggccaaatcgcgagttcaagcccctctattcaggatatcgaatatgtgaaaatgtgacccaattgaaaacgcgaaaacgggtcgcaactacacataaactgcatatatttatacacacgcatatacatatatatatgtatatgtgtgcgggcaagcataagtacatctgtcaatacaaggaggaattatgaagctctctgacaccatggccacgcctatagaagaaaaactcgaccaaaacctgaaggtgcgaactggaatggtgcacgtgagcgatggcaagagcagaccagaaccgcttcgacttaatcttaccatggagttgctttcgctgcagaagctggaagtggtaacaccaagtagttgtcaccccaatggaccacccatggaatcaaaggaacgtatggttcaaattacgcgccaaaaacaaggcggcctaggactgagcataaaaggtggcgccgagcataaactacccattttgatatcgcgtatctataaggatcaggctgcggacataacgggccaactatttgttggcgatgccatcatcaaggtcaacggagaatacatcacggcatgtcctcacgatgatgccgtcaatatattgagaaacgctggcgatattgttgtgctcactgttaagcattatcgcgcagccacgcctttccttcagaaacaactgaccaaggacacacccgactcggacaacgatgtcacatgtgccgaactgaaggctgacgagggctacaagtcatccgtcaatagtggaaccatcagtcgcagttgtagtcgccccatgtcaatttgctcggagcccgagaagcgctggaccgacgtggttgccgtacctctaatgatggcatatgtgacgaggtacatctatggcaccgacaagctgcgacaaaatgccttcgaagttcgcggtctgaatggaatttccacaggtgtcatacactgtgacgaactggccatacttagtcagtggctgaaattgataacagacaatgttgtgggcctgacgcatttacagatgaagctatataatagaaactttgctgtgggcgagcgcattgagtacatgggctgggtgaatgaaggtgtcattaacaacaatatatcgtggcagagctacaagcccaggtttctactgctcaaaggcactgaagtgatgctctttgaaacgccaccactaaatgtggctggcattagtaaggctttggtggtctacaaggtctaccagaccatgttccgcattgtcaaggaatcggagaccgtggatagtcgtcagcattgtttcctgctgcaaagttcgggtcatgaaccgcgctatttgagcgtggaaacccgtcaggagcttttgagaatcgaaaacagctggaatgcggccattgtgacaagtgtcatcaaactgggccgtaagacctttgccgtgtcgcatcatggaaaaagtggtggactcacgctggactggcaagctggtttttcattaaccgaaggagccgaatccgccacagtttggcagtataaattctcccagctgaggggctccagtgatgatggtaaatcgaagctgaagttgcatttccaggatcacgatagccgtgcaatagaaaccaaggagctggaatgccaagtcctgcaaagtctgctgttctgcatgcacgcgtttcttacggccaaggtggcatcggtggatccagcatttttgagctcaatccagcagacttaa

SEQ ID NO: 9921 - protein, 490 aa, DROSOPHILA
MVHVSDGKSRPEPLRLNLTMELLSLQKLEVVTPSSCHPNGPPMESKERMVQITRQKQGGLGLSIKGGAEHKLPILISRIYKDQAADITGQLFVGDAIIKVNGEYITACPHDDAVNILRNAGDIVVLTVKHYRAATPFLQKQLTKDTPDSDNDVTCAELKADEGYKSSVNSGTISRSCSRPMSICSEPEKRWTDVVAVPLMMAYVTRYIYGTDKLRQNAFEVRGLNGISTGVIHCDELAILSQWLKLITDNVVGLTHLQMKLYNRNFAVGERIEYMGWVNEGVINNNISWQSYKPRFLLLKGTEVMLFETPPLNVAGISKALVVYKVYQTMFRIVKESETVDSRQHCFLLQSSGHEPRYLSVETRQELLRIENSWNAAIVTSVIKLGRKTFAVSHHGKSGGLTLDWQAGFSLTEGAESATVWQYKFSQLRGSSDDGKSKLKLHFQDHDSRAIETKELECQVLQSLLFCMHAFLTAKVASVDPAFLSSIQQT

SEQ ID NO: 9922 - DNA, 2846 bp, DROSOPHILA
gtacagcgcccgcttctgcgtgtcggtaagcacctggtagagcttcgatagcaccttgaacttctcggtggactccgccttctgctcctccggcactcgatcgggatgaacgagcagcgagagcttgtggtatgccttcttcacctccttctcgccggcgccccgggccagctccattagcttgtacacatcgcgcgtcccaaaatacttttcgcacagctccagcgtcgacattgctaatttcgtattttgtatttttatttttcgcaccaacactaccaaacgcaaaatgcgccaaaacgccgcgccagtgtggcggtgcgtggggcagacaaaaattcctttgtttaatggtgcgaaaaaatctttgattttcctgtttacagcaatttggttattatttaacaagtaaaatggtattctatgaattttgttttaactattgataatttttgagagcctgcgtgataagtaacaaaaataaattggagaattgaacatttcagtgctgcacaacattgcatggttggtgtcccaactaaaaagtaacccgtgttaagaacgtatgagggtggcatccctcaaaatccatggcgagcagtgttaccgtactgcgaaaagtgaccttaaacccatctcaaaaaatataccaaacgtgtatttctcagcaaagttaccactgggcacactacacactatataacgagacggaagtcggaatcgtttcttttccgttttacacgtctgaagagaacagacatggtgagcatctcgatcggataaaataaattatattactatgtgatgtgtcaaaaagatggatgattgcaagttaaataattgattagtttggaaacagtagcgttataatcactctaaatgtaactaatacaaacaaagcgtaattttaatgcataatttgcacttgcaacatccacgtgttcacctaacctcaaagtgcagaaacgcattgtgctaatggattttctccattcattttgcagtctcatcgtaagttctcggcaccccgccatggctccatggccttctaccccaagaagcgctcagctcgccatcgcggtaaggttaaggccttccccaaggatgacgccagcaagccagtccatctgacctgcttcatcggctacaaggccggcatgacccacattgtgcgcgaggccgatcgtcctggctccagtaagtaccagcatccacctctatcaactaacaactactttccatgatgagtatactagaagatttatggttagaacacatatgattaaccgtgattatctcaactagggcggactgaccaagcccactctgtagatgatttctcttagggaataccattactcggtattaatggcttttctttctcttgcagagatcaacaagaaggaggtggtcgaggccgtcaccgttctggagaccccgcccatgattgtggtcggtgctgtcggctacatcgagactcccttcggtctgcgtgccctggtcaacgtttgggcccagcatctctccgaggagtgccgtcgtcgcttctacaagaactggtatgtatccgaggaccacgtggtcgttcttcctactccatttgtcgccattttctttgcaccgggtgtacacacacacaaaatggcagccgacacgtgctttctactcgagtctggatgatgaaacgatggtatctgaatgagcaaattattgttgagaagccttttaccatctgctgccttccttctgatcggcctcttagaaaataagcgattgattttgctgcaatacaatatctattgttttttgaagtataaatcaaccagtgcgctgttttgtgtgtgtgcgaacttccgatcaacagtgattccctcgtgtaatatagacccctattaaatgtaaaacaaaatcataaagttcttcgatcagcttgctgagagagcttttcaaatcgctaaacgttgtgtgagctgtcaggttaatcttgatcatggggcgcacaagcaagcccctggttaattgaaattgcctgacgagtgagcatgacaaggaagactgcatctccgctcgccattcgtttgcgatgaggcgcacttcctgttctatctcgccccacataaacagcgcggctaagaagttggagttgttgcgacaccccaatggattgctacattacgctcgtttctgaccactgcgtctccaacttgaccatcgtccatatcaggtacaagagcaagaagaaggcattcaccaaggccagcaagaagtggaccgatgatctcggcaagaagagcatcgagaatgacttccgcaagatgctgcgctactgcaaggtgatccgtgtgattgcccactcgcaggtaaatatcaatttcaattatgtattccatatttcccgacgtccttggccttgttgcgccactggtgctgggtcctcgggctcggtgcctttggtgcgcctggcctaaaaagcattcgcgctgtggttttcaatgcacggtttagggatgcaacgtcgcagagcaatctgcccctcgggtggcgggacttgatatattccagtaacggtgcggagccgttcaggcgatgatagcgcggttaaaccatatcacgtacagtcccaatttccaataccacaaggtggatgaaactaacctgttgtgtactttttctctatttgcctgtagatccgcttgatcaagcagcgccaaaagaaggcccatgtcatggagatccagctgaacggcggctccatcgaggacaaggtcaagtgggctcgcgagcatttggagaagcccatccaggtcagcaacgtcttcggccaggacgagatgatcgactgcgtt

SEQ ID NO: 9923 - DNA, 653 bp, DROSOPHILA
gcagtctcatcgtaagttctcggcaccccgccatggctccatggccttctaccccaagaagcgctcagctcgccatcgcggtaaggttaaggccttccccaaggatgacgccagcaagccagtccatctgacctgcttcatcggctacaaggccggcatgacccacattgtgcgcgaggccgatcgtcctggctccaagatcaacaagaaggaggtggtcgaggccgtcaccgttctggagaccccgcccatgattgtggtcggtgctgtcggctacatcgagactcccttcggtctgcgtgccctggtcaacgtttgggcccagcatctctccgaggagtgccgtcgtcgcttctacaagaactggtatgtatccgaggaccacgtggtcgttcttcctactccatttgtcgccattttctttgcaccgggtgtacacacacacaaaatggcagccgacacgtgctttctactcgagtctggatgatgaaacgatggtatctgaatgagcaaattattgttgagaagccttttaccatctgctgccttccttctgatcggcctcttagaaaataagcgattgattttgctgcaatacaatatctattgttttttgaagtataaatcaaccagtgcgctgttttgtgtgtgtg

SEQ ID NO: 9924 - protein, 148 aa, DROSOPHILA
MAFYPKKRSARHRGKVKAFPKDDASKPVHLTCFIGYKAGMTHIVREADRPGSKINKKEVVEAVTVLETPPMIVVGAVGYIETPFGLRALVNVWAQHLSEECRRRFYKNWYVSEDHVVVLPTPFVAIFFAPGVHTHKMAADTCFLLESG

SEQ ID NO: 9925 - DNA, 9612 bp, DROSOPHILA
ttgcggcgcgttccatttgggccttcggtcccgactccacgggtccaaatatcctggtcgacgacaccctgccctcggaagtggacaagaacctgctgaccgcggttaaggattcgattgtgcagggcttccaatggggaacgcgagaagggccgctgtgcgaggagccaatccgtaatgtcaagtttaagattctcgatggcgtcatcgccaacgaggcgttgcatcgaggcggtggacagatcattccaacagcccgtcgtgtggcatactcggcgtttttgatggccaccccacgtttaatggaaccatatctatttgtggaggttcaggcgccggcagattgtgtatccgctgtctatactgtgctggccaggcgcaggtaagttttgctgctcatgtttccgtaagagaatgcctctaaattttatataatctattttgcagaggccacgtaacgcaggatgctcccgtatcgggttctcccatatatacgatcaaagccttcatacccgccattgattcatttggatttgagacggatctccgcacgcacacccagggccaggccttctgcctttcggtgttccatcactggcagatagtgcctggcgatcccctggacaagagcatcataatccggccactggagccgcagcaagcatcccatttggccagagagtttatgatcaagacgcgtcgcaggaagggtctgtccgaggacgtgtccatcaacaaattcttcgacgatcctatgttgctggagttggcacgccaggatgtgctgatcaactacccgctttagacttcccacaaatcaggaatcgggaaaacaaataaaacatttagacatactttccgaatttcaattgcgaactttaaagggagtagtgtttttttttactatatttactaaatatttatttgaagccttttcgggacaaataatttacaaaatagtatacagaaaacagctacagttgtgatagtttctaggactttactcgccattgccgttctgcaggacctccgactcgtagccttcctgctcggcctgctcgtcatcgaactccacttcgtcgtcggcggtagcctcctaaaggaggaaaccaatggaaatcgtttttagagatactttgcaaggatatggagggatcgctaacctggtactgttggtactcggatatcagatcgttcatgttgctctcggcctcggtgaactccatctcgtccatgccctcgccggtgtaccagtgcaagaaggccttgcgccggaacatggcagtgaactgctcggagatgcgcttaaagatctcctggatggcggtcgagttgccaatgaaggtggcggacatcttgagcccacggggcgggatgtcgcagacggccaccttgacgttgttgggaatccattcgacaaagtagctgctgttcttgctctgcacgttgtacatctgcgtgtccacctccttcatggacatgggtcctgttaattattgagagagcgttgaaacaaaattgccttcgtacaatcttcctgtgcgcatttaaacatttacatcaaaagacaagttcgctttgatgcgccggcggaatccccaaatccctgaatatgaaatactaaatggcttccaagttctgcctgcgcacctggccgggcacctgcactgggatctcagctcggagcttgggaatggaaacagtgaaaaagtcccaggaggtaactaaaaaagttgtttaaattcctgctcgctggcattttttccgcacatttttgtgattaattattttgcaagtatttctggcagtcggtcggagacgataacgaatcctgagatggtgacgccggatctgggctgaacctgggctaagcttgagtgcgggtgcgctggaacgcagtgcaggccaagtcacgttcggcatgattagttgggcctgggggccgtgtcaggcggcggtcgcaattccccaatggatcttgaaagtaaatttctaattacgcgcgttttgcgagtcatcagtcaaaagcaaaggggccaaagcggcgcgagcgcacacaaggaatagcaaatgaaatattatgcggcacacttttgggcgccgcatcgcagtttattaatttaggaattagcgcgaaaaaaaaaaaatgcgaagcaaccttttcggtgggcgtggcgagggcggcatgccacgatgccatggctaacaaatttgcgctacgtgcgcgttgacggattgcagcctttttagccgccagccagcgggcattaatcatttttagtggcgcccataagtagtaggcccagtgctcggctttcgctaataaaatcgtcgccaaagccaagccccaggagtccaaggtgttggccaggggcggctgtgtcgttctattctaagggggtgtcctgcagatgcggctcagatctctatctatacgatgtcttccttgtcagacagtcctttggtttggtttggtaatactaccactagttttggtaattgcttagttttcagcctttcaatttttttcttattctaaaaaccgctccttgcggatcccttgatccgcccctgatggctcgactacgtgcctgcgggtccggaaaagcggcggacaggtgcgccgccgactgcccatgacaaagtgacaaagttgactgggataagccggtgtgggggctcctgaataaatgagcggatggatgaatgaatggatccctgtgttttctggctacgcgtgaaagtgtttagggcttcttgttaaataactatttttcttttcccaccccggtggtttcattcatcaaacggcaggactcaccccggaagatgcaggccacggtgaggtagcgtccgtgccggggatcacaggcggtcatcatgtttttggcatcgaacatttgctgggtcagctcggccaccgtgagggcgcgatattgctgggatcccttggcggtcagcggagcgaatccgggcatgaagaagtgcagacgcgggaagggcaccatgttcaccgccagcttgcgaagatcagcgttcagctggccagggaagcgcaggcaggtggtcactccggacattgtgacctggttgggtgaggaaaagctacattactgtcagaaaaaaattacagattacatggacttcaaattctgttcttttgatttgattgtgggaaaggtagggtggacttattgctcctggtgtggacatctggtcatcattatcctcatcttcatctttgcttcacgttaatgctaatgtcttggctactcactgacaccaggtggttgagatcctggtaggtgggcgagcagatgcgcaagctctgatagcagatgtcatacaaagcctcgttgtcgatgcagaacgtctcatcggtgtccacaattagctggtgcagcgacaacgtggcgttatatggctccaccaccacctcagacacctttccgccattgatttcgattggagagcagaaggagtaggagcaggaaacgggaaaatgggacagacaaacagaggatgcattagatggattgactaggggtactcacggagacgagatggttcagatcgccgtaggtgggcgacgatagcttcagcgtgcggaagcagatgtcgtagagagcctcgttgtcaatgcagaatgtctcgtcggtgttctccaccagctggtggatggacagcgtggcattgtacggctccacgacagtgtcggatacctggacgcatttatggtgtcaatgaaggcggcagtgcggcatgcagaaaatggagcagatacaactttgttaattagcaatgctatcagcaatcagcggactcacaaaggagccaaattcaaatattgtgtgtgtaaatcaattagttaaatggatgagcatatacttattcataacctataagaactcttagaaagatacttaaatttatgtattttagtattgaaaatgtaacctcttaaggttgttatattaaaggaagcctttaaggacgagcttcttcaaagcaacctaaaggctagttctcttttggtcgtactctggtcaataatcaacaattgtccgcactctccatctaattcgcacttcttttggaccaatcgcctggctggctggttgaggcatggacatgaaaaatgcattctgccaacaggagcaattcgaatgcagtgctaactgaatagcagaccctattaatacagccagttgtttgtggctgcaaccagcagttgctaatgccattttgagcctggagcggcactcaggccgagagttgttgcataaatgcagttgcatgttgcacaaacatctgggtgccaggtatagccccattcacattcgcattcgcattcatacatgcctagtgtgtgtttcgaatgctgcaaattgaaaattatgtataatctttggcttgccctctatatttgcgcagccaagatgcattgctcgtcggttgtagaatgttgaatgtggcacgggcaggggcaggggcaggggcatggaaagggatttcatgcgtaccggccactgttaagcatgcgacaaacttcactccagcttcagtttgccgtatgcgtagtgtgtgcacataaattgtggcaattatttaatggccacagccctagagcgataacgtgcaactccacccacccactctaagttctttgcacgtggaaaacttttgaaaagaatatcttaccctgctggacatgccaaacttgatatagttagttacaaataaaatcagatctattttagctcaaaaagtcttatataaagggggataaaagtatgaaatggcacagtagaaagtttttcctaatgcaccactgctttcaaatcttccttgctatgtatattatttatgattattctatatgatttataattagttcagttaaatagcagttttttttttcctgtgcacaacacacacctttgtctgcttagctggtacatgcagttaatactaatgagttatgctcgtacatatgcattttgcattttgtatttggtatttgttgccagcctcactatttgtacaccgccaggacacgatatttatctgtgggtttgtgtgtgtgtgtttgattcaaaatctgcaggatttacgagcatgcattttgatatcattgcattgtccaaacggcaggtgcaaatctcaatgggcgccatggcaaccattcggatgcttcagtttcagtcaccttcggtcttccgaaagcgacttccgttaattaatgaacgtaattaaatactttaatcaaaggccaaaatattgagcatttaaacgagagagagagagagctggcgctttttttgcgctgattatgctgtgtgtgaatgggctgcatttgcataaatgacgcctatcaaagcgacaaaggccctctacatggcctatgaaaaactattaaattatatatgtacatacgaacaaacaagcgcgcattaaaaccgccataacgtgacaggcatgtgtcaggccaggccgcaataaaatgaccgctgaagccaaaacattgcggtaagccggccaaaaccagcaaggcacataaataacaatcgaagggcgggggaggggggtagagaggaggaggggtccatactccacatttaaagttaagcacccccttcgatgggttggagtttggagttcgggttcaatagttgaccattggcgttcagtcgtgatggtaataaatttaacgcagttcaaatgtgtgtgtgtgtgtgtgtgccctctgggctgcactaaaaattccataaaatttattgtgcactctgatatgccaataagaacattgtcaaatgttaatttcacgcctcaccaaatctaccttctctccggagtcttggaacttacatttgattgctttctattcctcttaaaactttaaaccagattatagattatgggctaaaatatatctagaggcagtcagaatggtcttttagtccttaatcattgttttcaacaaaattttgctaattaaatgaactcaagtttaattttaatgcaaaatatcaagcttagccactttttataattgttaaagcaatgcaaaatgctgtaattatttctctatcagcaggacctcctgccaatgacaatctattttgcgctgaataaatttaattaaacgtcaaaatgtaattaaatgcgaataatccaattgaaggcgtatcacgtgccacccatacaacaattaatatttctacaactataatgcgcacgtgtaatatatgcaactgggttaattaagcgccaattgaggcgtgtcaaaaaaaaaaaagggacgctgaggtggtcgatcttgcgatttcgagccaccaaattgcattaaaattgcattgccaattaggctttggccgctgctcgttggcggtgccgctaatttcgcctgcaaattaattagaataattcgaacaaagctggcccagtcggcgcgcaaagccgccaattgaatttagcgtatgaattgcataaataaaacaacatttgtggcatactttcgacacacgaaaataaacggtagcggctctccgcagctttcgcctgctaatttggtcaaaacgcgtgcaggtgtaaagcgcttttgggtcggcttaggaacgtcgccatggccccaatggtcccaaatggtggtacatgctcgatgtcaactgcctcgttcagcagagcaaaggatacaccctgatttcctggcaccattgtgcgcggcagtaagctgatttggctaagcggattgcattcgtcatgaccacaatgataattatatgctgcaatgccggcgagcatcgctaacctaccttgggcgatggcaccacggagaaggagttcatgatgcggtcggggtactcctcgcgaatcttcgagatgagcagcgtgcccaggccggagccagtgcctccgccaagcgagtgagccagctggaagccctgcaggcagtcgcagccctcggattccttgcgcagcacctccagcacggaatcgatcagctcggcgccctctgtgtaatggcccttggcccagttgttgcctgtgatataaacaagatgttattacaatgtaatatatactaaactattcatatatatgttaagcttaaattagaccatataatagctgtgtgctactcatccgccaaaactcatcgaagttcgcggcgtttgtgggtcattattgaggccacagcaacagcgtctgacatgtacaaaattaattttcatcgtcatccgcaggccattttataattgcaatcatcatagccatcatggtcattatcctcatggcagctgagcataaagtgggccggccgggaggtcctgaccgcggcaggactatcgcaccggcggctgttagctgataagctcgcctgtgataacaatgccgtgctcatcttgtcaattggttggcacttatcaaagcaaggataaggccgccctcagtggctgctgttgtcacggatgttgctgctgctcctgctcccgctgctgctcctgttttcgatgttgcgacaaggctggcgcagctgcaataactgccgtggcaaaaggacactcacagcaccatcgatgatagtgcgctagcggactttggccgaaacaaaagcatgccgaaaagcggcagaaaaacaaaagctatgtcctagcacatgaacaccacaccagattcgcccattaacgagtgcaacggaaatgcattaggaaaatgcccaaagaggctggctacgaaacagaaacaggaggacatcgaaatgctactgttttcaacggagttagaacatttttggtgctaagcgccattaagaagttctagcttgttattcaatagtcaatacattgataaggaaatgatgaaacaaaacatgttgctcatatctaatatcaatcaaaaatagatcgcaaacatctatggcgtgtcacgttgacgcacaagagcttatctcttgtggtttggaacaccagcgattatctgcaactggatttgtactcaccggctcccgactgtccgtaaacgaagttatctggccggaaaagctggcccaccggcgactggcggacggagtccatggtgcccggctccaggtcgatgagcaccgctcgcggcacgtacttcccgctgctggcctcgttgtagtaaacatcgatccgctcgtgctgcagggcggactcgccgtggtagtaaccattgggatcgatgccgtgctcgtcggagatgatttcccagaactgcaagtggcagagagaacaatgcgtggagcgctactttaatgccgtttcaataatgatttaagtgcataatggagcccgcctgctgtatgcaaatatgcggtggtcgcaatgagcgcatttgcatattgcgacccaccattcgtttcacatgacgtatgcgtgatatttcgtgacagcgtccgctggtatgcaatgaaatttcgcgatccccttgccaacgttttccttttcagaaatattattttacaatcaatgtggtgtgggtgggcgagtggctgtgtctgtgtgtttgtgttgcattgctttggcaatcaatgcatataaatatgagtgtcctttttacatgcctcctgcttttattaccgtcgccatcggagttctcgtatctgtcgtcgatttatgcgcgtgcatatgctgcatgaccccacctcctgctactcccgtcccgtcccttctccctccccactcacacacacacacgagcactcgcacccacacatatacacccgcacagcgagcactttacatgccgtgagcaatttctgttgcatacttccatgggcgcagcaattttttcatgccgtgttatttttttgttattgtgtaacgagcgggaataattgaatccttttaggtattttcatacacatatacctgcgcacgaaatatatatatatatatatatatgtgtgtgggtgtgttctccctctcgatagcgttttctcgattttatttacacaagaaattctccagctcgattcgtgtttgttttgtttttggtttggctctttattttttattgcacaatacgcttggcaaaacatttcacgtttgctgcgcatatgaatttcaaatttttaaaaatgtttcaatcgcctcccctcttcccccgcgctccgcgcgacaggtgagtgcgtggtggggggacaatgtgcgggaaaatggaaggaaggaaaacgggagaaaatggtgaaaaatgctaattgtgagaaaatcgcaatgtgtgcgctcggcctgccgcggctcccactgatcgaaatgatttttaatggactaaaaggcagcagtggcagccaagggccatgaattcacttttatatgcgagtattttttcacgcatttattccagcttggctggtaataccgaaggtcaccggcagattgattactgaatatgaattttaattagtcgcacatggcgctgaagattcgacttttcccttgaaaatgccataaactcaagtgactgtcgaggaaatgacagcacagagagaaacccatcaccgaaattggcaatcaattcggtagattcaatatcacatcatacatatcttatctgtgacatattcaaatagtgctacaggctgattaa

SEQ ID NO: 9926 - DNA, 1329 bp, DROSOPHILA
atggcgacgcagttctgggaaatcatctccgacgagcacggcatcgatcccaatggttactaccacggcgagtccgccctgcagcacgagcggatcgatgtttactacaacgaggccagcagcgggaagtacgtgccgcgagcggtgctcatcgacctggagccgggcaccatggactccgtccgccagtcgccggtgggccagcttttccggccagataacttcgtttacggacagtcgggagccggcaacaactgggccaagggccattacacagagggcgccgagctgatcgattccgtgctggaggtgctgcgcaaggaatccgagggctgcgactgcctgcagggcttccagctggctcactcgcttggcggaggcactggctccggcctgggcacgctgctcatctcgaagattcgcgaggagtaccccgaccgcatcatgaactccttctccgtggtgccatcgcccaaggtatccgacactgtcgtggagccgtacaatgccacgctgtccatccaccagctggtggagaacaccgacgagacattctgcattgacaacgaggctctctacgacatctgcttccgcacgctgaagctatcgtcgcccacctacggcgatctgaaccatctcgtctccgtcacaatgtccggagtgaccacctgcctgcgcttccctggccagctgaacgctgatcttcgcaagctggcggtgaacatggtgcccttcccgcgtctgcacttcttcatgcccggattcgctccgctgaccgccaagggatcccagcaatatcgcgccctcacggtggccgagctgacccagcaaatgttcgatgccaaaaacatgatgaccgcctgtgatccccggcacggacgctacctcaccgtggcctgcatcttccggggacccatgtccatgaaggaggtggacacgcagatgtacaacgtgcagagcaagaacagcagctactttgtcgaatggattcccaacaacgtcaaggtggccgtctgcgacatcccgccccgtgggctcaagatgtccgccaccttcattggcaactcgaccgccatccaggagatctttaagcgcatctccgagcagttcactgccatgttccggcgcaaggccttcttgcactggtacaccggcgagggcatggacgagatggagttcaccgaggccgagagcaacatgaacgatctgatatccgagtaccaacagtaccaggaggctaccgccgacgacgaagtggagttcgatgacgagcaggccgagcaggaaggctacgagtcggaggtcctgcagaacggcaatggcgagtaa

SEQ ID NO: 9927 - protein, 442 aa, DROSOPHILA
MATQFWEIISDEHGIDPNGYYHGESALQHERIDVYYNEASSGKYVPRAVLIDLEPGTMDSVRQSPVGQLFRPDNFVYGQSGAGNNWAKGHYTEGAELIDSVLEVLRKESEGCDCLQGFQLAHSLGGGTGSGLGTLLISKIREEYPDRIMNSFSVVPSPKVSDTVVEPYNATLSIHQLVENTDETFCIDNEALYDICFRTLKLSSPTYGDLNHLVSVTMSGVTTCLRFPGQLNADLRKLAVNMVPFPRLHFFMPGFAPLTAKGSQQYRALTVAELTQQMFDAKNMMTACDPRHGRYLTVACIFRGPMSMKEVDTQMYNVQSKNSSYFVEWIPNNVKVAVCDIPPRGLKMSATFIGNSTAIQEIFKRISEQFTAMFRRKAFLHWYTGEGMDEMEFTEAESNMNDLISEYQQYQEATADDEVEFDDEQAEQEGYESEVLQNGNGE

SEQ ID NO: 9928 - DNA, 5004 bp, DROSOPHILA
tctatttaaatgccacaagttcggtgatgtgtgtcccaatcgctcagctataacgaatgtattataaaagataggtaaacatgagtacttttccttcaatgcgtcactggataaaacaatttaaaaaaatgcataaaatacataataaatcctacaatgcttacctggcattcacgactgcagtaccattgattctgacagttggagcacataaaggtggctccatagagcttgcactcgtggcattgtctacctgtgttaccgttgatggtggcggaagattcagcctgggacttatgggagctcctatgcttgtgagacttgtgcttatgcgacttgcgcttgtgagacttgtgcctcttttggacattctcatggtcgttgatattagcggaatgttgttcttggtaggactgaatagaaacatttattttcgcggaatgtcaaaaaatattgtgattaagtgcatacctgtctattggccagttggcgacgggaggccatcggactgctgttgaacagcggttcgatctgtgattcattatccgaattattgtcctccattgagacgttactaaaatgcgaataatttttccaagccctaatcttgcgaagcgtctctgaaagattggctgacaaatgtgtcgaggagcttgccatgtcctggttactataaattatatgacgttaaaataatatgttctagtatattatttgtattttctcacctgtcttgcgagtggattagcttcggtcgcttggctggcggatctctgtctggattgctatctagcagatggtcatttaccgcattccgagattcgtaatgctgatcccgcattgatagatgacttacgggcaaggaatctctacgaaaaagcatttggtcatcctcgaaattggccggagacacggacggtgcgcgtttatttaagcccaaggaactgaaaacgatcaattttaacttgggattctcagaattaaacatttaaagatttacccccgcagaagctgtatgatgttctggtttaactcggcgtaattcagtaatttttcaattgccgacaaactatgtttggaggccattggagaatcgatttcctcttctagcatagcctttacctcactgagctccttggtgccgcacttgttgataaggatgggcagtaggtccttaatacgtatcaagcgctcctttcgctccattcgttcatgcagctccttcttaatgcagctcaaatacagcagtcggttatattcatcctctttctgggccatcagcttatctagggctgcaagatccgcaacgatgcgttcgcgctcttttttcaatgaatcttcatcagggggtaccgagttaattttatcaatcattgtcgagttcaattcatcgaaaagttctttgacgcgataatggaagtttgcatcactattattgagatcaacgaatgacttttggcgggttgtcgaagaagaagccgctggtgaccccaagccctgcgtctgggtgctcaccgtttccgatcgacggggttgcggctgttggggcaccgcaaagttgggagcagccactggaacaggatgcagttgagatggcgattgatggacctgctgtgattgggcaagctgatgtggactagcatgcctttgaggggtcaacggctgcaccgaagctggtcttgatgaatctggctgctgtggtggaggagctagctgctgtggtggaggagctagttgctgtggtggaggagctagctgctgtggtcgaggcgctagctgctgtggtggaggagctagctgctgtgttggagctagctgctgtggcggagccatatgttgtggtggagccatatgctgtgtgggagctcgctgttgtggcggagccagctgctgtggcggagctcgctgctgtggcggagctcgctgctgtggtggagctagctgctgtggtggagctagctgctgtggtggagctagctgctgtggtggagctagctgctgtggcggagctagctgctgtggcggagctcgctgctgtggtggagctagctggtgtggtggagctagctggtgtggtggagctagctgctgtggcggagctcgctgctgtggtggagctagctggtgtggtggagctagctggtgtggtggagccagctgctgtgatggagctagctgctgtggagatggtctatgttgagccaggtgccgtggtggagcgaatggagctgtagccagttgctgtggaggagctcgctgctgtggtggaggaagctgctgcggtggaactgatcttgggaagtgcatctgttgcacgggggcttgttgtagtggagcaacctgagatggagctctctgcgcgagggcagccacttgtggtgcagcagcataggatgcagcgacttgggataaagctgtctgttgaatcgagaaagtcgcattagctttcatgttatttgacagcttttcgttgggataggatatctgcatttgggtggccgttggcggtggagtatttaaactgtaagtgtcagcttgcttggcggcagtaggcggagccagggtatacggtgtgctcagcttaaaagcctgctgacgctgaagaggattagtcgatggagtggtgggcattcttagatttaatggtggagctgcctccattggcttctgttgctgcaccgttgaaaacccaattatattatcatcctcgacttcattgttgcgcttctcttcgctagcgggcggtgttaccgaacggcgtcttttaagagtggcatcaaccacaagcgactctgcctcatttggcgcatctcgcgaccggtcctttagagcctgttccaattcccgacacgctgagagtttaccgtagtcgaagaccggttcctggggatccttctttaccaggaactcgtcgaggatagaggcaccgttttcgttgtttccaagtgggtttgctttcttcctttctggcagctcgtagtttagttggggtggagccggaagcgtaggcttattttccttgatgggcgtaacccttgccggctcttgctctggtttctcaggcgaatcctcgttctccgtgtcgtcaaggcaaatgagttccggcgaaccactgccgctgcggctgcgagaatagctacgactacgactgcgactgcaacttcggctaagactgcggctgtggctgcgactacgactgatgctcctgctgtcgtaggttctgcgctgcctgtcatggaagcgaaccaggtgcttcaatttacgcttgggcagcaagtccttcaggccgtcaaaatagctgttgtagtccattttattgggtcgcagcctgaagtgtgatcggataagataggattacagtttcagtaggttctttgggaagtaagccttaccaacgaatactgcgacgcttgaagtaaagattgggcagcctgccacgctgtaactgcaattgccggatccgccgaattgtttctgagcgcgtggaaggtggcaccgcatcgtcatctggcttttcatttttctcagtggcagccgccgattctggagctccatttccgggtttctcggactcggatcccttggattttgtcttttggggtcgttgcttgctcaccgccgcgtccattagagcgtcgtattcctcctcctcgtggctatactcgtcgctacttagctgcgaattggaggagtcgtagatctcgttggacattaggcctgcaactggacgacggtcaggtatgtacatcttttggcattaaccccctcaaaaactcacgcgctcacgtctgcaaatttttggccaacaaaaaatcgtctgccggttgaatattctaatccgccgacgggctcaccttttcagttgctgaaaaccacttaaaacaatggcccaagtccccaaataggctaattcgggtttataccagttttaaagcgtttactttcagcaaaaatccaatttccaaatgcgaaaaaaaattcgccgttcaattctgcgaataattttgacaggcatttagtatggacgcaaaccaatagggtaaccacttttgggaaagtctttaaataatactgaataaaatatgttcttccaactagttcttagttaggtaaaccaagcaaacaaatttttaatcttattaaattaaagtaatctagtaatcttattaaatattactagtttcggggtattcggtcatttcatatctaaaaaccaaataactatattagaataagttactcactagagtttcattttttgatttatggaaaagttagcgtagatcaaaaatcaatcattaataagctataagttgtagtgcagatcgttagccaaattattcagatttcctttacaacattgcaacctgacagccctggtggcaaatattaaatattgaaaaatactaaaggcaaaagtggcgattttccgtttgttcaccggtgtcatcgtcattgcactcgaacggtcataccgtttggcttacaaaagaaaacaaatcaattcgcacaaaaacattgccaaaaaggtaaatggcgggcacgacgccgccgagtgataaccatatagtagtgaccagtgtttagcaaccgattcccgcccagtgacactcgtaaacaaagggcacgaccgacagtgtctgtatatatatgtgcatatgcgtaacagggaataaccgataagaacggcgcagctgcagatagacatacctttaaataggactttgtttattgatcgtttgtgggtggctattgccttgcagatcgcgaactgataaccataaatgttaaccacgtcacgccaccccacgcctctcccaaacacacacactcgcacacgtgcgccagctgagcacatgcatacgtatatgcatgctcacacgcacacaatcgcatggtcgtgcacaagaactcttttgttgtatgtaaagtggacgatcgaaaaagtaaactaattcaatacaatgggttcagcaatcaacgtcggggtcaccaattgagtgc

SEQ ID NO: 9929 - DNA, 2885 bp, DROSOPHILA
aattattcgcagaattgaacggcgaattttttttcgcatttggaaattggatttttgctgaaagtaaacgctttaaaactggtataaacccgaattagcctatttggggacttgggccattgttttaagtggttttcagcaactgaaaaggtgagcccgtcggcggattagaatattcaaccggcagacgattttttgttggccaaaaatttgcagacgtgagcgcttgcaggcctaatgtccaacgagatctacgactcctccaattcgcagctaagtagcgacgagtatagccacgaggaggaggaatacgacgctctaatggacgcggcggtgagcaagcaacgaccccaaaagacaaaatccaagggatccgagtccgagaaacccggaaatggagctccagaatcggcggctgccactgagaaaaatgaaaagccagatgacgatgcggtgccaccttccacgcgctcagaaacaattcggcggatccggcaattgcagttacagcgtggcaggctgcccaatctttacttcaagcgtcgcagtattcgttggctgcgacccaataaaatggactacaacagctattttgacggcctgaaggacttgctgcccaagcgtaaattgaagcacctggttcgcttccatgacaggcagcgcagaacctacgacagcaggagcatcagtcgtagtcgcagccacagccgcagtcttagccgaagttgcagtcgcagtcgtagtcgtagctattctcgcagccgcagcggcagtggttcgccggaactcatttgccttgacgacacggagaacgaggattcgcctgagaaaccagagcaagagccggcaagggttacgcccatcaaggaaaataagcctacgcttccggctccaccccaactaaactacgagctgccagaaaggaagaaagcaaacccacttggaaacaacgaaaacggtgcctctatcctcgacgagttcctggtaaagaaggatccccaggaaccggtcttcgactacggtaaactctcagcgtgtcgggaattggaacaggctctaaaggaccggtcgcgagatgcgccaaatgaggcagagtcgcttgtggttgatgccactcttaaaagacgccgttcggtaacaccgcccgctagcgaagagaagcgcaacaatgaagtcgaggatgataatataattgggttttcaacggtgcagcaacagaagccaatggaggcagctccaccattaaatctaagaatgcccaccactccatcgactaatcctcttcagcgtcagcaggcttttaagctgagcacaccgtataccctggctccgcctactgccgccaagcaagctgacacttacagtttaaatactccaccgccaacggccacccaaatgcagatatcctatcccaacgaaaagctgtcaaataacatgaaagctaatgcgactttctcgattcaacagacagctttatcccaagtcgctgcatcctatgctgctgcaccacaagtggctgccctcgcgcagagagctccatctcaggttgctccactacaacaagcccccgtgcaacagatgcacttcccaagatcagttccaccgcagcagcttcctccaccacagcagcgagctcctccacagcaactggctacagctccattcgctccaccacggcacctggctcaacatagaccatctccacagcagctagctccatcacagcagctggctccaccacaccagctagctccaccacaccagctagctccaccacagcagcgagctccgccacagcagctagctccaccacaccagctagctccaccacaccagctagctccaccacagcagcgagctccgccacagcagctagctccgccacagcagctagctccaccacagcagctagctccaccacagcagctagctccaccacagcagctagctccaccacagcagcgagctccgccacagcagcgagctccgccacagcagctggctccgccacaacagcgagctcccacacagcatatggctccaccacaacatatggctccgccacagcagctagctccaacacagcagctagctcctccaccacagcagctagcgcctcgaccacagcagctagctcctccaccacagcaactagctcctccaccacagcagctagctcctccaccacagcagccagattcatcaagaccagcttcggtgcagccgttgacccctcaaaggcatgctagtccacatcagcttgcccaatcacagcaggtccatcaatcgccatctcaactgcatcctgttccagtggctgctcccaactttgcggtgccccaacagccgcaaccccgtcgatcggaaacggtgagcacccagacgcagggcttggggtcaccagcggcttcttcttcgacaacccgccaaaagtcattcgttgatctcaataatagtgatgcaaacttccattatcgcgtcaaagaacttttcgatgaattgaactcgacaatgattgataaaattaactcggtaccccctgatgaagattcattgaaaaaagagcgcgaacgcatcgttgcggatcttgcagccctagataagctgatggcccagaaagaggatgaatataaccgactgctgtatttgagctgcattaagaaggagctgcatgaacgaatggagcgaaaggagcgcttgatacgtattaaggacctactgcccatccttatcaacaagtgcggcaccaaggagctcagtgaggtaaaggctatgctagaagaggaaatcgattctccaatggcctccaaacatagtttgtcggcaattgaaaaattactgaattacgccgagttaaaccagaacatcatacagcttctgcgggg

SEQ ID NO: 9930 - protein, 882 aa, DROSOPHILA
MSNEIYDSSNSQLSSDEYSHEEEEYDALMDAAVSKQRPQKTKSKGSESEKPGNGAPESAAATEKNEKPDDDAVPPSTRSETIRRIRQLQLQRGRLPNLYFKRRSIRWLRPNKMDYNSYFDGLKDLLPKRKLKHLVRFHDRQRRTYDSRSISRSRSHSRSLSRSCSRSRSRSYSRSRSGSGSPELICLDDTENEDSPEKPEQEPARVTPIKENKPTLPAPPQLNYELPERKKANPLGNNENGASILDEFLVKKDPQEPVFDYGKLSACRELEQALKDRSRDAPNEAESLVVDATLKRRRSVTPPASEEKRNNEVEDDNIIGFSTVQQQKPMEAAPPLNLRMPTTPSTNPLQRQQAFKLSTPYTLAPPTAAKQADTYSLNTPPPTATQMQISYPNEKLSNNMKANATFSIQQTALSQVAASYAAAPQVAALAQRAPSQVAPLQQAPVQQMHFPRSVPPQQLPPPQQRAPPQQLATAPFAPPRHLAQHRPSPQQLAPSQQLAPPHQLAPPHQLAPPQQRAPPQQLAPPHQLAPPHQLAPPQQRAPPQQLAPPQQLAPPQQLAPPQQLAPPQQLAPPQQRAPPQQRAPPQQLAPPQQRAPTQHMAPPQHMAPPQQLAPTQQLAPPPQQLAPRPQQLAPPPQQLAPPPQQLAPPPQQPDSSRPASVQPLTPQRHASPHQLAQSQQVHQSPSQLHPVPVAAPNFAVPQQPQPRRSETVSTQTQGLGSPAASSSTTRQKSFVDLNNSDANFHYRVKELFDELNSTMIDKINSVPPDEDSLKKERERIVADLAALDKLMAQKEDEYNRLLYLSCIKKELHERMERKERLIRIKDLLPILINKCGTKELSEVKAMLEEEIDSPMASKHSLSAIEKLLNYAELNQNIIQLLR

SEQ ID NO: 9931 - DNA, 2603 bp, DROSOPHILA
cacatcctcgggcgccttctggtgcagctcggccaccgccctcacatactcggtgaatagctgcgtctcaataatggatagcagggctttggcctcgtccttgaatcctgtcacacggaaagtagtgggcagattgtccctgatggaagcaaggaactgcgtccactcctcatcggtggcgcagatcttctgcagttggtagtacttgatgaagaaggcattatcccttttgatctcctcatacggctgggcctgacgatcggtgcgcttgggaccctttaagataaaaaatatatttaagaataaaatccaaaaacgtggaatgtttctcctttcaaattgaggtgactcacattctcccgcttttgacgtttgcgagccgcgaaaaaattttgcttctggtttcgacccatttgtcaatatcaataccaagttatcagtccactgaatatgtttaaaaaaaattaggcaagcgttgtgtgttttctaaacgaaacgaatagttaaaacgtgttcgtcgcctaactggcaacgctgtcgcgcgagagtcgccggacatttggtgcttggaagggaaggtgaaatatgctgctaaagaagtgaaattgaattgaaagggaattactttttacagtacttggtttccgtgctgcaaggaattgacttgtttttaaacgttaacttcatttgcatggcttacatttttagccccaaaatcaataagagctggtttcccaactatcggtaagcaaaatcaaacaacttatttcagttttctagaaactttaaaaacctgttagtttatgtaaggaaacctacatatcttgttgttatttacattttcgaattattttcattttttttttatatagttattaatagccaaatttgactcgaacatagctacgcgcctatcgttacaaaaatctccgttagccgacttcaaatgctaccgatagcagctgcgaaagcgatagcgtcggcaatcgaatccgaatttcccactttaaaaactaagaagtttttgtaagccactatggaaactccacccactcccaccacgaccacaccgccatcattgacaactgagggcaccatggacgacatccaatacctgctgcacctggaggcgatgcgccgttttcaggaagacagccgcaatgtaaagcgccaggtggaggagcaagtacgcatttggctggacgccaagtgtgagtatcagcgggactttgggcggctggcgaggctcctgaagtgcggagccctgcaggcggccgtggatgcccatcgtgtatctgatgtgaatcaagtcgaccaggcggccaaggatatcgctagtttgcgatccaaactgggcagtgatctgcgtcccgccattctggactccaacgatgtgaagcagtgcctggaacatctgaacaccacccacaaaccgcgcctaaatctatgccggcaacaacgggagttcgcccagaaccaagaagctctaagaagtttgcgtaccgccgtcgatggattggagaatggtatggagatgggcatgatacaggcaatggaccgccttgtggaggatcttctcccaccgcgggaaacaaacaactagccggtcgtctcaaaagtatatataatattgtatgatataaactagtttataacattaaaaacggaaactgtaaatgaaaactacaagctacaacgaagccaggatcatccgatgaagaatattggtagcggaaatctaaaaacaaaaaaaaacggattcaaagctgtttaaactcagttatttatacggagaagatgaggagattaccatttggagcgcttggaccagtctttgggtgtccagtgcaggcatttcgagtcgatgcggatcttgcgcttgtccattgctcgccggtgttgctcgatgataacccggttgatgcacacgatgtactggcccttgtagtagttgatcaggttcaggttctgcagcgttgagatcacgtcctcttttttgatggatgtgcattcgcagatgtcgctgtgaagaaaaattttgggagcatgattaatctatgtttcggcaatgaagcacaatctctgtggattgaaaattgtattactttaagcttagaactagccatactttatagttatagtgggcttttcgccgtccgtgctcgggttttggctgataaagatctccagtatggtttgcgcccagtacgatcgataggacagcaaacccagatcagacaatggtttctccggcgatcccgtcttgccctcgaacttggacaactcgtagctgaactcaatgagcagcttgccgtagcccttgcgctgatacggaggcattgtgagaatgcaggccacgttgtagtcctctgtgctctccttctccttggagaagtaccctactatgtggaagccgcgcgagtcgaactctgtcattacgtagaagagaaacggatcggtatcatagtagagtgtcttgtggtcgagaaagagtttggcaagcaggcacaagttctgggcatacaccttgtttttgcgtccatcgatttcaaagaaggaaattgtatgtttgcgatagatctcgtttcccggtggatgcctaa

SEQ ID NO: 9932 - DNA, 603 bp, DROSOPHILA
cccactttaaaaactaagaagtttttgtaagccactatggaaactccacccactcccaccacgaccacaccgccatcattgacaactgagggcaccatggacgacatccaatacctgctgcacctggaggcgatgcgccgttttcaggaagacagccgcaatgtaaagcgccaggtggaggagcaagtacgcatttggctggacgccaagtgtgagtatcagcgggactttgggcggctggcgaggctcctgaagtgcggagccctgcaggcggccgtggatgcccatcgtgtatctgatgtgaatcaagtcgaccaggcggccaaggatatcgctagtttgcgatccaaactgggcagtgatctgcgtcccgccattctggactccaacgatgtgaagcagtgcctggaacatctgaacaccacccacaaaccgcgcctaaatctatgccggcaacaacgggagttcgcccagaaccaagaagctctaagaagtttgcgtaccgccgtcgatggattggagaatggtatggagatgggcatgatacaggcaatggaccgccttgtggaggatcttctcccaccgcgggaaacaaacaactag

SEQ ID NO: 9933 - protein, 188 aa, DROSOPHILA
METPPTPTTTTPPSLTTEGTMDDIQYLLHLEAMRRFQEDSRNVKRQVEEQVRIWLDAKCEYQRDFGRLARLLKCGALQAAVDAHRVSDVNQVDQAAKDIASLRSKLGSDLRPAILDSNDVKQCLEHLNTTHKPRLNLCRQQREFAQNQEALRSLRTAVDGLENGMEMGMIQAMDRLVEDLLPPRETNN

SEQ ID NO: 9934 - DNA, 4325 bp, DROSOPHILA
acaataatgaaaggtcccccaacaaaggggacacattttcctcgttttccaggacctccgaaaaatttagacacaatgcccccgaatgcagttcactttgttaaaatgcgcaaccaaaatggtcggcatcgtgttgcgccgtattgctcctgtcgttgcttcccctttgttgcgtccttgccgctggccaatgcacttctagcttgttcgctcattaaagggtagctacactttgccaagcattctgtaaaatgcttaattaattgtccaaaaatttaattatgtaatttttcaggcaagaaatattgttagaaataataattgtattttataggtttactattaacaaattcaataaataagagtcaaagcattggaaaagttcactctgctcaagggtaatactggttttcaagtatttaatagtgacttaaaaacaattcattcgcatttagatagagcattttctagtcgctgttcgtcatgttccagcactgccattgtttagccgtgtttaacgtgaggatttgactcgacattgtcggcgtctgcagccgtttgccgttttgtttcgaggtcgagttaagcgcctgcagtcaagtggccgggatttaaaatgcataagcccgcgtggccggaaagtcgccgttttcaatttggccatggccatgcggctgcacctgtcgcggtggctagttgcaggcgaggatgtggcgctggtgacccggggcttggtgagctacaagtgcgcactggctaattagaatgcctcgcctagtgccggctcaaaggtaacatttagccgggcattgggtcagagttgacaattacgttagctgcaggtgagggatgaggtttgccagtctctgggtttctttaaaccccacggggattccggtgctccagggcgagcttgcaaattacgccagcttagcgacatgaagtaattgaaacgccaccaaaaacgccacctacccacgccgaaaattcgtggaaaagtatgcgtgccgcgttggcgatccgtcgggactgtcctccaccatcggttccatcgcaggacagcagccgcaccctgcacccgtacggacgggtatataaaggctggagtcttgcgtgcgcaccgctgacttagtcaacgcatctccagcacgccggaccggatgtcgacggacagcacacaaccccatacgcccagccatgaggtggcggtacgtccgccgccctgtgccgccaaccagtggaaacgggctgcactaatggcccggatggctccggcattccgggagaccgtatccgatgacagcgaggacgaggtggacaccaagaagcagatcaaatacggcagcggcttccaggcggccaaggccatcatacacgagtactgcgactatacgaccatccatggcatccggtatctgggcgagaagaagagaccgctcttggagcgcctcttctggatcagtgtcctggtgctatcggttttcacctgcgtcaagctgaccctaaatatctgggacaagtggaacaacaatccggttattgtcagtttcgccgagaaatccactccggtgtggcaaatcccatttcccgctgttacagtttgtccggagactaaaacgcgtcgtgagatattcaattttacggattcgtatcaccaagtgcgtgattttcaaagtaatgtcagcggtattgtagacctcagcgataaacagtaagtaattgtccttttcacacctaaaaacgaatgtatattagagtacatttgttaacagaaagggattatatggcgctgtgtcgcaggtttgcgagccacatttgcatgatgtaactctgggtaataaaacccggaggggcatggaaatcattgatgccctgactgaagtatccccccatttcgatgacacctatctgaactgtaagtggcgtaactctccggttaagtgcagtgatattttccacaaatttgtgacggaggatggcgtttgcttcagtttcaattcactcagtccagcggagattttccgagcggaagggtgagcttggatatcaagtttatgataaactcaaattctgatactagcgctctgttgtagtattattcccgattttatattccgcgaggaaaaccgactatccatggactggaatgtggaggatggttatagcgccagtgcggatacatctccctatccaaatcgagttttgggccccggagctcgagctggtttatatctgtttatgggtggtgcggaaattgatttcgatgacatgtgtcgtggtccagttcagggtttcaaggtaaaatctattatgtttgatatagttgttcaaagggaatcctcttagattttattacacacacctggagatgtggcccaagtgtcgaagcagtacttccgcataccgttcgaccaggaagtgcttatatccattcgtcccaagatcattaccacttcggatggtctgaagcactacgaacccaatcgacggcagtgctatttccaaaaggaaagggaattacgttacttcaatatctactcgcagagtaattgcgaattggagtgcctggccaacttcaccttgaccaaatgtggctgtgttaagttctccatgccacgtaagttttagcccagtattgtccattgggatttaattaaccagtttggttttaggtaatgttaatatgcccgtgtgtggtgacgccagtttgaagtgctataaccaagccgaggatgagctgctgctcagggaattcacacagggcttggttaacgcaggggaaaatactcggggagaaactgagtgtaactgccttccatcgtgtacttcgattgcctacgaggctgagatctcccaggctgattttgactataagacagtaattaatactgattctccggaggggaaggaggagcaatctaagaggcaagggtaagtcggacaagaaattccattagatagatataacattctgttaaaaacgtacatgtttcgcaatatatatatatatttgagtcatcagctaaaatgactgtacctattatatgacatattttcttaaaaaatcccctttgacagaatgaagatgtcgcgcgtgtccatctttttcaaggaggcccagttcctgacctctcggcgctcagagctttatggtaccaccgactttcttgccaattgtggtggcttacttggcctcttcatgggcgtctccatgctgagcatagtggaactgatctatttctgcaccgtgcgcctcatctcgaacctaaggatgcgccgcaaaacccgcaaggaactgctgaaggcggtcaacaaggatgcctaatcgaaggacctcctgtacggcccataaataatccagaatccagtgaatccagctaaactggaagccaaagttgagctgactctgctgctctgtgtttgttctgcgttaaatgttaaatctgcaaacaatgaaaataaagttgtactcagcactagacggcaaatgcagtcctctatctgttccgatacgacccgcatcctgccaaatcatctcagtgcttctgtatgtgtgtgtgtgtaagtctgtgtgcatttgaaatggaatcaattattttattgtgtgatttgctgctgccttcgatgcgatgcaatgcgattcgattcgatttcgaaagtcaatagacaacgtcgtcgaagagtcgtggacaaagtcaaaggggagctacgcatctcaacttccaactcatatgttatgcagggccaatcctttgattcagaccaagtatatccgaatgtatcctgatcccaggagtatgggaggcatggtatgggaggtatgggataccttggctgggcaaacactgaggcaatcccggcactccttcgttcaagttgtgcgtgcggctctaatggaaatccaattgaattaagttaattatgttggcaaatatttaaacaatagcagcaatttatgcacacccaacccccgggtacttcacaacctgcaggcgctgcaaagtaggctttaaaatgttgccatgcattggctgtcattttgtttaattcaattggctgtttgcattatgtacgccacgtacattttccaccaaattgttgcgcaacagttgtgcgggccatgaaactactgaattttgccgtggagttcattacggcaacaagtgtcgaaatgtgtcgaaatattgcaaataaagttgacacatttgcatatgcctaataaaattttcatgcccacacacgacggagtgcatcgcacattgcacatcgggcacgaaatcgcagtccacatccgtgtccgcactttggcactttccatctccacc

SEQ ID NO: 9935 - DNA, 1809 bp, DROSOPHILA
atgcgtgccgcgttggcgatccgtcgggactgtcctccaccatcggttccatcgcaggacagcagccgcaccctgcaccccacgccggaccggatgtcgacggacagcacacaaccccatacgcccagccatgaggtggcggtacgtccgccgccctgtgccgccaaccagtggaaacgggctgcactaatggcccggatggctccggcattccgggagaccgtatccgatgacagcgaggacgaggtggacaccaagaagcagatcaaatacggcagcggcttccaggcggccaaggccatcatacacgagtactgcgactatacgaccatccatggcatccggtatctgggcgagaagaagagaccgctcttggagcgcctcttctggatcagtgtcctggtgctatcggttttcacctgcgtcaagctgaccctaaatatctgggacaagtggaacaacaatccggttattgtcagtttcgccgagaaatccactccggtgtggcaaatcccatttcccgctgttacagtttgtccggagactaaaacgcgtcgtgagatattcaattttacggattcgtatcaccaagtgcgtgattttcaaagtaatgtcagcggtattgtagacctcagcgataaacagggcatggaaatcattgatgccctgactgaagtatccccccatttcgatgacacctatctgaactgtaagtggcgtaactctccggttaagtgcagtgatattttccacaaatttgtgacggaggatggcgtttgcttcagtttcaattcactcagtccagcggagattttccgagcggaaggtattattcccgattttatattccgcgaggaaaaccgactatccatggactggaatgtggaggatggttatagcgccagtgcggatacatctccctatccaaatcgagttttgggccccggagctcgagctggtttatatctgtttatgggtggtgcggaaattgatttcgatgacatgtgtcgtggtccagttcagggtttcaagattttattacacacacctggagatgtggcccaagtgtcgaagcagtacttccgcataccgttcgaccaggaagtgcttatatccattcgtcccaagatcattaccacttcggatggtctgaagcactacgaacccaatcgacggcagtgctatttccaaaaggaaagggaattacgttacttcaatatctactcgcagagtaattgcgaattggagtgcctggccaacttcaccttgaccaaatgtggctgtgttaagttctccatgccacgtaatgttaatatgcccgtgtgtggtgacgccagtttgaagtgctataaccaagccgaggatgagctgctgctcagggaattcacacagggcttggttaacgcaggggaaaatactcggggagaaactgagtgtaactgccttccatcgtgtacttcgattgcctacgaggctgagatctcccaggctgattttgactataagacagtaattaatactgattctccggaggggaaggaggagcaatctaagaggcaaggaatgaagatgtcgcgcgtgtccatctttttcaaggaggcccagttcctgacctctcggcgctcagagctttatggtaccaccgactttcttgccaattgtggtggcttacttggcctcttcatgggcgtctccatgctgagcatagtggaactgatctatttctgcaccgtgcgcctcatctcgaacctaaggatgcgccgcaaaacccgcaaggaactgctgaaggcggtcaacaaggatgcctaa

SEQ ID NO: 9936 - protein, 602 aa, DROSOPHILA
MRAALAIRRDCPPPSVPSQDSSRTLHPTPDRMSTDSTQPHTPSHEVAVRPPPCAANQWKRAALMARMAPAFRETVSDDSEDEVDTKKQIKYGSGFQAAKAIIHEYCDYTTIHGIRYLGEKKRPLLERLFWISVLVLSVFTCVKLTLNIWDKWNNNPVIVSFAEKSTPVWQIPFPAVTVCPETKTRREIFNFTDSYHQVRDFQSNVSGIVDLSDKQGMEIIDALTEVSPHFDDTYLNCKWRNSPVKCSDIFHKFVTEDGVCFSFNSLSPAEIFRAEGIIPDFIFREENRLSMDWNVEDGYSASADTSPYPNRVLGPGARAGLYLFMGGAEIDFDDMCRGPVQGFKILLHTPGDVAQVSKQYFRIPFDQEVLISIRPKIITTSDGLKHYEPNRRQCYFQKERELRYFNIYSQSNCELECLANFTLTKCGCVKFSMPRNVNMPVCGDASLKCYNQAEDELLLREFTQGLVNAGENTRGETECNCLPSCTSIAYEAEISQADFDYKTVINTDSPEGKEEQSKRQGMKMSRVSIFFKEAQFLTSRRSELYGTTDFLANCGGLLGLFMGVSMLSIVELIYFCTVRLISNLRMRRKTRKELLKAVNKDA

SEQ ID NO: 9937 - DNA, 5031 bp, DROSOPHILA
gaacgatcttctgaatgcgcggctcgtcctccaccttcatgaagggcacatggttcatcagatagttgatgcaacccttgccgcccagatacgcctttttcagatcggtgcgctccagctccgattccacatactccttttcatagttgttgatatcctcctcggtgatgggcttgaagattttgctccacaactccagccacgacgacagcttggactcgctctcatcgtcgtcgtcgatcacgccctgctcgtcgtacagcgcccgcttctgcgtgtcggtaagcacctggtagagcttcgatagcaccttgaacttctcggtggactccgccttctgctcctccggcactcgatcgggatgaacgagcagcgagagcttgtggtatgccttcttcacctccttctcgccggcgccccgggccagctccattagcttgtacacatcgcgcgtcccaaaatacttttcgcacagctccagcgtcgacattgctaatttcgtattttgtatttttatttttcgcaccaacactaccaaacgcaaaatgcgccaaaacgccgcgccagtgtggcggtgcgtggggcagacaaaaattcctttgtttaatggtgcgaaaaaatctttgattttcctgtttacagcaatttggttattatttaacaagtaaaatggtattctatgaattttgttttaactattgataatttttgagagcctgcgtgataagtaacaaaaataaattggagaattgaacatttcagtgctgcacaacattgcatggttggtgtcccaactaaaaagtaacccgtgttaagaacgtatgagggtggcatccctcaaaatccatggcgagcagtgttaccgtactgcgaaaagtgaccttaaacccatctcaaaaaatataccaaacgtgtatttctcagcaaagttaccactgggcacactacacactatataacgagacggaagtcggaatcgtttcttttccgttttacacgtctgaagagaacagacatggtgagcatctcgatcggataaaataaattatattactatgtgatgtgtcaaaaagatggatgattgcaagttaaataattgattagtttggaaacagtagcgttataatcactctaaatgtaactaatacaaacaaagcgtaattttaatgcataatttgcacttgcaacatccacgtgttcacctaacctcaaagtgcagaaacgcattgtgctaatggattttctccattcattttgcagtctcatcgtaagttctcggcaccccgccatggctccatggccttctaccccaagaagcgctcagctcgccatcgcggtaaggttaaggccttccccaaggatgacgccagcaagccagtccatctgacctgcttcatcggctacaaggccggcatgacccacattgtgcgcgaggccgatcgtcctggctccagtaagtaccagcatccacctctatcaactaacaactactttccatgatgagtatactagaagatttatggttagaacacatatgattaaccgtgattatctcaactagggcggactgaccaagcccactctgtagatgatttctcttagggaataccattactcggtattaatggcttttctttctcttgcagagatcaacaagaaggaggtggtcgaggccgtcaccgttctggagaccccgcccatgattgtggtcggtgctgtcggctacatcgagactcccttcggtctgcgtgccctggtcaacgtttgggcccagcatctctccgaggagtgccgtcgtcgcttctacaagaactggtatgtatccgaggaccacgtggtcgttcttcctactccatttgtcgccattttctttgcaccgggtgtacacacacacaaaatggcagccgacacgtgctttctactcgagtctggatgatgaaacgatggtatctgaatgagcaaattattgttgagaagccttttaccatctgctgccttccttctgatcggcctcttagaaaataagcgattgattttgctgcaatacaatatctattgttttttgaagtataaatcaaccagtgcgctgttttgtgtgtgtgcgaacttccgatcaacagtgattccctcgtgtaatatagacccctattaaatgtaaaacaaaatcataaagttcttcgatcagcttgctgagagagcttttcaaatcgctaaacgttgtgtgagctgtcaggttaatcttgatcatggggcgcacaagcaagcccctggttaattgaaattgcctgacgagtgagcatgacaaggaagactgcatctccgctcgccattcgtttgcgatgaggcgcacttcctgttctatctcgccccacataaacagcgcggctaagaagttggagttgttgcgacaccccaatggattgctacattacgctcgtttctgaccactgcgtctccaacttgaccatcgtccatatcaggtacaagagcaagaagaaggcattcaccaaggccagcaagaagtggaccgatgatctcggcaagaagagcatcgagaatgacttccgcaagatgctgcgctactgcaaggtgatccgtgtgattgcccactcgcaggtaaatatcaatttcaattatgtattccatatttcccgacgtccttggccttgttgcgccactggtgctgggtcctcgggctcggtgcctttggtgcgcctggcctaaaaagcattcgcgctgtggttttcaatgcacggtttagggatgcaacgtcgcagagcaatctgcccctcgggtggcgggacttgatatattccagtaacggtgcggagccgttcaggcgatgatagcgcggttaaaccatatcacgtacagtcccaatttccaataccacaaggtggatgaaactaacctgttgtgtactttttctctatttgcctgtagatccgcttgatcaagcagcgccaaaagaaggcccatgtcatggagatccagctgaacggcggctccatcgaggacaaggtcaagtgggctcgcgagcatttggagaagcccatccaggtcagcaacgtcttcggccaggacgagatgatcgactgcgttggtgtgaccaagggtaagggtttcaagggtgtcacctcgcgttggcacaccaagaagctgccccgcaagacgcacaagggtctgcgcaaggtggcctgtattggtgcctggcatccgtcgcgtgtgtccaccaccgtggcccgtgccggtcagaagggttaccaccaccgtaccgagatcaacaagaagatctaccgcatcggcgctggcatccacaccaaggacggcaaggtaagcaccagtacccattattcccaccattccactttaatcgggctgtagaagaaatctgtttttgtgatgataaaaccttaaaaataatatcgacatcgaaacaaaaaaaacttgatgaaccatgatatttataatgataggactgataacagatcttcagctacataagattaaatcctgaatccccctgccgcaagaccacagtaatctgatccagaatgtatcgctttgcttttgcaggtcatcaagaacaacgcctccaccgagtacgatctgaccgacaagagcatcacgcccatgggtggcttcccccactacggtgaggtcaacaacgacttcgtcatgatcaagggctgctgcatcggctccaagaagcgcatcatcaccctgcgcaagtccctgctgaagcacaccaagcgctctgccctggagcagatcaagctcaagttcatcgacacctcgtccaagatgggtcacggtcgcttccagacccctgccgacaagctggccttcatgggaccgctcaagaaggatcgtctcaaggaggaggctgccgctaccaccgctgctgctgccgccgccaccaccaccagtgcttaaacaaaatgtcgtgtccgcgttcaattgtctgctcgcttctaccaccaactgctgcggtagggcagcgatcaataaacagattttggctaagctgactcattaatcttttcaattgcatctaatgggaaaagaccacgtcacagattttacaatcgattaatgttgattaggaggtggaatcattagtttatttctcatgatagtttaatatatgtacatacccaggctaaattgttatttattatacctccttagagctaaaagtaaaataatattaggacactagtaaatagtttatctacaataaaagagtaccaccaaacttaaacactcgtagaacatttatagcaaaagagattagaaatcgccaattgagttcgatgtgatttgctagaataattgggtgtcctccggatcagcaggttagcatcgtagttcctacggagagcattgctacaatgccactgactcttggcaactgattgtccgtagtctatagttctgcttttatatgacactcgagtatgggtaaactactccatcgtgaccagacattcatgggaatgcagctgtaacaatacttggctacaattcctctccggttacttggtaaaaaccccccacagctatcctataaatagggtactttgggtagctaagcctcagtccaaaaccaacgctgaagatggccattaagtctctgattttgcttacttccctgctgggaataagccttgcagcggactattgtgctctgcccacgtgcctggacaagcacatagcctgcaacaacaagggagtaagtagtgatagctggccaaaacctgttggtgctcacccattctcgcccagaatttcagtgaaaattgtcccaaggacgtgcgtgaggtgaagatcgagccgcaccacaaactcatcctcaatctcttcaacgagttgcgcaacaacgtggctggaggcaaaatagaaggactacccaaggctgttcgcatggccaagatgtcctggtgcgaggagctctcccatctggccttgctgaacgtaaagacctgtgagtccctgccagataaatgtcgcagcaccgagagattcgcc

SEQ ID NO: 9938 - DNA, 1361 bp, DROSOPHILA
ctgaagagaacagacatgtctcatcgtaagttctcggcaccccgccatggctccatggccttctaccccaagaagcgctcagctcgccatcgcggtaaggttaaggccttccccaaggatgacgccagcaagccagtccatctgacctgcttcatcggctacaaggccggcatgacccacattgtgcgcgaggccgatcgtcctggctccaagatcaacaagaaggaggtggtcgaggccgtcaccgttctggagaccccgcccatgattgtggtcggtgctgtcggctacatcgagactcccttcggtctgcgtgccctggtcaacgtttgggcccagcatctctccgaggagtgccgtcgtcgcttctacaagaactggtacaagagcaagaagaaggcattcaccaaggccagcaagaagtggaccgatgatctcggcaagaagagcatcgagaatgacttccgcaagatgctgcgctactgcaaggtgatccgtgtgattgcccactcgcagatccgcttgatcaagcagcgccaaaagaaggcccatgtcatggagatccagctgaacggcggctccatcgaggacaaggtcaagtgggctcgcgagcatttggagaagcccatccaggtcagcaacgtcttcggccaggacgagatgatcgactgcgttggtgtgaccaagggtaagggtttcaagggtgtcacctcgcgttggcacaccaagaagctgccccgcaagacgcacaagggtctgcgcaaggtggcctgtattggtgcctggcatccgtcgcgtgtgtccaccaccgtggcccgtgccggtcagaagggttaccaccaccgtaccgagatcaacaagaagatctaccgcatcggcgctggcatccacaccaaggacggcaaggtcatcaagaacaacgcctccaccgagtacgatctgaccgacaagagcatcacgcccatgggtggcttcccccactacggtgaggtcaacaacgacttcgtcatgatcaagggctgctgcatcggctccaagaagcgcatcatcaccctgcgcaagtccctgctgaagcacaccaagcgctctgccctggagcagatcaagctcaagttcatcgacacctcgtccaagatgggtcacggtcgcttccagacccctgccgacaagctggccttcatgggaccgctcaagaaggatcgtctcaaggaggaggctgccgctaccaccgctgctgctgccgccgccaccaccaccagtgcttaaacaaaatgtcgtgtccgcgttcaattgtctgctcgcttctaccaccaactgctgcggtagggcagcgatcaataaacagattttggctaagctga

SEQ ID NO: 9939 - protein, 403 aa, DROSOPHILA; identical to SEQ ID NO: 9834

SEQ ID NO: 9940 - DNA, 8797 bp, DROSOPHILA
ctaatcttgggtcgacgattctataccacacggcgatccaatacccggctagccctggactttcccagttttaccaaaacacctgatgaacgaaccaaaaggaaatagtcaatacatctcagtgtagagggatatattggggagatgtctaacaatgggatttactcaagtgtatccatctggcatggtccgctttgaaaatgctgtttcgcaacacctgatggtgatcattctatttaacttgagtgggtctgtctataagtcgttagccgatatctgccggcgtcagttaaattaggtggaataatccgagagattcgaggcaaaaattcaatcatctgtgttggctcaatgttatgctgagtgattccgtgtaataaatcaataaattaccccctctcatgcgaacgcctgatgcaaaactcttttcggttcctccaacccggtcaagagtccacgacaatctccgtaatatccaaattgtcgctccagccgcgagtccagatcgtggactactattaaattatacgcgactaaccatatgcgccctgttcatttattcaacgtctaaaattgcgacacgccgctattcatatattcaaaaatttatcataaagtctgaccgggcactccttacgtgacaatccggccatatgcatatatcgcggaaaataacactgcccggctggactttttccgtattccgggtcgatgtgttatattttaaattcaatttgccaactaaattaattaattttatcatatttaaattacttctacaacattaagattttttccatcattattttaattattttgcaccgcagttcacaaacatgtacatttgttgatcagtgttattgataggaaaatggggaaatgtacgttttttacagaattttccctatatcttctcccctttcgttgccagggtgcagtccatgttcagactccagcggcaattgggatcaggaggtgagcgcttccgatcgagaggataatgtgttcaatatttcgcaaccgcatcaattaccgtggaactggtggcaccaggagcggcagcggggagcgggagagggaccgagatcgggacagggatcgtgatcgagatcgggaaagggacagagacaccctgctggccaaggaactggatgcggatagcaataacaatggtaccgagccacaaatggaggcggaagcagtgccggaatctgatacggaaagagaaacggccgaggagcgcggcgaggaacaggagccggagaacagtaacgaggccctggatctctcactgatttcgtccggcggtcgggaatcactgccgggcagtggtcacgtgtcgctggaggctctacaacataccaaagtggcggtggcccagtttgcggccactgcgatggcgggaaaccaccagtccgccgatctggccatggtgcagtccaccatctttaatgtgcagcggcagcatctgatgcagttacagctcatccaacacctgcagagtcaattgaaaagggccgaggcagccgccttgggtaggcactctcacagcgatgaggaggaggaagagccggagccagagccggaacctaagaagcagcccaccaatggcctgaaggaggagttggagctggagcagggtccggagtcagagcaggatcaggagtcgcggcgggaggagaattcaaagactgacaagaggggaactgaggacagaaaggcagagccagagggttaccaatcgatgatgtgcgacataagctcgagtctggcatcgagcattatcaccaaccacgatcccccgccagcccccaacgagcccaattgcctggagatgttgcaacggagaacggaggaggtcctcgactccgcatcccagagcttacacgctgctcagatgcaagaggaatactcggagtatgcctccaaagaggctcaaagtcgcggtgagatctttaagcatcgatgcaagtactgtggcaagatctttggcagctactcggccctgcagatacatctgagatcacataccggtgaacgcccattcgtttgtaatgtttgcggaagtaaattcaccacgaaaggcaatctgaaggttcactaccagcggcatacgcaaatctttccgccaatgcttctgccaccaggagtggcgcccaacgtgggtcattcgggtcaggggcaagtccagggcgagcagtatcccattcgcctgccttttgcgccaccagtagcacctgtgggtcaggaacagcatcagaatcaagttgaggagccggaggagattagacaggagattccagttccgcaggcagaagatctcagcaagccaatggttaaggaaaaggagaaatcccactcgcccgtggagcgtgtcaagactcccaaagaagttaagacagatgcagcgctgccgtcatcagagaagcctgaaaaagagatctccaagccggtggtgacctcgtcacgacgaaatggatctgtgcggaagcgacaaacaagtgctgttagcccgccgcaagaggatagggaacgggatcttgtcgagcacttgcacatagccaagctggtgagacgctcctctgccagcagagaatcacagccggcggagtactcgctcgcgcaaatggagcgcattatcgacaagtcatgggaggatctgattgagatcgacaagacttcggagacctcgaagctgcaacagttggtggacaacatcgagaacaagctgaccgatcctaaccagtgcatcttctgccagaaggttatgtcctgtcgcagttccctgcaaatgcatattcgcacccataccggagagcgtccgttccgttgcaagatctgcggcagggctttcgccacgaagggcaatcttaaagcccacatgagcatacacaagatcaagccgccgatgaggagtcagttcaagtgtccggtgtgccatcagaagttctccaacggcatcatcctgcagcagcacattcgcatccacaccatggacgatggcagcggtggtcagggagcccctgccgccaatcctggcgaggccgaacggctgggtatcgaagatcaaaactcgaacaagtccctgggcacttcggatacattggatttctccaccaccatatcggatcactcgggtcaaagatctgagtcctcgcaaggcggagattttgatgagtttatgaccatggacagcacggatgactccagggataactcaagtgcggccacagctacgcctcatcctctagaaagagagagggatagggagaaggagcgggagagaaggattcccaacgattgctctgatgagagatcgcattccaatcctgatttaactggaggccgcagcgagagtggcgaaatgcccgccatggatctctcttcaccctcttccaactcgggtcgtatcttcgcaactggactggctaacggagctgctggtggaggatctggaaatggtggtcttcccatgctcggaatgcccatgcctccaaatcttctgctcatggcagctgctcgcgaagaaatgcacgctctaggtcatgctcacgccaaatttcccctgctgccctttggtccacttggatttatgggtaagctataaatattctataatattaatatttttttgggggcttattttataaaattttccgaaaattgtccgaaaaatatcattgtctgatacatataaggagctttgagaaatcttatttgctttggtacttcactatgaatttacccagctaattaaaagcaaaatatagagcttatagtttgctctttgtcgcgtccaacaatataaaaataaacccggcaaattgcgtatcttttggccgccacacttggcattaactttcttctccgttctgttcgtggatgcgaggtgacaaagcccctttgtctgccacctttgaccccgtcagcgtttgccaagcaactcgcagtggaagtgcgataaatctgcgatctgggcgcgacataactcaattggaccgagacaaagcatccgccgagcacttcgcaccgctccacccagctccatcccaatccatgtctgatatgcctatgccaaattccgcaatttatttataaacattggcgcattccccgaatcgtggcgcaaaaggcgcaagcgatcggatcgagtagcgatctgtcgcctcattatgtcacaaccttttacgcggatggatatttattatatctccgatcgcaaagagccacattcggcagcacgtggcgggaattatgtgtaccccactgacctcgcaagtaactctttgtctgcatcccgccctcatccgcaggtctgcatccgcccccaaatgtgtgcaatctctgctttaagatgctgcccagtttggccgccttggagagtcatttgcagagcgaacatgccaaagaaccggcgacgggccacgcccaacgcccacagtgcagcgatgctggatcgccgtatggagcaaaggtaagtgcaataatatcgaattggatattggatcactatgtttgctaatccacgccatgacagtaagcaacttatcgccatgatccaatttaataaaagtcctaaagaattcgcgtaagttttgtgaaagcaatatttaaatggtttatagaaatgcttgcggaatacatgacagttctctttattctcaataataagatgaactactcggaaattggtacttcattacgtgtcactgactccgaactcaacttatttttcgcggtgcaaaacccactaatcacttccatagttaaccatggggcagcattcccatgccccaatatagtagcacttacatcacatccaactagcctaatctcacctcaactctcgctttgagaaccagtgccatctggcagtgagagtcttgccttggtcatgattaattaaaatgttcacgggttcagctcgttccttggggttggcttgatttggccaaatatggttggagcaaacggcccgttttggccgcgaccatacaaattatgagcacattattaattgcccgacgtgttcgtcactggatgggtattactgtgaaagaaattgtggccaacttgcatagctttgccttaattgttggcgttccgctttgcagactccaatcgaccaagttgttggggctggcaacccagactcacgggtttaagtgcccggattacatcgcccaacaatgccaattatttattaaagtgcgttcgctgctccgatgttcggatggagtggttttctgcagtggctgtccataacttaagtacaaatgcgagtattaatatttatttctggccggagcatgcagtgcggcattgtccctctatgactaatgacatcgttcattatggcatacattcttggagtaattccaaaacagaaacttagtgtctccgcacagggatggaatctgaacaaatttcgcagctgggggcttttagttggataaggatgcattttgaacagaatgtttgatttttgagaaatatacttaagagagctagctctttgtatttcacaatcccttgaaccgctcctgtgcttcctattgtggccaaaatgcaagtgcagtgtaaatgtcataacattttcagttggtaatcagcaagtctctgctgggatgccctcctttccccaataccccccaagttttgcgacagactgcatttgtacatctttggctgcgcagcggctacgttccgttttgctcgcttagcacattgttgatgatctagagcagacgagcatcggatcgagttggtccgggtatggggttatcccatgcagatggttgcagggggattgtgacaggcaatggaggtggggctgggaatcggcatcatcttttgggcttgaaatttctaaatgattcaaaaatcttaagtaattacgagaatgcattatgatgatgcgaaatttacgactccgtctggtatgttttcactctggatcgtggcgaaatgatgaaaacgaagggctattcgggggctatagaggatcgggttggtttgagagatatagaggagcctgtgccggatcggtgacggtgtgtgcgatgcattcaatgcaaataaattatgctacgctttatgcaaaattatttaatcttttgttcgtcgcgtctgctggggacaccagaacagagcactacatagttggattcggctcccctcgcacacagattcccctctttttggcgaacaattgttttgccataaaaatatgagacccggcggcatcgtctgcgcgagataattagttggcattattacacgcgatggtatatagaaaaattgtaaattatgtttttggctctcactctccgcgaaaataagattattaagaggcgcgagtctgccgcatcggaatgaacggcacatttagccgaaaatgcgcagaaattagcgcccgtcgctgaaagtatctcgccctataatattgtacatcatcgcatttcagctcactctcaatccaaatctgttcgcaaagaagccgccttcgtcgtcgtcctcgtcgtcgggtgaaaagttgccggagtcatccaatccgccctttcccgctgaaaatcccccagcaacgcccatcaaagaggatcccgatcaggagcagttgatggtggaggagggtgcttcggctggagaaggatctggcaccggagccacctcgaattatccccaggaggccggcgatgccgagcagtcactgatgaagatgcagctccgtaagtcgctagcgaggatgactgagctcctttccgcaatcctaagagtttctctccattagatgcccatcgttttcctgccagtcccctcgactttcagcaggctctgatgtccgcaggaccaccgacttctagtttggatccgccggtgaataacaagcacttttgccacgtctgccggaggaacttcagttcgagttccgctctccagatccacatgcgcacccacacgggcgacaagcccttccagtgcaatgtgtgccagaaggctttcaccaccaaggggaatctcaaggtacagtcaagaatttccgtctgtccctccagcattttactcaactgagttcctgcttgtccctatttttgggtttctatattttctaggtccatatgggtactcacatgtggacgaatccgacttcgcggcggggtcgtcgaatgtccttggagctacccatgcgacctggtccaaactccggccaaggtcatcctggatccagtgcagagcaggagttcatgcagagacgaccagagctcttttttccctacctgccgcccttctttaacggattgccaccaaaggtgattattagatgcacttttcttttgctatatatgttaactgctaaaaactatttagcctgataatactagtatacaattaagttatgttatctgaaatttgttggttgttctttaccttttttccgaatagcctggggaactcagtcccggcgcctttcccaatattcccccgcctcccttcgccaacggcgggaagtatccctatccgcccgggctccttggcttccctggtttcctggcccaacatccttacatcctagagcggaggagcagcagcaagtcacccacgccagagccggctcagagtcccgccttgcgggaggaggaggggtccggcaatatctggcatccactgagtcgcatcaaggtggagaacaatcaaaacgagtccatgggtggctttaacgagcaggaggatcacgctgagacggatgccactggaggggacaacgacgaatcggagtccagggatgcggagaagtaacgtggatgaggagaagctgatgagatcttagtcttggaacacacatggtttttgtggagtacatatcttgagcattaccctacgctaagcttctactagcactgacacaaactcaaacacaaccacccacacacttatacgaatatatcctttgtgtctatacaaatatatatatacatagtacggttaattgatagcgatcttcaaggcatttaaatgcattaagtttagccggtaagttgtaaaaatagcggattgaggaacgaacttgactggagaaatatcttcaaccggatcaggcaggctgcgaggtcggaacttaactaattttatggctatacttagatatatttaactacatataccgataaatacacgtaatgtaaactgtggtagttgcatataaaaaaattgaaatcgaagcccgaaaaaaaaacaccgcgacaaaaatgatcaaaaataaagccggcatgcgaaattgcaaagaaaactcagtgacgtttcttttccgggaagtgggtagcattccaaatggaattgggtatcgcatttacgatggattcaataaattcatgcaaattggcagctttggtaagtgcgcctccttcgatcgtgccacatgccacgcgcatcccattcatcatcccattcccttcgaaaagacgccctcgccacaaggcatcccccatcgccatccaacagatgttttctttttgattcatttgcccagacatgggtgtttggtcaaagtatctctctgtctcgcagatcgctgcgttgtcgcaaaacttttaattattcccttgtcattttggcactgcctcttcccgcgacgacaatgcaacaaataataatttctagagcgcaacaacttgatgtcgccgcgaattataaatgttcgccaaatatgacagccgttgtctgccaaaacaatagactatagactatatagactcgatccgatgcacccaaatcggattcccgggcgagtggcacatgt

SEQ ID NO: 9941 - DNA, 3804 bp, DROSOPHILA
atgtgttcaatatttcgcaaccgcatcaattaccgtggaactggtggcaccaggagcggcagcggggagcgggagagggaccgagatcgggacagggatcgtgatcgagatcgggaaagggacagagacaccctgctggccaaggaactggatgcggatagcaataacaatggtaccgagccacaaatggaggcggaagcagtgccggaatctgatacggaaagagaaacggccgaggagcgcggcgaggaacaggagccggagaacagtaacgaggccctggatctctcactgatttcgtccggcggtcgggaatcactgccgggcagtggtcacgtgtcgctggaggctctacaacataccaaagtggcggtggcccagtttgcggccactgcgatggcgggaaaccaccagtccgccgatctggccatggtgcagtccaccatctttaatgtgcagcggcagcatctgatgcagttacagctcatccaacacctgcagagtcaattgaaaagggccgaggcagccgccttgggtaggcactctcacagcgatgaggaggaggaagagccggagccagagccggaacctaagaagcagcccaccaatggcctgaaggaggagttggagctggagcagggtccggagtcagagcaggatcaggagtcgcggcgggaggagaattcaaagactgacaagaggggaactgaggacagaaaggcagagccagagggttaccaatcgatgatgtgcgacataagctcgagtctggcatcgagcattatcaccaaccacgatcccccgccagcccccaacgagcccaattgcctggagatgttgcaacggagaacggaggaggtcctcgactccgcatcccagagcttacacgctgctcagatgcaagaggaatactcggagtatgcctccaaagaggctcaaagtcgcggtgagatctttaagcatcgatgcaagtactgtggcaagatctttggcagctactcggccctgcagatacatctgagatcacataccggtgaacgcccattcgtttgtaatgtttgcggaagtaaattcaccacgaaaggcaatctgaaggttcactaccagcggcatacgcaaatctttccgccaatgcttctgccaccaggagtggcgcccaacgtgggtcattcgggtcaggggcaagtccagggcgagcagtatcccattcgcctgccttttgcgccaccagtagcacctgtgggtcaggaacagcatcagaatcaagttgaggagccggaggagattagacaggagattccagttccgcaggcagaagatctcagcaagccaatggttaaggaaaaggagaaatcccactcgcccgtggagcgtgtcaagactcccaaagaagttaagacagatgcagcgctgccgtcatcagagaagcctgaaaaagagatctccaagccggtggtgacctcgtcacgacgaaatggatctgtgcggaagcgacaaacaagtgctgttagcccgccgcaagaggatagggaacgggatcttgtcgagcacttgcacatagccaagctggtgagacgctcctctgccagcagagaatcacagccggcggagtactcgctcgcgcaaatggagcgcattatcgacaagtcatgggaggatctgattgagatcgacaagacttcggagacctcgaagctgcaacagttggtggacaacatcgagaacaagctgaccgatcctaaccagtgcatcttctgccagaaggttatgtcctgtcgcagttccctgcaaatgcatattcgcacccataccggagagcgtccgttccgttgcaagatctgcggcagggctttcgccacgaagggcaatcttaaagcccacatgagcatacacaagatcaagccgccgatgaggagtcagttcaagtgtccggtgtgccatcagaagttctccaacggcatcatcctgcagcagcacattcgcatccacaccatggacgatggcagcggtggtcagggagcccctgccgccaatcctggcgaggccgaacggctgggtatcgaagatcaaaactcgaacaagtccctgggcacttcggatacattggatttctccaccaccatatcggatcactcgggtcaaagatctgagtcctcgcaaggcggagattttgatgagtttatgaccatggacagcacggatgactccagggataactcaagtgcggccacagctacgcctcatcctctagaaagagagagggatagggagaaggagcgggagagaaggattcccaacgattgctctgatgagagatcgcattccaatcctgatttaactggaggccgcagcgagagtggcgaaatgcccgccatggatctctcttcaccctcttccaactcgggtcgtatcttcgcaactggactggctaacggagctgctggtggaggatctggaaatggtggtcttcccatgctcggaatgcccatgcctccaaatcttctgctcatggcagctgctcgcgaagaaatgcacgctctaggtcatgctcacgccaaatttcccctgctgccctttggtccacttggatttatgggtctgcatccgcccccaaatgtgtgcaatctctgctttaagatgctgcccagtttggccgccttggagagtcatttgcagagcgaacatgccaaagaaccggcgacgggccacgcccaacgcccacagtgcagcgatgctggatcgccgtatggagcaaagctcactctcaatccaaatctgttcgcaaagaagccgccttcgtcgtcgtcctcgtcgtcgggtgaaaagttgccggagtcatccaatccgccctttcccgctgaaaatcccccagcaacgcccatcaaagaggatcccgatcaggagcagttgatggtggaggagggtgcttcggctggagaaggatctggcaccggagccacctcgaattatccccaggaggccggcgatgccgagcagtcactgatgaagatgcagctccatgcccatcgttttcctgccagtcccctcgactttcagcaggctctgatgtccgcaggaccaccgacttctagtttggatccgccggtgaataacaagcacttttgccacgtctgccggaggaacttcagttcgagttccgctctccagatccacatgcgcacccacacgggcgacaagcccttccagtgcaatgtgtgccagaaggctttcaccaccaaggggaatctcaaggtccatatgggtactcacatgtggacgaatccgacttcgcggcggggtcgtcgaatgtccttggagctacccatgcgacctggtccaaactccggccaaggtcatcctggatccagtgcagagcaggagttcatgcagagacgaccagagctcttttttccctacctgccgcccttctttaacggattgccaccaaagcctggggaactcagtcccggcgcctttcccaatattcccccgcctcccttcgccaacggcgggaagtatccctatccgcccgggctccttggcttccctggtttcctggcccaacatccttacatcctagagcggaggagcagcagcaagtcacccacgccagagccggctcagagtcccgccttgcgggaggaggaggggtccggcaatatctggcatccactgagtcgcatcaaggtggagaacaatcaaaacgagtccatgggtggctttaacgagcaggaggatcacgctgagacggatgccactggaggggacaacgacgaatcggagtccagggatgcggagaagtaa

SEQ ID NO: 9942 - protein, 1267 aa, DROSOPHILA
MCSIFRNRINYRGTGGTRSGSGERERDRDRDRDRDRDRERDRDTLLAKELDADSNNNGTEPQMEAEAVPESDTERETAEERGEEQEPENSNEALDLSLISSGGRESLPGSGHVSLEALQHTKVAVAQFAATAMAGNHQSADLAMVQSTIFNVQRQHLMQLQLIQHLQSQLKRAEAAALGRHSHSDEEEEEPEPEPEPKKQPTNGLKEELELEQGPESEQDQESRREENSKTDKRGTEDRKAEPEGYQSMMCDISSSLASSIITNHDPPPAPNEPNCLEMLQRRTEEVLDSASQSLHAAQMQEEYSEYASKEAQSRGEIFKHRCKYCGKIFGSYSALQIHLRSHTGERPFVCNVCGSKFTTKGNLKVHYQRHTQIFPPMLLPPGVAPNVGHSGQGQVQGEQYPIRLPFAPPVAPVGQEQHQNQVEEPEEIRQEIPVPQAEDLSKPMVKEKEKSHSPVERVKTPKEVKTDAALPSSEKPEKEISKPVVTSSRRNGSVRKRQTSAVSPPQEDRERDLVEHLHIAKLVRRSSASRESQPAEYSLAQMERIIDKSWEDLIEIDKTSETSKLQQLVDNIENKLTDPNQCIFCQKVMSCRSSLQMHIRTHTGERPFRCKICGRAFATKGNLKAHMSIHKIKPPMRSQFKCPVCHQKFSNGIILQQHIRIHTMDDGSGGQGAPAANPGEAERLGIEDQNSNKSLGTSDTLDFSTTISDHSGQRSESSQGGDFDEFMTMDSTDDSRDNSSAATATPHPLERERDREKERERRIPNDCSDERSHSNPDLTGGRSESGEMPAMDLSSPSSNSGRIFATGLANGAAGGGSGNGGLPMLGMPMPPNLLLMAAAREEMHALGHAHAKFPLLPFGPLGFMGLHPPPNVCNLCFKMLPSLAALESHLQSEHAKEPATGHAQRPQCSDAGSPYGAKLTLNPNLFAKKPPSSSSSSSGEKLPESSNPPFPAENPPATPIKEDPDQEQLMVEEGASAGEGSGTGATSNYPQEAGDAEQSLMKMQLHAHRFPASPLDFQQALMSAGPPTSSLDPPVNNKHFCHVCRRNFSSSSALQIHMRTHTGDKPFQCNVCQKAFTTKGNLKVHMGTHMWTNPTSRRGRRMSLELPMRPGPNSGQGHPGSSAEQEFMQRRPELFFPYLPPFFNGLPPKPGELSPGAFPNIPPPPFANGGKYPYPPGLLGFPGFLAQHPYILERRSSSKSPTPEPAQSPALREEEGSGNIWHPLSRIKVENNQNESMGGFNEQEDHAETDATGGDNDESESRDAEK

SEQ ID NO: 9943 - DNA, 2382 bp, DROSOPHILA
ggatgagtcctagaaggatacgtatccttttgatacagaaaactaaaaaattcgaatataattattttatttagttttttgtatttaactattttgcaaggcaaacctaataacctacccccttgacgcattttgcgctgcaccacaaaactatttgaatgtcgcagtaacataaataaactgagataatgcagttccgtttatagcattttgcataattacgcgtggcattctttgggaaatccaagctcactcttatcgaattcccccaagttcaacagaaatgcaatttttttcctgccccatcctgctgctcattatcaatttctctcctgggtgctgcatttcgcccctagcagcgagttacataagggcattgcattatgcgccgcaaaaatcccaaaatggatgcactcatttcgattgctcagttttcggtggctggcactagttggatggttaaagttgggagataaacaaccgcaagcagagcaaacgacctcacatagtttccttttacgatcattgggccgccataagtcgcaaaagtctcgtgcgaggcgagatgataaagcggcagacagtggcacaaaaaaattgctgatgcaacagagcggcatgttgcagtcagctaaatgctaagtgcgttgcagatacaaagcgctcgccaatgcacagatacaaagatactcgcggcgagggaatgccatggcacagtttttggtcaccagtcagcgacaattgcgatgcgtaaatgttgcaaactagtttcggtttccatttcgatggcagtttcaggtttgattcaaacaaaaggaaaaccgacaaatgaccaaatgctgaccatgcctaattacgcggacgccattgtgggcgctctgtttcaacgaccgcctggaagtatgcaatcaaaaacggcggccaaattacgattgcaagtgattcgcttatttgattgcaatcataatggagctacccacccaaaattattgctacatctttaatggatgcctacaatatgatactattgcttaatctaaaatttactccttactaacttactgaaaaccattgtcattaatatatatatagattttatgaaaatatattaccagttaaaatatttatcagtgcaactcacctataaacttgcactccttaatctgctcatcgctgtgatccttgcagtccgcatcgccgtcgcaaacgaatcgaatgggtatgcagtcgccgctgtggcactggaactgcttctcatcgcacttggcctccagggattggcctgcaacataaacagagctgatttagatgggcaaacaagcgctttaagccaattatagggactccgagtaacggacttactggctcaacgggccactcatgcacagagcaaacttttctcattaaaggaaaaataacaaaggctcaaattgattagggctaaaaacttcaaaaacaatcagctgcagacacagacagatatatatccgcttgcctacatatgtgtgagtgtgacaagtaatttgcatactaaacgataaaatggagggaaatggctgtggagcttttaatcaacagaaaagcctcaaacaaaatggatcacaaagttttttgcctcctccccggaaaatccaaaacataggagcccttgaaaatatgcaatacacatattcggaacgaaacaagccatcagacagacggccagaaaacccaaggaatgtcaacagttttacacagagaaaaatagcgaatgtttattataatgtaatatgtagctcaaaaaaaaaattaataatgggaaagcgttcatataagtatataatacttaggataaattttatttcattatttttttaaattgacttatgcctttttggtggactatttcttcattttcttagtgtaagaacgtaaaacaaaatgtgacacatgaaaaaaatgaatttaatagattgccattgaacaaacagagggccagcaaaaagcgataataatgaaggaggcaatattgaagtggagccgtgcgtgtggcaaaataaacaatgggatatctccgatttgcagccgtcaatcaataaggtcaaatcaattcgatttcatgtcgccgcgctggctggtcgggaattgttttcaattatacatgatgacagtcaacaaaatggcaaattataattcgagcaaatgcatgcatatatgtatttatggggcagatgggggaatttcgttgaaataattccaaatgacgtcaagcatgacgatgaatgagttcctttgccttatgcggcgggtgtttgaatgaaaaagtacaaaaataaatattagcttgcggctcacagaaggattttgaataggataatgaaaaaataataatatggaggttct

SEQ ID NO: 9944 - DNA, 189 bp, DROSOPHILA
atgagtggcccgttgagccactctgtttatgttgcaggccaatccctggaggccaagtgcgatgagaagcagttccagtgccacagcggcgactgcatacccattcgattcgtttgcgacggcgatgcggactgcaaggatcacagcgatgagcagattaaggagtgcaagtttataggcatccattaa

SEQ ID NO: 9945 - protein, 62 aa, DROSOPHILA
MSGPLSHSVYVAGQSLEAKCDEKQFQCHSGDCIPIRFVCDGDADCKDHSDEQIKECKFIGIH

SEQ ID NO: 9946 - DNA, 2925 bp, DROSOPHILA
tgcgctcctacttcggtaatagttaaagcccctctgcctatcagccccttctcactgcttgatttgaattgcagatctggactactggaggggatcatttggcagcatcatctgggtgcgcaaccatgtgatagcaccgctgagcgaggagttcgtgttccgagcctgcatgatgcccctgatcctgcagagcttttcgcccctggtcgccgttttcataacgccgcttttcttcggagtagcccacttgcatcacatagccgaacgcctgagcttaggcgtggagttgagcactgccctattgattggactgttccagttcatctacaccacgctatttggcttctattcggcctttctatttgcccgtacaggtcatgtgatggctcccatcttggtgcacgcgttttgcaatcatatgggtctgccggatctgcaggatctgtggcagcaggatctctggcgacgagtagtggccattattctctacttagctggatttgttggatggatgttcctggtaccactggctaccgatccgtcgatctatgataacaccctttactggaatgcataattaagttaatttgtatgtatcaaccgctgccatacgtcggttcattcatgtgtacataaatattcgtgcatatattatgtttatatgtaaattgcatatcccattcgagccaattccgcgcacaaaaaaaagacttccgatgaaaaagaaaaaagaaagtacagataaatgtatacctaatagtaagtcagttgtactgttttgttgttcgagagtacttttattacaactacttttgtttgcatttgtttattaaacaatttcttaacatttataaatattatttattattattattaagaaagaaatatgaattcaaatttaggcggtattattggttccgcgcaatcactagttccaacatatcggtattgggcagctggtcacactgccactcagacccacataggcttatcgatagggcccgataggcccagacaagtaaattttggtaaatatgtgatgatttaaaacgacgcacaacaagcgagcatctaaacgacccgaaaatcgagaggtcagcgccaggaggcccaatcggaggtaatcccgcagagcggcgacccgtgctagaactgggaaaacagatccgcgttctggtgacgtttgtggtctttgcccaggactacgaatgatagtaattatagaacaattaagactaacctcaaccccccggggtcatcctgggacacttgcaggccgcgcggaagaccacgtcaacgcacacgcaaatagaacccaaatcttaagcagaaatagcaacaacaacacaaccacccacccaaccgcacacagaatgtattgcctacaatgcctgctgcccgtactactgataccgaaaccctcgaatccggccctgatggaaacgcacgtgatgttcatagtcctctacctggtcggattcttcctggagcgaaagccctgcaccatctgcagcctcgtattcctcacagccgtatccctgatatgctacagtggcgtcgggaactgcatattttggggcaactgcgagggccatcaatgtgagaatggctagagggtcagcagtgcgccgcttatctttcactcccacacaaagaaagcccccgtagtcatagtcaacgaagataaagtgctaataataactacctttttacggaattacgttcgcgttgttacagctttacatcctcgaagatcggagaaagtcagaggagcaggcggatataagggattagggatagcttgactaagtcggtaaaatcaagtgatcagtgatacaagtgatgagtgagtccgaccaggaacaaagattgtgtgtctagtaatacccattgcattatttccagccctctatatgttaccttcataattctcttgattatgaattgtaattgtattgtatgttttgtttttaaagcttagacgaatttagtttatacgaagaaagcgctacgaaaacgtattgtacatcaccccacccaaaagccctacccttcaaatcaaaagaaaaaacccctatccaacccacttgtcaatgcaacttacgattagtcatatatgttatatatagataaatacattatacaaaacgtaattgtaaagaaaactaaggcaaaccacacattcactgcgcatccttgctgagttgctaagttgctgagccaacgaaagctgctgacatcggttgtaattaccctgtcgtgtgcacgtgcaaaaactgtatatacaaacaagcatataacttacaccgatcgaaatatataaacattatatacataaaatgtaaacgagagacaagcacaaatatgtaaaaacgaggaacgggcgggcgattataacttatacaaataatattgttcgatttttgcgaatttgtatgatttgagcggtatccaaaaaaacggaaagtgtggtagatgtaatgaaataaaatttaaataatgataaacatctgcaatagcttgtttaaatatttttataagtgcgggaactgttacttcgaaacctgactttttaatattgaaatagaacctattatcctggaatttatatacatatgtatattccaacgacccacagccaaataaagtacgcattttatttgatttccaattatccacaattttattcgcttcaaaatgtgagtgtgtatatagtatatatgttcatatataatgtacaaatttctcttcgctgtcgttggttttggaatttgattatatcaagatcagatcagcttcatcttcgttcttaatttactaacaactacacaagacaattaattaattaaaaatacgataataatttatgtacaaaaatttccatcggatttatttgtgtgtatttgtgaaaaacaaaactgtaga

SEQ ID NO: 9947 - DNA, 770 bp, DROSOPHILA
cccgataggcccagacaagtaaattttggtaaatatgtgatgatttaaaacgacgcacaacaagcgagcatctaaacgacccgaaaatcgagaggtcagcgccaggaggcccaatcggaggccgcgcggaagaccacgtcaacgcacacgcaaatagaacccaaatcttaagcagaaatagcaacaacaacacaaccacccacccaaccgcacacagaatgtattgcctacaatgcctgctgcccgtactactgataccgaaaccctcgaatccggccctgatggaaacgcacgtgatgttcatagtcctctacctggtcggattcttcctggagcgaaagccctgcaccatctgcagcctcgtattcctcacagccgtatccctgatatgctacagtggcgtcgggaactgcatattttggggcaactgcgagggccatcaatgtgagaatggctagagggtcagcagtgcgccgcttatctttcactcccacacaaagaaagcccccgtagtcatagtcaacgaagataaagtgctaataataactacctttttacggaattacgttcgcgttgttacagctttacatcctcgaagatcggagaaagtcagaggagcaggcggatataagggattagggatagcttgactaagtcggtaaaatcaagtgatcagtgatacaagtgatgagtgagtccgaccaggaacaaagattgtgtgtctagtaatacccattgcattatttccagccctctatatgttaccttca

SEQ ID NO: 9948 - protein, 79 aa, DROSOPHILA
MYCLQCLLPVLLIPKPSNPALMETHVMFIVLYLVGFFLERKPCTICSLVFLTAVSLICYSGVGNCIFWGNCEGHQCENG

SEQ ID NO: 9949 - DNA, 6572 bp, DROSOPHILA
gaagagtccgattacgtggacttccataaactgacatgcctgctctgcaagcgtgccttccaatcgttggaaatactccagaagcacttgaagatgtccactctgcacaaggagaacctggccaagctcaatcaaaacactagcagtagcatcgaagaggcactagcgtaagtgaaatcgcgatgtgtggtggagtatattatcattgaattcatattctttcccagctatcgtgatcgtgccaaggagcgcaggctgaagtacggcgagagcgatcctcccccaccaaataggagcagggagcgattcgagcaggagatcaagacactgcagtcgcggcaaaagcagtctactagcgctactccagccatgcccatcagttcgagcaacgtgggcagtcgactgctccaaaagatgggttggtcggagggacagggactgggcaggaagaaccagggacgcacccagatcatagaggtaactgagctgacggcaagctataaaatgaattaagaaaattaagcattttgggttccctcaggcggacggacgctccaattacgtgggcttgggcaacaaatcgggacagatgataccgggcaacgactacaaatcctatataaagaagatgatgaagcagcgctacgagaatgcttgagaaattggtttttagccgtttcacatgtttcatttcaactaaagtcgccgtttaattcagcttttcaaccgaagcaaaaattatttccatattatatatgaagcttcttgagcattgttttcctaacagattggcgtttttttaagtccacgagcaagtgtgaccgtttagttaatagtttctgattaagcgaatttaaatcctttttcgaatgtacaaaataaaatgtaacggtgtaaagtttaaatttgcttggtgttgggaaacaactgttagctggcacttggtagccctggagctatcggtcagttatcgataactggcagtcagatacttcgggtgaacggcaaaaaagaagaccgagaatttttctattcgggtttttttttttggccggataactgattgtttctgcctgaatgcaaagagacttccagttcgggaacaagtttaaccagcttccaatcctgttacagtcgtggtaaccaagtaagatgtgcgcacatagacggttcatctaatggcaaaaggccaaatcacaaacactgcatttaattacaatcgattcgcattagatatggattctcgatatggtcacagcttctcgggcggcaacggaaacggcagcgaatcgggctacagacgctacagtcgctcccgatcccgatccaggtaggtagtcctttgtccacctggagcctcttagtggattactaccaattgcgattatttcagggaacgaagtcgggaccgcaatgagtacagacgtcgcaactcccgttcgcgcagtcgggagcggtcctcacactatagaaacgaccgcagtccggatcgcgatctgtaccgcgacctgatcaacgaggattacgaggatcagggaaactacaactcgagacagaaccttgaccagcgccacggcgaggacaaatacgatcgtcggcatgctgatagccagggtcgcagggatcacgatagcaactacgacaagagtggccaggatatggataaggaccgcgatcaccgctggaaaaactacgatcgcgtttcgagagagcgcaaccatgatgacttcgatcggggatcggagcgcagcaggtaagaaatgatacatattgcatattacccatatcgtgctcagtgttatcactgagattaagattaagctaagttctatgtttccattcacaaggcttccataagaaggaggactcctctttcactagtttaaaagacctttcatttgctaatcacttgtaataaaagtcaaaataattagaaatcaacccattcagtaatgtacacttccctttgttcgcataaatgcatacaaatcatcttatgaaatattcatgctggatgcctttaattacagtggatagtatgcaaacgatggtttcaaacgaaccgaacgaaaatttattcgacaaagtgctcattgtatgaccttaaagaatcgctttcctttcagccgcagcaatgaccagcggcagttcaataataatggaaatagtaactccagcagcagttacagagatcgcgagaaggagcgcgatcgagatagacggtgttcctcggacgaggacagcgacatggccagcgaattcaggcagagaggtgcctacaacagtggcagcagcgttgagcccttgaacaacataatcctcttcggtctgaagaagcacgtcacggaagcagacgtaatgtttaagcgataagcagaacgaatgtaaaattaaccaagtaatcctccacagatcatgggcgagctgatcaaggtcgacctggagcccacatccattcgcgtgatgaggaagcaacaaacaggtgggttacatttccgtgtgttacattcgatttaaagtgaaattgtagagaaagcgtgagtattgcgtgcccagcaacatgttcgatgtaggacttatagcaatttcaattatacttggcttcgacatcagcaaaaacatatagaaaactacaaaccgaaacaaaaacacaatccccaaaaatgacacaatgctaatgatacaaccaacattttttgaccaaacattttcgtatctacttctatctaaaatttaggtgcctcacgctgttttgcatttgtcgagtttaaaaccgttgaggaggcgactcgttggatggagttaacccaggtatccctaaaaaccacaagaatcttgaatcttctcgtatccgccaaaatagaaatgacggcaagatccgatagcttggcatcaactgttgaaaaatgtgtgccttgagttcaattctgctggtgggctgcctgtcccttccatttttctgtcttagatcagggaactgaactcaaaggcggaatcgaatcttacgtaaaggaagcaaccagcatctgcgtgatgtcgaaaaacacagatgcaatcttggtgactgtgtagtctgtgaacgatttgcctgatcagcagtttcagttactaattccaattttacctcttctatttttccgttcagggagtcctccaactgggcgatcatcgtgtcaccatgcagtatagtcacactcgcatctcagactggacttgcattaaggtatgctccgttaagatacagattggcaacaataattagcttttttcgccatccttcagtgtggtgccagcaactttaagcgccgcttccaatgctacatgtgcaatgcgtcgcgggcggagagcgagaatgctctttacggagccggcgagggcgtcgacgagatcagccaaatcctcacaaaaagtatatccaccatgagcaatatctttcaatgccgtttcctagctaatcagctaaataccccactaacctgccacgctttccccatgcagagatcatgcttcgcggcttggacgcgctgacaaacgaggagggcgtgctaactgcccttcagcagcgcctgcccgaactggccaaaacagtcagcaaggtgctggtcagtcgcgacgccctaaccaatgcatctcggggcatttgctacctcaattttgacacactcattgattctatgaacgtgttcaacgggctgacggcgttggatccgccactcactctggacgacaaaacaggtaaattattacttcttaattatttcataattaaaaaacaaaactttaatccatgcccttcagttatcgtcacctactgcattgactccgaaaaccgtcaaatgatgccagccgaaggcaacttttttagagcaggtgaaacagcgatgtctccgtcggccattacggcggcctacactttggcggatgtgcctcgtcttgcggagtacagtgcatccgtgtatgcctcgaatccgttggagcatgctaactacgtccagtactatacggattattacacgactgaaataagcaagaactgcagagatcgtcaagtgacggaggccaactccggcgctgccgttgctctctcggccatccagcgcaagcaacggaaggtcagccagatggagaccacggtttcggtgacagaggcgaaggtcgccttccttgccaggggtgaaagtgctcccaaggggaatgatggcaagaaatacggtaagtgagcgcacactattctatctatgcgctcctgtaatgtcgaatatttcatgctcaatggttagatactcccgatgtgtccaagtaccagtacgacgagacctccggctactactacgaccacgttacaggactctactatgatgcccactcgcagtactactacaacaacgagacgggcgcgtatttgtactgggatcagaagcggagcacctatgtgctggccacacccgcttccactcaggcagccctcaaggaagtattagccgatgccgagaaaaaggaggaggaggccaaaaaggcaaaggagaaggaaaaagaaaaggaggaagctggggggaagcccgacaaggtgaaggtggccaagaagatcgtcaaggacatggagaagtgggccaagcagctaaaccaaaaaaaggactacacagcagtggcaacgccgcagcctatcctgtcggatactgaggcggccaccacctcccgtgcttcccaaggggcatatgctgatgtgggattctcaatccttgagaagaaggagcttggcaagctcaacgactatgtaccggaggcaggacctccagcgataagcaaattggttggtgcttatggaggaccttctgactcggaagatgataatagtgccaatcagaaagcacttgaagctagcgttgggactaaacgagccattagcgatgaatctgactacgtggacttccaaaaacttacttgcctgctctgcatgcgtgccttccaatcgctggacatcttgcagaagcatttgaaaatgtcgaatctacacaaggagaatctggacaagcttaaacggaatcccgcagttgaggctggcacggatgagggtctatcgtaagtgggaatatgctgctagaatggagataaactcactaatttacttacccgtacttagctatcgtgatcgtgccaaggaacgcaggctgaagtacggtgagagcgatcctcctccaccaaataggagccgggagcgtttcgagcaagagataaagactttgcagtcgcgccagaaggattcttttggcgccactgcagccatgcccatcagttcgaccaacgtgggcagccgcctgatgcagaagatgggctggtcggagggccagggactgggcaaaaagaaccagggacgcaccgagatcatagaggtaggagtcgacgagggcgacgaatggcaaaatatggataattcaatgtcaatgtgtatccacaggctgatggtcgttctaacaacgtggggctgggcaacaacactggccatatggcgcctgggaacgactacaaatcctacatcaaaaagatgatgaagcagcgttatgagaacgcctgagactcttcttaaagtgtatgattttattccgcttgaatataggggcatttaagcattgttgtttacctcgattacacttcctccaccttgtcgcgttcatttagcattagttgcgaagttcaaattgtaaatagttcgtaaatacagtctcaaattaggtttaaatttaaattgtaaatgctttaagtatggaattgtgcaagggaatctaaatctcgtccatgtagccatgctcataggcgtgacgaacggtcttgaagatctcctggttcgcctcatcgccagcgatgtccaaggacaactggtggaaggcggggccgtgcatatccgtctcgaagaggcgggacaactcggcgcaatccttctcggtgccgagcagccagggaaggaagtgcatgcataccattggtccgtagaaggcatatcgtttgaagtgggcattgaagcgttcgaagctgtattcctgtagcaactggtccacccgatcgtcggtcaactcgttccggtttcggcgcagaaccagttccaacatttcgatcatgcttcgatggtacttgcgcaacaagtcggcgtagatctccttccttccttcggatggcgtgttcatgtacataaagaagctcaggtcaatggccgtagtgctgaagcgcagctcctggaaatcgatggctttgatagcgtccaccttatcttcagcgccgtagtggaacagcacgttgttcctgttgtagtcgccgtgcagaaaggtggcaaagtggctgtccggttgatcttcggcaaaggagctggtgcggattctctccagcaggagagttggctgcttgaagtacttctcccgcagtcgctcgatggcggccccgaatccggggtctgccccctggaggagctgctccttttgccggtcgtagaactcgtagaaccgatcgaaagccacgcgatagaggacatcaaagatgccctttcctgagctggacacgaagggcatgtccaccactccggc

SEQ ID NO: 9950 - DNA, 2989 bp, DROSOPHILA
aacggcaaaaaagaagaccgagaatttttctattcgggtttttttttttggccggataactgattgtttctgcctgaatgcaaagagacttccagttcgggaacaagtttaaccagcttccaatcctgttacagtcgtggtaaccaagtaagatgtgcgcacatagacggttcatctaatggcaaaaggccaaatcacaaacactgcatttaattacaatcgattcgcattagatatggattctcgatatggtcacagcttctcgggcggcaacggaaacggcagcgaatcgggctacagacgctacagtcgctcccgatcccgatccagggaacgaagtcgggaccgcaatgagtacagacgtcgcaactcccgttcgcgcagtcgggagcggtcctcacactatagaaacgaccgcagtccggatcgcgatctgtaccgcgacctgatcaacgaggattacgaggatcagggaaactacaactcgagacagaaccttgaccagcgccacggcgaggacaaatacgatcgtcggcatgctgatagccagggtcgcagggatcacgatagcaactacgacaagagtggccaggatatggataaggaccgcgatcaccgctggaaaaactacgatcgcgtttcgagagagcgcaaccatgatgacttcgatcggggatcggagcgcagcagccgcagcaatgaccagcggcagttcaataataatggaaatagtaactccagcagcagttacagagatcgcgagaaggagcgcgatcgagatagacggtgttcctcggacgaggacagcgacatggccagcgaattcaggcagagaggtgcctacaacagtggcagcagcgttgagcccttgaacaacataatcctcttcggtctgaagaagcacgtcacggaagcagacatcatgggcgagctgatcaaggtcgacctggagcccacatccattcgcggagtcctccaactgggcgatcatcgtgtcaccatgcagtatagtcacactcgcatctcagactggacttgcattaagtgtggtgccagcaactttaagcgccgcttccaatgctacatgtgcaatgcgtcgcgggcggagagcgagaatgctctttacggagccggcgagggcgtcgacgagatcagccaaatcctcacaaaaaagatcatgcttcgcggcttggacgcgctgacaaacgaggagggcgtgctaactgcccttcagcagcgcctgcccgaactggccaaaacagtcagcaaggtgctggtcagtcgcgacgccctaaccaatgcatctcggggcatttgctacctcaattttgacacactcattgattctatgaacgtgttcaacgggctgacggcgttggatccgccactcactctggacgacaaaacagttatcgtcacctactgcattgactccgaaaaccgtcaaatgatgccagccgaaggcaacttttttagagcaggtgaaacagcgatgtctccgtcggccattacggcggcctacactttggcggatgtgcctcgtcttgcggagtacagtgcatccgtgtatgcctcgaatccgttggagcatgctaactacgtccagtactatacggattattacacgactgaaataagcaagaactgcagagatcgtcaagtgacggaggccaactccggcgctgccgttgctctctcggccatccagcgcaagcaacggaaggtcagccagatggagaccacggtttcggtgacagaggcgaaggtcgccttccttgccaggggtgaaagtgctcccaaggggaatgatggcaagaaatacgatactcccgatgtgtccaagtaccagtacgacgagacctccggctactactacgaccacgttacaggactctactatgatgcccactcgcagtactactacaacaacgagacgggcgcgtatttgtactgggatcagaagcggagcacctatgtgctggccacacccgcttccactcaggcagccctcaaggaagtattagccgatgccgagaaaaaggaggaggaggccaaaaaggcaaaggagaaggaaaaagaaaaggaggaagctggggggaagcccgacaaggtgaaggtggccaagaagatcgtcaaggacatggagaagtgggccaagcagctaaaccaaaaaaaggactacacagcagtggcaacgccgcagcctatcctgtcggatactgaggcggccaccacctcccgtgcttcccaaggggcatatgctgatgtgggattctcaatccttgagaagaaggagcttggcaagctcaacgactatgtaccggaggcaggacctccagcgataagcaaattggttggtgcttatggaggaccttctgactcggaagatgataatagtgccaatcagaaagcacttgaagctagcgttgggactaaacgagccattagcgatgaatctgactacgtggacttccaaaaacttacttgcctgctctgcatgcgtgccttccaatcgctggacatcttgcagaagcatttgaaaatgtcgaatctacacaaggagaatctggacaagcttaaacggaatcccgcagttgaggctggcacggatgagggtctatcctatcgtgatcgtgccaaggaacgcaggctgaagtacggtgagagcgatcctcctccaccaaataggagccgggagcgtttcgagcaagagataaagactttgcagtcgcgccagaaggattcttttggcgccactgcagccatgcccatcagttcgaccaacgtgggcagccgcctgatgcagaagatgggctggtcggagggccagggactgggcaaaaagaaccagggacgcaccgagatcatagaggctgatggtcgttctaacaacgtggggctgggcaacaacactggccatatggcgcctgggaacgactacaaatcctacatcaaaaagatgatgaagcagcgttatgagaacgcctga

SEQ ID NO: 9951 - protein, 936 aa, DROSOPHILA
MAKGQITNTAFNYNRFALDMDSRYGHSFSGGNGNGSESGYRRYSRSRSRSRERSRDRNEYRRRNSRSRSRERSSHYRNDRSPDRDLYRDLINEDYEDQGNYNSRQNLDQRHGEDKYDRRHADSQGRRDHDSNYDKSGQDMDKDRDHRWKNYDRVSRERNHDDFDRGSERSSRSNDQRQFNNNGNSNSSSSYRDREKERDRDRRCSSDEDSDMASEFRQRGAYNSGSSVEPLNNIILFGLKKHVTEADIMGELIKVDLEPTSIRGVLQLGDHRVTMQYSHTRISDWTCIKCGASNFKRRFQCYMCNASRAESENALYGAGEGVDEISQILTKKIMLRGLDALTNEEGVLTALQQRLPELAKTVSKVLVSRDALTNASRGICYLNFDTLIDSMNVFNGLTALDPPLTLDDKTVIVTYCIDSENRQMMPAEGNFFRAGETAMSPSAITAAYTLADVPRLAEYSASVYASNPLEHANYVQYYTDYYTTEISKNCRDRQVTEANSGAAVALSAIQRKQRKVSQMETTVSVTEAKVAFLARGESAPKGNDGKKYDTPDVSKYQYDETSGYYYDHVTGLYYDAHSQYYYNNETGAYLYWDQKRSTYVLATPASTQAALKEVLADAEKKEEEAKKAKEKEKEKEEAGGKPDKVKVAKKIVKDMEKWAKQLNQKKDYTAVATPQPILSDTEAATTSRASQGAYADVGFSILEKKELGKLNDYVPEAGPPAISKLVGAYGGPSDSEDDNSANQKALEASVGTKRAISDESDYVDFQKLTCLLCMRAFQSLDILQKHLKMSNLHKENLDKLKRNPAVEAGTDEGLSYRDRAKERRLKYGESDPPPPNRSRERFEQEIKTLQSRQKDSFGATAAMPISSTNVGSRLMQKMGWSEGQGLGKKNQGRTEIIEADGRSNNVGLGNNTGHMAPGNDYKSYIKKMMKQRYENA

SEQ ID NO: 9952 - DNA, 3615 bp, DROSOPHILA
tggtcatgttaggcctacttcagttccatcgtaacccgtatcctttggattcacgcagtttgccgcccttttggttgcctgcatctgtgttcagttcatcatctgcggctggtcgctggccatgagggagaacctgcccacttccgtggagatcttcatcgacgactcctttgtcgagttcttagacaagttttcgcgcaccaaggtggataacctacatctgtggaataggatgcagtcgcaggtgagccaagagcgggctatgtaaatctagtggttttggggtatcctaacgtagagatggcgttccaattcatccccgttccctacccattagttgcaatgctgcggcgtcgacggacctctcgattaccgccgactttcgctgccctggtcctgctgctcgcgcccggagcacgcctacgagtcagcatgtgatacccactacaagcgcggatgcctggccgtcgtatcggagcagatcaggaaccgcctgctgatcaccgccttcggagctgccatcatagccatattccaggtgagtcccccccaatggattctctctcaactctcagttagttgaccaataataaattgaaaaccaattcgcacagagcctgggaatcttctgtgctgtccacctgaccattctgttcggcaagaacgacaacacccatcccatgaacatgaaccggaaaaagaagcagcagcagttcttgcccctgaccatacaggacaagaggcacgacatgccctcgcccatcaatctatccccttcagcacccgggcagcgggttttaaaaactgctctgccctcggccatgcacaaatgacagacgattagcttttaaggatgcaaaaatttatggaaactccaaagaaaaagtataaaaaaaatgttgtaaactgagatggaatgaatataactgtgaccctcaatgttacgttatggtaattttaaacaatttaacgttcgagaaaagaaacaacatttgaatttggattaactctccagtagtttaattaaagcttaaaaacaattggatctaacttgtttgtggccaggagttgtcgtgggtccacgggttgtccactagccgttgtgcgtgatagtcggcggcacatagaaggtgtctgctgccttgggcttcttctttttgccgaaccagcgcttgggatagtagaccttcttcttgtagatctggatgtcgatgtcgtcccggttctcgaagaaccacaggttctgccgcttcgcctccagttcgctgagggtcttctggatggtggccttacgctcctccacgctctgcgaatccagttgtcgctgcaccgctgcctcaaacttcttggcccactcctgatacgactcgccgtagtcggccagcagtttgggctcaaacttctgcacattggctttgacgctgttctccagtagcgattgaatggcattcgatttgctactcttctcaacggcttcctgcagggacttcagcagctcttcggatccctccagcttgaggctttcaactatgctctgtgcggctaaaagagtctccttgtgcagggcagctgagttcgaggccagaaagctggaggcctcgggcacttgtccggttaggacatagccaagtagggcaacgttctgcttcagctctttcaaggacccttcgccggagcccaatcgaaccatggcgcgacccagtttcttctcttcggtattttcgctggcgtcgtcggggtaattgcgaatgaacttcacgcgaactttttcctagcaaattcaggtatgattagtaaacttggtaaaatgccaaaatgaacaaaatcttaaatagctatttatgagtgaataaagtttccagccgcttagctgataattcagccactatcgaaaatcatcttaccacttcaacatttttggcaggaggttgaacttgagaggactcgaagggcttgaactccttggcgaaggaccagaaggactgtagggccagggactccagcaactcgttgttgcataagtttctgtccacgagaatagtggccagctgggcagattccaccgcgtggccattgtgcagcaggaagtccaacaggaagcagccagagaactggtccacaaagagcccgtactggatgggattacggagcaccgatatcgtctcctgcggattggtggagtccagcaattgcttgaccaagacactgggaatcagcggcaccaaactggcctccttctgtttcctgcaagagttatcttatgagtagggacactacttccaatatggccgcacccacctgagcttgagcagccggtccaccaggtccatgggacggttatccggattgacgaacacatccaaatccacactcgttacggcatgactgctgcctgcggcgaatttagccggtccctcgtgcgccaccttgttgaattccgccgagaagtaggacaccagtctcctgggtggcagtgcgcaggaaatcctcgatcgcagcattgtcaattgtcttttttaattcataaagtgttataaccagccgattaacaaataacatgcagctggccaaaagagcaacaaaatccctagcgcgttcgccagttaataccgcagatagcggtattttcgtattcgaaagcattgagggtatttcgacttataatatgttgctttttccgggaacgatggaattgaaaatgtccttggaatatttgaataaaataattaatttgaattcttttattctaaatgaaaaaacacataaaataatcaaatcaaattgcaacaaaactatttaaaaaacggaagagtacgttttatatatagttaaaaggctaaatgatatttgtatatttatgtatatatttaatatctgtatatacgtttcactaatgaagtgtagaaaaatgtaaaatgaacaacgatttcacagtttattaaaatcattcgagggtgttgaaaggcgggcactacttataaattgcaatattaagttatacatctgggcacatatgatttcaataaactgcaattcaatcttgatcttgttaattagatctgaaaggtattcaccgccaatccctgcggtgggcactccacaacaattgctatattgagcgcaccgaatcgccaccatcaactgattacacgccctaatgccgatccaatccactttttccacccgataatgggatgacaatttacccctgaagggcgtgaggtttggtacttgtagatggtgacccttcaacccccattcaagtccttgtttttcttcccacaggcttagccggctgagccctcaaaagggtgctaagccagttgtcccggatgatatgaaaacaagcaaagtgttacacagatcttatttatttaacgcaattcgctccaaatagtcagtaaaaataatatcaaaataactgcattcatcaaaatgtatactaatatttacatagatattagtggattctatatttgatcgtataagcatttcatttgacggccatggccattctggggtcccttgagagatgggcccaggtatttcgatcctgctacaggattcttccggccatccaatttgctcgacttgtccttcattatgtaaatggca

SEQ ID NO: 9953 - DNA, 1428 bp, DROSOPHILA
ctgcggtattaactggcgaacgcgctagggattttgttgctcttttggccagctgcatgttatttgttaatcggctggttataacactttatgaattaaaaaagacaattgacaatgctgcgatcgaggatttcctgcgcactgccacccaggagactggtgtcctacttctcggcggaattcaacaaggtggcgcacgagggaccggctaaattcgccgcaggcagcagtcatgccgtaacgagtgtggatttggatgtgttcgtcaatccggataaccgtcccatggacctggtggaccggctgctcaagctcaggaaacagaaggaggccagtttggtgccgctgattcccagtgtcttggtcaagcaattgctggactccaccaatccgcaggagacgatatcggtgctccgtaatcccatccagtacgggctctttgtggaccagttctctggctgcttcctgttggacttcctgctgcacaatggccacgcggtggaatctgcccagctggccactattctcgtggacagaaacttatgcaacaacgagttgctggagtccctggccctacagtccttctggtccttcgccaaggagttcaagcccttcgagtcctctcaagttcaacctcctgccaaaaatgttgaagtggaaaaagttcgcgtgaagttcattcgcaattaccccgacgacgccagcgaaaataccgaagagaagaaactgggtcgcgccatggttcgattgggctccggcgaagggtccttgaaagagctgaagcagaacgttgccctacttggctatgtcctaaccggacaagtgcccgaggcctccagctttctggcctcgaactcagctgccctgcacaaggagactcttttagccgcacagagcatagttgaaagcctcaagctggagggatccgaagagctgctgaagtccctgcaggaagccgttgagaagagtagcaaatcgaatgccattcaatcgctactggagaacagcgtcaaagccaatgtgcagaagtttgagcccaaactgctggccgactacggcgagtcgtatcaggagtgggccaagaagtttgaggcagcggtgcagcgacaactggattcgcagagcgtggaggagcgtaaggccaccatccagaagaccctcagcgaactggaggcgaagcggcagaacctgtggttcttcgagaaccgggacgacatcgacatccagatctacaagaagaaggtctactatcccaagcgctggttcggcaaaaagaagaagcccaaggcagcagacaccttctatgtgccgccgactatcacgcacaacggctagtggacaacccgtggacccacgacaactcctggccacaaacaagttagatccaattgtttttaagctttaattaaactactggagagttaatcc

SEQ ID NO: 9954 - protein, 406 aa, DROSOPHILA
MLRSRISCALPPRRLVSYFSAEFNKVAHEGPAKFAAGSSHAVTSVDLDVFVNPDNRPMDLVDRLLKLRKQKEASLVPLIPSVLVKQLLDSTNPQETISVLRNPIQYGLFVDQFSGCFLLDFLLHNGHAVESAQLATILVDRNLCNNELLESLALQSFWSFAKEFKPFESSQVQPPAKNVEVEKVRVKFIRNYPDDASENTEEKKLGRAMVRLGSGEGSLKELKQNVALLGYVLTGQVPEASSFLASNSAALHKETLLAAQSIVESLKLEGSEELLKSLQEAVEKSSKSNAIQSLLENSVKANVQKFEPKLLADYGESYQEWAKKFEAAVQRQLDSQSVEERKATIQKTLSELEAKRQNLWFFENRDDIDIQIYKKKVYYPKRWFGKKKKPKAADTFYVPPTITHNG

SEQ ID NO: 9955 - DNA, 3048 bp, DROSOPHILA
tgacataatcagtagccatttagaagaattctacattaggaagggcggtacttttcgcccagtgcatggaaacccatgaaattgccgcgcaaaggtcaagtcaagtgaaattggttgggaaaaaggcgagaaagcatgcgacggaggcgcacagtgaagaaattatgtcaaaatttgaattagcagctgggaaaataaaatggcgcgaccagaaagacaatggcggcgcataaattaatttccctatcagctgcagcctcggaaaagtgcattcgcttttcactttcgtgtcgcctgctgcggctccgaattggattggtctgggtgggattggattggagtggagtggagtggacgggttgtgtgggctgtggttcagtttccagctgtttgcgagaatcgtttcggggcgataaagccgttgacagaagcggtttccctttttgagcgctgcggtttcgcccttggcgtgcggtgaaaatgcattttcccagcgatgccgaagaatggggaaaactgcattagaaatgaggaaaaacagtcgcccgtgaaaattggttttcggttggtggtttttcccacttcagataatggtctttcctgatttaaaccgaacgtcattgttttttcttcaatacgttgaatattatcaaataatgatcaccttgatctttcaatttaaaatttcaacgctttgcatcatcaaagttatcgactgttgatttcgataggtgtttaaatgatagtaacggtattttttagttaatttttaagtttaagtcaacagtgctgccaagatttcaaactaaataagcttttgtaagacaaaaatgtacaatgagtccaattttcaaaattgatagagtacagtcacagtatttaagcttaatatatttctaatatatattatcagaaattaaaacattgcttaatatagttatttccacaacaatattcctaaaacctggcatccctggtcagtgcattctttgatcgttagtaagatactaagttgcattccaattataattagaatattttaatttgcaagaattactttgttttaaaaccatttcattgccaatatgagcagctctacgccagcttactacaatgcggatgctgtgcgtcaggttctcacctggccgctggtcaataaggcagtggaatctgcacttgtagctatagttaagcagaatccggaaacgccctccacatcctttgcctttcaaccgaagaggacttttattccatgcggcaaggaacctggcaaggttctgctcaccatgcccgcctatgtgggcaactacaggctggaatcgtcaagggatcctggggaagtggagcacacccactcaacactggcctgcaagttggtgacctcgttcagtgggaatccccgacgggatcctccgctgcccagcatccatgcccatgtgctgctgttcgacaatcaaaccggtcaactgtcggccataatggagggcacggacttgaccacctggcgcactgtatccgcttcactggtggccaccaagtatctgtacttcaggcgctttggggcgcaggcggagcaggaaaggaatatcaacgtggccatcgtgggctgtggagttcaaggacaactccatgctgccgctttctgcgcgaacttccgggtgaggcagcttaatctttacaatcgcacgcaggcaaaggcactgggtttagcggaccaactgcggcagaaattgaacaccgagagcggaacccagattactgtatgtccaagtcctcacgaagcttgccaggatgccgatatcatctgcatcgccacgtactccaaggagccgcttatccagttggcagatctgaaatccaaacgggctgttcatattaacggtaggtctgctgttataatggaatgctggatggatgatgatgacctaccctttataactttcgatttcagctgtgggagccggcgaagttcacttttcggaggtggctccaaagatttaccagcaggccaaggtctacgtggattgctatgccaatgccgaggctgaattggtgggattacctgcgccgatcaccgctgaagtgggtcagatcattctggatggaaactatcccaaggagctagaaatcagcatctttcaatccatgggtgcgtttttattaagtttgtgtaactatatgactatctctgtctgtttcaaagttgtatcattaaaaatttcatacatttcctatttaaggcatggcctcggaggacgcctgtgtggcccaggcggttcaggattgcattatctctagcgcaaaggattcctgattgctgtccagctggcaaagcgattccggaaccagcccaagccaaaccagtgaattcttaaactttaatgtgtatatgcgcgtatataaaaaagcatttggaaacataacaatcggttcgcttacaaactacaacaaacccaactggccggagaagtccttccggtcgtcacttccagatcacagtcacattcgtgtccttctcgatatcccgctcgatggtgcagggcgagaggcccgtcttgcagcagatctcgtcaaagctgatcagcccggtgtacatcttctgccgcccggaaggcactgagcccgtaaacaccgggtacttgtggatgcagcgaatgaatcggtgctgcagcccgaagatcaccatgcgacgctcatcgatgttgtggtgctgggggcacaatctctggcagatcgctcgcagagtaacgccgtgagtcatcgaggcgtagaactgaaagatgcgctgaacactgggcagcgtcttgtccggacgcaaggccacgtatttccggcatgcgccgctcagtgatgcgctctggatgagatgctttaggttctgcgtcatgtacacgttgctgtacttcaggattggcagcagctgaacgaccccgtagtagaccagattctgtatgcacgacttgaccaggtccgtttccacgtccgcttcggcggcaatgcgggcaacatggttgattccatttatataaggcaggatctagaggaaac

SEQ ID NO: 9956 - DNA, 1048 bp, DROSOPHILA
taagatactaagttgcattccaattataattagaatattttaatttgcaagaattactttgttttaaaaccatttcattgccaatatgagcagctctacgccagcttactacaatgcggatgctgtgcgtcaggttctcacctggccgctggtcaataaggcagtggaatctgcacttgtagctatagttaagcagaatccggaaacgccctccacatcctttgcctttcaaccgaagaggacttttattccatgcggcaaggaacctggcaaggttctgctcaccatgcccgcctatgtgggcaactacaggctggaatcgtcaagggatcctggggaagtggagcacacccactcaacactggcctgcaagttggtgacctcgttcagtgggaatccccgacgggatcctccgctgcccagcatccatgcccatgtgctgctgttcgacaatcaaaccggtcaactgtcggccataatggagggcacggacttgaccacctggcgcactgtatccgcttcactggtggccaccaagtatctgtacttcaggcgctttggggcgcaggcggagcaggaaaggaatatcaacgtggccatcgtgggctgtggagttcaaggacaactccatgctgccgctttctgcgcgaacttccgggtgaggcagcttaatctttacaatcgcacgcaggcaaaggcactgggtttagcggaccaactgcggcagaaattgaacaccgagagcggaacccagattactgtatgtccaagtcctcacgaagcttgccaggatgccgatatcatctgcatcgccacgtactccaaggagccgcttatccagttggcagatctgaaatccaaacgggctgttcatattaacggtaggtctgctgttataatggaatgctggatggatgatgatgacctaccctttataactttcgatttcagctgtgggagccggcgaagttcacttttcggaggtggctccaaagatttaccagcaggccaaggtctacgtggattgctatgccaatgccgaggctga

SEQ ID NO: 9957 - protein, 320 aa, DROSOPHILA
MSSSTPAYYNADAVRQVLTWPLVNKAVESALVAIVKQNPETPSTSFAFQPKRTFIPCGKEPGKVLLTMPAYVGNYRLESSRDPGEVEHTHSTLACKLVTSFSGNPRRDPPLPSIHAHVLLFDNQTGQLSAIMEGTDLTTWRTVSASLVATKYLYFRRFGAQAEQERNINVAIVGCGVQGQLHAAAFCANFRVRQLNLYNRTQAKALGLADQLRQKLNTESGTQITVCPSPHEACQDADIICIATYSKEPLIQLADLKSKRAVHINGRSAVIMECWMDDDDLPFITFDFSCGSRRSSLFGGGSKDLPAGQGLRGLLCQCRG

SEQ ID NO: 9958 - DNA, 6108 bp, DROSOPHILA
ttttgcatggtgtttgtatcagctagatgtggttcgtgtctctgctaaatgaatcgtgtctaattcacagtgaatgtgttggttgatacatggtggttgtatcagctaggcgtggttcgtgtctccactaaatggactgtgccaaattcgcagtgtgaccatatataataataccacccaggcccagtgtgaccgtgcaaccgcccagcaaaaatgacacagccacgcaaacgcgatagtatcgcggccgtataaaaagcggcgctcaccgccgagcgccagtattaaatttgtgacgtcaagagctccgcttcgccaccatcgaaggcccagcttcgccaagtgtacagctatacatagaaacatatatcaggccgaccccgccagcatcccagcttagtagtccgcttcgccaatccaaaaaaaaaactaaatcaaggtgagtttcatttctacttgcagattgaaatttttatttttgtcaattttcgttgatttcgttaagtttgggggatcgccggtaatttcgtttttgccattgtaagatgcggtgggggtaatggggaatcctaactggtttttgttgactgcgcttcttcgttgattgcgaaaatggcagcggatttgttataaatatttattgtgcttgtctagtccgttactttttcatctttctcctcgtttccatttcttttctgctactttgtaacttttttccgcagctgttgaagcgcttttgtcgtcgccccttttgttgactattattttttgttttttttttgtgtggctcaaactttagatttgcgcgtgtgtgtgtgcgagtgccggccggcatttttaacttcttttttttccgccgtctgcttgccgctgtgtgtatgcatgtgcatgtgcatatgtgtgggtacttgggcggggcgcatgtgtgtctctgcccaatatcctcccccacagtgagcggcacgagaaaagtgtcctgcaaattaattaattcatttagtgccttgggtatcgcagactacaaatattgcagtcgaggaacttggaatttgaattgttaaagaggcgttggcgaaactctcgctactccaaagtagagccattttttaaacaactaagttcgagcacttcttgctggcgaattggcaacgaaaagtgaactgggaaagatagaaagatgggatagatgtacatatgcacatttcacaaggatgaagtcactatctgtgcgacctcgactgtgcgatgtgtgtgctggcgagtggcgaattgtgctgggcgtggtgctgtgtcacttggatatccaatatccagcgattttgaaattgaatatatgactaaacgcagccgcctgcataaaatgtgtatataatgtgcgcaacaacaaagtgcttaaaattcattgcaagtcgccgattgcgcctccctttcgttctgtctacccccctctctttctcattgtctatcactagctacacacacacacacacttgtgcatttctgcaggagatgagggtgtaaatgcaaagcggacgtgtctgtcatttctcatttccccatctctccggcgctccagctcctttgctttgcgctctctccaccctttcttctcgcctcctttttgcactccgttcgtcggctgtttgccacgcatcagcggctttgactcattttattttacatacatatgtatgtaagtctgttaagtacgtatgtacgtgtaaatgtgcatattcatattcttattcccaaaaaaatttcagtgtcttttgtttttaacggtctcttggcgccgtctcactcacacccccgaaaagagccaaaagatttacatatgtatgtatatctgttagggaattaaccaaaacaggaagaaagaaagcaaaagaaaagcttacaaagtcgggcgaagaagaagcacagctgtgtgggcaacgataaattcaccagcaaacatatgcacatatgtacgtacatatctatgtttggatgtatgcaatgtgcggtgattcatcaacggcttttaagcgggacgaccatatttcgaatttcgaagttggaagttgattcacggcgaacttcattgcccccacccccgtgaaaatcaccccctcgccgccccgaatcgccatagctcccactttgtatgtatgcgacgttgttgttgttgttggcctctcctttgttcggtgcaaggagctgactaataagacactcgtttacacgatgaccaattaatcgaactttaaacggagcgatctaaaacaccatcgatctacgtataggaatagtttcccaatgagtttacatattgaatctttattgttcagttgccgttttctcattattggctcattgctgttattttggtaccgataaagaattgtgagcaattcagcagcattatcagaacaaagattggcgggccaaataatgttgaattaatcatcatcacttactgcaaatcaattgatttttggattggtcatagtatttgtatcggagtaaggaatatttgtgggattgcagcaagtcaggcctagattcgtgataaaagtgctgcatgaaccgagcggactacgatacgattttgcgccaggggaagtggaagtggggagagcgggaaaatcggcggccgttagtcagttagtcaatcaacgtgattggccagccgcttgaggcgcagctttccgaccatttatggccataaatgtgcaaataaataaatatatagattcgcgatgccttttctccgcttctctgcttcttctccgttttgcttttggtgcggtcgctgcccttgtaccgattgcattttagcgcagctgttccatcgaatgcaatgcagtcccaatccgactgatgacttgataccaataagatatcggtgcacaaagaggattctttgtccggcgcaactctgattggaactcggggggcatgctatgtggcacgcacactcgaatttcgcaactaaaaataaacgtgataaaatgcagtttaaccgctcgaccaagtacacatgtcttctgataagaatgccagtgctaaaaaacaaaggccaagaacggcagcaaagcgaattggagtcttaatctgtttccagttggaaaggttcgctgaactcctcgctctctccgctccggaccgtttcctctttctttctccctccttctgataggaacacacactagcatgactcgtccttgctgcgcctgtgtgtgtgtgagtgtgtgcgtgcctttgagtcatcgttatcgccccacatttctccacatggctatcgcttgagaaatcaacggtcaacaaagagatattacgtttctgtttaaagaaaatgaattatttattaaggcgcaacacagtatcaacaaaagcaaacagtgaagagcaacaaattgtcaatcggaaagttggcttcccctttctcaccaataacatcgatatcctcttccggcttggctccaattggatttgttgtttctaacttgaaatgtttacatagggaattcgtttgcttttcaattgttaataaggtaacaaaaaggcgatccaagccaaacagtaattgtaacagtaactttttgtatgcttcgtttgttgtattccttaaattcctttttcccatgaactattaatttagtatcaatattctttaagactttgctatctaaggtgaaaccactatcataattcccatatcaattggttgtgtcagcaaactgaaacgaagatcttaactagtgatcgatcagcaattaaagctacaagaaaaataaatgatcccaaagaatagatacgtttactatcaaggcaagtaatttaaaattcatcaaaaaactttatgtgttcagatggccgccccagcaccagcactcaaggatctgcccaaggtggccgagaacctgaaaagccagttggagggattcaaccaggacaaactgaagaacgctagcacccaggagaagatcattcttcccaccgccgaaggtgagttggctattgttggttggtgaaaggccgaaaccatgaacaccgaaatctaatccccctgactcacagatgtggctgccgagaagacccaacagtcgatcttcgagggcatcaccgctttcaatcagaacaacttgaagcacacggagaccaacgagaagaacccgttgcccgataaggaaggtgcgttcattgtaggccatctagtatgttgcatattgtacatacatatggtccggccataaaaggcagcctgccttagatggccaatgcaggctctataattgtgttgttatttctctatttctcaacctcaaattgcagccatcgagcaggagaaggagaagaatcagttcatcgccggcatcgagaactttgatgcgaaaaagttgaagcacaccgagaccaatgagaagaacgtgctgcccaccaaggaggtgatcgaggccgagaagcaggcttaaaatgggggctccaatgtggtccactccgatccgagatccgagatctgagatccgatccgatccgatcctcagtcaccccatctctctttttcgactcgccgcatctcactctttatacgtataaagctattccctctcatttttcaactgctaccaagttattcgaaccgctgcgcatgcgcgtgatagcaaaagtattttactattatcgtatttcggttgtccgttttttttttttttgcaatatttttacacatatatatatatattttttgtattaacaagcaagagagccagtctcattcctacagcgtaattaacataaaataaacattcgtctatcccatatatatttgtgcataaatgtttccaaaacacacgacaaacacacacatcatcatcggaggaagaataaaacgcagatacaaagcaatacgacagccaactcactcagaacatttacacaagaaaagacagcaaatatatgagaaatactttttaaaagacacgcaaaacgtatgaagcgtataaaacagaaaaacaaaaagaaatacggtagaaaagcatctatataaagagtatgtgtaattttttaatgaacttttttttatatactttacatacgatatatttatactgggaaaaataaaaaaaaaacataaatgtaacattttataacaaaaacgtactaaaactgcaccgacttttgctttcttcgggggcggaaaactctcaaacaataaaagaaacacaaatggttgtaatacgggaagtatgaactcttgattcgtggtaaatatacaaatatttgcttaaatcaaagacactagaataacaagatgcgtaacgccatacgatatttttgcacacgatttttttttatttattctatcgtctttgcttaaatgctagatttcatagctactcccgacaaacactaactggtggccaccacttcggtgtccattggtgtgcctgttgtctcggcggccactgtgacatcaatagcgccactgccagagaatgtggactccgtggcgtcaccatcgccggaggaatcggcttcggcctcggcactcttgccgacttcagcgtccgctgcagcagcagccgccactctcgcgtcctcgtacttattggtctcaaacttgctgagatcagcgcccagcagtcggagaatgtggatggtctcgtccttttggacataggcgcgcagactggaggtgccgcgccagcccaccgtgtacaacgtaaaccgctggtccacgtacttaagtatgcagctgcccacccctgaaatggaacatcattattagccaaccgtcagagcataggaaccggttgaacttacccaattccttgcagcgctcctgggtttccttcttcagttcgtgagtcgacggcggctgcgtgggatcagtgcaattgagcatcattaccaggtcctcccgctccacctggattctcctgctggcgcccatgaaggcattggaggtctggaggccctcctgggccaatcggaagggatgcaccgtatgccggttctcgcagcgcacgaatgtcttaacgcccgtgttgatgatcttaatgttgttttcgttgttaagcaccaaatcgcggatgggttcagagcagtaatagatgttcttct

SEQ ID NO: 9959 - DNA, 1134 bp, DROSOPHILA
tgccttgggtatcgcagactacaaatattgcagtcgaggaacttggaatttgaattgttaaagaggcgttggcgaaactctcgctactccaaaatggccgccccagcaccagcactcaaggatctgcccaaggtggccgagaacctgaaaagccagttggagggattcaaccaggacaaactgaagaacgctagcacccaggagaagatcattcttcccaccgccgaagatgtggctgccgagaagacccaacagtcgatcttcgagggcatcaccgctttcaatcagaacaacttgaagcacacggagaccaacgagaagaacccgttgcccgataaggaagccatcgagcaggagaaggagaagaatcagttcatcgccggcatcgagaactttgatgcgaaaaagttgaagcacaccgagaccaatgagaagaacgtgctgcccaccaaggaggtgatcgaggccgagaagcaggcttaaaatgggggctccaatgtggtccactccgatccgagatccgagatctgagatccgatccgatccgatcctcagtcaccccatctctctttttcgactcgccgcatctcactctttatacgtataaagctattccctctcatttttcaactgctaccaagttattcgaaccgctgcgcatgcgcgtgatagcaaaagtattttactattatcgtatttcggttgtccgttttttttttttttgcaatatttttacacatatatatatatattttttgtattaacaagcaagagagccagtctcattcctacagcgtaattaacataaaataaacattcgtctatcccatatatatttgtgcataaatgtttccaaaacacacgacaaacacacacatcatcatcggaggaagaataaaacgcagatacaaagcaatacgacagccaactcactcagaacatttacacaagaaaagacagcaaatatatgagaaatactttttaaaagacacgcaaaacgtatgaagcgtataaaacagaaaaacaaaaagaaatacggtagaaaagcatctatataaagagtatgtgtaattttttaatgaacttttttttatatactttacatacgatatatttatactgggaaaaataaaa

SEQ ID NO: 9960 - protein, 129 aa, DROSOPHILA
MAAPAPALKDLPKVAENLKSQLEGFNQDKLKNASTQEKIILPTAEDVAAEKTQQSIFEGITAFNQNNLKHTETNEKNPLPDKEAIEQEKEKNQFIAGIENFDAKKLKHTETNEKNVLPTKEVIEAEKQA

SEQ ID NO: 9961 - DNA, 3530 bp, DROSOPHILA
gttcggggctagcactaaacgtaaatccatattggccaaaacaggtggctagatttaaagttagatttatgattggaatgccccgcgccacaaaataacgtcacagatagacgccaaacgcttttcctatcgcttagccattagaagatacagattctcgatggtcagccaggcggaaatcaatgcggaagtggataaaaaattctcggctatttcgataccacggtaacagtaggtccgcataccgtctgtgtgtgtgcaacaagtggaaggtgcacttttgtatctgtatctgcaactgcattagtgcttgtatctgtatctttttaactgagcccattttaagtgcacgaagtgtgaagtgagcaaagccatttgaatgactcgacatgcaggtgatacccttgtgaccaagattgtgatgattataaattaagcagtataatggaaaggccatatatcttaaatgttattattgactcatataagtcaaaactgcttactttccattcaaagaggattgcttggagttgcgaagataatgtaatattttgaaataatcgtttacattgctcaatggcttggggataatttaataactaaatactcaaacactatcagcttaataaagtttaatgaaaagcttcttagcattggttgataattctttaacgattaaattgtaattcgattgcacgcgctttaattttaagttatcagctcaagctaagtactttactttgttctacaacgcagttattaatacaaattttttttcattttacatatttgtaaataggcatcaagttgaaaagattaaatgaatcattttatatataccccaagccagggtatccaaacttcattttcgacttcaacctcgacgacatctgtggtctaaaattagcacaagctaggctataaacaaacatcgcactttgtgcccccccttgtgcgatctttttttctggtttttcgctattttcgccggttttttcaatcagccaatgcatttctcacctatgccgaggggtgtgccaatctttccggaaacgttgaggaacttgaatcccatgttgatgaaggctttgccatcgatcaccttgctcagcgatccgctctcgtccagcgtttgtggattatgtgggctaactgccgaggtgggcgtgttcgttgagggcgtgttcagcggcgtgggcgtggcagtgcagcatttgccgaatccgagcattaaagtcaggagcaggagattgaagttggcgcatgcgcagcggaacagctgttcggcgcgtcttttctcgccgagattaccgaatgttactggagattttgagcttgtggttgattttatggcggtttttgtggtttcacttgcagtgctcgtagagcgtgactctatggccatggtacggtattttgcttgccttcactcttcttttgctttaatttatgctgtctgtttaatgcttttttcacacttttatcacttcgatcttacaaggtttgtatagacactgtattcgataggggaaaattaagtggggtgatttctggtgaccctggttgaatagattatctaagcaggaagcgtgagatcttcgccagagattatctaatcagagaaatggccaaaagaaccagcgtcaacgtaaaaataaacgcaagcattaacgcaaaaacattggaagaatcgcttgccagccaaaaaataaaataaacacacgatccggccaattctcttttactttcgtctctcttcacatttcttatttcgagatgagaagactgaagaaactggttgaaaatcgtgcgacacacaaaaacgcgacgtagctaaaaaaaaatacaaaaaccgaaaaggccgaaaaaaaaaaatttaagcaaaaatatcggacaacaacaaaatcaccgaaaaatgcgaagagagaaaaaaagcaacgcataaaattacacagaaaattcatttatatattaaactttgaaaataattatatatgtacttaacgagaaataacatttattttgagtaaaatatggaaattataaacgataagtaaaatatttgataataattgtatattagcaagaaaaacaagttttcccttaatttttatagagaaacaaaaacgtttctgttgacgttggcaattaataaagccgaagtataatttaaaatttagttgagcggacggccacgccccctccgatcgcgcaaataaattaattaaatattgttgttgccgatatttgtagctagcacgcgtcaaatcgcccggataaataaactcttatcagttttgccttttattttgatttatttttgcggtattttcaaggtgtctgcgaatgtgcggcacgtgctaatcgcgtctttccaaatttatttcagaaacagatcattgcatttaaatctgtagaatgtttgaattacatgaggtttgtttttatttcgctttgtttgtttcttttgtgttttttatttggtttttaagttgaaaataaaccgcaaaaaactgtgatgcccgtttcgcacaacgcgcctttttcaactgaattcgcttagagaattggcctgcaaatttaagcgaatcgccagcgattttaattcgagagccgagagtaactgtcgtttgcgattgtgcttgtttttgcaccgtcttaaggtggccttatcaaaactgacaagaaactgaccagaccccgtcgaagagatacataaagagtgatctggcagatcggagcactctctgaatttaatcgatgctgtattccactcttagctccccaaaagattactaacgtacaaggtgctcttaaggcaaaccagttgatcagtgatcaatggagcgtacgttgatgtgaatggatagattgggcaaggaatcgttgggcgatctatagatacaactattacagaagcattgtttaaaaactacaagaattttaaatgcttcttcaactgagataatttatttaaaaaacaaaagcaacatgctaacgaatcccagctattaagaatcgatcaatcatttcttaagttataaacctacgccttagaaattaaagtattttttatgataagggatcatactactttcggaatattgcgactgatttcacaactagacagaattccgtggaaatatattgaataagtagtgataattatcttgtcgtaatgccaagaatccactttaatttaaaaatacgttttgttattttatactcaagttgggcaaatatcccctgagaaagaaaaagaaggactcaagtgctaacttgagaatgatgtttgcgaaccaacaaaggttatatagggtaatcgcacaaagtgtacttagatgtacatgtaattggtcagccaattattcaatctgatattaaagtctaattaaaaataagtggttaagggctccgaattaagagcagtttcagacctcggaaaaaatcctattttctacagtaccaacctgaatgtaaggaaaacgccaaggagatcacaatcagcacacagagatcacttttaaaca

SEQ ID NO: 9962 - DNA, 613 bp, DROSOPHILA
cgaaacgggcatcacagttttttgcggtttattttcaacttaaaaaccaaataaaaaacacaaaagaaacaaacaaagcgaaataaaaacaaacctcattgtctatacaaaccttgtaagatcgaagtgataaaagtgtgaaaaaagcattaaacagacagcataaattaaagcaaaagaagagtgaaggcaagcaaaataccgtaccatggccatagagtcacgctctacgagcactgcaagtgaaaccacaaaaaccgccataaaatcaaccacaagctcaaaatctccagtaacattcggtaatctcggcgagaaaagacgcgccgaacagctgttccgctgcgcatgcgccaacttcaatctcctgctcctgactttaatgctcggattcggcaaatgctgcactgccacgcccacgccgctgaacacgccctcaacgaacacgcccacctcggcagttagcccacataatccacaaacgctggacgagagcggatcgctgagcaaggtgatcgatggcaaagccttcatcaacatgggattcaagttcctcaacgtttccggaaagattggcacacccctcggcataggtgagaaatgcattggctga

SEQ ID NO: 9963 - protein, 134 aa, DROSOPHILA
MAIESRSTSTASETTKTAIKSTTSSKSPVTFGNLGEKRRAEQLFRCACANFNLLLLTLMLGFGKCCTATPTPLNTPSTNTPTSAVSPHNPQTLDESGSLSKVIDGKAFINMGFKFLNVSGKIGTPLGIGEKCIG

SEQ ID NO: 9964 - DNA, 4728 bp, DROSOPHILA
agttttcgacagatcctctgcttcctctgctggctgtacacatcgaagagatcctccagctgttgggccagtcggtgctcctccaagagttgaggatgcaagctgaaccgaagttgtttgaggcacaatttcaggcaacgtctggagggcaggcccttcaactcacttggaggcatgggagggaagaacacgctctgaaatctcctatggcacacactgcgatatagatgtttccccatcaagaaactcgcaggcttctgtccacttagctgaccaatcagatcagagcccaattttccggacttgcttttggactgctcctggtagcggttcagcatacggatctgggagtccttcaactcactcaaatcgctcaaatgcaactgaaagtgcagggtattactcggtcggtaaagtaagctctcatcatagtagtggcgctgcttgaatagctgaccccaggccagaggaggatcgtgcagatcgatatgtataaatgtctgggagggcgaatccgttggttcctcagccagttccccacccgaatcttcgtcactctcctggcaatcttcaacagcgaaatcgttctcctgctgcatctcaccctcaaatccatgaaagaactgcaggctaagtgcctccatgtcgtgttctggaccagagattctgccttccgttgcccttatcaacttttgcacctcctgctcccttttccgataccctctggtggtatgggtcttgcgtttcttctttgcagtcttcctggatagagcggcttccatgttacataggttattacaaacggaaaatgccaggcaaacaatattccgcctgctttgacctttcaactggttgccatgggcaactgacttgaccactgttacacacctgctcaccaccagctatctatcgtctatcgccttgaatgaaacatcaaaaaaacataccccaaacgtattttgttttcgttttctttttgctgtttacatacaaatacatggcaaatctactattaggcatactggaaggaggaggggtgtgcgcaagaaaggtcatttaattagatgttatgttcgcaattgctgattgagttgaagtttacttttgggcttataattcgtatgttcgtatgttgtatgtataggcaaaggttccgcttagagttgtttgcaagcagacgcgtgctactgtattggataatggattagggccctggcatcaaccagggcgtagacgcgtcccggacacgaaatgtgaggcgacaggatcgcttcgaagtaggcaggggacgacagcgttggagtggcgttgagggggtcgtctactccagcagagtgacttcttccttgactaaaaattcaacaatttcttcatccacttcgtcagtttccaggttgtctgtgtccacatctgttgcgtaaggataatatacatatagaaatcggcaaattttaaacaatttgtttcttgagaatacttacgccctcgcagcatgatgcgacgactcttctgctccgcccactcggcaatacgcttgttgcggtactccataaaggtctcgcgcagctgcgagcgcttctcgagcagctccttggaggcacgggtaaggcgcaggcgatccttttgttcgaaggcagcgtagtacttcttcaagttcttcttgatctccttctgcttctcctcgctaagcagggtgggaggacgcgggcgccacaagaactgcacaaagttcttaagaatggtacgcttgatgatgcggccctggaacgtgtacatgttgaagccggtatcctctttcaccttccatgacgagacaccagtcacaacgtagcgtccagtgggatcccactcgacctcggaagcgcggaaatgatcgggcgatgccgtgatgatgtaatcgttggtggagtccacaaactcgaaggtacccatggtgaggttggccattacgataaactgaccgcgtggcgaccagaacagatgtgtgcatgacttcttttctagacgcttcaccaagctgggcttaacgcccttgttcacctcgtagaagctcacattcgacgagttggtctcgccgtgaatgatggagaacttgttgccgacgggctcccaggcaaaggccaaaataagctcacgaatctccacagagtcgacgggaatctccttctcgcgcatgtggaagatctcaaagttgtagaacatgcccagaaacttgacgtccaggtccttcttatccttcttcaactttgagtaacgatctaccttaacgcacagatagtcgccggacttttgccaatgtaacttgcaatcggccacatggaaaaggttcttgttacggatctcacgcttcttggggatctccatcagggtaacgcgggcgggtatttggttctgctcctccacccagtaggcaatcacgttgtctgtgggggaccaagagaagccacgaatgccgggaatcttaatggacttcaggtccagaagatagaaagagggtgtctcgtagatgtggatcgaattctcgcccatgcgggccacaaacttgtcgtcgtgcgaccagcggaacatagaaagaaccgacatgccatcggcaacaaacgaacgtttctcggctccagtgcgaatgtcccagatgatgatcttttggcccgtgggtgtcggtccgtaagtcactaggtaattctcgcagggcgaaaactcaacgaattgggtaccaggatggggaaacttctgaatcttctggaagctactgccaccccagatggccacaccgggtttgtggaaggtgactacataagtacccaggggcgaccacttgacgaaggtgtcggtgaagcgttcgcgagtctccagctcaaagggttcgggcaatacgttttgccagaaaccaacctgcacgcagttgggagcggtctccgctgccacgcagtactggtcataagtgtccgggtcattgatgaagttgtatagatcgctctgcactttgaaggtctgcacggttggcggctcccacttctcggggatgttttcgtacctgccaagattaaattttattaatctcattgcttgatgcggatgcaaggagaacttacttttggaaatcggtgaagagattgacggcaaaggtgtggtttttgtctaggcgatgattgttgagcttcttgacggcttcctccgcctgtctggcctgcttgtactccatgaaggcgtagcccttggtcttgccctcctcgtcgacgggatagaccacattgacgatttctccgtagttcgaaaacagcttgttgatgaccaacttcagcttctccaggcgcaccggctccacctttgggatattgtccactaccaccacactctcgacgccatcggcctccgaggggcgctgggccaacatgtcgcccagcagatctgaaagtgcatcacgaatatatttaattagatatgcaaatgcaaactttcgcacaccgcacacggattgaggttagatcgccgcgtgtgatgcgctggcagtcggtgattttcaccttcatcactaatgttgtccacgaacccgggcggatcgtcaaagttcggctcctcctggtaatcactgtcgttcgcatccgtaccggagtgctcctcgcttttcttcttggccatattcagcgatctatttgcaattttccgtcattaaacacacaagcacaaagtgaaaaaggaagagcgagatgccgcatttgccagtcaaggcgaaacactgttttgtgtgaatggttagtgttgccaactactcactgcgttgataacgcggcggggtaacttttattaatatttataaatacatatgtacatgcatatattttaatttactgtttcttagatttatttgtatttatactgcatatgtttgcttgacagcaatgacaataatatctggatccttctcttatggatccttaacaacagaatcttaggtgcttatctggtgataatgtgttaaaacggctaaatattatcattttgtatttcatgtacatacaattatttaatattagtcaatatgtattaagcaaagtataacctataacaactagtttaatcgttctttaataatacatacattttttccgcttgcaactctagcgatggaagttttgaagcatgttcaaccgattttttagaattaggcatcaatcgatttgttgccgataagccaaaaccgattgcatcgagtaatcatcggctggggttccatctctcacatgaaaatttgtaagattttagagcagatcggtgtccgtgattttctcaatttaagcccaatttgtagtattaaagctgttgaaaaatgcagcggggacgagcgcgaaccgtgtgaaatgcatgcgaaagtcgtcggtgcagcaaatcagtgcgaaaaacatcccaaatgtgcgtaggccccacactcactctcgcacacacacccgcgcgcacatacacagctttttcggtcaccactcgttcgctgtgggtgcgagcagtaccacactagcagtgtcgcacaccagcactgccagtgcagcgggagcgacagagaggcaaacagcgggcggcggacaacaacagtgcgaggcgaaggaaaatgttttcatttacttaagtcggcggttccccaaagaaaattggaaacttgctggcttaaaacggattgggaaaacattaattataccatggacgggcggttgaacactgcgatgggttgaaaag

SEQ ID NO: 9965 - DNA, 2483 bp, DROSOPHILA
cttgactggcaaatgcggcatctcgctcttcctttttcactttgtgcttgtgtgtttaatgacggaaaattgcaaatagatcgctgaatatggccaagaagaaaagcgaggagcactccggtacggatgcgaacgacagtgattaccaggaggagccgaactttgacgatccgcccgggttcgtggacaacattagtgatgaagatctgctgggcgacatgttggcccagcgcccctcggaggccgatggcgtcgagagtgtggtggtagtggacaatatcccaaaggtggagccggtgcgcctggagaagctgaagttggtcatcaacaagctgttttcgaactacggagaaatcgtcaatgtggtctatcccgtcgacgaggagggcaagaccaagggctacgccttcatggagtacaagcaggccagacaggcggaggaagccgtcaagaagctcaacaatcatcgcctagacaaaaaccacacctttgccgtcaatctcttcaccgatttccaaaagtacgaaaacatccccgagaagtgggagccgccaaccgtgcagaccttcaaagtgcagagcgatctatacaacttcatcaatgacccggacacttatgaccagtactgcgtggcagcggagaccgctcccaactgcgtgcaggttggtttctggcaaaacgtattgcccgaaccctttgagctggagactcgcgaacgcttcaccgacaccttcgtcaagtggtcgcccctgggtacttatgtagtcaccttccacaaacccggtgtggccatctggggtggcagtagcttccagaagattcagaagtttccccatcctggtacccaattcgttgagttttcgccctgcgagaattacctagtgacttacggaccgacacccacgggccaaaagatcatcatctgggacattcgcactggagccgagaaacgttcgtttgttgccgatggcatgtcggttctttctatgttccgctggtcgcacgacgacaagtttgtggcccgcatgggcgagaattcgatccacatctacgagacaccctctttctatcttctggacctgaagtccattaagattcccggcattcgtggcttctcttggtcccccacagacaacgtgattgcctactgggtggaggagcagaaccaaatacccgcccgcgttaccctgatggagatccccaagaagcgtgagatccgtaacaagaaccttttccatgtggccgattgcaagttacattggcaaaagtccggcgactatctgtgcgttaaggtagatcgttactcaaagttgaagaaggataagaaggacctggacgtcaagtttctgggcatgttctacaactttgagatcttccacatgcgcgagaaggagattcccgtcgactctgtggagattcgtgagcttattttggcctttgcctgggagcccgtcggcaacaagttctccatcattcacggcgagaccaactcgtcgaatgtgagcttctacgaggtgaacaagggcgttaagcccagcttggtgaagcgtctagaaaagaagtcatgcacacatctgttctggtcgccacgcggtcagtttatcgtaatggccaacctcaccatgggtaccttcgagtttgtggactccaccaacgattacatcatcacggcatcgcccgatcatttccgcgcttccgaggtcgagtgggatcccactggacgctacgttgtgactggtgtctcgtcatggaaggtgaaagaggataccggcttcaacatgtacacgttccagggccgcatcatcaagcgtaccattcttaagaactttgtgcagttcttgtggcgcccgcgtcctcccaccctgcttagcgaggagaagcagaaggagatcaagaagaacttgaagaagtactacgctgccttcgaacaaaaggatcgcctgcgccttacccgtgcctccaaggagctgctcgagaagcgctcgcagctgcgcgagacctttatggagtaccgcaacaagcgtattgccgagtgggcggagcagaagagtcgtcgcatcatgctgcgagggcatgtggacacagacaacctggaaactgacgaagtggatgaagaaattgttgaatttttagtcaaggaagaagtcactctgctggagtagacgaccccctcaacgccactccaacgctgtcgtcccctgcctacttcgaagcgatcctgtcgcctcacatttcgtgtccgggacgcgtctacgccctggttgatgccagggccctaatccattatccaatacagtagcacgcgtctgcttgcaaacaactctaagcggaacctttgcctatacatacaacatacgaacatacgaattataagcccaaaagtaaacttcaactcaatcagcaattgcgaacataacatctaattaaatgacctttcttgcgcacacccctcctccttccagtatgcctaatagtagatttgc

SEQ ID NO: 9966 - protein, 690 aa, DROSOPHILA
MAKKKSEEHSGTDANDSDYQEEPNFDDPPGFVDNISDEDLLGDMLAQRPSEADGVESVVVVDNIPKVEPVRLEKLKLVINKLFSNYGEIVNVVYPVDEEGKTKGYAFMEYKQARQAEEAVKKLNNHRLDKNHTFAVNLFTDFQKYENIPEKWEPPTVQTFKVQSDLYNFINDPDTYDQYCVAAETAPNCVQVGFWQNVLPEPFELETRERFTDTFVKWSPLGTYVVTFHKPGVAIWGGSSFQKIQKFPHPGTQFVEFSPCENYLVTYGPTPTGQKIIIWDIRTGAEKRSFVADGMSVLSMFRWSHDDKFVARMGENSIHIYETPSFYLLDLKSIKIPGIRGFSWSPTDNVIAYWVEEQNQIPARVTLMEIPKKREIRNKNLFHVADCKLHWQKSGDYLCVKVDRYSKLKKDKKDLDVKFLGMFYNFEIFHMREKEIPVDSVEIRELILAFAWEPVGNKFSIIHGETNSSNVSFYEVNKGVKPSLVKRLEKKSCTHLFWSPRGQFIVMANLTMGTFEFVDSTNDYIITASPDHFRASEVEWDPTGRYVVTGVSSWKVKEDTGFNMYTFQGRIIKRTILKNFVQFLWRPRPPTLLSEEKQKEIKKNLKKYYAAFEQKDRLRLTRASKELLEKRSQLRETFMEYRNKRIAEWAEQKSRRIMLRGHVDTDNLETDEVDEEIVEFLVKEEVTLLE

SEQ ID NO: 9967 - DNA, 2830 bp, DROSOPHILA
gttctgtaggcggcgcttgtcatcttcgcgagacaggaagcacgactcctcctccatcattatgaggtactcggacagcttcttgacgaccggctcgtactggacgctcctggcccgcgagtcgcagacaaagcataggttaaacaggaaggcattccgtgcgtacttctgctgatcctggatgcccactggatagccgactatctttacatccattgcgttgacggtgagaatgcagcgttgaagatgctgcttgggtatgatgtaaacattgatagcatcgaacacatccttggatatgtagttatcaggaacctgagggacgtggatttgttcgaactatactgcgttatcagcgctcctgggaaccagctcacctggcagcttatcttgcagcccgccgtcgcatgaaactcgctgaggaagatgcaccggatcttgccctccgtgctgccatgggcacccgctgctccagctcctgatccgcctgctccattcgtgaccgcgcccgccgttgtcgacgtcgcagccgtctcattcgtatgggaatgcatgccgttcaaaagattccagtatcaccgcatccacatcctctgcttccttccgcggagtggactccaaagctttaacagcaggtggcacaatccaataacagtggcggaattcgctgtaatgttatggtaagcgatgctttagtgtgaccatagccttactgcaacaaatatactccaatgcaaaaaccaattataacaaattttaacaacaaattaattcaacaccatttaatttgttgagtagatcgttttattcatgtataaattatctgttatgttaatatataaaggccaactgtaatatgcgtaggtggggtatattttagcgctcgctctgcggtcatactaaaatttgcagaaatggaaacgtgaggattgttttgtttttatttagtttttccattaaacagcgaataatatgcagatgataacgcttccatttcaggatcaatcccacgttctcgtacctcaccaatctggaggtaatgcagattctacagaagatcaaaagcaccaaaaagaagttcggcatgcgcaacttggccacggttacctatgaggtgtcgatttttttaaatatttaactaatatatgataaattaaccaaacactttgttccacaggcactgcagtatctggaggagtcgccctgcaagacacaaactcgtgagaacattatgaattacgttaaagacctgtcttcttatcgtctaaagtcccaagagatcctgcaaatgatcaacgatccgcctacaagtgcactacacacgcaactggtaaggattagtctatcatatgccagaaaggctaattaagtatataataacctccccagctcatcgacgacaataaagctccactaaccgatgaggagaacgagaaaatcattcagctgagctacaaacacttccatggtggagaaaccaaaggcgctgctaaggaaacaccggcggaaaagcctgcggagtccactgcgaaggccggcaagcaatctggcgtaaagcgtaatgcccaggcaaaatccaatccagcggaacaaatagctccagcggacaaaaccacgccaggtgatggagttactcctgcgaatgtcgctactccttcaagtgaagccactactactactccagcagaagaagcaagcccagtggaaacatcgtcttcagaaaataatgctactccagcaaatgaagccactacagcgcctgcaacggatgcacccacttcaatggaaaccaagtccaatccgacaccagatggagaaaacctcgggtagcagccgccaaaataacccatccgcttattacgtttaacgtttcatatatttatgttgatggagcgtataaaataagctaaaaaaaaaggtaaattatttatgttcgcttctgatcgcccaaatcctcgatgacgtcctcatcgatctcggcccatttttcgggtatgacatcgaacaagtcatccttgacgtcaccctgaatgacgatctcgtcgtctccggtaaccgaggagccgcaggcaaatttcgtgccaaagaacttggcggccaccttgagatcaatatctggaacagacagggaatgtattatgcttagttaacaataaagctcataagtatatctaatatatctaagttacatggtatggtaatggctactcatagcatccagtgggcccgcatccccctccatttcctactctatactcataatgtgcgaacagaacctaccaaaagtgctcaatcctgtgaccacggtcactgacttctttttgccacgtgccgcccgcgagacgcagatacgcttgggcacgtcctctttcttcttgacgcgcaacagtcccttgccaccgcgtttctggcgcttcttgtcgtcatccgtcccgtcagcggcggcagcctcctcctcaatctttagtcgctcgaagtcatcgggcatgtggagctccagccactccttgcacttctcgtactccggatagtactcgcagtactgcgtatagtggatatatatatatgtaaatatatgggccatatatgatccctaatatggatttttcccaggtttgaagacgaactcacctcaatgggcatcgtgcagtggccacagtacttcatctggatcggataggtgacgccttcgcgcggacccaactgtaggcggtcggcgacgctgttggtgcccacatcttcgttcgtcattgcggatcggattaactgcctgggatttgctccgggttattgaaatattaaaataatgacagttttaagaagtcggcta

SEQ ID NO: 9968 - DNA, 708 bp, DROSOPHILA
atcaatcccacgttctcgtacctcaccaatctggaggtaatgcagattctacagaagatcaaaagcaccaaaaagaagttcggcatgcgcaacttggccacggttacctatgaggcactgcagtatctggaggagtcgccctgcaagacacaaactcgtgagaacattatgaattacgttaaagacctgtcttcttatcgtctaaagtcccaagagatcctgcaaatgatcaacgatccgcctacaagtgcactacacacgcaactgctcatcgacgacaataaagctccactaaccgatgaggagaacgagaaaatcattcagctgagctacaaacacttccatggtggagaaaccaaaggcgctgctaaggaaacaccggcggaaaagcctgcggagtccactgcgaaggccggcaagcaatctggcgtaaagcgtaatgcccaggcaaaatccaatccagcggaacaaatagctccagcggacaaaaccacgccaggtgatggagttactcctgcgaatgtcgctactccttcaagtgaagccactactactactccagcagaagaagcaagcccagtggaaacatcgtcttcagaaaataatgctactccagcaaatgaagccactacagcgcctgcaacggatgcacccacttcaatggaaaccaagtccaatccgacaccagatggagaaaacctcgggtag

SEQ ID NO: 9969 - protein, 222 aa, DROSOPHILA
MQILQKIKSTKKKFGMRNLATVTYEALQYLEESPCKTQTRENIMNYVKDLSSYRLKSQEILQMINDPPTSALHTQLLIDDNKAPLTDEENEKIIQLSYKHFHGGETKGAAKETPAEKPAESTAKAGKQSGVKRNAQAKSNPAEQIAPADKTTPGDGVTPANVATPSSEATTTTPAEEASPVETSSSENNATPANEATTAPATDAPTSMETKSNPTPDGENLG

SEQ ID NO: 9970 - DNA, 8736 bp, DROSOPHILA
ccaagtgccaaattcgagatgtctcgtggtcgccaatgtatggccccagaaaaacccaaagtcaaagccctgcttgaagaagtgatgggatacaatgagtattgtacgtatgttcaacccaagcgttgctcggggacatccaagttgatttttcgacgttctcaaacaatggtggcacttttttgctttttcattgcgcatccacttagcagttggtgattttcaaaatgagataacacctcacattttggggatcggcttttatatttgaacctcagctcagccgagcaacgcgacaaagctgagaagaaaacgatggaaaatcgtttgaaacgcaggagattatgcttgatgatggggataaaagtgaggaaggttattgtggagcgccacaaattaatttgcacctttcgcctctgtcgcagcgctgcagcagcgctgcagcagcgccgtcgacgtcggcagccggagaaagttgcacatgcaaatctaaaaatgaaagaaaaactgagagcgctgtcggcaattaaaggcaactccgttgcactgagatgaaaatgaagcataactgcagtgttaaaggtttagattaattacggacatccatttgtttaaactcttgaggtaaattgttgttattaattaaaatgaaattgaattaaaatgcattatacaaaacactacaatttttacgaaaatgataatttgtaaatatatatattatatatatagaaacattatctgattggaaaagtgcagcaaactcaaactcttttcatatttgatgcatctcaatgtgccagagggaaacttttccgcctttttcgaatttccctcaatcggcgggcaatggcaatgtcataatatcagcgcttaggcgcattttctccgattcgcttgactgtgcgcacatattgttcatatatatttagtgactgtgtgtttagcgggcacaacggtaaccgtatttgtcatttatttgcacttcgcattcgaatgaatgccgctcgccaagaggaagcggaaacaagtgcagtctgcagcggtaaagcgcatttgggtgtttgattgtgtttcacacagttacgacgacttttcgagcatgtaaaagacagtcgttaagtaaataaaaaaagctaatgaatttaaaatccatttcaaaatatcggagcgtaacgacttaaatagtgtggcaacgctaacagagtgtgcactcgctatatgttaaggtgggtgtattcgctattatatcgatagaactagaagcattaataatatcagtagttttcacactggaaaatttcagtgctgttaagacggcgatagttaaacaaatattaatacaaattgtgccatgttgctgtataataaaatggggacttaaaactatcttaaaaatgtctgcagagaaatgtccaaatttgtatcttctttttaagtaaatttggtaatagcggtctggcagtactgcctgccgatagattcaatgtgcccagtctctgttctgcattgagtagtgtttactcgctgcagaaaagttattggctttggtttttcataatggcataaacattaaacggaaacgtacatgataccgcaaacgccgagctggtgcaccgctgcaaccgacgaggacgtccgcccgcgcagcccaatcaatattaccgctcggcaggggaaaacgctgcgtggatacccagcaacaccgcgccgccattgagagagcagaaaaagaaaagcgtgtgcgcccgcaaacaacaagaaagaatcatcgaaaagggggacggagtgaggggcaaaccgatttgaggtcgccggatgtgaaaatgtcgcaagcagctggaggatctgccgtcggaatggagcagccagccactggcaaacagttgaagcccccggaggatctccaggacaatgacaccaacagtctggaaccgggcgaggtggtgaccccgccccattatcatcccagcagtccggcagtcaaaaagcacctgtccaaagagctgatgataagcaaaacattacggaagctaccagttagcgttgtggaacaggcgcgcaaagagaacggatctggcgggacaccaaatgcccaagccgaggatgcggacgatagcgaaggcctctattcggaatcggactcctcgggggaggacctcaaaaacgtagaagatgtgcagaaggcgaggaaggaaaagcaggaggaggctgcagctgctaccctgccccaagcaccgcccacgccgttcttgggcattaatccgctaagattccacatgagagctccttgctttgaatttccacgcatgggctttatgccccgaatgaacaggggcggaccaaggggcatgcgaccaacattctttggtcgcccacccgcagcgaatcgcatgggagctcccatgatgggtgggctaccaacgcaaggacctccgccgggagcgtatgcacctcaaaatccaccacctacaggtattaacagcaattcaggtcgttgcaagcgactccaatcggatgtgatgtaagtaaattccatatttatgtagaaagttaggtttaatatgattaattttagttggacagcattgcaaccgccagtgtcctttgtctttaatcttgtttccgagtgctccaatacaaagcatgagaactgcaggactaaagcggaaactactgaccacaactccaaggaatcaaaacttcccagcgaaacaaagtccactgaacccttaattgaaaacaatcgatcgagagagttgccccagcacaaaaattacgtcagaggaaaaacaagtaatcgatcccatgacagaacccaaaatcgaggaagaactagggagaggtcgaaagaatcgcacggaaagtccactgaaaactccaagaacaaggatgaaggcagagggaaaggaagagaaagagatttgtttcgacggaaaagtagagaaagatcccaagataaaaatttaaatagagcaaaaagtatgaatctatctaaggaaaaggatgaagttggaggtgagcctagaaatacagcgagtggaaagtcccaggaaagagatcaatccagaggtaaaactaaagaccgatctagggagagagatcggactaggaataaaacacgtgaaaaatcacaagccagagatcaaaccagaagtaaggcaaacgacgcggaacatactagagcaaaatcaaggaaaaggtccagttcaagggataagcgtcgagaaaaatcaaaggaaaagctaggcgataaggaaaagaatgaagacttatccaaggaaaagcttgaaggaaaatctaccgagcatagcgaaaaaagaaatgaatccaaggttaaaaataaggatacgaatgaagaaaacgcaaataaaaagcttcgagagcgttccaaagatagaaaccattctaaggaaagactgcatgaaagaacgcagaataagtctgaagaaagaaagcctgaagcaaagaaagtaagaaatgcaatagaaaattcaaaggaagcgccaactgatcgcaaaaaggacaaactcttggggccattgggagaaaaaacagacgaacgttcaaaggacaagcaaataaagcgatcgagagaacaatcagtaacgaaatgcccaaaggaaagcggcaaggacacattaatggagcatccgccacaagaaaatggattggatggctccaagagatcaagcatgccgcatgaatccttcagtgaaagtgcaaaaacaagagaacacgcatcaagaagaaaaaatcagacgctttcgccttgggggagcagggaaggaactcccccaatgacaccaccacaagttcagatccctcagactccaattgttgatatcgcaaatcccaaggactttgatatttttgccgactcacctccacgagtaaacactgccgtttcagctccagctgcaactattgaaaggagtacaacgccgccgttgaagtcatccattcctattgtccccatcgctaaagccgacaaactggctcctctgctcaaggccagtgagattcacagtaggattggcgccctgctcgaggagagcgatttgcatttggataatctactagctactaaagagcagttgttccgtcgcactaatgaatacaaagagagaaaagaggctcccaaagagattaaagctgaataccttccgaatagcaggcataatagatctgcgactggtagggcagaggtcgagcatcacaaaagccaaccacgacatataaatcctttcaagcgcgaatcagtattaagcgggaggaaatcctcctctcgcccttcaagcaaggagagacgatttcaaagacacgacagtgaggttgagaattgggatagggatctagaactcgaaagaaatcaattaaatggcagtcagctaactggattccaaccaagaaagagtgatgagtatacaaaattcagcattaagaaagaaaaagatcttacacccccgcctctgcaaacgaactttactcgaaccactataaaaatcgaacgcaatgcaacgcctccccggcacatggagcacgatgtgctggttagaaacggtgcagtggcgaccaatgctcctccaccggcaaaagagcaggaaagtcccgatacggatgactacatcgacaactgggaaaacgacgattcattggccagtatgcccaagaacgcacctcctgttactcctactcccgctccaaatgcaaacgcatctcttaacgctacacccttgccaccagtagcttcgcaatttaatggcgatgatgacgatgatgactccaacgctctgtggaatgcaaaaagcacacctcctccgcgaaggaaaaatgagaacctgcccgagggcaacatccatgaactatatgacaaattcatgaatagtattaagatgtccaacgagcatttggagccagaaacgctggacacctcaaagaacagttccttgagcaattccccagccgaagaaagttcctcgggcactgagacttcctcaacaagtagcagcagtagcgaaaccgaggatgactccagttcagatgacgatgccaatgaaagctcttcgaatgatgaatcggccacaacatccggtaattgcaacacaaatcaggatgaagccgctggtaaggagcagctgcaaaagaaaaacaatgtaagcaaggacctacggaaattaaagagccttgaagacaatctggctaggattcagatgatgcgtgagaactatgatgcgggcgatgagatctctgaagaactgctaaaaatggaatccttatttctaatgcagcgcaatgccatcatggataagtatcgcaaacaggaacttaaaagcaattccagtgaggatcagcagccagtggatgaacagggaactgttcaggcacaagaggtggttaaggaaacatcatttcctgtaaacagcatcttcagtgccaatcgggaagccatcaaactgaccatctcgccattgaagttgactaggaaatctgtcatcttcgacaaggatgaagcagatctaccggaaacatccaaggcggagcctcccaaacaaactctgcaaaagccacaaaaggagattgccattgtgaaacccaccattgtcgaatctcgatcaaagcctaagctaaggagtccgccaccatcatcaggaagtcgtcgtagatcccggtcccgttctatttcaagaagtagggcacgacgtcgcggctcgaggaccaagtcgcgtactcccagccccagacgccgacgtcttccatcgcccagaagagtttccagatacgctaagcgaataggaggaggagccgtcggaggaactaggaaaggcaggagtcatagtagaagtttaacaaggagtcgaacgcgcagtaggagtccaagtagacgaagacggttgccaccagcagggcatagaaaacgaggttcaatatctcctattccacaaaaattggctggacctcggtcaccacctccttcccgccgtcgtcaatcactaagtcgtgatcgggaacgtgaacacttatctcgctcccgttcgcccttacccttcaaaccaccgtctcctccgatgagacgcagttggtccaaagcacgatcaccaaccagaaggagatcgttttccaggtcgagatcacggtctatatcaccaaggtctcgattatcagcagaggaagctttcgctaattattttgaggaaaatcagggcatggaagcggctgcctactactacaatatgtcattgatgcagcaggaggatcagaacgcattgggtgagggctatgatgcttatgccgcatatatggactccgcgtacaacatggaacaagcgtatgcacagtactctgaagaatattcgaatacgtacatggattatatggtcgaagtagcttcttcacctcaggcacctggatcggttcttagggaactacctatggcgccgatgatgcccgtggaatcccttgctcctatagcgccattggaggcaatgccatcgatggcggctacggcgtcagggatgccagtggccgtacaaaaaggaaacgttttggagatagtaccttctggggaggatatactggaagcagaggagaacatagtgccagatgcaacagataaaccagttgaggacacgaggtaaaacagggttttaaatttatttatatatagtaatatatatagtaacaatgtaattatttttagcaaaccaaagggaaaaggcgttaatttcgtggataaggtgctgcccgcatacgagagcgacaacgaagaccgggcggtcgttgaaatggcggtgaaacgtgccctgcggaaatatcacgaaagtcgctcccaagccgccgccaagctgcaactgattcgcgatgagctacttctgttgcctccaccaccaccgcctccactgacaaccaagccagctaatctggaaaagcctgttttggtgcagaagaaaccgaagttccgatactttcattttgatcctttcaagtgtgcaatagtgaagacgtacacacgcacgctgcgttcagcctaccgccctccattcgatcccaagcattttgccatgctaatgaagaccggtcgcctgccgcagattcctccaggattcctgcgacaccgcccaccatttatacctgcgcatgtcgatgctgtcacgagaggagcaatgctcaaggaattctttagcaaacatcctccaccgcccctagcgatgcccatgcctgtacccaatgggatgccctattacctgagtggtccgccgccaacgtcaagtggagctgcagtttctcctgtgcctgttaatgtcctgccacaacccatacccgtgttggatggaagtggttatcagggttatcctcagtcggctacaatggtaccattacctgttccagttcctgttccagtgccgctacctgtgcccttgcctgtttctactgacacgacgccatctcccgcgttggaaactccttacttcacaccaccacctctgcccgagctgccgcctctacccgaactgccgtctcaattcaccgtgagttcagtgcccacaataacggagataatgccagtggatatactacagaagttgggaccgctgcccaagaccttggacgttgatgacggaggtggaactgccagtccggaggatattagcgacgatctcaaggaggttgaggcaaagccagccgaacagcatgtggtgggcgtgaagccgcagctccttgtggagacccagtagtagatccatcttgctagcttgatttctttaattatagtgttctttagataattattcttaattttaaatatgaggatcctcaatgcctacacagatttatttcgtaaatattttgtttataaaatatttttaattgaccatttgtaaacaagttgcatttattcatagaaggtcgttttcgatttattcagctttaggtttctatgtcatttatataaggcccatctgggcccacatttattgatttctaaaagaaaataaaaattgtaaatatttcgcttaagaattacacttgaatttacattcggcgtgcacattatacatatttgagtcatttactgtaacgaagttcttaacgaattaatctaatcctaagatcctcaagaatcgaatgtatgtgaaatttttatagtgtggtgagcatctataagactttgcgtgtttggtatcgtacaaaatatagacatgaaatacaaaaattttgtatttgcgttagttaagtaattgaaaatatactcaacagtaaaatagttttactatttgattgagcttattcgttatgtctgataatagataacgcagtaatcttattctgaagctgtttgggctatttatgtgtaatattttaattggtagtgcttaatggtattggtttttaaattataatttattatagtggtccgatcttttccctgggtgtcaagaccaatggaaaacaatcggcaggcagtgccaaactctccggactgatcttaatcgtcgaaggattatgactgctgatattatatctctgcattacgttgaccacgaccagaaaaccaaatcctctcaccaaattctggccgatgcaagtccgcttcccgatgctaaagggcagaaagtgcggaatattcctctttagttgaagtttttcattatcactttcgatgccagaatcagaacctttggaattttttgggctttgttcctttgacggttccaaaaatcttaatggattaaa

SEQ ID NO: 9971 - DNA, 5955 bp, DROSOPHILA
atgccgctcgccaagaggaagcggaaacaagtgcagtctgcagcggtaaagcgcatttgggtgtttgattgtgtttcacacagttacgacgacttttcgagcatgggaaaacgctgcgtggatacccagcaacaccgcgccgccattgagagagcagaaaaagaaaagcgtgtgcgcccgcaaacaacaagaaagaatcatcgaaaagggggacggagtgaggggcaaaccgatttgaggtcgccggatgtgaaaatgtcgcaagcagctggaggatctgccgtcggaatggagcagccagccactggcaaacagttgaagcccccggaggatctccaggacaatgacaccaacagtctggaaccgggcgaggtggtgaccccgccccattatcatcccagcagtccggcagtcaaaaagcacctgtccaaagagctgatgataagcaaaacattacggaagctaccagttagcgttgtggaacaggcgcgcaaagagaacggatctggcgggacaccaaatgcccaagccgaggatgcggacgatagcgaaggcctctattcggaatcggactcctcgggggaggacctcaaaaacgtagaagatgtgcagaaggcgaggaaggaaaagcaggaggaggctgcagctgctaccctgccccaagcaccgcccacgccgttcttgggcattaatccgctaagattccacatgagagctccttgctttgaatttccacgcatgggctttatgccccgaatgaacaggggcggaccaaggggcatgcgaccaacattctttggtcgcccacccgcagcgaatcgcatgggagctcccatgatgggtgggctaccaacgcaaggacctccgccgggagcgtatgcacctcaaaatccaccacctacaggtattaacagcaattcaggtcgttgcaagcgactccaatcggatgtgatttggacagcattgcaaccgccagtgtcctttgtctttaatcttgtttccgagtgctccaatacaaagcatgagaactgcaggactaaagcggaaactactgaccacaactccaaggaatcaaaacttcccagcgaaacaaagtccactgaacccttaattgaaaacaatcgatcgagagagttgccccagcacaaaaattacgtcagaggaaaaacaagtaatcgatcccatgacagaacccaaaatcgaggaagaactagggagaggtcgaaagaatcgcacggaaagtccactgaaaactccaagaacaaggatgaaggcagagggaaaggaagagaaagagatttgtttcgacggaaaagtagagaaagatcccaagataaaaatttaaatagagcaaaaagtatgaatctatctaaggaaaaggatgaagttggaggtgagcctagaaatacagcgagtggaaagtcccaggaaagagatcaatccagaggtaaaactaaagaccgatctagggagagagatcggactaggaataaaacacgtgaaaaatcacaagccagagatcaaaccagaagtaaggcaaacgacgcggaacatactagagcaaaatcaaggaaaaggtccagttcaagggataagcgtcgagaaaaatcaaaggaaaagctaggcgataaggaaaagaatgaagacttatccaaggaaaagcttgaaggaaaatctaccgagcatagcgaaaaaagaaatgaatccaaggttaaaaataaggatacgaatgaagaaaacgcaaataaaaagcttcgagagcgttccaaagatagaaaccattctaaggaaagactgcatgaaagaacgcagaataagtctgaagaaagaaagcctgaagcaaagaaagtaagaaatgcaatagaaaattcaaaggaagcgccaactgatcgcaaaaaggacaaactcttggggccattgggagaaaaaacagacgaacgttcaaaggacaagcaaataaagcgatcgagagaacaatcagtaacgaaatgcccaaaggaaagcggcaaggacacattaatggagcatccgccacaagaaaatggattggatggctccaagagatcaagcatgccgcatgaatccttcagtgaaagtgcaaaaacaagagaacacgcatcaagaagaaaaaatcagacgctttcgccttgggggagcagggaaggaactcccccaatgacaccaccacaagttcagatccctcagactccaattgttgatatcgcaaatcccaaggactttgatatttttgccgactcacctccacgagtaaacactgccgtttcagctccagctgcaactattgaaaggagtacaacgccgccgttgaagtcatccattcctattgtccccatcgctaaagccgacaaactggctcctctgctcaaggccagtgagattcacagtaggattggcgccctgctcgaggagagcgatttgcatttggataatctactagctactaaagagcagttgttccgtcgcactaatgaatacaaagagagaaaagaggctcccaaagagattaaagctgaataccttccgaatagcaggcataatagatctgcgactggtagggcagaggtcgagcatcacaaaagccaaccacgacatataaatcctttcaagcgcgaatcagtattaagcgggaggaaatcctcctctcgcccttcaagcaaggagagacgatttcaaagacacgacagtgaggttgagaattgggatagggatctagaactcgaaagaaatcaattaaatggcagtcagctaactggattccaaccaagaaagagtgatgagtatacaaaattcagcattaagaaagaaaaagatcttacacccccgcctctgcaaacgaactttactcgaaccactataaaaatcgaacgcaatgcaacgcctccccggcacatggagcacgatgtgctggttagaaacggtgcagtggcgaccaatgctcctccaccggcaaaagagcaggaaagtcccgatacggatgactacatcgacaactgggaaaacgacgattcattggccagtatgcccaagaacgcacctcctgttactcctactcccgctccaaatgcaaacgcatctcttaacgctacacccttgccaccagtagcttcgcaatttaatggcgatgatgacgatgatgactccaacgctctgtggaatgcaaaaagcacacctcctccgcgaaggaaaaatgagaacctgcccgagggcaacatccatgaactatatgacaaattcatgaatagtattaagatgtccaacgagcatttggagccagaaacgctggacacctcaaagaacagttccttgagcaattccccagccgaagaaagttcctcgggcactgagacttcctcaacaagtagcagcagtagcgaaaccgaggatgactccagttcagatgacgatgccaatgaaagctcttcgaatgatgaatcggccacaacatccggtaattgcaacacaaatcaggatgaagccgctggtaaggagcagctgcaaaagaaaaacaatgtaagcaaggacctacggaaattaaagagccttgaagacaatctggctaggattcagatgatgcgtgagaactatgatgcgggcgatgagatctctgaagaactgctaaaaatggaatccttatttctaatgcagcgcaatgccatcatggataagtatcgcaaacaggaacttaaaagcaattccagtgaggatcagcagccagtggatgaacagggaactgttcaggcacaagaggtggttaaggaaacatcatttcctgtaaacagcatcttcagtgccaatcgggaagccatcaaactgaccatctcgccattgaagttgactaggaaatctgtcatcttcgacaaggatgaagcagatctaccggaaacatccaaggcggagcctcccaaacaaactctgcaaaagccacaaaaggagattgccattgtgaaacccaccattgtcgaatctcgatcaaagcctaagctaaggagtccgccaccatcatcaggaagtcgtcgtagatcccggtcccgttctatttcaagaagtagggcacgacgtcgcggctcgaggaccaagtcgcgtactcccagccccagacgccgacgtcttccatcgcccagaagagtttccagatacgctaagcgaataggaggaggagccgtcggaggaactaggaaaggcaggagtcatagtagaagtttaacaaggagtcgaacgcgcagtaggagtccaagtagacgaagacggttgccaccagcagggcatagaaaacgaggttcaatatctcctattccacaaaaattggctggacctcggtcaccacctccttcccgccgtcgtcaatcactaagtcgtgatcgggaacgtgaacacttatctcgctcccgttcgcccttacccttcaaaccaccgtctcctccgatgagacgcagttggtccaaagcacgatcaccaaccagaaggagatcgttttccaggtcgagatcacggtctatatcaccaaggtctcgattatcagcagaggaagctttcgctaattattttgaggaaaatcagggcatggaagcggctgcctactactacaatatgtcattgatgcagcaggaggatcagaacgcattgggtgagggctatgatgcttatgccgcatatatggactccgcgtacaacatggaacaagcgtatgcacagtactctgaagaatattcgaatacgtacatggattatatggtcgaagtagcttcttcacctcaggcacctggatcggttcttagggaactacctatggcgccgatgatgcccgtggaatcccttgctcctatagcgccattggaggcaatgccatcgatggcggctacggcgtcagggatgccagtggccgtacaaaaaggaaacgttttggagataggaaaaggcgttaatttcgtggataaggtgctgcccgcatacgagagcgacaacgaagaccgggcggtcgttgaaatggcggtgaaacgtgccctgcggaaatatcacgaaagtcgctcccaagccgccgccaagctgcaactgattcgcgatgagctacttctgttgcctccaccaccaccgcctccactgacaaccaagccagctaatctggaaaagcctgttttggtgcagaagaaaccgaagttccgatactttcattttgatcctttcaagtgtgcaatagtgaagacgtacacacgcacgctgcgttcagcctaccgccctccattcgatcccaagcattttgccatgctaatgaagaccggtcgcctgccgcagattcctccaggattcctgcgacaccgcccaccatttatacctgcgcatgtcgatgctgtcacgagaggagcaatgctcaaggaattctttagcaaacatcctccaccgcccctagcgatgcccatgcctgtacccaatgggatgccctattacctgagtggtccgccgccaacgtcaagtggagctgcagtttctcctgtgcctgttaatgtcctgccacaacccatacccgtgttggatggaagtggttatcagggttatcctcagtcggctacaatggtaccattacctgttccagttcctgttccagtgccgctacctgtgcccttgcctgtttctactgacacgacgccatctcccgcgttggaaactccttacttcacaccaccacctctgcccgagctgccgcctctacccgaactgccgtctcaattcaccgtgagttcagtgcccacaataacggagataatgccagtggatatactacagaagttgggaccgctgcccaagaccttggacgttgatgacggaggtggaactgccagtccggaggatattagcgacgatctcaaggaggttgaggcaaagccagccgaacagcatgtggtgggcgtgaagccgcagctccttgtggagacccagtag

SEQ ID NO: 9972 - protein, 1984 aa, DROSOPHILA
MPLAKRKRKQVQSAAVKRIWVFDCVSHSYDDFSSMGKRCVDTQQHRAAIERAEKEKRVRPQTTRKNHRKGGRSEGQTDLRSPDVKMSQAAGGSAVGMEQPATGKQLKPPEDLQDNDTNSLEPGEVVTPPHYHPSSPAVKKHLSKELMISKTLRKLPVSVVEQARKENGSGGTPNAQAEDADDSEGLYSESDSSGEDLKNVEDVQKARKEKQEEAAAATLPQAPPTPFLGINPLRFHMRAPCFEFPRMGFMPRMNRGGPRGMRPTFFGRPPAANRMGAPMMGGLPTQGPPPGAYAPQNPPPTGINSNSGRCKRLQSDVIWTALQPPVSFVFNLVSECSNTKHENCRTKAETTDHNSKESKLPSETKSTEPLIENNRSRELPQHKNYVRGKTSNRSHDRTQNRGRTRERSKESHGKSTENSKNKDEGRGKGRERDLFRRKSRERSQDKNLNRAKSMNLSKEKDEVGGEPRNTASGKSQERDQSRGKTKDRSRERDRTRNKTREKSQARDQTRSKANDAEHTRAKSRKRSSSRDKRREKSKEKLGDKEKNEDLSKEKLEGKSTEHSEKRNESKVKNKDTNEENANKKLRERSKDRNHSKERLHERTQNKSEERKPEAKKVRNAIENSKEAPTDRKKDKLLGPLGEKTDERSKDKQIKRSREQSVTKCPKESGKDTLMEHPPQENGLDGSKRSSMPHESFSESAKTREHASRRKNQTLSPWGSREGTPPMTPPQVQIPQTPIVDIANPKDFDIFADSPPRVNTAVSAPAATIERSTTPPLKSSIPIVPIAKADKLAPLLKASEIHSRIGALLEESDLHLDNLLATKEQLFRRTNEYKERKEAPKEIKAEYLPNSRHNRSATGRAEVEHHKSQPRHINPFKRESVLSGRKSSSRPSSKERRFQRHDSEVENWDRDLELERNQLNGSQLTGFQPRKSDEYTKFSIKKEKDLTPPPLQTNFTRTTIKIERNATPPRHMEHDVLVRNGAVATNAPPPAKEQESPDTDDYIDNWENDDSLASMPKNAPPVTPTPAPNANASLNATPLPPVASQFNGDDDDDDSNALWNAKSTPPPRRKNENLPEGNIHELYDKFMNSIKMSNEHLEPETLDTSKNSSLSNSPAEESSSGTETSSTSSSSSETEDDSSSDDDANESSSNDESATTSGNCNTNQDEAAGKEQLQKKNNVSKDLRKLKSLEDNLARIQMMRENYDAGDEISEELLKMESLFLMQRNAIMDKYRKQELKSNSSEDQQPVDEQGTVQAQEVVKETSFPVNSIFSANREAIKLTISPLKLTRKSVIFDKDEADLPETSKAEPPKQTLQKPQKEIAIVKPTIVESRSKPKLRSPPPSSGSRRRSRSRSISRSRARRRGSRTKSRTPSPRRRRLPSPRRVSRYAKRIGGGAVGGTRKGRSHSRSLTRSRTRSRSPSRRRRLPPAGHRKRGSISPIPQKLAGPRSPPPSRRRQSLSRDREREHLSRSRSPLPFKPPSPPMRRSWSKARSPTRRRSFSRSRSRSISPRSRLSAEEAFANYFEENQGMEAAAYYYNMSLMQQEDQNALGEGYDAYAAYMDSAYNMEQAYAQYSEEYSNTYMDYMVEVASSPQAPGSVLRELPMAPMMPVESLAPIAPLEAMPSMAATASGMPVAVQKGNVLEIGKGVNFVDKVLPAYESDNEDRAVVEMAVKRALRKYHESRSQAAAKLQLIRDELLLLPPPPPPPLTTKPANLEKPVLVQKKPKFRYFHFDPFKCAIVKTYTRTLRSAYRPPFDPKHFAMLMKTGRLPQIPPGFLRHRPPFIPAHVDAVTRGAMLKEFFSKHPPPPLAMPMPVPNGMPYYLSGPPPTSSGAAVSPVPVNVLPQPIPVLDGSGYQGYPQSATMVPLPVPVPVPVPLPVPLPVSTDTTPSPALETPYFTPPPLPELPPLPELPSQFTVSSVPTITEIMPVDILQKLGPLPKTLDVDDGGGTASPEDISDDLKEVEAKPAEQHVVGVKPQLLVETQ

SEQ ID NO: 9973 - DNA, 6808 bp, DROSOPHILA
gcaagtggtacgtttcgttggaggaataccccttcgatcggtggccaccgtacgtgaccgccggcgcgttcattctgtcgcagaaggcactgcgccagctgtatgccgccagcgttcacctgccgctcttccggttcgacgacgtctacctgggcatagtggccttgaaagcgggcatttcccttcagcactgcgacgacttccgcttccatcggccggcgtacaaaggtccggacagctatagttcggtgatagcctcgcacgaattcggcgatcccgaggagatgacgcgggtatggaacgagtgccgatccgccaattacgcgtagcagcaagaacaggcaggactgaagagcgctgcagattgtacatatatacgaacgagacagcacctagacaacagccttataaagtatattaggagcagtggatgatacctcaaccgttcagtgagactttaaaccaagcagctggtgctaatagtgcaagatcgcaagagtaattcaattctaattgtaagcgtaatgataaagcagttgattcaattcgtatatatagagattatgtgcaaatgtcggataacgtatgtgtggtctgatacctttgaatgcaatataaagttgattaacataggaaagcgaataaaaaacttaaaataaatgattggcttgcatttgagcaaagtttaaaattgccgcgcttttgcatggtgtttgtatcagctagatgtggttcgtgtctctgctaaatgaatcgtgtctaattcacagtgaatgtgttggttgatacatggtggttgtatcagctaggcgtggttcgtgtctccactaaatggactgtgccaaattcgcagtgtgaccatatataataataccacccaggcccagtgtgaccgtgcaaccgcccagcaaaaatgacacagccacgcaaacgcgatagtatcgcggccgtataaaaagcggcgctcaccgccgagcgccagtattaaatttgtgacgtcaagagctccgcttcgccaccatcgaaggcccagcttcgccaagtgtacagctatacatagaaacatatatcaggccgaccccgccagcatcccagcttagtagtccgcttcgccaatccaaaaaaaaaactaaatcaaggtgagtttcatttctacttgcagattgaaatttttatttttgtcaattttcgttgatttcgttaagtttgggggatcgccggtaatttcgtttttgccattgtaagatgcggtgggggtaatggggaatcctaactggtttttgttgactgcgcttcttcgttgattgcgaaaatggcagcggatttgttataaatatttattgtgcttgtctagtccgttactttttcatctttctcctcgtttccatttcttttctgctactttgtaacttttttccgcagctgttgaagcgcttttgtcgtcgccccttttgttgactattattttttgttttttttttgtgtggctcaaactttagatttgcgcgtgtgtgtgtgcgagtgccggccggcatttttaacttcttttttttccgccgtctgcttgccgctgtgtgtatgcatgtgcatgtgcatatgtgtgggtacttgggcggggcgcatgtgtgtctctgcccaatatcctcccccacagtgagcggcacgagaaaagtgtcctgcaaattaattaattcatttagtgccttgggtatcgcagactacaaatattgcagtcgaggaacttggaatttgaattgttaaagaggcgttggcgaaactctcgctactccaaagtagagccattttttaaacaactaagttcgagcacttcttgctggcgaattggcaacgaaaagtgaactgggaaagatagaaagatgggatagatgtacatatgcacatttcacaaggatgaagtcactatctgtgcgacctcgactgtgcgatgtgtgtgctggcgagtggcgaattgtgctgggcgtggtgctgtgtcacttggatatccaatatccagcgattttgaaattgaatatatgactaaacgcagccgcctgcataaaatgtgtatataatgtgcgcaacaacaaagtgcttaaaattcattgcaagtcgccgattgcgcctccctttcgttctgtctacccccctctctttctcattgtctatcactagctacacacacacacacacttgtgcatttctgcaggagatgagggtgtaaatgcaaagcggacgtgtctgtcatttctcatttccccatctctccggcgctccagctcctttgctttgcgctctctccaccctttcttctcgcctcctttttgcactccgttcgtcggctgtttgccacgcatcagcggctttgactcattttattttacatacatatgtatgtaagtctgttaagtacgtatgtacgtgtaaatgtgcatattcatattcttattcccaaaaaaatttcagtgtcttttgtttttaacggtctcttggcgccgtctcactcacacccccgaaaagagccaaaagatttacatatgtatgtatatctgttagggaattaaccaaaacaggaagaaagaaagcaaaagaaaagcttacaaagtcgggcgaagaagaagcacagctgtgtgggcaacgataaattcaccagcaaacatatgcacatatgtacgtacatatctatgtttggatgtatgcaatgtgcggtgattcatcaacggcttttaagcgggacgaccatatttcgaatttcgaagttggaagttgattcacggcgaacttcattgcccccacccccgtgaaaatcaccccctcgccgccccgaatcgccatagctcccactttgtatgtatgcgacgttgttgttgttgttggcctctcctttgttcggtgcaaggagctgactaataagacactcgtttacacgatgaccaattaatcgaactttaaacggagcgatctaaaacaccatcgatctacgtataggaatagtttcccaatgagtttacatattgaatctttattgttcagttgccgttttctcattattggctcattgctgttattttggtaccgataaagaattgtgagcaattcagcagcattatcagaacaaagattggcgggccaaataatgttgaattaatcatcatcacttactgcaaatcaattgatttttggattggtcatagtatttgtatcggagtaaggaatatttgtgggattgcagcaagtcaggcctagattcgtgataaaagtgctgcatgaaccgagcggactacgatacgattttgcgccaggggaagtggaagtggggagagcgggaaaatcggcggccgttagtcagttagtcaatcaacgtgattggccagccgcttgaggcgcagctttccgaccatttatggccataaatgtgcaaataaataaatatatagattcgcgatgccttttctccgcttctctgcttcttctccgttttgcttttggtgcggtcgctgcccttgtaccgattgcattttagcgcagctgttccatcgaatgcaatgcagtcccaatccgactgatgacttgataccaataagatatcggtgcacaaagaggattctttgtccggcgcaactctgattggaactcggggggcatgctatgtggcacgcacactcgaatttcgcaactaaaaataaacgtgataaaatgcagtttaaccgctcgaccaagtacacatgtcttctgataagaatgccagtgctaaaaaacaaaggccaagaacggcagcaaagcgaattggagtcttaatctgtttccagttggaaaggttcgctgaactcctcgctctctccgctccggaccgtttcctctttctttctccctccttctgataggaacacacactagcatgactcgtccttgctgcgcctgtgtgtgtgtgagtgtgtgcgtgcctttgagtcatcgttatcgccccacatttctccacatggctatcgcttgagaaatcaacggtcaacaaagagatattacgtttctgtttaaagaaaatgaattatttattaaggcgcaacacagtatcaacaaaagcaaacagtgaagagcaacaaattgtcaatcggaaagttggcttcccctttctcaccaataacatcgatatcctcttccggcttggctccaattggatttgttgtttctaacttgaaatgtttacatagggaattcgtttgcttttcaattgttaataaggtaacaaaaaggcgatccaagccaaacagtaattgtaacagtaactttttgtatgcttcgtttgttgtattccttaaattcctttttcccatgaactattaatttagtatcaatattctttaagactttgctatctaaggtgaaaccactatcataattcccatatcaattggttgtgtcagcaaactgaaacgaagatcttaactagtgatcgatcagcaattaaagctacaagaaaaataaatgatcccaaagaatagatacgtttactatcaaggcaagtaatttaaaattcatcaaaaaactttatgtgttcagatggccgccccagcaccagcactcaaggatctgcccaaggtggccgagaacctgaaaagccagttggagggattcaaccaggacaaactgaagaacgctagcacccaggagaagatcattcttcccaccgccgaaggtgagttggctattgttggttggtgaaaggccgaaaccatgaacaccgaaatctaatccccctgactcacagatgtggctgccgagaagacccaacagtcgatcttcgagggcatcaccgctttcaatcagaacaacttgaagcacacggagaccaacgagaagaacccgttgcccgataaggaaggtgcgttcattgtaggccatctagtatgttgcatattgtacatacatatggtccggccataaaaggcagcctgccttagatggccaatgcaggctctataattgtgttgttatttctctatttctcaacctcaaattgcagccatcgagcaggagaaggagaagaatcagttcatcgccggcatcgagaactttgatgcgaaaaagttgaagcacaccgagaccaatgagaagaacgtgctgcccaccaaggaggtgatcgaggccgagaagcaggcttaaaatgggggctccaatgtggtccactccgatccgagatccgagatctgagatccgatccgatccgatcctcagtcaccccatctctctttttcgactcgccgcatctcactctttatacgtataaagctattccctctcatttttcaactgctaccaagttattcgaaccgctgcgcatgcgcgtgatagcaaaagtattttactattatcgtatttcggttgtccgttttttttttttttgcaatatttttacacatatatatatatattttttgtattaacaagcaagagagccagtctcattcctacagcgtaattaacataaaataaacattcgtctatcccatatatatttgtgcataaatgtttccaaaacacacgacaaacacacacatcatcatcggaggaagaataaaacgcagatacaaagcaatacgacagccaactcactcagaacatttacacaagaaaagacagcaaatatatgagaaatactttttaaaagacacgcaaaacgtatgaagcgtataaaacagaaaaacaaaaagaaatacggtagaaaagcatctatataaagagtatgtgtaattttttaatgaacttttttttatatactttacatacgatatatttatactgggaaaaataaaaaaaaaacataaatgtaacattttataacaaaaacgtactaaaactgcaccgacttttgctttcttcgggggcggaaaactctcaaacaataaaagaaacacaaatggttgtaatacgggaagtatgaactcttgattcgtggtaaatatacaaatatttgcttaaatcaaagacactagaataacaagatgcgtaacgccatacgatatttttgcacacgatttttttttatttattctatcgtctttgcttaaatgctagatttcatagctactcccgacaaacactaactggtggccaccacttcggtgtccattggtgtgcctgttgtctcggcggccactgtgacatcaatagcgccactgccagagaatgtggactccgtggcgtcaccatcgccggaggaatcggcttcggcctcggcactcttgccgacttcagcgtccgctgcagcagcagccgccactctcgcgtcctcgtacttattggtctcaaacttgctgagatcagcgcccagcagtcggagaatgtggatggtctcgtccttttggacataggcgcgcagactggaggtgccgcgccagcccaccgtgtacaacgtaaaccgctggtccacgtacttaagtatgcagctgcccacccctgaaatggaacatcattattagccaaccgtcagagcataggaaccggttgaacttacccaattccttgcagcgctcctgggtttccttcttcagttcgtgagtcgacggcggctgcgtgggatcagtgcaattgagcatcattaccaggtcctcccgctccacctggattctcctgctggcgcccatgaaggcattggaggtctggaggccctcctgggccaatcggaagggatgcaccgtatgccggttctcgcagcgcacgaatgtcttaacgcccgtgttgatgatcttaatgttgttttcgttgttaagcaccaaatcgcggatgggttcagagcagtaatagatgttcttct

SEQ ID NO: 9974 - DNA, 1180 bp, DROSOPHILA
aagagctccgcttcgccaccatcgaaggcccagcttcgccaagtgtacagctatacatagaaacatatatcaggccgaccccgccagcatcccagcttagtagtccgcttcgccaatccaaaaaaaaaactaaatcaagatggccgccccagcaccagcactcaaggatctgcccaaggtggccgagaacctgaaaagccagttggagggattcaaccaggacaaactgaagaacgctagcacccaggagaagatcattcttcccaccgccgaagatgtggctgccgagaagacccaacagtcgatcttcgagggcatcaccgctttcaatcagaacaacttgaagcacacggagaccaacgagaagaacccgttgcccgataaggaagccatcgagcaggagaaggagaagaatcagttcatcgccggcatcgagaactttgatgcgaaaaagttgaagcacaccgagaccaatgagaagaacgtgctgcccaccaaggaggtgatcgaggccgagaagcaggcttaaaatgggggctccaatgtggtccactccgatccgagatccgagatctgagatccgatccgatccgatcctcagtcaccccatctctctttttcgactcgccgcatctcactctttatacgtataaagctattccctctcatttttcaactgctaccaagttattcgaaccgctgcgcatgcgcgtgatagcaaaagtattttactattatcgtatttcggttgtccgttttttttttttttgcaatatttttacacatatatatatatattttttgtattaacaagcaagagagccagtctcattcctacagcgtaattaacataaaataaacattcgtctatcccatatatatttgtgcataaatgtttccaaaacacacgacaaacacacacatcatcatcggaggaagaataaaacgcagatacaaagcaatacgacagccaactcactcagaacatttacacaagaaaagacagcaaatatatgagaaatactttttaaaagacacgcaaaacgtatgaagcgtataaaacagaaaaacaaaaagaaatacggtagaaaagcatctatataaagagtatgtgtaattttttaatgaacttttttttatatactttacatacgatatatttatactgggaaaaataaaa

SEQ ID NO: 9975 - protein, 129 aa, DROSOPHILA; identical to SEQ ID NO: 9960

SEQ ID NO: 9976 - DNA, 3533 bp, DROSOPHILA
tagttaacaataaagctcataagtatatctaatatatctaagttacatggtatggtaatggctactcatagcatccagtgggcccgcatccccctccatttcctactctatactcataatgtgcgaacagaacctaccaaaagtgctcaatcctgtgaccacggtcactgacttctttttgccacgtgccgcccgcgagacgcagatacgcttgggcacgtcctctttcttcttgacgcgcaacagtcccttgccaccgcgtttctggcgcttcttgtcgtcatccgtcccgtcagcggcggcagcctcctcctcaatctttagtcgctcgaagtcatcgggcatgtggagctccagccactccttgcacttctcgtactccggatagtactcgcagtactgcgtatagtggatatatatatatgtaaatatatgggccatatatgatccctaatatggatttttcccaggtttgaagacgaactcacctcaatgggcatcgtgcagtggccacagtacttcatctggatcggataggtgacgccttcgcgcggacccaactgtaggcggtcggcgacgctgttggtgcccacatcttcgttcgtcattgcggatcggattaactgcctgggatttgctccgggttattgaaatattaaaataatgacagttttaagaagtcggctactgcaaactgaccgtttttgtttaggctcgtaaaatatactaacattgacacatgttaaataaatacctacctaaaatatacctttatttaaatcgtagtacaattccgactatcaataagctaaaattaaaatttacgtattttcattaattttacattgattgaaactattttaatttataccttgtattgtattacaaaatacttattaaaattgtatttattggcagaacagaagaatgtttcgatagtaaaataccaaaatatgtttgcctatcaaaacaacactcgtgaaatactgcatgaaggaagcggcatttagaataatttgccggtttgtaacatgcaaccaaagtttttaccaaattgtatcacagtaggctgataattgtattcgagcacaagtcagccaaaaatatccagttgctaacgaaacaaggcttaataaaatggtcacatacaatactctaatacagaacgaaaagaatgaaaatgtggtcgccccgataagccggccattcgccagaaagaggaggactgagattcgccgcctgcagtccaacaggcggttgaataaaaaggtgtgcaaacaccatttggacattgcccattgtacccagaagaaggctccatggcggaattgggcatacctcattctcgccctcgccgcaggaattggcatgttattgcagttcaccgacaagttgtccacggtcagcggattcctggaaagctacaaaaaccagtaccactcgatcgtccacaaccaggacaactactgcaatccctcccgacggctgggcgacatggtcctgcacgcccgccaccaggtactcaaccaggatcttgcattgaaccagctagaactggcactggacaacaccaccaatgaggtgactagcggggaaacagtagatttaatgtgcatcctaagcggattttccatatcacttagtatagtttactattgattgtactaccagttgttgtatatgctcatccagatttatcctggttattgcaacaaacaactagatgatctttagtaaacttaatgaattgccaatattttgtgtattaatatcccggatctccttccaaacaggcaatcgtcttggtgggcacctctggcgtaggcaagagccacactgcgcgaatcttgcgcgaaacgtttccctggcccgagaacgtgaatacactctcctggaccggcagttcttctttgggccgagtgaagagcatgctatccggcctgacatattgcggacagaatatgatcttgattgataacatgacgccgaaggatgcacacttcgtgcctatcattaacgaaatgataagtgagggcgaaaagagcgccaaccacactgagcatccgcaacagaagcggttgaccattgtgtttatctttaatgtgaatagcatgcagcccggcgaggagtttgagatggatatggagatccttagaaatatgccacacacccagttggtcacctttgcgactctggatcccacccatctggtcgactgcatccgcagggaagccgccatcgcaatggtgcacctggaagacgagcacgtagaagagataatcaaaagtatcgatgctagcgcttctggctgcaagtcgattttggccaaggtcctgctctacggcaaaccaataatcgcagactcccaggatactgaccaagtccttccagtaggttccttttagtaggtttttaaagtttacgttttagacaattctgcaaaccagtcgtgataaatttaaaagcaggttggcaaaaactattaggctagcatccgtggaatatcagcaaacaaagtttaatgttgtaaatcaaaaaccaatgttttattcctgtgtatcgtacatgtacatacatatatggccaatactttgctatttttgtactaccatatgtgtaaatgaaattaagacgacaaatgacaaaatttttgtaaaagaaaaccaatggtatcatataagaataaatttaaatgaacgaattatatttaaattgtaagttgacagcattcaaccacgatattaagtaaatgtgattaaaattgccatatgtgtataagagtctagaatcaagttcttataaatatactatttttttattttaaaaataagaaaaaaattattgttctgctatcttaaacaattatatatttcgaagaatgggaattactatactactatatatttacaaggattaatcttttacacaactactattagcaatttaaatattcgttacggtaggattccaaatgatagatcctctggccgtcagcaaccttctctattggcagatccctttctatagagcgttgcacattgttcccaggattttactgtgagttacacggattttgtttatgagcgttttggcagcaattccataaacttgaaggccactctccaaatcgggctgaggattgtcttttatgtggccagcttgttattgaagaaaagccaatgtagtatgccgaccaaagtttagttgcctgtgtgtccaggtatttatatatttatatgtatgcttcagcgtttcatttctgcacgttaggatcgacaatgccactttgtccaaattgtgaatctttcgagataggactatgcttcagctttaatcgcaacccgaaaagtatgctactgctccgaagcaccctgctccattctcgggccattagggcaagcgaagcccatgcgcttctgctgctgttctggcttttgccttgtttgcgctttatgggcactgcgaagagacgctccgttatcggatagcacggataaggggcgtcgtgtggcagcccgatttgctattccatg

SEQ ID NO: 9977 - DNA, 1321 bp, DROSOPHILA
cggcatttagaataatttgccggtttgtaacatgcaaccaaagtttttaccaaattgtatcacagtaggctgataattgtattcgagcacaagtcagccaaaaatatccagttgctaacgaaacaaggcttaataaaatggtcacatacaatactctaatacagaacgaaaagaatgaaaatgtggtcgccccgataagccggccattcgccagaaagaggaggactgagattcgccgcctgcagtccaacaggcggttgaataaaaaggtgtgcaaacaccatttggacattgcccattgtacccagaagaaggctccatggcggaattgggcatacctcattctcgccctcgccgcaggaattggcatgttattgcagttcaccgacaagttgtccacggtcagcggattcctggaaagctacaaaaaccagtaccactcgatcgtccacaaccaggacaactactgcaatccctcccgacggctgggcgacatggtcctgcacgcccgccaccaggtactcaaccaggatcttgcattgaaccagctagaactggcactggacaacaccaccaatgaggcaatcgtcttggtgggcacctctggcgtaggcaagagccacactgcgcgaatcttgcgcgaaacgtttccctggcccgagaacgtgaatacactctcctggaccggcagttcttctttgggccgagtgaagagcatgctatccggcctgacatattgcggacagaatatgatcttgattgataacatgacgccgaaggatgcacacttcgtgcctatcattaacgaaatgataagtgagggcgaaaagagcgccaaccacactgagcatccgcaacagaagcggttgaccattgtgtttatctttaatgtgaatagcatgcagcccggcgaggagtttgagatggatatggagatccttagaaatatgccacacacccagttggtcacctttgcgactctggatcccacccatctggtcgactgcatccgcagggaagccgccatcgcaatggtgcacctggaagacgagcacgtagaagagataatcaaaagtatcgatgctagcgcttctggctgcaagtcgattttggccaaggtcctgctctacggcaaaccaataatcgcagactcccaggatactgaccaagtccttccagtaggttccttttagtaggtttttaaagtttacgttttagacaattctgcaaaccagtcgtgataaatttaaaagcaggttggcaaaaactattaggctagcatccgtggaatatcagcaaacaaagtttaatgttgtaaatc

SEQ ID NO: 9978 - protein, 351 aa, DROSOPHILA
MVTYNTLIQNEKNENVVAPISRPFARKRRTEIRRLQSNRRLNKKVCKHHLDIAHCTQKKAPWRNWAYLILALAAGIGMLLQFTDKLSTVSGFLESYKNQYHSIVHNQDNYCNPSRRLGDMVLHARHQVLNQDLALNQLELALDNTTNEAIVLVGTSGVGKSHTARILRETFPWPENVNTLSWTGSSSLGRVKSMLSGLTYCGQNMILIDNMTPKDAHFVPIINEMISEGEKSANHTEHPQQKRLTIVFIFNVNSMQPGEEFEMDMEILRNMPHTQLVTFATLDPTHLVDCIRREAAIAMVHLEDEHVEEIIKSIDASASGCKSILAKVLLYGKPIIADSQDTDQVLPVGSF

SEQ ID NO: 9979 - DNA, 2841 bp, DROSOPHILA
aagagcatcacgcccatgggtggcttcccccactacggtgaggtcaacaacgacttcgtcatgatcaagggctgctgcatcggctccaagaagcgcatcatcaccctgcgcaagtccctgctgaagcacaccaagcgctctgccctggagcagatcaagctcaagttcatcgacacctcgtccaagatgggtcacggtcgcttccagacccctgccgacaagctggccttcatgggaccgctcaagaaggatcgtctcaaggaggaggctgccgctaccaccgctgctgctgccgccgccaccaccaccagtgcttaaacaaaatgtcgtgtccgcgttcaattgtctgctcgcttctaccaccaactgctgcggtagggcagcgatcaataaacagattttggctaagctgactcattaatcttttcaattgcatctaatgggaaaagaccacgtcacagattttacaatcgattaatgttgattaggaggtggaatcattagtttatttctcatgatagtttaatatatgtacatacccaggctaaattgttatttattatacctccttagagctaaaagtaaaataatattaggacactagtaaatagtttatctacaataaaagagtaccaccaaacttaaacactcgtagaacatttatagcaaaagagattagaaatcgccaattgagttcgatgtgatttgctagaataattgggtgtcctccggatcagcaggttagcatcgtagttcctacggagagcattgctacaatgccactgactcttggcaactgattgtccgtagtctatagttctgcttttatatgacactcgagtatgggtaaactactccatcgtgaccagacattcatgggaatgcagctgtaacaatacttggctacaattcctctccggttacttggtaaaaaccccccacagctatcctataaatagggtactttgggtagctaagcctcagtccaaaaccaacgctgaagatggccattaagtctctgattttgcttacttccctgctgggaataagccttgcagcggactattgtgctctgcccacgtgcctggacaagcacatagcctgcaacaacaagggagtaagtagtgatagctggccaaaacctgttggtgctcacccattctcgcccagaatttcagtgaaaattgtcccaaggacgtgcgtgaggtgaagatcgagccgcaccacaaactcatcctcaatctcttcaacgagttgcgcaacaacgtggctggaggcaaaatagaaggactacccaaggctgttcgcatggccaagatgtcctggtgcgaggagctctcccatctggccttgctgaacgtaaagacctgtgagtccctgccagataaatgtcgcagcaccgagagattcgcctacgccggccagaacaacgccgtgttccagtacagcggagccgagacggagtacaccgatgcggaaataataaaggagcagatcgagaactggtttgctgagcgctcgaatgcatctcccgagatcctcgccagcttcccggaggagcttcccaacaaggcggtgaccaagttcaccatcgcggtggccgagaagaacacccatgtgggatgtgccgcggtgcgcttctcccgggacttttacaaccacttcgtactcacctgcaacttcgccacatcgaacattgtgggtcagcctgtctacactccgggagagaaggcaaccaccgggtgcaagaaccgttatggagctgcctacgactaccccaacctgtgctacgccaaggagatctacgacaacgagaaggtcatcgagaacacacagacgatgtaggcatggaatggacttcgattgatgggacaatggaatttgattaatatgtaacattttagtttaagagtgctaaaagaataaattttaattatttatgtttgctgtaagtaacggatttgtgctatccaaacagctgtttgcccagcaagtgggcagccccctttatacaccctgtaactgtggataaagtattccaatttattggtgataattaaaaaaatatacctttaagaatacagttcttaaattcaattatatttgtctacaatgaatttaaaattatctgtgtgctagaaacccttttaataaaacatctagcgttttatataatcatttgaaattaaatgcagggtatccagtggtcactacctaatcagaaaacatttcatttatttttgtagcaactttttcgccggcccaaaatgttacgcgaggctcttaggatcggcaacaggcgctggtacagctacaagtccgtccgtcgtccgaatctgggcgccacaggtactccaaagatggagccgccaaaggaacagccggaggcgtcctccaaagcggagagcggacatggcagcctggccaagcaactgagggccaagattctgtccaccggacccattcctgtggccgagtacatgcgcgaagtgctgactaatccccaagctggctactatatgaaccgggatgtgttcggcagagagggcgacttcataacctccccggaaatatcacagatcttcggagaggtgagataagcacattgatcagaacctgtcatcataacatcatatccctttgcacagctcgtgggaatttggctggtgagcgagtggcgcaaaatgggcagtccctcgccctttcaacttgtggagctcggtccgggtcgcggcacactggccagggacgtgctgaaggtgctcaccaagttcaagcaggacgccgaattctcaatgcacatggtggaggtcagtccgtttctgagcaaggcacaggcac

SEQ ID NO: 9980 - DNA, 788 bp, DROSOPHILA
aagatggccattaagtctctgattttgcttacttccctgctgggaataagccttgcagcggactattgtgctctgcccacgtgcctggacaagcacatagcctgcaacaacaagggaaatttcagtgaaaattgtcccaaggacgtgcgtgaggtgaagatcgagccgcaccacaaactcatcctcaatctcttcaacgagttgcgcaacaacgtggctggaggcaaaatagaaggactacccaaggctgttcgcatggccaagatgtcctggtgcgaggagctctcccatctggccttgctgaacgtaaagacctgtgagtccctgccagataaatgtcgcagcaccgagagattcgcctacgccggccagaacaacgccgtgttccagtacagcggagccgagacggagtacaccgatgcggaaataataaaggagcagatcgagaactggtttgctgagcgctcgaatgcatctcccgagatcctcgccagcttcccggaggagcttcccaacaaggcggtgaccaagttcaccatcgcggtggccgagaagaacacccatgtgggatgtgccgcggtgcgcttctcccgggacttttacaaccacttcgtactcacctgcaacttcgccacatcgaacattgtgggtcagcctgtctacactccgggagagaaggcaaccaccgggtgcaagaaccgttatggagctgcctacgactaccccaacctgtgctacgccaaggagatctacgacaacgagaaggtcatcgagaacacacagacgat

SEQ ID NO: 9981 - protein, 261 aa, DROSOPHILA
MAIKSLILLTSLLGISLAADYCALPTCLDKHIACNNKGNFSENCPKDVREVKIEPHHKLILNLFNELRNNVAGGKIEGLPKAVRMAKMSWCEELSHLALLNVKTCESLPDKCRSTERFAYAGQNNAVFQYSGAETEYTDAEIIKEQIENWFAERSNASPEILASFPEELPNKAVTKFTIAVAEKNTHVGCAAVRFSRDFYNHFVLTCNFATSNIVGQPVYTPGEKATTGCKNRYGAAYDYPNLCYAKEIYDNEKVIENTQT

SEQ ID NO: 9982 - DNA, 2858 bp, DROSOPHILA
tctattaatttagtgagactgcttcatctgccaatgtgcaccgtcatggggcaaaggactcttcagcaagggcgatataaaagtccaaagtcctcgttggcccattattgtctggcagttctttcggaaacccagatcgtaggtgcaatcaaaaatattatagtaggtagagttttggcttaaaatctgcatttgatatgccaacataaaggcaggcatatagctggcgcttatattcaagaggaaggcaatggtctcaaaagtattgccagtataattttggaaaaaagtcctagttattaaattaaaaatcacagacgagagactcatgaagttaccgccattctgcaggataaacatacaaaatgttgcaaagcttgtgactaagccgagcgttaaataaaatgtgaaccagaagaaaaagcgttgattattgtgtccaatgcaagtgcccgtgaatatacagtggtggtcccgtctcaaaatgcaggtgttgcacaaaacgcagtgccaggatcgtggcgatctcagctttttacacgattcgcaatagtgccacaggggctcatcctctggattcgggcatcgggagtccttggacaaggtgtttaccgatgagctagtcatatagcaggccagcatgttaccaagtatgttgtgcgttatgaaggtgaccaatatccagtagagcttgtaagcaatgtcgccaaacactttgggcgcaatgtaaaacatctgcagtgagaagaagaaagctgtgctgcacaggacgaaaactatcgaaagtggatgcactatcctcacaaagttcttcgggtagcgattggcaaagtaatggcaaaatctattcacgtagcacattttttaggattttgaaaacttctgttgtaaattatagactaaatagaaacatttacatcacagaagaagaaacgccaacccgacatattataatagaatttattcgctatcttatattcaaagtttttacaaacaaaatttacactgtctgcttctggaaccactgagtgccatcggtaggaagaggacttgagatcgttggagagaaaaaaatccagaagcgccgttttcccaagaccatatcaaaatttcttctccaaccaacatcatagctgcgatcgagcatcttatagcatgtactattccgatataccattatcatttgaaagacgaacatgaagagggggacgccaaaaagaaataaattcagtttgaaaaggttggcgattgtgtacttccatttgaaatcagcatcttgggttgtatcctggaacattagcaacaaaggatcgacgaccaaaaaggccttgtttgtccaattcaaaatgccattgtagacgagcgcctgtccgctgccaaagctcaggtgaaacaagaaggcaaggaaatacctctgatttttatggccaatgcaactggcaaagaaggtgcagtggtgatcccgcttcagaatgcaaatgttgcacaaactacagtgccaggacctcggtggcaccagcttttggcatgtggagcagtagtgccacaggtgagcctcacctgccacaggatactgtctttccagaactaagctatcgactgaggtattggtcatacagccgagccaccagttgcccaatatattgatgactgtataaattcccataaaccaacacaatttgtgccatataccatggggatcagttatttgcggcaaaacgtagcataattcatagacaaacagcaatccaatcagacagagtaaaaatattgcacaaaacggatgaagtaggcccataacttttatgcgatgtagttgaaagtgacgatgaaacccttcctcggctcgaaaacacattcttctactccaaccgcaagtagatcttaataaaactcgaaatcgaagcatttataaatgacagacgtattgttaaatttatcaaataaattatttttaatagactttgggcaccagaactgccttgatttggaaatatgtatctaactgacataatcgcatcacccactgaattgtaaaaatctggcattgtatgtatgtgtactttggtgggtggtttcaaattcaatttcttttcctttttaagcggattattgcgaaattacgttttataattgctggcgtcatttgtgaaggcagaaaatttttatttaagtggcgcttctaagtgaattctacaattcaaaagatttggcttatggaatgttttcacctaaaagtttctcaaatttttacttcattttcaaagcagtataggcaaaaccttgcttataaagcaagcttataagcagaaaataaattgaaataaaaaaaacaatggagggaaaaagggcatcagcatggcaaaatatggtattttgcagcagctgtatgttgtataaacaaagagcagaataaaaacaacgaggaatgcatatcaaatacatgtaggaaacagctgggttaagtcgacttcatcagcccagcgaccgcaaaatggcagctgtcggccaggtttagaccgcaggaacgaatgttgtctatttcgcataaatttttatgaattattaatatgaactaagcattttgaatgtggcctggtcgggtgggaaagctggtgaggacgcggtttttcattttaagttcactgaggtgtatggcacacctattgaggtggtttttctttttgccgtaaagtagagtggcagtttgcttttcgtttgcataaaatatgtacgatggggcggggcgggactttcctcacttcgtggctaaatgtgtttgccgtctttggcctagaccggaagcaaacaaacagccattttgtgctgctattcgacgcagccatttccggcagcca

SEQ ID NO: 9983 - DNA, 858 bp, DROSOPHILA
atgtgttttcgagccgaggaagggtttcatcgtcactttcaactacatcgcataaaagttatgggcctacttcatccgttttgtgcaatatttttactctgtctgattggattgctgtttgtctatgaattatgctacgttttgccgcaaataactgatccccatggtatatggcacaaattgtgttggtttatgggaatttatacagtcatcaatatattgggcaactggtggctcggctgtatgaccaatacctcagtcgatagcttagttctggaaagacagtatcctgtggcaggtgaggctcacctgtggcactactgctccacatgccaaaagctggtgccaccgaggtcctggcactgtagtttgtgcaacatttgcattctgaagcgggatcaccactgcaccttctttgccagttgcattggccataaaaatcagaggtatttccttgccttcttgtttcacctgagctttggcagcggacaggcgctcgtctacaatggcattttgaattggacaaacaaggcctttttggtcgtcgatcctttgttgctaatgttccaggatacaacccaagatgctgatttcaaatggaagtacacaatcgccaaccttttcaaactgaatttatttctttttggcgtccccctcttcatgttcgtctttcaaatgataatggtatatcggaatagtacatgctataagatgctcgatcgcagctatgatgttggttggagaagaaattttgatatggtcttgggaaaacggcgcttctggatttttttctctccaacgatctcaagtcctcttcctaccgatggcactcagtggttccagaagcagacagtgtaa

SEQ ID NO: 9984 - protein, 285 aa, DROSOPHILA
MCFRAEEGFHRHFQLHRIKVMGLLHPFCAIFLLCLIGLLFVYELCYVLPQITDPHGIWHKLCWFMGIYTVINILGNWWLGCMTNTSVDSLVLERQYPVAGEAHLWHYCSTCQKLVPPRSWHCSLCNICILKRDHHCTFFASCIGHKNQRYFLAFLFHLSFGSGQALVYNGILNWTNKAFLVVDPLLLMFQDTTQDADFKWKYTIANLFKLNLFLFGVPLFMFVFQMIMVYRNSTCYKMLDRSYDVGWRRNFDMVLGKRRFWIFFSPTISSPLPTDGTQWFQKQTV

SEQ ID NO: 9985 - DNA, 3103 bp, DROSOPHILA
tttatacaatcattattttagtttaaaatgcgtgcaacagataagcaaaaacatagcctatttggcgtaatcgttggattttttaaaactccgtaatttctgtgtaaaaaacgacattgtcgtggacaatgtttgccgagccacttttcttaaaaatgtgatcctatctaactcacaaaagtaatttacataattgtgagaaactattattcagtacgaatttataactaactattcaaacatattcaatataatagaaatacaactgctttgtgccgccgaaaacataaccttcaaaaaccaacagccatgcgtgtgtttgtttgcctgcgactgttcgcatttgtttacaattgttttatgtagaccatttaaactaatccaaatcccatttgcagttgaaggagtacgaggtcgtgggccgcaagctgcccagcgagaaggagccccagactcccctctacaagatgcgcatctttgcccccgacaacatcgtggccaaatcccgcttctggtacttcctgcgccaactgaagaagttcaagaagaccaccggcgagatcgtgtccatcaagcaggtgtacgagacgtcgcccgtgaagatcaagaacttcggcatctggctgcgttacgattcccgctcgggcacccacaacatgtaccgcgagtaccgtgacctgactgtcggcggtgccgtcactcagtgctaccgcgacatgggagcccgccaccgtgcccgtgcccactccatccagatcattaaggtggactcgatccctgccgccaagacccgccgcgtgcacgtgaagcagttccacgattcaaagatcaagttccctctggtccagcgtgtccaccacaagggcaacaggaaactgttctcgttcaggaagcccaggacctacttccagtaggattctcctgcatcctatacctatgacttagtggattttttcaataaatgagaacgttgaagagtacactagttgtgaaagcttctttatttgagttctccacaggagtatatgacaatcttttggctgggagtgcccgacttggagccacaacgttccatcttgcgcaccacctcggcgccactgatgacatggccaaaaacgacgtgcttgttgtccagccaatctgttctgtagaacaaaagaaatgtaattagtagaaggaaatatttcagttaaattatttattgtaaaaccagcttactttgtggtacatataaaaaactgcgagccatttgtgttggcgcccgagttggccattgaaagagttccaaaactgttgtgtttcagattgaagttctcatcgttgaactttttgccatagatggacttgccgccggtgccattgttgttggtgaagtcgcctccttgacacatcttttgaatggaaagaatgcataaatgaagaaaactatgccaaattattatcttacaaactcgggtatcacgcggtggaaggagcagcctttgtagccgtagccctgctcgtgggtgcacaattgccgaaagttctccgccgtcttcggcaccacatctgcccggaggagcatcacaatgcgaccggcgtcattgccaccaatccgtatgtcaaagaagacttgtggattgcgtttctctgccttttcgatgactgccggcccggtggatggtgtttccactttctctgcctccggttcgccttccggctgcaacgtggctcccgcatgcttctgcaaccagtcgtcatctgcccagataggcttgaaactgtcctccttaacgcgcactggtttcgccaagttcacgcgaattgtgcgtccgcagagctcggagtcattctggaaatagttgattcgttgtatttccgctgcaggttgatctacttgtgcaacaacttcttaccatattatcaatggcagcagccgcatcctcgctctgttcgtattctataaaggcgaatccgcggtgtcgctgtgattcgtagtccgccggcatttggatatctgcaatatccccaaagggtataaaggcattgttcagcagtctctctgtgacctcgtcagccaggccgcccacataaatggtgcgcttgtcgttagacatggtttaactaattcatgaaaccacaataaagaaaacaaacaagataaatgcaaaatgaatgtttatgcgacgcaatcgattaatttcactgcatttatcgacattaaatcgatttaaaatttaatcggaagcggggttttccaccaaggttggcgacttgcatattcttttatcgcctggcagtgctgtacaaattcaaaacgaaaaccgccaaatgaattcaaaaaaacttcgttacccgctaggtattaaattatttattgattaagataagctacactaagattatgttattactgatccgctttcgttgccgcaaaagccctccgtactcgtactgcaaacgctggtgagattttgcacgctcgtttggggccataaaagctggaagacggtgacacaatagcccggcacaaaggcaaaggatgcgtagaggatcagggagacgaagctgccgaggaggacatctaaaagtgaaaatagcatgttgcgacataacaatccattagctggttccatgactaagaccgccgagtgaccggcatagataagatatcgatgggtaaagacaatatatcgcgctaaagttgatactccgtagatacgaatggtggcgcggcgctaatctttccctttcgatggaaagggcaccgtccattagtactcactgaggaagaccttttcccacggctcacatatggcgatctgtgtgttcagttcgtagagggtgtacagccatttcacatagcgcttgaatttcgcgtaatcctcggccagctttgggaacatgctttgcgacatgggcttctgcaatcgacgtcaggcgatgtggacggtgtcagggtgcgcggcggactagcctagtgccaacttcgacacctggtacctgtgtccccgtcaccgccttatcactgcatacaactacacgcgtttttattctctaaccacacatatatttatgtatatatatatatgtttttatacatttttcgggctgtaaaccaaat

SEQ ID NO: 9986 - DNA, 910 bp, DROSOPHILA
ttaaaccatgtctaacgacaagcgcaccatttatgtgggcggcctggctgacgaggtcacagagagactgctgaacaatgcctttataccctttggggatattgcagatatccaaatgccggcggactacgaatcacagcgacaccgcggattcgcctttatagaatacgaacagagcgaggatgcggctgctgccattgataatatgaatgactccgagctctgcggacgcacaattcgcgtgaacttggcgaaaccagtgcgcgttaaggaggacagtttcaagcctatctgggcagatgacgactggttgcagaagcatgcgggagccacgttgcagccggaaggcgaaccggaggcagagaaagtggaaacaccatccaccgggccggcagtcatcgaaaaggcagagaaacgcaatccacaagtcttctttgacatacggattggtggcaatgacgccggtcgcattgtgatgctcctccgggcagatgtggtgccgaagacggcggagaactttcggcaattgtgcacccacgagcagggctacggctacaaaggctgctccttccaccgcgtgatacccgagtttatgtgtcaaggaggcgacttcaccaacaacaatggcaccggcggcaagtccatctatggcaaaaagttcaacgatgagaacttcaatctgaaacacaacagttttggaactctttcaatggccaactcgggcgccaacacaaatggctcgcagttttttatatgtaccacaaaaacagattggctggacaacaagcacgtcgtttttggccatgtcatcagtggcgccgaggtggtgcgcaagatggaacgttgtggctccaagtcgggcactcccagccaaaagattgtcatatactcctgtggagaactcaaataa

SEQ ID NO: 9987 - protein, 300 aa, DROSOPHILA
MSNDKRTIYVGGLADEVTERLLNNAFIPFGDIADIQMPADYESQRHRGFAFIEYEQSEDAAAAIDNMNDSELCGRTIRVNLAKPVRVKEDSFKPIWADDDWLQKHAGATLQPEGEPEAEKVETPSTGPAVIEKAEKRNPQVFFDIRIGGNDAGRIVMLLRADVVPKTAENFRQLCTHEQGYGYKGCSFHRVIPEFMCQGGDFTNNNGTGGKSIYGKKFNDENFNLKHNSFGTLSMANSGANTNGSQFFICTTKTDWLDNKHVVFGHVISGAEVVRKMERCGSKSGTPSQKIVIYSCGELK

SEQ ID NO: 9988 - DNA, 2837 bp, DROSOPHILA
tctaatccgcgagatcaacaatctgaccattgttgaaggcagctatgcccagagtttgatcaatctgcgagtattgggcacctatcttcatcgctacgctggcttacatgcggacgagctgcccaaggacacaaagccactgacactgctcgtgggaatgcaggtgaacgccttctactacaatctggataactcggtgtacgtgatggcgggagtactgcatccgcctgcgtaccaccgttcatggcccgattccttgaagttcggcaccattggctatctgataggtcacgagttgacccacggcttcgatacggagggctccagtttcgacagcgccggcgaagtacgcgactggtggtccaggaagtcggaggcggtattccaggaacgggcgcagtgctatgtggattacttcaaccaatacttgataccggaaatcaaccagacaattcgcggcaatgagacaagggacgagaacatagcggacgccggtggcttgagggccgcactcaccggctatcgaaaccacatgaagcagctgcaacgaagtggagcggatggggagacgttggctcacaaaaacgagcagatgcccggcctcgacctgtcgccggagcagctcttcttcgtgggattcgcgcagctgtggtgcgccgactacgagccggagcactactgggaggagctcactggcgcacataccgtcgataagtatcgggtgctgggtgccgtttccaacaacgacgattttgctgaggtctacaagtgcccactgggcagtccaatgcatccgaaggctgagagttgtcggatgtggtgaccataagtcgtatataaaggaaaagatgtaaaatactctagatgttcaactacaaaataaatgaaaacaggaaaaataatgcaaatcgacgatatagtcttacacatttctgcaattgagttaactcactcgactttacccatttactcttaatagtctctttatttctaattggttttaatgagcaacgtgctctgaggatttgaaggcgttgggtccccggtaattctcgaccagcagggatttgtagcgcctcaggtggacgctgagtccttcctcgcgctcgctgacggagaggattgagacgcgggccacgaccagatgggaaggattcgattgactaaagcctcggattacgtcgatttcatcgccgacttccagctgtaaatggtaaatcataagattgaattcgatctatatatggactccatacctgggcactctttttgggcagcttctttccattgacgcgtatcttgctctcgtagaaattcagttccactttgctgtgggaggtaagacatcatggttattgggggcatttagaaaaccttcggctgtttcttactttctcgccatgcccaggccagctttcagtaggagatcggcgcgcagtgagttcaccttggtcttgaccaccttggagtccctttcgtccttgaaatcctcatcatcctcgtcgtcgctgtccaagtcatccgatgctcgtgaggatttcttgtcgtacttccacgctgaagcactggtgtgtacaggagcctgcagctctaaggtggttgagagtttaggcagacttttagatggaaatggcgtccttagggatcttcctagtcgggctatttgacgaaaagtccggagcattttgtgtgggcgccttaacaattacgataacaaactgaataacataacctaaaaactacagctgttgcggtggcgttgccaaccatctctaggacttgtttgcctttttgtttcgtttctttttgggtttcttgtcgggattaggacgcacttggtagacagtaagggggcgatagttgtgcagatctgcgggcaggaaatcatcatcatcatgtggctccacctccatgggctctgggctgggggacttctcttttttaacagggttatttttgacttctactaccggctttttacttttggctttcattgccaaattactgagggcattgcccagtttttgggtctccacctggacatccacgcggtccaactttactgagggttcgtccgagaagcaggatatgaaatcatcaccccaatccttcttttcagccactgggagctgcggttttttttcctcttcggctggtttgattatttcgggtttcttcttgggttttttgtgcgttttcggggctatcttcttagcaggtgtaggtgttctctttcgggcagtaatccactgttccaagtcctcgcttattgctttcaaatctaatggcaaggccaaggaaagcgctctaacgccaaagatttcctgggtaagctcctccagtttgggctgcgcgtaaatgggagccgtgggcatcttgacagatgcactggtggccattagacggacgaggtgagttggtcgcaggctcaaggaaaccaataggcaggagaaacgccgcgagtttatggcgcgtagggagctctccaggccgagatgtattccgtatcgagtggcaaacgatttggtctgcccgtcgctgcttttaattgcattctgaaggatctgacggaactgctgcacttcctcctccgataaaagagggctaaagtcaaaagaaacaacctgttgattgggtttttattggtttctgcccgcctcacctgtgctgtttgtaaggattggctagaatattgcgcagtttgggcagcaatttctttttgcccttagcttctttctgttttatgctggacaaactcatgtttacgatataaactaataaaaaataaaaaatttctgctgaaaaatcaaacaacaatgtgtttggcttttggccag

SEQ ID NO: 9989 - DNA, 723 bp, DROSOPHILA
aagtgcgtcctaatcccgacaagaaacccaaaaagaaacgaaacaaaaaggcaaacaagtcctagagatggttggcaacgccaccgcaacagctgtagtttttaggttatgttattcagtttgttatcgtaattgttaaggcgcccacacaaaatgctccggacttttcgtcaaatagcccgactaggaagatccctaaggacgccatttccatctaaaagtctgcctaaactctcaaccaccttagagctgcaggctcctgtacacaccagtgcttcagcgtggaagtacgacaagaaatcctcacgagcatcggatgacttggacagcgacgacgaggatgatgaggatttcaaggacgaaagggactccaaggtggtcaagaccaaggtgaactcactgcgcgccgatctcctactgaaagctggcctgggcatggcgagaaacaaagtggaactgaatttctacgagagcaagatacgcgtcaatggaaagaagctgcccaaaaagagtgcccagctggaagtcggcgatgaaatcgacgtaatccgaggctttagtcaatcgaatccttcccatctggtcgtggcccgcgtctcaatcctctccgtcagcgagcgcgaggaaggactcagcgtccacctgaggcgctacaaatccctgctggtcgagaattaccggggacccaacgccttcaaatcctcagagcacgttgctcattaa

SEQ ID NO: 9990 - protein, 189 aa, DROSOPHILA
MLRTFRQIARLGRSLRTPFPSKSLPKLSTTLELQAPVHTSASAWKYDKKSSRASDDLDSDDEDDEDFKDERDSKVVKTKVNSLRADLLLKAGLGMARNKVELNFYESKIRVNGKKLPKKSAQLEVGDEIDVIRGFSQSNPSHLVVARVSILSVSEREEGLSVHLRRYKSLLVENYRGPNAFKSSEHVAH

SEQ ID NO: 9991 - DNA, 13798 bp, DROSOPHILA
acttagctatcacatttttctgataggatgagccatccaaaaaacaaaaaaaaatgacaaaccacaccacccaccgaccgcccaaaccccaaacgcccttcgatcaacccgtgcgcgtttattaattagaatttatggaacgactattgccgcgtccaaatggagacaataaatagccgttgcatatgttgttggagctggaaccgactaatcttatcgagccgaatccactcctcgcctcagcgcttcaaagtatcaatctctcgacagctgaagagctctcctatcgcccaggagcggttgtcccatcggatccgtcgagatccaagcgataccaatggcatactaattccatgaatatgtactcccagctgagatattgattctgtttaggaacttttcgtatcttattctatctttctaacaagatattccaatgcatccttacaagtctccaaagactggaaaatatagaggccccgcaatatgatcttgtggcgtactttatcgactgaaccgctcctgagagctgccacacgacccacgggcaatcggggatttaactgccacgcccaccagccagccactgcacaccagccgcccagttatctggaaattggcaaaggcaaatcggggagcgtggaaatatgtacatatctgcccaaaattagcagaacactatgagacgagtacaacaaatatatcgttaaatatatatatatatacatatataataatgccgctggggcggaatgttcgtcgctctatctccgtccctgtccgattatttacagttagctccggccaggcgataaccttgcccacatatatcttggccagctcttggaccgccatttgcgattacctggtggtgacggcggcggcgacggcgacgtcgacagcgacgcctgccactaatcactccaattagctagaaagtgcttttcgtttaaaattcgcacgttgtcgcagtttcttggcattgtactgcgaggctctgagacagccacttggccatttggagttccctttattccttggcttggtccgaaaaacgagaatcgatcatcgtcaaggctcaaggttcgagtttcaagtttcacgtttcgagttccgtgtccaccggccgaaggattcgcattttttttgcccgacaattgtgagtgtgacccttaacaaaaaaaaaaaaaaacaagtgaagatcctgccaaagccccgaaaagcacaaacatcaagccaacaaaaaaggctaaaataaattaaaaaaaaaggccacaaatctgaacaaagcgaagcgaaagagcaacaaaagcgcattgcaaataaccaaattcgaatgcagaaagcaaaaaaaaaaaaaggaaagaaacaaattgaagcaaattgtagtatttagtaataaaaatcaaaacacgccgacagtcttgagttactctataaagagaggaaaaagcaaacaactcgttgaacaagtgctataaagcattcggtttaaggttttccactgccacacgaataatactatagattttatttttcaattgcggaaaccgcgagagttccgcgtgtcggaaaaagtcttaaaaaagtctataaaaataatacgtttcgattcgattcgaaacgatttgttgcaaaagttgcagttcttcctttttatttgccaagttcaagtgttgccaaaaaaatagtggttcagcttaggagattttcatttgtttgaaaaaaaaaatgttgaaaaaattcaattttgatgttcaatatatgagaattttaaattagtagaaatagttgcaataatttagcaaatgccgaattttccatcaacatactttcgattttttcaagagtatcgccaaaaagtgcaaaaaatatgagcaaaccaggcagtttgggtgaagggctggcttcgtagctaaatggaaataataataaataaaagcgagcgaataacaatgaaacaacatttggcactagccaatttgtaggccacttaagtcccgatctacgcgcggccaagataatgcagattgtctatagccgatttcgaaacgcgttggatggagggggaaatagattcgacgatgatatggacgatgtgttatggagtttccgactttgatgagtgcgttatttcgctagaataataattgaaatcgcactgcttgctttttaatgacgtttggcgcgtgtcgcgttttttcatgtactatatacgatatatacgaaaattaacccacacgcagcagccataaaaatctttggctcaaatgtagcgaaccgccaattgctggccaaattcggatcatagatgtatctacgtacatatgtacatattatacgttttatataagagcttgcggcttatttagtttttcagtaaaatcgtggaaatccgctaaaactatatcgccaattgccaatcgccaatcgggcaattgaaaggctcagaaaacaacacgtgctggccgaatattctggcatgctcatattgtattcgtgtattcatacgaggtatatactataaagactatcgacttctgccagctgtttggctttaagataattagcattagacggcgccgactttgttgtgatgacgtcagtggatcgtggctcgcagtcgccagtagcaagttctttatgagccatattaatttttggccaggttttttgctatcgtttctggatttcttcgtaaataataaaaacccgaaatgaccaaactacgtcgcattatctgacgtattatctgcgatagtagccgccgagcccaaaatccaaccaaaacgaatacttaagcccactaatcgattattgttttgggatacactagcatattatacgagcatatacaggtatatgtatgtatgtatatgtacatatcaatcataagcacagccggtagagaacttatcgaacgcactgttcgttcacgcgctcttcgagtcacaaattcaactgtcactgccataacacccagtcccatatataatgcatgtgaagtcacatgccatatagtgacaagtcacgtattgcatcacaaaaaaatcttagacaactgccagagtgactgcgaaaattcgtaggacacctgggactgcagtttataccacattatagtaacaatacaaattagtcatagggtttgctaatgaaatcattaaaaatgtttcaactcacaactaaatcgaaaaaacgtgacacattctgtagaatagaataaattgcacacaagatatactagtaaatagtttactaaaatgtatcattttaaaaagtacaaataattatagcttgggctaaaaaaacacttaaagctctttaaaattaggccacaaaatattcctgcaatttaataggaacaataaatatctaacaagttttagaatagatacgataaacctttgtttggttatagttcactgatccacacgtgactacaaactgcgatcacttggctaggccatcgatattttcggtctatatcctcatctttttgcagtcgtttcgttttcgtttttttcttcttaaaatgttatcttcttagttagcataaataaatattaatttatgtagaattgtaaaaagaaaccgcagccggcgatcgacagcgacatgattataactcataaagtttttagcatttttatgctggagtttttttattatttattgttagcattaatgatagcaatcgttaatttgctgtgcttatttcctttgagaatttctatgccaatgcctggccataaaaagtttacccaatttttttttttattatcattacttgttttgtgcgaatgtgtgtttgatattttagtgtttttcatttatttttttttttgtgtcgtcaggggtttcattgtgttttgtcgcttcagttgaggggcctgaataatagtttttgataccgcctaatatgcaattaattggacatgaacttgaactgcggccgaaacgggggtgggggcgggctatgtcaattataaacaattagacaatggcaaaattggtaaccaaccgatgggaacgcgggccaaatgaatggggaagactttggcgaaatgcttctgaatctcaaacagattcgcaattgttcctgggctacactcgtaatataatatgtatttatagtagatacgagtacgagtatatacggccagtcagtcagtcagccagtcagtcagtcagccagtcagtcagccagtcaggcaagcagtcagtgccatcaattcgtctacgaaattttcattaattatggctcggtccaggcaattttcaataacaaaaatctttcagtattgaagttattatattttttatgattattgttattacctttgttgagtatatatatacacagtggcaaatcgctgagtttgcccacaaatggctttataatcgtctaatggtgttacacgtctttttctctctctttctctgtgcttgcagcccacttttcccttggcttaattgattaaccaggcccaaataaatccaaaagggagcggacaacacaaagagccagcaagatgactggtttcacgaacgccggtttcgagaacgatgagcccgtcaaggtgagtgtgtatattttgttgtgggccctgcgatgggatctggatgggatcccaagtagttctccagtccgaggagtgcttacctgattctcacctccttctcattcatcttgaacaagcgctggacacgtcaacgtacccataatgaaatcaccggcccacaaatcttgtaaacaaaggcgggcgaaaagaaattacgaaacaaggctcattatttcgagttctgcataattaaatgataactcttcctcaattattcaacattaacgtgtcaggaaaccctataccaaatttggggcaggaacctcaattcgttagtcagatcgctggatttgtattggtcttctaaccaaggcctcttaattgggttaaccttacttcttctcgctgcaaattagccacacaaaccaaattctaaccaagttgccttatccgttcagcagatctcacatagaacattatcgccctagtcgattaattcgatttagtagggtaattaccattaattatcccaactggtttacctacctaccagttcaatgagaacagcgcgcataggaagtcatttcaatttagtttagattcaattatagaacgaactttctgcaaaacggtgcagtgcaaatggccaaccttatagaaacatatagtctagatcgagtcttaatcagacggcttgggaatttcccggattggcatagaacctatcgaaatggccataaaaaagctgccacttgaaaattgctgtcacattcacattctcacatagttggccgtctcgtttttggcattcattcatgcatggacgactgtgtatatatagcatttggccatatagcttataaggtggattacacttatcgagtgtctggggccgtttgtttttttgtttttcttccttttgtattgtttagtagtgtattgtttggatgttgagctaatgactgtgtttgccttcgccaaagaaatcatgttttataatgacacgcgtcatagtttgttgtttgttttttttttttacgatggcccttagttttggggaggaagtgttcaataaagcgagagacccggtcgaactaagccaaaaatcggattcggatgatcattatcataagtggtggagtggtttgctttggccactccttggcttggcttttaatgaggcgaaataaatttcacctcaagaaactgaaaaccaaagacaaaaaatcgaaaaatcgaaaaacccacgcgagaagctgaaaagcagaaaaagaaatgtgacagcagaaagcacacacacacacacacacagcaatcaagtatttatggatatgtcttagccacaaacttgaccagccagctgatggccaaccgatttggcaataaataaggtaacagaaacagaagaaactaaaagcgatgataataacaataataataataataaaccaagcgggcgaacaagcaacaactaagcgactaacagactaaaacgtattgcacaattaaagcactgacaaggtttcataataaaatattgccaatttacaatgccgacaccccccccccaccccctcgcacgaccaccccctccgcaagagacacccatgccccacacccagtgtaatcggttcttggcagacatcgaaaccaaactcgttttcctcgcttggccaacacagaaccgcagcagccaaaaagtaatacaaattcgtaaaagaaaccagagaacgttaacaaacttacagcggcggtcagcagactaacaatttgttggcatatacatacatatcgcaaatataaacatagccaataaatatgggatcaaatagcaagcaatatcaatcgaagttcaaatgaatagcaatcacaatatctagtaatccaaaaggtgtattatattagtatatattagtatttatattagtatatttctatcaaatgtatccgtgttcctagcttctatggctctggagctctattctgcttaccgcaggtgtatgtaaggcaccaacgccaaatggcatgtaaaatgtgaaggggaccctccatggggggggagggaggtggtcggaaacttgtgagctgagcaaacacgaaacgtgccgcgtttaaaaataaaacgcaaatctcgtgcggcgcagcgcgtgcgcaacatgttgccacagacagacaccgacagcgacacacacacaaacaggcgcacgcacacacatgcagcagacagtaggtcgctggcaacatgttgccgaagagcttggcttttcacagttaaaaaaaaaaggaatatatattactcaagctaattagtttcgcttcccttttgcatatttattttttttatttatttttttttaaattttcgcataaattatatgattcttcctttcataacattagccaatcttatacaatgttaaattcatatagtaagagctacttttttctgccggtgcactcacgcaaacacacttgaaaaaaatgtattcaaaatcaacacacacctgcgggcacactcgaagcgacggtccgctcacctggccgctttgaactggtttgcggcggtttttgtttgtctcggtctctcaactagcggcgtcgctgccaacactctcgcatatcattatggcaccccccttccactccaccactgtgcactggcattattattacgcgcacttgtttcaaagctcggcttgtcgtttcttcgtaaagtataaaaataaaatataaaacgaagaaaaatgggtgaacaaaacctaaatatcagctgttagcgggaaaagcatggcacaagcacacagccatcaaacaaacaaacaaacagttaagagtggttttccagttggctctgtgcattgtcatgattttcctaccatttttcacctacttgccatatgctagcccatatttttttttttgcatgcattgcacttgcggtgtggcaacttccattgatagcagaaaatcccttgcagctttttaacacaaagcatttcgcgggaattctcgatcgcatttcttagaaaaaaaaaaatgcattgctttgttattgattgtaatccgtaagtcaatactcaatcatagagcgccagtgccaaagacattggctttcattcaagtttaaaagtttttcaaaccttttcactagattcaacaaaggttcgcccacagggcgtatgcgcgatattaaatttctgactgcttttcagaagttttgttgcacttttgcgctcaactttcaattttacgtttctacctcttaattaaatgtgacatttggcagtttcaggaattttttcctttttttttgggatatttttttctgtgtgtgttcgctgacgtttttaatggcttgcaattttttttttgttcacttttcgtttttaatacaaatttaaatgcaattttattatgcttataagcagcgaggggatttttgtatctgaaatctgtctgcaatttgcatacaaacaaaacggggtttctatagccccccaactcgcccgatccgtcgatttccttaacttaaaaatagtgtgaacagcgtcaactattatgtgctgtaattaagtccatattgttggctcaaattaaacactcactcacacagacacacacacacacacacaatatccagtgaacgaaacagataaaatgtgaaaaaaaatgtaatcgatggggcgacttgcataacaacgcgtgtgggttaaaccgaaccccctgcgaagccgacgcccctgactacatacatatgtacatacaaacatacatacaaatgtactcctatcgatgtaaccttctggccctgtgcagtgcatgcgaaatggccagtttcggagtggctttgggcccgtttctggctctgggtcggttctcgggaccaccacgggcatttcgatggccattttggaggcgaaaagcgggcagagggcgcgccacgcatgcgcaatgcgaaaaacgcgcgcgaaacgcgagcaaaacgcgtgcgagctttttaaattgactgcggagcaatccgaaaattttccccccgcgttgtttttattttgtttttagaaactaaaagcgtaaaatgcgccaacacataaataattaattaatgtgtgtggtgtgtggggcggcaaaaacaagaccagaaaatgaaagctgtcaaggggcaagacgaactgggaatgctctgtagatgaaggcatctagataacttatcaatacactattaatgactatctgacaattgtgtaacattcataatggtatttttatttattttttgttttcaaatttaccaccctctaatttctcgccgtgtatttgggtttacagcctaaaggaaattaactttgatggacggcaatttaaataaatttgtttattatctaaagacatagcaagaaagttaacgctgctccgaaaatgcggagataagaaagaaagtaggatcatgatcatcacgatcatccattcattatcccatcccatttgatactatacatatatgtatgtatgtacatatacatatgtatatccactggcctgctggctgcactcctcggctcgggctcaaagatggaagatctgagctgggcgatgtgaggcggccaaaagcgaataccgatctgttgccactttgcttacgatatgtatgttttctttgcttgcttttcgtttatttttagccaaaagctggtttcgagcccgataccgcctcgctgcgagagaaagttgtgctgaatccgggcgagaaatggcgcatcttaaagaatatctcgatcatctcgatcgccttcatggtgcagtttacagcgtttcaggtgagagacacaattgccatggtcgcgaacaaaaaaatttgtagtttcgaaatttgtagtaatcgttgccaaaattgtattgttaatgtaattgttgaatccgatatacctactgcaaattgtttgaatgcacaaagtataataatgttatatttatttattgcagaatttttctgtgatattaacagcatttaaaataacttaagaatattgatcgcaaagtatgtaccgccatctttgacaattgaacaaaaaccaaaaaccaaaaaccaaaaaccaaaaaaaaaaaacaaaaactaaactaagaactaaaaactaaaaaccaataacttaaaactaattacattattaagcaactttttcctcagcttcattaatttcccaaaatttatcgcacatcattgctcgaatgatgtgttatcgataaattcgaaatacgaaattcgaaaaacggcttgcagagcaacagccatgagctaaccaaactctcccattacagggcacggccaatctgcaatcctctataaacgcaaaggatggcctgggcacagtgtcgcttagtgcgatctacgccgccttggtggtctcctgcatcttcctgcccactctgatcattaggaaactaacggtcaaatggacattggtgtgcagcatgctctgctacgcaccatacatcgcattccagctcttcccgcgattctacacgttggtgcccgccggtatccttgtgggtatgggcgccgcacccatgtgggcgtccaaggccacctatttgacgcaggttggacaggtgtatgccaagatcacggaacaggcggtggatgccattatagtgcgattctttggcttcttcttcctggcctggcaatccgctgagctctggggcaatctcatctccagtttgggtgagtttcatatagtcaattagtcaaagtcaaataggaaactatgctaagtaatcaccttcctcgcgcttccttaataaaaatccactccaaagatggtcataaagaattgcgaaaagtcagcggcaatcttatcggatcgtaaagattgaaaagattgccacggctcttaaattaataaagtattagcttttgattttgccagctaccggggaatcatataactaagaaccgcgtcatttgaggccatcgattacgaagcatatttgataatctccgattcccggaaatctacaacattagtaaacataattatgataagagccgtgcgactgtagggcagtaggattaggccctggctgattgcaagacttcattatacatttaatacccaactaacgtgagaccctgccatcccctttagtcctctccagcggcgctcatggcggtggcagcagctcgaacacgacggtcagcgaggaggatttgcagttctgcggtgccaacttctgcaccaccggaagcggcggccatggcaacctggagcgtccgccagaggatgagatcttcgagatctcgatgatctatctgtcctgcattgtggccgccgtctgcatcatcgccttcttcttggatcccctcaagcggtatggtgagaagcgcaagggctccaattctgccgccgagttgtccggactgcagctgctgtccgccaccttccgccagatgaagaaaccgaatctgcagctcctcatccctatcaccgttttcattggcatggagcaggctttcatcggtgccgatttcactcaggcctatgtggcctgcgccctgggagtgaacaagattggcttcgtcatgatctgtttcggtgtggtgaatgccctctgctcgatcctcttcggatcggtaatgaagtatatcggccgcacgcccatcattgtactgggcgccgtcgtccacttcaccctgatcaccgttgagctcttctggcgccccaatcccgataatcccatcatcttctatgccatgtccggcctgtggggcgtcggcgatgccgtgtggcagacccagatcaacggactgtacggactgctgttccgcaggaacaaggaggctgccttctccaactaccgcctatgggagtccgccggattcgttattgcctacgcctatgccacaacactctgcacgcagatgaagctctacattctgctggctgtactcacgctcggctgcatcggctacgtgattgtggagatcctgtacaggaagaaggtaagtctgcccatccacgatacaataatgccattaattggtgttttttttggtgtcttgggtttcggttaaaactaaaactatagtatttgatatctagaaagtataaaataagtttctttttgagttaatatattgcccgttgcctttcatgcccaaaagtaggcaatatttttgcgtattgcatttaaatacctatttatgagctcaggagaaaataaataaagctgttgctatgtttctaatagttctatcggaaaatgatgagggctatttttgaaagaaaggaattcaattagattagactgaataaatgaatctagactttccttaagaaacccttgtacaccccaacagcctagcaaggaagctaggaactgcagctgtggtcaatgctgaccctcggactagagtcaaaagaagactcaagcgacaccaccctcatgacctccctaacctggttttgacctagaaagtcttagttttaaaattcattagaataatcaaataaataataattactatgttatatcaactattataattctccctatcatttttaggattaaaaatctgttagtcttaagtaaccaagacacattgtaaaataaaataatttaagcagatcaaattaagttgccgcatgggtaacagtgcgttgatcaaataataaaaacatcatcgtattattaaacttaagaaaccccacctcgaatatccccagaagtgggctatcaaatgtatatagacaatccaaaacctaatatcgtctcctattccagcaacgcaagctcaagaagcaggagaagctggaggccgcggagaaggagaaggaggccgccgccgccgcagccgccgccgctttggccgccgccgaggcaggagcagatggcgtcgaggagaccgacgacgagctggacgatctcgaggaggacattgtggtcacgcgcctgtaaatgtttttttctcacccaaggacaccccaaaaacaaaaaacaaaaaaaaaaaacaccgcacaagcccctcacaccccacattccatcaagatatcgatagaaggaagcagaattgattggatgctttatcgatttaaatgcaaaaaagacaagattgaaaaacaagacgaagagctctatcgataaaatgaaaactagcataactatcgatagacaaatacgcaccgtgatcgataagcaaccggcgccgattgaaagtcgcgacgcgttgcatacttttgtggttgtagttttgtagtagaacatttgtacccctcacccacgaaaacccgatcctgcaagagaaaaaccatttagctcaaagtccaacggagtttggcttaactttagtttgtacatacagagaagagatcgaaaagagcgaaatgctattgaatgcaaaggcagtgagaagccccggaaatgcaaatcctttgtgtgttagtctaggtgtaagcacactcgtactcggttgaaacggacttcctgttttcaaatataaatcaatcgagacctatcgaaaaaatcgatataatcgatcgacttaaattcgcaagtgttttttatttgctgaatgcaagtcaaacaaatagtttctgaaatatgcatttcgaaattcaagagcagtttacaatcgatacatttatatttgaaaaatggggcgttcttaaaaacttggtatcacacaatcatacaaacaaacaaaaaaaaaacacacacacctatatacctatatacaagacgcacacactgcagcagtgtgtgtgtgtacgatgcctaacaaattgttattttattttaaaacgtattttaaatatagcctatccctatacgaaaattgtaaaacccctctttttttgtaattgagtttttgttttttgaaaaagaaaaaagaaaacgtgataatctacacacgcccacacgaaacacaaaaaaacagtcacaacaaaaaaaaaaacaaatatataaaaatagtcaaatttgtaaagcttaatgatactggtccttttgaaatatatatatttaaaaaatatatatattcgatggatcagtgcaaaaatggaaaaacaaacaaaacgaaaagcaattaattaatatataaaaatatctttaaacaaaaaagcaaaaaatctagtaggcaaaatgttatatacacattttttgctcagtattatgttttaaactaaaattaagcgagttattgtttcctgtttatatattttttttcgtaaaccctattt

SEQ ID NO: 9992 - DNA, 2136 bp, DROSOPHILA
agacagccacttggccatttggagttccctttattccttggcttggtccgaaaaacgagaatcgatcatcgtcaaggctcaaggttcgagtttcaagtttcacgtttcgagttccgtgtccaccggccgaaggattcgcattttttttgcccgacaattcccacttttcccttggcttaattgattaaccaggcccaaataaatccaaaagggagcggacaacacaaagagccagcaagatgactggtttcacgaacgccggtttcgagaacgatgagcccgtcaagccaaaagctggtttcgagcccgataccgcctcgctgcgagagaaagttgtgctgaatccgggcgagaaatggcgcatcttaaagaatatctcgatcatctcgatcgccttcatggtgcagtttacagcgtttcagggcacggccaatctgcaatcctctataaacgcaaaggatggcctgggcacagtgtcgcttagtgcgatctacgccgccttggtggtctcctgcatcttcctgcccactctgatcattaggaaactaacggtcaaatggacattggtgtgcagcatgctctgctacgcaccatacatcgcattccagctcttcccgcgattctacacgttggtgcccgccggtatccttgtgggtatgggcgccgcacccatgtgggcgtccaaggccacctatttgacgcaggttggacaggtgtatgccaagatcacggaacaggcggtggatgccattatagtgcgattctttggcttcttcttcctggcctggcaatccgctgagctctggggcaatctcatctccagtttggtcctctccagcggcgctcatggcggtggcagcagctcgaacacgacggtcagcgaggaggatttgcagttctgcggtgccaacttctgcaccaccggaagcggcggccatggcaacctggagcgtccgccagaggatgagatcttcgagatctcgatgatctatctgtcctgcattgtggccgccgtctgcatcatcgccttcttcttggatcccctcaagcggtatggtgagaagcgcaagggctccaattctgccgccgagttgtccggactgcagctgctgtccgccaccttccgccagatgaagaaaccgaatctgcagctcctcatccctatcaccgttttcattggcatggagcaggctttcatcggtgccgatttcactcaggcctatgtggcctgcgccctgggagtgaacaagattggcttcgtcatgatctgtttcggtgtggtgaatgccctctgctcgatcctcttcggatcggtaatgaagtatatcggccgcacgcccatcattgtactgggcgccgtcgtccacttcaccctgatcaccgttgagctcttctggcgccccaatcccgataatcccatcatcttctatgccatgtccggcctgtggggcgtcggcgatgccgtgtggcagacccagatcaacggactgtacggactgctgttccgcaggaacaaggaggctgccttctccaactaccgcctatgggagtccgccggattcgttattgcctacgcctatgccacaacactctgcacgcagatgaagctctacattctgctggctgtactcacgctcggctgcatcggctacgtgattgtggagatcctgtacaggaagaagcaacgcaagctcaagaagcaggagaagctggaggccgcggagaaggagaaggaggccgccgccgccgcagccgccgccgctttggccgccgccgaggcaggagcagatggcgtcgaggagaccgacgacgagctggacgatctcgaggaggacattgtggtcacgcgcctgtaaatgtttttttctcacccaaggacaccccaaaaacaaaaaacaaaaaaaaaaaacaccgcacaagcccctcacaccccacattccatcaagatatcgatagaaggaagcagaattgattggatgctttatcgatttaaatgcaaaaaagacaagattgaaaaacaagacgaagagctctatcgataaaatgaaaactagcataactatcgatagacaaatacgcaccgtgatcgataagcaaccggcgccgattgaaagtcgcgacgcgttgcatactttt

SEQ ID NO: 9993 - protein, 538 aa, DROSOPHILA
MTGFTNAGFENDEPVKPKAGFEPDTASLREKVVLNPGEKWRILKNISIISIAFMVQFTAFQGTANLQSSINAKDGLGTVSLSAIYAALVVSCIFLPTLIIRKLTVKWTLVCSMLCYAPYIAFQLFPRFYTLVPAGILVGMGAAPMWASKATYLTQVGQVYAKITEQAVDAIIVRFFGFFFLAWQSAELWGNLISSLVLSSGAHGGGSSSNTTVSEEDLQFCGANFCTTGSGGHGNLERPPEDEIFEISMIYLSCIVAAVCIIAFFLDPLKRYGEKRKGSNSAAELSGLQLLSATFRQMKKPNLQLLIPITVFIGMEQAFIGADFTQAYVACALGVNKIGFVMICFGVVNALCSILFGSVMKYIGRTPIIVLGAVVHFTLITVELFWRPNPDNPIIFYAMSGLWGVGDAVWQTQINGLYGLLFRRNKEAAFSNYRLWESAGFVIAYAYATTLCTQMKLYILLAVLTLGCIGYVIVEILYRKKQRKLKKQEKLEAAEKEKEAAAAAAAAALAAAEAGADGVEETDDELDDLEEDIVVTRL

SEQ ID NO: 9994 - DNA, 7554 bp, DROSOPHILA
gggtttcgcaggcgtttgtaagttctatttgaagaccacgaatgtgcggctgcttaaaacatcaaaagcgcacagaaaagtttgacatatcaaataataattcacagaaatgcctatccgggacgtctgacaaagttcaggctgtcaaaacgaaagttatgatagcgtgaaatatgcaaaacgaatgcaaggcaccaactccttggccgcaaattgaaaactgaaatggatttcgggtagcccatgggcaaaaactgggcttaactgagcgtaaattattaaggttcacgagcggatgagcctaactatagtcgggaatccacccaaggacaaatgtcctgccagccgatatgtattaaatttcatttattgttcgctttccgcacaaaaatacagtcaataaagtcatttgacagattatgtgaatagacagagcacaaaaaacataaaagcatggatgagtttgggtcgcacattcatctggcgttatgtaatatcctttgccaagtatgtgtgtgtgtgtatcctgtgtctgacatcttcccaaatgttttgtggccacaaggatttggccagcattgaggaatttcatttgggccagattgtagcaggactccttaaacactacgaccgctggcagtaaatatttaataacataccgaaacaaataacgcattaatttatatgccaaatcggagacctgatacttaaaaataggtattaacttatatttttctttcttcgataaaaacctctttagtaaaatatcatttcatactgtaattgtaaattattttattttaaatgctaactttcaatacattatttcgttcagtgcaggttttgttaagctgaatcagacctttgcagagcgaagaattatttcgggaaattatcaattagatgacatcaaagtgagtttagattaaatggtcctttttgagttgacactgattgttctctcaacaaaagattttttttttcaaaatattgctaaataatctagtactccgttgtcataagatccagtcacacacaagtttccaactcatatatatacacattgtaaattaacttaggcctgttaactaaacaagatggcagaaccaggagaacaacggtgggtttcgcatttgttttagcaagtatcttccagctcatttattgaattccctaagaaaattcgtattgggacgctgttgtattttccactggcgcgggaaggcttcaataattatacccttgatcacactgccaattcttatttatggctttcagaccgacatggccgtaagtgcacaatatattgtttaaatatcacaatctggatcaaagtaatttcttaggagttcaagtgcctgtggcttattgttaccatggccctgctgtggatcaccgaaaccctaccgatatatgtcacggcattgtttccccttgtcttttgccctctccttggtcttgtggtaagtttaaaaatgtcctaattaaatgaaaacacaatttatataaactaaactatctctttagaatgcctctatagtctgcaaacagtacttcaccgacaccattgtggtattccttggtgggcttattgtggccttgggaattgagtacagtaatctacacaccagaattgccctgagggtcattcggattgtcggtggaagtcctagacggtatgtcctattttaatcactcattcgattcgatctagtcgtcttcctcctaagatgtgccattaatattttcgtagtcgaggaactcggttaaatgttttcgtcttagactacaagactcaccagttttacacaatcaactattgtattaattcatcattacattttaacttaattcggaaaacctttcagtttattcgtaggcttgatgagcgtgagcacgtttatgggattgtggatatccaactcagccggaacggccatgatgtgccccattgtcaaagcgctggtcaatgaattggataccgtgagttcttagatcgatattatagtaatttaagcctaatataaatattttcacactgcgtaaaacattctacaattcaaagaacaaaatatttcccgtttatatgacgcaagaggaagaaccagtagaggagggagagtaagagtataccataatttgtagataataaaatcttcaattttaatcatgtgcagaccaccacatccgtcgaagataacagtagccttctacgctggcatagcctacgcctcctccattgggggactgggaacactgattggcacaggaacgaatctggtctttaggggcatatacacggagtaatagaatggggtttggaaagctatataccaaatttaatatatgtgtctttcgcaggcgatttcccacttctacggtggagattacatttgccaactttatgttctactcgatacccttgatggtgattgtaaacgttacgctggttatcatagctttcctcatcacgcacatgggactgtttcgaccaaatagtaaaaccggtaaaatcattgcggaggccaacacaaacaggaaactgatggaggatgttttgcgacagcgccatattgatttgggcccaatgagctgtcatgaaattcaaatggccatcgcctttgcttttatgatagtgctcctaattacccgcaagccgggattcgttccgggttggagcgatttgatcaatagaaagtgtgtatatatttatttatataggcctctgtgtctgaaaaatatccattatattattactgtaccatttcagggtagtgggaagtgcatcgggactgtcatttattgttctactgatttttgccttgcccacccaatatacgttcttcaagtactgttgcggtaaaggtgggttttcattattacccatattgaagagagtctcatatagcaccttgcattacaggtccgtttaccgcccaggcgatcgatgcgatattatcgtgggaatatgttttacgcaacattccctggggcctattatttctgctgggtacgtttcttcttccacacatttgaaatacttgtattactcgtatcgaacaaggagggtattcgttgaaaatgatggtttgtgatgatttatggtttgtctatcaacattcggcaaacaattgcaatttatcagtaatgttgtaaccgtaaatcattactatctccatttacttcccaagtttcacgggtatccacccttggtttacttgcaggtggtggctttgccttggccgtggccagcagggaaactggtttgaacataatgatctccaaggccatgcaagtcctcatcggattgccaaatattgtggtgcagtcgatcacgtttgtattggccaattttttctccgctttcaacgccaacgttgttgtggcgaacattgtgctaccaattttatgtgaaatggtaaggtgtctataactttttaaaaattacttatttgtttcttttttacatgaagtctctcgctctggagctacatcctttgattttaactctgccagcttgtttgggaattagcatggtctactttttacccgtgagcacgccgccaaatgcaattgttacccaatatgcacatattaagaccaaatactttgtaagtaaaagcttcacaataataattataaattaccgcattaaataatttattttctaggcctgttgcggtatagtgcccaccattatcgggatttctgtggctctggtgaacacgaatacctggggattgataatatttccagaatcgaaaagctttccagattgggcaaaggaaattaagaatcaaacaaaaatataatgatggaactaaaggggtttcaaatcttgttataaattctataaaaatgatgttttggaacgcaaaaagtatataaattcaaatgaattcttgatcacaaccacgtcaagcccgtttattattttttatttattttttttcgcgtttaatggatatctgataaccaaggcactcctacatacaaatttatcagttgtcaaaaatcatgtgtatttttttgttcgaacttcatttcaagtattccagtaggcaatgatatattggttcaagtaaaatcgaaaaaattcattacgatcgtattagaagccaagcaaaatgggagagtaagacttttgtaaatcaattttaagaaccaaacgattttaaacatcatcttgcagtgctgacggaaaaattggaggtggtcaggccgtaaagagatgttgcggcttccattggaggggcaaggcgaccgccatgattcctctcatcacattgccgattatgatctatggggtcttggagaataatttggcaagttatggagtagtagacatcctcgagtcggtaatatcttattcctaacctcaggcatttcaatgcatgtatctggtggccaatatggcgctcttctggatcacggaagccattcctctatatttgacagctctgtttccggtcgtttttctgccactgtttggcattttggtacgttattgtggttgcacagtggaaagtttaatatcttaaatactttcaccctatcgaacacagacttcggaaaaggtgtgcagcttttactttagtgacaccgtggttatgttcattgggggactgcttattgctctggccatagaatatagcaatctccatcaacgtattgcactcaacactattctaatagtgggctgcagtccgaggcggtaaggcttcgtctaaaagctatttcaaaactaaggcagctctcttcgaccagcttgcacttcggattggtcatggtgacttgcttcatttcgctctggatttcaaactcagcagccactgccatgatgtgtccaatagtcaaagcagtgctcaatgaaatggaaactgtgagtagatacttcctaactatggtaacacttttcaaaaaatgcaagaatctaatatattttgaaaatcactagtaaataatcgattggtccttttagccggataggttgtaaggttgtctggtcccttctagtttagcacacacattgccatattcaatagtttgtgtaatgaactcatgtaaactttcacttttagcaaaacatttttgccatttacaagacgcaggaagaggagccagtggaagagggagagtatgtgaaaaatagatagatttccatctgtattacaaacacggcaatttacttgcagcccaccgcatccgtcgacaatctcgatggcgttctatttcggcatcgcgtactcttcgtcaatcggtggttgtggcaccttgatcggaactgggacgaacctgacttataagggcttatacgatacgtaaggacgataggttgagtttgccggtcattttgatagtatgcagctgataaaacccatagacgttttcccaactccgacgagaagattgacttccccatctttatggcgtactccgttccgttcgtagtgctcgtgcttatctttctcacgtacttctcgctacaagtcacacacatgggtctcttccggccgaatagcaaaattggtcaggaggtgaagaagggcgccgagagccaggacgttgtcaaggatgtgatcaagcagcgcaaggcagagctaggaccgatgagctgccacgagattcaagtcggtttgctcttcgttctgatgattttcctgctcttcacccgaaaacctggtttctttccgggatgggctgactttctgaatgccaagttcgtttttaaccaaagatctctgcattccgaagcatcacgtctaacttaaattatttctttctagagccattggcagtggtcctccagtatttttcgcaacaatactgctcttcgcgctgcccacacagtacaccttcttcaagtactgctgcggaaaggctcctttcccaggacaaactttggatgcctgcctgtcgtgggtctactgccaaaagtacaccccctttggcctggcctttctgttgggcaagtagatttgaaatctatctacaatatattctttcatttggttcaattacatattatttctctgacaggaggtggatttgctttggctgagggcagcagggtaagcggaatggccaaaatgctgggcgagtccttagcattcgctggtgaaatgcattccgtcctcgttatatcaatgtgtattataatctccctattctgcactgcattcgcatccaatgtggctatctgcaatattcttatcccgatcttctcggaaatggtatgttgatcccggcggcagccttcaagtatcttcaacatttatagatatacatttatccattaggccctggccatcgaagtgcatcccatgaagctgacttttccggctgccctggcctgcagcttggctttccatctgcccgtaagcactccgcctaatgcaattatatccggctttacgggtttgaaaacaaagtacatggccatcgctgggattctgcctacatgttgggccttcctatgtctgctgttcaccggaaccgtgtggaccatgctgatctatccggggacgacggaattcccctcttgggctatttagctccaattataaaatgcctgcgaagtggggttagattccacaccaaggttatcaaatggaagtcttttaataactttttacttttcccgcaggacaatccatatctacagacatacgaagactcgaagattcaagatggaacatgtgaaaaatttctggtattcccaataatatttctgtcaaatcgaaaggctttgaggtcaaatgaactggatctttgttttggcagcaattttgttgagttgcatgccgcgtttggcaaaatgtgggtaccatactacttgtaaactgacatttaaaaatttgctcgcttcagttttaggtgtgctcacattactaatcttatgcggtatttcgtttaatggctaataaataaaaagcccacaatttgcggcaataaaaccacagcaaacttgtttaaaagtacagaagccatctcaatgtcttagctcggcatagaattttgggaaggccaaaaggcttagcagacaatttggctcgagggaaaacaaaagttgtatgcaaacacagcaataagttcctatggctggtccttcatccaaactcattcacattcgcaggtatggtttggaaagatataatcagaaaaaaaaaacatccttaccctaagcaactgagttatattgctttcatgcgtgaatgatatgctgagtacacgaacagccatcagtagagcacaaatctccagtcgacacacaaacaaataaaaaatatacacttccgagaaaaatgcctgtgtgcgagtgttcatgtgtataagaaacgcaccgaaataaatgtaataaaaaccctgacaagcggaatatacatacgtaatcaagactcgaataaaaacacgcttttcaacactgattacggtgaggcatgcggcaggacttcatcagcagaactccaggtcgccaggacgacgccatcgggggggccgacataagcccgccaaatgggcgacagtgcgaagaacgagccgcccattcaccac

SEQ ID NO: 9995 - DNA, 2953 bp, DROSOPHILA
atctagtactccgttgtcataagatccagtcacacacaagtttccaactcatatatatacacattgtaaattaacttaggcctgttaactaaacaagatggcagaaccaggagaacaacgaaaattcgtattgggacgctgttgtattttccactggcgcgggaaggcttcaataattatacccttgatcacactgccaattcttatttatggctttcagaccgacatggccgagttcaagtgcctgtggcttattgttaccatggccctgctgtggatcaccgaaaccctaccgatatatgtcacggcattgtttccccttgtcttttgccctctccttggtcttgtgaatgcctctatagtctgcaaacagtacttcaccgacaccattgtggtattccttggtgggcttattgtggccttgggaattgagtacagtaatctacacaccagaattgccctgagggtcattcggattgtcggtggaagtcctagacgtttattcgtaggcttgatgagcgtgagcacgtttatgggattgtggatatccaactcagccggaacggccatgatgtgccccattgtcaaagcgctggtcaatgaattggataccaacaaaatatttcccgtttatatgacgcaagaggaagaaccagtagaggagggagaaccaccacatccgtcgaagataacagtagccttctacgctggcatagcctacgcctcctccattgggggactgggaacactgattggcacaggaacgaatctggtctttaggggcatatacacggagcgatttcccacttctacggtggagattacatttgccaactttatgttctactcgatacccttgatggtgattgtaaacgttacgctggttatcatagctttcctcatcacgcacatgggactgtttcgaccaaatagtaaaaccggtaaaatcattgcggaggccaacacaaacaggaaactgatggaggatgttttgcgacagcgccatattgatttgggcccaatgagctgtcatgaaattcaaatggccatcgcctttgcttttatgatagtgctcctaattacccgcaagccgggattcgttccgggttggagcgatttgatcaatagaaaggtagtgggaagtgcatcgggactgtcatttattgttctactgatttttgccttgcccacccaatatacgttcttcaagtactgttgcggtaaaggtccgtttaccgcccaggcgatcgatgcgatattatcgtgggaatatgttttacgcaacattccctggggcctattatttctgctgggtggtggctttgccttggccgtggccagcagggaaactggtttgaacataatgatctccaaggccatgcaagtcctcatcggattgccaaatattgtggtgcagtcgatcactgctgacggaaaaattggaggtggtcaggccgtaaagagatgttgcggcttccattggaggggcaaggcgaccgccatgattcctctcatcacattgccgattatgatctatggggtcttggagaataatttggcaagttatggagtagtagacatcctcgagtcgacttcggaaaaggtgtgcagcttttactttagtgacaccgtggttatgttcattgggggactgcttattgctctggccatagaatatagcaatctccatcaacgtattgcactcaacactattctaatagtgggctgcagtccgaggcgcttgcacttcggattggtcatggtgacttgcttcatttcgctctggatttcaaactcagcagccactgccatgatgtgtccaatagtcaaagcagtgctcaatgaaatggaaactcaaaacatttttgccatttacaagacgcaggaagaggagccagtggaagagggagacccaccgcatccgtcgacaatctcgatggcgttctatttcggcatcgcgtactcttcgtcaatcggtggttgtggcaccttgatcggaactgggacgaacctgacttataagggcttatacgatacacgttttcccaactccgacgagaagattgacttccccatctttatggcgtactccgttccgttcgtagtgctcgtgcttatctttctcacgtacttctcgctacaagtcacacacatgggtctcttccggccgaatagcaaaattggtcaggaggtgaagaagggcgccgagagccaggacgttgtcaaggatgtgatcaagcagcgcaaggcagagctaggaccgatgagctgccacgagattcaagtcggtttgctcttcgttctgatgattttcctgctcttcacccgaaaacctggtttctttccgggatgggctgactttctgaatgccaaagccattggcagtggtcctccagtatttttcgcaacaatactgctcttcgcgctgcccacacagtacaccttcttcaagtactgctgcggaaaggctcctttcccaggacaaactttggatgcctgcctgtcgtggggatttgctttggctgagggcagcagggtaagcggaatggccaaaatgctgggcgagtccttagcattcgctggtgaaatgcattccgtcctcgttatatcaatgtgtattataatctccctattctgcactgcattcgcatccaatgtggctatctgcaatattcttatcccgatcttctcggaaatggccctggccatcgaagtgcatcccatgaagctgacttttccggctgccctggcctgcagcttggctttccatctgcccgtaagcactccgcctaatgcaattatatccggctttacgggtttgaaaacaaagtacatggccatcgctgggattctgcctacatgttgggccttcctatgtctgctgttcaccggaaccgtgtggaccatgctgatctatccggggacgacggaattcccctcttgggctatttag

SEQ ID NO: 9996 - protein, 908 aa, DROSOPHILA
MAEFKCLWLIVTMALLWITETLPIYVTALFPLVFCPLLGLVNASIVCKQYFTDTIVVFLGGLIVALGIEYSNLHTRIALRVIRIVGGSPRRLFVGLMSVSTFMGLWISNSAGTAMMCPIVKALVNELDTNKIFPVYMTQEEEPVEEGEPPHPSKITVAFYAGIAYASSIGGLGTLIGTGTNLVFRGIYTERFPTSTVEITFANFMFYSIPLMVIVNVTLVIIAFLITHMGLFRPNSKTGKIIAEANTNRKLMEDVLRQRHIDLGPMSCHEIQMAIAFAFMIVLLITRKPGFVPGWSDLINRKVVGSASGLSFIVLLIFALPTQYTFFKYCCGKGPFTAQAIDAILSWEYVLRNIPWGLLFLLGGGFALAVASRETGLNIMISKAMQVLIGLPNIVVQSITADGKIGGGQAVKRCCGFHWRGKATAMIPLITLPIMIYGVLENNLASYGVVDILESTSEKVCSFYFSDTVVMFIGGLLIALAIEYSNLHQRIALNTILIVGCSPRRLHFGLVMVTCFISLWISNSAATAMMCPIVKAVLNEMETQNIFAIYKTQEEEPVEEGDPPHPSTISMAFYFGIAYSSSIGGCGTLIGTGTNLTYKGLYDTRFPNSDEKIDFPIFMAYSVPFVVLVLIFLTYFSLQVTHMGLFRPNSKIGQEVKKGAESQDVVKDVIKQRKAELGPMSCHEIQVGLLFVLMIFLLFTRKPGFFPGWADFLNAKAIGSGPPVFFATILLFALPTQYTFFKYCCGKAPFPGQTLDACLSWGFALAEGSRVSGMAKMLGESLAFAGEMHSVLVISMCIIISLFCTAFASNVAICNILIPIFSEMALAIEVHPMKLTFPAALACSLAFHLPVSTPPNAIISGFTGLKTKYMAIAGILPTCWAFLCLLFTGTVWTMLIYPGTTEFPSWAI

SEQ ID NO: 9997 - DNA, 3849 bp, DROSOPHILA
cagctgaacgagtccgagaagagcaagaagaacttcgagtcgctaaagagcaccttcgagccgctggtcaagtggctgaacgatgtggcactcaaggatcagatctccaaggcccaggtttccgagcgtctgagcaactcgccatgcgccctcgtggccggcgtcttcggctggaccggcaacatggagcgtctggccatgtccaacgcccaccagaagtccgacgatcctcagcgcacctactacctcaaccagaagaaaacgctcgagatcaatcccaggcatccgctgatgcgcgagctgctgcgccgcgtggaggccgacgaggccgatgacaccgccaaggacatggctgtgatgatgttccgcaccgccaccctgcggtctggatacatgctccaggagacttcgcagttcgccgacagtattgagcagatgatgcgccagaccttgggtgtctcccaagacgagcaggtggagttcgacgaggaggaggaggatgatgccgaggagaccgccaccggcagccaggagagcggcaacgccgatgatgaggaggaggagcagcagcacgacgagctgtaaactacttcacctcacccactgtccaaatagattgtacataagagtgtgaagttcagactgagttttaaaccgccaccgggtggccgggcgggcactccatcaacattacacgctagattctaagtaaaataatttcgtagtccttcgcccacgccgtcatcaccgccagtcgcccagagagcactccaccatttcagccagcacacttggttgctcaagcgttttcttttttcgaaagcaagtgaattatgtatttatacaatgtaatatgcttagtacacaacagattccaatcaaaacaaataaagacaaatgaatttaaaactaaaacaactgcctatttaatatggcgcgcaatgtaaaatttccgcaatcggataccaaaaaatagttaaaaagtgaattgattgctcgatcagtcaagatcggaactcagcggctcatcgttcagggccctcaagtaggtgttgtacttcatctggtcgcggatctgctgcacggcctccgattgggacagcgtgtatgtgtccataaagaggcgcactatccacagcgggagcagtccgttcaccagcagcgacgtgtggttctggtaatcgggacatgttaggatggatatgtgtgtcactccaggacgccccaaacttacgcttcgactgctgtagacctcgcccagtttcttgagcatctgctggtgaatgctcttgctcagtatgtcgatgacgtccatgtgggcaatgttcatgtagtgactggtgcgcggcttgaactcgcgctccttgaacagcttatcgaagtcgctgcgatagttttcgaacgtattcagcacctcgtcctcgcccattttttccaagagtctgagccaatcaaaagaacgcaagttgaaggcacattcgtgttcgctttatttgcatctagtcgagtcacttacaaaatcttaacctcgcgcggcttgggcgtgtccagcatgctgtccagccgctgcaatgcattgaaccgccctccgtccatgtgttccaccttgaaatctttggccggcactggcgatactcgtttcactttgggcttgggtcctctgctcttgccgctcctggtctcgctgaaaatggcagccagggaaatgatgaatgaaactgatcgctatagcaccatatttctatggcttacccaactacgaagtttttgaatcgactcgggcgtatgggcgatcggccggagcggcgtgcaggcttggcctcaacggagctggatctggaattcctgcgaatagatcaataggctcttagttctctcacatcctagccttcgcctaactcactgctgtgatggactgtgcgatcgcttaatgcggttgctctgctgcgaggaactggggctgctggaagaagccttatccttttcgcctccttgggaaatggacctgcgctcgctcttgatcttggttggttggctggccgtggtggagctcttgtcatcctcgttgtcggcgtcaatgtgcttgggcttcgattgtgtgctggaggggaaacatgcagtggagaaaacattaaaatgcattcaacttcggtacataaaatgtgaaaggtgcaaaggtggttcatagctattgggatcaaaaaccacacaatccaagcctatggagtatttgggactaattaatagggtttcctaccccgcttttggcttggatcctgagtttgctacgcggatcttgcgggatgtgggtctggtgccatttgtttctgcttccgtggcaagctcgcgcttggcgggaatgacgtccacaatggtggtgtcctcttgtgttatgtactgcagctgtaggtccaggcagagatccttggagctggactccgtaccggccagaagagcgaccgttgcaggatgcgacttattggtcgcctggacgcgcacgatgatgtgatcgataatgagctcggtgtccagttggtaggcatcctgccactgcttcaggttctcgaacaggcgccatagaccacactcaatccggctccaccgatccgcggtcatccaatggaaatcattcttggattcccgctcaaaatgggtcacaggtgtcggcagaactttgacgctgcagatgacgcggtgcttcttgtactgaaatgggagctgctttaggacatggcggatcacacatctcagtggcttttacctggtataattgcgaaattagttggcaatcaccgatggcggaaaatgacatttttataaaattgctatgcgtcctgatgtgaccgtagccgctgacaggcacagcaacaacaattcggggcggatctttgggcacactacgagcgctttggtggtctatcgattgtatttttttatcgacgtttgggcggcaaaaaagtatcaacttaagctgaattcaattcataaatattcattatctggagaaaactgcaaaatgtttttttggaacgtgacaagaaatacttttacgttttaccacagagatctctatagaaagtataaaaatagtaattatgcataatgaacatattaagaatccacctgatatatgcatttatttataaaaaaaaacaacaaagataaaaaagtgttaagtgttaattaggacaaaagttcagaacgtgttcacaatgtgcaatcgtgtgacacaagtgacgatgagattttgaaaccaaaactgagaattgtttttactctgaatgaatgaggggcgctatcaatgaatctcccagaacttacaaatccttatcaacagaagcgtgtggcttaggtcaagtctcgccaagagaacagccggactacacagtgcagcaaaatcgttcccattctgcgaaagtggttacctaaaaactaagttggctagagagatagcttggatgcccatgacctcctccttattattcaaagcagtggcttagaatgcgcaccaaagatggtgaaagtgtgcggaacgacgtcatagtaatataattcattataatctctgttgtccagtgctgctggtcaacatgattgcgaaaaaaaagcacacgccgatgggatcggagagatgctgctgcttgctcagttctcaatcgcgttccggattaggtagtcgagcttgttgggtttttcaaataatccgggtcgatcgatcactggccgcactactttattatattatacaaactgcgtgtgtgccctgcgaatcggaccaatatgctctcaatctcgagctactttcgactgcccctatacacgcggctggcagtttgcatcctgatctgc

SEQ ID NO: 9998 - DNA, 1378 bp, DROSOPHILA
ctacggtcacatcaggacgcatagcaattttataaaaatgtcattttccgccatcggtgattgccaactaatttcgcaattataccagtacaagaagcaccgcgtcatctgcagcgtcaaagttctgccgacacctgtgacccattttgagcgggaatccaagaatgatttccattggatgaccgcggatcggtggagccggattgagtgtggtctatggcgcctgttcgagaacctgaagcagtggcaggatgcctaccaactggacaccgagctcattatcgatcacatcatcgtgcgcgtccaggcgaccaataagtcgcatcctgcaacggtcgctcttctggccggtacggagtccagctccaaggatctctgcctggacctacagctgcagtacataacacaagaggacaccaccattgtggacgtcattcccgccaagcgcgagcttgccacggaagcagaaacaaatggcaccagacccacatcccgcaagatccgcgtagcaaactcaggatccaagccaaaagcgggcacacaatcgaagcccaagcacattgacgccgacaacgaggatgacaagagctccaccacggccagccaaccaaccaagatcaagagcgagcgcaggtccatttcccaaggaggcgaaaaggataaggcttcttccagcagccccagttcctcgcagcagagcaaccgcattaagcgatcgcacagtccatcacagcagaattccagatccagctccgttgaggccaagcctgcacgccgctccggccgatcgcccatacgcccgagtcgattcaaaaacttcgtagttggcgagaccaggagcggcaagagcagaggacccaagcccaaagtgaaacgagtatcgccagtgccggccaaagatttcaaggtggaacacatggacggagggcggttcaatgcattgcagcggctggacagcatgctggacacgcccaagccgcgcgaggttaagattttactcttggaaaaaatgggcgaggacgaggtgctgaatacgttcgaaaactatcgcagcgacttcgataagctgttcaaggagcgcgagttcaagccgcgcaccagtcactacatgaacattgcccacatggacgtcatcgacatactgagcaagagcattcaccagcagatgctcaagaaactgggcgaggtctacagcagtcgaagcaaccacacgtcgctgctggtgaacggactgctcccgctgtggatagtgcgcctctttatggacacatacacgctgtcccaatcggaggccgtgcagcagatccgcgaccagatgaagtacaacacctacttgagggccctgaacgatgagccgctgagttccgatcttgactga

SEQ ID NO: 9999 - protein, 399 aa, DROSOPHILA
MTADRWSRIECGLWRLFENLKQWQDAYQLDTELIIDHIIVRVQATNKSHPATVALLAGTESSSKDLCLDLQLQYITQEDTTIVDVIPAKRELATEAETNGTRPTSRKIRVANSGSKPKAGTQSKPKHIDADNEDDKSSTTASQPTKIKSERRSISQGGEKDKASSSSPSSSQQSNRIKRSHSPSQQNSRSSSVEAKPARRSGRSPIRPSRFKNFVVGETRSGKSRGPKPKVKRVSPVPAKDFKVEHMDGGRFNALQRLDSMLDTPKPREVKILLLEKMGEDEVLNTFENYRSDFDKLFKEREFKPRTSHYMNIAHMDVIDILSKSIHQQMLKKLGEVYSSRSNHTSLLVNGLLPLWIVRLFMDTYTLSQSEAVQQIRDQMKYNTYLRALNDEPLSSDLD

SEQ ID NO: 10000 - DNA, 2738 bp, DROSOPHILA
cgatcagatgggctgtcggcgattttctggaggaggacatcacccacacggaggtccacctccccctcgtcaccatcatcaccatcgtggcagacatggtgctggtggacgctgtggacacggacaccagcaccagccttttccaccaccgcctcatcgcccccatcgacatggaagtcacttttgggagggatacggtccacctccaccaccgccccattatccaccaccagggggatatctgtatggtggccaccattggcagggatatcctcctccgccacctccgcctccttcttcacaccaccccccaccatctggatctccagcaggagggtgtccgcattgcggttgcccaggaggcggtccacctcaaagtggatttcctggtaccgaaagacctcacaacgaaacctcaaacgacgatcagcatggcagcttccaatctccaattcccggtggcgaagttcctactgatgaaatacctggaaaaaataaatacgaaatcattgatatttagacaacagtagaaaatgtttcaaaaaaggtaaagtcactatgttatatcttgtatctgagtaatgtcttattaatgattttatattatccggattttcctgatcaaaaaaatcgagtaatgttatgttgataaaaacttttcaaatatcaaataaataaatataaataaacaaataatttaaaaactcctttatatttccgtcatttcaatatggtactgaattagtattagtattctattcaattccggatttttctgtttttccattttccctcttccaataaactggtttattttattttccatcgtaaccagatgttgacggcaatacttttctgtgatttccttttacaggtagagactcaaacttaagtccctcagccaggtagaatacctttcagctacctacttgatattaccaaatcgtggtataaaaatcaaaaaaatattagagccgcctcagtaccgaaacttcagccacgatgaaactactggtgcgtcttctactatagaaatcttaactaacttagaaatatttttataataacaaatttataactatagattgctctgtttgcactggtgaccgctgtgaacgctcagaatggattcggccaagttggacaaggaggatatggagggcaaggaggatttggaggattcggaggaatcggcgggcaagcaggttttggtggacaaataggattcactggacagggtggagttggtggccaggtgggaattggtcaaggcggagtccacccgggtcaaggaggattcgctggacaaggttctccaaaccaatatcagcctggttacggaagtcctgtgggatctggccatttccatggaactaatccagttgagtccggtcattttcacgaaaatcctcatgaatatccggaacatcatggcgatcatcaccgtgaacatcatgagcaccatggacaccacgaacatcatggacatcatagacattagtacaaatatgagaatacccatgacaaaattaaaggaatgtaatgctatagttctctaccgtaaattcttaagaaacacttgcttgtttctgaagtctctattgtatctaatgtccagaattgatttgtaaaagtgattctttatctaaaacccccttgagatccactatacaacgtgccttcttgaatttcagtatctaaaatgaaaaaaaaaacggagtctcaataaaaaagtaaataaggaaacggaaccctttactctgtccattttggttgaggcatctataaattattttgcagatagcatacaagcatatataccccacacatcccatctcaacttttgcaatcggagaaaaggatgccgtcgaccgctcccaagcgacattttctgaccaaagcagctgacagaattgaaaaataagcgacgtccgactaaaagggggaatggggagggaatggtaaagggtggggttcaggtgggtgggggctgaaggtgaaaaataaaaaatggcgtccagtcgagtgctcaacctcaagatttataacgaaggaaaaaaaatagagtcgaggtgagggtgggaaaaaagagcacacgttaaaataatgcaaaagctgaagaaaactaaaaaaaatgtgcgggaaaaactgccacccacacggccaaggaaagagtgagaaggaaaaccgcacacacactgatgcgcgcaacaacggaaatggaaaggataaaattaatttttctcctttattgccatttacttcacctgctgctgctgctgctgctttctcccactcgctcgcgcttttcctcgaaggagaacgaaaaagtggcccggaatagcggggcggctcaaagtgggtggtggccaaagggtgaaccacccaagcggcaacattgctgacgctatcaaacaccacaaacacatttagtttgcgggaatttgtttttgcgtcgctcacttttcttgctacttctttttcttctggcaatttgcgccataaaaatgtgaaaaaaaaatttgcaaaaaataagagcggaataaaaatgccatgagaggcaagaagaaactgtccgacaaataaaaatggcataaaaatattccactcacctgagaggtgcgaattgggtccccaatacactgtcatataaaaggatgaagattatagaaatttaaatcttttaaaaatgttgtaattatattttaaaaaagctgtgcaaaaatattgcttaatat

SEQ ID NO: 10001 - DNA, 668 bp, DROSOPHILA
cgatgaaactactgattgctctgtttgcactggtgaccgctgtgaacgctcagaatggattcggccaagttggacaaggaggatatggagggcaaggaggatttggaggattcggaggaatcggcgggcaagcaggttttggtggacaaataggattcactggacagggtggagttggtggccaggtgggaattggtcaaggcggagtccacccgggtcaaggaggattcgctggacaaggttctccaaaccaatatcagcctggttacggaagtcctgtgggatctggccatttccatggaactaatccagttgagtccggtcattttcacgaaaatcctcatgaatatccggaacatcatggcgatcatcaccgtgaacatcatgagcaccatggacaccacgaacatcatggacatcatagacattagtacaaatatgagaatacccatgacaaaattaaaggaatgtaatgctatagttctctaccgtaaattcttaagaaacacttgcttgtttctgaagtctctattgtatctaatgtccagaattgatttgtaaaagtgattctttatctaaaacccccttgagatccactatacaacgtgccttcttgaatttcagtatctaaaatgaaaaaaaaaacggagtctcaataaaaaagtaaa

SEQ ID NO: 10002 - protein, 142 aa, DROSOPHILA
MKLLIALFALVTAVNAQNGFGQVGQGGYGGQGGFGGFGGIGGQAGFGGQIGFTGQGGVGGQVGIGQGGVHPGQGGFAGQGSPNQYQPGYGSPVGSGHFHGTNPVESGHFHENPHEYPEHHGDHHREHHEHHGHHEHHGHHRH

SEQ ID NO: 10003 - DNA, 3052 bp, DROSOPHILA
tgctgagtccttgggagtccgaagctccttcgtttttatttatgatgcgctcaaattgttgctctttgcatatttaccttgttattttattacgtgacggaaatgaacagaaatataaaatacaataaaataaaaagagaagcaacggcgagagcaacgcccacataaacagcgcgaaaacattgtcacagcatgaagtcgaatggtttttacatgcaaaaatatttcatttcctccaccagcagcgagctgtttaataataaaaaaaaaaagaggaagaaagggcaggcgaaatgagcgacaaagtaaatttcatagtgagtgaggaaaagggagtcggcgcaaataaaaaactgcaataaaaatctgtttaacatgaagtgcggcaaacgcacaaaagtctgaggaagatcctcggaaatcatcttgttctgtctctgcttgccttttgcccatacactttacaacttatgagtgctaataaaattcactcggcacatacacatacacagatatatagcagcgcacaagctcaccgaaaaaaaaatcagcagcaaagcgagtccttcaaggtgtgcgctttgataaagaattcccctcgaagcaagtcctttatggttggggactaagtggcgaagatatcccaatggacagaataaaaggcaaggatttcatttaaaatttctcaatttattgcgtcagctctgcggtggtggagtgttgcttgcattgtgcaatttctgtgatattgccgaatgatgaatggaattcttgataaaatcttcgatgcacaagcttattgggcattattaggtgtgctattgtgattatggcttgcactgaatttcttctttttgtgcaactttgtatggaaaatgctactggcaaagatttgtatttgcagctaacagtatttagccgaagttatctttaagttttcaaaggtctatgccccactgataaccaagttcacttaaaaaaatccgtcatacggatactacatacaaataatcaagaattatgagagaaaagtggaaagctctgttgctattgcttcagctgcttgctcatttggaatcgggtcaagctatttggtttccctggtactttcagcgctacggactagccccacattcatcccgccatggcggaggtcataagaacaacacagaccccgggtcaacctgcccaccaggctacgaaataaaggcatcagtggcaggattgtctggcggaacggccggatgtgaacgcgtagttggatcgaaagcaggacgcctttgcgacgataatcccgtgttgatgcaactggcgcgtctctatgtggtgagtcctgagaggattgtcctgctcctggcgcagccatcactaaccgagtcctgcgccgagatcaccgatgtgctggacaatattcggaactccatgcgcaattgtgtcttggcaccggataacatatacggaagactagctgatggactgagctacttccaatcggaggtctgcgttggtggcgatggcagcaacaggaagcgatgcactggactccaggagtcgcacaactgcctcaaggaactccggacggacatgatcgagtgcgaggcaccggctgattggtacgaacgcaggaatgccagcaaggtgtgccacatattcaacgatgttctcgactgttactatacgagggcagccttgttgtgcggacttgaggttgccaggcaactaaggtccttcgcaggcgacagcatgggcagagccatgatccacaagtgcgaggtcagcaaaaggctaccccgggttgataatgccatgcccgtcaacgcaagtagtggggctagcttaaggtcatcatggttaggtgcacttatttcatggattttcgttatttatttttcagacattaaatatatttttggattattggtatattaaaaacaaagttcgtatactttcaattatgaaatagttggtaaaaacaaattttagttgttgtagtgatattgttaaactttttccattgtcttataccatttttagtgtttcgctgttctttagcatcgaaagcgtactcaattttggaatgtttatgagaaaaattcaatttattaccacttaaaactgtcatctgactcaataaagtttaagacgtctgagatcgaaactaaatagacggctgttatgtagagccatcatttatcttgcgacggcccgaaatgccaacttaagtgtttagctattttcaactaaatttcaataaacacctaagggacttaggctgtcgacaaagtaagccaattcaccgtcacacccgcatagtttcgaggtggtgtgtggatatcgttgtgagtatctgtgtgagagaggtgaccgcaaacatacaaacactgctcacgggaaaccgatgtcgacattcgcctcttgcttagagcgaaactcatcaattatgttgacgcgactggaaaatgcctgggtgctttgggtggcttggctgtttgggtggttttgggtggagcggcggttcgccgtgctggcctttgttaatgacaccttcaccaatcgcctgagtcggccataaagagcgagatcggaaagctttgggggatggcttttacatttgcatcgcactcgtggaggctggccgcaggatatctgggttacaaaatgcacaacagacctcctccactgagcatcaaagtgttggaaccacaatttaggttcattagcaggcaatttcaattcaatttgacaactaaggcggctttttaaagcttttttaaaagtgaataaatatctaatactgcacttctgtattaatacttaatattatatgattaaataaataaacattaagtcacaaaacagcataaataaatatggtctatcgtataattcaatttttgtgtgcaaaaatccataaaattgctcaattatcgccatatttcatttgcacccgcaaaattattactcataaaaccgaggtggctggagttatgactgctaatactaaaacttaatgccacaattaagtaaaacaacagcgaatgaagatgggctt

SEQ ID NO: 10004 - DNA, 812 bp, DROSOPHILA
catacaaataatcaagaattatgagagaaaagtggaaagctctgttgctattgcttcagctgcttgctcatttggaatcgggtcaagctatttggtttccctggtactttcagcgctacggactagccccacattcatcccgccatggcggaggtcataagaacaacacagaccccgggtcaacctgcccaccaggctacgaaataaaggcatcagtggcaggattgtctggcggaacggccggatgtgaacgcgtagttggatcgaaagcaggacgcctttgcgacgataatcccgtgttgatgcaactggcgcgtctctatgtggtgagtcctgagaggattgtcctgctcctggcgcagccatcactaaccgagtcctgcgccgagatcaccgatgtgctggacaatattcggaactccatgcgcaattgtgtcttggcaccggataacatatacggaagactagctgatggactgagctacttccaatcggaggtctgcgttggtggcgatggcagcaacaggaagcgatgcactggactccaggagtcgcacaactgcctcaaggaactccggacggacatgatcgagtgcgaggcaccggctgattggtacgaacgcaggaatgccagcaaggtgtgccacatattcaacgatgttctcgactgttactatacgagggcagccttgttgtgcggacttgaggttgccaggcaactaaggtccttcgcaggcgacagcatgggcagagccatgatccacaagtgcgaggtcagcaaaaggctaccccggtgtttcgctgttctttag

SEQ ID NO: 10005 - protein, 263 aa, DROSOPHILA
MREKWKALLLLLQLLAHLESGQAIWFPWYFQRYGLAPHSSRHGGGHKNNTDPGSTCPPGYEIKASVAGLSGGTAGCERVVGSKAGRLCDDNPVLMQLARLYVVSPERIVLLLAQPSLTESCAEITDVLDNIRNSMRNCVLAPDNIYGRLADGLSYFQSEVCVGGDGSNRKRCTGLQESHNCLKELRTDMIECEAPADWYERRNASKVCHIFNDVLDCYYTRAALLCGLEVARQLRSFAGDSMGRAMIHKCEVSKRLPRCFAVL

SEQ ID NO: 10006 - DNA, 2716 bp, DROSOPHILA
aggaccatattctacaagtctttatgtgatatgctttgcacccacaccgacacacgtacatctggttgcactaattaaataataaatttaagtagagacatgttcatgggatgttgtggcggtgttctataacatatatgtacggaatgcttgctgtcttttgaccagcgcctttgttgtatgtcatcgtcatttcataaaaagcttctatcatgacgacaaggacgacctgcacttgcatcccgccactgaattcacattgcgttcctgtttctggtaattactcaagcagacgtcgaggattcgaggaggacctcctgctcgggcgccatctacttcccacttgtcggctggcaaacataatgaacatatgtgactactcgtgacacggcacactggcgtaaaaaggctctctcgacacacacacacacacgcacacccacgcacacagggacaagtgggcgtatgcaatggctgcacaaaagaggcgtggccggggcattacgcgcacataattctaattagtggcatatgccaccagatagcagataccattgcccacagtaaccagagcagagtccatgtctcaaattatgttattacgcctttgagcgtccggataatatagccatggctatggagtaaaaaagatggcatagatggcgaaaaaatctataaagatagtttttttttttttcaaatatgtggccgtctgttattttagactaggtgctacaagaacttaagaaggggcagttgaaatagttacccaaattacacatcatgaacttagaaattaattttaattctacatgtttctttttccttgaatatatctgtaattttgttgcagaacatgaagcttatgtctaaatgtctatgtgataagtagacattgatataaacatcacaaacagcactcaaaacgattgaagcttaaagtcacattcaagaaattttggtaccgtcaacaataaattcggaaaataagctgagcataatggccagtcttgatgatttctttgccaagaaagataataagaaaactaaaaaaaaaaacccaattacttggccaccgatgagttgtacaaaacgctggaggaatctgcaaagttggccacggatgccgattccgtaaagagtatggaaaatgagaatcgtacagaggggccaactgaatctacaggatcggctatgaaatcgttggaattttcacttctttacccaaatgaatctgttaaagaggaggatgaatggtctgaatttacagaggagaatcgtatggagctcatgagcttgggccacagctctggctcaacaatactgactcaattggccgtcggcgatgtcaaagctcaagattcggagcaaaccgatacaggtggcgatggcatgaacgtgggtcagaaacatgatgatgacatcggcaataccacttgtccctgggtgaaaatggagcacgcactggagcagcagaagctaaaggagccgatgtctgtggagcaaccgaataagaaagaaccgtccgaggtaaagagccaaatctacataccacctgctctccgccagagccaaggtgacttcaatcgacgggatcaggctgagagccgtctgcgtaaggttccatccaagatgtccggaaaacctcaagctcctgatctcaacagtgacgagtatttccccagtcttagcaaagcactcaaacgcaccaagtagccgtatcacgatgatatactctttaaacttaccgtttctgttgttcactatgtttaacgatatcaatttttctggtcgatctgatgcggggtgcctcgattaaataaaattgaaagcaatcagcaagcccatctgttttagtggtgttttactcgtaaacaaatttgcactcaacaggcccattagcattacacgtctttttggctggtccccgatgtatcgttagccgtaaacgagccaaatatttacaatcaaatggggtttagccttaaatgcacccggcggactgaaaagaaaaccaaaaacggcaaattacgagatggaattttgtgattgtttccacagaatgcatgccaaatatttaattaggtttgctaactgttgatagcaatacatgtgaagtgaaattaaagtggtctatttttgaattatacgtataatttattaacatctatttctgatggcataatctttcatcgaacacaaatctttggatccactttgcctgacaacttttcagcgtggctcctcatcttcgacaaggcctcacggctgcaatctttaaagctcctgttccagatcgcggataaagaaaccctacattccttctaagcaggctaacaatgtccaccatacggcccgtagcatgagcagcaaccatatgggccacaaggaccgcaacagtggttgaccgaacggaaccactggccattgtagggtccgcagagcaggcagggtcccagtccgccagtcggtccacagcaagtgccgggcatcgagcacattcctggattgcacattttattctgaaaacgaaatgaaacgaatcgaggatattttcaagaaacaaattcgtttgttgttcacactcacattagcctgattacggaagtaggattttcagtcctagaaatttggtagtcgtacaaatagatgttttctgttggagaaccgaaactataatgagctaaagccactagcttggtccacaaagttctac

SEQ ID NO: 10007 - DNA, 672 bp, DROSOPHILA
atggccagtcttgatgatttctttgccaagaaagataataagaaaactaaaaaaaaaaacccaattacttggccaccgatgagttgtacaaaacgctggatggaaaatgagaatcgtacagaggggccaactgaatctacaggatcggctatgaaatcgttggaattttcacttctttacccaaatgaatctgttaaagaggaggatgaatggtctgaatttacagaggagaatcgtatggagctcatgagcttgggccacagctctggctcaacaatactgactcaattggccgtcggcgatgtcaaagctcaagattcggagcaaaccgatacaggtggcgatggcatgaacgtgggtcagaaacatgatgatgacatcggcaataccacttgtccctgggtgaaaatggagcacgcactggagcagcagaagctaaaggagccgatgtctgtggagcaaccgaataagaaagaaccgtccgaggtaaagagccaaatctacataccacctgctctccgccagagccaaggtgacttcaatcgacgggatcaggctgagagccgtctgcgtaaggttccatccaagatgtccggaaaacctcaagctcctgatctcaacagtgacgagtatttccccagtcttagcaaagcactcaaacgcaccaagtag

SEQ ID NO: 10008 - protein, 223 aa, DROSOPHILA
MASLDDFFAKKDNKKTKKKNPITWPPMSCTKRWMENENRTEGPTESTGSAMKSLEFSLLYPNESVKEEDEWSEFTEENRMELMSLGHSSGSTILTQLAVGDVKAQDSEQTDTGGDGMNVGQKHDDDIGNTTCPWVKMEHALEQQKLKEPMSVEQPNKKEPSEVKSQIYIPPALRQSQGDFNRRDQAESRLRKVPSKMSGKPQAPDLNSDEYFPSLSKALKRTK

SEQ ID NO: 10009 - DNA, 2828 bp, DROSOPHILA
actatcaacagctcataaattttccagcaacggagtggggcaaacttttattttcccgctgtgtttttccattaaattgagttccactcgagcagcaaatatgaggcaacccctcaataaggggatgttccttagctccttgttgctgtcaactttatcagcaggggtgtcagtggttcctttcttttcggagtggtggcagtcagttgtttatgatttttgtttgtttttattccaaggggaagccgagaagtttttgtgcccttccagaaggaagatctgaagttgaaattaatgatcagaagtcgaaaagttttggtgcgtcctaaatagctgttcaagaaagatgccatatgcatagctcagtataaagttcctatatggattggccataaaaataatattatttatagatatattataattcattgaaacacccattttattgacactgcgcatagagtactaccacttcgttctgtgtgcatttttccactcttgatgtttttcttttgtttcggccaagtttggaaaatgaattttcctgctctgctgctcacgggcgcatgatgaatatttattgaaattaccaaagttgacgctactccaaattgaattgtgttgccaacttgggatgcttcttactgccacaaattctgcgctctttttccttcttctattggcgcgcatttttttgttttggtttttgtttttggcaaattgttattaattttacacggggggcgctgaagccccacaccgaaacctaattaccgcgtttaatgcatgcctgcaaattggctttcaagcggttacgcaggtgaactgccatcgcattgtggaaatcaccagaaaaccaaccaaaaaccgacaaaaactggcacgcgtccgatgcgtataaaagccggcacattttggccaaatcagcatcagtcgcagcccaaccagcctgctttcaacttgactcgagcaaaccgtccagtcatcaccgtacttcaacatggcattccgctatctcatctctctgtgcgccctggtggcctgcgccaatgctggtctcttggccagccatgtggccattgctaatccgtcggtggatgccgtcgcctccactcagcagaatgtggtgaggtcctttgccggtactgtttccagctactcgaaggcggtggacaccccctactccagtgtgaggaagagcgacacgaggatccagaacaatgtatacactcctgctattaagacgaccacttatggtgctgctcctctgtacactcaggctactcccattgtgtccaagactctggtccatgctccagctcccgttgttgagaagactgtgtacgctgctgctccagctccagttctggccaagactgtttactccgctcctgctccagttgtggccaagcacgtttattccgctccagctcaggtttatgctcctgccgccccagttgtggccaagaccgtgtactctgctcctgctccagtttacgctgctcctgctccagtttatgctgcacccgctccagttgtagccaagaccgtgtactccgcaccagctccagttctggccaagaccgtgtactctgctccagctccagtttatgctgcttccgcaccggctgtggccaagactgtgtcctatgccgccccactggccaccaccaatgtgaaccatggaccagctgccaccacctacacccacaatgctccagctctgggcgtctccagctatggaagctcccagacggttcactattcccccgcagagagtgtgtcgcacatgagcttcgatggattcggaacccactggggtttctaaataagtcttggcctttgggcttaagcaattgttaatgtttggtggtcaataaagacggagatcgattgttgcaaattaaacatgagccgagtaaagtagaccttctgggtgaacaatgggccaaactggtttctgccaattcatcgttatgcgttggccttctatgaggtcttacctgaagtgctaaggcggtgggcgtggtggtaagcggctttgtgataagctgtgggggcgtggcatgtcgtgttttatggctctttaattggatttaatatttttcgcacacctttcccccaaaagcaacttgtgcacatgttatatttattgtcagttaattaacggatatttatgctcgcataaccgcaactccgcataaatggcttacacgcttgcctcccaaacttaacattgacatcttggctcagagtgactgtggatagatatgtggtactacattaatgggtaccagttaaatgggttcaattggaaccattgacaggcggccaagaggtagagtttaatagaccgaatgcgtgttttgacagtgatattttaacgggattgcttgaacagcgatcgagttgcgtaatgaaaggtaaatgatagagagactgaggtaatagacaaaagacaaaaagacaggaaagttattaaagacatggatcagctcttaataagcattaacttatgcctcatgaacttttgaacttattactattgataataatttttgttattcttccttaaaactcgtttaagattttctcaaaaataagtcaaaaatgttcaactttagtttgcccttctaagacatgacactaatgcgacatgcaatcgagctgattaattccctcttggccaattgacaggccagacaagaacaatcaaattaaatgaaaacgtgtccaaaaagagtagaacgaggaccctgtcttggaatttttgccagccaaattagttgcatttgttattgttctcggcgggcgctttgatttgtgat

SEQ ID NO: 10010 - DNA, 828 bp, DROSOPHILA
atggcattccgctatctcatctctctgtgcgccctggtggcctgcgccaatgctggtctcttggccagccatgtggccattgctaatccgtcggtggatgccgtcgcctccactcagcagaatgtggtgaggtcctttgccggtactgtttccagctactcgaaggcggtggacaccccctactccagtgtgaggaagagcgacacgaggatccagaacaatgtatacactcctgctattaagacgaccacttatggtgctgctcctctgtacactcaggctactcccattgtgtccaagactctggtccatgctccagctcccgttgttgagaagactgtgtacgctgctgctccagctccagttctggccaagactgtttactccgctcctgctccagttgtggccaagcacgtttattccgctccagctcaggtttatgctcctgccgccccagttgtggccaagaccgtgtactctgctcctgctccagtttacgctgctcctgctccagtttatgctgcacccgctccagttgtagccaagaccgtgtactccgcaccagctccagttctggccaagaccgtgtactctgctccagctccagtttatgctgcttccgcaccggctgtggccaagactgtgtcctatgccgccccactggccaccaccaatgtgaaccatggaccagctgccaccacctacacccacaatgctccagctctgggcgtctccagctatggaagctcccagacggttcactattcccccgcagagagtgtgtcgcacatgagcttcgatggattcggaacccactggggtttctaa

SEQ ID NO: 10011 - protein, 275 aa, DROSOPHILA
MAFRYLISLCALVACANAGLLASHVAIANPSVDAVASTQQNVVRSFAGTVSSYSKAVDTPYSSVRKSDTRIQNNVYTPAIKTTTYGAAPLYTQATPIVSKTLVHAPAPVVEKTVYAAAPAPVLAKTVYSAPAPVVAKHVYSAPAQVYAPAAPVVAKTVYSAPAPVYAAPAPVYAAPAPVVAKTVYSAPAPVLAKTVYSAPAPVYAASAPAVAKTVSYAAPLATTNVNHGPAATTYTHNAPALGVSSYGSSQTVHYSPAESVSHMSFDGFGTHWGF

SEQ ID NO: 10012 - DNA, 3257 bp, DROSOPHILA
gcgaatggggctagggggtggtaaaatagtatttgacatgctcgacgggctgcatcaaggtcatggtgattctaccccgcccgtccacttcgatttcgattcgcatctgtgcgggcacaagccgtggcatcatatctcacggatagaggactccaaactggttgcagtcgcatcttatcgccgcattaaatgcttgcccaaacggcttccatctctcctggggctccaacttgcaaccttaagtggtgcgtaattaatggctccgccaataaatgctcacgttttatttactgtttatggaatgatggggatgggtctgaggattcgacttcgtgttgggtagcctgtaaacaagaggacaatttatgctacaagcaattttaaaactaaattatcatccaaatttatgccacgttcggtgggtaacaaattaagcgaggaatttctggcgatgcgtaaaatatttattgctctttttgttattttaataagcgtaaaagtgattcattttaataattttagggtatatctataactgtatagctgtaccgtaaatacctaatatcgccttaggattattaaaacccatgataactgcatgctagagactaatcataaaagatctagcaagctagcgctaagttctgacccccatagagtaacccatgtgagccaaacctgttgactatttgttttgtgtatttgggtttgccaaaaggcgataattagctgcgttgggagatgggggacccaaaccgatgacgccatctaatgattgagtctctcccaatttgcctttagatttccatctctcgaaatctagctgagagagctttggcctagctttgggtgggtatagctttgcctttgtccagttcagcatgggttgtgatatcattgcgaaagcgaagtgagtaaagtactgataaggtgttcgcaaagatacgtctgggaatagcacctacatatgtagatagttgacagtgacggacaagacccaccgcaatgttggtgagcgttgtggcccacaggtgaggaactgcgtaggtgacaaccgtagtcaaccgattacgcaggagcggaaaagttgcgtgttggaagaaaccactacaaaatgttaaacaaaacaatgacctatcaggctaggcatattattaataataaatgatcctcagtccatctgtaaaattgaaggttctttgtccgtagttgtttatttattactgggcatctattaaaacacctgtagggttcagtaaaggttaaaaaaatatatataatattaaatatatttttcagatccaccatgtccgaggtagctgcagcaaatggaagcccctccccagcgccaactcctgaggtgcccgctaccgagttggcccaattggcgctggaggatgagcccaaggttagcttttcggatcagttcaaggccttctccaagttcggggactccaagtccgatggcaagctgataacgctgtcgcagagtgacaagtggatgaaacaggccaaagttatcgacaagaagatcaccaccacggatacaggcatccacttcaagaagttcaaggccatgaagatctcgctcagcgactacaacaaattcctggacgatctggccaagacgaaaaaggtggagctgtcggagatcaagcaaaagttggccagttgtggagctccaggagttgtgtccgtttcggtgggtttgataaattggttgtgaaaaatatgatctatataagtcaaatgattaagattgattttaaagtgtaaagaacttcgagaagaccatttagatatgacaaaatttaaatgatttttttttgactcatttaaactatcaattgttaaagtagttttcttacagaagttcttaaaaaatatctttttaaacctttgaaagtcataaccatatactttatgcctttattgaaaacctaatcaacattttgttaccatttttaggctggaaaagccgcagctgccgtggatcgattgacggatacgagcaagtacaccggttcccacaaggagcgtttcgatgcctccggaaagggcaagggtatcgcgggcagacggaacgtggtcgatggatccggatatgtgagtggctaccagcacaaggacacctacgacaatgcccactagatggggtaaccaccgtttttcaccctctcataaatctgtatttctaacttttgtgtttccctagttaatgtctcccaatctaatttatctttgtgtatataataagtttgtgataatttaagtgcttacaaataaacttatatttttgattataatttttgagttcctttactttgtttatccttctttgtcctttgatacgtaaaattttgaagcggcccaaaaagagttcaaaagtaaatccaaatcaaatttatatacatttcatggcaatcaaacccatgtttggtagtcttaagataacagataaacttttaatattacaatttgtgaaagaaatttaaatatcacatatggaaaccaaagatatacgacatacatatgtagatatatgttatgttttcacaagaattttgcttgaataaatacactttaaaatatttgcattgctaaaatttgtattgggaggaaatacaatttaaaaaaccaaaattttaaagcaattaagatggttttgtaaatcgaaatatacatttaattgtaagatctttgaaaaatgcccaacatgtgtaccttcttaaaagcaaagatttcactggaagatagttattaagagatcattgctttatctacacaatgacattatcactgatgcaaagctgacatcgaaaaaccggagcggtgtgaagcagactgaacgctacagcgaccagatggggatggaaattgatatatgggcataagttgcataatcctaacccagagcaggtggaaaactagctattgattgcagtcgaaccaaagtcactcaacgatatatcatatagcccttgggaaataggtataaaagcggcgaacattacagctccaagtcagcagtgcaactgaggagctcagtgcttgatgaagccacaaggaataccaccgactactacacgaatcagccagaccaagatgtcctttcgcggcaagaatgcagtggtgaccggtggagctggaggcattggactgcaggtgtccaagcagctcctggccgctggagcagcggttggttgttttacacataattacgtgaagtaatttctaaagcgagtgcttcctagaag

SEQ ID NO: 10013 - DNA, 716 bp, DROSOPHILA
ccgcaatgttggtgagcgttgtggcccacagatgtccgaggtagctgcagcaaatggaagcccctccccagcgccaactcctgaggtgcccgctaccgagttggcccaattggcgctggaggatgagcccaaggttagcttttcggatcagttcaaggccttctccaagttcggggactccaagtccgatggcaagctgataacgctgtcgcagagtgacaagtggatgaaacaggccaaagttatcgacaagaagatcaccaccacggatacaggcatccacttcaagaagttcaaggccatgaagatctcgctcagcgactacaacaaattcctggacgatctggccaagacgaaaaaggtggagctgtcggagatcaagcaaaagttggccagttgtggagctccaggagttgtgtccgtttcggctggaaaagccgcagctgccgtggatcgattgacggatacgagcaagtacaccggttcccacaaggagcgtttcgatgcctccggaaagggcaagggtatcgcgggcagacggaacgtggtcgatggatccggatatgtgagtggctaccagcacaaggacacctacgacaatgcccactagatggggtaaccaccgtttttcaccctctcataaatctgtatttctaacttttgtgtttccctagttaatgtctcccaatctaatttatctttgtgtatataataag

SEQ ID NO: 10014 - protein, 192 aa, DROSOPHILA
MSEVAAANGSPSPAPTPEVPATELAQLALEDEPKVSFSDQFKAFSKFGDSKSDGKLITLSQSDKWMKQAKVIDKKITTTDTGIHFKKFKAMKISLSDYNKFLDDLAKTKKVELSEIKQKLASCGAPGVVSVSAGKAAAAVDRLTDTSKYTGSHKERFDASGKGKGIAGRRNVVDGSGYVSGYQHKDTYDNAH

SEQ ID NO: 10015 - DNA, 3621 bp, DROSOPHILA
caggaaggtctgctgatattgtcattacatgcttgggggatatttctgtggcgtaaccaaggcaaatgtacttttgacagtccgagtgctggaaactcctgaaacctgaaagggttgaccaaccctctccgttgaccccggcaaccgcaacgggcaaaagacaaaagatttgtttgctcgccgggacaacagctgcttatggccccaaggcgttcgtccttcgtcctttgctgtcctccccactcgattgcccccaaattggtttgtttaatagtttcgaatcgtgtcacccggctcagcagcaataaatgttgggtaagtatttaaatatttattagtcacaactatcttttatggcacagatgacgcaattatctatggcatcccatccccgaacgggtattgccaattcttgacttggccaatcaagtttgctcactaacatgaaatctaagctttacgagatgtggaaatagaatcaaattatgccagcccatatacactttacttaaatttataataattcatgcataattctgagttgttaatacctatatttcgctttttattgatgtactatatatagaaggttgcattttacgtagcaacatgttgcttatacattcgcaacattttgtggaactcattgcaagcgacgaaatggaaatcttatttttgtaacgataaaatgttttgaatacaaaatcctttaaaattgaacaaaatacattaaaatttcttttttaaatcaaattaatttacagaagaatgatatagcagacttatcttaacttatccggagattttactatcgcttggttattttttgacatacaagggggtccgagcatcgataagattaaacgaaatttaagacccctgtgagattagcactgcccctcgaacgctcataaaccgtggatagtatagatgcaggcgattgcgataacctgcgattagcatagacagacggggaccgtgttttggttcagttggcaccatgatcttgaccgccacattcatttgtttctgcctggcttcggccttcaactatttcagggcccgccgacaaaggtcgctgatcaaaaatctgaaaggaccctttacctggccgctgatgggagcaatgcacaaattgctatttctgacgccgataagtaagtttcactgaactaaacttataatttcttataaatatgctggcagatttctttcagcgcagcaccgaatacctcaccaaatatggtaccttcagtcgttgttgggtcttccatcgccttttcattcctctggcagatctagaacttagcagacagcttctggaaaatgacactcatttggagacgggatatgagctgatgaaagattggctagttggaggagttctcatgtgtcagtcagaacaatggcaaaagcgacatagtcttattagtggtcttttcgacaagggaaacttggaacagttgatcgatttaagtcgccaccagacggagcagctgctccaaaaattagcgaaacaggcggatcaaaaggtgtttgatatctggtatactgtgagtcctattgttttagatctaatggtaatgaccacctgtggtgccaaacccagtgaggagtattccaagaatctaaaggagtaagtaataataggtgttacttgatggcccaaataattcaattttttcacctttttcagtttatcggagatctatagaaaacgttttttgagcctacagtctgcaaacagatttaactattggctgagttctccttttatgagaaaacgtcagaatcgattaataaaaagactgaatgatgaacacaacaatctcatggccatgcaccaaagtcaaaatcaattgaaaattgagaatggtttggacatatatcagctaaggccaatacctctgaaggaccataaatccttattggaaattctcttggaaagtaaagatccccaacttacaggagaagaaatctgtggagagctaaatacctgtaattacctcgggtaccagctttgcagtccagctctctgtttctgcctcgtaacaattgctagaaatccatcggttcaacaaaagtgtttggatgagttaaatttggctcagatcaaagatcaaggatgggacctggaaaagctaaattatctggatgctgttctgcacgaaactatgcgtctttacccaccacaagtgattgtcgggaggcaactcaaaaaggattttccatacagtgcgtatgagcaatattttgtctgtaacacactcatcttaattcgattttcaacagcacatagcatcgtgggagatgcagaacttccctgcggttcagagatctatattaatctctatgaactgcagcgcaatgaggttcgatatccaaaagcaaaccactttgatgcgcagcgatttttggactctcctccggaactcctgagctacagtctaggtcctcgatgttgtccagcgagaaagtttagcatgcagctacttaaaacattgttggctcctattttggccaactttgaagtgttaccatatggcgatgaggtgcgcttggatttgcgacttgttttgggatcatccaatggatttcagttggcattaaagccacgatagatttttagaaaagtaaaaaatgtcatggttatcaagcctattattatttaacatgcgcttaaacatatgattatagaataatactatatgaacccgtttatattttaccacttaaactagttagttggtgtacttagttatgttttcgcttccgcattcccagctgaaaacccgtttccgatcgcaaaacgatattaacaatgcactcaaccctttgacccatcggaagcagttcgtattccctgacaatcttggccagcatcatcttcatctccagctgagcgaacttctgacctatacagttcctgggtcctgcactgaatggaatcattttaaatggagccacgcgacttccattctcatgtcgttcagggataaattcgtccggattgggaaaggtttctggttggcgatgtacaccaaagattccgattataatctctgagccagccggaattactccatctccatgcacggaatgggctgaaaaaatattaaataaattacgattatgaaaactgcgattaaatataggaatcctactgtatttgaagtcggtctgcaatttgcgccctacgatgggcactggtggatacatcctcagcgactccttgatgacgcactccatgtacttgagctccccgaggtcacgaatgctaaccggtctgcttcgatcggtgccgagcacctgaacgatctcctccagcatctttgcctgcacctctggatgcctcgaaagctcgtgcaggcagaaggacaaagcactggtggtggtatcgtgaccctcgaacatgaacgtatccacctcctcgcgaatctcatcgttggtcagcggtctgccatccacagtggacatcagcaggacgtccagcaaggccattcgccgcttggagcccacatcctcatcggcagtgtccatcaatttggattgttgatcctctaaagcctgacgccgcttctcgatcaccttgatggtgaattcctgcatcgtgcgaatgag

SEQ ID NO: 10016 - DNA, 1437 bp, DROSOPHILA
atgatcttgaccgccacattcatttgtttctgcctggcttcggccttcaactatttcagggcccgccgacaaaggtcgctgatcaaaaatctgaaaggaccctttacctggccgctgatgggagcaatgcacaaattgctatttctgacgccgataaatttctttcagcgcagcaccgaatacctcaccaaatatggtaccttcagtcgttgttgggtcttccatcgccttttcattcctctggcagatctagaacttagcagacagcttctggaaaatgacactcatttggagacgggatatgagctgatgaaagattggctagttggaggagttctcatgtgtcagtcagaacaatggcaaaagcgacatagtcttattagtggtcttttcgacaagggaaacttggaacagttgatcgatttaagtcgccaccagacggagcagctgctccaaaaattagcgaaacaggcggatcaaaaggtgtttgatatctggtatactgtgagtcctattgttttagatctaatggtaatgaccacctgtggtgccaaacccagtgaggagtattccaagaatctaaaggatttatcggagatctatagaaaacgttttttgagcctacagtctgcaaacagatttaactattggctgagttctccttttatgagaaaacgtcagaatcgattaataaaaagactgaatgatgaacacaacaatctcatggccatgcaccaaagtcaaaatcaattgaaaattgagaatggtttggacatatatcagctaaggccaatacctctgaaggaccataaatccttattggaaattctcttggaaagtaaagatccccaacttacaggagaagaaatctgtggagagctaaatacctgtaattacctcgggtaccagctttgcagtccagctctctgtttctgcctcgtaacaattgctagaaatccatcggttcaacaaaagtgtttggatgagttaaatttggctcagatcaaagatcaaggatgggacctggaaaagctaaattatctggatgctgttctgcacgaaactatgcgtctttacccaccacaagtgattgtcgggaggcaactcaaaaaggattttccatacaatgcagaacttccctgcggttcagagatctatattaatctctatgaactgcagcgcaatgaggttcgatatccaaaagcaaaccactttgatgcgcagcgatttttggactctcctccggaactcctgagctacagtctaggtcctcgatgttgtccagcgagaaagtttagcatgcagctacttaaaacattgttggctcctattttggccaactttgaagtgttaccatatggcgatgaggtgcgcttggatttgcgacttgttttgggatcatccaatggatttcagttggcattaaagccacgatag

SEQ ID NO: 10017 - protein, 478 aa, DROSOPHILA
MILTATFICFCLASAFNYFRARRQRSLIKNLKGPFTWPLMGAMHKLLFLTPINFFQRSTEYLTKYGTFSRCWVFHRLFIPLADLELSRQLLENDTHLETGYELMKDWLVGGVLMCQSEQWQKRHSLISGLFDKGNLEQLIDLSRHQTEQLLQKLAKQADQKVFDIWYTVSPIVLDLMVMTTCGAKPSEEYSKNLKDLSEIYRKRFLSLQSANRFNYWLSSPFMRKRQNRLIKRLNDEHNNLMAMHQSQNQLKIENGLDIYQLRPIPLKDHKSLLEILLESKDPQLTGEEICGELNTCNYLGYQLCSPALCFCLVTIARNPSVQQKCLDELNLAQIKDQGWDLEKLNYLDAVLHETMRLYPPQVIVGRQLKKDFPYNAELPCGSEIYINLYELQRNEVRYPKANHFDAQRFLDSPPELLSYSLGPRCCPARKFSMQLLKTLLAPILANFEVLPYGDEVRLDLRLVLGSSNGFQLALKPR

SEQ ID NO: 10018 - DNA, 21857 bp, DROSOPHILA
atgatggcgatgaaaattcgttgtcggtgcactcaaatggaattgagtaaaattcaataaagtgctttgtggtcggggattaccgaaaatatgttctaaaaactaatttgggggatggttagagaaatttctagatactttgaatgcgatgggttttccaactgcgaaaaaaagtgttcgatgtaataaaataattaatgttttggtgtaattgaaaactgtcctcagtgtcctgttgtaaaaccacattatgcttcagatcttcaatcctcaaaacgactctccactgcagactaacaaacaaatgccaaatttttacaatccgccgctctaaactcgtccaaactaaaaaccaaaaaaaccaaactaaaaaatacaaaaaaaaatctaagtcaccaccgtcgaatttctacaactattaaaccattttctaaatacaaaacaaaaagcttttcgcttatttaagtgagtctgattaaaatgtgcatgtctgtgtggcgactgagaccaaacacacctgttgctgcgatgctttgaccgcgtttcgctttttggcttttggcaaggaaaacgctcaacgaataaggcattttaaaggaaaggcaataaatattgtgcgtccgaatgaaacttcaaatatgaatacaggtacaaggactttttctaataataccttgaaataaaattgtgatatatttgggataatccatttcgttataatactgataagagctttatgttgcaaatttgattttaattagaacagtggactctttaagcggagctactagcctcatgatacattgaaactttattttaaagaaaatagtactttaaaaagggcattttattagttaataacagcgtatgaaagttttattatgccactcacaagttacgaaaatatctccccaatatctcacagtttgattactaactttaataacctatttccgacccctgttgtgccacccattacccccaccgctaatcccgcaaggagatcgtaaggagcaagcctcgttaacaccgcaacagcaacaatcgccgcagcagccagagcaacagcaaccaattacccgacacgatgccttggatagttctagtgctaacaataaactaaatcataaacacaataacgataaggataaggataccactagcgataagaactgggaggcgggcagagatttattgccggccagtgttgtcatcgtcgatgaatcatgtgcctcgaaaagtcagaaacaaccaatcgagccgagcattgtttcgcgaagtggagccacctcctcatcgcaacgtcgccggcaattgcaattccagcgacaaaaggaggccaaactttatgaccgcggagatggggatcgggaccgcgaacgggagcgggaagcctcgacctcgacctcaacctcgacctccgcctccaccaccaccacgaatactgtgatgggtggcggggagctggtgaactgtatagcctacgatgacaacaccctggtcatcgagaggaaaccctcgccctcctccccgtccaccagccggcgttatctgaaggccgaaacgccgacgcgtggcagtcgaaagtacaaccgcaagtcatcggctaaaagtgatttggaagtggtcgttgtcaagccggaacaccatcatcagcatcgatctccgacgataacgcttccggttccggctaacccactaaccacatcggcatcggcgggatcctcgcccacgggagcgggattggcagccggattgggaactgcctcgggaacggtcctgcaacaaaggtacatacaactccagctggagaacgaaaagaaatacattttccatgcaatgcaagagtttgattacatggaacaatctaggcgttctggggcatagtaagtcggaaccagaccccacaattaactatcgtactcctatcgtgactcaatgttgtcccttgtgctcgtcgtcttattgtgtgtctcatgtgtctgaaatcgcatgccaagtatttaatgtgccatttgaaacccgcattagggccattggggattcaaagttgggctttaatataataggctgcctctgatgtcaatgcaaaaatacattagaggtaaagctaaaatgacatgaaatttttgctttatttttgtataatttacatcatttgcttgtcagagtctcggaatacatctaggtgttaatttatgacgccttaaattatactgccaagttaagtcataataaggtaaacatgtgggtcataaaaaccagaaaagtttgtttgcttattgaggaaattccataaactattgcagtttatcatgagtttacactatttaaaccgcaatatgtgggaaagaaacttttgggcatctattcgcaaagtaatttttaaatttattattgttattattcgggaacaaagtaaaaagaatatatttcaattcatatttaagccgcattttcaactacggaattaaatttgtaaagatgtaaagaaacatcttataaattctgaaatggaacactttacagctaactgttaaattgaaattcaaaaggtcacttattttaagctaaagtttaactccagtccagaaatgtacactattttgccacacccccaccctgtagaataaatggttgatggcaagtgcatatcgaatatttgattaagataaaacattaattaaatgcatttcccttcgtaccacgacagctgcagtgcacttgatccgcccgaggattcgaatcagcccagcgggaccaggaggcgacccaccagcaccgagctcgccctcagcaacgtcaccagtcagattgtgaacaatgccacctacaagctagacttcaagcaacgtcgtcacaaaagcaacaacggaggcagtgagtcaggatctctaaccggaatagccacaggaccggcgacaagtcccgcaggaccaacaggaccaaccagttccagcggcaagcggcgcaagtccagttgcacatcctgcggcggaggtggcatcagtgccccacccccgagactaacgcccgaggaggcgtggcaactgcaaccacagaacagtgttaccagtgccggcagcacaaatagtagtttcagcagcggcggcggacgtgacgataatagtagttacagtgccgtcggcggcgatagcagcagcagcaatagttgcaactgcgatatcaccggtgataacagtacattgcatggttttggcgtcggcgacgtttgtagtttcatcgccgattgtgacgacaatagcgaggacgacgacggcgatccgaataaccaggatctcagctcgcaaaccctgcgcacagcggccatcgtagcggcagttgcggcagcagccaaggaacaggcccaggagcaatcgctcgccgactgcgagagcttcagcgatcgccggcaggatgccgatgaggacgtccgcatcattcaggattgctgcggcggcaacaacgactcactcgaagacgttggcgaggtggacgacaacgccgacgttgtcgtgagaaagaactcaaggaatcgtccctcgatcagaaggacatgcaggataaccgaggaggacgacgacgaagacgagaacgcggactacggtgatttcgatcgggaggatcaagagctagacgacgaggagcccgagggcaccaccattgacattgatgagcaggaacagcagcacgaccaaggtgattccgctgaagaggaagacgacgacgaggacgtcgacgagtactttgaggaggaggaggacgacacgcaggccttttcgccattctactccagttccgcggagctaattgataattttggtggcggtgcgggcaagttcttcaacataatggacttcgagcgtggagcctccggcgagggaggcttttcgccaaacggcaacggtggtcccggcagcggtgatgtttcccgtacggcgagatacgactccggggagggggatctgggcggcggcaacaatatcatgggtaagtctcttgccacttttaaagcatgttttgcaatgaactataaacttattaatgcgttcctttgaaggcatcgattctatgggcattgcaaacattccggaaaccatgaacggcaccacaattggaccaagtggagctggtggccaaaaaggtggtgctgctgcaggtgccgctggccaaaagagacaacaacgccgtggaaaaccgcaaccagacagaccacaacgagcattattttgcctgagcgtcaagaatcccctgcgagccctgtgcattcgcattgtggagtggaagtatccttttcattgctagagttatatcaaaaaacatttaactagtaaaatccaaaccttgctattctatcaacctaactttctatatagttctttaacaaaaactcgtatttcatatagttctaagatgtgaagcctaaatctggttatccttaacgctttgacctttctagaccatttgagttccttattttgttaaccatttttgccaactgtattgccttggctgtttacaccccctatccgggaagcgattcaaacgtgacgaatcaaaccttggtaagtcctacccactggcatagggtattctgaaattataagaatattataatggcttactaatgattatgaatttctttcatgtatgcgcatccgattcactcatgacctaaactcataaatccaccaacgaaactatccttgaaatccaaattctgaatccctaatacaaacataaaacacatgcactccaaaacaaatcaaatgatacgaaaaccaacatcgaacaacaggaaaaagttgaatatgtattcctagttatattcacagcggaatgtgttatgaaaattttagcatatggttttgtgttacataatggtgcatatctaagaaatggatggaatttattagattttacaattgtagttatagggtaagcatattaaatataccagttaaaagcgcttagcgcccaggcccattgcggcctcgttttaaccattttctatgttaccttatatgcaattcaatcgaaattgatcaaatcagaaaagaaaatcgtaaaacgaaaagaacagcaacaaaattatcgaaatgaaataatgtccagactgagacacgtatgaattttgtatgccatacatttttccagggcgataagtactgcactctcccaattgatgaaggacgcctttgatgttaaggccttacgtgcctttcgagtgctacgtccactgcgacttgtatcgggtgtaccaagtaaggccttcattgcaccatcgaacatattctaaaacgaaagaatccctccaaaatcctctggcctggtagagcggaaatctaggaactacggatggattcgtagttaaaatacagcacagataaagcacaataattgttatagctaaacaaaaaaccttgaaatgaaaatgctgattgtccgatagattgtccgaaattttttctgctatgctattttttctgtgacgtattttctgctgaactttgattgttcgcactagatttttagccgcccaccatgcccacaataacccaatcgaatattggcaataaataacgctattcaacaggtctacaggttgtgctgaattcaattttaaaggccatggtgccactgtttcacattgcactcctggtcctattcgtaatcataatctatgcgataattggcctagagctcttctctggcaaattgcacaaggcgtgtcgcgatgagatcacaggtaagcggagatcccaccatcataatcgaatcgtacaatttttatacgttgtacgaatatcattcaaatgtcttgaatgccaccagatatgtcgcatttcaaaatcaacgtccactgaggttctatcactagtagattagagcgtggaaatcggtggctcttaccacacacaagtaaggaaatgccccgatctccggctaatcttctagtcaataaacctacaaaatctatcaaattgtttgggacaagttaaatatgccaaagaagcggcatattccgcaaacgacactgcacaacaagtaaacttaaatggcaccccactgaacacaacagatttcgcagagatatcacttcattccattccatttcatcacattactaatgcatgaatcctaaaccaaaccgaatacgacaaaccgaaatataggtgaatacgaggaaaacatccggccctgcggagtgggctaccagtgtccgccgggctacaagtgctacggcggatgggatggaccaaacgacggcatcaccaacttcgacaactttggcctggccatgttgacggtgttccagtgcgtcacccttgagggctggactgatgtcctttatagcgtaagtgaaatagagattccaagcaattaaataaagcttaagaattcgcaagaaagaatttgtacctatatccatattctaacgaaattctattcttcagatccaagatgcaatgggcagcgattggcagtggatgtacttcatttccatggttatcctgggtgccttcttcgtgatgaatctgattctcggtgtgttgtccggtgagttctccaaggagcgtaacaaggccaaaaaccgcggcgacttccagaagctgcgcgagaagcagcagatcgaagaggatctgcggggctatctcgattggattacccaagccgaggacattgaaccagacgccgtgggaggtctgatatccgatggcaagggcaagcagcccaacgaaatggattccaccgagaatctgggcgaagaaatgcccgaggtccaaatgactgaatcacgatggcgcaaaatgaagaaggacttcgatcgagtcaatcgtcgaatgcgaagagcctgtcgcaaggcagtcaagtcgcaggccttctattggctcatcatcgttttggtgtttctcaatacgggtgtcttggccacggaacattatggccaacttgattggctagataacttccagggtaagtgggaaatacaaataaagtgttgcaaataacacatcattttgttacgtattattttagagtacaccaacgtgttcttcatcggactgttcacctgcgaaatgttgttgaagatgtacagcttgggctttcagggctacttcgtttcgctgttcaatcgttttgattgttttgtggtgattggcagcattacggaaaccctactaacgaatacgggaatgatgccgccattgggtgtctccgtgctgcgttgtgtacgtctcctgagagtctttaaagtaactaagtgagttgaatcatttattagttgtggcataactctaaaaatatccattccattctatacttttagatactggcggtctctctcaaatctcgtcgcttccctattgaactctatacaatcgattgcttcacttttgttactgctcttcctatttattgtgatatttgctctgctgggcatgcaagtttttggcggtaaatttaattttgatggcaaagaggagaagtatcgaatgaacttcgactgcttctggcaggctctactcacagtgtttcaggcaagttaatttgaacttctggctttaatcgtaaagggcaagatataatgcaattattacagatcatgactggcgaggattggaatgctgtgatgtatgtgggcatcaatgcctatggcggtgtgtcctcctatggtgccttggcctgtatttactttattattttgttcatatgcggtaactacatcctgctaaacgtgttcttggccattgctgtggataatttggccgatgccgactcgctctctgaggtcgaaaaagaagaggaacctgtaagttttaattttattccctaaggattctaactaagaactttattgaatatttcagcacgatgaatctgctcagaaaaagtcacatagtccgactccaacaattgatggcatggatgatcacctcagcatagatatcgatatggagcaacaggaactggatgacgaagacaaaatgtatggcgataatattctattgactctcaatgtttagatcaaaagacgcctgatttggatgattgtaatcttatgcctttatagggaccatgaaacattatcagacgaggaagttcgtgaaatgtgcgaggaggaagaggaaggtatgtatgtcatgttcacttctattaaccaaccccttactaagctcagtgtaagaattaaatattatctaagaaccatattttaagtactttagcttatgcttaaactttatcaagaaactaaaacctatcgaaaccaaatcaaaaatatttcctaaaacaatgccgccgacgcctacatcaatgctgctatttttcggaaacctcgcacccaaaaacataaaacataaacaaaccaaaaccatgaaaaaaacacacgacacttgcaattattaatcaaaagactccaattccgaagtatcagcacgtgtcactgcacgacccaggcgattatccgaagtcagcatgaagaagactaaaaagcccatcccgcgaggcagtgcctttttcattttcagttacacgaacaggtaattcaatcaagcaatcaatcaaacgatccatcagcgatcgacatactacagaaacaacactcgcacaccctttaatatggtccatgtgttttgtgattggagttacgttatcttacactggttttcaaccgtttgttcttcgcatgtgacaaacaatcgataataattctaaatcgagctgtatttaaagcgtattacgaatgtatataatttgtattatttttagtttcgataaaacccaatacgacgatgatcatttgttttatttatttaattctcattggttttgcattttgctattaaggttggccaactttaagtatcaatattttttcactctttctgtttaatggaagtataataataataagtatatgtaggtacaaactacgaacttcaaatgaaatacattttttaataagaacctaagtttatttttaaggtacttgtagttaaaatgtacaaatcgtttttggacaaattcttataaatgtgtttattattttttccaaattggcaacttacatatatatacgtaatatatgataaaatttgtattgcatatagtggatgaagaaggcatgattacagcacgaccccgacgtatgtctgaggttaatacggcaacgaaaattctacccataccgccgggcacatcattttttcttttctcacaaacgaacaggtttttatgtttgagttttatttttcccccaaatattgaaagtgtccgaaaatactatatatatatatatatatttgtgtgtatgtgtgcgtgcgcgtagattatttttttttaaaacataatttcaataatcatgtatttgtccttttgtttaaccatgttttgtatattgtcataagaaataatatacggttttattttgagtttgattagactatagaaatccattatggtagaaaaaatttatttccactcttagctgctttttattccataatttcgtttataacttgaattgtaaaacttctaactgcatgctaaaaatatctttgttttttctgtgattttacttttgtgatttataaaactttgagagcacgtttcttaacactctgctctatgatatttcaacagatttcgcgtcttctgccactggctttgcaatcacagcaatttcggcaacattatcctgtgttgcattatgttttcatcggctatgttggcagcagagaatcctctgagagccaatgatgacctgaataaagtaagtagctccagttccgatcaaaactaataaatcagcgtcaaatgaactaaaaagacttgtaagttacgattgaaaatcgcaaagtgcatatattagttttcacctctagtagaaacacgttccattcgatgttcttcacaactgtccatttgtttttgcaggtgctcaataaatttgattattttttcacggcagttttcacaatagaactgattctgaaattgatttcatacggcttcgtattacacgacggagccttttgcagatccgcatttaatctattagatttacttgtggtctgcgtgtcattgatttctctagtgtccaggtaaacgataatccatataactactctaacccagtagttgtgatactaattacttctggaacataaactataacgtcgatttcaactgcagttcgaatgcgatttcagtcgtgaaaattctacgtgtgctccgtgttttaaggccactcagagccattaatcgtgccaagggactgaaggtaagaattcattcaaaacctcttcaatttcgcttcctactttctgacacataataaaatgcttcaacagaaaattgttgtacttcttctttgagtttcagttttattatttcaatttttagttcattacgaagagcacaatcaatgacaatatttatctcaaactaatatgcaagttaaacattttaaatgataataatcccaagaatcttgggccttcaattaactttagagtaagccaaacaaaaaaccttgaaatgctgggtgtagggtgcacctcaataaagttatgaaaatataaattaagcaatataaaaagtatattcatgaactacacacagctgacaaatatatttcttgatttcgagttttactcgtaacaccctaacgaaaatgggcgtggaataggaatgtatgggcgtggcttgggcatagtgaactctatgtaataacccctgatactaaaaacacatggccagcaatatgttcgcgcaaaatatggaagtcagaagccaaacatgccttaatataattagacttatatattaaatagtgtttttattataactatatatcgtcgtatcacatacagcatgttgttcaatgtgtcatagtcgctgttaagactatcggaaatattgtgctcgtcacatgcctactgcagttcatgtttgccgtaataggagtccaattgtttaaggtatgattttaattttaagttcccaataggatagtattttattaagaactcaagcgtagggaaacactcctcattaataattagagcaacaatttagtatcctttaaaggatatcgaatatatagcatttaagaatctgtacaaaatatttcagaaccaaactaccgcatggaacttccattgacttaataatataagttttcgacaaaaagttctaagttaatttaattactatacatacagccttgttaaaaaaatagttcagtttcttcttaaaattttaaaaattcatgtttattattgggtgtaagaacgagcattttctaaaaaccttgctaaccttgttgttgtttaaaatacaatttttgtttggattttctgctactaataatgtctaaaagcttattaatttgttatgggtttcaaacatgttgactaattttcgtttacttttgactaagaaagttaaattgtacatatcaacaacttttgctggctagtattgcttattaatgctcagcataatatatttaaaatcaagtcggaaacaaagataaagcaggaaatagtcttatattggaaaaatattacttcaaaataaatagaacgttatagtcttgtagcagggataagaactaaaaatttacaatatataattctaaggactcgtagcatccagttttcgcaatcgtaacacaactcacacaacttaatacacattatgccatttattatactatcaaatcttatatattccacacccattttctgcgtttgtacacgtctaatgcaacaaattcacaatatatatcgaaaagcgatcatgagcacacttacacatacagtactatacgctatatacctaatagcacacacatcagcacatgagtttcgggttttagccattagctacaaatcagcaacctaccttgcaccctagcatcaaggccaatccccggtgtaaagtttgccctaagtttacggaccatcagtaacaacaactcacaactgcattaagattgtaaacaacctattgaatccactgtaaagttaaccataagttttaaatatatctgtatacaaagttgttctaagatgtttcttgcatttcatagataactcttactatggattcataaaataagaatttgaagtgttatttttgattttttttattatctttaccttgttaagataaacgttttgattttatttataattgtattttctgttttattattttttctgtaattgtaaaaaatataatcaaatatcacaagatttcccaatattttaaacgtattttcttccctttttctctccttgaacgtgtttcggttgttttgaattgaattttgcgaaccaaaaaaatgtcgtgttttaaatactgatataatggcaacaaattcatttgatatcatccaccaaattggttctgaaaaaccacacaaattcttgaattaaaaatgaaattatatttcctattgtcattcatacgtcaaaaattcgaataataaaccaattggcctacactgataaacaattaaacttctgcagtatgtggtcaaatgcgttgtagtcgcaatcaaaaccattggtaatatcatgttggtgacatatttgttacaattcatgttcgctgttattggagtacaactctttaaggtaatttcttttgaattatatataaaagtcattggtaaagggtatctgaagacagctttaagtgtgcgcttttattttttaaaggaccaactataaataaagaaaaattgcggcttactctgtgtgtgctttgaattttgtagattcttttcggtatttgtgcgtagggtaattctgtattgaaaggtaactattttcggtgttctatttttgaatttgactaaatagaaacctttcttcaaagaaaagtctaagtcaagtttctttcacaatttcttcatatcagaaaatattcgcttcgcaatagcttggtaaacgaaacaaaatttcgaagctttaccacccagctcagttcagttccaagctttccaaactaacctctcaggcaaagttagctcgctccttgccaacccaatgtaatatatttatatattttccaacgtatgtaacaatgtttttcaacccaataacccttgttggcgtcccgtctgtaaataatgctctgtccaatataaaaaaaaaaaactaaaacctttgtcgtccatccaaaaattttgagcagtgtatgtaaatgtgtttgcatatgaaacaccctgtaactgtgtgcatacttttaagcaaacatatgtagaactagatagtttatcaaagtaaagctttttttgaactaggtattagataatagtcagtacaataaagcagttttaatgtttgtgaaccatgggaaagcaaactctatcgattattacttaacgttgagattgctttccttaacatatcacctataccatttcattcgctaatacctgactatcttctcgccccctgacgttccaaatcatttccaaaaccccaaaccaaaaacagggcaaatttttcaagtgcactgatggttccaaaatgactcaagatgaatgctagtaagtatgctttttttttgttagttattggattcgttttaataaaaatacaatttttcagcggaacctatctggtctatgatgatggcgatgttcataagccgcgactcagggaacgggaatggagtaacaatcgcttccacttcgatgatgtggccaagggcatgttgactttgttcacggtgtccacatttgagggctggccagggtaagtgactactgactagatactatttttcagagtcattttcatatataatttaatattccagtttgctgtatgtttcaattgattcgaataaggaaaacggcggtccaatacacaacttccgtccgatcgtagctgcctactatataatctacattattattattgccttcttcatggtgaacatattcgtcggtttcgttatcgtcactttccaaaatgagggtgaacaggaatataagaattgtgatctggataagaatcagcgcaattgcatagaatttgccttgaaagcgaaacccgttagacgctatataccaaagcatggtatacaatataaggtctggtggttcgtcacgtcgtcatccttcgagtacacaatattcatactgatcatgataaacacggtaacgctggctatgaagttttacaatcagccgctgtggtacacggaacttttagatgccttaaatatgatatttacggcggtgtttgctttggaatttgtctttaaattagccgcgtttcgatttaaggtgagaagtgttaagtgatatctaattgatactaatctttttatcacaatacagaactactttggagatgcttggaacgtattcgattttatcatcgttttaggcagtttcatagacattgtctactctgaaattaaggttcttaaattcatgaccttgaaaaatcgcagtaataatcataaaatatttgcagagcaaggatacttctcagatagcagaatgtgacatagtagagggctgcaaatccaccaagaaatcagtgagtttatcaaaaattgtcttattatatgtagttaaaaaacacactatttcaggctggttcaaatttaatatccatcaatttcttccgactgttccgagttatgcgactcgtcaagcttctcagcaaaggcgaaggcattcgaacattactgtggacttttatcaaatccttccaggcactgccctacgtagccctgctaattgtgcttctatttttcatttatgcggttgtggggatgcaagtatgtcttatgttttaacatttttgtagagataccaattataaactgtatatttgcaggtgttcggcaaaattgctctagatggtggaaacgccatcacggccaataacaatttccaaacgttccagcaggctgttttagtactcttccgatcggccaccggagaagcttggcaggaaattatgatgtcctgctcggcgcaaccggatgtgaagtgcgatatgaattcagatacgccgggagaaccatgcggttcctcaatagcctatccgtactttatttccttctatgttctctgctcgtttttggtaagaatgcaaaacagattaagattatgaaatcatattatcataatatgtccatctcagattattaatcttttcgtggccgtcattatggacaactttgactatctgactcgtgattggtcgattttgggtccccaccacctggacgagtttattcgcctttggagcgaatacgatccggatgcaaagggacgcatcaaacacttggatgtggtcacattgctgagaaagatctccccaccacttggcttcggcaaactgtgtccacatagaatggcctgcaagcgactggtttccatgaacatgcctcttaactcagatggaacggttctcttcaatgccacactgtttgctgtggtccgcacttcgctgagcatcaaaactgacggtaatatcgatgatgccaactccgagctgcgcgccactatcaagcagatctggaagcgtaccaatccgaagcttctggatcaggttgtaccaccgccgggcaacgatgacgaggtgaccgtcggcaagttctacgccacatatctaattcaggactacttccggcgcttcaagaagcgcaaggaacaggagggcaaggagggtcatccggacagcaatacagtcacgctgcaggccggcttgcgaaccctacacgaagtgtccccagctctaaagagagccatctccggcaatctcgacgagctggaccaggagccggagcccatgcatcgtgtaagttagcaattaagttaatattatattaatattacttttgtatatattttaacataaacatttctcccaactatttcttgcagcgtcatcatacgcttttcggcagcgtgtggtcatcgatccgccgacatggaaacggaaccttcaggcgaagtgccaaggcaactgcttcgcagagcaacggagccttggcgatcggtggatcagcgtccgcggccttgggtgtgggcggtagctcgctggtcctgggaagcagcgatcccgctggcggggattatctgtacgacactctgaaccgcagcgtagccgacggagtgaacaatataacgcggaacataatgcaggcccgtttggcggcagccggaaagctgcaggacgaactgcagggggcaggaagtggcggagagctaaggacattcggcgagagcatatccatgcgaccgctggccaaaaatggaggcggagcggccactgtggccggaacactgccgcctgaggcgaatgccattaactatgagtgagtatgcgggggtggaggatttcacaggagaagcggtctgtaggccaatttttaagttgtcacctagccaaacatccaaaaaaaaaagatatttaaaaacacgaagctccattaccataatactcgttactatggcttgctgtttagtgagtttatccatattcttattgccaacaattagcgttttctgttttgtggcattttgtttggtcacctagtgaagagcgccctaaagtttgtaatggacaaaaggagccgagccaagctcaacaactgacttggcaccaccaaaataaatacgagttttcaattagttgacttagcaaacttagttgcaatcacaaaaaatacgttaaatgcatacttgttgccacataaactagtggatctcaagacaaatgatacagaaacgatcaacctattgagcaaaaaagcaaaacataaaccaaacttttactcaatccccgaacattaatttcagcaaccgcaatcgtggtattttattgcatccatataacaatggtaagcctaaaatgctgcaaattgcaataataaaattaaaacaaataaaaacataacaaaaaaacaactacagcagtaattgcaacagcaacaaccaaatgcactcctttttattaacattatttaatgtgttttatattttattcctttttaaccggacaaaattctaaaaaaaattccgatcaaattggttcgtttgttgtttttatacacaccaaatttgaccctaacaaaaaagcaacaacaatttattataacaccaatctaattgtttacgaaatgatttgttttgttttacattcgattacgtagctgctgcattcctattaaacatattgcaaattaaaatgatgtacagattctcgaccactgcgttctcagatttgttattgcctgcggcatgtaaaaatgttcaatacgacttttcgggtcaattgcaatatcataaactaatcagttgaggcggccaaatgttatatgttcttattgtgtttacctggctgttttctaattgggaccaaattacattaattgaatcgaaaatgaaattgtcattatgtttcacatcattgtagtacacatcgattagattttaaacctaaatagaatagtaattgtagaacaaactcgtagcttagtaatattgagtgcagctttatttacagctaataattatatagaactatagaaacgcttccgctgcattatagttaaaatcgagccaaacacacaaaaacatacataaagccattaccttaagaatttatataatttcagaagaggaaaatcacaggtaaaaacgtatattacgtgttttaagggggaaaaggataatttatccgtgacattaaaatcgcattagatcggaatgcttggtttttgaacagatttataatttggtgaagtatttttgtttgatttaatgaaagagtttttttttcttttttcctatgatgcagaaaaagaatgaatttgattcttaaattggctaatctatcttaaatactatcgataccaatctttcctttcaaacttccgatagctattgtgttacccacaacttaactgaacataaaaacccatttcgaaaattagatcttcccattataataaccactattaaccttagcgtatgtggctccttttgttaattacaaactaataaacggaactaacccatcaagaatcatacattttcaagaagaacaaattcgccaagacaggatatttttaaaaccagtcaattgtgtctgctaaagtaatttgtttttataactctttctcacaaacatttttattatagcataagtgattcgagtttaaaaaccaccgagtgctgagtctcgaaccctgaccaaattcttcagtatccaaagagtctgcaaagagttcgaatcaagactggtttccctttccaaatgggactccttcccaaaacgttttcatttttgtttcattattttctgttcaatttaaaatgcgcaagagagaagcaattgaaacattccgttgtcgctaaaaattatgatatttcgtgagttcctatatgaaagttccctgataacaatatggatttaatgacataacacctacaacaagaacaacaaactacaacaagtaccagaaacaactttagcaacaactatcgtttaacacgcaacaacagcaacagagagagagagaacgaacgtaattaaacgcaagcccaaagcaaacccgatatcgatgtctatatattcaatatatataaaatttcttatatatatttattttaaaaagccgtgatgttgtgcccatctactcataagccttggccttggctttatcgagccatatcccttacaaaagtgtgtgccttgcgaccatataaaccacatcttaccacatataatactaaccaaaaaccgaatactcaatttgtataaccaagctgcgaatctgaacgttgtcatcgttgtaattgttacagaaatatactcgtacgtttatgttatcctatgctatgcgtaaaaaaaaaaaaatctgccagaaagtgtattccaaaagttcactattgtctctcagtattgtattgttgtcgcttccttttcttttctttttttgtgtgggaaccattgtcaacggatttggggccttgggtatttcacatcctttatacgaacattaactaacacactgtgaatacaaaacatgcgaaaaaattaccataaaagaccatgcttagatgctccgcctgcattgtttatagaaagtctagctaaattgcgtataaatgttgcctagtaattttggagaacattgagctttgcccttatctaaccaataactgcttgcttaatttagaaacaaacttataattttaattgtgcttatgatattaacaatgtatgcagatcgtgtataaagagcttgcaatgtcgaatgcttaactaacccataacagtaatcataattataaacaaaataataaagcttgatgatcattgtaaggtaaaaagagcatgtaaatttctcttaagcgaatagtgatttgattgaactgcattttattggaaaaacttaaatattctcgtaaacttatgttatttttcacattgtataacattacaaaatatatatttgaaataaaacctttagtttttgtcttgtaaataagttaaataaatgatcagtttatagatcataatatatagatatttgagttaatatattttaaagtgtagggtagattgacttagagctttaagaataaatacctggatcatcaagctcaaataaagcgtgtataaaaatcatgcatttatccacaccaaaacgattaaattgatttacaatttaaatttaaaattttcttattttatgcaaacgtgcagtctacgcacccaatggtgctcttcctggccacgaacgcatgatccaatcgacaccagctagtccctacgatcagcgtcgtttaccaacttcatctgatatgaacggtctagccgaatcattgattggaggggtaagtacttacatacattacattagaaattagcataatggatttcaaattttaggtactcgccgctgagggattgggtaaatactgcgactccgagttcgtggggactgctgcacgggagatgcgcgaggcgctggacatgacgcccgaggaaatgaacctggccgcccaccagatcctctctaacgagcactcgctgagtctgatcggcagtagcaatggtagcatcttcggtggatccgccggtggcctgggaggggctggatctggaggtgtgggtggattgggcggtagtagcagcattcgcaacgctttcggcggaagcggaagtggaccgtcctcactgtcgccgcaacatcagccttactcgggcactctgaactcaccaccgattccggataatcgtctgagacgtgttgccacagtcacgaccacaaacaataacaataagtcccaagttagccaaaacaattcgaatagcttaaatgttagggctaatgccaatagccaaatgaacatgtcaccaactggacaaccagtgcagcaacaatcgccgctaagaggacagggcaatcagacttactcctcatagcacccacattgtaagctatacatacagaatgtcttcttgatggaactttaagtgtgcattcagcgcaagctgaggtttattggctaatttatttgttatttttagcgaagaaaaacacattagtcttagcatcgggaattgttatatttgaattgttcgcacacacacaagcgggaaccaaaccaacaaaacttgtataacttgtataaagaaaatcagctaattgtatatgtataaatatattaatgtttttgcctttttgagaaatctatcgtgggccttcgtcctctaacgagccagaaaaccaaaaaaccaacaacactaaactgaacaaattaaggaaaaatgtatatttttggataaaaaaaaaaaagaaaagaggaaaccaacctaaactgataacgtttaacttctaattagaaatatagatcaaaaccaaaaatatataaataaaaaccacaccaatataattgattaggtaataatcaccaaaacggaaatgaaataattatacattaacattgaacattacattattgagagcgacagtgtaattacctatttcgatttagacgcattttattttttaagtatttaaaatatgaacaatttacgataaaaggaattgtttactatatatgtagcagacatacatatatgtataaaattcataaatgtaatagcataatttcaaactgaacgagagtcccaagccccttaaaaagtaatgtaaactgaattttaattgttatgattgaatttttacaataaaaccgagaaaatgtgagaaaataaaaacagagtttcataaaaaccattaattccttttctttctaaatctccatttgcaggaagtgtttgttcttgataataatcactatccatctatcgatctattcacgaccgatatggagaacaaaataagtaaaattttgggattgagtacttatttctttatcatttctcttgccaatgaggcatatatttaaaaacgtaaaaaatccaaaaaggggaaaaggaaaaacaagccagttcaaaatcgattttggctcccagataatatcaaaaagcatttttgtgtataaaaacaaactaatttaaatatagttctggcggtgaaagcaacttcaaagtgaccttctgacttttctttctttctttttttcaaaaagtcccgagagcgcgcacgtgttaatctgccacacaaaggatttagagtgcctccaccacaaggaacaataaaaaataaacaaataagccggggaacaacagcaggagaagcagcagcagcagcagtagcagcaccagtcgaaagtagctagaatattgccatcgattttctgtctggtgcattttcttaacgccact

SEQ ID NO: 10019 - DNA, 8368 bp, DROSOPHILA
gagatcgtaaggagcaagcctcgttaacaccgcaacagcaacaatcgccgcagcagccagagcaacagcaaccaattacccgacacgatgccttggatagttctagtgctaacaataaactaaatcataaacacaataacgataaggataaggataccactagcgataagaactgggaggcgggcagagatttattgccggccagtgttgtcatcgtcgatgaatcatgtgcctcgaaaagtcagaaacaaccaatcgagccgagcattgtttcgcgaagtggagccacctcctcatcgcaacgtcgccggcaattgcaattccagcgacaaaaggaggccaaactttatgaccgcggagatggggatcgggaccgcgaacgggagcgggaagcctcgacctcgacctcaacctcgacctccgcctccaccaccaccacgaatactgtgatgggtggcggggagctggtgaactgtatagcctacgatgacaacaccctggtcatcgagaggaaaccctcgccctcctccccgtccaccagccggcgttatctgaaggccgaaacgccgacgcgtggcagtcgaaagtacaaccgcaagtcatcggctaaaagtgatttggaagtggtcgttgtcaagccggaacaccatcatcagcatcgatctccgacgataacgcttccggttccggctaacccactaaccacatcggcatcggcgggatcctcgcccacgggagcgggattggcagccggattgggaactgcctcgggaacggtcctgcaacaaagctgcagtgcacttgatccgcccgaggattcgaatcagcccagcgggaccaggaggcgacccaccagcaccgagctcgccctcagcaacgtcaccagtcagattgtgaacaatgccacctacaagctagacttcaagcaacgtcgtcacaaaagcaacaacggaggcagtgagtcaggatctctaaccggaatagccacaggaccggcgacaagtcccgcaggaccaacaggaccaaccagttccagcggcaagcggcgcaagtccagttgcacatcctgcggcggaggtggcatcagtgccccacccccgagactaacgcccgaggaggcgtggcaactgcaaccacagaacagtgttaccagtgccggcagcacaaatagtagtttcagcagcggcggcggacgtgacgataatagtagttacagtgccgtcggcggcgatagcagcagcagcaatagttgcaactgcgatatcaccggtgataacagtacattgcatggttttggcgtcggcgacgtttgtagtttcatcgccgattgtgacgacaatagcgaggacgacgacggcgatccgaataaccaggatctcagctcgcaaaccctgcgcacagcggccatcgtagcggcagttgcggcagcagccaaggaacaggcccaggagcaatcgctcgccgactgcgagagcttcagcgatcgccggcaggatgccgatgaggacgtccgcatcattcaggattgctgcggcggcaacaacgactcactcgaagacgttggcgaggtggacgacaacgccgacgttgtcgtgagaaagaactcaaggaatcgtccctcgatcagaaggacatgcaggataaccgaggaggacgacgacgaagacgagaacgcggactacggtgatttcgatcgggaggatcaagagctagacgacgaggagcccgagggcaccaccattgacattgatgagcaggaacagcagcacgaccaaggtgattccgctgaagaggaagacgacgacgaggacgtcgacgagtactttgaggaggaggaggacgacacgcaggccttttcgccattctactccagttccgcggagctaattgataattttggtggcggtgcgggcaagttcttcaacataatggacttcgagcgtggagcctccggcgagggaggcttttcgccaaacggcaacggtggtcccggcagcggtgatgtttcccgtacggcgagatacgactccggggagggggatctgggcggcggcaacaatatcatgggcatcgattctatgggcattgcaaacattccggaaaccatgaacggcaccacaattggaccaagtggagctggtggccaaaaaggtggtgctgctgcaggtgccgctggccaaaagagacaacaacgccgtggaaaaccgcaaccagacagaccacaacgagcattattttgcctgagcgtcaagaatcccctgcgagccctgtgcattcgcattgtggagtggaaaccatttgagttccttattttgttaaccatttttgccaactgtattgccttggctgtttacaccccctatccgggaagcgattcaaacgtgacgaatcaaaccttggaaaaagttgaatatgtattcctagttatattcacagcggaatgtgttatgaaaattttagcatatggttttgtgttacataatggtgcatatctaagaaatggatggaatttattagattttacaattgtagttataggggcgataagtactgcactctcccaattgatgaaggacgcctttgatgttaaggccttacgtgcctttcgagtgctacgtccactgcgacttgtatcgggtgtaccaagtctacaggttgtgctgaattcaattttaaaggccatggtgccactgtttcacattgcactcctggtcctattcgtaatcataatctatgcgataattggcctagagctcttctctggcaaattgcacaaggcgtgtcgcgatgagatcacaggtgaatacgaggaaaacatccggccctgcggagtgggctaccagtgtccgccgggctacaagtgctacggcggatgggatggaccaaacgacggcatcaccaacttcgacaactttggcctggccatgttgacggtgttccagtgcgtcacccttgagggctggactgatgtcctttatagcatccaagatgcaatgggcagcgattggcagtggatgtacttcatttccatggttatcctgggtgccttcttcgtgatgaatctgattctcggtgtgttgtccggtgagttctccaaggagcgtaacaaggccaaaaaccgcggcgacttccagaagctgcgcgagaagcagcagatcgaagaggatctgcggggctatctcgattggattacccaagccgaggacattgaaccagacgccgtgggaggtctgatatccgatggcaagggcaagcagcccaacgaaatggattccaccgagaatctgggcgaagaaatgcccgaggtccaaatgactgaatcacgatggcgcaaaatgaagaaggacttcgatcgagtcaatcgtcgaatgcgaagagcctgtcgcaaggcagtcaagtcgcaggccttctattggctcatcatcgttttggtgtttctcaatacgggtgtcttggccacggaacattatggccaacttgattggctagataacttccaggagtacaccaacgtgttcttcatcggactgttcacctgcgaaatgttgttgaagatgtacagcttgggctttcagggctacttcgtttcgctgttcaatcgttttgattgttttgtggtgattggcagcattacggaaaccctactaacgaatacgggaatgatgccgccattgggtgtctccgtgctgcgttgtgtacgtctcctgagagtctttaaagtaactaaatactggcggtctctctcaaatctcgtcgcttccctattgaactctatacaatcgattgcttcacttttgttactgctcttcctatttattgtgatatttgctctgctgggcatgcaagtttttggcggtaaatttaattttgatggcaaagaggagaagtatcgaatgaacttcgactgcttctggcaggctctactcacagtgtttcagatcatgactggcgaggattggaatgctgtgatgtatgtgggcatcaatgcctatggcggtgtgtcctcctatggtgccttggcctgtatttactttattattttgttcatatgcggtaactacatcctgctaaacgtgttcttggccattgctgtggataatttggccgatgccgactcgctctctgaggtcgaaaaagaagaggaacctcacgatgaatctgctcagaaaaagtcacatagtccgactccaacaattgatggcatggatgatcacctcagcatagatatcgatatggagcaacaggaactggatgacgaagacaaaatggaccatgaaacattatcagacgaggaagttcgtgaaatgtgcgaggaggaagaggaagtggatgaagaaggcatgattacagcacgaccccgacgtatgtctgaggttaatacggcaacgaaaattctacccataccgccgggcacatcattttttcttttctcacaaacgaacagatttcgcgtcttctgccactggctttgcaatcacagcaatttcggcaacattatcctgtgttgcattatgttttcatcggctatgttggcagcagagaatcctctgagagccaatgatgacctgaataaagtgctcaataaatttgattattttttcacggcagttttcacaatagaactgattctgaaattgatttcatacggcttcgtattacacgacggagccttttgcagatccgcatttaatctattagatttacttgtggtctgcgtgtcattgatttctctagtgtccagttcgaatgcgatttcagtcgtgaaaattctacgtgtgctccgtgttttaaggccactcagagccattaatcgtgccaagggactgaagcatgttgttcaatgtgtcatagtcgctgttaagactatcggaaatattgtgctcgtcacatgcctactgcagttcatgtttgccgtaataggagtccaattgtttaagggcaaatttttcaagtgcactgatggttccaaaatgactcaagatgaatgctacggaacctatctggtctatgatgatggcgatgttcataagccgcgactcagggaacgggaatggagtaacaatcgcttccacttcgatgatgtggccaagggcatgttgactttgttcacggtgtccacatttgagggctggccaggtttgctgtatgtttcaattgattcgaataaggaaaacggcggtccaatacacaacttccgtccgatcgtagctgcctactatataatctacattattattattgccttcttcatggtgaacatattcgtcggtttcgttatcgtcactttccaaaatgagggtgaacaggaatataagaattgtgatctggataagaatcagcgcaattgcatagaatttgccttgaaagcgaaacccgttagacgctatataccaaagcatggtatacaatataaggtctggtggttcgtcacgtcgtcatccttcgagtacacaatattcatactgatcatgataaacacggtaacgctggctatgaagttttacaatcagccgctgtggtacacggaacttttagatgccttaaatatgatatttacggcggtgtttgctttggaatttgtctttaaattagccgcgtttcgatttaagaactactttggagatgcttggaacgtattcgattttatcatcgttttaggcagtttcatagacattgtctactctgaaattaagagcaaggatacttctcagatagcagaatgtgacatagtagagggctgcaaatccaccaagaaatcagctggttcaaatttaatatccatcaatttcttccgactgttccgagttatgcgactcgtcaagcttctcagcaaaggcgaaggcattcgaacattactgtggacttttatcaaatccttccaggcactgccctacgtagccctgctaattgtgcttctatttttcatttatgcggttgtggggatgcaagtgttcggcaaaattgctctagatggtggaaacgccatcacggccaataacaatttccaaacgttccagcaggctgttttagtactcttccgatcggccaccggagaagcttggcaggaaattatgatgtcctgctcggcgcaaccggatgtgaagtgcgatatgaattcagatacgccgggagaaccatgcggttcctcaatagcctatccgtactttatttccttctatgttctctgctcgtttttgattattaatcttttcgtggccgtcattatggacaactttgactatctgactcgtgattggtcgattttgggtccccaccacctggacgagtttattcgcctttggagcgaatacgatccggatgcaaagggacgcatcaaacacttggatgtggtcacattgctgagaaagatctccccaccacttggcttcggcaaactgtgtccacatagaatggcctgcaagcgactggtttccatgaacatgcctcttaactcagatggaacggttctcttcaatgccacactgtttgctgtggtccgcacttcgctgagcatcaaaactgacggtaatatcgatgatgccaactccgagctgcgcgccactatcaagcagatctggaagcgtaccaatccgaagcttctggatcaggttgtaccaccgccgggcaacgatgacgaggtgaccgtcggcaagttctacgccacatatctaattcaggactacttccggcgcttcaagaagcgcaaggaacaggagggcaaggagggtcatccggacagcaatacagtcacgctgcaggccggcttgcgaaccctacacgaagtgtccccagctctaaagagagccatctccggcaatctcgacgagctggaccaggagccggagcccatgcatcgtcgtcatcatacgcttttcggcagcgtgtggtcatcgatccgccgacatggaaacggaaccttcaggcgaagtgccaaggcaactgcttcgcagagcaacggagccttggcgatcggtggatcagcgtccgcggccttgggtgtgggcggtagctcgctggtcctgggaagcagcgatcccgctggcggggattatctgtacgacactctgaaccgcagcgtagccgacggagtgaacaatataacgcggaacataatgcaggcccgtttggcggcagccggaaagctgcaggacgaactgcagggggcaggaagtggcggagagctaaggacattcggcgagagcatatccatgcgaccgctggccaaaaatggaggcggagcggccactgtggccggaacactgccgcctgaggcgaatgccattaactatgacaaccgcaatcgtggtattttattgcatccatataacaatgtctacgcacccaatggtgctcttcctggccacgaacgcatgatccaatcgacaccagctagtccctacgatcagcgtcgtttaccaacttcatctgatatgaacggtctagccgaatcattgattggaggggtactcgccgctgagggattgggtaaatactgcgactccgagttcgtggggactgctgcacgggagatgcgcgaggcgctggacatgacgcccgaggaaatgaacctggccgcccaccagatcctctctaacgagcactcgctgagtctgatcggcagtagcaatggtagcatcttcggtggatccgccggtggcctgggaggggctggatctggaggtgtgggtggattgggcggtagtagcagcattcgcaacgctttcggcggaagcggaagtggaccgtcctcactgtcgccgcaacatcagccttactcgggcactctgaactcaccaccgattccggataatcgtctgagacgtgttgccacagtcacgaccacaaacaataacaataagtcccaagttagccaaaacaattcgaatagcttaaatgttagggctaatgccaatagccaaatgaacatgtcaccaactggacaaccagtgcagcaacaatcgccgctaagaggacagggcaatcagacttactcctcatagcacccacattgtaagctatacatacagaatgtcttcttgatggaactttaagtgtgcattcagcgcaagctgaggtttattggctaatttatttgttatttttagcgaagaaaaacacattagtcttagcatcgggaattgttatatttgaattgttcgcacacacacaagcgggaaccaaaccaacaaaacttgtataacttgtataaagaaaatcagctaattgtatatgtataaatatattaatgtttttgcctttttgagaaatctatcgtgggccttcgtcctctaacgagccagaaaaccaaaaaaccaacaacactaaactgaacaaattaaggaaaaatgtatatttttggataaaaaaa

SEQ ID NO: 10020 - protein, 2516 aa, DROSOPHILA
MGGGELVNCIAYDDNTLVIERKPSPSSPSTSRRYLKAETPTRGSRKYNRKSSAKSDLEVVVVKPEHHHQHRSPTITLPVPANPLTTSASAGSSPTGAGLAAGLGTASGTVLQQSCSALDPPEDSNQPSGTRRRPTSTELALSNVTSQIVNNATYKLDFKQRRHKSNNGGSESGSLTGIATGPATSPAGPTGPTSSSGKRRKSSCTSCGGGGISAPPPRLTPEEAWQLQPQNSVTSAGSTNSSFSSGGGRDDNSSYSAVGGDSSSSNSCNCDITGDNSTLHGFGVGDVCSFIADCDDNSEDDDGDPNNQDLSSQTLRTAAIVAAVAAAAKEQAQEQSLADCESFSDRRQDADEDVRIIQDCCGGNNDSLEDVGEVDDNADVVVRKNSRNRPSIRRTCRITEEDDDEDENADYGDFDREDQELDDEEPEGTTIDIDEQEQQHDQGDSAEEEDDDEDVDEYFEEEEDDTQAFSPFYSSSAELIDNFGGGAGKFFNIMDFERGASGEGGFSPNGNGGPGSGDVSRTARYDSGEGDLGGGNNIMGIDSMGIANIPETMNGTTIGPSGAGGQKGGAAAGAAGQKRQQRRGKPQPDRPQRALFCLSVKNPLRALCIRIVEWKPFEFLILLTIFANCIALAVYTPYPGSDSNVTNQTLEKVEYVFLVIFTAECVMKILAYGFVLHNGAYLRNGWNLLDFTIVVIGAISTALSQLMKDAFDVKALRAFRVLRPLRLVSGVPSLQVVLNSILKAMVPLFHIALLVLFVIIIYAIIGLELFSGKLHKACRDEITGEYEENIRPCGVGYQCPPGYKCYGGWDGPNDGITNFDNFGLAMLTVFQCVTLEGWTDVLYSIQDAMGSDWQWMYFISMVILGAFFVMNLILGVLSGEFSKERNKAKNRGDFQKLREKQQIEEDLRGYLDWITQAEDIEPDAVGGLISDGKGKQPNEMDSTENLGEEMPEVQMTESRWRKMKKDFDRVNRRMRRACRKAVKSQAFYWLIIVLVFLNTGVLATEHYGQLDWLDNFQEYTNVFFIGLFTCEMLLKMYSLGFQGYFVSLFNRFDCFVVIGSITETLLTNTGMMPPLGVSVLRCVRLLRVFKVTKYWRSLSNLVASLLNSIQSIASLLLLLFLFIVIFALLGMQVFGGKFNFDGKEEKYRMNFDCFWQALLTVFQIMTGEDWNAVMYVGINAYGGVSSYGALACIYFIILFICGNYILLNVFLAIAVDNLADADSLSEVEKEEEPHDESAQKKSHSPTPTIDGMDDHLSIDIDMEQQELDDEDKMDHETLSDEEVREMCEEEEEVDEEGMITARPRRMSEVNTATKILPIPPGTSFFLFSQTNRFRVFCHWLCNHSNFGNIILCCIMFSSAMLAAENPLRANDDLNKVLNKFDYFFTAVFTIELILKLISYGFVLHDGAFCRSAFNLLDLLVVCVSLISLVSSSNAISVVKILRVLRVLRPLRAINRAKGLKHVVQCVIVAVKTIGNIVLVTCLLQFMFAVIGVQLFKGKFFKCTDGSKMTQDECYGTYLVYDDGDVHKPRLREREWSNNRFHFDDVAKGMLTLFTVSTFEGWPGLLYVSIDSNKENGGPIHNFRPIVAAYYIIYIIIIAFFMVNIFVGFVIVTFQNEGEQEYKNCDLDKNQRNCIEFALKAKPVRRYIPKHGIQYKVWWFVTSSSFEYTIFILIMINTVTLAMKFYNQPLWYTELLDALNMIFTAVFALEFVFKLAAFRFKNYFGDAWNVFDFIIVLGSFIDIVYSEIKSKDTSQIAECDIVEGCKSTKKSAGSNLISINFFRLFRVMRLVKLLSKGEGIRTLLWTFIKSFQALPYVALLIVLLFFIYAVVGMQVFGKIALDGGNAITANNNFQTFQQAVLVLFRSATGEAWQEIMMSCSAQPDVKCDMNSDTPGEPCGSSIAYPYFISFYVLCSFLIINLFVAVIMDNFDYLTRDWSILGPHHLDEFIRLWSEYDPDAKGRIKHLDVVTLLRKISPPLGFGKLCPHRMACKRLVSMNMPLNSDGTVLFNATLFAVVRTSLSIKTDGNIDDANSELRATIKQIWKRTNPKLLDQVVPPPGNDDEVTVGKFYATYLIQDYFRRFKKRKEQEGKEGHPDSNTVTLQAGLRTLHEVSPALKRAISGNLDELDQEPEPMHRRHHTLFGSVWSSIRRHGNGTFRRSAKATASQSNGALAIGGSASAALGVGGSSLVLGSSDPAGGDYLYDTLNRSVADGVNNITRNIMQARLAAAGKLQDELQGAGSGGELRTFGESISMRPLAKNGGGAATVAGTLPPEANAINYDNRNRGILLHPYNNVYAPNGALPGHERMIQSTPASPYDQRRLPTSSDMNGLAESLIGGVLAAEGLGKYCDSEFVGTAAREMREALDMTPEEMNLAAHQILSNEHSLSLIGSSNGSIFGGSAGGLGGAGSGGVGGLGGSSSIRNAFGGSGSGPSSLSPQHQPYSGTLNSPPIPDNRLRRVATVTTTNNNNKSQVSQNNSNSLNVRANANSQMNMSPTGQPVQQQSPLRGQGNQTYSS

SEQ ID NO: 10021 - DNA, 7536 bp, DROSOPHILA
tcaaatttccgcacaattccggcaaggggtatgcgaaaaattgtgttagctgcggttggctttccttcgcagccttctgcttattttacttccactaccgatgccacagcgccacttaaatattcaaagcgaaaagttgccctacacctttgcgtcttggctgactttcccctgttttccgtgttttcttttctttattattcaaacgccgcttttcatgtgcagtgcccaaaaattcccacaggatgcagtcaaaggcggtggggtgattaagggttggtgtggggttaggggcgaaaaggttgatgggtgaattgtatttcacatgtgcagttctttaaacgtttttatagcgctcatctcgctcatgccccacacgctttacattgtgggcaagagtctaggcaattccctggagatattatacctttcggttaggttaggatagcaaagaatgttcaaaaacaatataaataaaacagattaatatatttagtacaaattcaaaagaaccgcctaagtggtttttagggctgccagacaagaaaaaaattcgtgcactctggtttgagtcaatgctaacagtgctgtattcttctttgtgtttgccactgaaataataatttgggtattttaggacattttgtgtactatatgctgagctggcaacttatctattttgtagacatatgcagctattatattttaaacttcagacaaattaatataatatattatattttaatcttaagacaagttgttataatatatttttgttataatatattttaagcttcagaaaaaaggttatttatctgcatattccaatttttgtaatcgttaccaaactcaataaaataattttcaactgctccatacaatacatatcatttttgacagatcgcttaatttttgctttaaaacggaatttatttatcaatacctgctagtttagctttttacaagatggcatttggctgctctttcactccgagagttggcaacactgccacactgtcaaattccagtaattattctcgtccactgctgttgttgaattgcaaagtcgctcggcgcgttagcatagaagcccagcatatatttgcccgatccgaaagcaggcggagatcagtgaaaacgtatacatatttaccgctagttgagcagtgcgaaaacgtgtccggaaaagccaaaggccaacgacagcgagtgcgagcgagagagcaggtgacagcgacaccgacaagattccccgccttcccccctccaccaacgaacccttttcgactgtttttttgcacggcacggggaaaaccgaaagaaaaacgagattttcaattgatttgcgacgcagtccggccggaaaatgctcataaaccttaaggtgaagaccttagatgcgcgcatccacgaattcagcatcgacaatgaggtaatgtttgaggttgtgtgtccaggtctaggggcttctttatatccatgcaccccacccatttccagctcaccatccgccagttcaaggaccaaatagccgagaagactaacattgcggcggaaaaccagcgtatcatctaccagggtcgcgttctggtcgatgataagcaggtgaaggaatatggtgagtcatgcccccgggagcacccacatatatatatgcacttatatctaatacaacaatatcaatgcccatgcagatgtggatggcaaggtgctccatgtggccgaacgaccaccattctcgcagcgcggagccaatgcccgcaacaatgatgaacccatgcgaaccttccgcaatgtggcacgtccgccgccgcccggaatgcgtacttctccgtacttccgcgccctcgatggaatgctggtgggcaccatggccataccggtgaacaatggtccagtagctggggtaagccattaagatgaaagctctttcaacacgcgtatttaaacgtatcttagcagacacgtcctccaccgaatcgttatcccaactcgtcgtccttctgcattaaccgcatcacggtcgccctgcacatgatcgattgcgctgacaatatagcagcttatctggaaaatcctgccgttggcctgaacaatcaatcactggacattctgcagcgcggtcgctggtcgatggagtccacagtcgtggaagtaggtgtctcctcgactgatctgccacgcaacaataacatcatcgatatggtccaagatgccgtgaccgctgctctttcgcatacaggagcacgcaactatacggtggttcagctgcccacggtttataccaatgagaatggcgagacgagccagcagagaacagccgaagctataacaagtgagggagcagccagtggagctgcaagtaatgctagtggtgaaaccacagctgctactgtgattatcgaggatgttatcgaaacggacgacgaagtggccgatggagcatcagatcgttcggtcacgccaacaccagagccggaggcggaaggagcagttggtggccagcaagtcactgcagcagagactcccacatcctcggttggatcagcaaatgacgcggctgccgaaggcggcaacaactcaggacccaggcgacgcactcgtcctcaggtgttggcccaagttattcagcactatcgtggcgtacaggctcgcttggcgccttttgttgatcggtactatgagattctccagaatgatcccacttttgaggagagtgtaagttaataagccgagctcttataagcctattaaaacattaaattccttttttaggacaccgatggtcgcgagaacgcacagcgcatcttcgatcgcgtctcggaggctttccactacctttcgcacgcccagcacgctatatccgatttaatgcttgacctgtcgcagccagggccacgtgtgctcacctgccgacccattctcgttgagcagagcggttacatacgctccaataacatcttcacgcccaactttttggcaccgccctcgggtattatcaacgagcctttccgcaatagagcacctggttctgcctctgcagctggcactcaaacggccaccacagcgggcactcaaacgcccaccagcgcgggcactccaactgctgtggcaccttcgcaggctgccaatttgcaggcggccaccgatgccagtcgcagtgcagcggccatggcggagatcgccagtcgagctgctggagccgctgcggaaatggctgccggagctgccagtgcggctgctggagctgcgaatgcggctgccgccgccgctcgcgatttatccagtgatcaagtagaggatcccatcgacgagcctatggtggggccaaatgctgcaggtgctgaaacactagcacaagagcaacagcgtctcgaaatgggtaagaaactttatacaaacactgtatgcagatgaggctgtgcaaaatcaaattcactcatggccttagacaaggaattcgtgtctctgaatcgtaaatattcccgtattatttgttgaaaatattctagatcacgaccacgatcaagctcaaagtgaaactcccgaacgagaaacccgaccagtgcctaggctgcgtgtctatgtgccagtgactttgccaccgcccagtatgttttgattgttcggttgaatccaacgcctcagtcatggcagactaaccataatcttagctgctcactcactgcatccctactttggtttcactttcactttgctagtttgattcttttactgacccggccctaaacaaattaacccttgctatactgaacgcttcaaagagctgttactgctgctttacagatccccaattggaaatggcccgaattattcaggcaatggtcaatggtcaacgaccgaacgatatccatgtggaattcaatgcccccaacgtcatgtcgattaacttgcccgtgcatgtgatgacgaccgtgcgacaggctccggcagctggatcgaacgaaacagcagatcagtctgcgtccgaatcctcctcccctgaaagtgcgcctgcgtcgggcaatggagagtctccaaatgcagcttcaacatcaagtggaacacgcagtggcgatcagagggccaataccttgcccaccacggccacccaaacgcgctcgacatcaagaccacagattcagattggcggaaacaacaactggggcggacgcattgctccgacacacacggcattcgaccgctttctgccttgcaatagtcatcacattcgggaaccagagcagctgctccaaaacaacagtaccagtcgcagcacctcgacagcaccagcaggaggagccaccgttgttccgcccacatctgctgcagtaactcgtcctggtgagtacggctcccatccggggaaatctagcaaacactaccttatgtccacgatccatttcgccaatccaccaatccatttcatttgcacactcaccaaccggagatggaaagccaagtgtatcaaaaacctgtcggatcagggcgcgataaatctttaaatgctatacgattttaaaatttttacaaaatttaatagttaactatactaaagaactatttatttgctatctcgacctccgactggcctccatctctgacattaatttccattttatccatatcatcatttagtcaccactggtcgcatccaacgcggcagtaacacaatccgcccaatgtggtcgtcgcgtcgccagcgaccagccagcgagcaactaagcaacctgggaccggcagcctgggcgcaggcgcagacccaaacaactcatataccaagtgcccacgttggtgctggcagtaccaatggggccggagtcggagccgggagagtgcggcccgttggaggatcgaccatcaatcgtgatcggctggcgactcgaacggcccacgttggcggtggcagcaccaacggaggcttgccctctggccgaagggggcgactacaggccgccaccagtcgcctgtccagacatttacccacccaactcgctaattttttgattaataatatgagaaataatgcgccaacagcttcggtaggcagtgcagttgccgccgtcggagatacggccgcctcaccatcaggagaagctgccccaattgcttcaaccacgccagctgctccgctacaaactgttttgccgacatccacacccactcctcgcggagactcgaacaacctgcgttcgcaactgcgcaccttcctcaacgacagcctgtttgtcggagtacccatcaacgagcagactattccgggggccattggtcgcgcactagactggttcggggagagcctggtctacctgccgcagtacgagcgtccggagtacaactcgcgcgactctgtgtgcaacatcctgcgtgtcagcctccgtttgatcatcgagctttgtaatggagctccggccggtgtagatagtgctcaattcgagcaaagtctcaaacagatttgtgaccaattccgcaagcggctatacagcgttctcttcctgtgccttggaagcgcgaatgcggagctctattggcgccagctaatgcgcctcctttgcgcaccgatgcgatccagtaagttgacaccaaaagtgatcgtaagtatactggttaactcaatatttcttttgcagacttccgcaacgaagccctgcagtttttgtgcatctacatagaccccacgattcccgcccaaactgacacagtggatgcccaacagttcctggtcttgcgcagcattcaagcagctcctccaacagctgccgacgaggtaggtttccaaactattttccatgcccagaaacttatgcactaatagccatttgtggcgccgcctccttttgctttcaacccacaacagcagcagctgcaagagcaaactctggacacggatgttgagatgtccgaagtgaccgccagcggcagcaacagttcaccggcagacgagctaccagctgtgattgtgggctcagagccttggcacatgagtttccccaatgattggttgcctgtgataacgcgcgacctacagacccaggcagaggtaggttattccgtacaactttctggaattacactaaactatgtctcaatctatgtatcctgcagcagagtaatcgtccccagccgcccttctcggatgcctacatctcgggcatgtccgccaagcgccgcaagataattcagtcggaaaagccgactgccagcgtggagtgtctcattgctaatggagtgcagagggctatccagagcgtcggcttgggtggaagcaatggtggtagcgccttaaacgcgtcgatcagtatggataccgtaatcggatccattgctcacgactccaccattcaggccgcctacacggatgcggtgcgcaatagtttaaaagagcgtaccgagcgggatgtggattttaagaccagcaagtatccgcagattgccaagttcaccgagcaaaagtagggggcagatacggagacggaagcctggccacctaatgcttcttgtacattttactttaataaattgtatttaatttagttaatggttaagttctgtttaaatcgagaagacgacgaagattgcgacaacaccaacacacggagtggacccttagcaaatgcttcaaactatttagaataataatatccaactgatatttatccacacacacacagagatacacacacacaatgggtcaagacgcaacagagcccaatcaaaaacaatttttgcggtgcatgaatgagcaaaataaacacacatattaaccgaaacaatggcgattggaattggattaaatggacttggatattagaccacacaccgagcggaatgctttcaattgtcccaaatggcggtggcgtccccgcgtcggatgacgtgctgcaaaatcagaacagacccgtagacccgtgacgacagccaaattccgaattccagccaagtattttggccggcgccaaatcgccattgacgtgagccgatggcacatgattgctggacggccgatgacgaccaatccggaatgtgcagatctattcaagtggataagccttcagcagaagcattaccggaggcatatccacaccatcccatcgtaccagcaacccgcaccatcccatttcatcgtcatcgaagtccgaagcctacgctactcttgttattgttgtcgcctgcaatcgaaacacgaaaatgtgtcacataaaaatgttgagaatatttatgtgcaaaaaaaataaaataaaaacaaaaagaaataccaagaagccgtaaagaaaagaaaacatatgaataaataataattataaatatttgccgcttttctttaaatatttactcgagatgattgggcgccaaaaatagattggctacgtaatcgaggtatattttcgtacctacagttattgattacagtgcggttcagcactgtaacaccacaattggcatctgctaagctcggcagttgctgtgctaaagagtttaacattttagtttattccaagctgccagtttagatcataatttaaataactatctgca

SEQ ID NO: 10022 - DNA, 4046 bp, DROSOPHILA
gcaacactgccacactgtcaaattccagtaattattctcgtccactgctgttgttgaattgcaaagtcgctcggcgcgttagcatagaagcccagcatatatttgcccgatccgaaagcaggcggagatcagtgaaaacgtatacatatttaccgctagttgagcagtgcgaaaacgtgtccggaaaagccaaaggccaacgacagcgagtgcgagcgagagagcaggtgacagcgacaccgacaagattccccgccttcccccctccaccaacgaacccttttcgactgtttttttgcacggcacggggaaaaccgaaagaaaaacgagattttcaattgatttgcgacgcagtccggccggaaaatgctcataaaccttaaggtgaagaccttagatgcgcgcatccacgaattcagcatcgacaatgagctcaccatccgccagttcaaggaccaaatagccgagaagactaacattgcggcggaaaaccagcgtatcatctaccagggtcgcgttctggtcgatgataagcaggtgaaggaatatgatgtggatggcaaggtgctccatgtggccgaacgaccaccattctcgcagcgcggagccaatgcccgcaacaatgatgaacccatgcgaaccttccgcaatgtggcacgtccgccgccgcccggaatgcgtacttctccgtacttccgcgccctcgatggaatgctggtgggcaccatggccataccggtgaacaatggtccagtagctgggacacgtcctccaccgaatcgttatcccaactcgtcgtccttctgcattaaccgcatcacggtcgccctgcacatgatcgattgcgctgacaatatagcagcttatctggaaaatcctgccgttggcctgaacaatcaatcactggacattctgcagcgcggtcgctggtcgatggagtccacagtcgtggaagtaggtgtctcctcgactgatctgccacgcaacaataacatcatcgatatggtccaagatgccgtgaccgctgctctttcgcatacaggagcacgcaactatacggtggttcagctgcccacggtttataccaatgagaatggcgagacgagccagcagagaacagccgaagctataacaagtgagggagcagccagtggagctgcaagtaatgctagtggtgaaaccacagctgctactgtgattatcgaggatgttatcgaaacggacgacgaagtggccgatggagcatcagatcgttcggtcacgccaacaccagagccggaggcggaaggagcagttggtggccagcaagtcactgcagcagagactcccacatcctcggttggatcagcaaatgacgcggctgccgaaggcggcaacaactcaggacccaggcgacgcactcgtcctcaggtgttggcccaagttattcagcactatcgtggcgtacaggctcgcttggcgccttttgttgatcggtactatgagattctccagaatgatcccacttttgaggagagtgacaccgatggtcgcgagaacgcacagcgcatcttcgatcgcgtctcggaggctttccactacctttcgcacgcccagcacgctatatccgatttaatgcttgacctgtcgcagccagggccacgtgtgctcacctgccgacccattctcgttgagcagagcggttacatacgctccaataacatcttcacgcccaactttttggcaccgccctcgggtattatcaacgagcctttccgcaatagagcacctggttctgcctctgcagctggcactcaaacggccaccacagcgggcactcaaacgcccaccagcgcgggcactccaactgctgtggcaccttcgcaggctgccaatttgcaggcggccaccgatgccagtcgcagtgcagcggccatggcggagatcgccagtcgagctgctggagccgctgcggaaatggctgccggagctgccagtgcggctgctggagctgcgaatgcggctgccgccgccgctcgcgatttatccagtgatcaagtagaggatcccatcgacgagcctatggtggggccaaatgctgcaggtgctgaaacactagcacaagagcaacagcgtctcgaaatggatcacgaccacgatcaagctcaaagtgaaactcccgaacgagaaacccgaccagtgcctaggctgcgtgtctatgtgccagtgactttgccaccgcccaatccccaattggaaatggcccgaattattcaggcaatggtcaatggtcaacgaccgaacgatatccatgtggaattcaatgcccccaacgtcatgtcgattaacttgcccgtgcatgtgatgacgaccgtgcgacaggctccggcagctggatcgaacgaaacagcagatcagtctgcgtccgaatcctcctcccctgaaagtgcgcctgcgtcgggcaatggagagtctccaaatgcagcttcaacatcaagtggaacacgcagtggcgatcagagggccaataccttgcccaccacggccacccaaacgcgctcgacatcaagaccacagattcagattggcggaaacaacaactggggcggacgcattgctccgacacacacggcattcgaccgctttctgccttgcaatagtcatcacattcgggaaccagagcagctgctccaaaacaacagtaccagtcgcagcacctcgacagcaccagcaggaggagccaccgttgttccgcccacatctgctgcagtaactcgtcctgcttcggtaggcagtgcagttgccgccgtcggagatacggccgcctcaccatcaggagaagctgccccaattgcttcaaccacgccagctgctccgctacaaactgttttgccgacatccacacccactcctcgcggagactcgaacaacctgcgttcgcaactgcgcaccttcctcaacgacagcctgtttgtcggagtacccatcaacgagcagactattccgggggccattggtcgcgcactagactggttcggggagagcctggtctacctgccgcagtacgagcgtccggagtacaactcgcgcgactctgtgtgcaacatcctgcgtgtcagcctccgtttgatcatcgagctttgtaatggagctccggccggtgtagatagtgctcaattcgagcaaagtctcaaacagatttgtgaccaattccgcaagcggctatacagcgttctcttcctgtgccttggaagcgcgaatgcggagctctattggcgccagctaatgcgcctcctttgcgcaccgatgcgatccaacttccgcaacgaagccctgcagtttttgtgcatctacatagaccccacgattcccgcccaaactgacacagtggatgcccaacagttcctggtcttgcgcagcattcaagcagctcctccaacagctgccgacgagcagcagctgcaagagcaaactctggacacggatgttgagatgtccgaagtgaccgccagcggcagcaacagttcaccggcagacgagctaccagctgtgattgtgggctcagagccttggcacatgagtttccccaatgattggttgcctgtgataacgcgcgacctacagacccaggcagagcagagtaatcgtccccagccgcccttctcggatgcctacatctcgggcatgtccgccaagcgccgcaagataattcagtcggaaaagccgactgccagcgtggagtgtctcattgctaatggagtgcagagggctatccagagcgtcggcttgggtggaagcaatggtggtagcgccttaaacgcgtcgatcagtatggataccgtaatcggatccattgctcacgactccaccattcaggccgcctacacggatgcggtgcgcaatagtttaaaagagcgtaccgagcgggatgtggattttaagaccagcaagtatccgcagattgccaagttcaccgagcaaaagtagggggcagatacggagacggaagcctggccacctaatgcttcttgtacattttactttaataaattgtatttaatttagtt

SEQ ID NO: 10023 - protein, 1199 aa, DROSOPHILA
MLINLKVKTLDARIHEFSIDNELTIRQFKDQIAEKTNIAAENQRIIYQGRVLVDDKQVKEYDVDGKVLHVAERPPFSQRGANARNNDEPMRTFRNVARPPPPGMRTSPYFRALDGMLVGTMAIPVNNGPVAGTRPPPNRYPNSSSFCINRITVALHMIDCADNIAAYLENPAVGLNNQSLDILQRGRWSMESTVVEVGVSSTDLPRNNNIIDMVQDAVTAALSHTGARNYTVVQLPTVYTNENGETSQQRTAEAITSEGAASGAASNASGETTAATVIIEDVIETDDEVADGASDRSVTPTPEPEAEGAVGGQQVTAAETPTSSVGSANDAAAEGGNNSGPRRRTRPQVLAQVIQHYRGVQARLAPFVDRYYEILQNDPTFEESDTDGRENAQRIFDRVSEAFHYLSHAQHAISDLMLDLSQPGPRVLTCRPILVEQSGYIRSNNIFTPNFLAPPSGIINEPFRNRAPGSASAAGTQTATTAGTQTPTSAGTPTAVAPSQAANLQAATDASRSAAAMAEIASRAAGAAAEMAAGAASAAAGAANAAAAAARDLSSDQVEDPIDEPMVGPNAAGAETLAQEQQRLEMDHDHDQAQSETPERETRPVPRLRVYVPVTLPPPNPQLEMARIIQAMVNGQRPNDIHVEFNAPNVMSINLPVHVMTTVRQAPAAGSNETADQSASESSSPESAPASGNGESPNAASTSSGTRSGDQRANTLPTTATQTRSTSRPQIQIGGNNNWGGRIAPTHTAFDRFLPCNSHHIREPEQLLQNNSTSRSTSTAPAGGATVVPPTSAAVTRPASVGSAVAAVGDTAASPSGEAAPIASTTPAAPLQTVLPTSTPTPRGDSNNLRSQLRTFLNDSLFVGVPINEQTIPGAIGRALDWFGESLVYLPQYERPEYNSRDSVCNILRVSLRLIIELCNGAPAGVDSAQFEQSLKQICDQFRKRLYSVLFLCLGSANAELYWRQLMRLLCAPMRSNFRNEALQFLCIYIDPTIPAQTDTVDAQQFLVLRSIQAAPPTAADEQQLQEQTLDTDVEMSEVTASGSNSSPADELPAVIVGSEPWHMSFPNDWLPVITRDLQTQAEQSNRPQPPFSDAYISGMSAKRRKIIQSEKPTASVECLIANGVQRAIQSVGLGGSNGGSALNASISMDTVIGSIAHDSTIQAAYTDAVRNSLKERTERDVDFKTSKYPQIAKFTEQK

SEQ ID NO: 10024 - DNA, 3111 bp, DROSOPHILA
cagggcataccactcgttgacatcggatagtagctcctccagaatcagctcctcaagctccacatccttctctagctcactgagttccaggcgcaggatttccctgagttcggactgaaaaaatgggtggtttatgatgggcttactatggagatttgtatgtcctaccaattggatttctcgttgggcatccgtgcatctattgcgcgtttctatgatgcgcttgcggtatttctacagggtatttatgtgtaagtatattggtactttaaggggtacactgatgtctttacctctcgcagcatttcgcgaagtcttggcatttggttgcccatccgctgtcttttggccacttcttgagcatgccgcttttgctccacggaggtgcgataaaccgggctttgagtggagttcatttcggtttatttgtatatgtggttattttgtttgtttttaatctttttttttaactagatatggtaggtcagtgtcgtcaataaggcaaggttccaattttatagcgctgttggtgattgatagtgatctaaaaagtatacggtattcaaaattaattaggtaaattaagtgaaatgaagtaaatgtaagatacgactcatctccacatatatataaaagattataaaataagtagtattacttaacacagcccatgaagacagctcgcacaatgaattcatgaactaagggcggcttaaatacactattaacatgtttaaccaacttacctagtaattagcaatcggaaatagttgaaaaacacaacttttttgctaaaaaaaaaaatccgcgcaatttgctgttgctctgctagtggtggcacttcttcgatagcccactccgcggccagtgtgaccgtttggccgatggcgcgcgtgtcacgtgtgcacgcatttcgcagcactgaaagcagggttgtaccgatttgacagcccgaagttggcgtatagcacgtttccggtctttctttccctttcttttaccagcgtgtgcagtgactagtaaaaggttagtgcgatattttcaataaaaataccatccaaagtgaaaggaaaccgctcaaatgccattgttttgtgccgcccacagatgcctgctccggtcgtcaagaagccagcagcgaaaaagctgcccgccgtgccggaatcgaagctgaagttcagcaagaaacaaatctccaagcgagtcgccgagtcgaaacgtcgcctgaagaaggccgccgtgattgccctgcgcaagaaggagaacctggtccgcgccgagaagtaccagaatgagtacatcaaggcggaacagcgcgagatcaagctgcgtcgcttggccaagaagcgcaaccagttctacgtgcccgccgaggccaaattggcctttgtcgtccgtatccgcgggtaagtcctctaatgctcctccatgcacaagtcacaccaattcatgcccaatcccattaaccgccaacagtatcaacaaggtggctcccaaggtccgcaaggttctgcagctgttccgtctgaggcagatcaacaacggtgtgttcatcaagctgaacaaggccaccatcaacatgctgcgcatcgccgagccctacatcacctggggctatcccaatctgaagtccgtgcgggagctgatctacaagcgtggattcgtgaagcataaccgccagcgcgtgcccatcaccgataacttcgtgatcgagcggaagctgcgtcaggcgcaccaaattcagtgcgtcgaggatcttgtccatgagatcttcaccgtggggcccaacttcaagtacgcctccaacttcctgtggcccttcaagctaaacacccccaccggcggctggcgcaagaaggccaaccattatgtcaacggtggtgacttcggcaaccgcgaggaccagatcaaccgtctgctgcgcaagatggtctaaggactccttttgatttatgtgctgaaacgacaactgcagcggttcgatgtaaacagtgagagaaataaaagttacttttataaacccacgaaatgccgttcagtacaaaaacgcagtgttttcgcttcgattcgctgatttagtcattgcgacttaaattggaaaatatcagtgaagagagagaggacttttttaaggaacgtttagttaaatgtaccaatagtttcataacaactttaaatttagtaattttctttcattttaatgttacatttttactttaaagaattctgcggtactccagaaagtcttgccctttgctaagattaaccccacgttcagtataattttttggtttgctaatcgttaataattcgatgtatagcaatatttaaatttaaaatttagacagtttgcttttgtaggcccattatttgaaatgaaaacacaggattcttgttaatttgtctacgctctagattgtttattgttgttctggtcaaattttaagcgcgcttagtgcacaacacttaaatgcagatagcaagctagattcagggtgccagggataaaaatcgtttgccaatgtacactttattgaatcatggtttgcctttcagctggcagtggatttaaatcgttttttttttttttacacacacaatagtccaaagcagttagcaaacaaacataaattgtaaattccaatagcatggaaattagtcaataatcgggaggaagctggcaccctttttaaatgtataatttaattaatcgttaccacatggagcacatgccgttgtccgctgttcagattcccgcttctactggtgtccaccggcctgcgtggtggtcacatggatgttctgcaccaggcgctggccccagtactcctccaaatcgaatggcttaaagttcttcagctgattgtcggattcgttgcagtacagcacaggtggaccctgttcgtagacctggagagagagcaaagcatgaagagcaaccgacaatttggaccggggaccgcgaatctcaatggttttcaccatcaaaatgctcttgaatattttagaaagatacctaaaggtaacttgttggactcgaggttggctatttctaaactagatcttgatgcctaaaatgcatagaatgatcctgctgatcgaaattggaat

SEQ ID NO: 10025 - DNA, 960 bp, DROSOPHILA
ccagcgtgtgcagtgactagtaaaagatgcctgctccggtcgtcaagaagccagcagcgaaaaagctgcccgccgtgccggaatcgaagctgaagttcagcaagaaacaaatctccaagcgagtcgccgagtcgaaacgtcgcctgaagaaggccgccgtgattgccctgcgcaagaaggagaacctggtccgcgccgagaagtaccagaatgagtacatcaaggcggaacagcgcgagatcaagctgcgtcgcttggccaagaagcgcaaccagttctacgtgcccgccgaggccaaattggcctttgtcgtccgtatccgcggtatcaacaaggtggctcccaaggtccgcaaggttctgcagctgttccgtctgaggcagatcaacaacggtgtgttcatcaagctgaacaaggccaccatcaacatgctgcgcatcgccgagccctacatcacctggggctatcccaatctgaagtccgtgcgggagctgatctacaagcgtggattcgtgaagcataaccgccagcgcgtgcccatcaccgataacttcgtgatcgagcggaagctgcgtcaggcgcaccaaattcagtgcgtcgaggatcttgtccatgagatcttcaccgtggggcccaacttcaagtacgcctccaacttcctgtggcccttcaagctaaacacccccaccggcggctggcgcaagaaggccaaccattatgtcaacggtggtgacttcggcaaccgcgaggaccagatcaaccgtctgctgcgcaagatggtctaaggactccttttgatttatgtgctgaaacgacaactgcagcggttcgatgtaaacagtgagagaaataaaagttacttttataaacccacgaaatgccgttcagtacaaaaacgcagtgttttcgcttcgattcgctgatttagtcattgcgacttaaattggaaaatatcagtga

SEQ ID NO: 10026 - protein, 252 aa, DROSOPHILA
MPAPVVKKPAAKKLPAVPESKLKFSKKQISKRVAESKRRLKKAAVIALRKKENLVRAEKYQNEYIKAEQREIKLRRLAKKRNQFYVPAEAKLAFVVRIRGINKVAPKVRKVLQLFRLRQINNGVFIKLNKATINMLRIAEPYITWGYPNLKSVRELIYKRGFVKHNRQRVPITDNFVIERKLRQAHQIQCVEDLVHEIFTVGPNFKYASNFLWPFKLNTPTGGWRKKANHYVNGGDFGNREDQINRLLRKMV

SEQ ID NO: 10027 - DNA, 3072 bp, DROSOPHILA
cgtttcgatgcctccggaaagggcaagggtatcgcgggcagacggaacgtggtcgatggatccggatatgtgagtggctaccagcacaaggacacctacgacaatgcccactagatggggtaaccaccgtttttcaccctctcataaatctgtatttctaacttttgtgtttccctagttaatgtctcccaatctaatttatctttgtgtatataataagtttgtgataatttaagtgcttacaaataaacttatatttttgattataatttttgagttcctttactttgtttatccttctttgtcctttgatacgtaaaattttgaagcggcccaaaaagagttcaaaagtaaatccaaatcaaatttatatacatttcatggcaatcaaacccatgtttggtagtcttaagataacagataaacttttaatattacaatttgtgaaagaaatttaaatatcacatatggaaaccaaagatatacgacatacatatgtagatatatgttatgttttcacaagaattttgcttgaataaatacactttaaaatatttgcattgctaaaatttgtattgggaggaaatacaatttaaaaaaccaaaattttaaagcaattaagatggttttgtaaatcgaaatatacatttaattgtaagatctttgaaaaatgcccaacatgtgtaccttcttaaaagcaaagatttcactggaagatagttattaagagatcattgctttatctacacaatgacattatcactgatgcaaagctgacatcgaaaaaccggagcggtgtgaagcagactgaacgctacagcgaccagatggggatggaaattgatatatgggcataagttgcataatcctaacccagagcaggtggaaaactagctattgattgcagtcgaaccaaagtcactcaacgatatatcatatagcccttgggaaataggtataaaagcggcgaacattacagctccaagtcagcagtgcaactgaggagctcagtgcttgatgaagccacaaggaataccaccgactactacacgaatcagccagaccaagatgtcctttcgcggcaagaatgcagtggtgaccggtggagctggaggcattggactgcaggtgtccaagcagctcctggccgctggagcagcggttggttgttttacacataattacgtgaagtaatttctaaagcgagtgcttcctagaaggtggccatcattgatttgcaggataatctggaggagtttgtaaaacttagggccgctcatcccacccaaagcgtaatgatcatcaagatggatgtggcgaacaagaagggtgtggaagccacctatgaggagatagccaagaccttcggtaacatcgatattgtggtcaatgtagccgggatttttaacgacaaggatgtgcagaggactctgttggtaaatctcggtggaatcatcaattccacactgagtgcattgccctacatgggcaaggataatggcggcaagggtggcattgtggttaacatgagctcggtggtgggtctggatccaatgttcatcattcccgtttacggagccaccaaggctggcatcatcaacttcacccggtgcttggcggtaacaagaatttcttacatatcttttgaattaggtttttcatttaagtctctttcttaattagaacgaaaagtactatcaacgctcgggcatcaagtttgtgactgtttgtcctggagctacaatgacggacatgttcaccaactttacggagaagatcatcttcccggaaacgagtgacgagacctataggatcctggataggctaaacaagcagagtgccgctgatgtctctcgatgcattctgaatgtcctggagaaggacaagaacggagctgtctatgtcatcgagggtaagcgcgtttaccctttggaaattaagccccagtggacgggcaaggaacaggccctttaagtgggttaattcgttcacatcctaaacacatgcattttacaaatatgaagttattatggacactagttatttaataaacaaacgatgcacagaaataagttcttgtggtgattagtcatcccgccagctgaccagcacttcgtccgttcgaaatcgctgagtcacataagattcctcaaagggcatcctagtgccagagcggaacatttctgcaccagcatgggcaatcattagtccgttgtctatgcagtaacgttcatcagtggcaaagagtttgcctccgcgttcctcgcacataatacgcatcatctcctggagtcgctcattgcaacccacacctccaactataaggacctgaaaagaagtcggttaactcatagattaatttcggaaaactgttgcaaccaacctcatttgagccgcagtgtgccatggcgcgctctgtgatctccaccaacatggcgaagatggtctcctgcagcgaatagcaaagatcggcttggctgtaattattgacctcttcttcctgtggcttttttctcttattttgcctcttgcccggctctgccaggtcctcgatgtaggataaaatccccgagaagctgacatccatgcccttaaccacatagggcagtttaatataacgattgctcgacttggccagctgctcgatgttgtagcccggactaggatcgttggacagcttaatgatgcgggcgaatcgatccaggcaattgcccactgcaatgtctatagtttcgccaaagatgcgatatcgcttattggagtaggcaataacctgtgtgtttccaccgctcacatagagaactgtaggattctgggcaccggtgatcaggcgacccatctcgatgtgtccaatgcagtgatttacgcccagcagcgggatattccacaagagcgacaaagtgcgagccacaatggcgccaaccagcaaaggaggagccattcctgggccttttgtgtaacaaataacatctagatcagaggatttcaattgggcttcctttagactggattccaccaagcccaggatggcttccctgtgatgtttggccgtttccttgggcaggaaacctg

SEQ ID NO: 10028 - DNA, 952 bp, DROSOPHILA
gaggagctcagtgcttgatgaagccacaaggaataccaccgactactacacgaatcagccagaccaagatgtcctttcgcggcaagaatgcagtggtgaccggtggagctggaggcattggactgcaggtgtccaagcagctcctggccgctggagcagcgaaggtggccatcattgatttgcaggataatctggaggagtttgtaaaacttagggccgctcatcccacccaaagcgtaatgatcatcaagatggatgtggcgaacaagaagggtgtggaagccacctatgaggagatagccaagaccttcggtaacatcgatattgtggtcaatgtagccgggatttttaacgacaaggatgtgcagaggactctgttggtaaatctcggtggaatcatcaattccacactgagtgcattgccctacatgggcaaggataatggcggcaagggtggcattgtggttaacatgagctcggtggtgggtctggatccaatgttcatcattcccgtttacggagccaccaaggctggcatcatcaacttcacccggtgcttggcgaacgaaaagtactatcaacgctcgggcatcaagtttgtgactgtttgtcctggagctacaatgacggacatgttcaccaactttacggagaagatcatcttcccggaaacgagtgacgagacctataggatcctggataggctaaacaagcagagtgccgctgatgtctctcgatgcattctgaatgtcctggagaaggacaagaacggagctgtctatgtcatcgagggtaagcgcgtttaccctttggaaattaagccccagtggacgggcaaggaacaggccctttaagtgggttaattcgttcacatcctaaacacatgcattttacaaatatgaagttattatggacactagttatttaataaacaaacgatgcacagaaataa

SEQ ID NO: 10029 - protein, 278 aa, DROSOPHILA
MKPQGIPPTTTRISQTKMSFRGKNAVVTGGAGGIGLQVSKQLLAAGAAKVAIIDLQDNLEEFVKLRAAHPTQSVMIIKMDVANKKGVEATYEEIAKTFGNIDIVVNVAGIFNDKDVQRTLLVNLGGIINSTLSALPYMGKDNGGKGGIVVNMSSVVGLDPMFIIPVYGATKAGIINFTRCLANEKYYQRSGIKFVTVCPGATMTDMFTNFTEKIIFPETSDETYRILDRLNKQSAADVSRCILNVLEKDKNGAVYVIEGKRVYPLEIKPQWTGKEQAL

SEQ ID NO: 10030 - DNA, 5232 bp, DROSOPHILA
agtgtacgacgagttggtctgctgatggtgatggtgctgcaggggagtggccgtcgccgcggagaagcctccgaattgatccagctgcagatgggcggtatgggcaccaggatgcgatactgccgcagtggtgggcaccagaaaagtagccgttgctgtggtggcgctcagaacgtcggcggcactgctgctggcgccaggattaaacgtggccatcgggtagcggtggctgtgcacatatatgtatggctaccgctccctgggatctctagcctatacctatttcactatatatcttgcggattcgaccaaaaactaaacgtccattatccgcacacacaaacacacgtggacacacacggcacacggacacacactagcactggcccacacacacacgcacacagtctacatttttacaggttttcgctgcctctttcggatgcaacattggctactgggcctgcggcaattccccataaacaaatgacataatccaaagcgacgcgacgccactgggcactatccacaggtcgagggaaccgaagcacccaccagtccaagtgcggttgcccaaaataaaaccctgtgcgatccgagatcttttctttttttttgtgttttttttttttggtggggaggcggaggcgcgactttcctgctgcgttgttgcgtttttgcgcggttcttccaagtgaatatcgagcactggctgcagagctattggccaacacacgatctgttgcttatttatgtttttcttttgcgaattggaatcaaaatcctctggagaaaagtccacgggacggacaaaaaaagaagcagcgaactatgttaagttaacagcgatataacagggactattcgattttattgctgccttgtcgatgattcaccagcaggcgttaggcatttttagcaggactggtttggccatcggcatttctgctatcgataacatccagagcgcgcaatttaaaatattataaaatatttgaaatattttttttttaataattatcatctcacagatgaatgtcaaattttatttcccagcacataataacaattaaaagtcgcctagaaatgcatatggaatataaaagtcaacgaacgcactaactaatccagcattttgcgtatcatatagttcaaaatgccgccattcttgtagtacgttatgtccacctcggtgtcgaaacgcaacgtggtctcaaagacattgccatcagcatcgacctgaatcctctggcccggcttcagttcgccctcgggcaggacaatgttgtacacctccctgccactcagtttcagggtatcggcgctctggccaggcaagaactgcagcggaatgatgcccatgcccaccagatttgagcggtgaatgcgctcgtacgattcagcaatcaccgccttgatgcccagcagaaatggccccttggcggcccaatcacgtgagctgccactgccgtagtccttgcctacgaccagaaccaaaggtgttccttcgctcgcataccgttccgccgcatcgaagatgtccatctcctcgccactgggcacgtgcagtgtgctgggtcccgtcttggatgccagtttattgaccagacggatgttggcaaaggttccgcgtgccatcaccgcatcattgccacgtctggatccatacgaattaaagtcgcgcggcgttagacccctttccgacaaatagcgcgctgccggtgactttcgtgcaatggatccggctggcgagatatgatcggtggtcactgaatcaccgagaagcagcagacagcgagccttctcgatacctttaagtttgggcagcgcacgagtcataccctcgaagaacggtggtagtttgatgtatgttgatatttcactccatggatacaacttgctatccgacacctccaacgtttgccagtccctggatcccagttgaattttgcctgtgatagcggacacagttagcctagagctgcggaaaaatcttagtcagctagctatactcactgtacacctcctggaacatggcgggaatgacgtgcttatgctctacctcctgaatctcactgcgcgttggccagatatcgcgcaggaacacctccttgccgttggaatccacgcccagcggttcgatctcgaaatcaatatccacacggccggcaatcgcgtaggcaatcaccagcagcggactggccagataattggccctagtattgggatggatgcgaccctcgaaattgcgattgcccgacaggacgccacagcaaaccagtccgttcttctcgatggtgttcactacgttctcatcgagcgggcccgagttgccaatgcaggtcatacagccatagcccacaatgtcgaagcccagctgctccagatagggaatcacaccggattccctcagatagtaggtaaccacgccagatcctggtgacaatgaggtcttgatatacggcaaaatactcaagcccttctgcacggcattcttggccagcagaccagcgcccaacatcaccgagggattcgaagtgttcgtgcacgaggtgatggcggcaatcacaacagatccatgacctatcttatagctcttcccatcgtcccattggaattcaccacttgcagccaatgcactcggtggtatggcgaatcccttgaagccgacaggacttatgaggcacgacttgaagtcttcgcacatgctggaaactgaaacgcgatcgtgcggtcgcttgggccccgaaaccgaggtcaccacggtggataagtccaaagttacagactgcagggtaaaaaagtgattcgttagtatgtctttgcattggaaaaacagaatctcacttacctccgtgtattggggatcctgatccacaagggaatagtcacgaagttgtcgagtggccttcaaatacttccggataatatcgattttcttctcggagcgatctaatgatccacatccatggatatcaagtaataaatttagataatttttaagattgactcactggtttggcgcatgtaactcagcgtgttttcatcgattgggaagtaacccacagtggctccatattccggacacatgttgctgatggtggcgcgatccgcgatgctgagctctgccactccggggccgtaaaactccacgaacttgccgacgacaccaagctgacgcaaatgcttggtaatggtcagcaccagatcggtggatgtggccagagggcccagtttgccctccagcctgtagccaatcacctctggcaacagcatggaaatggactggcccaacattacggcctccgcctcgataccgccaacaccccagccgagaacacctaatccattgatcattgtagtgtgggagtcagtgcccacaacgctatccggataaaggatcttagatccgtccgctgaactgtcgctttcgaaaaccactcgggccagatactccaggttaacctggtgcacaatgccagagccgggtggcacaattagcatattgtcaaaagcgcgagctccccatttgaggaaggtgaatcgttccttgttgcgctggaactctagtgactcgttcttggtcaatgcgtccgaggagcgaacgaaatccacctgaacggaatggtcgatgaccaggtcggcagggcagatgggattgattttctcaggattgccgcccagctcgcggacagcatcccgcatggcagcaaaatccacgacggcgggaacgccagtaaagtcctgaaagcagggaatatcttaagaagtcacatacaaacataatctatgtgatgcaataatccacacctgcaatataacacgagctggcttgaaggagacttccacatcgctggtttcctgcttcagcgatggagtccatcccaggatgctctgcacatccttctccagcacatgaaagttgtcacagttgcgcaccgctgattccagcagaacgcgaatggaaaagggcagtgactctgtggggggttaataatattcataaagataacaacaataatgataacgaacaacaataacgattaccaaccatatttgctgtcgatggagggcagatcaaaatacttgtagacgttgccgtcctgggtgaatgactcctggaactgggcaaagggattggcgcctgcaaggaagacaggattagcgtacagatcaaatactcctttttccaattaaatcccaccggagccggacattgtggaaaaattaaacagaaaaccaagcaatgtgatatagagatgagcgcgtgaggaaccgctaccaggcaaaacttgctcatcactaacgcaaacattatattatcgataactgaacatgaaaacaaaccggtacacagtaaaaaatatttatttattacttaaaatgaaacatttgtaaattatagtggaataatttatcatttttgtgattcgaaaataatattggatataatattggattgattgcttttttattttagttcaaaataaggtatttaaaataacttgtttgcatgtctttaaacgcttttcccttcctacatgctaatttcgttaaataaacttaaatattaattatgttttctgcggtttattgcaatagttacatggtaggcttattgtaatgtcacgtagtataattggtatttgtaatctatataaataatatgtataggggattatcatctaaagctgcgtcgggatgcaaagcctgttttatggcgcaagcaatttggcagcggggataacaagtctgtgatggacgtctacaggtagattcgtcgcaggtccttcggcgtggtaatcgagttgcactgcgggcacagctttcgcgcgccgagcgtctgcaaccaacactgctcgcagtggacgtgccagcaggacacggagatggcgggattcttgtagtcgtcgatgcagatcaggcacttgtacttgccctgcgcctgcttttcgtagagccgcagcttggccttcagcgattcgatgatctgctgctggttttgggaggtggatcgcgtggaccgcgacgtagacggctcctcgctggctggtggagcctccacgttgcttgtgctggcaggctcttgctcggtggcttcgctggaatggtttggcttgggcccatcgctggaggagataagtcggcgcacgtagctggtaacatccgcctcggaaacatttccctctgtgtcctcgttgaccagtgggatcacatcgccctcgccatact

SEQ ID NO: 10031 - DNA, 2846 bp, DROSOPHILA
tttaatttttccacaatgtccggctccggcgccaatccctttgcccagttccaggagtcattcacccaggacggcaacgtctacaagtattttgatctgccctccatcgacagcaaatatgagtcactgcccttttccattcgcgttctgctggaatcagcggtgcgcaactgtgacaactttcatgtgctggagaaggatgtgcagagcatcctgggatggactccatcgctgaagcaggaaaccagcgatgtggaagtctccttcaagccagctcgtgttatattgcaggactttactggcgttcccgccgtcgtggattttgctgccatgcgggatgctgtccgcgagctgggcggcaatcctgagaaaatcaatcccatctgccctgccgacctggtcatcgaccattccgttcaggtggatttcgttcgctcctcggacgcattgaccaagaacgagtcactagagttccagcgcaacaaggaacgattcaccttcctcaaatggggagctcgcgcttttgacaatatgctaattgtgccacccggctctggcattgtgcaccaggttaacctggagtatctggcccgagtggttttcgaaagcgacagttcagcggacggatctaagatcctttatccggatagcgttgtgggcactgactcccacactacaatgatcaatggattaggtgttctcggctggggtgttggcggtatcgaggcggaggccgtaatgttgggccagtccatttccatgctgttgccagaggtgattggctacaggctggagggcaaactgggccctctggccacatccaccgatctggtgctgaccattaccaagcatttgcgtcagcttggtgtcgtcggcaagttcgtggagttttacggccccggagtggcagagctcagcatcgcggatcgcgccaccatcagcaacatgtgtccggaatatggagccactgtgggttacttcccaatcgatgaaaacacgctgagttacatgcgccaaaccaatcgctccgagaagaaaatcgatattatccggaagtatttgaaggccactcgacaacttcgtgactattcccttgtggatcaggatccccaatacacggagtctgtaactttggacttatccaccgtggtgacctcggtttcggggcccaagcgaccgcacgatcgcgtttcagtttccagcatgtgcgaagacttcaagtcgtgcctcataagtcctgtcggcttcaagggattcgccataccaccgagtgcattggctgcaagtggtgaattccaatgggacgatgggaagagctataagataggtcatggatctgttgtgattgccgccatcacctcgtgcacgaacacttcgaatccctcggtgatgttgggcgctggtctgctggccaagaatgccgtgcagaagggcttgagtattttgccgtatatcaagacctcattgtcaccaggatctggcgtggttacctactatctgagggaatccggtgtgattccctatctggagcagctgggcttcgacattgtgggctatggctgtatgacctgcattggcaactcgggcccgctcgatgagaacgtagtgaacaccatcgagaagaacggactggtttgctgtggcgtcctgtcgggcaatcgcaatttcgagggtcgcatccatcccaatactagggccaattatctggccagtccgctgctggtgattgcctacgcgattgccggccgtgtggatattgatttcgagatcgaaccgctgggcgtggattccaacggcaaggaggtgttcctgcgcgatatctggccaacgcgcagtgagattcaggaggtagagcataagcacgtcattcccgccatgttccaggaggtgtacagcaaaattcaactgggatccagggactggcaaacgttggaggtgtcggatagcaagttgtatccatggagtgaaatatcaacatacatcaaactaccaccgttcttcgagggtatgactcgtgcgctgcccaaacttaaaggtatcgagaaggctcgctgtctgctgcttctcggtgattcagtgaccaccgatcatatctcgccagccggatccattgcacgaaagtcaccggcagcgcgctatttgtcggaaaggggtctaacgccgcgcgactttaattcgtatggatccagacgtggcaatgatgcggtgatggcacgcggaacctttgccaacatccgtctggtcaataaactggcatccaagacgggacccagcacactgcacgtgcccagtggcgaggagatggacatcttcgatgcggcggaacggtatgcgagcgaaggaacacctttggttctggtcgtaggcaaggactacggcagtggcagctcacgtgattgggccgccaaggggccatttctgctgggcatcaaggcggtgattgctgaatcgtacgagcgcattcaccgctcaaatctggtgggcatgggcatcattccgctgcagttcttgcctggccagagcgccgataccctgaaactgagtggcagggaggtgtacaacattgtcctgcccgagggcgaactgaagccgggccagaggattcaggtcgatgctgatggcaatgtctttgagaccacgttgcgtttcgacaccgaggtggacataacgtactacaagaatggcggcattttgaactatatgatacgcaaaatgctggattagttagtgcgttcgttgacttttatattccatatgcatttctaggcgacttttaattgttattatgtgctgggaaataaaatttgacattcatctgtgagatgataattattaaaaaaaaaata

SEQ ID NO: 10032 - protein, 902 aa, DROSOPHILA
MSGSGANPFAQFQESFTQDGNVYKYFDLPSIDSKYESLPFSIRVLLESAVRNCDNFHVLEKDVQSILGWTPSLKQETSDVEVSFKPARVILQDFTGVPAVVDFAAMRDAVRELGGNPEKINPICPADLVIDHSVQVDFVRSSDALTKNESLEFQRNKERFTFLKWGARAFDNMLIVPPGSGIVHQVNLEYLARVVFESDSSADGSKILYPDSVVGTDSHTTMINGLGVLGWGVGGIEAEAVMLGQSISMLLPEVIGYRLEGKLGPLATSTDLVLTITKHLRQLGVVGKFVEFYGPGVAELSIADRATISNMCPEYGATVGYFPIDENTLSYMRQTNRSEKKIDIIRKYLKATRQLRDYSLVDQDPQYTESVTLDLSTVVTSVSGPKRPHDRVSVSSMCEDFKSCLISPVGFKGFAIPPSALAASGEFQWDDGKSYKIGHGSVVIAAITSCTNTSNPSVMLGAGLLAKNAVQKGLSILPYIKTSLSPGSGVVTYYLRESGVIPYLEQLGFDIVGYGCMTCIGNSGPLDENVVNTIEKNGLVCCGVLSGNRNFEGRIHPNTRANYLASPLLVIAYAIAGRVDIDFEIEPLGVDSNGKEVFLRDIWPTRSEIQEVEHKHVIPAMFQEVYSKIQLGSRDWQTLEVSDSKLYPWSEISTYIKLPPFFEGMTRALPKLKGIEKARCLLLLGDSVTTDHISPAGSIARKSPAARYLSERGLTPRDFNSYGSRRGNDAVMARGTFANIRLVNKLASKTGPSTLHVPSGEEMDIFDAAERYASEGTPLVLVVGKDYGSGSSRDWAAKGPFLLGIKAVIAESYERIHRSNLVGMGIIPLQFLPGQSADTLKLSGREVYNIVLPEGELKPGQRIQVDADGNVFETTLRFDTEVDITYYKNGGILNYMIRKMLD

SEQ ID NO: 10033 - DNA, 4276 bp, DROSOPHILA
tgggtgggcgacttgtttggaaaacccctttttttcatctgattggcgatttggatgaaggtgtactgggtggtgctggtggacagggctccctggcagttgttcacctccttaatcaggtcgagcatgcactctatttcggcggagacccaaaagtttcgtttcagtttctcggacttcatggtcttgacaatatttctaaaaacaaatgtttttcaatctcaagtttgttgttctacgaaaatagtgtgaccggatcaagagaactttaaaatatgcgaaacgatagaacataaacgaaattcgccgctgaaaagctaaaagaaaaatttgaaaaccaaaaattatgtattatgaattaacgtatgttaaattatttaaattaagttgagagtaagaataacttttaagtgcaatttccatagaatattttgtccttattttagagaacaaaataaaggcactggttaattgtttgatattcgagattcggacgaaatgtttaaaagtggctcgatttcaaataaatattttttgaattgttagtccttactatgcatattttgcatttgtaaacgatgcagagaagtacaaaatttcccaaataaacaaaaaaaaaaacaaatgaattgtgtaggataacatagaagttaatcatgtgaattaaattttctatttgttttaaaatattttataaactaaaaaggggattttagtatatacttacacataccattttcgctgacgctggcaaccctgctgtatttcgcacgcctgttgcttttcttctttcgtctgaaacttttataaaaaattctccgggctggggaactaaaactcttaggaaaataagtggcactggtaggcactaacgactaaacaataattttatctaaaaaaaatatatcaatgttttagtgtattaatcgaagacaaaaccttaacttgaatgtgcttgttgacttttcttccaaagaaacgtgctgcgaaagtgtaaataatggactccaaatactttgcaaccagcagaaacgatgctgtaggtccatcgcctgtgaagttctccttcaagcggaagtacgatgccatggcgaacagtcccatactggagaagaaaccccatgtggcccaaatcaagcagacaatagctcccattctgctgaccagcaaaagaacctccattgaacagcagcaaaaatcactgcctgtctttaattgccgccatcgaatcctcaaggaactggaagcgaacgacaccgtgctaatcatgagcgagacgggctcgggcaagaccacacagataccacagttcctgctgctggctggttacgccaagaacggaatgatcggaatcacccagccgcgcagagtggcggccataacagtggcacgtcgcgtggcccaggagttgaacggaaccattggcgacacggtgggctatacggtgcgtttcgaggatgtcacctcaagggccacaaagattcgattccttaccgacggcgttttgctgcgcgagtccattaaggatcgactactgctcaaatattctgtgattattctggacgaggctcacgagcgaaccgtgaacgcagacctactattcgggatagtcaaagatgctcaaaaggagaggcgtaagcaaaagttggccaacctaaaggtagtggttacatctgccacgatggatatcgatcacttcggaaattactttaattgcaagggcatgtacctggagggacggacgtatccggtccgtgtgatgcacaccaaggaggagcacgaagattacatccacaccgtgctggttaccctctttcacatacaccgcaccactccgaaaaagtaggtctgatgatatatatatttacacttactgatttatatatatgtgtacatttattacagccacgacgtgttgatattcctaaccgggcaagaggaaatcgagtcattggcccaacaaatacgccagcttgccaaggtgagtccatcgtcgtacagcccacagattgcacatcattaaaaataagttgctcgctatttcagattgacacgactggaacaacagatctccgcgtattcacgttgtatgctcagctatcgcagggcaagcaattggagtgttttgtgccgacaccggccaacgtacgcaaagtaatcttggccacaaatatagcagaaacgtcgatcaccataccgggcatccgttgtgtgattgactgtggctttgtgaaggagaaatcgttcaataccgtcgacggactggatgtcttaaagtcagttcgaatatctaaggcgcaagcctggcagagagctggacgagcaggtcgcgatgcggatggaacctgctacagggcgtacacaaaagctgaaatggactcctttgcagatgcaactcagccagaaatcctgagaacaaatccaacgtcaatggtgctgcagctcctcgccctggacattgattgcaacaatttcgacttcctagacccgccacttgaagatggactgcgcagtgcgtataagagcctcgatgccctgggggctattaagactggagatgactcatacattacaccgctgggtcggcaaatggtgcagtatcccttggatcccaagtactcaaagctactgcttactgcttcatcgttcggctgcatggaggagatcctgagccttgtttccgttctctcaagcgatcacgtcttcgtctcgaatagcgaaaaaaacgaaatggctgcactagctcacgccaagtttcagtccaagcatggtgatcatttgacgctgctgaatgtgttcaatgggtttttgaaaagcgaaaagccaaaggtaagtgtttcgtcgtactatctttcctattaaacaatcattaaatcgttttatctgttttagatgtggtgtcacgacaactatttaaatttgcgtagtttaacctatgcacgaaatgttcgccgacaattgagggaaataagcgagcacttgcatttggctctaaatagctcggatgacattgaaatgttgaagaaatgcattttaaatggattctttgaaaatattgccgttctgcaacgcgatggcttctacataaccgcttccggcaacatcaggtccaaaatccatccgtcgagcgttctgcacggaaagtacaagccgagctacatactcttcaccgaaattgtgcagacggagcaaacgtttctacgccaagtcacggaaatatccatcgaatggatcaaggaggttgtgccgtttgttaaaaacataccaacaagatgaaataaagtacaaaactgttcaaagaatgttttgatcttttccttatcccttttttttttattaatatatcatcaagatcgggaagttaagattgtacagataggcttgttaattctttggtattcgaatcttttttattttggttgcaaaaaaataacaataagtttaacaaaaaatatacaaaacgcgactttcatttgttattatttattaccttaaccagttaacatttaaaatattttttgagattattacaatacaactatgggattgatttatagtattcccgctagtgctgtctcgtgctcagcagccgcctggctatgataccttaatctagcattacttacaggagcccctgtaacaaaaaaaaaaacgaaggattaataggttataagttattttatcagaagctatcttcactcaccaatataacttaatagaacgggcagaaagatcaacccgtgcgccgccccaattacaacgattcccaagtacatacggaaataaaacacctggaatatctgactttttgcaaaggctaacactagtatgcccgcaaatttggttaaagtgattccggagaaaatggagctacccattttggaaaggctatctgcagctcgatcaatttgactaactgatttcgatgtggcgaagctgtgcaccaagtgcgaacaaaattccacggatatgccgacggccatgacgagattcaccaacgaaacagcattcaacgaaatgttccaataatacataaggccacctaaattaacaacaatcatagttatcgttatgacaacaactaatgcggaatgaacatcgaagcccatcaaaacaaatgtaacaacgaatatggaaagaactgaaatacccatgctctgtagcgtatccgaccacatggtcagatattgttcgtaaaacacatagaatactgaatatggaaacacttcgaccgtaagggccgatgccataggaactccatttgacattagtctgc

SEQ ID NO: 10034 - DNA, 2112 bp, DROSOPHILA
atggactccaaatactttgcaaccagcagaaacgatgctgtaggtccatcgcctgtgaagttctccttcaagcggaagtacgatgccatggcgaacagtcccatactggagaagaaaccccatgtggcccaaatcaagcagacaatagctcccattctgctgaccagcaaaagaacctccattgaacagcagcaaaaatcactgcctgtctttaattgccgccatcgaatcctcaaggaactggaagcgaacgacaccgtgctaatcatgagcgagacgggctcgggcaagaccacacagataccacagttcctgctgctggctggttacgccaagaacggaatgatcggaatcacccagccgcgcagagtggcggccataacagtggcacgtcgcgtggcccaggagttgaacggaaccattggcgacacggtgggctatacggtgcgtttcgaggatgtcacctcaagggccacaaagattcgattccttaccgacggcgttttgctgcgcgagtccattaaggatcgactactgctcaaatattctgtgattattctggacgaggctcacgagcgaaccgtgaacgcagacctactattcgggatagtcaaagatgctcaaaaggagaggcgtaagcaaaagttggccaacctaaaggtagtggttacatctgccacgatggatatcgatcacttcggaaattactttaattgcaagggcatgtacctggagggacggacgtatccggtccgtgtgatgcacaccaaggaggagcacgaagattacatccacaccgtgctgccacgacgtgttgatattcctaaccgggcaagaggaaatcgagtcattggcccaacaaatacgccagcttgccaaggtgagtccatcgtcgtacagcccacagattgcacatcattaaaaataagttgctcgctatttcagattgacacgactggaacaacagatctccgcgtattcacgttgtatgctcagctatcgcagggcaagcaattggagtgttttgtgccgacaccggccaacgtacgcaaagtaatcttggccacaaatatagcagaaacgtcgatcaccataccgggcatccgttgtgtgattgactgtggctttgtgaaggagaaatcgttcaataccgtcgacggactggatgtcttaaagtcagttcgaatatctaaggcgcaagcctggcagagagctggacgagcaggtcgcgatgcggatggaacctgctacagggcgtacacaaaagctgaaatggactcctttgcagatgcaactcagccagaaatcctgagaacaaatccaacgtcaatggtgctgcagctcctcgccctggacattgattgcaacaatttcgacttcctagacccgccacttgaagatggactgcgcagtgcgtataagagcctcgatgccctgggggctattaagactggagatgactcatacattacaccgctgggtcggcaaatggtgcagtatcccttggatcccaagtactcaaagctactgcttactgcttcatcgttcggctgcatggaggagatcctgagccttgtttccgttctctcaagcgatcacgtcttcgtctcgaatagcgaaaaaaacgaaatggctgcactagctcacgccaagtttcagtccaagcatggtgatcatttgacgctgctgaatgtgttcaatgggtttttgaaaagcgaaaagccaaagatgtggtgtcacgacaactatttaaatttgcgtagtttaacctatgcacgaaatgttcgccgacaattgagggaaataagcgagcacttgcatttggctctaaatagctcggatgacattgaaatgttgaagaaatgcattttaaatggattctttgaaaatattgccgttctgcaacgcgatggcttctacataaccgcttccggcaacatcaggtccaaaatccatccgtcgagcgttctgcacggaaagtacaagccgagctacatactcttcaccgaaattgtgcagacggagcaaacgtttctacgccaagtcacggaaatatccatcgaatggatcaaggaggttgtgccgtttgttaaaaacataccaacaagatga

SEQ ID NO: 10035 - protein, 703 aa, DROSOPHILA
MDSKYFATSRNDAVGPSPVKFSFKRKYDAMANSPILEKKPHVAQIKQTIAPILLTSKRTSIEQQQKSLPVFNCRHRILKELEANDTVLIMSETGSGKTTQIPQFLLLAGYAKNGMIGITQPRRVAAITVARRVAQELNGTIGDTVGYTVRFEDVTSRATKIRFLTDGVLLRESIKDRLLLKYSVIILDEAHERTVNADLLFGIVKDAQKERRKQKLANLKVVVTSATMDIDHFGNYFNCKGMYLEGRTYPVRVMHTKEEHEDYIHTVLPRRVDIPNRARGNRVIGPTNTPACQGESIVVQPTDCTSLKISCSLFQIDTTGTTDLRVFTLYAQLSQGKQLECFVPTPANVRKVILATNIAETSITIPGIRCVIDCGFVKEKSFNTVDGLDVLKSVRISKAQAWQRAGRAGRDADGTCYRAYTKAEMDSFADATQPEILRTNPTSMVLQLLALDIDCNNFDFLDPPLEDGLRSAYKSLDALGAIKTGDDSYITPLGRQMVQYPLDPKYSKLLLTASSFGCMEEILSLVSVLSSDHVFVSNSEKNEMAALAHAKFQSKHGDHLTLLNVFNGFLKSEKPKMWCHDNYLNLRSLTYARNVRRQLREISEHLHLALNSSDDIEMLKKCILNGFFENIAVLQRDGFYITASGNIRSKIHPSSVLHGKYKPSYILFTEIVQTEQTFLRQVTEISIEWIKEVVPFVKNIPTR

SEQ ID NO: 10036 - DNA, 5152 bp, DROSOPHILA
gtgccatggcgcgctctgtgatctccaccaacatggcgaagatggtctcctgcagcgaatagcaaagatcggcttggctgtaattattgacctcttcttcctgtggcttttttctcttattttgcctcttgcccggctctgccaggtcctcgatgtaggataaaatccccgagaagctgacatccatgcccttaaccacatagggcagtttaatataacgattgctcgacttggccagctgctcgatgttgtagcccggactaggatcgttggacagcttaatgatgcgggcgaatcgatccaggcaattgcccactgcaatgtctatagtttcgccaaagatgcgatatcgcttattggagtaggcaataacctgtgtgtttccaccgctcacatagagaactgtaggattctgggcaccggtgatcaggcgacccatctcgatgtgtccaatgcagtgatttacgcccagcagcgggatattccacaagagcgacaaagtgcgagccacaatggcgccaaccagcaaaggaggagccattcctgggccttttgtgtaacaaataacatctagatcagaggatttcaattgggcttcctttagactggattccaccaagcccaggatggcttccctgtgatgtttggccgtttccttgggcaggaaacctgttgaatgattggttatgattaaatctgtactagccggcgggttagaatgtggcaataccttctcctggtggggtaatgtacgttctacgtacgttcgccagtactttaccatctcgaattatgccaatgccaattttattggcactgccttcaatacccaaagcgcaaaccatgtttaaaattctaacaaattaagcaaattgcaatgtaaacaaacattagtgttacccttcgcgccgagtggcagcaatggtcatactgctcaaggagggctgccaacttttccaaactaacagctggttgcaaatatcaaacttttgttgtatagcaaaagtacgcgaaattcattgtaaaatttaaatagatgatcaaataaccgatccgataatggaatcagcgcaggcaacaccgccggctgagatggaaaatccggccagcgtggaaaatggtgattctggccgggattctaaccacatagaggggaaagcaattggagacgtggatatgaaagcggattccattgaacagcagctggaagaaagcgatgtgaaaactgagtctaatggagatcagcttacagaccaggatgagggaaaaatagagcaggatctcaaggcagccgtactggagcaggtgccaatcgaagaggaaggactaagtctgcgattcaaggatctgcaggcccaggaaaaggtgaaggaactgcagcaaaccccttcgcaacccccacagaacgacatcctatcccatgtccactgcttggcccagcttgaggagcagcggcgcaactacgaacagcagttggaacaacttcgtacgtccaatgtccagaaggataatatgatcacgctcattcagcgggagaacgccattctgggcaaggagaagcaggcctgccgcaaggaaatggaaatggccaacaaggagaaggaagccaccgtcattaagttcgccatgaaggagaagctacttatcgacgccaagaaggagaaggaggcggtggagaagcagctggccgaggccaaaaaggaagtaaagaatgtgtccaccagattcctggctgtgagcgaagaaaagtcccgcatgacgtacatcatcgatgaaaaggtgggtgggaatactttgctgcttctataattcaacgaaagattgactatcaaataattgcttaattggcaataaaactaattcttctatgagttatacaagctccaattccgaattttgtgcagataacaaatctcttatcataacatttatcttttccttatcagtgcaatgaagtcagaaaatatcagagggagtgcgaaaagtacaaaacagaaatgggtcacttggaatccaagctcaagtatcacataaacaaactgaacatcgaaacagaagccaaagcggtacgcaatgattacctaagcttatatttgatcttcactgaacttggttcccattttaggttgtagaacgcaaactggaagaggaaaagaatgcgcccaataaactggaggaaaaggcaaatggttcgattattttttcaatgatatatgtttaactggtcttaccattcgctttttatacacagagaaacttaaaatggaatttgaagccaacacaatactcttgaaacacgagattaccagcaagactgaggctctggataagctcaccaaagagcagcaaaaactaagcgcagccaacaaagaactgcagaaccagcttcaggagatcaccacggaggtaaatcaagttttggaatatatcttatcttttttaactattttaaaattttcttgtgcagcataatcagctgacagaggagtataatcgtttgcgagagctgcacaattccgtagaaggttcatacagtgatgagctgcttaactccgcaaagctcagggggcaactggaggaactgcagcttctgcgtactcagaacacaatgtaagtttaaggaaatgtatacattagaggcagaatatatccatacaatcccatttatgtttaaatgataattttctttgtagaaacgaagaaaaactgatggaccaacagaaacgagtccagaaactggaggctttggtccaagacaacgaaacggacctggagcaactgaaagtcaaaaggcaggagctactcacaattaacaaggagatgagtgagctaatcgtgcagctgcagaatgatatttgcctggccaaagcaaaggtgagtacaagtaaaaataaaccaaaaaatgtacatgccccgggtgaggctcgaactcacgaccttaagattatgagacttacgcgctgccaactgcgccaccgaggctttgaatggctagcaattctaagcagttgagataaatgccggtatcagatgcatcctaaaccataccatgttcaaggatctgatgttatttcctttattttggcaggcgcagggacttgatgctgagaacaagttactgaagcaggaaaagctcacctacgacaccaagtataatcaactggagcagcaactaagtttggaggcatcggagaaaaacgaggagcgactgttgctggccaagcatttgtccgaaaagacgaagatgtacgaactgaccaagcagaagctggaggatgttcagggtgactttgaggctacccagcacaagcatgccaccgtgctgaaagagctccatcgcgagctgaacaagtacaaaaggggaattacggaaccgaagacaccaatcagctactgcagcaactgtcagcaggcgatcaatgggtatccaacggagaatcctcaacaacggagtcatagtcgctccagtagccacggcagcatgcacagcggcagtcgacgggccagcgagtcttccgaatcggaaacggtggccagtagtgccaccaccgtgcaacagccgccaccgcagcaagatctccaggcggtaccgtccaaaaaagtcctcgtagagcgaattctgcgactgcagcaggccactgcccgccaaaccgaacggatcgagttcctggagaaccacacggccgctctggtggccgaggtgcagaagaaatccaaggtggtgcagcactacatgctcagggatcagactgccggcgcattaaccacatcgcggagcgatcagaacaaaagcgagttggtcaagtacggaaatggtatcatggcagccatctatggtggtggatcatcgaagacgggaggcgagaataaagccatgtccctcgaactttctctagagattaacaagaaactgcaagctgtgctcgaggatacgctcttgaagaatattacgctgaaagagaacctcgatgtgttgggactcgaagtggataatctcacgaggaaattgcgctccctggagggcagttgcaagtaaatgccagtcttcttattccatagtattccattccagagtctaacccgcgtgtagatagtgtacaaatcaaatgttcgtatgtttaagtgtataatatatgtatttaatatttcaacaacgtccccaggcttataataatccttcgtaaagcttggcgctcacgggtttcggctggcccacaccaagggcaaagttaacagttggcttttctccatccttggctaatctggccattttgttgtcggtcagtttgtagtggaccttcatctggggattggggttgcccgtttcctccgataccagttcgcggagcagaggcggaagttcaatcttggtgggcagtatcactggttcaaccttcttcttgttgttcagatactttgcttcctgatcctgcggcaccagttcgtagtccgccttatagctggtgctgtagatttccacaggctttggctgcgttacgccgcgccacgttttctccacagtgacccgcaccttgcggatctcgccgggctgctcgtccacggactgcaccttcagaatccgcatgtagcagggctccggatatcgctggaacatgttacgtattagcagacggcccacaccccagttgggcaggtttgagaccagctcccacagcgtgttgccgcgaaagtctgtggtgcgaccgatgtacttgatcactttttgggccattttactgggttatttcactattttaattgaatttttgttgcaagttataaaaacagtgagtttgccactcacagggaaggtcgaacagctgtgccggctggcttaacagggctgttaaaacttaacagaaggctgttatgaacagtaaattgtgtgtgttggcaatgctgcgcggcgattttaaaaccagttaaattttgaaaaaattaaataattttttaacttcccaaataataaatgaaaacacacacacacatttaaaattttagtaactaataatcgctttaaaaggttttaatcatgttcttgtctcctagatccagatgttttgtctagtataatatttatttttaaaacaatttggtttttttcagagatttaaagatcacctaatatttaaggaatatttaaataatattt

SEQ ID NO: 10037 - DNA, 2506 bp, DROSOPHILA
caaaagtacgcgaaattcattgtaaaatttaaatagatgatcaaataaccgatccgataatggaatcagcgcaggcaacaccgccggctgagatggaaaatccggccagcgtggaaaatggtgattctggccgggattctaaccacatagaggggaaagcaattggagacgtggatatgaaagcggattccattgaacagcagctggaagaaagcgatgtgaaaactgagtctaatggagatcagcttacagaccaggatgagggaaaaatagagcaggatctcaaggcagccgtactggagcaggtgccaatcgaagaggaaggactaagtctgcgattcaaggatctgcaggcccaggaaaaggtgaaggaactgcagcaaaccccttcgcaacccccacagaacgacatcctatcccatgtccactgcttggcccagcttgaggagcagcggcgcaactacgaacagcagttggaacaacttcgtacgtccaatgtccagaaggataatatgatcacgctcattcagcgggagaacgccattctgggcaaggagaagcaggcctgccgcaaggaaatggaaatggccaacaaggagaaggaagccaccgtcattaagttcgccatgaaggagaagctacttatcgacgccaagaaggagaaggaggcggtggagaagcagctggccgaggccaaaaaggaagtaaagaatgtgtccaccagattcctggctgtgagcgaagaaaagtcccgcatgacgtacatcatcgatgaaaagtgcaatgaagtcagaaaatatcagagggagtgcgaaaagtacaaaacagaaatgggtcacttggaatccaagctcaagtatcacataaacaaactgaacatcgaaacagaagccaaagcggttgtagaacgcaaactggaagaggaaaagaatgcgcccaataaactggaggaaaaggcaaatgagaaacttaaaatggaatttgaagccaacacaatactcttgaaacacgagattaccagcaagactgaggctctggataagctcaccaaagagcagcaaaaactaagcgcagccaacaaagaactgcagaaccagcttcaggagatcaccacggagcataatcagctgacagaggagtataatcgtttgcgagagctgcacaattccgtagaaggttcatacagtgatgagctgcttaactccgcaaagctcagggggcaactggaggaactgcagcttctgcgtactcagaacacaataaacgaagaaaaactgatggaccaacagaaacgagtccagaaactggaggctttggtccaagacaacgaaacggacctggagcaactgaaagtcaaaaggcaggagctactcacaattaacaaggagatgagtgagctaatcgtgcagctgcagaatgatatttgcctggccaaagcaaaggcgcagggacttgatgctgagaacaagttactgaagcaggaaaagctcacctacgacaccaagtataatcaactggagcagcaactaagtttggaggcatcggagaaaaacgaggagcgactgttgctggccaagcatttgtccgaaaagacgaagatgtacgaactgaccaagcagaagctggaggatgttcagggtgactttgaggctacccagcacaagcatgccaccgtgctgaaagagctccatcgcgagctgaacaagtacaaaaggggaattacggaaccgaagacaccaatcagctactgcagcaactgtcagcaggcgatcaatgggtatccaacggagaatcctcaacaacggagtcatagtcgctccagtagccacggcagcatgcacagcggcagtcgacgggccagcgagtcttccgaatcggaaacggtggccagtagtgccaccaccgtgcaacagccgccaccgcagcaagatctccaggcggtaccgtccaaaaaagtcctcgtagagcgaattctgcgactgcagcaggccactgcccgccaaaccgaacggatcgagttcctggagaaccacacggccgctctggtggccgaggtgcagaagaaatccaaggtggtgcagcactacatgctcagggatcagactgccggcgcattaaccacatcgcggagcgatcagaacaaaagcgagttggtcaagtacggaaatggtatcatggcagccatctatggtggtggatcatcgaagacgggaggcgagaataaagccatgtccctcgaactttctctagagattaacaagaaactgcaagctgtgctcgaggatacgctcttgaagaatattacgctgaaagagaacctcgatgtgttgggactcgaagtggataatctcacgaggaaattgcgctccctggagggcagttgcaagtaaatgccagtcttcttattccatagtattccattccagagtctaacccgcgtgtagatagtgtacaaatcaaatgttcgtatgtttaagtgtataatatatgtatttaatatttcaac

SEQ ID NO: 10038 - protein, 776 aa, DROSOPHILA
MESAQATPPAEMENPASVENGDSGRDSNHIEGKAIGDVDMKADSIEQQLEESDVKTESNGDQLTDQDEGKIEQDLKAAVLEQVPIEEEGLSLRFKDLQAQEKVKELQQTPSQPPQNDILSHVHCLAQLEEQRRNYEQQLEQLRTSNVQKDNMITLIQRENAILGKEKQACRKEMEMANKEKEATVIKFAMKEKLLIDAKKEKEAVEKQLAEAKKEVKNVSTRFLAVSEEKSRMTYIIDEKCNEVRKYQRECEKYKTEMGHLESKLKYHINKLNIETEAKAVVERKLEEEKNAPNKLEEKANEKLKMEFEANTILLKHEITSKTEALDKLTKEQQKLSAANKELQNQLQEITTEHNQLTEEYNRLRELHNSVEGSYSDELLNSAKLRGQLEELQLLRTQNTINEEKLMDQQKRVQKLEALVQDNETDLEQLKVKRQELLTINKEMSELIVQLQNDICLAKAKAQGLDAENKLLKQEKLTYDTKYNQLEQQLSLEASEKNEERLLLAKHLSEKTKMYELTKQKLEDVQGDFEATQHKHATVLKELHRELNKYKRGITEPKTPISYCSNCQQAINGYPTENPQQRSHSRSSSHGSMHSGSRRASESSESETVASSATTVQQPPPQQDLQAVPSKKVLVERILRLQQATARQTERIEFLENHTAALVAEVQKKSKVVQHYMLRDQTAGALTTSRSDQNKSELVKYGNGIMAAIYGGGSSKTGGENKAMSLELSLEINKKLQAVLEDTLLKNITLKENLDVLGLEVDNLTRKLRSLEGSCK

SEQ ID NO: 10039 - DNA, 8844 bp, DROSOPHILA
acattagccgccgggaacgtggcattcctttccaggatattaaacccacagtccggacgggtgggttaacgagtattggccacgttagaggaatttctctgaaaggcgaaatccgtaatgttaactttttttcgccaattattaattcgaaaaactgcttttagattagctcacaaaatcggtacaaagctagtgatattctactggaattaaaaaaattgattccatattccatgtgacctttaataaattgcaatttattattcaaaaggcccatccacctgcttcacttttagaacaaccaattatttatccaaatgatccgctcattaccttataaattgatgaactcatattagacccaccagcgagcgagtgaccaaacaaattagtacaattcgttttaataattgtttttgtatacgtctcacaatgttgcatgtttattttttcataatccattgcattccgatttgcagctggctttcgattttttgttctaatcatagtcattacgtgtatatatatgtataattagttatgaactatacttgggactgctatttataggtgtataacctatttcctaagtgtttatggtgtctatcttgtaatctagctattttacaaagtgcatacgaaatatgcagccatcgatatttacaaacgatttaagcgaatatagaaatgtatatataatgggatactcttcttgcgaatatttatattacaattagcttagcttaggctctcctcggagagctcttttgagcctggggttacattccgctcgcaaattttacaagtacgatacttattagtctagctctatttctttagtagataagatatagatttcttatccttagacgatcgccagggatgagcgactatatgtttttatcaattaataagcgtaatccattctgtagtggggtttgtagttatagttgtttatttgtggtaggaggaaccaatgatgcagttaatccgtgttcattcattggggctttgcgccctgatagataccctcagagtacttgggcctgcactcggcacagaaccatttgccctgcggcgccaccataatgcccacgcactcgaagtggaaccactcgatcagacagttgtccccgtcgcatgcgatcatctcggagacctcgtcgtacggacaacgacagtagcagtacacggattctccttcacgagcgagacgcgctcccgccggcggtcgaatgggataccgtatgttgttcgccttgaagtactgcagtgtggcgaatccgggattgggtagcagcgctggtggtatgggttgattgaaagcagtggccgcaggtggcggtggtggtggaactggcaatgccaccggtagaggagttggcaaaactggaggtggcgccggttgaggagtcggtaccacactggtcacattaacctccgcctcctcgtcatcagagctgctttcactgctatccgacggtggagccgtggtgggcagcaggctaggccgaattttcagggtcggaatgggtggcaaatgatcgtttgggtcgggcttgtgacgcttggctgggcgagatcctcctgcaccgaacagcgatcgctgtttgcttctctttcgcgaggacccggccattccaccattgctgtgtgagtgatggtggtggctactgttattgttattcctgtttcgctgcttaggcggtgtgggcagatcctccttggcccaggtcaactgtggtggtggctgcggtttaataagctgcattcccacctggagcggtggcgcaagaacggcgctcatattttcatcgtcgctcgtatagccataaaacttgttgggccttcgctggcgtttcgaacgcttcagctggccatcggcatcggaacagctgctgccctcactcattctcgtcatagacgattgcagttggcgatgagtaagtggcgttacaggaaacagagaagattctggatgcgacagtataggagtgggcggctccaggggtgcaatcattccaggcattccgggtatcctatccatgggtgggggtgtagtactagcaaccggctgtagcttgccagatttacaagtagactttcgttcccgcttctttttcttgttcctcaccttttcccgcttatcagcaaaagcagaagcctcctccgggagagaaggagttgagggtcgactgttttccacaatgtcataattgttgcttggccgcattggggcatgctcggccatgagagcttctcgcttttgagtcagcagttcattggccagcttctgaggatgggagtcgtagaactcttcatctgtatccgagaaagctgtatcgaagtccgactcattgtacatcgggggcttgggagagggtggtgcaacaggattattgttctcattgacggcagtcgtatcctccacttgattctgctcattttgaccattctgatcgattttgagtgactctgagctcttctttacctttaaggatttcttacgagatcgtttctgtggcgatccacgagcagtagagctatctgagtcgtcggaattgccactggaactactgctgttgctagaactacagctacagttggacccgcatgagcagctcgaggaatcggagtctgaagagctggagctacttgaactgtcgctatcactggatgcattctcaccgggcgttttgatcgatgatttgttagcggacttttgtttcacaggagagggtgcaggcgtgcggtacaacttgcaataatcgtgatcagaccaggcaacgtgcagctttgcgggcggcagattgactaacgagtcttccctttcctcatccttaaccgcctgctcttcggggatggccaccgcctgattttgaaggaggtttttccaaattgagacatccacttgatcttcctccttcttaggctccaattcatcatcggcatcaagagccttttcttctgtagagccgtctaaaggcttttcctccttatcctccagtttggatttgccatcaagttcatcggcgtcactctcagatgatggggacagcatcaccttgggcatatccagatcatccacagaggatctcattggcagcttaggctgctcctggtggctgcttctcggtgcatctgaatcactgtcatcactgctatccgactccgagagattgggtgcgataagattaaggtcttccaaagattccttgttgcgctttgatttcttgcgacgctttcgattctcagatttactgagtggcggctctattgaattatcaatacgatccgattcctccttcttgggggtctcgttattggttaacgactcggacaagagtttttcttgattgtgtgctccttctttttcgtcttcgccttcttccagctcctcctttatatcctccaacttttcggttggtgctgcatcggctgtctgctccacggaaactgcttggggcagttctttcgccacatgactgctggcatgctttagcaagagcttgcgcgacacgaatttctcttcgcagccctcctcggtgcacgcatagcggaaatccccagtatgcattctttgatgcacctccaggtatatagccttgctgaaaacaaaaccgcattgctcgcatggaaattctgcgggcggcacgcaaaagtggtagacatgtcgccagcgcttttgtaggcattgcttgcatcctgcactctccgttccgtgcttccagaatagatgctttgaaatatcctgcttgttgcgataggcgataccacaacgatagcacaaatgtagcaacttgtgcttccacacgtgagacgacagtttcgattggctctggcagtcctccagacaaatatcgcaagcctggtgctgcttcctcagatgcaccatcagccgaaaggcggagggcaatggagccatgtcgcagagacagcaccggaactgaagatcataaacacttcctgctacctcgccaggacaaatatgacacaaaatctcgctgtagctatagaagttagtttgacacattacgcacgttatgttcgacttaatgtgcagtcttctgttgtgggtgtacagctccttatgagtggaggtcacaaagcggcaggtgaagcactcgtaaattcgctcattgaacggctctacgtacttgccattttccaaactgcaacaactggcagcattcatatactcgttttcgaggttcggaagaaagctttttagtttggctacaattgtctctgcgtacagttcctcagctgtaatgctatccaccgtagctgtaaatctgtgctggcctattaaatgaatcaccaactgttttacatttactgcgatccttcgagcgtgattgcaatataggcataaggagtacacagattttaagcacaaacgcacaaaatccaccattgaaaaccggtcgagaggacgatcaagttgcagatccaccgtgtgggtgtcgggtccagctaccataatgccatcggcgggtggaagcggctgaatggcaagcggttcgtcagcagtttgtgtatcctgcgaaggtggggctggctccagagtttccttctgggcctccgtaaagtccctactaccttccatctctggtgcattcaaactatcatccatgtccatgcaatcgctgccgaggctgttgcgacgcactgcatcgggctgaccttgaaattccgtaattaaagctggcggaggttctggaagattgacgtgattgttgtggggcgacgcaggtggcgttagtgaccaacgacgctgttcctcctgctgtggctgcaggtgctgaggaggatctacaacctgtggcacaacgttttccaaatgtgcattggccataataatcttggactgttttttggtaattatatccgccttggttcgctcaatgtccagcttggtgcgctccagttctgccagaacacgatttagcttagacgaagtcgagtcatcatagctaagcgctggcggtggaggaggcggtgcatcaaaaggtagatcctcgggtggtgccgacactgcctcttccacaggctgtgcagtttctagctcctcgtcctccgtatccgtactgcttagggctgcatccacagacttctggaattccttaggcacccgcaacataattttgggcacaaccaatttcggaatgggaggcgctggaggatcttctacgggctctggcgctggaactatacgaaatttagatatgtcattttaaaaatttaatcaatttgttcttactgttttctgcagggaaaggattctgaatatccgattgcaggtgcaactgttggggaagttgttccggtattgcctctacgggcacgggttgttcaaccgcctcctgggaaacgggtagtggcggttccgggggtctacgcacctttcgacgccttttcgtaggcttccgtttgttgttcttgcagccaatgatatggccacccttttgattgcacaaggcacacggctgcatcagttgagagcaatcgtgatcctcaaactcagaaccttggacaaaagtggcttgacatgtgcaacaaacgagatgccgtgctctatcttccttactctgctgctggtcccacgcatccttagcgaagtgactctggtcgatgtcatgcttgttttctagatgcagcgacagcttttctacactgggatacacatgattacaatatagacaaatgtaacgacggtggacttcacgcatgtggagaaaaaagtgccagcactggtgaacgctgcaacactgggagcaacgaaagaatcgctcctgcttctgcgatagctgggaactattcgcactttggatcccgctgcactgggcctggtgcttgttcagctcctgaaacctttcgaaatcgaactgcaaattgcactttgcacaactaaggacttgttgagactccgtagagatggcaggcggaataacattagagttgctctgaaggcgttgcagaagcagcgaggaaacgaagccacctgcctccacctttgtttgtttttcgggttggctgacggaggaactcttgctgcgcctgcgcttcagcgaaagcttcagagccggcggtttggcattgtgctcgctctctggatgatcgatgaccagatgcggctgcgaagcagagcttacagtgctgctcctgctgcttatacttctgctacgggtggtaccaacgggtagaatcaggggaagcgctgacacctgagaagcggtagtgtcctcctccttagtgttgttgccagtgtggtttgttatcacagactgttccttggggtcttccagctcttcgccgggatcctcgacctcctcgacctccccgtcctcgagcttctcttctttcaaagctttatgtgccccattgagttttatcaacggaacgacctctacagtatgttctttcaacttgacactatcactgtgtgcttcatcttccatatcagactcgattttaatgacattagggggcgctccgtcttcgctgcatggaagatctacatccattgtcagcgaaggagaatccagtgtatcggatccctctaaagaaggtacaccaattgtttgcgatgtagtctcatccacttctggcggtgcagtggaagcgtattcaccaacgtcagcttggtaaagatctcctgaagtctgactcttttctgtccctccttcaatctccaaaacaggactctcattatctttaattgatatgaactctttatccccactttcagaatctgtttcaagatttatcactggcggggtgtacactgtttcctcaatttcgctttcggaatcttcatttgctgattgaaaatacttatcctccacttcattgctgtcagattcttttggctggaagtggtccaccttttcatcgatttcggactcatgatttgcccctaaagactctgagggctgctcttccgaatccgttaagaactccatatgggtctcacttaaggaatccgatttgtcctccacttcggtctttagttcaatatcatctaagaactgctcattaagtgagatgctggttggttctttgagttcctccgatttgtcttcgacaagctcttgctttacgagatctttagagggagagccagttgtcaagcaatttgctcctaaatcgactggtgtatccgtgctttttcgtgaattaagaagagattcctctgcctgctctgcctcttccgtttcggctgtctcctccgtttcggctgtctcttccgttccggtcgtctcttcttcaggtgtgtctttgaaaccctggccatttgccatggttacatctatcacgtcatcgttctttttcggcttcccatcttcatttcccttagcgttgttgttctgtccatgttggtggctctcgttttcctccttcgcctggtccagcacataatgaagttcttcgatgtcgtcttcttcgccagcagctgcacctgccccggtgccctcttccgatcccgtttccgatcctcttcccgcttctccatcatctcggttagacgttagcttggcttgttgctgatccaatgcttccatcatattatctgcaatcacacgctgtcagcaaaaaacaataataacatttaagaaaagaggagaaaaacaaataatcagagcgctattaattaaacgcactttagacaaaaattgttatattcattacctttgcatgccgttggcgttgaatccgttccggttctcgctatttttcttgtatgcttttcgttgttctttacgcagctgaaagcgaaatgaaacgaatttattattacgagatattgggtttggtatttcgataaaaaaaaattagaatgacagcaaaggctaaatgtttatgcgggggtatacacgataaatttttcagaatattaacggcataaacatttgtattgcacaaaaatcgccggtcattggttgatcttgcagccctggtgcaaacgaaaagtcaaaataattgaaaataccaaaataaatgttaacaaaatggcaacgtgagagccacttactgctaaaaataaacgaatttacttgaaatattcttggaatggacactacaatcaaaatgtacagcaattatgcacgtttatttacctgctctcctcctatgcgttgctgttgttttgtcggttctgctcagcgtattattgctgttgttgttcttgttgctgtaccctgcttaggtagaattttcccacaatttgtaggcggcagagggagagagagtgggaaggcaagagagggagagaaagagcgatgaattttacgcgcgcaaacagcaaggagagaacgtagccaaaacaacaaccgatttcacggaagttcgctgcacaactgaaccaaaaagagaccgaaaccgagagaatttgcccagcggattggattggacgagccgagacggctcggaaggagagcggggcgcccccaccccacggcgaacttatacaattaacgcctggtttcaattgtttataaactcgcaggactcgcatacgtaatgcaaacagatttcacaagtgcacccaattgccgttgggcttagtttcgaccagaagcacaatgatattgtcgaattgcttttttgcctttttgcgcgtctcttgtgcggggtaaaaaatgttcttctttttgaacgtcgccgtccacgctttgcattttacgttctgctcgatttgttcgcgctctttttcaccgtattttagtagctgcacattgggtagcgtatggggattggatatttcacaatttggctgcggagagagctcgaataaagcgtgaaaaacaagtttttagcaatatttttcgccttttttacagc

SEQ ID NO: 10040 - DNA, 6642 bp, DROSOPHILA
tcattctaatttttttttatcgaaataccaaacccaatatctcgtaataataaattcgtttcatttcgctttcagctgcgtaaagaacaacgaaaagcatacaagaaaaatagcgagaaccggaacggattcaacgccaacggcatgcaaagcgtgtgattgcagataatatgatggaagcattggatcagcaacaagccaagctaacgtctaaccgagatgatggagaagcgggaagaggatcggaaacgggatcggaagagggcaccggggcaggtgcagctgctggcgaagaagacgacatcgaagaacttcattatgtgctggaccaggcgaaggaggaaaacgagagccaccaacatggacagaacaacaacgctaagggaaatgaagatgggaagccgaaaaagaacgatgacgtgatagatgtaaccatggcaaatggccagggtttcaaagacacacctgaagaagagacgaccggaacggaagagacagccgaaacggaggagacagccgaaacggaagaggcagagcaggcagaggaatctcttcttaattcacgaaaaagcacggatacaccagtcgatttaggagcaaattgcttgacaactggctctccctctaaagatctcgtaaagcaagagcttgtcgaagacaaatcggaggaactcaaagaaccaaccagcatctcacttaatgagcagttcttagatgatattgaactaaagaccgaagtggaggacaaatcggattccttaagtgagacccatatggagttcttaacggattcggaagagcagccctcagagtctttaggggcaaatcatgagtccgaaatcgatgaaaaggtggaccacttccagccaaaagaatctgacagcaatgaagtggaggataagtattttcaatcagcaaatgaagattccgaaagcgaaattgaggaaacagtgtacaccccgccagtgataaatcttgaaacagattctgaaagtggggataaagagttcatatcaattaaagataatgagagtcctgttttggagattgaaggagggacagaaaagagtcagacttcaggagatctttaccaagctgacgttggtgaatacgcttccactgcaccgccagaagtggatgagactacatcgcaaacaattggtgtaccttctttagagggatccgatacactggattctccttcgctgacaatggatgtagatcttccatgcagcgaagacggagcgccccctaatgtcattaaaatcgagtctgatatggaagatgaagcacacagtgatagtgtcaagttgaaagaacatactgtagaggtcgttccgttgataaaactcaatggggcacataaagctttgaaagaagagaagctcgaggacggggaggtcgaggaggtcgaggatcccggcgaagagctggaagaccccaaggaacagtctgtgataacaaaccacactggcaacaacactaaggaggaggacactaccgcttctcaggtgtcagcgcttcccctgattctacccgttggtaccacccgtagcagaagtataagcagcaggagcagcactgtaagctctgcttcgcagccgcatctggtcatcgatcatccagagagcgagcacaatgccaaaccgccggctctgaagctttcgctgaagcgcaggcgcagcaagagttcctccgtcagccaacccgaaaaacaaacaaaggtggaggcaggtggcttcgtttcctcgctgcttctgcaacgccttcagagcaactctaatgttattccgcctgccatctctacggagtctcaacaagtccttagttgtgcaaagtgcaatttgcagttcgatttcgaaaggtttcaggagctgaacaagcaccaggcccagtgcagcgggatccaaagtgcgaatagttcccagctatcgcagaagcaggagcgattctttcgttgctcccagtgttgcagcgttcaccagtgctggcacttttttctccacatgcgtgaagtccaccgtcgttacatttgtctatattgtaatcatgtgtatcccagtgtagaaaagctgtcgctgcatctagaaaacaagcatgacatcgaccagagtcacttcgctaaggatgcgtgggaccagcagcagagtaaggaagatagagcacggcatctcgtttgttgcacatgtcaagccacttttgtccaaggttctgagtttgaggatcacgattgctctcaactgatgcagccgtgtgccttgtgcaatcaaaagggtggccatatcattggctgcaagaacaacaaacggaagcctacgaaaaggcgtcgaaaggtgcgtagacccccggaaccgccactacccgtttcccaggaggcggttgaacaacccgtgcccgtagaggcaataccggaacaacttccccaacagttgcacctgcaatcggatattcagaatcctttccctgcagaaaacattccagcgccagagcccgtagaagatcctccagcgcctcccattccgaaattggttgtgcccaaaattatgttgcgggtgcctaaggaattccagaagtctgtggatgcagccctaagcagtacggatacggaggacgaggagctagaaactgcacagcctgtggaagaggcagtgtcggcaccacccgaggatctaccttttgatgcaccgcctcctccaccgccagcgcttagctatgatgactcgacttcgtctaagctaaatcgtgttctggcagaactggagcgcaccaagctggacattgagcgaaccaaggcggatataattaccaaaaaacagtccaagattattatggccaatgcacatttggaaaacgttgtgccacaggttgtagatcctcctcagcacctgcagccacagcaggaggaacagcgtcgttggtcactaacgccacctgcgtcgccccacaacaatcacgtcaatcttccagaacctccgccagctttaattacggaatttcaaggtcagcccgatgcagtgcgtcgcaacagcctcggcagcgattgcatggacatggatgatagtttgaatgcaccagagatggaaggtagtagggactttacggaggcccagaaggaaactctggagccagccccaccttcgcaggatacacaaactgctgacgaaccgcttgccattcagccgcttccacccgccgatggcattatggtagctggacccgacacccacacggtggatctgcaacttgatcgtcctctcgaccggttttcaatggtggattttgtgcgtttgtgcttaaaatctgtgtactccttatgcctatattgcaatcacgctcgaaggatcgcagtaaatgtaaaacagttggtgattcatttaataggccagcacagatttacagctacggtggatagcattacagctgaggaactgtacgcagagacaattgtagccaaactaaaaagctttcttccgaacctcgaaaacgagtatatgaatgctgccagttgttgcagtttggaaaatggcaagtacgtagagccgttcaatgagcgaatttacgagtgcttcacctgccgctttgtgacctccactcataaggagctgtacacccacaacagaagactgcacattaagtcgaacataacgtgcgtaatgtgtcaaactaacttctatagctacagcgagattttgtgtcatatttgtcctggcgaggtagcaggaagtgtttatgatcttcagttccggtgctgtctctgcgacatggctccattgccctccgcctttcggctgatggtgcatctgaggaagcagcaccaggcttgcgatatttgtctggaggactgccagagccaatcgaaactgtcgtctcacgtgtggaagcacaagttgctacatttgtgctatcgttgtggtatcgcctatcgcaacaagcaggatatttcaaagcatctattctggaagcacggaacggagagtgcaggatgcaagcaatgcctacaaaagcgctggcgacatgtctaccacttttgcgtgccgcccgcagaatttccatgcgagcaatgcggttttgttttcagcaaggctatatacctggaggtgcatcaaagaatgcatactggggatttccgctatgcgtgcaccgaggagggctgcgaagagaaattcgtgtcgcgcaagctcttgctaaagcatgccagcagtcatgtggcgaaagaactgccccaagcagtttccgtggagcagacagccgatgcagcaccaaccgaaaagttggaggatataaaggaggagctggaagaaggcgaagacgaaaaagaaggagcacacaatcaagaaaaactcttgtccgagtcgttaaccaataacgagacccccaagaaggaggaatcggatcgtattgataattcaatagagccgccactcagtaaatctgagaatcgaaagcgtcgcaagaaatcaaagcgcaacaaggaatctttggaagaccttaatcttatcgcacccaatctctcggagtcggatagcagtgatgacagtgattcagatgcaccgagaagcagccaccaggagcagcctaagctgccaatgagatcctctgtggatgatctggatatgcccaaggtgatgctgtccccatcatctgagagtgacgccgatgaacttgatggcaaatccaaactggaggataaggaggaaaagcctttagacggctctacagaagaaaaggctcttgatgccgatgatgaattggagcctaagaaggaggaagatcaagtggatgtctcaatttggaaaaacctccttcaaaatcaggcggtggccatccccgaagagcaggcggttaaggatgaggaaagggaagactcgttagtcaatctgccgcccgcaaagctgcacgttgcctggtctgatcacgattattgcaagttgtaccgcacgcctgcaccctctcctgtgaaacaaaagtccgctaacaaatcatcgatcaaaacgcccggtgagaatgcatccagtgatagcgacagttcaagtagctccagctcttcagactccgattcctcgagctgctcatgcgggtccaactgtagctgtagttctagcaacagcagtagttccagtggcaattccgacgactcagatagctctactgctcgtggatcgccacagaaacgatctcgtaagaaatccttaaaggtaaagaagagctcagagtcactcaaaatcgatcagaatggtcaaaatgagcagaatcaagtggaggatacgactgccgtcaatgagaacaataatcctgttgcaccaccctctcccaagcccccgatgtacaatgagtcggacttcgatacagctttctcggatacagatgaagagttctacgactcccatcctcagaagctggccaatgaactgctgactcaaaagcgagaagctctcatggccgagcatgccccaatgcggccaagcaacaattatgacattgtggaaaacagtcgaccctcaactccttctctcccggaggaggcttctgcttttgctgataagcgggaaaaggtgaggaacaagaaaaagaagcgggaacgaaagtctacttgtaaatctggcaagctacagccggttgctagtactacacccccacccatggataggatacccggaatgcctggaatgattgcacccctggagccgcccactcctatactgtcgcatccagaatcttctctgtttcctgtaacgccacttactcatcgccaactgcaatcgtctatgacgagaatgagtgagggcagcagctgttccgatgccgatggccagctgaagcgttcgaaacgccagcgaaggcccaacaagttttatggctatacgagcgacgatgaaaatatgagcgccgttcttgcgccaccgctccaggtgggaatgcagcttattaaaccgcagccaccaccacagttgacctgggccaaggaggatctgcccacaccgcctaagcagcgaaacaggaataacaataacagtagccaccaccatcactcacacagcaatggtggaatggccgggaggatctcgcccagccaagcgtcacaagcccgacccaaacgatcatttgccacccattccgaccctgaaaattcggcctagcctgctgcccaccacggctccaccgtcggatagcagtgaaagcagctctgatgacgaggaggcggaggttaatgtgaccagtgtggtaccgactcctcaaccggcgccacctccagttttgccaactcctctaccggtggcattgccagttccaccaccaccgccacctgcggccactgctttcaatcaacccataccaccagcgctgctacccaatcccggattcgccacactgcagtacttcaaggcgaacaacatacggtatcccattcgaccgccggcgggagcgcgtctcgctcgtgaaggagaatccgtgtactgctactgtcgttgtccgtacgacgaggtctccgagatgatcgcatgcgacggggacaactgtctgatcgagtggttccacttcgagtgcgtgggcattatggtggcgccgcagggcaaatggttctgtgccgagtgcaggcccaagtactctgagggtatctatcagggcgcaaagccccaatga

SEQ ID NO: 10041 - protein, 1987 aa, DROSOPHILA
MEALDQQQAKLTSNRDDGEAGRGSETGSEEGTGAGAAAGEEDDIEELHYVLDQAKEENESHQHGQNNNAKGNEDGKPKKNDDVIDVTMANGQGFKDTPEEETTGTEETAETEETAETEEAEQAEESLLNSRKSTDTPVDLGANCLTTGSPSKDLVKQELVEDKSEELKEPTSISLNEQFLDDIELKTEVEDKSDSLSETHMEFLTDSEEQPSESLGANHESEIDEKVDHFQPKESDSNEVEDKYFQSANEDSESEIEETVYTPPVINLETDSESGDKEFISIKDNESPVLEIEGGTEKSQTSGDLYQADVGEYASTAPPEVDETTSQTIGVPSLEGSDTLDSPSLTMDVDLPCSEDGAPPNVIKIESDMEDEAHSDSVKLKEHTVEVVPLIKLNGAHKALKEEKLEDGEVEEVEDPGEELEDPKEQSVITNHTGNNTKEEDTTASQVSALPLILPVGTTRSRSISSRSSTVSSASQPHLVIDHPESEHNAKPPALKLSLKRRRSKSSSVSQPEKQTKVEAGGFVSSLLLQRLQSNSNVIPPAISTESQQVLSCAKCNLQFDFERFQELNKHQAQCSGIQSANSSQLSQKQERFFRCSQCCSVHQCWHFFLHMREVHRRYICLYCNHVYPSVEKLSLHLENKHDIDQSHFAKDAWDQQQSKEDRARHLVCCTCQATFVQGSEFEDHDCSQLMQPCALCNQKGGHIIGCKNNKRKPTKRRRKVRRPPEPPLPVSQEAVEQPVPVEAIPEQLPQQLHLQSDIQNPFPAENIPAPEPVEDPPAPPIPKLVVPKIMLRVPKEFQKSVDAALSSTDTEDEELETAQPVEEAVSAPPEDLPFDAPPPPPPALSYDDSTSSKLNRVLAELERTKLDIERTKADIITKKQSKIIMANAHLENVVPQVVDPPQHLQPQQEEQRRWSLTPPASPHNNHVNLPEPPPALITEFQGQPDAVRRNSLGSDCMDMDDSLNAPEMEGSRDFTEAQKETLEPAPPSQDTQTADEPLAIQPLPPADGIMVAGPDTHTVDLQLDRPLDRFSMVDFVRLCLKSVYSLCLYCNHARRIAVNVKQLVIHLIGQHRFTATVDSITAEELYAETIVAKLKSFLPNLENEYMNAASCCSLENGKYVEPFNERIYECFTCRFVTSTHKELYTHNRRLHIKSNITCVMCQTNFYSYSEILCHICPGEVAGSVYDLQFRCCLCDMAPLPSAFRLMVHLRKQHQACDICLEDCQSQSKLSSHVWKHKLLHLCYRCGIAYRNKQDISKHLFWKHGTESAGCKQCLQKRWRHVYHFCVPPAEFPCEQCGFVFSKAIYLEVHQRMHTGDFRYACTEEGCEEKFVSRKLLLKHASSHVAKELPQAVSVEQTADAAPTEKLEDIKEELEEGEDEKEGAHNQEKLLSESLTNNETPKKEESDRIDNSIEPPLSKSENRKRRKKSKRNKESLEDLNLIAPNLSESDSSDDSDSDAPRSSHQEQPKLPMRSSVDDLDMPKVMLSPSSESDADELDGKSKLEDKEEKPLDGSTEEKALDADDELEPKKEEDQVDVSIWKNLLQNQAVAIPEEQAVKDEEREDSLVNLPPAKLHVAWSDHDYCKLYRTPAPSPVKQKSANKSSIKTPGENASSDSDSSSSSSSSDSDSSSCSCGSNCSCSSSNSSSSSGNSDDSDSSTARGSPQKRSRKKSLKVKKSSESLKIDQNGQNEQNQVEDTTAVNENNNPVAPPSPKPPMYNESDFDTAFSDTDEEFYDSHPQKLANELLTQKREALMAEHAPMRPSNNYDIVENSRPSTPSLPEEASAFADKREKVRNKKKKRERKSTCKSGKLQPVASTTPPPMDRIPGMPGMIAPLEPPTPILSHPESSLFPVTPLTHRQLQSSMTRMSEGSSCSDADGQLKRSKRQRRPNKFYGYTSDDENMSAVLAPPLQVGMQLIKPQPPPQLTWAKEDLPTPPKQRNRNNNNSSHHHHSHSNGGMAGRISPSQASQARPKRSFATHSDPENSA

SEQ ID NO: 10042 - DNA, 7903 bp, DROSOPHILA
agatggtgccgggcttacagtttgacacccacgaaagtgcaaaatgaacacacacctgctatgggataatcgctgaggagcatacggatgttctgcaagcggatcctgccgctgtcgccatcgtcgaactctacgcttacgaagtccggcgctgttgtagccgcattcgtagcgctgctggccgttccatcgacgacctgctcggagtcgatggcacgtcctggataaaggcatcggtactgctgactccagtaggcgcacaggcgcgtgcctactggtacactctccacgctcttcggagctacctcgaggatctttaaagataataatcataaatatgtttgtatcaattgcttaggaatcaagtattcactcaccgtatccttgagtatatcctcgcgcgacattacatgcgacttgttgccacgctctccatccaatgtgattgaatacacatctggcggccgcaatggcttcattacacccgcatagaaaagaccacccatgtccgtgaggacacgtgtctcatcgcgatacaggtgctcgctggtcagctgaagctcgcgatcaatggcgctaaatcgccgctttgcctccgtggccgctgtctgctctccagcggcgccgacggtgctcgccttcatcttgcgctgcttccgcgcggaagccacctgcttggtggatggtgagccggaggtggaagtcgaagaggtagttggtgcaatggcaacggccgcgtccaatgcgctgggttccaggcggacaaacgacgaggtactcggtgagctgctgcttggcaagggattgggctccggttgggattgctgtagggacggcggtggggggaaggagtgcgtcttgtccgggaatcgcaaaaaactagacgcctgaaggttactgctcgaaaactttgggaacttgtaatcgcgcaacggggatgaagttctgaaaaatacaaatagtattaggttaagggtaacatgactttggagtaaaccacttaccccaggacactggacagcgtcatctgtggctgttgcagagctgaagatggctgcaccgcctgttgcgatgcctgctgctgttgcagttcgagctgctgcttggagcacttcttcttctttttgtgcttggaaatctcatccagcttccgtttcttcttgcgatactgccgcgttattttcgccagtcgcatacgcatactattgtccatgatgctaaacacctcctggccaaagcgctgcgcatagctgggatccacggcgtggagggcattgcgtagctccgactgcagctgatcgtcctgcaggtccagatcctcctcggccggagcggagaactgctggcggctgctgctgtggtggcgcttcttcttgcttttcttgctgcaacgtgccgacttgcggctgtcgctgcctgaggacttggaatgtttgtgcttcttgcgcttcacaggagtcagttcggcaacgataccagccgacgtggttggcagctcgatgccctgcatcgaggggaatccgggcgagcttaatggcatctgaaaggaggatgttgaggaggggaagacggaaccctgcgattgcccaaaggcataacaggacttggcctcgaaaatgggcggcgtcgcagctgtcgttcccagggccagcgacgtgggagtgggcgttcgcgacgacggcgtagcaaacagactgctgccctgcaccacctcctcctggatgcgttgctcagcgagtgcacacagcagcttgagacctccaagtggttcgcgttctgaagtgggctccatttccagcattggcggcataggcagcgtaggctctgagggcattatattcacaggctgcggctgcggcgctggctgctctatgtgctccaccggctcttgttttactcgcaccagtggtttgctattggtgcttatgttcgagagcagctccaaaccggtcaggtcctcgggggacgtttgatctgcctgcgtggcttgcgtcatcgtttctatgggttccgggggagtctgctccgctgactcctcctggctggcactgggtatgtcactgggttcggtctgggtatggcactcagtaggctgggtatggctggcttcactgggcttcgttagttccagcggctggacatgggttgggggcggaaatgcttctgcagcaggatcctgcggctttgctgagcccggaaagctctcgtcttcactgcaaacgggcgtatccgtctgtatattgacatcctgcatttgcggcaagagctgagtcgatcccgacacaggaatgtccgccaggcgaggaggtgtctgcggtgtcaacggtgcatgcagcttgtagttcagcgccgcttcatcactgaccgctggcagaggcgttgcagcaggcagctccccaccgttgccatgcatcgataggttgagcaatgctggcgtgggcgtagccatggcacccgactggaagagatggtggggcgttgcatggcctagggaagacggctccatggtggccgaggtgggcggcgtgggcagacgcattaggttcaaggcctgctccttatcccgcgccgcctcgagcggcacaaggggcggcaatgccagcggcatcgggtactcctctttcaaacctgtcggtggcggcaaggagagaagtgaaggaatcccagtctgaccagtggccaggctgaggaaacgggagctactcgcgctgagactactgctggaacttaagctgctagccgcattgccgctttgcgtgacccccgaaccagcggccagactcagattaatggtggaattggtggttgtggtgctggtctgctgattgctgtgctggcacatcgtcgagctgcccgtcgcagtggccgcagcggccagatacagctgcagggtggacgcgtacgaaggcgttgtgctcagcgcctggtggccgcccatcgagggaaagatgaagttgggcaaactggacaagttgggcgtcggctgcagcgaagcagctgcggcggctgccgcagcagagtgaccaccaggtgccggcgcctgggggatgtaggccgagggccagacgaaggccgccgcagccgctgcctgctggaacggatctgtgggcgttaagaggggaaaatttgatatgcctgctgtgcatggtcgtggtagcgattcagttaagtcggagtttcaagttcgggtgttttcgggagtttgaagttttggagtttggagttgtcgggggagtggcggtgggagagaagcgcagtttaaaagcatgaattagttttattttggcgtatcgaagtttcgaaatcaaattaaccgagaacacctaggtaggtaggtgtcccggtgtgctggcatgcggagtgcgaatggcggagatcgtcgccgatcatctcggctcacttaccgagcgctgttgggccggccggcagcagcaccacctgtccgcgactggcctcccgcgagtactgcaggcccaccgtggcgggcgacatggaaatcactgattcaatgggtaatgcatctacaaaacgcaacggaaaagagagagaaccaaaatagagaggtggagacagagtgtgacggtgagcactgattgttcatttttttttcacattttgcatttatcaatttctgccggggatctacttgtagcatgctctaaacgtggacaactcacttggatactgccagaaagtggagggtgcccggttcacacccgctgcactcagagccagttcctcggcggtggctgtgccggtggtcatcaggtcgccgttgccagtaaagtacaaattgccgcaactggtggcacctgaaagtaaaaagcaaaaaggattcgttgaattttgggcgcttttttttccttaaccattgattctcaaattgaattctgggaagagatatgccaacctattcgtttggcgttcgtttgtttaataaagtttcgggcctgccgtgtaacttgtaagttgtaagcgaagatgtgtatgtatacgtgaaatattgcaatgtccttgaactatgcatttggtgaccgcgtgcgcccaaaccacccaaccgcccaccactacgccaaccaggcaactatcacacatcccaatcgtttcgaataacccacccccttccgacactgtggctggataatttctacaaaaattcgattaaaacgtacgtgatgccctgtaattggattacattatgggttctgaattgggaaacccaccaccgcactcgaatcgaaatgaatgacaagtattcgacagtgtcccatctccgcaaacgcaattagagctacatcttttgacaagtgatttgtttcggaccgagaaactacccaggcaaacgtttataaatagcatgtgacttgtggcaaggaaaggaaaaaaaaaaaaaataataaccagcggcacgttaggaagactcttccatatggtcgtctactgaatccaattcggcgtgtcatgttgctaggtcctgtgtcctggaggatgattcgcccggtttgttacccagttcccctttagtttcccatccccggagaaccactcatgcatccgagcatccagctcgagcatcccttataggtgatgccttacttgttcctggttcccccacacacacacacacacacacacacacagattccagactacttctagcaacagccaccgctgctaccttgtctgaagtctgaaaaaacaacccacccgagcaccatgagtccatgagtaatctgtctttggattcccgctctgatgttcctctgaatggcgcccacgcaactggaactttagcttcagctccattggagcatgctaactaagccgaagccctcgatactctgctcattgccgaaccataagtaatgcgcctactttataagggtttttttctgcactcaaaagcactagaacccgctaaaaatatgtattttctgaagtcattctaaaaatctaaaaggaaaacgtatttgatgcatgaaaataaacaccctcaatcgagaatgagctgttctgtcagagtttcttactaaaagagaacttctgggaaatacccagaatagatataaaaacaaaatttcaatctgtttttgcattggatttttatagcagcgttgaacttctagtttaatagatatataaaaataaaaacccccgcaaaaagtagcttgtgacttcaattttatcagagttgataataataaatgagtaaatggagattccaggtaaaaataacaaaaaataagtgcaactttgtaaagtcaaagcaatacaaattatatattcatttagttaagtgtaatgattcatttccctgccatcatattgctctaaccatttatagacgttatcatttaaagaataacatgaaattccatgtagtgattaaaacaaagtacacagtttcctgtactcttgctctttgattaaggctatggcacatctggtactattttgtaaatagattgatatgaaaaagtaacccatccaagatcataaagttcatgttcgtgtcatgggcatggttgattatttcaccattagcagactttaaaaataatccggaaaatgtaattcgactggctacggcgacaaaacacacccccaaaaaaatataaacatatttatgtgcccatctaaagagcaatttcaagtcgaccagagccaaggcgacgcaaagcctcccttctcaaatcgcaatgtgtttcactttcgtttcacttccgctttagaagttcgtatgatttaccaccgggtttccttctgcccgcaagggaggatggatatggggatgagccgttttgagtcgaatccagtcgattcggtggctgtcacaacaacgacagccgcacaacaggcggccatcatatgattcctgccctctaaactccagcgggttgtttaaggcggagacgacaccctcggccattgctcactgatggaattccgcacagcgctgaacgtttgttggcaatcttattagtggcataattgaacgacgtccacgtcctggcatcataagcatcatataacgttgtcccttgggaagcgccgttcattaggggcgctcaaatctggtgactcaattgaattagatgcccagaagttacacggatggaaaaaatgtatggcacaagacagtgattgtcttaaatttacatatcatttaacacaaatggaaaacagcatctagaaatatctaatgattctttaagtaaatcatttggtatctcaaagatagcagataccttaaaacagtttacatccccttgaatatcactaagaacttattatttccatgagatgaagctgcatttctctctgtgtagcttggcactcaccgaggtcagcgacgcgtatgccgaagcagttcaagtccttgttgagtggtggctgcagcggcagcgtagcgggggtgttgatagccggcaccagagcttcttgcgggcgtttcctggccacggcgatgccaatgggaacggagttgcctgatagaatcgtaattaaccgatgaggagtgctcttgaccagtggctgggtgtcacctacctgtggacttttccaattccgatacctttggcgagggagcctctattttgacgagagtggtcagtgtggaggaggacatggtcttggaggaggcggtcatcgaggcggaagacaggccctgatgctgcacctggtgctggtggtgttggtgatgttgctgctgttgctggtggcaattgttcgagcttatttcggacacctggcagggttccctcttgatctgcacaaaagtgtacgacgagttggtctgctgatggtgatggtgctgcaggggagtggccgtcgccgcggagaagcctccgaattgatccagctgcagatgggcggtatgggcaccaggatgcgatactgccgcagtggtgggcaccagaaaagtagccgttgctgtggtggcgctcagaacgtcggcggcactgctgctggcgccaggattaaacgtggccatcgggtagcggtggctgtgcacatatatgtatggctaccgctccctgggatctctagcctatacctatttcactatatatcttgcggattcgaccaaaaactaaacgtccattatccgcacacacaaacacacgtggacacacacggcacacggacacacactagcactggcccacacacacacgcacacagtctacatttttacaggttttcgctgcctctttcggatgcaacattggctactgggcctgcggcaattccccataaacaaatgacataatccaaagcgacgcgacgccactgggcactatccacaggtcgagggaaccgaagcacccaccagtccaagtgcggttgcccaaaataaaaccctgtgcgatccgagatcttttctttttttttgtgttttttttttttggtggggaggcggaggcgcgactttcctgctgcgttgttgcgtttttgcgcggttcttccaagtgaatatcgagcactggctgcagagctattggccaacacacgatctgttgcttatttatgtttttcttttgcgaattggaatcaaaatcctctggagaaaagtccacgggacggacaaaaaaagaagcagcgaactatgttaagttaacagcgatataacagggactattcgattttattgctgccttgtcgatgattcaccagcaggcgttaggcatttttagcaggactggtttggccatcggcatttctgctatcgataacatccagagcgcgcaatttaaaatattataaaatatttgaaatattttttttttaataattatcatctcacagatgaatgtcaaattttatttcccagcacataataacaattaaaagtcgcctagaaatgcatatggaatataaaagtcaacgaacgcactaacta

SEQ ID NO: 10043 - DNA, 2855 bp, DROSOPHILA
cggcagtatcgcatcctggtgcccataccgcccatctgcagctggatcaattcggaggcttctccgcggcgacggccactcccctgcagcaccatcaccatcagcagaccaactcgtcgtacacttttgtgcagatcaagagggaaccctgccaggtgtccgaaataagctcgaacaattgccaccagcaacagcagcaacatcaccaacaccaccagcaccaggtgcagcatcagggcctgtcttccgcctcgatgaccgcctcctccaagaccatgtcctcctccacactgaccactctcgtcaaaatagaggctccctcgccaaaggtatcggaattggaaaagtccacaggcaactccgttcccattggcatcgccgtggccaggaaacgcccgcaagaagctctggtgccggctatcaacacccccgctacgctgccgctgcagccaccactcaacaaggacttgaactgcttcggcatacgcgtcgctgacctcggtgccaccagttgcggcaatttgtactttactggcaacggcgacctgatgaccaccggcacagccaccgccgaggaactggctctgagtgcagcgggtgtgaaccgggcaccctccactttctggcagtatccaaatgcattacccattgaatcagtgatttccatgtcgcccgccacggtgggcctgcagtactcgcgggaggccagtcgcggacaggtggtgctgctgccggccggcccaacagcgctcgatccgttccagcaggcagcggctgcggcggccttcgtctggccctcggcctacatcccccaggcgccggcacctggtggtcactctgctgcggcagccgccgcagctgcttcgctgcagccgacgcccaacttgtccagtttgcccaacttcatctttccctcgatgggcggccaccaggcgctgagcacaacgccttcgtacgcgtccaccctgcagctgtatctggccgctgcggccactgcgacgggcagctcgacgatgtgccagcacagcaatcagcagaccagcaccacaaccaccaattccaccattaatctgagtctggccgctggttcgggggtcacgcaaagcggcaatgcggctagcagcttaagttccagcagtagtctcagcgcgagtagctcccgtttcctcagcctggccactggtcagactgggattccttcacttctctccttgccgccaccgacaggtttgaaagaggagtacccgatgccgctggcattgccgccccttgtgccgctcgaggcggcgcgggataaggagcaggccttgaacctaatgcgtctgcccacgccgcccacctcggccaccatggagccgtcttccctaggccatgcaacgccccaccatctcttccagtcgggtgccatggctacgcccacgccagcattgctcaacctatcgatgcatggcaacggtggggagctgcctgctgcaacgcctctgccagcggtcagtgatgaagcggcgctgaactacaagctgcatgcaccgttgacaccgcagacacctcctcgcctggcggacattcctgtgtcgggatcgactcagctcttgccgcaaatgcaggatgtcaatatacagacggatacgcccgtttgcagtgaagacgagagctttccgggctcagcaaagccgcaggatcctgctgcagaagcatttccgcccccaacccatgtccagccgctggaactaacgaagcccagtgaagccagccatacccagcctactgagtgccatacccagaccgaacccagtgacatacccagtgccagccaggaggagtcagcggagcagactcccccggaacccatagaaacgatgacgcaagccacgcaggcagatcaaacgtcccccgaggacctgaccggtttggagctgctctcgaacataagcaccaatagcaaaccactggtgcgagtaaaacaagagccggtggagcacatagagcagccagcgccgcagccgcagcctgtgaatataatgccctcagagcctacgctgcctatgccgccaatgctggaaatggagcccacttcagaacgcgaaccacttggaggtctcaagctgctgtgtgcactcgctgagcaacgcatccaggaggaggtggtgcagggcagcagtctgtttgctacgccgtcgtcgcgaacgcccactcccacgtcgctggccctgggaacgacagctgcgacgccgcccattttcgaggccaagtcctgttatgcctttgggcaatcgcagggttccgtcttcccctcctcaacatcctcctttcagatgccattaagctcgcccggattcccctcgatgcagggcatcgagctgccaaccacgtcggctggtatcgttgccgaactgactcctgtgaagcgcaagaagcacaaacattccaagtcctcaggcagcgacagccgcaagtcggcacgttgcagcaagaaaagcaagaagaagcgccaccacagcagcagccgccagcagttctccgctccggccgaggaggatctggacctgcaggacgatcagctgcagtcggagctacgcaatgccctccacgccgtggatcccagctatgcgcagcgctttggccaggaggtgtttagcatcatggacaatagtatgcgtatgcgactggcgaaaataacgcggcagtatcgcaagaagaaacggaagctggatgagatttccaagcacaaaaagaagaagaagtgctccaagcagcagctcgaactgcaacagcagcaggcatcgcaacaggcggtgcagccatcttcagctctgcaacagccacagatgacgctgtccagtgtcctggggtaa

SEQ ID NO: 10044 - protein, 866 aa, DROSOPHILA
MTASSKTMSSSTLTTLVKIEAPSPKVSELEKSTGNSVPIGIAVARKRPQEALVPAINTPATLPLQPPLNKDLNCFGIRVADLGATSCGNLYFTGNGDLMTTGTATAEELALSAAGVNRAPSTFWQYPNALPIESVISMSPATVGLQYSREASRGQVVLLPAGPTALDPFQQAAAAAAFVWPSAYIPQAPAPGGHSAAAAAAAASLQPTPNLSSLPNFIFPSMGGHQALSTTPSYASTLQLYLAAAATATGSSTMCQHSNQQTSTTTTNSTINLSLAAGSGVTQSGNAASSLSSSSSLSASSSRFLSLATGQTGIPSLLSLPPPTGLKEEYPMPLALPPLVPLEAARDKEQALNLMRLPTPPTSATMEPSSLGHATPHHLFQSGAMATPTPALLNLSMHGNGGELPAATPLPAVSDEAALNYKLHAPLTPQTPPRLADIPVSGSTQLLPQMQDVNIQTDTPVCSEDESFPGSAKPQDPAAEAFPPPTHVQPLELTKPSEASHTQPTECHTQTEPSDIPSASQEESAEQTPPEPIETMTQATQADQTSPEDLTGLELLSNISTNSKPLVRVKQEPVEHIEQPAPQPQPVNIMPSEPTLPMPPMLEMEPTSEREPLGGLKLLCALAEQRIQEEVVQGSSLFATPSSRTPTPTSLALGTTAATPPIFEAKSCYAFGQSQGSVFPSSTSSFQMPLSSPGFPSMQGIELPTTSAGIVAELTPVKRKKHKHSKSSGSDSRKSARCSKKSKKKRHHSSSRQQFSAPAEEDLDLQDDQLQSELRNALHAVDPSYAQRFGQEVFSIMDNSMRMRLAKITRQYRKKKRKLDEISKHKKKKKCSKQQLELQQQQASQQAVQPSSALQQPQMTLSSVLG

SEQ ID NO: 10045 - DNA, 4807 bp, DROSOPHILA
gacgttaaggaattgtggatacatctctgcacgatcgcacataccagtcatccatccatccatccatccatccatctatctatctatctcgatatctatgtgctcaagttcaacgggctcattatggatacagtatctcagtatctctgcgtagagcgtccatctcggccagcttcactcattacataatcaaggcttgacaagcgcagctcgcagataaagtagcactcctccttctctttggagccggcaatcaatcaagatcgtctggctaaaaatagagactgccaatcaatctgctgcactggccactgtacacatgtccattccatatatccacatatccagtcaacatccccatgccaataacgggcgccaaggattcacttggcacgccatccagcccagttcccatcatgaatctgctgttcttgggggacgtttggcgcctcgacggcgacaacttaatagccacctgcagacgtcgataaagatactgatcaggtgcagcggagcgggatggggccatagcccctgataaggctgcgtcatcgggtccaaagatagaccgatagaccagggatgcgaaacatgatatgggcccattcaaaactaattacagttcggcttgaatcactctcatggcgtgaatcagatttagggggcattgctctctagtactataacgatcattagagtcattcataaaagcatacatttttgctaaattaccaagattgtaattggcaaaaattggcaggtgatccagttgttacatttggcggtttcagatttagcaatggggaaagcaaacaaatactttaataatgaatacggaagaatttgaaaaaatgtcgtcagcgatcgagtgttatctactaaacaattaatatttgttgtcagattatcgggaaataccaaacaaatcaagaaaattgctataacttttaagtgctgcaaaatagaagagatcaggagacccaaactcaatcccaaatgaatgaaaccaattcagttcgaaaacagattcaaaagatattctcataagttaggtcatcttataacaattgtgtacttccccttagatttcatttagtgcaagataatccttttctgaaaatgaacttttttgctgaaatatatccgaataatcctactgcctttttggccgtgtgtccaatatacggctccctccgtctaataatacgaaattgtaatggatttgttttgttgccgctatttatagatcgctgcccgaggtgccgttccgcgggttatcgaatgtcacctacctaagcatcggcgacaacgacctcgacgagatcccgaagcacgccctgagccacatgccgagccttttgactctggacattgggcggtgcaagatacgggcggtgcagcaggaggacttccggggcatacagcgggtaacgaatctgattctggtgagcaacatcattacgcgcctggaccgaggatcctttcccaagagcctcctcatcctgcatctgggtagaaaccaactggagtcgctgaatggctcgcttcacgatctgcacaacttggagtctctgttcatcaatgcgaataatatcacatcgctggatgatgagctacccgatggagggcagttgcgcctcctgatggctcacaataataggttggaacgcctgccggccaatatggccggtatgcacagcctggagacggtccacatacactgcaaccagctgagatccttcgaccgtgtacttcgcaatgccgtcaatctgtccgaggtcatggccgataacaatgagctggagtacctggcccaggatgaattcgcctcctgctccaaggtggagaccctgcagatgggctgcaatcacatcaagtcgctcaactcctcgctactgcccatcctcaagctgaagaatgccaacttctcgttcaacgacatcgaagagttctccatggcggaactgcacggattgcgatcgctgaagacactccagctgtccagtaatcgcatccaacgactgctgcccgatccccggggagtgcaggagctgatgcttgtcaatctggatctggataacaatagaatcgactctctgaatggagctttggctggcttgggcaatcttcggatactcaatttggctggaaaccgattggaacatctccaggtgggcgatttcgatggcatgattcgattggacatcctcgacctgaccgggaatcagctagcggagctcaagcccttggaaatggtaagctactacatgttagaattacatatattgttcactaattcttattatttgtttgtagactttgttgcccagcctgaaaatccttaaggttgcgtacaacaatatcaccaagctggaacaggacttcaagggactgcccgtgctttgccaggccaacttgaccaataaccagatttcgaccatatcgagtgaactcgtcaccaacacgcgctgcaaaaatcacaatgttcccggcaaactggagatacatctagatggtatgtcatcaatgggtttctttcctatgaactcgaattgattctacttttttcaaaactagtatagaaatttatattttatcaagggcttatcaattgactgggggaatcgtaaatagttacaaaacaataatttagaatttaattgcgatattacagtgcacatgaagattaagattttatttaaaaggtagaataaagagggtttattgagtattaaatgaatagaaactgcgcatgcaaacaagtttctcgttcgttttaagctgaagtactatacatttgtgtttataataatcatgtaatataaatctataaactcaattattctttttccagacaatcccataatgtgtgacgtgggattgaacgagctgtgtcgattgatggccgttcaggaggcacgaattcgtggtcgatcccagtgctttgagaatgaccaggaggtgtgcaccgtgctcccgatgctatacaatgtgaacctgcccataatggtgaccaatctaaagttgacgggccgcgaggttccaaagccgatggttcgggtgatcgtaccatcgctgatcaaggccaataatgagctattaccgccacttattgccactctgggtaatccagtgctcattagcaccgatttggtcaatccggtgatatcgccactaccaccaccacttctgctggccaccacaacgccgccaccgcctctgccacttcctgtggaatcggaagttgagaagaatgagtctaccactgcgaatccagtgccaaccaattacacacaggagaccacgacaaccacaagtaccacaacgacgacaacaacaacggagaccagtagtcaggtggctcccatcgagattattacgactacagcacccacgacgactaccaccagcaccacaacaccgaaacccaatgaaacgctgcccgtgattgtggaactccaggatcccaatccaccggacactacagtcaatcaaactgccctcgttccgccagtggttctagatcccctgcagcaggatctggaaagggagagggaacgcgaaagggagcgagaactagagcgggatctggaccacgaggcggtggccaagaccgagtacgagacggtcgagtacatccccaatctggtgcagcctccagtgggcagtgatgcactgacgccgcctccgagcaaggcgaatgcgctggaggaggactccgagtcggtgcactctaactcagtgcacgcggagtatccccacgcggcgcagagcctccagattcccgaggaaccgccggaggagtgagtcctccgcctgggggtttggctcctcggggggaatcccccgaaaataaccacattattttactgtaaatcgcagagggatggaggcggtggaatcgatggagagcggacggagcagcatgcaaacggcggaaggagcgagtttcggatttgtatgccttaagttaacttagttcttatgttttatttaagccatcgctaaatcgaacagtttgtcagaccaaacgcttttttgttgagttttttcgtcgattttatgcaaaatttgatacgattactgggtttttgatgtaatcctgcattcgggacaaacgtacgaggacagtcttatgatttaagcttatttgttgggggctcaatttcgcgtatgtgtgctttggcgttggcaagcggaactctttcggttttcaatttcacggaattttaaactatttgcagaaaacaatccaaatatataaattatgtattttaaaatctcttaaatatctagagctgatacattgatacattgaaacacatcgaaatgggtgatatattttccgctggtttagtatgatcataaaaaataaattgaaacaaaccgtgaaattaaaaaacgaaagcaagaccgatagaaacaggaagttggcgatatcgaatatgcaactgcatatgcacattatatatatttaataactgtatacacgtatgaacgttgaacatctacaagtaggtacttagagttaaacgacagcaacaacaaatcgcatcgagctaatgttaataacgaaaagcactcactcacatacaaacacacaaaaccacacacacacaaacacagccgtagtcgtgcacatgcacaaactgaaaaaaatacgaataaaaaaaaacgagaaaatatattgttatcagttcgttaacaaaatgagaaaatagattttagcgtgtaattatacgaaaatgaaaatggtattctaaataaaatcataaataaaagtcgagtttgttgttctcttcttaaa

SEQ ID NO: 10046 - DNA, 2175 bp, DROSOPHILA
atgaaaccaattcaatcgctgcccgaggtgccgttccgcgggttatcgaatgtcacctacctaagcatcggcgacaacgacctcgacgagatcccgaagcacgccctgagccacatgccgagccttttgactctggacattgggcggtgcaagatacgggcggtgcagcaggaggacttccggggcatacagcgggtaacgaatctgattctggtgagcaacatcattacgcgcctggaccgaggatcctttcccaagagcctcctcatcctgcatctgggtagaaaccaactggagtcgctgaatggctcgcttcacgatctgcacaacttggagtctctgttcatcaatgcgaataatatcacatcgctggatgatgagctacccgatggagggcagttgcgcctcctgatggctcacaataataggttggaacgcctgccggccaatatggccggtatgcacagcctggagacggtccacatacactgcaaccagctgagatccttcgaccgtgtacttcgcaatgccgtcaatctgtccgaggtcatggccgataacaatgagctggagtacctggcccaggatgaattcgcctcctgctccaaggtggagaccctgcagatgggctgcaatcacatcaagtcgctcaactcctcgctactgcccatcctcaagctgaagaatgccaacttctcgttcaacgacatcgaagagttctccatggcggaactgcacggattgcgatcgctgaagacactccagctgtccagtaatcgcatccaacgactgctgcccgatccccggggagtgcaggagctgatgcttgtcaatctggatctggataacaatagaatcgactctctgaatggagctttggctggcttgggcaatcttcggatactcaatttggctggaaaccgattggaacatctccaggtgggcgatttcgatggcatgattcgattggacatcctcgacctgaccgggaatcagctagcggagctcaagcccttggaaatgactttgttgcccagcctgaaaatccttaaggttgcgtacaacaatatcaccaagctggaacaggacttcaagggactgcccgtgctttgccaggccaacttgaccaataaccagatttcgaccatatcgagtgaactcgtcaccaacacgcgctgcaaaaatcacaatgttcccggcaaactggagatacatctagatgacaatcccataatgtgtgacgtgggattgaacgagctgtgtcgattgatggccgttcaggaggcacgaattcgtggtcgatcccagtgctttgagaatgaccaggaggtgtgcaccgtgctcccgatgctatacaatgtgaacctgcccataatggtgaccaatctaaagttgacgggccgcgaggttccaaagccgatggttcgggtgatcgtaccatcgctgatcaaggccaataatgagctattaccgccacttattgccactctgggtaatccagtgctcattagcaccgatttggtcaatccggtgatatcgccactaccaccaccacttctgctggccaccacaacgccgccaccgcctctgccacttcctgtggaatcggaagttgagaagaatgagtctaccactgcgaatccagtgccaaccaattacacacaggagaccacgacaaccacaagtaccacaacgacgacaacaacaacggagaccagtagtcaggtggctcccatcgagattattacgactacagcacccacgacgactaccaccagcaccacaacaccgaaacccaatgaaacgctgcccgtgattgtggaactccaggatcccaatccaccggacactacagtcaatcaaactgccctcgttccgccagtggttctagatcccctgcagcaggatctggaaagggagagggaacgcgaaagggagcgagaactagagcgggatctggaccacgaggcggtggccaagaccgagtacgagacggtcgagtacatccccaatctggtgcagcctccagtgggcagtgatgcactgacgccgcctccgagcaaggcgaatgcgctggaggaggactccgagtcggtgcactctaactcagtgcacgcggagtatccccacgcggcgcagagcctccagattcccgaggaaccgccggaggagtga

SEQ ID NO: 10047 - protein, 724 aa, DROSOPHILA
MKPIQSLPEVPFRGLSNVTYLSIGDNDLDEIPKHALSHMPSLLTLDIGRCKIRAVQQEDFRGIQRVTNLILVSNIITRLDRGSFPKSLLILHLGRNQLESLNGSLHDLHNLESLFINANNITSLDDELPDGGQLRLLMAHNNRLERLPANMAGMHSLETVHIHCNQLRSFDRVLRNAVNLSEVMADNNELEYLAQDEFASCSKVETLQMGCNHIKSLNSSLLPILKLKNANFSFNDIEEFSMAELHGLRSLKTLQLSSNRIQRLLPDPRGVQELMLVNLDLDNNRIDSLNGALAGLGNLRILNLAGNRLEHLQVGDFDGMIRLDILDLTGNQLAELKPLEMTLLPSLKILKVAYNNITKLEQDFKGLPVLCQANLTNNQISTISSELVTNTRCKNHNVPGKLEIHLDDNPIMCDVGLNELCRLMAVQEARIRGRSQCFENDQEVCTVLPMLYNVNLPIMVTNLKLTGREVPKPMVRVIVPSLIKANNELLPPLIATLGNPVLISTDLVNPVISPLPPPLLLATTTPPPPLPLPVESEVEKNESTTANPVPTNYTQETTTTTSTTTTTTTTETSSQVAPIEIITTTAPTTTTTSTTTPKPNETLPVIVELQDPNPPDTTVNQTALVPPVVLDPLQQDLERERERERERELERDLDHEAVAKTEYETVEYIPNLVQPPVGSDALTPPPSKANALEEDSESVHSNSVHAEYPHAAQSLQIPEEPPEE

SEQ ID NO: 10048 - DNA, 3075 bp, DROSOPHILA
ctatttggatatgtagctaagcggatgtcacggaataaagcaatcttgtagcgaagatatgggaatacggacagcgaacagtagccgcattgaagggcacgcaatataagtatactatcactttcacagaaatcgttaattgtaaacattagtaatgcgccgaaccaataaaaatgttttctttgttcgtgcacatacgtatatagggatattatgaggtgtacatatgtatgtagcggtttgtgtgtatgtgtgtgtgcaatgaagtcaccttagttaattccttcagttaattaaattacacggctttatgattaaggtgcgcacgaaaatctttctttctactaatcttaacaatgcaattttgatgctaacactttcgagtggaggtatatatataggcgagcatataccctcgacaaacaatccgattacggagctacaaaccctcggtcccaaaacaggagagagtgaaaactaactgaaatatacaattaaaacgtaaacactcccactgacagcttatcagacttaatggcaaaacaatcgattgtagtcgatatgcagtgattccgaatgcaagttgggaacaagcgaatggaacaagaaattcatttaattttttaagtatgcagttaataaattaaactaaatataacttaattgttagttaagtcccgataagccgttatagtttaaaattgtattactcacatggtatgctgtaattgttggtcaattaaacgtgtgtagtcaggtataatgtggtgctggaattaatttaactacgattaacaaggtgctcatacaagtttactgattataattaatatcattatccccttaaatttgtatgcatatcctacaatgttctattgcatcgttccaaaaatgatagcatgcccgaatcccttatcgatacccgatacacagtttgtttgtgtctcccggcgtgccataactaactatcgggcatttctacttgtcatcattgagctcagcggcttgcatttcaaaagtcatggtaaagtgtttattgcgaataatggtgtgctaactgcatttgttacaaactcacatctttgctttcagtttcgcaaccagtacgatagcgatgttactgtgtggagtccgcagggacgtctccaccaggtggagtacgcaatggaggccgtgaaacttggcaccgcaaccgtgggcctgaaaaataaagattacgctgtacttgtcgccctgtgtaagccgacatcggagctatcggatacccagcgcaagatcatcccaatcgacgatcacctgggcatttccattgctggcctcacggctgatgcccgcgtccttagccggtacttgcgctccgagtgcctgaactacaagcactcgtacgatacaacctatccagtctcgcgtctgatcactaacctgggcaacaagatgcagacgaccactcagcgctacgatcgccgtccgtatggagtgggccttttggtcgccggctacgatgagaggggtccgcacatctatcaggtcacgccatcggcgacctttttcaattgcaaggccaattcgatcggatcgcgttcacagagtgcacgcacctatctggagaagaatttgaacaagttcttggacagttccaaagatgaaatcatccgtcacggaattcgcgctatactcggtaccctgcctacggatgagcaaggcaaagatgccggtcagtatgtaagttcattgcacatttcccgtcgcgaatagttagtaaattgtgtttttcttgcaggacatcactgtggccatcgtcggcaaagaccagccattcacaattctctctaataaagacagcgccaagcatgtggcgattgccaaagagaatgacaatgatacgcccaggaacgacgatgacgatgatcgcccatcccccccagaggaaccagcagccggaccacgcgacccagaagtcctggttgcaaccgagcagcgtccataggcatttatagggctatgaaagcatcttaaccattaaaaatgtaagattcaaggatacaataaaattgttcatgcatttgcatagatcctaaaacggaacaaactgaataaatgaatacaaaaaatcaatgttatgggtaaaattttttgattttaattttaaaccttcatttattatttatttatagtatttattaaatattggtttttcgatataagttttcccaacttatttgcatttttccgatttcacagttcggtcacactgttggattaaaaatatttatcaatgccggtattgaaacatttctactataaaaaaatgttgattgcttttagtgaatgacaagttatcctctaagatggtttttatgccaaataaaatgtgccacttcagcggcaacttgtatatttatttgctcacacctaaattacaattaattacataacgagagtgatggcaaatggttgatttaaataataaaattacatggttttctcatgagaaaataaaattgttggtgcctttgctgaagcgcacgtaaacagtatatgttagacttcagttttatttgtttaaaaagttgcttcgaaaagatgtaccattgtttacaggaggaacccatgttttggatgatagattaagcaacaggtgttgttttatagggttttattgccgaaaaagagtaaaacactttaattaaacgttgatccttgttctcggtttttgcagacaagatgactttgcccgatcttgtagctggactttcgtcaaatccctactttggtgccggttttggactatttggtgtgggcgccgctgctgccatattgcgcaagggcctccagggcggagtgatactgttccggcggcactgcatgattaccctggaggtgccgtgtcgggacaaatcctatcagtggctgttaaaatggattacgatcagaggagcgcgaaaaacgcaacacttgagcgtggagacaaactttgtgcagaacgacaatggcacaatcaaaaccagctatgacttcatacccagcataggcaagcatctgttccagtacaagggcaattggattcaggtggag

SEQ ID NO: 10049 - DNA, 949 bp, DROSOPHILA
gcggcttgcatttcaaaagtcatgtttcgcaaccagtacgatagcgatgttactgtgtggagtccgcagggacgtctccaccaggtggagtacgcaatggaggccgtgaaacttggcaccgcaaccgtgggcctgaaaaataaagattacgctgtacttgtcgccctgtgtaagccgacatcggagctatcggatacccagcgcaagatcatcccaatcgacgatcacctgggcatttccattgctggcctcacggctgatgcccgcgtccttagccggtacttgcgctccgagtgcctgaactacaagcactcgtacgatacaacctatccagtctcgcgtctgatcactaacctgggcaacaagatgcagacgaccactcagcgctacgatcgccgtccgtatggagtgggccttttggtcgccggctacgatgagaggggtccgcacatctatcaggtcacgccatcggcgacctttttcaattgcaaggccaattcgatcggatcgcgttcacagagtgcacgcacctatctggagaagaatttgaacaagttcttggacagttccaaagatgaaatcatccgtcacggaattcgcgctatactcggtaccctgcctacggatgagcaaggcaaagatgccggtcagtatgacatcactgtggccatcgtcggcaaagaccagccattcacaattctctctaataaagacagcgccaagcatgtggcgattgccaaagagaatgacaatgatacgcccaggaacgacgatgacgatgatcgcccatcccccccagaggaaccagcagccggaccacgcgacccagaagtcctggttgcaaccgagcagcgtccataggcatttatagggctatgaaagcatcttaaccattaaaaatgtaagattcaaggatacaataaaattgttcatgcatttgcatagatcc

SEQ ID NO: 10050 - protein, 279 aa, DROSOPHILA
MFRNQYDSDVTVWSPQGRLHQVEYAMEAVKLGTATVGLKNKDYAVLVALCKPTSELSDTQRKIIPIDDHLGISIAGLTADARVLSRYLRSECLNYKHSYDTTYPVSRLITNLGNKMQTTTQRYDRRPYGVGLLVAGYDERGPHIYQVTPSATFFNCKANSIGSRSQSARTYLEKNLNKFLDSSKDEIIRHGIRAILGTLPTDEQGKDAGQYDITVAIVGKDQPFTILSNKDSAKHVAIAKENDNDTPRNDDDDDRPSPPEEPAAGPRDPEVLVATEQRP

SEQ ID NO: 10051 - DNA, 4818 bp, DROSOPHILA
tagcgattggaagtcagcatttttagtctcgtccttgaggttccagtactgctcaaccacccgctcgcactcctccaaaatggtgtccttcgaaggcagcttatgggctaacaatttaaattagaactgcaaaccacttacatgttcactgaaaatcgccgagttgacatcgatcacaatccgtttggtaatccgacgcagctccaggcccaatttgccgatttccgcgaacgtgtgcatcggctgggatttgttgcggcagtaccacttcggtgtggtgctcattttcggtggcgcctatccgccggaggcggaaccacgccaagccccctacccactaaccactggcttcctaaatccacctggttctagacaaatcgctttttaattattgtgtcttccaggcacgcatccatccgcacactcgccaacccgcttctttcctatctcccaagcctttcgaatgcaaattttccttctgttggatcgatggcgagtctcgtgacccccgcagccaggcaacgcacgcatctgacagcgggtggagacccggaaagggtacggaatatccacggaaattgggggtgctcaagctcccgagtcgtggcacccatgtgtgcccattgaacatcatcgacagacacgcattcgtcggcctgctcgttatgcaaatgggttatggggtcggttggggaaaccccaaacaaaatgcttgtctagcgatgtcataaccagaaacggctcagtagtcagttttgcctcgcgaacttcatcagaacttgtacggttgaaagttagatacccgacgataacctactagtcgtatacgtaatatcggtagatccacattgaacttccaatacattcttaaatataatttatactggtataaaaatattattttattgtggagttataggtgtatcattgatacagggccagcatatttcagctaagatagaaatgcaaattgatattctggcacataatccggaccgatctaagcctgactgtcctgagctaagttggcattattggtaacagcctggactggtgctctcggtgtaggtttgtccttcttcgtgttggccaggaaacccttggctatccaggagcacacaagcagcagaatgataaagacatgggataccaggaggcggtctaacgattctcgcaccttctccaaggaaccacgattgatcacaaagtagcagaagtacaagctcatggcgtcgttcatcaggaacaggcagatgaagatagaccggacattctttcggccaaaggataccaatgcgtatatgctcgacatgacaatgattgatggaatgaatatctttagcaggataaaggccacaagcatgtgcagatggaattgtggaaagaaaagtcgcgatgtcatgggtttgaatgtaaagttaaagaaccagtggccagttccaaaaaaggatatatagaggtacaggagtatcagtgccgcatagcgataggattgccttacgtgctccagcggattgttaggactttcatttcgagactcctctaatccttggttgttctgctgctggtttgcaatcgcatccttaagatttgcgtaactgaagctctcctcgtagagctccagtcctagcacaaactccgtgaccatgatctgaacaaagagcgaaccgattgaagtggtcagcattatgtgcaccgtcagcatattgaagattatcagttccaagcgtcgcctaagatcctttgttccactatatgggattgaaaggaaggcgaagagaaggtatgaccaacatgcagcatacacataggtgcagactggctgatccgcatcccattgatagattccgtaggctgtaaccagtagagcggccatgttgacgatccaaactcgtgtggagtgctgatgccccaggatcagaggacgaatgatggataagatcatgctgaagtagaccacatggctatttccaatgtaaactccaatggtatcggtgatgaagtgcaggctcgcgctctgtttgaccaacaggattccactcagcaggaagacaagtgcaagccagaaaattaacttcaaggagggtctaaagaaggctctacgattgttgaggcacactatcggcaagtagaggagcccgatgtgactgttgtggaaggccatcaagattagtagaacaccgggcataacgattccaaccaggtgaaggactgggaactggcacattaaatccctatcctgacagggacgttcagccagggccaagatgaggattccgaagggcagaagcagatagaaggccgtcaagtggggcaccctctgcaatatcattagctccaggagcaccaatcctcccaagcacatcatcaaagtggtccatgttagatagcccttacgctcagatttcggatgatttgactcccgtgccagtcgcaccagcagaaggtaaaaccaaaccagataagaggcagtggtggccaccagcaggggcaggtgatagtacccatggtagtactccatgcattcctgagccaacttggcgattttatggctcacctttagtgcctcctcgtactgttccttggccaccagatacttaattatctgcggatagttttctatctctgccgagcccagactttcaaatttgggcagcaacagataaagtataccgtcctcatgtcgctttatcagaatcctggcctgcgccagcaactgcatcgcgttcaggtggagaacctgcagttcgtactgaacgctggtattcaggaatccgagaggcatcagggccatgttgttcattggaggtggtaggccaataagggcggacataaggggcgccaactgaatttgttccagctggtataatggcaggatgggaccattttcaccggcagtgaaattctggccgggattcggcgccgagcgcttaacaccagcaccccaaaggatgaacggggtttccactccgcgctcacctccaccaccgtgcagacctaaaatatacgggggattcatgggtaattggtacactcataaatgaactcaactcacttatcccataatccgccgtcatcaggtaagcggtgcgactgtcattgaaaacgctttcgaagagttcataggtctgccgaatgccacgttgggtgtagtttaacttttcccggaaattcagactgttgggcatgtggacatgctcggcaaggtcgatatcggctagatacacaaagaagatcaccgaggtagcatcccgcaatggctgcacattttgttcattggtcatgaagttgcgcaccttgtcaaaagtccactgatccaatctgagcctgtccgaaatgtccgatctggcgaaggtttcaaaacgcagtggagctccgccggtgggcaggtgagtgaataccttggccacttcggcctgcatccaacctatggcgttcctgctcctattgaagacgctatcaaaagtggacggattccaggtgagcgttgcagcaggatcttcgttgaaaccgccaaagatggcgatgtgacccggtcgagttacagtgggtgggcaagcccgcgagatgccaaccaatgcctgttcaacgaacagctcccggaggtcaggaactgcactgcagtggtcagccaaaacggattgcgccctcagtccatcgaccacgaacactaccaatcgatccgccggcggttccaaacccaattcgcgcagcgtgctcagcggttcgagatccgacaagatggtcgattggaagtagatgctcagtatggaaccgagcagcagcagatgcaccaccaaggcctgaatactccacatgtttgcagtgtgacaaatgtgtaaactgttctcagtgtacaaatgtatgaatgtaattatttgaattaaatttcaaggattgtctgaaacgtcgaacgaaaatgggagttttcaatttccgagaaaaccaattgaaaatacaagtaagagcagtgatttcaatatatccggcaagtttattgatgtaattaaagataggtttgattttatacgttgctgttcatcttgaataaaacaaactgtaaatattcaacacacacattctgcttgatctcttatttatcatctatacttattctctcctctgtacacatcaacatctggttttgttttgctatcacattgaattgttacatttatagtagtagttgctgcatgttgcctgcttaaaatctttaaaacacgttctaaatttcatctgaaacatgtaggtatacacgccaattaacaagtgtatcccatatcctgtagctatagcttctgatccaagagtttgttctgtttgttggttggtttgtatgttgcttgtgttatgttgggtgtgttatgtttggtgtgttgtgtccaaagggtcaaaagggtccaagggatgtagaagcacacatttcgtttgtaaactttcggtgaacttgaagtgaatcaacattttcgacatcgaagcgccttttttgttttgttgttttgtttttacaaaattaaacttaaaattgcttgcgcttctcgtaactacacattaatttagtagttgttgcttagttccttgttctctctcttgtttttactctcgccagtgttctttttgtttgctttttttttttgagttcacgaaatacgtaatgcattttaaaatatatagaaataatatttgtatacatataggtatatatctgcttcatctgttcacgtatagtaaaatatatgtataatgtatatatattgtatatatatagatctgtatgcactatgcctaaccacggctatccacttttcgcttaatcct

SEQ ID NO: 10052 - DNA, 2760 bp, DROSOPHILA
atgtggagtattcaggccttggtggtgcatctgctgctgctcggttccatactgagcatctacttccaatcgaccatcttgtcggatctcgaaccgctgagcacgctgcgcgaattgggtttggaaccgccggcggatcgattggtagtgttcgtggtcgatggactgagggcgcaatccgttttggctgaccactgcagtgcagttcctgacctccgggagctgttcgttgaacaggcattggttggcatctcgcgggcttgcccacccactgtaactcgaccgggtcacatcgccatctttggcggtttcaacgaagatcctgctgcaacgctcacctggaatccgtccacttttgatagcgtcttcaataggagcaggaacgccataggttggatgcaggccgaagtggccaaggtattcactcacctgcccaccggcggagctccactgcgttttgaaaccttcgccagatcggacatttcggacaggctcagattggatcagtggacttttgacaaggtgcgcaacttcatgaccaatgaacaaaatgtgcagccattgcgggatgctacctcggtgatcttctttgtgtatctagccgatatcgaccttgccgagcatgtccacatgcccaacagtctgaatttccgggaaaagttaaactacacccaacgtggcattcggcagacctatgaactcttcgaaagcgttttcaatgacagtcgcaccgcttacctgatgacggcggattatgggataagtctgcacggtggtggaggtgagcgcggagtggaaaccccgttcatcctttggggtgctggtgttaagcgctcggcgccgaatcccggccagaatttcactgccggtgaaaatggtcccatcctgccattataccagctggaacaaattcagttggcgccccttatgtccgcccttattggcctaccacctccaatgaacaacatggccctgatgcctctcggattcctgaataccagcgttcagtacgaactgcaggttctccacctgaacgcgatgcagttgctggcgcaggccaggattctgataaagcgacatgaggacggtatactttatctgttgctgcccaaatttgaaagtctgggctcggcagagatagaaaactatccgcagataattaagtatctggtggccaaggaacagtacgaggaggcactaaaggtgagccataaaatcgccaagttggctcaggaatgcatggagtactaccatgggtactatcacctgcccctgctggtggccaccactgcctcttatctggtttggttttaccttctgctggtgcgactggcacgggagtcaaatcatccgaaatctgagcgtaagggctatctaacatggaccactttgatgatgtgcttgggaggattggtgctcctggagctaatgatattgcagagggtgccccacttgacggccttctatctgcttctgcccttcggaatcctcatcttggccctggctgaacgtccctgtcaggatagggatttaatgtgccagttcccagtccttcacctggttggaatcgttatgcccggtgttctactaatcttgatggccttccacaacagtcacatcgggctcctctacttgccgatagtgtgcctcaacaatcgtagagccttctttagaccctccttgaagttaattttctggcttgcacttgtcttcctgctgagtggaatcctgttggtcaaacagagcgcgagcctgcacttcatcaccgataccattggagtttacattggaaatagccatgtggtctacttcagcatgatcttatccatcattcgtcctctgatcctggggcatcagcactccacacgagtttggatcgtcaacatggccgctctactggttacagcctacggaatctatcaatgggatgcggatcagccagtctgcacctatgtgtatgctgcatgttggtcataccttctcttcgccttcctttcaatcccatatagtggaacaaaggatcttaggcgacgcttggaactgataatcttcaatatgctgacggtgcacataatgctgaccacttcaatcggttcgctctttgttcagatcatggtcacggagtttgtgctaggactggagctctacgaggagagcttcagttacgcaaatcttaaggatgcgattgcaaaccagcagcagaacaaccaaggattagaggagtctcgaaatgaaagtcctaacaatccgctggagcacgtaaggcaatcctatcgctatgcggcactgatactcctgtacctctatatatccttttttggaactggccactggttctttaactttacattcaaacccatgacatcgcgacttttctttccacaattccatctgcacatgcttgtggcctttatcctgctaaagatattcattccatcaatcattgtcatgtcgagcatatacgcattggtatcctttggccgaaagaatgtccggtctatcttcatctgcctgttcctgatgaacgacgccatgagcttgtacttctgctactttgtgatcaatcgtggttccttggagaaggtgcgagaatcgttagaccgcctcctggtatcccatgtctttatcattctgctgcttgtgtgctcctggatagccaagggtttcctggccaacacgaagaaggacaaacctacaccgagagcaccagtccaggctgttaccaataatgccaacttagctcaggacagtcaggcttag

SEQ ID NO: 10053 - protein, 919 aa, DROSOPHILA
MWSIQALVVHLLLLGSILSIYFQSTILSDLEPLSTLRELGLEPPADRLVVFVVDGLRAQSVLADHCSAVPDLRELFVEQALVGISRACPPTVTRPGHIAIFGGFNEDPAATLTWNPSTFDSVFNRSRNAIGWMQAEVAKVFTHLPTGGAPLRFETFARSDISDRLRLDQWTFDKVRNFMTNEQNVQPLRDATSVIFFVYLADIDLAEHVHMPNSLNFREKLNYTQRGIRQTYELFESVFNDSRTAYLMTADYGISLHGGGGERGVETPFILWGAGVKRSAPNPGQNFTAGENGPILPLYQLEQIQLAPLMSALIGLPPPMNNMALMPLGFLNTSVQYELQVLHLNAMQLLAQARILIKRHEDGILYLLLPKFESLGSAEIENYPQIIKYLVAKEQYEEALKVSHKIAKLAQECMEYYHGYYHLPLLVATTASYLVWFYLLLVRLARESNHPKSERKGYLTWTTLMMCLGGLVLLELMILQRVPHLTAFYLLLPFGILILALAERPCQDRDLMCQFPVLHLVGIVMPGVLLILMAFHNSHIGLLYLPIVCLNNRRAFFRPSLKLIFWLALVFLLSGILLVKQSASLHFITDTIGVYIGNSHVVYFSMILSIIRPLILGHQHSTRVWIVNMAALLVTAYGIYQWDADQPVCTYVYAACWSYLLFAFLSIPYSGTKDLRRRLELIIFNMLTVHIMLTTSIGSLFVQIMVTEFVLGLELYEESFSYANLKDAIANQQQNNQGLEESRNESPNNPLEHVRQSYRYAALILLYLYISFFGTGHWFFNFTFKPMTSRLFFPQFHLHMLVAFILLKIFIPSIIVMSSIYALVSFGRKNVRSIFICLFLMNDAMSLYFCYFVINRGSLEKVRESLDRLLVSHVFIILLLVCSWIAKGFLANTKKDKPTPRAPVQAVTNNANLAQDSQA

SEQ ID NO: 10054 - DNA, 3766 bp, DROSOPHILA
ctatcggatacccagcgcaagatcatcccaatcgacgatcacctgggcatttccattgctggcctcacggctgatgcccgcgtccttagccggtacttgcgctccgagtgcctgaactacaagcactcgtacgatacaacctatccagtctcgcgtctgatcactaacctgggcaacaagatgcagacgaccactcagcgctacgatcgccgtccgtatggagtgggccttttggtcgccggctacgatgagaggggtccgcacatctatcaggtcacgccatcggcgacctttttcaattgcaaggccaattcgatcggatcgcgttcacagagtgcacgcacctatctggagaagaatttgaacaagttcttggacagttccaaagatgaaatcatccgtcacggaattcgcgctatactcggtaccctgcctacggatgagcaaggcaaagatgccggtcagtatgtaagttcattgcacatttcccgtcgcgaatagttagtaaattgtgtttttcttgcaggacatcactgtggccatcgtcggcaaagaccagccattcacaattctctctaataaagacagcgccaagcatgtggcgattgccaaagagaatgacaatgatacgcccaggaacgacgatgacgatgatcgcccatcccccccagaggaaccagcagccggaccacgcgacccagaagtcctggttgcaaccgagcagcgtccataggcatttatagggctatgaaagcatcttaaccattaaaaatgtaagattcaaggatacaataaaattgttcatgcatttgcatagatcctaaaacggaacaaactgaataaatgaatacaaaaaatcaatgttatgggtaaaattttttgattttaattttaaaccttcatttattatttatttatagtatttattaaatattggtttttcgatataagttttcccaacttatttgcatttttccgatttcacagttcggtcacactgttggattaaaaatatttatcaatgccggtattgaaacatttctactataaaaaaatgttgattgcttttagtgaatgacaagttatcctctaagatggtttttatgccaaataaaatgtgccacttcagcggcaacttgtatatttatttgctcacacctaaattacaattaattacataacgagagtgatggcaaatggttgatttaaataataaaattacatggttttctcatgagaaaataaaattgttggtgcctttgctgaagcgcacgtaaacagtatatgttagacttcagttttatttgtttaaaaagttgcttcgaaaagatgtaccattgtttacaggaggaacccatgttttggatgatagattaagcaacaggtgttgttttatagggttttattgccgaaaaagagtaaaacactttaattaaacgttgatccttgttctcggtttttgcagacaagatgactttgcccgatcttgtagctggactttcgtcaaatccctactttggtgccggttttggactatttggtgtgggcgccgctgctgccatattgcgcaagggcctccagggcggagtgatactgttccggcggcactgcatgattaccctggaggtgccgtgtcgggacaaatcctatcagtggctgttaaaatggattacgatcagaggagcgcgaaaaacgcaacacttgagcgtggagacaaactttgtgcagaacgacaatggcacaatcaaaaccagctatgacttcatacccagcataggcaagcatctgttccagtacaagggcaattggattcaggtggagcggaccagggaacaacagacattggaccttcacatgggtgttccttgggagacagtgacgcttacagcgtttggtaacaataaaggtatatatttcgatatcctcgaagaggctaggcagctggctctggaggccacagagggcaaaaccgtgctgtacacagcgatgggtgcggaatggagacccttcggacatccgcgcagaaggcgtcccactggatcggtggtgctggatcgcggaacttcgcagcgaatcattgccgactgccaggacttcattaagagctctctgtggtatacgcaacgtggaatcccctaccgaagaggctaccttctgtacgggccacctggttgtggcaagtctagctttataaccgccctggcgggcgaactggagtacagtgtctgcctgctaaacctatccgaaagaggcctcaccgatgatcgactcaatcatctcctgaatgttgcgccagagcagagtatcattctgctggaggacatcgacgcagcattcgtctcgcgcgaagctactccgcagcagaaatccgcctttgacggtctcaacaggataacgttcagtggactcctaaattgcttggacggtgtgggctccacggaggccagaattgtcttcatgacaacaaactacattgaccgcctcgatcccgccttagttcgtcctggtagaatcgatttaaaggaatacattggctattgtacgcaatatcagttggaggagatgttcaagaacttcttcgccagcagtgacaccacaaaagccgaggagttcggaaaacgagtgaattcctttggacgctccgctagtccggcgcaaattcaaggctttttcatgaagcacaaactgtcctcgccgcaaactgttattgattcttgtgaagatatctgggaaaatgttttagatcataataaaaagattaattgaattgttgtggattttgtttacttgaagctctttaagacaagactgatgtcccttttgggtcttaattaattaaaacatctatcaattttactgtcattcgatattagtttatgtcattgttttcgaatttatttcatttttcaatgatttaagattatccattcgtttttatgcatagttgcacgtgtaattcccaatcgaactcacctaaatgaaggtcttgttttatattatgatttaattacatttttataggtaatttaaaaatatgaactatgttctaaaatatatgtatattttatgtgacattaagtttgattagtcctttgatcttctgggcctaccgacctttcctttcctttgtccaagcgttccattcgagttggcggggcccttaagtaatttgtgccaatcttgttcacacaccaagctagctcctaacatagtatacctgcaaaaagaaaaagcaattccatttcaaattcgctcttcactgcagtgtgttgttaggcatacctatcaccaggacgcagactggatccacacttagcacaactaaagcaccttagatgaaatacgcaattaattatttgtttttgttgattttgtaaatcgatattatttattccagtaagtgctttcgctaccagttcacttggcggtatagtttctccgcagccagaacaaactccggagcacccgaacatgctggaaaataaatgtgaacttgaacacaaggaacataatctaaagagtatctaaatggttgacgccattaagtaggcaacatgtttttaaggaagctgaaataatcttttcagtcgaatgcgtgcgtacctggaatagtcctttttgcaaagaatcaggcctcgcctcgtaaaacagctggaacccacttctgctagcatagctccacagcagtgacatttaaggcagccattgtgccagtatctgtccaaagcgtataaaagatatctatcacttattttatctgcaagcg

SEQ ID NO: 10055 - DNA, 1328 bp, DROSOPHILA
ttggattaaaaatatttatcaatgccgacaagatgactttgcccgatcttgtagctggactttcgtcaaatccctactttggtgccggttttggactatttggtgtgggcgccgctgctgccatattgcgcaagggcctccagggcggagtgatactgttccggcggcactgcatgattaccctggaggtgccgtgtcgggacaaatcctatcagtggctgttaaaatggattacgatcagaggagcgcgaaaaacgcaacacttgagcgtggagacaaactttgtgcagaacgacaatggcacaatcaaaaccagctatgacttcatacccagcataggcaagcatctgttccagtacaagggcaattggattcaggtggagcggaccagggaacaacagacattggaccttcacatgggtgttccttgggagacagtgacgcttacagcgtttggtaacaataaaggtatatatttcgatatcctcgaagaggctaggcagctggctctggaggccacagagggcaaaaccgtgctgtacacagcgatgggtgcggaatggagacccttcggacatccgcgcagaaggcgtcccactggatcggtggtgctggatcgcggaacttcgcagcgaatcattgccgactgccaggacttcattaagagctctctgtggtatacgcaacgtggaatcccctaccgaagaggctaccttctgtacgggccacctggttgtggcaagtctagctttataaccgccctggcgggcgaactggagtacagtgtctgcctgctaaacctatccgaaagaggcctcaccgatgatcgactcaatcatctcctgaatgttgcgccagagcagagtatcattctgctggaggacatcgacgcagcattcgtctcgcgcgaagctactccgcagcagaaatccgcctttgacggtctcaacaggataacgttcagtggactcctaaattgcttggacggtgtgggctccacggaggccagaattgtcttcatgacaacaaactacattgaccgcctcgatcccgccttagttcgtcctggtagaatcgatttaaaggaatacattggctattgtacgcaatatcagttggaggagatgttcaagaacttcttcgccagcagtgacaccacaaaagccgaggagttcggaaaacgagtgaattcctttggacgctccgctagtccggcgcaaattcaaggctttttcatgaagcacaaactgtcctcgccgcaaactgttattgattcttgtgaagatatctgggaaaatgttttagatcataataaaaagattaattga

SEQ ID NO: 10056 - protein, 431 aa, DROSOPHILA
MTLPDLVAGLSSNPYFGAGFGLFGVGAAAAILRKGLQGGVILFRRHCMITLEVPCRDKSYQWLLKWITIRGARKTQHLSVETNFVQNDNGTIKTSYDFIPSIGKHLFQYKGNWIQVERTREQQTLDLHMGVPWETVTLTAFGNNKGIYFDILEEARQLALEATEGKTVLYTAMGAEWRPFGHPRRRRPTGSVVLDRGTSQRIIADCQDFIKSSLWYTQRGIPYRRGYLLYGPPGCGKSSFITALAGELEYSVCLLNLSERGLTDDRLNHLLNVAPEQSIILLEDIDAAFVSREATPQQKSAFDGLNRITFSGLLNCLDGVGSTEARIVFMTTNYIDRLDPALVRPGRIDLKEYIGYCTQYQLEEMFKNFFASSDTTKAEEFGKRVNSFGRSASPAQIQGFFMKHKLSSPQTVIDSCEDIWENVLDHNKKIN

SEQ ID NO: 10057 - DNA, 4355 bp, DROSOPHILA
tctgtaagataattgacatgacgaagagtgtctcgcaaacatttgaattttaacaaaccgaacgccgataaacaatctgagtctgcttttcgctccacttgaacttgtgcttggccatggctgcctcttttttcagttcctccacaatggccggcatctccagcgctatcttttcaattctggcggtgattttgtgctggtaaatggtcagaggcagggtgaccacgctccgaaaaaggaaagtggacagcacgatggacgcccaccagggcaggccactgtagtcgtggatcttaatgagaacatcctgcatataggccaccggcgtgctgttggacaaggtctgccaatatcccaccaatccaccggcatttgccagttggacactcgcggccgccgcttctgtagacgacagacgatgattgcatgtgtgattcgcaatagttgttccttggtatgtgtatttgtagatgccagcaattgatgaacttctacaggtgcgtaaaagaagcaaagctgacatttttaattaatataaaactaataatcaacgtaaacaactatatagaatcagcagtgcgagttgttatcattgtgaacagctgattgttaccataacacggcttcaatcagtgtggccgtagctaggcattgtagttgcattaacccttaacttacgatgctttttttgctatccgaaattaggaaacattgaaatgcagttattaatttgaaatcatttaatcgttgataagagaacaataacaaaatttatacagtcattttatacgacagcaacacttttatttcctttgcatttttactcactttgaaatttctaaattaataattatctcggcttacttaaaatggctagacctaatttaagtgcataaattgttttttaattgacgtttaatttcatacgtatatgcttaagataaaattgtgcttgtattcatatttgttttcttggtcttggcatatttgcgacctcgtgcgacggtcactctaatttggcattttaaattgtgcagcgtactcggctgcacttgcaacttttcattgtttgaaacgcaattaacatttaaatcgagtaatgaattttagccaacgccaaccagaatggcacagaataccatcggtggcactaaatcacatattcgactatctaaatccccaggatcgtcggtcggcagcgggtgtatgtttttcttggagacatgccttatttcaaaaacggtaagtttgtcactgtgtgggtgtgtccgtatccgtgtgggtgtaggtatttgtgtatgtggctgaaatgtttaatttcagtacttattgggtatatttcctttgttattgccccttacattatatagccgtgggttaatcaagcgcaaaaaaacatctgtgcaagcaagaacgaatcgtagaccccaaaacttgttcgacatttatatgttgtactcttcgcatttggcaagctttcaatgtgtgggggcaagcacctaggtccgtttgtttatattagtgttgaaaaaaggggaaagtccacgataagaggaattcccctgccaataaatgcaattaattaaattaattgatgcgataagctgtgagctgtaaattgcgatcttagcgattgcgagaaagatacttatttttcttaccttttctatgctgattcatttattgtatttatagtaattttcctatgttatttaaattaattatattggtcttttggactaacaaatagaaaagaaataagcccaattttgtaatttagtatttacatctatatataattaatcattacctatttttcacccctcagctattttagaaactttcgctttcaattggatgtgggatgcgatgatcagttggccttcttccatcgctccatggccaacttggccatggaactgatagtagtcttcgactttcaaaatgcagttcacatccagaaaatgcgaggacttctatacaagtaagtttgctttagaaaacccaatgaggactcaacctaaccattttccatcccacagagtggcgcactgtgataacatccagaaattgcgtttccaaacccacaatgtcggccttgttgccatcggaaacatgcatagcgagcacttgttggccatcgaacagtatgtaccattagaaataaataaaaagttcaatagttagatatcctgacaatcccaacagatgctttgtggagccgttgattctgtttttaagccgcaagcgtcagccctgccagcttctggaccttggagccatcgaggccctctcatactatggccatgattttctaaaggctatgggaaaaccacaggaactgctgcagctgacactcgcgagcatcaagtacgatcctagtcactatcccatcctctcgttggactcgaccctgctgcagaaatgcgccgccctgcaggtgctctccctcgactacgacacactttctgacgaactgctgcacactatccaggtgcttccgctgcggaaacttttgatcgcagtgcacggcctggatagcgaagagcatcccgatgtgtcggagacggcctggtccaacttttcggatcacttttcgagcattgagttggtgctgacccttgtgtatgcctatgaggccatcgcactactgcagcatcgtgtgctgcgtagcaatatgcctgtaacccatgtgcgactgctattctgcgaaaagatgaacgccgaagccttggactggatgtcgttgcattacagggaaactctgcgcagcattcactatgtggacgcgccgtacaaatattccaatcgcatgaactccagtcgccgtgtctctttactccaggatccattcgtaatgatggcctggcgctgcaaacagctggaggagatcgtagtgcacgggtacttgatggatccgcataacctcgtgggcattgcccgtcttcggggtcggcagctaaagcgtctggaagtctccatgatcgattggtcaggcgctcctttgctgaacgcctacaatgaagtgagttctttaaaacgtcctgtaactaaacgagtaacttaattgattatccttcaggagataagcaccttactgggacaacaatggtcacccatcagctttgacaaaatgccgccatcgttgttctacgacaacgatttacgcgatcagttcgtgtacgaaatgctgcgccaggatctccgccagtaagtggtcgaaataggaaactactcaaatataaccaaaaattgaagcagtcatcaagtgaacgaaagaaatgaaaacatgacacgtgatcaactcgagcgcatagaaattaatttataaattgcaaaacctaattacgtagctaaacaaaaaacccaaaagaataatgtaagcaaaaagaaaatttaatcgtcataatcgtcaccaaaccttttgattggcgagcatttcatagatgttaaattttcctaatttcttagcctttgtaatcaaaatcgcgattagcccttgtttattagtacaaaagcgacagatcaagagcgacaggaatgttaggagcaaagcaaaagacttgagcacttcacaaatttatgtaattatgtaacggggcgagatgagtttgttgaaacctgctagagaaacatcattttataagcaacaacaactgtgattcaagcgaatgcagcagatgcaaatgcaagccagtgtgaaagcaaatgctatacccagctctcatacaaagaataacaaaaacgacaacagcaagttgttaagcgaattgtctagttagctaagtttaaagtaacaaaaagtgttgaaaatgtttgtaaaaccaaaactacgaccaatgtcaaattgtttgctcaaaacgacgcaattggcacaaattgttaacctttgtagtagtgtgaataagtacagaatctggcgctcaattgtgataaaccaacaaacaacaacataagcaaatgtaacaacaacgagagctagatcctcgttcgctaagcgccgccatttgtgtagtttaaagtgatattaccagcaacagcaaagcaaaatgtaagcaaatacaaaacaccacacagatatatatgtattgtatgtaatagccaaatggagctaaggaaatagctgtcgtgcgtgtggtgcatgcgttgtggccagataaacgggccaaaaagccaggcaattataagacccaaatccaactcttaagtattttgtagcacaggcattaattatacaactatgtactatatttaacctatgtttgcacaaaacagcagcgtgttgttacgagccgcggctcatcctccgcagacatgcttgccgaccaacaagtacaacagcaacaatgacaaca

SEQ ID NO: 10058 - DNA, 1593 bp, DROSOPHILA
cgacggtcactctaatttggcattttaaattgtgcagcgtactcggctgcacttgcaacttttcattgtttgaaacgcaattaacatttaaatcgagtaatgaattttagccaacgccaaccagaatggcacagaataccatcggtggcactaaatcacatattcgactatctaaatccccaggatcgtcggtcggcagcgggtgtatgtttttcttggagacatgccttatttcaaaaacgctattttagaaactttcgctttcaattggatgtgggatgcgatgatcagttggccttcttccatcgctccatggccaacttggccatggaactgatagtagtcttcgactttcaaaatgcagttcacatccagaaaatgcgaggacttctatacaaagtggcgcactgtgataacatccagaaattgcgtttccaaacccacaatgtcggccttgttgccatcggaaacatgcatagcgagcacttgttggccatcgaacaatgctttgtggagccgttgattctgtttttaagccgcaagcgtcagccctgccagcttctggaccttggagccatcgaggccctctcatactatggccatgattttctaaaggctatgggaaaaccacaggaactgctgcagctgacactcgcgagcatcaagtacgatcctagtcactatcccatcctctcgttggactcgaccctgctgcagaaatgcgccgccctgcaggtgctctccctcgactacgacacactttctgacgaactgctgcacactatccaggtgcttccgctgcggaaacttttgatcgcagtgcacggcctggatagcgaagagcatcccgatgtgtcggagacggcctggtccaacttttcggatcacttttcgagcattgagttggtgctgacccttgtgtatgcctatgaggccatcgcactactgcagcatcgtgtgctgcgtagcaatatgcctgtaacccatgtgcgactgctattctgcgaaaagatgaacgccgaagccttggactggatgtcgttgcattacagggaaactctgcgcagcattcactatgtggacgcgccgtacaaatattccaatcgcatgaactccagtcgccgtgtctctttactccaggatccattcgtaatgatggcctggcgctgcaaacagctggaggagatcgtagtgcacgggtacttgatggatccgcataacctcgtgggcattgcccgtcttcggggtcggcagctaaagcgtctggaagtctccatgatcgattggtcaggcgctcctttgctgaacgcctacaatgaagagataagcaccttactgggacaacaatggtcacccatcagctttgacaaaatgccgccatcgttgttctacgacaacgatttacgcgatcagttcgtgtacgaaatgctgcgccaggatctccgccagtaagtggtcgaaataggaaactactcaaatataaccaaaaattgaagcagtcatcaagtgaacgaaagaaatgaaaacatgacacgtgatcaactcgagcgcatagaaattaatttataaattgcaaaacctaattacgtagct

SEQ ID NO: 10059 - protein, 450 aa, DROSOPHILA
MNFSQRQPEWHRIPSVALNHIFDYLNPQDRRSAAGVCFSWRHALFQKRYFRNFRFQLDVGCDDQLAFFHRSMANLAMELIVVFDFQNAVHIQKMRGLLYKVAHCDNIQKLRFQTHNVGLVAIGNMHSEHLLAIEQCFVEPLILFLSRKRQPCQLLDLGAIEALSYYGHDFLKAMGKPQELLQLTLASIKYDPSHYPILSLDSTLLQKCAALQVLSLDYDTLSDELLHTIQVLPLRKLLIAVHGLDSEEHPDVSETAWSNFSDHFSSIELVLTLVYAYEAIALLQHRVLRSNMPVTHVRLLFCEKMNAEALDWMSLHYRETLRSIHYVDAPYKYSNRMNSSRRVSLLQDPFVMMAWRCKQLEEIVVHGYLMDPHNLVGIARLRGRQLKRLEVSMIDWSGAPLLNAYNEEISTLLGQQWSPISFDKMPPSLFYDNDLRDQFVYEMLRQDLRQ

SEQ ID NO: 10060 - DNA, 5544 bp, DROSOPHILA
caaaggtttattgtcttttttcaaaaaccctcttctattcatcacacaatttgcatacatacatatatgcaataaaagtataaaagatggtgggccctggtaatccaacccggcacatagtctacgtatccttttgcttctctggttcgtagtcttgatagcaattaatgggatccttggccgtataaactgagtatgccaatttgctgcccttgaagttctgtaaactcagggcagaaagggaaaattacttaaaattaaccattctgataagcactatctgccgtaccttcatatcgccagatatcagagtccaaaggaaaacgaacaccgccggtatcacagtggacaggacaaacagctcgaatgtgttaagctccccaaaaacggatattttcattttaatttcgtaatttttgatgagttctttgcgaatattagtttttgttgatgactagttgttgttctcacgtaggccgcacagtgttgtcacaccttgcttttaaagttttacgctatcctacggtcacactgtagtggtattatttaggacatttgaaactattgcgttcattgcgaacattttggtgcgtgtgaaaagttattaaatcaacaaaaatggctttccgcataccttttggcaagaagcacgctgagatagcgagttccttgtaagtatatgctgtcgtgcttgattctgcatcatgaattcattagtgttcccgctcttttactgctaccaaagcacacattgcataaccccatccagagaactaaactagtttcttttaattcgtagcatccgatctggagccggattcggaggagctgctggcctggccgtgctttactacaccgactggaagctggtcctacagtacgtgcccatctacggatccaagttcgaaaaaagcgagtaaccttgcctgccgtagttgaatccacagttagcctcgatgttttgcttggtgaataaaataagttaaaacgaccaaagggtattactgagtatcgtatattacaaataactttgtagagggcacaaggatcggttagattatttctctagctaactaatcgctaaggcttaagtaactgttccctaagtcttacatggctagcctattttgatcaagcattgtataaaaaagtacaacggcgagctgcccattcgattggaagagtacaaaacggtttcttttttgaaaagagaaatatgagattgcgtatttggaagcccgaatagaccgacgattgaatccttttagacaagtaatttggaatttcgcttaataaattctagtttgaaccataactttcctaacaatccggttcaacaaaggaggcggggaacagcccggttttgtgggtacgggcatgggtgcccttataccagccgttcttctgcttccgctggacgtagataatgtcgcccaaatgtagctctagttcaatgtcactgtttggtggatacggcacaatgcagcggaatcgactacgataaaaggttgcattagtaaatctctaagctcacaataatgtattgcaaaacccacctttccctcgtgcagtaaggagacttagtggtggcgctggccttaatggccgcctccgtgatcatattgctgctgggactcagcacatgactcgcatctaggctgtgcgacttccgatggctgggtgcaataatcatattggcatgcaactgggattgcgctccacctccaggaatcacctgttgctgaccgccggcgtagacagctggggccacggaagtagtaggtggcggcggcgacgcggcattgttgtacatactgcgaaatgtagctgcatctaatgattgtctcgcgctgaatcaaaatccaagagtcagttaaaagttaaagcattcaaattaagcctaacgaaccaaatcaagtgaggacgttccttgcttcctttcacgcgttgcgatccgtacgaaacgctgttcgtagaagcggaaggcagctgcttgggtaggaactgctgttgttgtgccgctgtcttggctgctggagtttcattgagcggttgactgtgctgcagctgactggggcacgagccggatctgaagagacaaaacaattaaacttttattctggtctataaagataacttattattgcggatctaaccttacatgtactggatgcaatttagctgatgggtttgttgtaaattccacatttgtgctaatagcttctttcggaacttgctgcaaggacgctcccggagatttggagcgtgttttcatgtgagttaatctcctcataagtcccactgctccagaggaactgctgctcgtagtcgaagctgtggcagtttcaggcttgggctccgattttctgctgaacagcgcctccactggtttcgaccacacagagcaactggtggtcgtggcggtagcctgctgctgacgaggtggcaaatcaggcggttgcatggacagcatgttgttgagtcgcacatctggtgcaactggatgctgctgtacttgtgccatctgggcgtctgcattttggggaacatatttccattgatgcattaactgctgctggtcgcgggcgcgcaggggcgtcaggtagttgcccgggaacactccagtgatgtccaaccagttttttcccttgaaccaaccgtccacacatcgttcggtcacaatgtaaacacaacccttttttaattccagctcatccgtttggcgtggtttgtatgggaacagggctaagtatccccagggtaaattcggttgcatctgctgctgaacagtggtcttaagtacacgcgatgtctgtggggctgacgtgggttttagagctgttgagctggaaacttccaagcggcttagttcatggggcaggctaagaatttcagccgaatggcggttggtctgcagcagacttaatggagctcctcctcccagcaaagcatttagtgagtggcgtttctcctttgctcccttgtcacggaaacgaacagacgccgatccggaagctactacatgttggggggtattcggcagtgagatttggtgattcggactgcagttattcgagctggatgtggagcttgaattgctgctgcccggcgtggaattggaggatcccgaactggattccgtgaccaccgtgggatcaataactggaaccggaggaagggcccgctgcccctgttgcttcggtggatggcagaatggatgggtgtgtagcccgctgtccaacagctttttggccgctgcattcagctcaacgaatgctattggaaagattccgatggtctggccaattcgtccttctgcccaattatgatcaactcggcgcattacctgtattacagtgcttttcttaaattcgaggcatccctcctcgtcgttgggccccatcttaaagtcatacatggcaatgcactgcggcatgggcagcggaaccgataccttgacgtagttgatgggaaatgtgccctcctgaccattcgcttgacccacaaaccagttgttgtcgatgcgatgcttgatcagtatcagatcccctttcttgaactttagatcggtggcttcaccggaggcgaagtcaaagagggcataggcgtgggggagtagaaatcgacgttgcttgtgacgagccggctgatgagattgctgatgtgactgcagctggagtagttggttgtcaggcggggccactgattccgctggcggctgaggtttggccctttccggctgtgtttcagtctcctctcccttttcttctcctttgccagctgctgcattttgtttcatgcctgtgagaattaaagaaagggtgtttaaaggtaggtaaagaccaggtaaacgccatattcaattgccaaagccactttgccgcactcataaagtcaaccattctttgattttgagcgtaggctgttgtgctgtgccagtttaggttggtgtgggcgttagctgttaccttctaagattcgcatcagcaagacgtttggaggcagctcatcaattttgcaagagaccaggatgcggcactccgggcatcgcaacttgtgctgactggccacaatgtcctggcatagaatgatgaaatcattcggttatatgatatatatgtagcaaacccacaacaattactcacctgcaagcatttgcggcagaaggtgtgctggcatggcagcaccttcgatgtggtgtccagtcgctcaagacacacggagcactccaacaggtcgtttaacgtgtgctcgtccatcttgccagtatgcaaaatctcaaggatggtcactatttgaatttcgtgcagggccacattccaaaacacacacacatgcaggtactggctcacgcatacgcaatcccaagacgcggttgggaaataaatttagctcaaatgctaaaatctactattataatcgctacttgtcgttcttaatgcactaaatcagattatattatcgttgcaataggcaggattcaatgtttaatttattaagtttgccaagtgcagccaaagctcgtggccaagcggatacaaatgtacataggcacacggatataaaaccagcttgatacttgaacacagtgatggtcataagtatatgcccaataggaatagtagttccataacatttaaccaaaaagaaagaagctaagagagtactacatgttttttaaattcactaaatttgcaaaaaattatttaaataccacatgtgccccggttatagttgcatttaataaatgcaaataattgttaagttgtacccaaactggtgtttattactgttgggattttagtgtggccagtcctcgtagtcgatattttctgaagcgcattttagtgttggatactaagtccagacagtgctgaaaaacgcacgatccctttgtttttttatttcatataaaaacacgtgtggtttggtttgatcgtgttcaaatatacgatttgatttataaacaaggcacacgacattcttgagacaccatgccaaaggtacgcagcaccccgggtaagccccggacgcagggattcaaccactcaaaccactccatgaatccggagcgccccaaaagcggtctcaagggagtcgcccacccccgcactaagggcaccatcaagcggcttcagatgtaccgtaacttcaaggccaagcgcgatcgcactggaaagatcctcacgcccgcccccttccaggtgagatttagctttacaacatgtatcttcgataattcttatctttggattcataagatttaccatcacttatagacataggaaggatttattgcaacatgaatatccaataaccattgtttagttttcaaaattatcatctacttcacaaaggtgcaattaaaacgatcgactcaaaattaaaagcattaaaagataaaaagatttcataagtatattttgttacgacttattatccgtataataatttaattacaaatcttatgttttcattcttgttgtaaatatataaaagaaaaaattaaatacaagagagaaaatgccgaatatgttttccaca

SEQ ID NO: 10061 - DNA, 3122 bp, DROSOPHILA
catttgtatccgcttggccacgagctttggctgcacttggcaaacttaataaattaaacattgaatcctgcctattgcaacgataatataatctgatttagtgcattaagaacgacaagtagcgattataatagtagattttagcatttgagctaaatttatttcccaaccgcgtcttgggattgcgtatgcgtgagccagtacctgcatgtgtgtgtgttttggaatgtggccctgcacgaaattcaaatagtgaccatccttgagattttgcatactggcaagatggacgagcacacgttaaacgacctgttggagtgctccgtgtgtcttgagcgactggacaccacatcgaaggtgctgccatgccagcacaccttctgccgcaaatgcttgcaggacattgtggccagtcagcacaagttgcgatgcccggagtgccgcatcctggtctcttgcaaaattgatgagctgcctccaaacgtcttgctgatgcgaatcttagaaggcatgaaacaaaatgcagcagctggcaaaggagaagaaaagggagaggagactgaaacacagccggaaagggccaaacctcagccgccagcggaatcagtggccccgcctgacaaccaactactccagctgcagtcacatcagcaatctcatcagccggctcgtcacaagcaacgtcgatttctactcccccacgcctatgccctctttgacttcgcctccggtgaagccaccgatctaaagttcaagaaaggggatctgatactgatcaagcatcgcatcgacaacaactggtttgtgggtcaagcgaatggtcaggagggcacatttcccatcaactacgtcaaggtatcggttccgctgcccatgccgcagtgcattgccatgtatgactttaagatggggcccaacgacgaggagggatgcctcgaatttaagaaaagcactgtaatacaggtaatgcgccgagttgatcataattgggcagaaggacgaattggccagaccatcggaatctttccaatagcattcgttgagctgaatgcagcggccaaaaagctgttggacagcgggctacacacccatccattctgccatccaccgaagcaacaggggcagcgggcccttcctccggttccagttattgatcccacggtggtcacggaatccagttcgggatcctccaattccacgccgggcagcagcaattcaagctccacatccagctcgaataactgcagtccgaatcaccaaatctcactgccgaataccccccaacatgtagtagcttccggatcggcgtctgttcgtttccgtgacaagggagcaaaggagaaacgccactcactaaatgctttgctgggaggaggagctccattaagtctgctgcagaccaaccgccattcggctgaaattcttagcctgccccatgaactaagccgcttggaagtttccagctcaacagctctaaaacccacgtcagccccacagacatcgcgtgtacttaagaccactgttcagcagcagatgcaaccgaatttaccctggggatacttagccctgttcccatacaaaccacgccaaacggatgagctggaattaaaaaagggttgtgtttacattgtgaccgaacgatgtgtggacggttggttcaagggaaaaaactggttggacatcactggagtgttcccgggcaactacctgacgcccctgcgcgcccgcgaccagcagcagttaatgcatcaatggaaatatgttccccaaaatgcagacgcccagatggcacaagtacagcagcatccagttgcaccagatgtgcgactcaacaacatgctgtccatgcaaccgcctgatttgccacctcgtcagcagcaggctaccgccacgaccaccagttgctctgtgtggtcgaaaccagtggaggcgctgttcagcagaaaatcggagcccaagcctgaaactgccacagcttcgactacgagcagcagttcctctggagcagtgggacttatgaggagattaactcacatgaaaacacgctccaaatctccgggagcgtccttgcagcaagttccgaaagaagctattagcacaaatgtggaatttacaacaaacccatcagctaaattgcatccagtacatgtaagatccggctcgtgccccagtcagctgcagcacagtcaaccgctcaatgaaactccagcagccaagacagcggcacaacaacagcagttcctacccaagcagctgccttccgcttctacgaacagcgtttcgtacggatcgcaacgcgtgaaaggaagcaaggaacgtcctcacttgatttgcgcgagacaatcattagatgcagctacatttcgcagtatgtacaacaatgccgcgtcgccgccgccacctactacttccgtggccccagctgtctacgccggcggtcagcaacaggtgattcctggaggtggagcgcaatcccagttgcatgccaatatgattattgcacccagccatcggaagtcgcacagcctagatgcgagtcatgtgctgagtcccagcagcaatatgatcacggaggcggccattaaggccagcgccaccactaagtctccttactgcacgagggaaagtcgattccgctgcattgtgccgtatccaccaaacagtgacattgaactagagctacatttgggcgacattatctacgtccagcggaagcagaagaacggctggtataagggcacccatgcccgtacccacaaaaccgggctgttccccgcctcctttgttgaaccggattgttaggaaagttatggttcaaactagaatttattaagcgaaattccaaattacttgtctaaaaggattcaatcgtcggtctattcgggcttccaaatacgcaatctcatatttctcttttcaaaaaagaaaccgttttgtactcttccaatcgaatgggcagctcgccgttgtacttttttatacaatgcttgatcaaaataggctagccatgtaagacttagggaacagttacttaagccttagcgattagttagctagagaaataatctaaccgatccttgtgccctctacaaagttatttgtaatatacgatactcagtaat

SEQ ID NO: 10062 - protein, 838 aa, DROSOPHILA
MDEHTLNDLLECSVCLERLDTTSKVLPCQHTFCRKCLQDIVASQHKLRCPECRILVSCKIDELPPNVLLMRILEGMKQNAAAGKGEEKGEETETQPERAKPQPPAESVAPPDNQLLQLQSHQQSHQPARHKQRRFLLPHAYALFDFASGEATDLKFKKGDLILIKHRIDNNWFVGQANGQEGTFPINYVKVSVPLPMPQCIAMYDFKMGPNDEEGCLEFKKSTVIQVMRRVDHNWAEGRIGQTIGIFPIAFVELNAAAKKLLDSGLHTHPFCHPPKQQGQRALPPVPVIDPTVVTESSSGSSNSTPGSSNSSSTSSSNNCSPNHQISLPNTPQHVVASGSASVRFRDKGAKEKRHSLNALLGGGAPLSLLQTNRHSAEILSLPHELSRLEVSSSTALKPTSAPQTSRVLKTTVQQQMQPNLPWGYLALFPYKPRQTDELELKKGCVYIVTERCVDGWFKGKNWLDITGVFPGNYLTPLRARDQQQLMHQWKYVPQNADAQMAQVQQHPVAPDVRLNNMLSMQPPDLPPRQQQATATTTSCSVWSKPVEALFSRKSEPKPETATASTTSSSSSGAVGLMRRLTHMKTRSKSPGASLQQVPKEAISTNVEFTTNPSAKLHPVHVRSGSCPSQLQHSQPLNETPAAKTAAQQQQFLPKQLPSASTNSVSYGSQRVKGSKERPHLICARQSLDAATFRSMYNNAASPPPPTTSVAPAVYAGGQQQVIPGGGAQSQLHANMIIAPSHRKSHSLDASHVLSPSSNMITEAAIKASATTKSPYCTRESRFRCIVPYPPNSDIELELHLGDIIYVQRKQKNGWYKGTHARTHKTGLFPASFVEPDC

SEQ ID NO: 10063 - DNA, 11417 bp, DROSOPHILA
tgttaataacgaaaagcactcactcacatacaaacacacaaaaccacacacacacaaacacagccgtagtcgtgcacatgcacaaactgaaaaaaatacgaataaaaaaaaacgagaaaatatattgttatcagttcgttaacaaaatgagaaaatagattttagcgtgtaattatacgaaaatgaaaatggtattctaaataaaatcataaataaaagtcgagtttgttgttctcttcttaaagaacttggcaatgttcttgccgttgtttttcataaaatggttgaaacggaagtgcaaagttccttttttgtttttgaaaatgttctgttggcgccattttgggtaaccgctaacggtagaggtgggaactaagatattcgcagctcacaaaaacaagaatctaaaaaccaaatgattatctaatttaacaataagaaaatatatttagaagaacacagaattttaaatcttgatgttgaaaatatccatgcacaactgtaaatactttagagaagtaaagttatcactttcacgcaagcaaattcaccacagtttggtaagtttgagaatgcaagtgatatcgataggtgatttgtcacagctatcgatatcatcgagtatcatgtttaaaaatcgggatgacaactcaaaaatatcggcgttacatttaaattactatgtaaacaacttgtagataattttaacattctactaattaaaagcttaaatatttattgtacatatagaaaaataaaaagaacgacggtagttgatggtcaaagataaattgttattcctttataaattttacataccaaaagcaaatgaatataattaaataacaggaataattttgctcttctgtgagctagtatttttaaaatacttatactccaaactgataagaaccgataggttcaggaataaatcgatatcgcgatatttcgagtgcccatcaattctggtccaccactagtgcaaagcgaaaagcagagaaagaaataataattcgtgttttgtgcgcagagtgcaaagggtaaataagttgcaatatcatcgcaatcgcagtcgagagccctataaacccgatagagtgccaggatttttggatatccatatcgtgcgcgcagctatactattttccccctttgttgacgtcgcattgtcgtcatcgtcatcttgtgaccgtgtctattcgagtccgaaaaaagaaagaaaagaaagtcgtaaaatatagaaaagaaaactagttggggaggaggagtcgcacacacagacacacacatacacagccgagcggagcccccacacgcacacacacacaaccaaaggcgaactgcagtgaagcaacaaaaccaacaataacagaaacattgcaggtgagcgaaagagtaagtgggagggggccacaaacatatttctgtctctctttctctttggggcttctttttcttaaataataattttccgtaattatagatcccccttgtctaaacgtaattccccgctaaccgttttttacaacatatgcttattgatagcgcttctttggcttttgttttttgttgtttttttttttatttgataactgccgttagccggtcgagtgattagtcatagtggatccagggttgccaggggcgtgggtggaaacgggtttatgtttgcgagggggggcggatgagtaatgaatgaagtttcgcacattcgtgtgccccccaatcagtgcgtccgtgtgcgtatacgtgtgtgtgtaggtgcgagtagttctagtgtcacaaatgaaatctaatcgcatttctggctcgttatcatacgcacacagccacagaaagcacccatgtagccattaatatattatatacaaatgatacctaatatacgcccgcatttacaacagatgcagcaacattggaaaatgcaacagtgccagcggtatggaggaggtgatgggggacgccgaggcggatcgaggaggggcccggcgatcgtgtggcacagtgggcagcatcagcgagcgagcagtgaccttcgtcaccagcggctagccctttccacctgtttgaggtgctaatagaaaaacatctcaagataaccataaaccaaaagcaaacatttcatttgcgaaagtaacgtagataccagataagcagatgtttaacacagacattttattattattatggtctttcgttgtacaatcttcaatgtttgtttgcagtattctctccttaagtcgaaacaaccaaaattataatttccaatcctcagatctttgcgaattcaattcaatttttaaatatgtattaaatttttaagttttgttaatcccaagattgtaagagaattgagttcaatctgcagggtttaaatagaaaagctttctcgttgtttaatgatgagataaaaagtatgtatttaggaatcatagattgtggggctactgacgggctttcatcaatatttttcatcttagcggaaacatgctaaacgtctgacaatagtgcacgtcaaatagcctcgtgaatgtggaatattttgctcgcatttaattgcgtttggatataacgagagtgatcgcagactgatcagtaccaccgcgcatatcaatcggcgaacaacgcacacgctgcagctccccatttcgagtttagttcggtgtttggagcgtttggggagctttttccgtctcttagctatacgagtgtatacgttcattgaaccgctggctggcgtcaaggctcgcagcctttggaacaaagtgattcgcaactcgttgggcattctgtttgttttgataccaacacaagcgcagctgtatatttttttggcaataaaacgaagcggtgacgttttgccgaaagtcaagtgcacagaaacacaaagaaagcttcgtcattgcctctgtctggcattcaatttgctcaagttcagaccaccaccacaacaaaaacagaccgtcaccatcaccaccacccacttttacttgactcttgcacttcatttgcgtagtgttttttgtttcgcccgtcttatactgcgcgacatttaattaaattatttcgccttccattggccaaatgaaaacaaacaaacgaggcagacaaacggccctttttcgcagtggatcgttactacgatcatcggtcaatgaatttcactgcccatttacgagtatgagtattcccccctcataccaatattaactcgatttctcgcatagctcgaatgcctgcggaacgggtttatctgtgagatacagttttgaggcgggttctcgatggagtttccccacagccggctcttctcgatatgtgtcaagtgcgttgtttacacgaaaaataaacaaaaataaatgcagacccgtcggaccgcataaagaacggtggttatatcagaaactacagcgattcttcagctacaaactggttaataaacgccacttaacttagcagtatttctgagattttgctggggccagctggggttaattgctatcttaactgccgaaaagacaaaaatatcttaacaagcctcattatgttatatgttgttataaaagtattgcccttattaattgtttttaaagtgatatctaatcaaattactatatctcgaaacaagaaagtggtatatatttggatttcttagtcttatcgatagcctaataaaatttggtattcgcttatcaagaatatgtttgcctcttttatttattgctcgattatattattttcaataaatttatcaacaatataaagtgtttatagtgaatatagtaacacacgtactttgcgttttatctacttttttccaaacaaagccgtaaaacgcgtggtcttactttgtacacatgcacgtaattatcttatgcttaatcagctataaatatatatgtacatatatttgaaattcttaatggtcgagaaccacattactctaaattcttctcaaagaactttcttcgcttttgcaacaaaatcgataacaatttgattagcattcttcgcatttaaaaatagatggaaccgcgcaaagagggcggtggaaaatcaattcatttgctatgaattctcgctgtgcttgtgggtcgccatttaatgcataatgcagtttggtctgaaaatttgcatatccagacatagtcgtagacgtttgtctgtccactttctgattcttgagcccaggctatttgcacttttgcggcttcttgtttcggtctgccatgggttaagttcaagcagagtctctatgagttaaatgagattgattggtaatactcaaagagtttgctgcaaaaataatattcttgtaaatataaaattctatatatggttaatggttaaaattcaattgattacaagcactttcgctggcaaataaatgtgacattaattgctcattttgctcagtttgtaaaaaattatatcttcatttagttttgtgctgtgtattccctagtcgactttgaaatgtcaagggaaatactcttttgccatgttttgttttatttttttgccatgcttttcctttccgtttgctttttgtttgcccgcaaattgaattatttcttctagaggctttcgggctggatgtatctagtattgtaaagtctggtgcggtttttaaagcagcgctttaaaatctcagggtttcgtatctcaagtttggtttcaacatatgctttcactctttttgtttggtgcacttgagtttggcgattactttatctattaatttgtgtgttttgcaccgatgcaacaacagacacaaccgacatttgactctatataaatatgtatatccgtatgtgtactctcttactatgtattttgattgtatttatcttgtatctcatatatagcttgctttggagcacttaaacagcaataaacataaaccaaaacgaatttaaaaacaaaaagagcaaaaaagtctaaagcctattcaagcaaaagtccaaagtttctgtatagcaaataaaaaaaaaaaaccaagtcaaacgcaaaaacaaacgaaaagtaagtctgaatgtcaattcatctcatataacttcaatttcttttccacaaaaaaaaaaaaaccgccaattataaatgggacatactgaaaatattcgatctgatttgatttgaaactaaagtttcaactctcaccacaccgagccgcaacacagagcagcaaaactcaccaaaaagatcacgtaacacattccacatacgttccacaccaactggtaccgactcatcttcaccgtttttctttgtttttgttcagattttgtagcccgaaacacacttaacactttagatttgaaaacatttcaaaaaacctcacagaaactgtcaaaaagaaagcctaaatcccaaatttaccacacactgattcgcattaacatcaaagcgggactcttcgatagcaagactaaacctaagatctaataacccttttcacaatccaaccaaaaaaccccctatcctactaaacgggttggatcacgaagatatagccatgttaacacccctctccatccttcttgtcacacagtgagaaagcaaaaggacgatatgcaggtcaatgtcgctggtctgcgcagaaacatcaagaaccttgcgcacaactactccgatgcccaggtgagtgatctacatgatccataagccaatttagctatttaaaaccaacattgatatccacaggttaaagtgcgtgaggcaacctcgaatgacccttggggtccttcggctgccatcatgagcgagatagcggaactcacctacaatgtggtggccttttcggaaatcatgcagatgatctggaagcgtcttaatgaccacggcaagaactggcgacatgtgtacaaggcactcattttgctggagtatctgattaaaaccggctcggaaaaggtcgcccagcagtgcaaggagaacatctttgccattcaaaccctgcgagagtttgtgtatttcgaagagggcaaggatcagggcacccatgtccgtgagaaggccaagcagctggtcactcttcttaaggatgacgagcgactgaagaatgagcgtgtgaaggcgcagaaggcaaaggaaagattcgcccagaacccgagtgggttcggcagcgatggctatattgatggaccatcgcaacgagacttgccgccaggctggcaggaggagccgcctaaatcggtatccgaactggaaatggttcgtccccagacggccggcgaggaggaacttcaactgcagctggccatggccatgtcacgagaggaagcggaacaggaggaggccaagcgacgcagtgatgatgtgcgtctgcaactcgccctcagccagagtgagcaggatttcaagtgagtagagaacgtctaataaaacaactcgtctggtttcaataccaatcaaatcctccaatttattagggatccaaacggacgacctattcctgcgcccaagaaggaggaacaacagagtcatttgctagatctgctggatatttctctgggggctacgagcatctcaagtccgccgctgggcgctgcaggcggcgcccccacggctgttgtcgatccctgggccatgccaggtccaagagctcccagccagttgtccgatccgtggtcaggtacttcctcgcctcaagtggatccctggaatccctccgctgccccacgaaccatcttgggtgccggagtgccgatgacttcggcgccattgggagctggaaacgatgcctggggagctcgcactcagtcgccttcggtggcctcgggctcctccaacgaaggttggctgcaaagtaatggtaatgccaaccaaaacggacgtggagccactccggccggccctcctgctgaaggctggctgataaaatccactgctgtcggagctttgggagctgcgccaattaatcatgcggcaaataatggtagctcatcttcggatccctggctagcagagccagcagcatcggcggcaggaggagcagcagcagttggcttggcagatccctgggcgccaggagcagcatctcaaacgggtgcgggggcactggatgacccatggaaagcactcggaactggcgccattaaggtaagcggtatattaatcttttaattgattgaattgcattgataattagatttactatgagctaattcaataatataatttaattttttacacattgtgtatatatttaaatgatgtaaaacattcttgtgaatttcagaaacaatcccccgagtttgatgagttcgacttgatcaccaaccgaaacaagagtgagcacagcaattctaacgcctccaacaacaacaatggtaaggcctttttcgtttgataacatcactttcgagcttatcacaatgaaaccatttccagcttctctgctcgatgacatggatccgctatcggcgaactacggaaatggaggtataaatagcagtatgcatccgtcgacgggggccacggcaaagaaatctataaaggatgctcattctttcctcggcgagaactctgcgcttgttaacctagacaatctgatcaaaccgattgcgccacagacgcaaacgggtaatcagccggcgtacaatcccttcagcgacaacgtagtgccacccaagacgaatctattccagcaacagcagccagccgtgagttaaattttggatttgatttaaatagatatttgtagatttgcttattatttttttgtggtttacctctaggtgccgtccatcaatcagctgaaacaacaggccccgttttcagtcagcatgaaccaagatccctgggcacctgtaatgggcggagttagtacgacttcgcaggtgagttgccagaatttggaggatttcgtgcgtctgcggtgttagggaaactctgcgtacttgtacttatattttgattatttttgagggtttgctcctctgatgacttatcgatatttctgtttactatttaaaactatcttatcatttcacctctgcattttgtttccttttactatcgtttgtccttctgtcatttcgttttgagcaaccgttgcatgtaaaacccgacattctagccaaaacttccgcctcccgtacgtcccactagcctcaatttggggccctcgtctgtgggtgaatttcaactgttgagtgcgttaagtaatcccatcattcccattgcccacatcccccagccacagcccaatttgcaggtctacaataatgcgtatcaaagtagcagcagcactaatatccttggaaaaagcaacatcccgaccaatatgaatagctccaccagcaacagcaccatacacagctgttacgcaagtccgagtccgggcgtcgatggcattcgcaacatggatatattcaccgaacgtccttactataatagtccaacagcacctgctgatgatacctacatgtacaacagcagggataataacaatatcaacagcaactatggtactcccagtctatattcaagttttgctgccagctatagcagcgccctatccgattctctggccgaaactcctggaattagtgttgctcccttgggttttgtggccgatactgtcatgagttttggtccctcatcctcgtcggccaactgcaagctggaagtgagtttgctgccgctaaagttgtcgttgctgccaatcccacactaccacctttgccagaagttgttgtttatcgtttagtttgcatttttatttagaaatttatttctttgatttagttttctttttgtttgttttgcaagtatgagtactatgagctgctgaatggggagtgcagcaaaaggtttgccatgctgccttccaaagaatacatactcatcctaaccaaaagctctgctaaaacccagttgatccataatattttctaattgtagccatcaatggaggcttggacgcttaaataaaacatacactaagcaataaatgcaaatgggtaaaatgtttttcgaatgtgcatgttctgctatttaactcgtagaataccctctaacaactaaaactattaaacaatttatgaaaaccctgtagttggcttagaaaactaaaaactctgcatgtcagtcgcttattattagtacattagctttcgcgaaatgaaacattgaaataaatataactaatcgacattgaattttgcagcaaaataacaacatgccgtggatcaagccggaagcagcaacaaatccgtttttgtcgtaaactggcgtcgatcaatcacaacaatgtaagcagaaggagcagcgggatcatcaattaagggaaagtcaactaataaaggcctgactggtgtataagaagctgtccaatagcgttagcaacaatagcagcagaagcaaccaactttgactctacataactgcagagagggaaatatgaattaattaataaattatgtgtaaggaagtattattaaagtgtaaaatatgtgatgtatgtgagagagaaagccaagatccagcgaaatagaaattgaggagttaaatagaaacagcaacgacacccagccaagatgagtagaaaagttgtgcgcaggaagcttacaagtaaactgaacttgagtctaacacatttgcaataattaaatctgtaaaaaccaacccattagaaatcgcaaccccttacgcccttcagctggggaatccttcactgtcagtcttcaagtacttccttagttgatcacttactgttaattaatttctatccttgttggggaaagaaccaagaaggcagccgcaaaaggagatcaatcgagtccaacctaatgatgcaaattgaaattaaaaaaattgttatatagctttaaagaatgcattggtaaagcgaatatgtttaaaaccatgttaaacaaattatatgtgcttgtaattgtaaatttttttacgttcatttttgtaaaatttattgtgcgcgcatgttgcagaaaccaaatacaattattaatggcttttggctatcgatttttaaacacatttttacgattttttcgagttgacagttgatttgtttgtgcattcgcttttggtccaccttcaagtcaccaatgcatacgcgagtttgctgttgaacatttttatagcgaatagtttaaaatttacaaaaacctttgaacacatatacaaagaacaagattacaagagcaaatcgaaaactaaaacaaaacaaaataaaatgatggtatacatttaggctagaatacgtaacgaattgtataagagtaacttaatgataaacaaaatatacatatatatatatatataaaagaaagccgattcggtgtgaaattatgcttaagagatttacatgcctgactagcaagcgtatacaccccacaacgctgatacccttttatatatatgaagacacacaaccccaaaaatcacatatacacttgcaaactgcaaattttaagcatattttcatattattaaaactttattttaactaaaaaaaaaaacaagcgaaaaaaatctccatgtaaaagtcagaccactttcgatgctcccattgcacaactaagcgggtggcgactgagtgtgccaatgcccgggggcctccacttgacagcctgcgccagcattcaacactttgttggggcatcatcacactcatgtcggatacatcgggccagggcacaggcagagacaatcccaatagcaatccgcatccgaatcccccaaactcaaacccgatcccgatcccagcagcaacggcagcacgattatgttaatttcgggggccgccagagtgcagcattaacggagcacgcccaccgcatatggcagtgatattttggccagctgggatgtggatgtgtatggggatatggatatggaatcgggatggggctggatatggatatggattgctggatgtggctgttgcgcaagtggccagctagctggcaggctggtttcggttttgatatttgacatgcgccaggggccatcaggaaacttcgtttaaatgaaatcaaaatgcacaaatacataatttacacaaatttgccgtcgagctgcggtacgagtttatcgcctcggttgggcacgaaaaagagcggctcctcagatggctgggaaaatgctggcggattgtataatgcatcgggtattccaggagcgatgagcatccagcagatgcaggaagaactggcatccaaacatagtttttcgatgaggggcacgataagaacaaacaaaacaaaaacatcttgtgcattatatggtttaatttttatatgtcatattaatttttctatcattttccagtacattgaatatccaggtaacatagttggctagcctagtgtacacgcctggaaaatgtgggtcagcacatccatgcgcaaaggatacgattccatagctactgccgcggtgaaccaagg

SEQ ID NO: 10064 - DNA, 4063 bp, DROSOPHILA
aagaaataataattcgtgttttgtgcgcagagtgcaaagggtaaataagttgcaatatcatcgcaatcgcagtcgagagccctataaacccgatagagtgccaggatttttggatatccatatcgtgcgcgcagctatactattttccccctttgttgacgtcgcattgtcgtcatcgtcatcttgtgaccgtgtctattcgagtccgaaaaaagaaagaaaagaaagtcgtaaaatatagaaaagaaaactagttggggaggaggagtcgcacacacagacacacacatacacagccgagcggagcccccacacgcacacacacacaaccaaaggcgaactgcagtgaagcaacaaaaccaacaataacagaaacattgcagtgagaaagcaaaaggacgatatgcaggtcaatgtcgctggtctgcgcagaaacatcaagaaccttgcgcacaactactccgatgcccaggttaaagtgcgtgaggcaacctcgaatgacccttggggtccttcggctgccatcatgagcgagatagcggaactcacctacaatgtggtggccttttcggaaatcatgcagatgatctggaagcgtcttaatgaccacggcaagaactggcgacatgtgtacaaggcactcattttgctggagtatctgattaaaaccggctcggaaaaggtcgcccagcagtgcaaggagaacatctttgccattcaaaccctgcgagagtttgtgtatttcgaagagggcaaggatcagggcacccatgtccgtgagaaggccaagcagctggtcactcttcttaaggatgacgagcgactgaagaatgagcgtgtgaaggcgcagaaggcaaaggaaagattcgcccagaacccgagtgggttcggcagcgatggctatattgatggaccatcgcaacgagacttgccgccaggctggcaggaggagccgcctaaatcggtatccgaactggaaatggttcgtccccagacggccggcgaggaggaacttcaactgcagctggccatggccatgtcacgagaggaagcggaacaggaggaggccaagcgacgcagtgatgatgtgcgtctgcaactcgccctcagccagagtgagcaggatttcaaggatccaaacggacgacctattcctgcgcccaagaaggaggaacaacagagtcatttgctagatctgctggatatttctctgggggctacgagcatctcaagtccgccgctgggcgctgcaggcggcgcccccacggctgttgtcgatccctgggccatgccaggtccaagagctcccagccagttgtccgatccgtggtcaggtacttcctcgcctcaagtggatccctggaatccctccgctgccccacgaaccatcttgggtgccggagtgccgatgacttcggcgccattgggagctggaaacgatgcctggggagctcgcactcagtcgccttcggtggcctcgggctcctccaacgaaggttggctgcaaagtaatggtaatgccaaccaaaacggacgtggagccactccggccggccctcctgctgaaggctggctgataaaatccactgctgtcggagctttgggagctgcgccaattaatcatgcggcaaataatggtagctcatcttcggatccctggctagcagagccagcagcatcggcggcaggaggagcagcagcagttggcttggcagatccctgggcgccaggagcagcatctcaaacgggtgcgggggcactggatgacccatggaaagcactcggaactggcgccattaagaaacaatcccccgagtttgatgagttcgacttgatcaccaaccgaaacaagagtgagcacagcaattctaacgcctccaacaacaacaatgcttctctgctcgatgacatggatccgctatcggcgaactacggaaatggaggtataaatagcagtatgcatccgtcgacgggggccacggcaaagaaatctataaaggatgctcattctttcctcggcgagaactctgcgcttgttaacctagacaatctgatcaaaccgattgcgccacagacgcaaacgggtaatcagccggcgtacaatcccttcagcgacaacgtagtgccacccaagacgaatctattccagcaacagcagccagccgtgccgtccatcaatcagctgaaacaacaggccccgttttcagtcagcatgaaccaagatccctgggcacctgtaatgggcggagttagtacgacttcgcagccaaaacttccgcctcccgtacgtcccactagcctcaatttggggccctcgtctgtgggtgaatttcaactgttgagtgcgttaagtaatcccatcattcccattgcccacatcccccagccacagcccaatttgcaggtctacaataatgcgtatcaaagtagcagcagcactaatatccttggaaaaagcaacatcccgaccaatatgaatagctccaccagcaacagcaccatacacagctgttacgcaagtccgagtccgggcgtcgatggcattcgcaacatggatatattcaccgaacgtccttactataatagtccaacagcacctgctgatgatacctacatgtacaacagcagggataataacaatatcaacagcaactatggtactcccagtctatattcaagttttgctgccagctatagcagcgccctatccgattctctggccgaaactcctggaattagtgttgctcccttgggttttgtggccgatactgtcatgagttttggtccctcatcctcgtcggccaactgcaagctggaacaaaataacaacatgccgtggatcaagccggaagcagcaacaaatccgtttttgtcgtaaactggcgtcgatcaatcacaacaatgtaagcagaaggagcagcgggatcatcaattaagggaaagtcaactaataaaggcctgactggtgtataagaagctgtccaatagcgttagcaacaatagcagcagaagcaaccaactttgactctacataactgcagagagggaaatatgaattaattaataaattatgtgtaaggaagtattattaaagtgtaaaatatgtgatgtatgtgagagagaaagccaagatccagcgaaatagaaattgaggagttaaatagaaacagcaacgacacccagccaagatgagtagaaaagttgtgcgcaggaagcttacaagtaaactgaacttgagtctaacacatttgcaataattaaatctgtaaaaaccaacccattagaaatcgcaaccccttacgcccttcagctggggaatccttcactgtcagtcttcaagtacttccttagttgatcacttactgttaattaatttctatccttgttggggaaagaaccaagaaggcagccgcaaaaggagatcaatcgagtccaacctaatgatgcaaattgaaattaaaaaaattgttatatagctttaaagaatgcattggtaaagcgaatatgtttaaaaccatgttaaacaaattatatgtgcttgtaattgtaaatttttttacgttcatttttgtaaaatttattgtgcgcgcatgttgcagaaaccaaatacaattattaatggcttttggctatcgatttttaaacacatttttacgattttttcgagttgacagttgatttgtttgtgcattcgcttttggtccaccttcaagtcaccaatgcatacgcgagtttgctgttgaacatttttatagcgaatagtttaaaatttacaaaaacctttgaacacatatacaaagaacaagattacaagagcaaatcgaaaactaaaacaaaacaaaataaaatgatggtatacatttaggctagaatacgtaacgaattgtataagagtaacttaatgataaacaaaatatacatatatatatatatataaaagaaagccgattcggtgtgaaattatgcttaagagatttacatgcctgactagcaagcgtatacaccccacaacgctgatacccttttatatatatgaagacacacaaccccaaaaatcacatat

SEQ ID NO: 10065 - protein, 824 aa, DROSOPHILA
MQVNVAGLRRNIKNLAHNYSDAQVKVREATSNDPWGPSAAIMSEIAELTYNVVAFSEIMQMIWKRLNDHGKNWRHVYKALILLEYLIKTGSEKVAQQCKENIFAIQTLREFVYFEEGKDQGTHVREKAKQLVTLLKDDERLKNERVKAQKAKERFAQNPSGFGSDGYIDGPSQRDLPPGWQEEPPKSVSELEMVRPQTAGEEELQLQLAMAMSREEAEQEEAKRRSDDVRLQLALSQSEQDFKDPNGRPIPAPKKEEQQSHLLDLLDISLGATSISSPPLGAAGGAPTAVVDPWAMPGPRAPSQLSDPWSGTSSPQVDPWNPSAAPRTILGAGVPMTSAPLGAGNDAWGARTQSPSVASGSSNEGWLQSNGNANQNGRGATPAGPPAEGWLIKSTAVGALGAAPINHAANNGSSSSDPWLAEPAASAAGGAAAVGLADPWAPGAASQTGAGALDDPWKALGTGAIKKQSPEFDEFDLITNRNKSEHSNSNASNNNNASLLDDMDPLSANYGNGGINSSMHPSTGATAKKSIKDAHSFLGENSALVNLDNLIKPIAPQTQTGNQPAYNPFSDNVVPPKTNLFQQQQPAVPSINQLKQQAPFSVSMNQDPWAPVMGGVSTTSQPKLPPPVRPTSLNLGPSSVGEFQLLSALSNPIIPIAHIPQPQPNLQVYNNAYQSSSSTNILGKSNIPTNMNSSTSNSTIHSCYASPSPGVDGIRNMDIFTERPYYNSPTAPADDTYMYNSRDNNNINSNYGTPSLYSSFAASYSSALSDSLAETPGISVAPLGFVADTVMSFGPSSSSANCKLEQNNNMPWIKPEAATNPFLS

SEQ ID NO: 10066 - DNA, 2710 bp, DROSOPHILA
ggcattcaccatgatgcagagtacttcccggatcccgagacctatgatcccgaacgcttctcggaggagagtcgcaattataatcccactgcattcatgccgtttggcgagggtcccaggatttgcattgcccagaggatgggtcgtattaactccaaactggccatcatcaagatcctacagaacttcaatgtcgaggtgatgagcaggagcgaaatagagttcgagaacagtggcattgccttgattcccaaacatggagtgcgagtgcgtttgtccaaaagagtgcctaaattatcataaaaattacaattgcaatgatgaaatacaatagttaagtggctagcaaatcactccgattatttggaatgataagagattaccgtcagataaaaaacaaaaagtgtacaataaattcattatcaaatcattaattaatatttaaattcgaaaataacttttatgaattaacatagtttcttgttataataatgttacttttaactcgctctctatttataggtattatgtaaattataaagttgaaatgaatatgtgtgttttgttaatttatttgctaaagttgcctaggtgcaatccatctgtttgctgttgaaataccttttatgattgtccttatcgttatcataagtatgcaatgatacgagaaccaactgcgattaccaattactaatgtcaccaagagatagcatagggtaacatattgtatattcagtgtggtaaaaataatgaactttctaaaccgttttctataatcagatgtattaccaataaatacaatagaccagaaaacaacaaaaagtgaggtcaacaatttttattgaatgcaatgccagtgctgtggaattcttcacaattcaaggagtcatggataaagatagtatgtacaataacaaaagcagtgtgctaaccgtccagtcaatttgctttccagaaatccgactattccgataattccgatttatccgattatttcgatttatttgctttcgcgctcctccaattgctgcatctccttttcattttgcaacattttctgtttgttcttttgccgaaagatttccttgctggcttctttgatggcctcgaagattttggcctgcgacatgatttgcttttgaacattttccacagctggctcggcattgatatcgatcaaatcacttagaccttcggataaatactcattgttatagggtttctcttcgacttcgttgcgtttgaatagcgagaatggcggatacgagggatacgtacgctttcgtccacagcctgtaaatcgtccggattgtaatggatattattatatattgtattaaaattacctgtaaatgcattgcaaaacggtcgcttctcgtacttccattgtataacgccacttagcttgtgctgcaaataagacgataaattatatttatatcaaaactaatcaggtaacaactatttaattaggtatgtaaatgaacgttaaacaatgcgtcgcgttatcaacttagattataactccgcttaactaatttaacgaatttcacaatttacttccactttctgttgggtcttaatgaaatagttaatccattgataactcacatttgccatattggtgccctcgttgttctccctttccagcgaagcctgagagcaaatggcacaagccaggagtgcaagcagcctcagggaaatcctcatggacgttctcattgcaggagtgtgttttttttaataaggatccacttagcaaccgacgcgcttaacactcgaaagccaaatgaaagtggccgcagcttgggccttggtcaacatctcggctacgcaatgtgagacttgttgctttcagaaggcgacaggaccaccagctgggcctggaatgtattttggttgccacttaatggctttttgtgtttttcccgacctttcccagccgggtcgcccccgcacattaacattgcattgacgtgtgaaggatggtccttgcccttgccgagtgtaataaaaaccactgcaaattcaatttgaaacgcaacttgggcaggcttaaagtgggcgaaaatcccccgcaattgtcactaatttcgttcagtgcagctgcattggccataattcgctcgcgagcgaactgaggcgtttgtatctatttataaagacccgatccgatcggatatatccgaaagaacacactcacagatcgctcctacgcgcttgagtgtgcattttccgaaacttttcctcacacttccactagacttttccgaacaaacagaggcaatttcgaggcgactctctgccaaaacggttcgcgtgctactcgaatctctggaattcaatgaaaagttctacaaaagttgcatgatctggaaaataaataaccatatattcattttcggaattttgaataaacaactgataccatttgtgccctagttgatttttaaattgtgatttcttcgcgactttcccacgatttggtgtcgaaagtgtaggaatttctgtgtcacttctactaaaatagcatgtgagtaatttggaaatctataaattatgcatattaattgggaatatctcaacattttatttgattataattaccaatttctgtcggttgaggccggaaaaaagtcgtttatatcacattgcatgcaatttcgtgttgccagttgagaatcttctgtaccttgtttttgtctacgta

SEQ ID NO: 10067 - DNA, 456 bp, DROSOPHILA
atgaggatttccctgaggctgcttgcactcctggcttgtgccatttgctctcaggcttcgctggaaagggagaacaacgagggcaccaatatggcaaatcacaagctaagtggcgttatacaatggaagtacgagaagcgaccgttttgcaatgcatttacaggctgtggacgaaagcgtacgtatccctcgtatccgccattctcgctattcaaacgcaacgaagtcgaagagaaaccctataacaatgagtatttatccgaaggtctaagtgatttgatcgatatcaatgccgagccagctgtggaaaatgttcaaaagcaaatcatgtcgcaggccaaaatcttcgaggccatcaaagaagccagcaaggaaatctttcggcaaaagaacaaacagaaaatgttgcaaaatgaaaaggagatgcagcaattggaggagcgcgaaagcaaataa

SEQ ID NO: 10068 - protein, 151 aa, DROSOPHILA
MRISLRLLALLACAICSQASLERENNEGTNMANHKLSGVIQWKYEKRPFCNAFTGCGRKRTYPSYPPFSLFKRNEVEEKPYNNEYLSEGLSDLIDINAEPAVENVQKQIMSQAKIFEAIKEASKEIFRQKNKQKMLQNEKEMQQLEERESK

SEQ ID NO: 10069 - DNA, 6098 bp, DROSOPHILA
aaagatcatacttccatttgtttcattgttcaacagattcaccgtgtaaattgggcgctgcgtctgcagccgcacaaggagctgctgcaattcaggacaaacagcgaccgcgacggcttcctggcggacatgacgggtcagacgctggtccgcgatgagatgtaccagctccaggtggtaacgatgcccggcgagggactgtttgaggcgagcgtggcctatagcctgcacacgttcagtgccacaacgaaactcacggacatctcgcgcgtcaataagtatggaaatcaggcccggtgcatatacgaccgggatccggagctgcggaagtactgctactgtcgcgattgatttgtgcacaaaatgacaagtccaaaacatagaaactgctaagcaatcaactggaatagatttctgcactgattgtagattttagattactccttccaaagaatattgtcactggctccttaagttaaaagatctgcctcagtttgtaatatacgttcctttaatcaacgatagtaatgagttaataaaaaaatgacatttttgtatgtgtaataaaaaaaagtagtcttaattagatatgggtacagatcgcctggttaactgggggtagcccgaagttatgtatgccaactcggggaatttaagttatagttatatgtatgcatacagtgcaaaatatcttttcttatacttacgattaccaattaaatagagcatttgtgtcgttccatatatatatcctcatatatttcaaggctgatgctaatccctttcttaagtaagaacttaatatttctgtttggatcgcttaggcagattaaccatagactaaaatacactgcgcacattatttggttatataggcctcttatcttatataggttaactataatacttgaaactatgatatattgagtaaatgtaggaggaactaaaaacaaataaaaagtaagtacgtaaatatcgtacaaaagtagttgtttattcgcaagattttagcactagtttacaaactttatttttttggtgagtaccttaaaacctttaacataaaataagggcagctggctgtgaagctgtcattaaataaagataatatttataattattgcatagaattcagtaaacaatattggcatatgtgtgttatagagttcaagatctctatgaggggaacaaggttttagagaggtacactcttggtgtaaactagtgtacttattaaattaatacaaattattattaaagagtagcaaatgcgtagaacgttaaaatcgtcgcgttagtgtataattgcaaaataatttaagattggtcttaaacgaaacgagtcttaacacaaatgagtctcaaaaactaaaggacgacttcaatattttgaaaaacgaaatcgattgggtcttgtgggcccctcgggccaacgtaacttacgatctagctagggggattgaggctgtgtgcgagccaagttcatttgcatttggcttgcatcgttaactttaagattaactttaatgatttggttatgtgcatgagggggttgtgcatcgtctagctgtagagagccgggccagtcgcggaggtcagggagtgtcacgacaccgacgtcgccaggaactcctgcagtcgctgcactgtgccgcggtccagcttgcacaggtcgaagtcgaacgtcttgtgcgtgatctcgtagcatccggtggccgcgatcatctccacgacgtgttgcaactcctcattgtcctgcagggtcatgatcttgtggtgcagctcctgaagctcgctcaaatactccgtgggcagctggagctgtcctggtgtcgtcatctcaccgggcgaatggctgctgttgctgttcgtgttattgttgttattattattattattatttaagctcgccgccactgcagcgctgtggttgttgctgggcgaagatgatggtggagcaaggaaaccggctccggcattgggcgtcccgcctccagtgcctgtagagttggtttctctaggtggacgcaacgagggcgacttggatttttcgcccgccgccttgccctgctcctttttcgaggccttaacagggggttctataaaagcaccggtgactccggcaccactgccactgttactactttgtgagcttcttcgattgcgcttcttgtcctctttttccgacttctcggacttgtccaccttggggtccggagtcttgtccggcttttctgtcttgtcagtgttcttctcgagcgtcttgtcgttctgcttggacttgcccttgtgttccttgacagtagacttcgtctctttgccggaaccggtgttgcccttcgtcggcttctgctggctgctactcctggcgggtaggtcgggaaaactgctgttggaactgtcggagtgctggagggtggcggctgctgctgcagccagagcgttggtggcggcaagatccggcgccgactgtgctgagtccatatcgctaagatctaggttgctgggcgttttgctctgacccgactgtgactgctgtgactttccagtgtgtttggtatcggcttgcttatcgacggcctcccgttggcgcttctcatccttcccagaggatttctccttggactttttgtgcttctccttcttgctgccgctgctggcactagcactaacaggggtcttgtccggtgcccctccctcggtggctggactggccccctctagtttaggcgatgggtcgaccgttgatgacttctctgaaccggtcacatgctgtttgtccttctccctttctttcagcttatccttgtcgcgctccttgtctttgtctttgtcccgatcgttgcgctccttctccttgtccttgcttttttccttcttcttgtgcttgtgggatttcttggtgtccgtcgcatttccattgcttgtgctcttatcacccttagattctgcggccttttcggaatgctttcccgttgcctcctctttttgcttgccaatgttcgagaccatgctgctgctgctattgctgccaaccgatgtgggcgtggccttgccggtactggccacctgggactgctgctgcaggtgggcagattgaaggtttccggaagccggactgtcggactggccaggacgctcgtctttgggcattcgcttgtctttgctctcatcgcgctgcttgtccttatcctttttatccttcttggatttcttgctggagctgcgctccttgtccttggactcggatttgacggacttgtgctcatcgcgctctttggaacgggaagtaggtgccaccgcaccagcggctgaatcatttgccgtcttcttgggactgggcgcacccatttcgtttggctttccaggcttaggacttgctgtgtgcttaaccagtcctccagctgtgccaacagaagtagccaccgtaagggcgttggcagatgtggtattgcctgaaccttgctcgcgctcacgctccttgtcccgtgatttatccttcttagacttttccttatcccgttcgtgcttgccatcgccggacttactggactttcggtctttgtcgcgaccatgccgatcttttttgtccttctcccgcggcttgtctccgccgctggacttatcgcgatccttgctcgccttctccctgccctcgtgaaacacaccctttccgccaacggcagcacttttagcctccggagagtgcttggagacaggcacctgggccatgttgttggccgttacgctggtcttcgtgataggcggaccgaagagggcagagaaggcattgctctttccgggatcctcgctgcgcgacttgtgtttcttgccggtgtttaaatccgagttcatggatattgtacctggtacgcctttggctttgacaccagacatctcattactgtgcgctgtctcaccgctgccaacactgggcgaaagcgttcgggcgagactgccggcaccgatgttagctccgaacactggcactccaccgcctcgcataagtttcgtgcgaaactcctccgacggcgcctcgaaaatgtgcgtctttacctcgacgtggtgctgcggtggacccgtggactgcagtaccaggtcgtactggtaaacaatgcgcttgggttcgtctcggttgcgaaagtaaatctcaacaggcagtaggaagccagcgtagccggactcctgaatggcatacggcggttccttgaccactgcaaataaacaattcgggtaacagagttaatccgactgaactactcccatgatatatcgccgcatttacctcgtttgggtttcggaaaggattcgtgcagcacaaagaccaccttctccacaaaagcactgatgtccgccttgttcacgccctgaacgtagatctcccagtcgtgcgtaaaggcctgcggatgcggtgtcttcttgctgcgcagcttcgacgtgtggccaatttcgaattgcaccttgaccgccatgcctgtgggtagggcatcaagttccagtgattgcctgcaattaagtggtgaattaagatgctacgtattagcgcgccaaaaccaatgcaactcgagtgtgcaagcacttaagcttgatgcgacgtaaacaaatgatcgccagttatgtggaaaggcccaatggattgccaaacgaggtgttagccaagtattgcgctccttgctttcgcttcagtgtgcatgcgtgatttctaatgcgaatcctgtggcaggtcacgtcctccaagtctgcgcctggctttggaaacctttcaatcggtctcaggatgcccgcactagctaccacattttgaatatcctttgataaccgacgttttttgttatgattcgctttgcgttcaatttgttattgtttgtgagcgaatgtgtgccacaatgtggacttttcatgttgcaagctttcgccgtgtttgtggtttcctttagccacatgcccccaccagccacgctttatacttactatcgcgccgtgcggcattcacatggagatgcgcacaattttcagaaaaaacgtaaaagcttggagccagaatcgaagtaaattttggaaaaacacagaaaataaaatccaaaatggtaaagtgtgaccaaagttcggggcaccaaaaaatacacttgagtcgggtaaaatatactagaatatgcgttgcgtttactttttctagggtggctcgtgaaattagttttaaatatgtacatatatctagtttaaattcattcagatttttaactcgatgcattttttaaagaatagagtgctttatttgtttcttagtagaaaaagtatagtttcttgccacatggtccttggggcccatttccgcacggaactggggatggtgccgccgaagtggttgaagtatcagaggaggcttccgtcgtggttgtcgaggtggaggatgcagcgaatccaacgatggcgcacagaaggaacagaatggcgaagaacttcatcttgattactcttttgtgactgtgatattttcccggggatagttgctcaattttatacctttcatttttagatttgcaaatattgacacaaatgcttcaattccgcctatgtaccaaatatcaagagaaaagaaacaattcggcaaacactgcgtggtacttaaataatgtgttttgtgtttgtttagaaatagcaacacatggaatttcgctttttgccacttacaggttaagcttttaagcatagcacgcggattcagacaagatgatatatatatgggaaatttttatattgcatgatcattgtttttaaggaacccgcataaaccaaaatagtcagcaaaagcttctgtgatccggaaccagttcggccgcctgtttggttcacagcacttaaaagaacacttgggaaaaacaataaaaatatttcgcaaaagttatggcgaacgctggataagtcagccaaaaattgaatccatcggagcgactgccttggagccacagcccacccatgatgacgaccgacttcgcgggcagccagttcgtgtccagcaatcccaacaccagctgtagtgcatcccgctggctaacggaggaggtatttgcatggatatgcaatttgaaaatgatttg

SEQ ID NO: 10070 - DNA, 3562 bp, DROSOPHILA
tcacactttaccattttggattttattttctgtgtttttccaaaatttacttcgattctggctccaagcttttacgttttttctgaaaattgtgcgcatctccatgtgaatgccgcacggcgcgatagcaatcactggaacttgatgccctacccacaggcatggcggtcaaggtgcaattcgaaattggccacacgtcgaagctgcgcagcaagaagacaccgcatccgcaggcctttacgcacgactgggagatctacgttcagggcgtgaacaaggcggacatcagtgcttttgtggagaaggtggtctttgtgctgcacgaatcctttccgaaacccaaacgagtggtcaaggaaccgccgtatgccattcaggagtccggctacgctggcttcctactgcctgttgagatttactttcgcaaccgagacgaacccaagcgcattgtttaccagtacgacctggtactgcagtccacgggtccaccgcagcaccacgtcgaggtaaagacgcacattttcgaggcgccgtcggaggagtttcgcacgaaacttatgcgaggcggtggagtgccagtgttcggagctaacatcggtgccggcagtctcgcccgaacgctttcgcccagtgttggcagcggtgagacagcgcacagtaatgagatgtctggtgtcaaagccaaaggcgtaccaggtacaatatccatgaactcggatttaaacaccggcaagaaacacaagtcgcgcagcgaggatcccggaaagagcaatgccttctctgccctcttcggtccgcctatcacgaagaccagcgtaacggccaacaacatggcccaggtgcctgtctccaagcactctccggaggctaaaagtgctgccgttggcggaaagggtgtgtttcacgagggcagggagaaggcgagcaaggatcgcgataagtccagcggcggagacaagccgcgggagaaggacaaaaaagatcggcatggtcgcgacaaagaccgaaagtccagtaagtccggcgatggcaagcacgaacgggataaggaaaagtctaagaaggataaatcacgggacaaggagcgtgagcgcgagcaaggttcaggcaataccacatctgccaacgcccttacggtggctacttctgttggcacagctggaggactggttaagcacacagcaagtcctaagcctggaaagccaaacgaaatgggtgcgcccagtcccaagaagacggcaaatgattcagccgctggtgcggtggcacctacttcccgttccaaagagcgcgatgagcacaagtccgtcaaatccgagtccaaggacaaggagcgcagctccagcaagaaatccaagaaggataaaaaggataaggacaagcagcgcgatgagagcaaagacaagcgaatgcccaaagacgagcgtcctggccagtccgacagtccggcttccggaaaccttcaatctgcccacctgcagcagcagtcccaggtggccagtaccggcaaggccacgcccacatcggttggcagcaatagcagcagcagcatggtctcgaacattggcaagcaaaaagaggaggcaacgggaaagcattccgaaaaggccgcagaatctaagggtgataagagcacaagcaatggaaatgcgacggacaccaagaaatcccacaagcacaagaagaaggaaaaaagcaaggacaaggagaaggagcgcaacgatcgggacaaagacaaagacaaggagcgcgacaaggataagctgaaagaaagggagaaggacaaacagcatgtgaccggttcagagaagtcatcaacggtcgacccatcgcctaaactagagggggccagtccagccaccgagggaggggcaccggacaagacccctgttagtgctagtgccagcagcggcagcaagaaggagaagcacaaaaagtccaaggagaaatcctctgggaaggatgagaagcgccaacgggaggccgtcgataagcaagccgataccaaacacactggaaagtcacagcagtcacagtcgggtcagagcaaaacgcccagcaacctagatcttagcgatatggactcagcacagtcggcgccggatcttgccgccaccaacgctctggctgcagcagcagccgccaccctccagcactccgacagttccaacagcagttttcccgacctacccgccaggagtagcagccagcagaagccgacgaagggcaacaccggttccggcaaagagacgaagtctactgtcaaggaacacaagggcaagtccaagcagaacgacaagacgctcgagaagaacactgacaagacagaaaagccggacaagactccggaccccaaggtggacaagtccgagaagtcggaaaaagaggacaagaagcgcaatcgaagaagctcacaaagtagtaacagtggcagtggtgccggagtcaccggtgcttttatagaaccccctgttaaggcctcgaaaaaggagcagggcaaggcggcgggcgaaaaatccaagtcgccctcgttgcgtccacctagagaaaccaactctacaggcactggaggcgggacgcccaatgccggagccggtttccttgctccaccatcatcttcgcccagcaacaaccacagcgctgcagtggcggcgagcttaaataataataataataataacaacaataacacgaacagcaacagcagccattcgcccggtgagatgacgacaccaggacagctccagctgcccacggagtatttgagcgagcttcaggagctgcaccacaagatcatgaccctgcaggacaatgaggagttgcaacacgtcgtggagatgatcgcggccaccggatgctacgagatcacgcacaagacgttcgacttcgacctgtgcaagctggaccgcggcacagtgcagcgactgcaggagttcctggcgacgtcggtgtcgtgacactccctgacctccgcgactggcccggctctctacagctagacgatgcacaaccccctcatgcacataaccaaatcattaaagttaatcttaaagttaacgatgcaagccaaatgcaaatgaacttggctcgcacacagcctcaatccccctagctagatcgtaagttacgttggcccgaggggcccacaagacccaatcgatttcgtttttcaaaatattgaagtcgtcctttagtttttgagactcatttgtgttaagactcgtttcgtttaagaccaatcttaaattattttgcaattatacactaacgcgacgattttaacgttctacgcatttgctactctttaataataatttgtattaatttaataagtacactagtttacaccaagagtgtacctctctaaaaccttgttcccctcatagagatcttgaactctataacacacatatgccaatattgtttactgaattctatgcaataattataaatattatctttatttaatgacagcttcacagccagctgcccttattttatgttaaaggttttaaggtactcaccaaaaaaataaagtttgtaaactagtgctaaaatcttg

SEQ ID NO: 10071 - protein, 931 aa, DROSOPHILA
MAVKVQFEIGHTSKLRSKKTPHPQAFTHDWEIYVQGVNKADISAFVEKVVFVLHESFPKPKRVVKEPPYAIQESGYAGFLLPVEIYFRNRDEPKRIVYQYDLVLQSTGPPQHHVEVKTHIFEAPSEEFRTKLMRGGGVPVFGANIGAGSLARTLSPSVGSGETAHSNEMSGVKAKGVPGTISMNSDLNTGKKHKSRSEDPGKSNAFSALFGPPITKTSVTANNMAQVPVSKHSPEAKSAAVGGKGVFHEGREKASKDRDKSSGGDKPREKDKKDRHGRDKDRKSSKSGDGKHERDKEKSKKDKSRDKEREREQGSGNTTSANALTVATSVGTAGGLVKHTASPKPGKPNEMGAPSPKKTANDSAAGAVAPTSRSKERDEHKSVKSESKDKERSSSKKSKKDKKDKDKQRDESKDKRMPKDERPGQSDSPASGNLQSAHLQQQSQVASTGKATPTSVGSNSSSSMVSNIGKQKEEATGKHSEKAAESKGDKSTSNGNATDTKKSHKHKKKEKSKDKEKERNDRDKDKDKERDKDKLKEREKDKQHVTGSEKSSTVDPSPKLEGASPATEGGAPDKTPVSASASSGSKKEKHKKSKEKSSGKDEKRQREAVDKQADTKHTGKSQQSQSGQSKTPSNLDLSDMDSAQSAPDLAATNALAAAAAATLQHSDSSNSSFPDLPARSSSQQKPTKGNTGSGKETKSTVKEHKGKSKQNDKTLEKNTDKTEKPDKTPDPKVDKSEKSEKEDKKRNRRSSQSSNSGSGAGVTGAFIEPPVKASKKEQGKAAGEKSKSPSLRPPRETNSTGTGGGTPNAGAGFLAPPSSSPSNNHSAAVAASLNNNNNNNNNNTNSNSSHSPGEMTTPGQLQLPTEYLSELQELHHKIMTLQDNEELQHVVEMIAATGCYEITHKTFDFDLCKLDRGTVQRLQEFLATSVS

SEQ ID NO: 10072 - DNA, 4049 bp, DROSOPHILA
aacgcaaagctctccgagatcatatccaaattcgtgaatttccaggagagccagggtcaccgggttaccaactatgtgcgcattctgctcgaggaagctgatgttcagccgactccgctggacttggatgacgaattggatatgactgagttaccgcatgcaaataaatgcatttctcaggaagcagagaaaggagtcccaccaaaaggtgagttcaacatgtccacaaacgtggatgtgccaaaggcgttgggggatgttctggaggcccttattgcagccgtatacctggactgccgagatctccaacgtacttgggaggtaattttcaatctcttcgagccggagcttcaggagttcacgcgcaaagtgcccatcaatcatatacgacagctcgttgagcacaagcatgcgaagcccgtgtttagctcgcccatcgtcgaaggggaaactgtaatggttagttgtcaatttacctgcatggaaaagacgatcaaggtgtacggatttgggagcaataaggaccaggccaagctatcggctgccaagcacgcccttcagcagctaagcaaatgcgacgcctaatatgatgattccagcccagtctagtttctgctaaactgcattgaatttgctttctagccaagacgtaatcctttggaagaggacagcaaagggcacctaatgaacttaactgtatatcttagaattaaaaaatacttttccatcgctttaatagacataaatgtctaaaaccaaaaaatcatttttgatcaccataaattgttaagaccttttaaatcaaaacaaaaacagcccatttggaaacacaatctaaagatgctatgccaatttcctcaaatacaaacggtttttaattatttttttatcaattattgccatttaaaatgttttagcttcattgttattaataaaatttaatagcttccccaatacaatatttgttaccttgggtcgaaataaatatttttatacaattgaatttatcaatgggcgtttttatttaccgcgtgcatgcttcaatgggatttacaatcggcgacgtcgtcaacggcgtatcgctacttatttacattaaaaatgccgagtgtattctgttcatcctctagatcagatccatgtgcttatagccatacatcatttgttgctcgagggctctagtgcttcacgaattacaaattatagtaagtaacatttggggttaacccgaaatcataggttttcaaagtggtaattggttatgttaaaaaacaaatcgattagcattatgcttacaattggaatgattaatctagcaagacaaaatacatactaaaaaagtggacacacacaagtacacaatacaactaaggggtaatccgaatgcgcattccggtttgagattaaatggaaataaatcagcacaacttatgcgacttaaacgcgacaggtgcaatccggcttattgatgctgcgctgtcgtgtctgtaagttacggagagcagctccgccgtactgaataccgctgccgatgcgctcgggatccagctctccggtctcaattttggccagtatggtctttgagcacttgagaaaggcctcttcaacattctcccccgtcttggcgctcgtctccaggaagataagctctgcaacgacaaacagacgtagaattacgataggaaatttatggagaatcctaaaaaacagaccgttctcttgggcaaaggtgcttgcttccagaaaggtcacatcacgcgcctcctccaagtcctttttattgcccaccaaaaggatcacaatatttgggctggccagagtgcgagcatcattcagccagtttgtcaaagcattgaaagagtcccgcgaagtggcatcgtagaccaggagagctccggctgctccgcgatagtacgatcttgtcaccgatcggaatctctcctgaccggctgtgtcccatatctgtagctttaccgacttgccgcccacgttcacaatccgcgagccgaactccactccgatggtgtgcgaactgtcgtctttgactttgatggtacatcaaaatgtataaaatgcattaggcgtgtaccattttcaggctaccaccaaacttacacttgctctcgatgaagtgatgcaacagacaactcttaccgctgccagcactgccaattatcaggaacttgaacaggtaatctaggtgagcgccgagcaccgatattaattagtaaaatgcattaattaattaaatgtgtgctgacaaaccgtatgtttccgacattgtttttgttcgtcttctgcgtagttgtcttctttgtttgttttggtttttcggccagacttcaggactatcggattgctggtgcgtatgggcaccaggaagtgcgcaggacacgatcaaaacccgcaatatccgtcgataagtaagcgtttaaacaattagaaagccaaaaattaccttaaaatctttgactggactcacttcagtgagaaggttcgctacaaacgcgaaaataccaacaaggggtgggtgtgaccaggtggttcaaaatatgattcatattgcaattaagtttttgtttacttttaaaatatttccaaatatatgaaaattgccgaaagctacaaagaaaaaacaaaatatgaaatgcagcccacaaaggtttattgtcttttttcaaaaaccctcttctattcatcacacaatttgcatacatacatatatgcaataaaagtataaaagatggtgggccctggtaatccaacccggcacatagtctacgtatccttttgcttctctggttcgtagtcttgatagcaattaatgggatccttggccgtataaactgagtatgccaatttgctgcccttgaagttctgtaaactcagggcagaaagggaaaattacttaaaattaaccattctgataagcactatctgccgtaccttcatatcgccagatatcagagtccaaaggaaaacgaacaccgccggtatcacagtggacaggacaaacagctcgaatgtgttaagctccccaaaaacggatattttcattttaatttcgtaatttttgatgagttctttgcgaatattagtttttgttgatgactagttgttgttctcacgtaggccgcacagtgttgtcacaccttgcttttaaagttttacgctatcctacggtcacactgtagtggtattatttaggacatttgaaactattgcgttcattgcgaacattttggtgcgtgtgaaaagttattaaatcaacaaaaatggctttccgcataccttttggcaagaagcacgctgagatagcgagttccttgtaagtatatgctgtcgtgcttgattctgcatcatgaattcattagtgttcccgctcttttactgctaccaaagcacacattgcataaccccatccagagaactaaactagtttcttttaattcgtagcatccgatctggagccggattcggaggagctgctggcctggccgtgctttactacaccgactggaagctggtcctacagtacgtgcccatctacggatccaagttcgaaaaaagcgagtaaccttgcctgccgtagttgaatccacagttagcctcgatgttttgcttggtgaataaaataagttaaaacgaccaaagggtattactgagtatcgtatattacaaataactttgtagagggcacaaggatcggttagattatttctctagctaactaatcgctaaggcttaagtaactgttccctaagtcttacatggctagcctattttgatcaagcattgtataaaaaagtacaacggcgagctgcccattcgattggaagagtacaaaacggtttcttttttgaaaagagaaatatgagattgcgtatttggaagcccgaatagaccgacgattgaatccttttagacaagtaatttggaatttcgcttaataaattctagtttgaaccataactttcctaacaatccggttcaacaaaggaggcggggaacagcccggttttgtgggtacgggcatgggtgcccttata

SEQ ID NO: 10073 - DNA, 1778 bp, DROSOPHILA
atccgtttttggggagcttaacacattcgagctgtttgtcctgtccactgtgataccggcggtgttcgttttcctttggactctgatatctggcgatatgaagaacttcaagggcagcaaattggcatactcagtttatacggccaaggatcccattaattgctatcaagactacgaaccagagaagcaaaaggatacgtagactatgtgccgggttggattaccagggcccaccatcttttatacttttattgcatatatgtatgtatgcaaattgtgtgatgaatagaagagggtttttgaaaaaagacaataaacctttgtgggctgcatttcatattttgttttttctttgtagctttcggcaattttcatatatttggaaatattttaaaagtaaacaaaaacttaattgcaatatgaatcatattttgaaccacctggtcacacccaccccttgttggtattttcgcgtttgtagcgaaccttctcactgaagtgagtccagtcaaagattttaaggtaatttttggctttctaattgtttaaacgcttacttatcgacggatattgcgggttttgatcgtgtcctgcgcacttcctggtgcccatacgcaccagcaatccgatagtcctgaagtctggccgaaaaaccaaaacaaacaaagaagacaactacgcagaagacgaacaaaaacaatgtcggaaacatacgattacctgttcaagttcctgataattggcagtgctggcagcggtaagagttgtctgttgcatcacttcatcgagagcaagttcaaagacgacagttcgcacaccatcggagtggagttcggctcgcggattgtgaacgtgggcggcaagtcggtaaagctacagatatgggacacagccggtcaggagagattccgatcggtgacaagatcgtactatcgcggagcagccggagctctcctggtctacgatgccacttcgcgggactctttcaatgctttgacaaactggctgaatgatgctcgcactctggccagcccaaatattgtgatccttttggtgggcaataaaaaggacttggaggaggcgcgtgatgtgacctttctggaagcaagcacctttgcccaagagaacgagcttatcttcctggagacgagcgccaagacgggggagaatgttgaagaggcctttctcaagtgctcaaagaccatactggccaaaattgagaccggagagctggatcccgagcgcatcggcagcggtattcagtacggcggagctgctctccgtaacttacagacacgacagcgcagcatcaataagccggattgcacctgtcgcgtttaagtcgcataagttgtgctgatttatttccatttaatctcaaaccggaatgcgcattcggattaccccttagttgtattgtgtacttgtgtgtgtccacttttttagtatgtattttgtcttgctagattaatcattccaattgtaagcataatgctaatcgatttgttttttaacataaccaattaccactttgaaaacctatgatttcgggttaaccccaaatgttacttactataatttgtaattcgtgaagcactagagccctcgagcaacaaatgatgtatggctataagcacatggatctgatctagaggatgaacagaatacactcggcatttttaatgtaaataagtagcgatacgccgttgacgacgtcgccgattgtaaatcccattgaagcatgcacgcggtaaataaaaacgcccattgataaattc

SEQ ID NO: 10074 - protein, 213 aa, DROSOPHILA
MSETYDYLFKFLIIGSAGSGKSCLLHHFIESKFKDDSSHTIGVEFGSRIVNVGGKSVKLQIWDTAGQERFRSVTRSYYRGAAGALLVYDATSRDSFNALTNWLNDARTLASPNIVILLVGNKKDLEEARDVTFLEASTFAQENELIFLETSAKTGENVEEAFLKCSKTILAKIETGELDPERIGSGIQYGGAALRNLQTRQRSINKPDCTCRV

SEQ ID NO: 10075 - DNA, 3960 bp, DROSOPHILA
catcagtacgcaccaagaattcgcaatgattaacaaaacggtagacaccgagatctacaatcacaaatatgataacatagttacagtacacaacactttcttcgtaaaaaaaccatttgttgtagttgctatcgaatagtcgaagtgagaactgactgctaaatggctgaaataattgtgacaaatactacccagtcttcaaattgaaacgcggaaatggaacaaaatgtgatgttgcacttttactttgctcttaaaaaagttttttactgtaaataaaatacatgtactggaatttttgtgtaaaatcgacatcgaattaattcgattccatcaaacacagctgacgcaaacatctgttaatctcttatacaaagtaaaggagagttgtatacctttaaaaaactttaaaacattttttttattatggtatctttttctagctttttagtagcacacaaggacgaggtccgtgatataaaaattttgttaaagagaagaagaagcattaaatagttaagtggaagataatatataaaaaaagtatccctctgtatccctctttcatcaaacctcttcacgcaacgacgacaattgtggtgaacatttcgttgcaacccatcacaagcaataaatcaactgatgacaagtatacacacatgttgatccgcaggcctgtgcaaaagttcgtcaaacatcgatgaggtgccacgtggaacttacattttgctacgttgagatcaaactttttttttatttctttccgggcactaataagtgtttcaatttatggacgttttgtaaaaattgcaataaatttgtttatttactcgcacatcaaaaagcagttcgtatgagaatgagaacgtgttaaaaatttggttgaaataaaaatgtcgtgtttcatttccatcgtttcagtagcaataaaaaacgaatccgatggcgtagatatcgatatacctgcattccctttcaaacgtgttatcgtattgttcagccaattgtgcaacgtgtttgagtaaatctgcgggcgaaagactaaaaatgaaagtagaggcattggacaaattctgggctgacaagagccgctacgatcttgccgagaagcgattctacgagggtccccagaaggtaaaatctctaagcaatcacagccataagtacttaagttgttagccagtttcacgtggccggtaaatcagttcaaatggtttcggcaatgtttattgcaaatctgtttgttttaacagcaaggacgccgaaacacacatgttctaaacttcaatacatacgtagaatgatctattaaaagatttctatatttatctgcctttgattttcaattgctgtgttcatattgcacattacattggtatattcttgtagctgtatgtaacaggtgaacgtttaacacttttaaaaaatataactatgtgcgtaaagtgtatacaaaacagagtgtgagagaaaactaactctggcaagccaaattttgaatacactttccgtttggcaattggtataaatacaaaatatagtatgcaaaacataagtacttaacatgacacctacacaacaaaattcgtttattcaatggaaatgtgccaaaaacaaatcgatgtatacaaagttaaaacctattgaaattcagggaaatactatagttaagtaaaggtttaaacacgttgtattctatctacacaaatatactacacaaaatgcatagcactgcattgtataatatttaaactacgtacaatttttgggctgattagagtgaggcttatcagtatttcagcatgcttgcatgacaacagacttgaagtagatgcccgtacataaaacatctcattttgcttaaaaattattatccctagaatcctttgtcaaccattcgatacaccaaatgtcagttcacacaagtaatcaatggtgttgtcttatttttaaaggtaactgatcgcagccactacagcccattagtaagcgaaatcgcaaaggctagggaacacatacagaactcgctggaaaaggtaactattgtgataaatctttgtatttcaacatttgatttgttcacattcctaggtttctttcggtttctttaaaactttgtagagaattgtataattattatttacaatatatttagtctgtacttatgatcaacatatcccaatgaggacttgaatttgaattattaatcaagccttttgtgtgtgttccagatcgatggcgttactctggacgatggcttaaattccgagctggccaagcgtctggcccaattggagggtgaacacaaggagttgaagacccaggtttccttgttgaacgaacttttgactgccacagtgaagcgcttggaaactcagctgaaattgacgaatggagtgtcgaaagagcccgaggtcgaagcgaaaaaaccagaagcgaacgacgacgatgacgatgtggatctatttggatcggacagcgaggaggaggatggagaggccgcccgcataagggaggaaaggctggcagcctatgctgccaagaaggccaagaaagttcaaattattgccaagtcgaacatcattctggatgttaagccgtgggacgatgagaccgatctgaaggttatggagacggaaatccgcaaaatcacccaggacggtctactgtggggagcttccaaattcgtgccagttgcctttggcattcagaaactgagcatttcatgcgtggttgaggatgataaggtttccatcgattggctgactgaggagatcgagaaactggaagactttgtccaaagtgttgacatcgctgcgttcaacaaaatctaaggggtaacatataatttttcaattcacgatcggatttgccgcattacaaatgtgtttgggagtcgtctaaataaatattttgataaaaaccaacttaaaaaactgcatttaaactgggagtaattggtaaatagtttactttaggatattttttatgcaaacgatatgttttgaattcgctaaaaggccatattatttcaaaatttataagaaaagaagatatatattagtttaagtcatgtattcgccattctttgattaattaaattcatttacgcacgagtataaaaacaatgcaaattacctattaaataaatattccaggtcacagctaaattatgcacatattaataatgattaaactgagggactagtttcataaggctctacaaattataaatagttaatcataagttatttaaccatcctaaagcataacttcgttttcgggtctcgtcgacgtttggcgcttaaactcacagctgccaggagaatgtcgaagagtggtcatcgcggtgctggttggagcataggatttggtcacgccagcgcgggttctagtcgatgcagtgctcggatttgattgcagaccttaaagattaaataaatacaaattacatgtagtatattcaactaactgccagttaattgatgccactgaaacttaccaaacttaaacataatttcgttataaattctgcgcttaaacacaaatataatgaagacaaagattccaagtagcacattaaacgaatcgctgatggtccaaaagaacgttttcttgtgatcataaaacaaaatgctaactatttccaacagccatgtgatgcccattacgaaacacagtttcgtgttcataacgaatctggttttgtcctgaaagaatcgccttttcaaaactggcttgtcgctgttcaagctctgcattttgtatatttcattttttactttgttgcaatacttcattgtgagcacgaatagaactaagtttataatgaaaagtatgccaactggacccgaaaagaacaataagctggctgaaccaaaagaatcatctggaattaatacaaaaatatacaaatactttaatatttaaatcgtaatttaattagatttttaacttaca

SEQ ID NO: 10076 - DNA, 944 bp, DROSOPHILA
ccaattgtgcaacgtgtttgagtaaatctgcgggcgaaagactaaaaatgaaagtagaggcattggacaaattctgggctgacaagagccgctacgatcttgccgagaagcgattctacgagggtccccagaaggtaactgatcgcagccactacagcccattagtaagcgaaatcgcaaaggctagggaacacatacagaactcgctggaaaagatcgatggcgttactctggacgatggcttaaattccgagctggccaagcgtctggcccaattggagggtgaacacaaggagttgaagacccaggtttccttgttgaacgaacttttgactgccacagtgaagcgcttggaaactcagctgaaattgacgaatggagtgtcgaaagagcccgaggtcgaagcgaaaaaaccagaagcgaacgacgacgatgacgatgtggatctatttggatcggacagcgaggaggaggatggagaggccgcccgcataagggaggaaaggctggcagcctatgctgccaagaaggccaagaaagttcaaattattgccaagtcgaacatcattctggatgttaagccgtgggacgatgagaccgatctgaaggttatggagacggaaatccgcaaaatcacccaggacggtctactgtggggagcttccaaattcgtgccagttgcctttggcattcagaaactgagcatttcatgcgtggttgaggatgataaggtttccatcgattggctgactgaggagatcgagaaactggaagactttgtccaaagtgttgacatcgctgcgttcaacaaaatctaaggggtaacatataatttttcaattcacgatcggatttgccgcattacaaatgtgtttgggagtcgtctaaataaatattttgataaaaaccaacttaaaaaactgcatttaaactgggagtaattg

SEQ ID NO: 10077 - protein, 256 aa, DROSOPHILA
MKVEALDKFWADKSRYDLAEKRFYEGPQKVTDRSHYSPLVSEIAKAREHIQNSLEKIDGVTLDDGLNSELAKRLAQLEGEHKELKTQVSLLNELLTATVKRLETQLKLTNGVSKEPEVEAKKPEANDDDDDVDLFGSDSEEEDGEAARIREERLAAYAAKKAKKVQIIAKSNIILDVKPWDDETDLKVMETEIRKITQDGLLWGASKFVPVAFGIQKLSISCVVEDDKVSIDWLTEEIEKLEDFVQSVDIAAFNKI

SEQ ID NO: 10078 - DNA, 3943 bp, DROSOPHILA
gaaatcatgtactgagaaccaaccgaggatgcggagcccagaaacggacagtgagcactcggaaacggactccgtcggctcctccacggacagtcagtcgagtggattgggcgcggtgcgccaccagcgacggagcgcccagcgcacggatgtcttcagcctcaaggccatggcgcctaggtgagtcagtgcagtgactgagtctccgaggggagtccaaagttccagcttatctgtaatctaatctgaccctttcgtaggccaaatgccggacccggcggctggttatgtctactgctgccgctggccttgaccgtccgcctgttgcgccacgccacgccggcatgcaaggaccaggccaggatgcagtgtctcctcacggtggccgccggcggtatggcccttgaaacgctgtgtttcttcatctatgcctttgtgaagacgggcattttggttaaatgcctggtcagcctgctgcccggagtggccaccagtttgagcttctatctgctggtggacacctcactgaccttcgccatcatcgtgggattcgtgatgacctctgcttatcagcaaatctatatttacacgctacgtggcttccagagatccttcacgtatggcgaagcctcggttttcgtccagggactggtgctcttcgctttgagtgccatccatcgactaggtggattcttttgcggcggttcttggccaaccgaggaatttgatacgctcaacatgatcatggtggtatgtaaggctagggagtgttgaatggaatggaaccaagttttaataacccgcttgcattggctctacagaatgccctattttgcctgctggtgttctgcgtggctctcgtcctctttccaacgctgaggaagccatgtcgcttctacttgtggacggtgatgctcctcttggctgtcacctgcatgccggtgacgcgacctcttcctctgctggcacttgtgcagttcctgctccgcgatcaggagagactggccatcttggtcttctatatgctgctggttgtgctaacctgcctcacagtcgcctggcaaattggaagctccgctaaggccaatacacgtgtgcgcaagatcttccacctgctcattgttatggtctatatacccggattgatcttcgagtgcgccctgctctacttggccactggcgtggcgttggctgctttcgtggtcctggagctgctgcgtctgctgaagataccgccattcgccgatagactagctgtggcctttagcacattcaaggacgaaaaggacgccggagagttggctctaactccgttctgcttgctcatcggctgctcaatgcccatttggatgacaccatgtccgtgctctggcgacaatactctggccttgctatcgggaattctagctgtcggcgtaggagacactgcagccagtgtagtgggatccaagctgggacgcaacaagtggggaagtaagtagaatgaactgaaagatacactgatctttcaatgcgttcattcgcatatataagattctattttaacacgcgtgccatacttctaggatcttcccgatccctggagggcaccattgcgttcgtggtgtccattctcatggccgtctggctcctggagatttccggcctggtggccatgagccaggccaagtggttcgccaccattttcgcagcactgaattcggctctggtggaggcgttcaccgaccaggtggacaacctggtactacccctgatattctataccattgtgggcctggcctaaatagaatgcatatttatgtaaattagttttagtgtacgcattcctcggtgtatttatatataaaactacttattaagaatgtttataaaactctatattccatattatattttgacgaacttttatgggactaaaaagaagtacttccctaaaaatgtatatgctacctttctaatccaacacaaagctataagtttgatattttgtttagtttagataatatttataaatacaagatttctagaaccggacagcaggttattttatatctttaccaatatgtcatctcgtcttctgatccatttttgcccttctgaaagtgtagttactaatttccatctattttgtttgttatacacaaggtctaaaaaatatctaaaaatccaataagaatgcgctgtcttaacagtgcaccccgccgactgttaagttaacataatccactccgtaggcgtccaacagaatgttagccaacacgtggatccactgttatgggtgaaaaaacggcacaaaaaccatgaaaataaccgcataaacggcacaaaaaacacaatttcacttggtttatataaagtgcaaacactgctgatttttattacgtagaaatggtgaacggatgggtgctacacaagtgtgtagactggccggccatgtatgaatggctgctccagaacgctgctttctcgcctcgcaagtgtgttgcacagtatattcgccacattcaaccgcttattcgaagagagcgaagcccatgtcgtcatcctcggactcggactcctccttcttctcctccttcttggcctccttcttgtcgccaccggcggcggcagcgggtgcggcatcagcggctgcgacggcaccaccgccgcccaccggcatcgaggagagcttctcgcgaccctccttgatcaggtcgtcgatgctcttgccagccagctccttgatgaccttggtcagacgctcggcgtcgacctcaacgcccacagagctgaggatcttctccagatcgctgttggcgggcgagtccttgccaccgaggacggccagaaggtaagcagccacgtaacgcatgtttaagtcttgggttcttgacacgaaacgtgaattggcaaaatgtacgaaaaacacaactttcctttgcaagttgtcgtcgaaaaagaggcggaagtcagtgtggccgcgcggtcgaggctcgaaaataccagctcatacttatatataccaaagtataccacatccttatctagcaatacccctaatgaaacgataaattcaaatattattttcaattttgcttttaaataaaaattagagcaatattattgatttttgaacaatttggtgtgttttttttatatttacaacatcaaaaagtatttatattagcttaataatatgacctttcttacagcatggaaatgttatcagttgcaacactgggtttcaaacttggctatcgtaatagtgggaagcactttgctcttgcagtaggcggtcacaccatttgaaacggttctgttaggcgaggtctaacatactgttaagtgctggaaagagagcaaaatgagagtgatcgtaagctaagagaaggaactagggatgcgtaaaagttaacagctggctatcgatgattaacatgaccatcgttttaacagcagaacttaactgttatttgtacacataaatataaaactgtaataaaactcgaaaaagctgtataaaaaataaatttttttcgaaaatatgtttaatatgagatatttattattcttcaaaaacactttaaatttaagttgcacccccacttgaaataaattgcagaaaagacatgagacccatcttattgtatgctgtatatataattgcatatataaatgattgttgtacaaaattttgaaattgtataatgcattcctgaactttgtgtatcacatttcgatttggagggccttcaaacgccctcgagaatcgtttcacatgtaatggtcatcagatagttgatcggcagtagtattcacacttaacttacgactacaaacaaattaaggtattctttattccggatccgtatccccggacacaataactggactgtcgcgaaaaaataaacaaaatgcttcactacacttaaaggaacattggtaacaagaacgaagcgcg

SEQ ID NO: 10079 - DNA, 616 bp, DROSOPHILA
tctttttcgacgacaacttgcaaaggaaagttgtgtttttcgtacattttgccaattcacgtttcgtgtcaagaacccaagacttaaacatgcgttacgtggctgcttaccttctggccgtcctcggtggcaaggactcgcccgccaacagcgatctggagaagatcctcagctctgtgggcgttgaggtcgacgccgagcgtctgaccaaggtcatcaaggagctggctggcaagagcatcgacgacctgatcaaggagggtcgcgagaagctctcctcgatgccggtgggcggcggtggtgccgtcgcagccgctgatgccgcacccgctgccgccgccggtggcgacaagaaggaggccaagaaggaggagaagaaggaggagtccgagtccgaggatgacgacatgggcttcgctctcttcgaataagcggttgaatgtggcgaatatactgtgcaacacacttgcgaggcgagaaagcagcgttctggagcagccattcatacatggccggccagtctacacacttgtgtagcacccatccgttcaccatttctacgtaataaaaatcagcagtgtttgcactttatataaaccaaaccaagatggccagt

SEQ ID NO: 10080 - protein, 113 aa, DROSOPHILA
MRYVAAYLLAVLGGKDSPANSDLEKILSSVGVEVDAERLTKVIKELAGKSIDDLIKEGREKLSSMPVGGGGAVAAADAAPAAAAGGDKKEAKKEEKKEESESEDDDMGFALFE

SEQ ID NO: 10081 - DNA, 6087 bp, DROSOPHILA
tcgcaggaacttccgctgagcaacgcaagcgctccaggatgttttcgagcttttctcagtccttgaacttttgaccttgtttctggtcgcctttctcgctgccgcggttatgtaagcagctgtacgtatcattatgcaacctggtccacgggattcacggactctgtgcgcttgccattgcatctttgccgttgcagtggctctcaaactgcagagtcttcggcgagcgataagaccccaatcatcatcacccaggccaattaagtgggctttgcaaaatagatagcgctgttgaatgaatgactgaacagtacgctcgagtttattatctggatttatttgcccacgacagacaaccggcgaaaggcgtcagcagcgctttttcgaccaaatttgatagttttggcctgggccaaacgctgcagtaagcaaaataaatagtaaacattgaactgatagtgccaattggaaaagtgactcgtccagtgcccaaaaactgtttccgaaaattcttttcttttattgattaggcagccttttgaccaggttcaacgcgattattgacacatagcggtggcatagcgtaagcctatgagtaacattccgaatcggagagtacacggaaataaatattgaaatcgtgcacagagaaaaataattaattagttacagaaaattcatagatttactattagttattactacattgaaatatctacatttaattatttgctagtgtcctctaataaatatgtatatcctttatagtagttaactctgaaccctctctgttggaatctgattaaagtcttctaagtttttttcgggtgtacctggcacagaacccgtgggttcgttgggaaacgaatctcgtgagaaaagcttcgtcgcaagtgcagccacagctaggaaacattggcgtcggcgctctccgtgctccccattctctttggggctctctcagttggatgccgtcgtagccgtagtctcgtcgcttttgccgccagtagagcagtcgattttcgcacggagcacgacagtcgaaaaaaacttgaaagaagcattcaacagcagaagagtgccagtcgagagaaaattaattttgtacctttactcaaaatcaaacaacacacaatcgagaccagtcctcgatatttgaccagctgtgaagcatttaaacgaaacgaaccttttgatatacgaaaaaatcgaacggaaaaccctccggaaaagcacttgcaactttttctagtcgttttattatccaacacaggcacaaaaggtgagtgcacgcagaaggggtcatgctgcaagtccccagttgtttgttatgtgtggcatgctgcaacagtgaatgagtgttatgggaatgagtgttcttaggcaccaccacccacccattttccacgccccagccacccactcatacgtttgccgtgcgatgtgacgtaactgtcagagtctgagtgtgctattaccatcgcagattgctcatacgccgcgtgtgcaaaagaaaacaaacgcagacggagcttcatggtgaattttgcttgcctttgctcaaatccgagggataaacaaagctcaggggactgcaaacagtgcgcaaaataatcatatttaattgatcgatggcagcactatctaaatttagaaccctttcgaccattgggcgccatccggtgcacaaaaagttcccctttttccgaattgatctgcagtgcacagaggaaaatttgcaatttgtttgcttgtgagaatacatattaaatgttatgacatatcttaaaaataaactttgcaaaccaaatactaggcaggtgcctcaaatatttcatataaagaaactttcatttataactttttaattgaggcaaactttaataatgttggcgttagtaggcttcaattggggaggagtttaaataagaaattcagaaattcagaaatcaaatttatgacaaaacattttcattttcccatttatgaggttttttctgtgtactgtttcccatctctggccgtttgcccaaaagtctcgacttcacgtgcctcggcgctcagcgttctgcgaatttggcattctgcattttgcatttgcaaacccatgcgcgcttttgtttataaataaaccttgaataatgccggcatatattcactgctgtcttttcgcctgttcaactgtttttttatctgtgtgccttgggtcttaattgagctctggctctctggaacttacttttctgatgagcgcctcgctcgattgagttttttttttttgcattgcttgacggcgacgtcatttgttgcgcttttcgaggtcgctgggtgaatcagattcagtgccagtccaacaagtgcatgtggtgtggaaattgccatttatagtccaattaattcgtatacattagcggtcaaattgctttgaaaatcacttaactatttactcattcgatcttctctcaatttcagctaatacaaaatgttcgctttgtggtatttaacttttgctgtcgatgaaatacggtaagtgcaaaaggggttttccacagtttggcaagcactgctgtgccccccacagggcggatgaacgttttgtgttgcctacttttcggctgggtagtgttaatggtgaattgtagtttgggggcgtaatgagatcctttttggagttaagcttaaaaatattctgcaattcagaaaaaggtctaagtacgttttaaatgaaaagtttctggtatgtgattcgagctttgggggattgggtaatacaaataaatttactggcttttaatggttatgcaatgctaataacaacaccttcaccaagcaaagctactttcttgcatttcataaatcttggcgataacagtagtcgcacttttgggacgcaatcattgcaaacccgataatcttatcgctatcagttgttgaattagaccaatttagctctacgtttccgtgatcgttatggttcgaaggtgctaatgcgactgtgtgtataattttcctgcatttggcaagaaagttagtcaccgagcggtgtcacatgatgaactatctgtccgttttcccatctcccactcccccgatctcgtcgaataccccagcccataacaaccggcttttgtggctctaactctcattcgtgataagtgcaatcggctgatcgcacacattcaaacattctctgatttgcacatgtgcaaaacaaaattcgcatttttttggcaaaaaaataaagaaaaaagcgtccagttgttatctgccggcaattagcgtaataacaaaagtgataattgaagtttggagcggtattagtttttttcgttctcatccatacagccggcatttggggccggtattttgccgatttgccgattttatgccgggtggagctcgtttgtttgcttatcaatttgccgcacgagtttttcgtcagctattgccgttttggcctacgtgacaagagaaatgacgacgccggcccaaagaaatgggggagtggagaaagtaatttcgtaactggggaaatgggtgggaaataagaaattgtggttacagttctaaattactgccatttgtgggcattaaagcactgaaacatttgcgtctaagcaacacgcccaccaataggctaacgccttttggcaaagtacaataaataactggctctattttgttttcttatctatagggcattataaaagaactatgattaactctataacaaaagctagaaagtgcagtattttcatacttttcaaatttaaatcaatttcaaaaaccagggctgccttagatccttccagtgtgactctacgaactactaaaaggcttcatttacttttaattatattaaaatgcatatgatttactgcaattactgcatattgaaaaatcgttatttgcgactatatttgttttcaaatatttatcgaaatgttatggagtatagggatacaccaatgatttacaagggctgtcaaagttttcaatgcactaaggagtggtcacactgcttgtaactttacattgtccattttactcttgtcatttggcgaattaggacgcgtagatcgcaaattaattttattcttcgtctaaaaagtcttattttctataaaagcaattgttatttattgattttcaacggtaggcggtgcctatagttaaaggtgggtaatgtaatcatggaatattagcgctaagcgcgcatttccttgtttcacgcttcgccgcatttattctggaactttctgtaaatcgtagtggaaaaaagatgctacagtagacattgcatacaagcgcatgttaaaatgttagtgactaaaaatataaattatcaaatgcaaacagtgaaaaaagcatcataccttacacatttctcattctcttatcaatttatccatttttcatttgatattttatttgcagtgcactttagttttatagattccctaatttgatattttatttattcattttttgttttgttgccatttccccttttcatttgtagcaaacgtttagcttggttatttagttctaacaagccagcagcgcctgcgctcgacaacaagccagcgaatccagctcccgccaaggaatcagcaccagctcctgcacctgctccaactccaaagcccgctgtagtaccacctgctcctaaaccagatcccccaaaaccagcgccagcggtagccaaacccactccggttccagttcctgcgacagctcccgctccaccgaaggaagaacctgctccaaagcccaaaccggaacctgtgccatcacccgtagttgccccgccaaaaccaactcctcccccagccaagcccagcagtccgccaaaacaagccgacaagatgccgatcccactgccaaaatccttgacagaggccaataccaatggccaaaatggcaatgccgccaatggcggtaatgtggatgaactggtgttcggtggccagcaggccgagaaggtgcttccagcggccaaggaggccagcaatgacttcatcaagggcgagaccaatgccttcatccagtcgattaaggaggctcaacagttgggcgagcggtaagctttaaatcctttcgttttatgttttgtttatttaagtctttactttagaaaacccttggttgcctttgctaaccgatagattctattagctggtatctccttatttcgggcactttgttacaacattcttcatttatttccgaaaaatatgtatttttaaatttcatttttcctcatctcccatggcgagaagtgggttcaatgcactctggtgacttctcggcgaaaatagttgccatgcggcagaaactcaaccgcttggcgacaacggtgctgcagcatcagcaaattcgttggatcaccatgatgatggcgatgatgatgatgatgatgatggctatgggtggagaccacaatttgctgttatttttgtccgcttgggcggacagctcggctcacatggcgtcgagtctttgggatcttgtgctggtgctgcatgtgcagtctacggtttatttatgaacccgaactttgccatgtgtttgctcaccactttctctaattgtgcaccattgatttgccattaatattaatcggagacaaaccttggcgcacgcaagccctggactggacacttgtccttgcccaggtgttcaaggatctctgcccgaccagcgaggtaggcaggttcattggtttttggcagcctgcccaagtgaaatggaaatggaatgggcattggtgatgatgtggcagtgccgggccattatgagacctgtcgcgtcgctgttgtcaggtcacatgatctcccccatgcaaagtttatttatatttggaaacgcagcagaatgtggctgctgtgccgccacaatgtacacacatttccttacggattcattgttcatgttcagcaaattagcccggcagcagcgggcatatttgcctcctgcagcgaagggatcccattttagacgggcgtcatgcctcaaatctatctgaacggccttaggggcttccttcataatgaccactcgttctgatggacagaggtcttcatt

SEQ ID NO: 10082 - DNA, 901 bp, DROSOPHILA
ccgccagtagagcagtcgattttcgcacggagcacgacagtcgaaaaaaacttgaaagaagcattcaacagcagaagagtgccagtcgagagaaaattaattttgtacctttactcaaaatcaaacaacacacaatcgagaccagtcctcgatatttgaccagctgtgaagcatttaaacgaaacgaaccttttgatatacgaaaaaatcgaacggaaaaccctccggaaaagcacttgcaactttttctagtcgttttattatccaacacaggcacaaaagctaatacaaaatgttcgctttgtggtatttaacttttgctgtcgatgaaatacgcaaacgtttagcttggttatttagttctaacaagccagcagcgcctgcgctcgacaacaagccagcgaatccagctcccgccaaggaatcagcaccagctcctgcacctgctccaactccaaagcccgctgtagtaccacctgctcctaaaccagatcccccaaaaccagcgccagcggtagccaaacccactccggttccagttcctgcgacagctcccgctccaccgaaggaagaacctgctccaaagcccaaaccggaacctgtgccatcacccgtagttgccccgccaaaaccaactcctcccccagccaagcccagcagtccgccaaaacaagccgacaagatgccgatcccactgccaaaatccttgacagaggccaataccaatggccaaaatggcaatgccgccaatggcggtaatgtggatgaactggtgttcggtggccagcaggccgagaaggtgcttccagcggccaaggaggccagcaatgacttcatcaagggcgagaccaatgccttcatccagtcgattaaggaggctcaacagttgggcgagcggtaa

SEQ ID NO: 10083 - protein, 202 aa, DROSOPHILA
MFALWYLTFAVDEIRKRLAWLFSSNKPAAPALDNKPANPAPAKESAPAPAPAPTPKPAVVPPAPKPDPPKPAPAVAKPTPVPVPATAPAPPKEEPAPKPKPEPVPSPVVAPPKPTPPPAKPSSPPKQADKMPIPLPKSLTEANTNGQNGNAANGGNVDELVFGGQQAEKVLPAAKEASNDFIKGETNAFIQSIKEAQQLGER

SEQ ID NO: 10084 - DNA, 4730 bp, DROSOPHILA
ccatgcgccgccaggggtactagatccaaatgaaatacaatttaaaattcgaatgtataataataattacagtgttgcccaactaataagtctagtgccctcattgttcataaaaagcatgaccattgaaaatgtatttaaaatttgtattttaagcttatatatttaggtagctatttatttaataaggaaaagcagccggttaataaaacaattttattgagtacgtatgccttaaaatgtcatatctaaccggtaaattgtaacggtttccagttgtaactgttgtttaaagtgttcaatttggagatttagagattataatagaagaactaggatgtgtggacgggctgtgcgcgattggttggtgctattgaccatggagaagtacattggtaaattcctggagcgggggtacgacagcattgaacgctgcaagcttattatcgtaagcgatctgatcatgctgggagtggataatcccgctcataggaagctcctgctcgagggagtccggttcttggtcaacgcacccgagcagttcatctgcaaggagccgtgtgagctgcatgaggagattgaactgaaattagacccggatgttgagttgtttgcttcgctaaagtgcctggaaaatgttgatttcctagaaacacctgttccatattcgctaacatctccacaaaagacgctcacaactcgggactcttgcaaatggaatgtcaaaggtgtggatcagttaccttccgataacatatttaactaaatacaaacaaagcaaaaaataatgcgtgtgataaggatctttatatatttttaagaaccaataaaacgacaattgaaaagctgttttacaacactatcataatcaaccaatataatttcgtaaatatttttcagtttaaataaatacatatgtatctattatattaaagtaaaaaaaatggggtgagcagattacaagaaactcatactcctgtgttttttaatttaatgaaaattacttaaacgtaattaaaggattcaacaaagcgttcaacaaatacttgatgcctctcatcaaatcttggaggcgtgcatccatgggtgaagcggccaccactcgctcgatgctggccgtacccaaatcccgcgaccggcactccacacactcgatggttttcagcttcacctgcacgttgtcagccaaaagccgagaattgtgcaggattccatagaatagtacaacatcgccctcgcttaggagccgtgtgaagttcccaaagtcatggtgagctcgtaggataacatctgtggtggtggaacgacccagtagacggccactcctcttggtgcccaccttgaccagcagctcgtactcgtagcgattccatcgctgcagtgtgcaactaccgctctgagcattgaatgtcttgaacacgctccgccactcctcgcactgcgcatccaatttgggatcgcatttgaagtgctgcgatatattctcgccatgcaagcagcgcagcatcctgcccagccaaacgggcaaatagttcgcaatggtatcctccaaaaaattggacacccgcgagatttccactttggtgacgctgccctcccatatcacgggcattccattcagaagggagcaacgcagctgggcttttatcttattcggctgctcgtggacaggttgagcacaaagtgcatgaaagcgatcccagggcagagtattcgtctcggaaagcgagtgcagacccgctctgggcatggcattgaagcgcggcgtatccttaaaactcgatgtcatatagggtaagaccaacaagcacgctgttgtgatcgccgtgattagctgaaaaggtattagttaatatatgaacaaaaccttaccatattacacttacctgcagcattgtaatgtatttctgggtagctcggttaagcgccaaaatgcaggacaggaccactaccagcccgcaggcgagagctgtgctgccccaccgaagctgctcactagccagtcctaaactatcgatggccacgaagacaggcaccagaagtgccacgattccgaacagaggcaggaacaggacgattccagccaagccgagggctgctcgcatcactccaaaaacggtggaactctgcgaggtggctatgcacacttgcagccaactgagcgtgacgcagtgcgggatgaggaatgtgtagactccatgccaacgggagcgtttggccatcataattagcagcaccggaataaagagatacaaggcagtgcggcaattcaaacagaattcaatgccattgccaatgacaaacgatgagaaagtaggtacgcgtaggtcaagaaagcgccagcgcgtagacacaacctcgtccatttcgtacggatatttggcaagaacatttacggcaaaggaaacaatcactagccagtcaggcagttggtgggaggaggcgtacatggacacgcacatggtgatgaaggtcaaggctccagagattatagtcagctccgagtgtggcagccaggcgtctgtgaccaacgggtagacaatcaggttgcaaatgaaggcacaaaagaagtacaggtacggcttcatattgttgcgtaaaaagcgatgctccgcaatgtccgcctcgatgttctgatccccgtagctcaggaacagtcccgaccagatgcgaaagtccacgaactgttgtttggttttcagcatcttacacgtggcccagatcatgatgcccagactgagataatagctgaccaggggcagcatatgccggctgctccaccaagagattgcaacgagcacgctgcagcgcacgctcagagggatgacgttgggtatggacacaatcaagttaagcagccggtggtagaacagggtgaagaagataagcgggtggaagatcatgcggtagaagcagggtacatggtccaagctcctaggatccgggacggataatgtgagagcatcattaacgctgggcatttgtccggcactgtaattggaagctgccgaaacgaggtgagcttcggtgatgaggcggcgtcgctccacattggctaggtcaatggtgggcacatcttcgagcggttcgcactccggctcctgctcgccctcgctgctcgacgaggagcggtcatcatcgcgtcgacgccgcttgcgttgcagattgtagatgcgccgcattttgcgctccagctgcttgggcgttatatgctcgtttccatttgataggcaggcaaaaagctcccgggctgcttttctggcagcccgctcaccaggcgtcatagccaggcagcgacgcacttcgtccgtattctctgccgtaataccgctgccatcgttgtagcactggcgtagcagcttgactgcatcctcgtgtccattgtgtgctgcactcaccagccagttgacggccttctggctctgattgcctttggcaagattgggctctactgcggacatagcaatcttcattatcttgtaattctcgagcaaatccttacactcacctatggaattatcgagtaactctttggccagatcgtattgcatctgggggcatccctcctcggcgatgtgatgcttaagtttgttcaaggaggcacgatctgtaagggaaaacatcttcactttatgaacgtgtatcaatcaaagctcagagatttaccttccagattccaacgcctgcgcttggtgacacctgtcggctcattttgcgtccaggtggccatctatgtcgagtttttcgctttgtttacgaaaatctatgaaataattctagtcttgacttagcgatggcatcgtgtagaacttgtcttagagatggactcacaaatattagttaatataattattaatttaaaaatttgtttaccaaagtttaattattcatcgtatatagtatataaaatacatttatgtagtataaataatttcctatatttaaatttgtgttctttgtgtataatgtcgtgacttctaatcgataaataactcaaatgtactcagctgtgatttcgatattgcgacatcaaaaatcgattcacacacatgccggctagattgtttgctgttgcaaaagtagttgtttatttttgatttataggcatttcccaaataagagccagcacaaaaatggagagaaatctgcagaagcaattatacggcatatcgcgcgaatcttcaccaggtgcacgaaggtacagcatgccagcagcctcggcagacagcacgcgtaaatcaatttttggcggcagcgccagttgcgcccagatgtcggggagcctcaaaaggactgccctgaccaacaggtatgtgctaacttattctcctggaatttcccactcatcaaacaatccttttcagccggctcagcttgtcggtgcgttccactcagtccattgccggcatccgatccgattacaattcggtagagagcttcggttgtccactgccggtggtggtcaatgaggcactaaccttcgcaggtccaggagcgggcacagtaacagccaaagtgacgcaaaacggttgggcttgggtaatatatcagcaactctcattgtatctggttcagcaatcagtacgattaccttttcaggttgtccaaggcagacgcctcttgatttggcagtataaggacacggccaagtcgggctcgccacctcgtgtgggcaaactggcaagacgtggtggtggtctggcccagtgccgtgaattgactttacctta

SEQ ID NO: 10085 - DNA, 2424 bp, DROSOPHILA
atggccacctggacgcaaaatgagccgacaggtgtcaccaagcgcaggcgttggaatctggaagatcgtgcctccttgaacaaacttaagcatcacatcgccgaggagggatgcccccagatgcaatacgatctggccaaagagttactcgataattccataggtgagtgtaaggatttgctcgagaattacaagataatgaagattgctatgtccgcagtagagcccaatcttgccaaaggcaatcagagccagaaggccgtcaactggctggtgagtgcagcacacaatggacacgaggatgcagtcaagctgctacgccagtgctacaacgatggcagcggtattacggcagagaatacggacgaagtgcgtcgctgcctggctatgacgcctggtgagcgggctgccagaaaagcagcccgggagctttttgcctgcctatcaaatggaaacgagcatataacgcccaagcagctggagcgcaaaatgcggcgcatctacaatctgcaacgcaagcggcgtcgacgcgatgatgaccgctcctcgtcgagcagcgagggcgagcaggagccggagtgcgaaccgctcgaagatgtgcccaccattgacctagccaatgtggagcgacgccgcctcatcaccgaagctcacctcgtttcggcagcttccaattacagtgccggacaaatgcccagcgttaatgatgctctcacattatccgtcccggatcctaggagcttggaccatatgatctgggccacgtgtaagatgctgaaaaccaaacaacagttcgtggactttcgcatctggtcgggactgttcctgagctacggggatcagaacatcgaggcggacattgcggagcatcgctttttacgcaacaatatgaagccgtacctgtacttcttttgtgccttcatttgcaacctgattgtctacccgttggtcacagacgcctggctgccacactcggagctgactataatctctggagccttgaccttcatcaccatgtgcgtgtccatgtacgcctcctcccaccaactgcctgactggctagtgattgtttcctttgccgtaaatgttcttgccaaatatccgtacgaaatggacgaggttgtgtctacgcgctggcgctttcttgacctacgcgtacctactttctcatcgtttgtcattggcaatggcattgaattctgtttgaattgccgcactgccttgtatctctttattccggtgctgctaattatgatggccaaacgctcccgttggcatggagtctacacattcctcatcccgcactgcgtcacgctcagttggctgcaagtgtgcatagccacctcgcagagttccaccgtttttggagtgatgcgagcagccctcggcttggctggaatcgtcctgttcctgcctctgttcggaatcgtggcacttctggtgcctgtcttcgtggccatcgatagtttaggactggctagtgagcagcttcggtggggcagcacagctctcgcctgcgggctggtagtggtcctgtcctgcattttggcgcttaaccgagctacccagaaatacattacaatgctgcagctaatcacggcgatcacaacagcgtgcttgttggtcttaccctatatgacatcgagttttaaggatacgccgcgcttcaatgccatgcccagagcgggtctgcactcgctttccgagacgaatactctgccctgggatcgctttcatgcactttgtgctcaacctgtccacgagcagccgaataagataaaagcccagctgcgttgctcccttctgaatggaatgcccgtgatatgggagggcagcgtcaccaaagtggaaatctcgcgggtgtccaattttttggaggataccattgcgaactatttgcccgtttggctgggcaggatgctgcgctgcttgcatggcgagaatatatcgcagcacttcaaatgcgatcccaaattggatgcgcagtgcgaggagtggcggagcgtgttcaagacattcaatgctcagagcggtagttgcacactgcagcgatggaatcgctacgagtacgagctgctggtcaaggtgggcaccaagaggagtggccgtctactgggtcgttccaccaccacagatgttatcctacgagctcaccatgactttgggaacttcacacggctcctaagcgagggcgatgttgtactattctatggaatcctgcacaattctcggcttttggctgacaacgtgcaggtgaagctgaaaaccatcgagtgtgtggagtgccggtcgcgggatttgggtacggccagcatcgagcgagtggtggccgcttcacccatggatgcacgcctccaagatttgatgagaggcatcaagtatttgttgaacgctttgttgaatcctttaattacgtttaagtaa

SEQ ID NO: 10086 - protein, 807 aa, DROSOPHILA
MATWTQNEPTGVTKRRRWNLEDRASLNKLKHHIAEEGCPQMQYDLAKELLDNSIGECKDLLENYKIMKIAMSAVEPNLAKGNQSQKAVNWLVSAAHNGHEDAVKLLRQCYNDGSGITAENTDEVRRCLAMTPGERAARKAARELFACLSNGNEHITPKQLERKMRRIYNLQRKRRRRDDDRSSSSSEGEQEPECEPLEDVPTIDLANVERRRLITEAHLVSAASNYSAGQMPSVNDALTLSVPDPRSLDHMIWATCKMLKTKQQFVDFRIWSGLFLSYGDQNIEADIAEHRFLRNNMKPYLYFFCAFICNLIVYPLVTDAWLPHSELTIISGALTFITMCVSMYASSHQLPDWLVIVSFAVNVLAKYPYEMDEVVSTRWRFLDLRVPTFSSFVIGNGIEFCLNCRTALYLFIPVLLIMMAKRSRWHGVYTFLIPHCVTLSWLQVCIATSQSSTVFGVMRAALGLAGIVLFLPLFGIVALLVPVFVAIDSLGLASEQLRWGSTALACGLVVVLSCILALNRATQKYITMLQLITAITTACLLVLPYMTSSFKDTPRFNAMPRAGLHSLSETNTLPWDRFHALCAQPVHEQPNKIKAQLRCSLLNGMPVIWEGSVTKVEISRVSNFLEDTIANYLPVWLGRMLRCLHGENISQHFKCDPKLDAQCEEWRSVFKTFNAQSGSCTLQRWNRYEYELLVKVGTKRSGRLLGRSTTTDVILRAHHDFGNFTRLLSEGDVVLFYGILHNSRLLADNVQVKLKTIECVECRSRDLGTASIERVVAASPMDARLQDLMRGIKYLLNALLNPLITFK

SEQ ID NO: 10087 - DNA, 4769 bp, DROSOPHILA
ggtgaggtaagcaatggatcctttaatcgtctaagtactctacgcaccataaatcacctggaaaatgtcaacgatacgcaagtatttatcttttcaattaacttaagtctagttattagctgacttttttccatatattctttcatgacacaaactaaaatcgcaaacataaatgtcatttttataatatacaaatctcctctatcgcaagtactatttatttattctaatacaaatatattaattttgtcattctccaatcggaataagtataaataaagtataaatccattggttaagaaaagaaaaatcaaaaaaataatttttattcattttaatgttattagttagtttctaatgtgatctttcattaaatatttaatacttataaattataaatgaaaagatattcataaaaatcgcagacaatcaaattaaagcttaactcagatgttcttctttcatacacgttcgaaatcttcctgtcgttcctaagtcccgttcacacaggcagctgcttcatctgaaatgcagttcatatattgtttttgttataattaaacggtgattttaacccggccggagtggagttgctcattggaaatgcttttctaaattaatttaaatttaaaataacggcaacagcagctaacacaacaaaaatgtgaaatatttgggtatacatatacacctacaggatttataagaggaaaatttaaatgccgattttttttaaataaaataattcttgcctaaatatgtggactaattttaaaacgttcatttgtttttgttaagccatgtataaatttctacaatattattgttcgtcattttgaacttgcaaaatttgtttcattccaacgttccaaatcagggcaatacatatttattatctacaccgagtgaaaatattttccgagtcatcagaaatttgtattattgatagcatgttgtaaggcgactcgactattttgaagctaagtgaaattttatattgaaacgcaaagttgaatacgtgagcagtatatgaaaatcggtgaatacagtgacttcattagtcagccgaaagcaaaagagagcgaaatacattttttaaacaaactaaactaaaatttcactgtgaataatgatgactgaaaagttaaattctgggcacactaatttaacaagcaaggggtttgtatattttatatttatttatattttttttttcacaagaggacccaagcttggtgtcccaacaaacataatatgcatgcgtattcatcagcccatatttatgattagatgccgaaaagacaagccgttttatagtttagaacgtcaatttttgcaaatgattgagcatgtaaaagccgaagatctgtattttagcaacatcatgtagttaggctgttttcactcaacaactaaacctgcagaacatgttatctaatgaaaaaaaccaaacaatgtgattcccgtatttatattactttattgtatgtagtagcggaacatgtgtacatatgtataaaagagttatctacatatgtagttgcactcgtggacttatttaccgctaaaaatgttgctaaatataattgcactgacttaaatcatttagaaactaacactgtatttaggtaaaacttctattgggtgattctcaacttttgagatcagaacaaaacaggtattttttttttgcatttcagcgccatgaacagttattcgtgggctgccattttaaaatttggagtagcgtttctttttctctcctccataaatgtgcgaaagagaaaaaatgttgagttcaatcgcttttagattgttcagttcttaaatattcaagacattatccatctttgtttacgatttaaaatcaatattaacattattattaatatacattaatacatggcttagactttagcttaaaatgcactttacataaaagaactcatttacaaaattttaaaaatcaaaaatttttaatatatatatatgcttatatatgccatccatatatatatggatgtgaatgacctacatatatcgtaatactttaattaccattttattttttttcttttcatccaggattataaatgatcttcaaattgctggaaacacaagtgacgatatgggctggaaatcaaagctgaagctgccgccaaaggacaaccgattcaaaacaactgtgagtttgccgacaaatcaatcggaatttatacaatttaaagcacaaacaaactaacaaataaatgtattgccattgccttactcaggatgtgaccgatacgcgaggcaatgaattcgaggagttttgccttaaaagagaactgcttatgggtatattcgagaagggatgggagcgcccttcgccaattcaggaagcagctattcctatagcattaagtggaaaagatgtgctggctcgggccaagaacggcacaggcaagacaggagcctactgcatcccagttttagaacaaatcgacccaaccaaggactacattcaggcacttgtgatggtccccacccgagagttggcgctacaaacctcacagatatgtattgagctggcgaaacatcttgatatccgggtaatggtcacaacgggaggtaccattctaaaggatgacattcttcgtatttatcaaaaaggtgggttttgatgatagttaaataacctaatatcggtttaattgcaactttctaaattttccctacgcctgcagtacaattaattattgccactcccggacgaatattagatctgatggataagaaagttgccgatatgtcgcattgcagaatattagttttggatgaggccgataagctattgtcgcttgattttcaaggcatgctggatcatgttatactaaagttaccaaaggatccacagatcttgctattttccgcaacatttccactaacagtcaagaatttcatggagaagcatttacgcgagccttacgagatcaacctgatggaggagctaacactgaagggtgtcactcagtactatgcattcgtacaggagcgccagaaagtacactgcttgaatacgctcttttcgaagctgcagatcaatcagtctatcatattctgcaattccacgcaacgtgtcgagctattggccaaaaagatcacagagcttggatattgctgttactatatacacgctaagatggcccaggcacacagaaatcgagtattccacgatttccgccaaggactctgtcgcaatctggtgtgctccgacctgttcacccgtggtatcgacgtgcaggccgtgaatgtagtaatcaatttcgatttcccacgaatggcagagacatacttgcatcgaattggtcgctcaggacgtttcggtcatttgggtgagtttaattgcattctcatattatagtttagcctatttacaatcttcgtttctcattttaaggtattgctattaatctgataacctacgaggatcggtttgatctgcatcggattgaaaaagaacttggaaccgaaataaagcctattccgaaggtcatagaccccgccctttatgtcgcaaacgttggcgcatccgttggcgatacttgcaacaacagtgatctgaataattctgcgaacgaggagggcaacgttagcaaataaaacggatatgccctgtgtaacgctagtatctgaaatagagtctaaatcgtggaatcaataaaaacagatgaactatttcagaaatcaaaattgtattaaataaatggaaagcaattcaatttttaaatgcgctcttaagataactgaaatgactggtctataaaaaaaaggctcgttcactttgtgggttttggtgctgagaagtattaacattaactattggggatttggtaaggaaagttagtcgaatgctattaaaaggcaggctaaggtcgtttaatatcaatccagtttttagtaaagggtttaaatcaaataaaaggtctaaaagtaattacaggattttcggacaagagaagtacacttggatcaagctaaatcctagatttacttacatggaagaattaccattggcaattacccgatttactagattccaaaaaaaaagtacaaagggatcattataatttaaataaaatttatttattagcatccaaaattgtaagctttgcttgtcagaatatttacaataaatgtacaatattaaacaaatcatatatataggatagggtcataaatttcaaaactttacgtattaaatatgttcgatgaggaggaagaggagtcggattggtcaaagtcgattttcgcataggtattcccatcctccgggcatgcggacaccggcggcgattcgcgtgatcctctcttcaggtatttagctggattttggccactgcaatggggaagatctaggctggcgtagtgcagctccggctgggatatgcgagacgacgaccttgaggggaaattcaaatctttaatctgtagaatgttctgtggtgtacttggatctgtgccagtgctacgcgaatcggcggcggcggctggctttgctgaatttatattgaatttggtgagtgagctgctgctcaccgcggtggcggtggcattatcgggaatcgtattcacactctctgtaagtctctgcgaacgctccaagttatccttgtgtatacccttttggtatagcttcgatgagatgagtgagctgtcgcttttaatttgcagaattttgtagccggcttcgttaaattttgtgaaatcattcgatttgtccttgattt

SEQ ID NO: 10088 - DNA, 1636 bp, DROSOPHILA
aaacgcaaagttgaatacgtgagcagtatatgaaaatcggtgaatacagtgacttcattagtcagccgaaagcaaaagagagcgaaatacattttttaaacaaactaaactaaaatttcactgtgaataatgatgactgaaaagttaaattctgggcacactaatttaacaagcaaggggattataaatgatcttcaaattgctggaaacacaagtgacgatatgggctggaaatcaaagctgaagctgccgccaaaggacaaccgattcaaaacaactgatgtgaccgatacgcgaggcaatgaattcgaggagttttgccttaaaagagaactgcttatgggtatattcgagaagggatgggagcgcccttcgccaattcaggaagcagctattcctatagcattaagtggaaaagatgtgctggctcgggccaagaacggcacaggcaagacaggagcctactgcatcccagttttagaacaaatcgacccaaccaaggactacattcaggcacttgtgatggtccccacccgagagttggcgctacaaacctcacagatatgtattgagctggcgaaacatcttgatatccgggtaatggtcacaacgggaggtaccattctaaaggatgacattcttcgtatttatcaaaaagtacaattaattattgccactcccggacgaatattagatctgatggataagaaagttgccgatatgtcgcattgcagaatattagttttggatgaggccgataagctattgtcgcttgattttcaaggcatgctggatcatgttatactaaagttaccaaaggatccacagatcttgctattttccgcaacatttccactaacagtcaagaatttcatggagaagcatttacgcgagccttacgagatcaacctgatggaggagctaacactgaagggtgtcactcagtactatgcattcgtacaggagcgccagaaagtacactgcttgaatacgctcttttcgaagctgcagatcaatcagtctatcatattctgcaattccacgcaacgtgtcgagctattggccaaaaagatcacagagcttggatattgctgttactatatacacgctaagatggcccaggcacacagaaatcgagtattccacgatttccgccaaggactctgtcgcaatctggtgtgctccgacctgttcacccgtggtatcgacgtgcaggccgtgaatgtagtaatcaatttcgatttcccacgaatggcagagacatacttgcatcgaattggtcgctcaggacgtttcggtcatttgggtattgctattaatctgataacctacgaggatcggtttgatctgcatcggattgaaaaagaacttggaaccgaaataaagcctattccgaaggtcatagaccccgccctttatgtcgcaaacgttggcgcatccgttggcgatacttgcaacaacagtgatctgaataattctgcgaacgaggagggcaacgttagcaaataaaacggatatgccctgtgtaacgctagtatctgaaatagagtctaaatcgtggaatcaataaaaacagatgaactatttcagaaatcaaaattgtattaaataaatggaaagcaattcaatttttaaa

SEQ ID NO: 10089 - protein, 458 aa, DROSOPHILA
MTEKLNSGHTNLTSKGIINDLQIAGNTSDDMGWKSKLKLPPKDNRFKTTDVTDTRGNEFEEFCLKRELLMGIFEKGWERPSPIQEAAIPIALSGKDVLARAKNGTGKTGAYCIPVLEQIDPTKDYIQALVMVPTRELALQTSQICIELAKHLDIRVMVTTGGTILKDDILRIYQKVQLIIATPGRILDLMDKKVADMSHCRILVLDEADKLLSLDFQGMLDHVILKLPKDPQILLFSATFPLTVKNFMEKHLREPYEINLMEELTLKGVTQYYAFVQERQKVHCLNTLFSKLQINQSIIFCNSTQRVELLAKKITELGYCCYYIHAKMAQAHRNRVFHDFRQGLCRNLVCSDLFTRGIDVQAVNVVINFDFPRMAETYLHRIGRSGRFGHLGIAINLITYEDRFDLHRIEKELGTEIKPIPKVIDPALYVANVGASVGDTCNNSDLNNSANEEGNVSK

SEQ ID NO: 10090 - DNA, 7792 bp, DROSOPHILA
aagaaagtggtatatatttggatttcttagtcttatcgatagcctaataaaatttggtattcgcttatcaagaatatgtttgcctcttttatttattgctcgattatattattttcaataaatttatcaacaatataaagtgtttatagtgaatatagtaacacacgtactttgcgttttatctacttttttccaaacaaagccgtaaaacgcgtggtcttactttgtacacatgcacgtaattatcttatgcttaatcagctataaatatatatgtacatatatttgaaattcttaatggtcgagaaccacattactctaaattcttctcaaagaactttcttcgcttttgcaacaaaatcgataacaatttgattagcattcttcgcatttaaaaatagatggaaccgcgcaaagagggcggtggaaaatcaattcatttgctatgaattctcgctgtgcttgtgggtcgccatttaatgcataatgcagtttggtctgaaaatttgcatatccagacatagtcgtagacgtttgtctgtccactttctgattcttgagcccaggctatttgcacttttgcggcttcttgtttcggtctgccatgggttaagttcaagcagagtctctatgagttaaatgagattgattggtaatactcaaagagtttgctgcaaaaataatattcttgtaaatataaaattctatatatggttaatggttaaaattcaattgattacaagcactttcgctggcaaataaatgtgacattaattgctcattttgctcagtttgtaaaaaattatatcttcatttagttttgtgctgtgtattccctagtcgactttgaaatgtcaagggaaatactcttttgccatgttttgttttatttttttgccatgcttttcctttccgtttgctttttgtttgcccgcaaattgaattatttcttctagaggctttcgggctggatgtatctagtattgtaaagtctggtgcggtttttaaagcagcgctttaaaatctcagggtttcgtatctcaagtttggtttcaacatatgctttcactctttttgtttggtgcacttgagtttggcgattactttatctattaatttgtgtgttttgcaccgatgcaacaacagacacaaccgacatttgactctatataaatatgtatatccgtatgtgtactctcttactatgtattttgattgtatttatcttgtatctcatatatagcttgctttggagcacttaaacagcaataaacataaaccaaaacgaatttaaaaacaaaaagagcaaaaaagtctaaagcctattcaagcaaaagtccaaagtttctgtatagcaaataaaaaaaaaaaaccaagtcaaacgcaaaaacaaacgaaaagtaagtctgaatgtcaattcatctcatataacttcaatttcttttccacaaaaaaaaaaaaaccgccaattataaatgggacatactgaaaatattcgatctgatttgatttgaaactaaagtttcaactctcaccacaccgagccgcaacacagagcagcaaaactcaccaaaaagatcacgtaacacattccacatacgttccacaccaactggtaccgactcatcttcaccgtttttctttgtttttgttcagattttgtagcccgaaacacacttaacactttagatttgaaaacatttcaaaaaacctcacagaaactgtcaaaaagaaagcctaaatcccaaatttaccacacactgattcgcattaacatcaaagcgggactcttcgatagcaagactaaacctaagatctaataacccttttcacaatccaaccaaaaaaccccctatcctactaaacgggttggatcacgaagatatagccatgttaacacccctctccatccttcttgtcacacagtgagaaagcaaaaggacgatatgcaggtcaatgtcgctggtctgcgcagaaacatcaagaaccttgcgcacaactactccgatgcccaggtgagtgatctacatgatccataagccaatttagctatttaaaaccaacattgatatccacaggttaaagtgcgtgaggcaacctcgaatgacccttggggtccttcggctgccatcatgagcgagatagcggaactcacctacaatgtggtggccttttcggaaatcatgcagatgatctggaagcgtcttaatgaccacggcaagaactggcgacatgtgtacaaggcactcattttgctggagtatctgattaaaaccggctcggaaaaggtcgcccagcagtgcaaggagaacatctttgccattcaaaccctgcgagagtttgtgtatttcgaagagggcaaggatcagggcacccatgtccgtgagaaggccaagcagctggtcactcttcttaaggatgacgagcgactgaagaatgagcgtgtgaaggcgcagaaggcaaaggaaagattcgcccagaacccgagtgggttcggcagcgatggctatattgatggaccatcgcaacgagacttgccgccaggctggcaggaggagccgcctaaatcggtatccgaactggaaatggttcgtccccagacggccggcgaggaggaacttcaactgcagctggccatggccatgtcacgagaggaagcggaacaggaggaggccaagcgacgcagtgatgatgtgcgtctgcaactcgccctcagccagagtgagcaggatttcaagtgagtagagaacgtctaataaaacaactcgtctggtttcaataccaatcaaatcctccaatttattagggatccaaacggacgacctattcctgcgcccaagaaggaggaacaacagagtcatttgctagatctgctggatatttctctgggggctacgagcatctcaagtccgccgctgggcgctgcaggcggcgcccccacggctgttgtcgatccctgggccatgccaggtccaagagctcccagccagttgtccgatccgtggtcaggtacttcctcgcctcaagtggatccctggaatccctccgctgccccacgaaccatcttgggtgccggagtgccgatgacttcggcgccattgggagctggaaacgatgcctggggagctcgcactcagtcgccttcggtggcctcgggctcctccaacgaaggttggctgcaaagtaatggtaatgccaaccaaaacggacgtggagccactccggccggccctcctgctgaaggctggctgataaaatccactgctgtcggagctttgggagctgcgccaattaatcatgcggcaaataatggtagctcatcttcggatccctggctagcagagccagcagcatcggcggcaggaggagcagcagcagttggcttggcagatccctgggcgccaggagcagcatctcaaacgggtgcgggggcactggatgacccatggaaagcactcggaactggcgccattaaggtaagcggtatattaatcttttaattgattgaattgcattgataattagatttactatgagctaattcaataatataatttaattttttacacattgtgtatatatttaaatgatgtaaaacattcttgtgaatttcagaaacaatcccccgagtttgatgagttcgacttgatcaccaaccgaaacaagagtgagcacagcaattctaacgcctccaacaacaacaatggtaaggcctttttcgtttgataacatcactttcgagcttatcacaatgaaaccatttccagcttctctgctcgatgacatggatccgctatcggcgaactacggaaatggaggtataaatagcagtatgcatccgtcgacgggggccacggcaaagaaatctataaaggatgctcattctttcctcggcgagaactctgcgcttgttaacctagacaatctgatcaaaccgattgcgccacagacgcaaacgggtaatcagccggcgtacaatcccttcagcgacaacgtagtgccacccaagacgaatctattccagcaacagcagccagccgtgagttaaattttggatttgatttaaatagatatttgtagatttgcttattatttttttgtggtttacctctaggtgccgtccatcaatcagctgaaacaacaggccccgttttcagtcagcatgaaccaagatccctgggcacctgtaatgggcggagttagtacgacttcgcaggtgagttgccagaatttggaggatttcgtgcgtctgcggtgttagggaaactctgcgtacttgtacttatattttgattatttttgagggtttgctcctctgatgacttatcgatatttctgtttactatttaaaactatcttatcatttcacctctgcattttgtttccttttactatcgtttgtccttctgtcatttcgttttgagcaaccgttgcatgtaaaacccgacattctagccaaaacttccgcctcccgtacgtcccactagcctcaatttggggccctcgtctgtgggtgaatttcaactgttgagtgcgttaagtaatcccatcattcccattgcccacatcccccagccacagcccaatttgcaggtctacaataatgcgtatcaaagtagcagcagcactaatatccttggaaaaagcaacatcccgaccaatatgaatagctccaccagcaacagcaccatacacagctgttacgcaagtccgagtccgggcgtcgatggcattcgcaacatggatatattcaccgaacgtccttactataatagtccaacagcacctgctgatgatacctacatgtacaacagcagggataataacaatatcaacagcaactatggtactcccagtctatattcaagttttgctgccagctatagcagcgccctatccgattctctggccgaaactcctggaattagtgttgctcccttgggttttgtggccgatactgtcatgagttttggtccctcatcctcgtcggccaactgcaagctggaagtgagtttgctgccgctaaagttgtcgttgctgccaatcccacactaccacctttgccagaagttgttgtttatcgtttagtttgcatttttatttagaaatttatttctttgatttagttttctttttgtttgttttgcaagtatgagtactatgagctgctgaatggggagtgcagcaaaaggtttgccatgctgccttccaaagaatacatactcatcctaaccaaaagctctgctaaaacccagttgatccataatattttctaattgtagccatcaatggaggcttggacgcttaaataaaacatacactaagcaataaatgcaaatgggtaaaatgtttttcgaatgtgcatgttctgctatttaactcgtagaataccctctaacaactaaaactattaaacaatttatgaaaaccctgtagttggcttagaaaactaaaaactctgcatgtcagtcgcttattattagtacattagctttcgcgaaatgaaacattgaaataaatataactaatcgacattgaattttgcagcaaaataacaacatgccgtggatcaagccggaagcagcaacaaatccgtttttgtcgtaaactggcgtcgatcaatcacaacaatgtaagcagaaggagcagcgggatcatcaattaagggaaagtcaactaataaaggcctgactggtgtataagaagctgtccaatagcgttagcaacaatagcagcagaagcaaccaactttgactctacataactgcagagagggaaatatgaattaattaataaattatgtgtaaggaagtattattaaagtgtaaaatatgtgatgtatgtgagagagaaagccaagatccagcgaaatagaaattgaggagttaaatagaaacagcaacgacacccagccaagatgagtagaaaagttgtgcgcaggaagcttacaagtaaactgaacttgagtctaacacatttgcaataattaaatctgtaaaaaccaacccattagaaatcgcaaccccttacgcccttcagctggggaatccttcactgtcagtcttcaagtacttccttagttgatcacttactgttaattaatttctatccttgttggggaaagaaccaagaaggcagccgcaaaaggagatcaatcgagtccaacctaatgatgcaaattgaaattaaaaaaattgttatatagctttaaagaatgcattggtaaagcgaatatgtttaaaaccatgttaaacaaattatatgtgcttgtaattgtaaatttttttacgttcatttttgtaaaatttattgtgcgcgcatgttgcagaaaccaaatacaattattaatggcttttggctatcgatttttaaacacatttttacgattttttcgagttgacagttgatttgtttgtgcattcgcttttggtccaccttcaagtcaccaatgcatacgcgagtttgctgttgaacatttttatagcgaatagtttaaaatttacaaaaacctttgaacacatatacaaagaacaagattacaagagcaaatcgaaaactaaaacaaaacaaaataaaatgatggtatacatttaggctagaatacgtaacgaattgtataagagtaacttaatgataaacaaaatatacatatatatatatatataaaagaaagccgattcggtgtgaaattatgcttaagagatttacatgcctgactagcaagcgtatacaccccacaacgctgatacccttttatatatatgaagacacacaaccccaaaaatcacatatacacttgcaaactgcaaattttaagcatattttcatattattaaaactttattttaactaaaaaaaaaaacaagcgaaaaaaatctccatgtaaaagtcagaccactttcgatgctcccattgcacaactaagcgggtggcgactgagtgtgccaatgcccgggggcctccacttgacagcctgcgccagcattcaacactttgttggggcatcatcacactcatgtcggatacatcgggccagggcacaggcagagacaatcccaatagcaatccgcatccgaatcccccaaactcaaacccgatcccgatcccagcagcaacggcagcacgattatgttaatttcgggggccgccagagtgcagcattaacggagcacgcccaccgcatatggcagtgatattttggccagctgggatgtggatgtgtatggggatatggatatggaatcgggatggggctggatatggatatggattgctggatgtggctgttgcgcaagtggccagctagctggcaggctggtttcggttttgatatttgacatgcgccaggggccatcaggaaacttcgtttaaatgaaatcaaaatgcacaaatacataatttacacaaatttgccgtcgagctgcggtacgagtttatcgcctcggttgggcacgaaaaagagcggctcctcagatggctgggaaaatgctggcggattgtataatgcatcgggtattccaggagcgatgagcatccagcagatgcaggaagaactggcatccaaacatagtttttcgatgaggggcacgataagaacaaacaaaacaaaaacatcttgtgcattatatggtttaatttttatatgtcatattaatttttctatcattttccagtacattgaatatccaggtaacatagttggctagcctagtgtacacgcctggaaaatgtgggtcagcacatccatgcgcaaaggatacgattccatagctactgccgcggtgaaccaagg

SEQ ID NO: 10091 - DNA, 4022 bp, DROSOPHILA
gtttttaaagcagcgctttaaaatctcagggtttcgtatctcaagtttggtttcaacatatgctttcactctttttgtttggtgcacttgagtttggcgattactttatctattaatttgtgtgttttgcaccgatgcaacaacagacacaaccgacatttgactctatataaatatgtatatcccttgctttggagcacttaaacagcaataaacataaaccaaaacgaatttaaaaacaaaaagagcaaaaaagtctaaagcctattcaagcaaaagtccaaagtttctgtatagcaaataaaaaaaaaaaaccaagtcaaacgcaaaaacaaacgaaaatgagaaagcaaaaggacgatatgcaggtcaatgtcgctggtctgcgcagaaacatcaagaaccttgcgcacaactactccgatgcccaggttaaagtgcgtgaggcaacctcgaatgacccttggggtccttcggctgccatcatgagcgagatagcggaactcacctacaatgtggtggccttttcggaaatcatgcagatgatctggaagcgtcttaatgaccacggcaagaactggcgacatgtgtacaaggcactcattttgctggagtatctgattaaaaccggctcggaaaaggtcgcccagcagtgcaaggagaacatctttgccattcaaaccctgcgagagtttgtgtatttcgaagagggcaaggatcagggcacccatgtccgtgagaaggccaagcagctggtcactcttcttaaggatgacgagcgactgaagaatgagcgtgtgaaggcgcagaaggcaaaggaaagattcgcccagaacccgagtgggttcggcagcgatggctatattgatggaccatcgcaacgagacttgccgccaggctggcaggaggagccgcctaaatcggtatccgaactggaaatggttcgtccccagacggccggcgaggaggaacttcaactgcagctggccatggccatgtcacgagaggaagcggaacaggaggaggccaagcgacgcagtgatgatgtgcgtctgcaactcgccctcagccagagtgagcaggatttcaaggatccaaacggacgacctattcctgcgcccaagaaggaggaacaacagagtcatttgctagatctgctggatatttctctgggggctacgagcatctcaagtccgccgctgggcgctgcaggcggcgcccccacggctgttgtcgatccctgggccatgccaggtccaagagctcccagccagttgtccgatccgtggtcaggtacttcctcgcctcaagtggatccctggaatccctccgctgccccacgaaccatcttgggtgccggagtgccgatgacttcggcgccattgggagctggaaacgatgcctggggagctcgcactcagtcgccttcggtggcctcgggctcctccaacgaaggttggctgcaaagtaatggtaatgccaaccaaaacggacgtggagccactccggccggccctcctgctgaaggctggctgataaaatccactgctgtcggagctttgggagctgcgccaattaatcatgcggcaaataatggtagctcatcttcggatccctggctagcagagccagcagcatcggcggcaggaggagcagcagcagttggcttggcagatccctgggcgccaggagcagcatctcaaacgggtgcgggggcactggatgacccatggaaagcactcggaactggcgccattaagaaacaatcccccgagtttgatgagttcgacttgatcaccaaccgaaacaagagtgagcacagcaattctaacgcctccaacaacaacaatgcttctctgctcgatgacatggatccgctatcggcgaactacggaaatggaggtataaatagcagtatgcatccgtcgacgggggccacggcaaagaaatctataaaggatgctcattctttcctcggcgagaactctgcgcttgttaacctagacaatctgatcaaaccgattgcgccacagacgcaaacgggtaatcagccggcgtacaatcccttcagcgacaacgtagtgccacccaagacgaatctattccagcaacagcagccagccgtgccgtccatcaatcagctgaaacaacaggccccgttttcagtcagcatgaaccaagatccctgggcacctgtaatgggcggagttagtacgacttcgcagccaaaacttccgcctcccgtacgtcccactagcctcaatttggggccctcgtctgtgggtgaatttcaactgttgagtgcgttaagtaatcccatcattcccattgcccacatcccccagccacagcccaatttgcaggtctacaataatgcgtatcaaagtagcagcagcactaatatccttggaaaaagcaacatcccgaccaatatgaatagctccaccagcaacagcaccatacacagctgttacgcaagtccgagtccgggcgtcgatggcattcgcaacatggatatattcaccgaacgtccttactataatagtccaacagcacctgctgatgatacctacatgtacaacagcagggataataacaatatcaacagcaactatggtactcccagtctatattcaagttttgctgccagctatagcagcgccctatccgattctctggccgaaactcctggaattagtgttgctcccttgggttttgtggccgatactgtcatgagttttggtccctcatcctcgtcggccaactgcaagctggaacaaaataacaacatgccgtggatcaagccggaagcagcaacaaatccgtttttgtcgtaaactggcgtcgatcaatcacaacaatgtaagcagaaggagcagcgggatcatcaattaagggaaagtcaactaataaaggcctgactggtgtataagaagctgtccaatagcgttagcaacaatagcagcagaagcaaccaactttgactctacataactgcagagagggaaatatgaattaattaataaattatgtgtaaggaagtattattaaagtgtaaaatatgtgatgtatgtgagagagaaagccaagatccagcgaaatagaaattgaggagttaaatagaaacagcaacgacacccagccaagatgagtagaaaagttgtgcgcaggaagcttacaagtaaactgaacttgagtctaacacatttgcaataattaaatctgtaaaaaccaacccattagaaatcgcaaccccttacgcccttcagctggggaatccttcactgtcagtcttcaagtacttccttagttgatcacttactgttaattaatttctatccttgttggggaaagaaccaagaaggcagccgcaaaaggagatcaatcgagtccaacctaatgatgcaaattgaaattaaaaaaattgttatatagctttaaagaatgcattggtaaagcgaatatgtttaaaaccatgttaaacaaattatatgtgcttgtaattgtaaatttttttacgttcatttttgtaaaatttattgtgcgcgcatgttgcagaaaccaaatacaattattaatggcttttggctatcgatttttaaacacatttttacgattttttcgagttgacagttgatttgtttgtgcattcgcttttggtccaccttcaagtcaccaatgcatacgcgagtttgctgttgaacatttttatagcgaatagtttaaaatttacaaaaacctttgaacacatatacaaagaacaagattacaagagcaaatcgaaaactaaaacaaaacaaaataaaatgatggtatacatttaggctagaatacgtaacgaattgtataagagtaacttaatgataaacaaaatatacatatatatatatatataaaagaaagccgattcggtgtgaaattatgcttaagagatttacatgcctgactagcaagcgtatacaccccacaacgctgatacccttttatatatatgaagacacacaaccccaaaaatcacatat

SEQ ID NO: 10092 - protein, 824 aa, DROSOPHILA; identical to SEQ ID NO: 10065

SEQ ID NO: 10093 - DNA, 3679 bp, DROSOPHILA
tcacagtgcagtagaagtccttgttctccttcttcaggtcgggtccctcgatgcgctccttgggcagggtaatgcactcctcgcgacaatagaacccagtcttgcgcagcgaggccttgatgtgccagggctcgagcacccatggctcatccttgttcatgaccaccgccagcacaatggtctccagcatgttgaccgtgcgctgggcgtagggggagctgtgtttaacagtcgatttttcagcctctgtcttggcgtacttggccacattctccggcgtattgtacgcggccaaacccggcagcaggagcttattgtagacaaagtgcggcttcattgacaccacgtcgcccttgtcgccaacgccctcgacgaaggtctttagcaccacctcgatgttgggccgctttttgaccagcgtgtcgtccacgagctcgtagatgaagttcttggccctcatccggcggggtttctcgttggttttgtgcagcggcgggtcatatttgcgcttcaggacgaacgtggtctggaagcaaattggtggtgaatggggatcgcttccctaatccaggagagcacttacccgcacttgctgctgcaggctggtggccgatttaagcaaatttaacggcgttacgtagatgttcttcaacatttttaccaccaatatgtctgcgttgccagactactcagccagtttgcagtgttgccagatatgattatttaatctgcgtgagttcagcagtaaaattttcagtgactttgaaaacgattatgaatttagtttttttattgcaactatttctttacattttaataaagcaaaataatttgcccaatttaccttttaattgattaaaaaaaatgtacctttgaaagtattatgactgtcaattttaatttaatagtttcattacaaaataaaagattgactatgccaatatttcggcgaacgcgcccatcgacatgcagtatgcgtacacgctgtgaagcagtttttaaacggaaaccgttagtcgaatttatttacaatatgacattttacaatcaggactcaatagtgttttgtatccaatcaacgtacttgcccaccagcgtgtaaactcctggccatccggccagaccgcacggagtcggtccaaatgacacgacgccggccaggaagtagtaggtgttcaccttgttggtgtccaagccgatgagcggtcccccggagtcaccgcgacaggagtcgacgccttccttgccgccggcacacatctgtgtgtcctcgaggagaatgtcctggctgctgtagacgttctggcactcatccatccggaatccctccacggctgccttcagcttgaggttgctggccgacagctgctccgttttgccccagccggccacgtccatggtgatgccgtcgaaggtggccgaccgcagattgacgtccagaggcaggcaaatgggtcgcacaaagtcggtgtactccacctgctgggccagacgcagcagggctatgtcgttgacctggttcttggaggccggtatatagtcgggatggggtatagtacgctccacgggcacgtccagatgcggtggcgcgcagtccttcatgccgcgcacatctacttcgcaatcgggattagtgttggtgtcccattcgcccaaacgaacaccggacaaccgccagtcggtgggcagtgcctttccgttgacacaatgcgaggctgtgatcacatatcttgtgctgatcaaggatccgccgcaatggtgaccctttttgccctggcctgcatgtaggaattaaccagtggataagtgcgttcagacttaagacgatgcccctctacttacttttggtgtattcaattagagccatccaggggaactcgtcgatcttggtcttcattccgccatagatgcgattggacaggatgttgccgcattgtcctggcagcggcagaaggctgttgctggttacattgggcttgggcggtggcgtcgtctccgatgagctctccctgtagcggtccggacagcagatgagcaccttgccgttcgtatagccgcactggctgcgactcaggtaaagccggtccgtgtcccggagcggggtggtggtcagcaggccgtataggtacttgcagtcctccagatggatgcacagcgcacgctcccgattcggcgttatgcagcgcccatagttgggcacctgggccgcctcgttggggaagtagaactctggaaatccagactttaggttcagagagcttaccaatattgtgaatacataaattaggtcattagctatggaagtacggaaacaggtttccagcgacttgtgaaggcccgcggcaaaaaaaaacaaatacgttaagctagtcatgtccagcagatgagcatcttggcagtcttctatttacttacggcccgccgatgatttcgccaaaatgcccaaaaagaggcagataatcgatggctttagcattttcgttgcgcaatcggacctcgttagtcctttctcaagacgtcgtcagtggtttgcggataatgttttgcctaaaaacaatattacagaccgaccgcagaagcagttatcaaaataaacggcgcgataatatggacgataccaggtgccacagcggagcggagtgaaacgaagaggccgaagctgagcttggcgcacaactgaatcttcggacggacgcggttctcggcctgcgagctttgtcgcaagctttttggcgagtctccaaatcagatatgaagataatcgtgggagcagatctttatctctcttccaattattattcttagtaattgtcagttggcttatttaactttggtactaatagaatttactttgtcacatgctgagtgtaagtaaagtactcggcaaatttaagggagtatctaccattatttaatccccgcctaagttcgattgtatcacatggtgttttgatagcaaaaagcactatcattaacgataagctaacggtatatttcgttctacagcaaactgaaagttctaccgactttaaatcggacctaaagcaaagtttaaagtcgcagtttaaattgcagcggtcgcgttgccaaacaacacagtatgaccgaattcgcaatgttgtttgccactgttttggcaactcgcatatagcggtacgtcgcagctggtgataagttaaatgtttaatttaaaaaatgagcgtggatatttagtaaaggtcgaataggcggcaagtttggagatcggcagtggtgtaagtagtacgtcgcttgagtgccgagtgagtgctgtatgtgcagcaataatgcgaatgcaagtctcatgtgtctggtccgatatttgcagctcataatttattcaaaatgcgctttgtgcggcggggaactgtccccaagattgcagcatgttgctgtgtggtggtcctgctggtcacctggtatgtgttgaacgtggagcgggatctggataagagcctcaaaatgtaagtatgtctagttgtgcgtcacagcggcttgggatattgattgtacgatgtttgtccatacatatgtatatgtacatatgcgcatatttgtgataaagagtatttatcttttgcaactaattcaattttgtatttaattaaagcgaaatcatcgagcgctccataagatcggctgtgaatcgtggcgagtgccg

SEQ ID NO: 10094 - DNA, 1429 bp, DROSOPHILA
cagttgtgcgccaagctcagcttcggcctcttcgtttcactccgctccgctgtggcacctggtatcgtccatattatcgcgccgtttattttgataactgcttctgcggtcggtctgtaatattgtttttaggcaaaacattatccgcaaaccactgacgacgtcttgagaaaggactaacgaggtccgattgcgcaacgaaaatgctaaagccatcgattatctgcctctttttgggcattttggcgaaatcatcggcgggccagttctacttccccaacgaggcggcccaggtgcccaactatgggcgctgcataacgccgaatcgggagcgtgcgctgtgcatccatctggaggactgcaagtacctatacggcctgctgaccaccaccccgctccgggacacggaccggctttacctgagtcgcagccagtgcggctatacgaacggcaaggtgctcatctgctgtccggaccgctacagggagagctcatcggagacgacgccaccgcccaagcccaatgtaaccagcaacagccttctgccgctgccaggacaatgcggcaacatcctgtccaatcgcatctatggcggaatgaagaccaagatcgacgagttcccctggatggctctaattgaatacaccaaaagccagggcaaaaagggtcaccattgcggcggatccttgatcagcacaagatatgtgatcacagcctcgcattgtgtcaacggaaaggcactgcccaccgactggcggttgtccggtgttcgtttgggcgaatgggacaccaacactaatcccgattgcgaagtagatgtgcgcggcatgaaggactgcgcgccaccgcatctggacgtgcccgtggagcgtactataccccatcccgactatataccggcctccaagaaccaggtcaacgacatagccctgctgcgtctggcccagcaggtggagtacaccgactttgtgcgacccatttgcctgcctctggacgtcaatctgcggtcggccaccttcgacggcatcaccatggacgtggccggctggggcaaaacggagcagctgtcggccagcaacctcaagctgaaggcagccgtggagggattccggatggatgagtgccagaacgtctacagcagccaggacattctcctcgaggacacacagatgtgtgccggcggcaaggaaggcgtcgactcctgtcgcggtgactccgggggaccgctcatcggcttggacaccaacaaggtgaacacctactacttcctggccggcgtcgtgtcatttggaccgactccgtgcggtctggccggatggccaggagtttacacgctggtgggcaagtacgttgattggatacaaaacactattgagtcctgattgtaaaatgtcatattgtaaataaattcgactaacggtttccgttt

SEQ ID NO: 10095 - protein, 392 aa, DROSOPHILA
MLKPSIICLFLGILAKSSAGQFYFPNEAAQVPNYGRCITPNRERALCIHLEDCKYLYGLLTTTPLRDTDRLYLSRSQCGYTNGKVLICCPDRYRESSSETTPPPKPNVTSNSLLPLPGQCGNILSNRIYGGMKTKIDEFPWMALIEYTKSQGKKGHHCGGSLISTRYVITASHCVNGKALPTDWRLSGVRLGEWDTNTNPDCEVDVRGMKDCAPPHLDVPVERTIPHPDYIPASKNQVNDIALLRLAQQVEYTDFVRPICLPLDVNLRSATFDGITMDVAGWGKTEQLSASNLKLKAAVEGFRMDECQNVYSSQDILLEDTQMCAGGKEGVDSCRGDSGGPLIGLDTNKVNTYYFLAGVVSFGPTPCGLAGWPGVYTLVGKYVDWIQNTIES

SEQ ID NO: 10096 - DNA, 3504 bp, DROSOPHILA
actgaaacataatgatgggcccacggatacgttacgtatacgccctgtgtggcgcaccgcttatcacacgacactgcacttggatgcgattttgacttaaaaaatgggcaaaaaacaaaatgcctaataatgataacgagctgattacgcccgctatagctatagaatttcctcagcttggaaagataatgcccgctggtttgattatattccagaggcttctttccaatgtttgtgttgccaatgtttattttggaggccggtgcgtcatcgtattgcatgtacagatacccacatattttgtgacgaaatgagcgcggagctgtaaagatcgggaaacaacttatattgagtcagctccagctatctctccgcgctctttctatttctatctctctgtatttctattggggatattttgaaacatacaagtcattcttgtaaatagagcgataagtgtgcgccgtatttgtgattcccttgccacaacactcccatctatccatctatttatgtgtgtgtgtgtgagtttcgagtacatttattaagatacatacatttgaatcgagcacatggctcttgaactttagcctctaattacacgttccgtttctcacacaagttgcaccttcctcctgctggccaggcgcatttataaaccattcgtcgtctgccaacttccaccacttgtcaattaaatgccccacttaaaggcctccactcaaatctcgaatcttaacttgactaactcgctgtaaattttccctgctgattagttcatttcaaccggacagtttccacatttttatttttggtttctattcccattttattgttgctggatttatttatggccggtggtcgcttgttgcacccttgctaatgctgatacaatctaaatcaccagttatatatttaatatacctgccattgtatacaatattctaatcaactgcggggcttttttttttgttggtttttatatttttatttaatttttgttgtatcgacaggcgagcgggtcagccacgtgatctagatgggtcgtcgggcgagacgcgtctgcctttaattagatttgagtccaacagaagcggaggcctagacagcgattagttggggcaaataacaagccacaacaaggaaatcaccaagagtactcgtctgcgaccagagcatataaattacaccagctggacgtacacttaatttgtagccgaggcattcaaaccggttggggctcaaatcgctaaacccccagcagctggaagccagtgacacacaatagccaattgccaattgtcgtttttgaaacgctttatgttcagaataagtattttaaaatcgtttacagcaaagtgaatcgatcggcttcgaatcatcaatttgggttttgtataacaaacaataagtacaccactgtacacagcatacattacaaacattaaaactatagcctagcatctgtatgtgggagttacttaaaactaaacgctcgacctcgacgcgcccacgatgtagcccttggcggtgagaacgccccggcagcggacatgcacctggtaacgcagtgtccagtcgattgtgtagccagggaccagtccgtcgaactgctccacgggcagcaggagctcgggatcgctgtgcgtgttcagttggatgtcgtgagcggtgcagaactcctgcagttctggtggcaccacgcagcacgtagacaggttgacctgggcaattgtgggcacaacctgtgcgctgttgtgtagctcctccagcgccgccgcatccagatcggcaattcccagctgtgtaatctgctgcttgagggcatattgctccagtgttttgtacagttccttcagctctgccactccttcctttccattgcgctggctccagtttgtagccctgctgacgttggaatcctcggaacagggcggtttggttgtggccaccggcgttgcggtggcaaccgcattcgggtggtaggccaacaccacattgtccacgtgcgtcacactaagtatgtggagcagctcctccaccgcctgattcacagactctgtggagtggcgattgaggaatatcttggcaccgatacttatctcattccgtccattctccgtcaagcgggtggtcaactcctgggtggccctttgcacccgcccatgcagctcgtcgatctccttttcaaccaccacgcgctccgcagtcgagtcggtgtggagcgttatcttcaggccgtcgtacagctcctcgttcgatttgcgctgtcccagttccgtggcgatgatgttgcccgtgctaatcaccacgttctggtacttcttcgttatggtcggtatcatggtgacaagtgttctccttatttggtatctgctactttcgcgaccgtccagacaactgcagccctctcaggtgtgtgaaacgcgtgtgttctcgagcaccgaccgcttggccacttaaatacactttgcaccgaagtgtggagagagaaataaattctgctgacagctggtgatggacgttggccgattggcttcgataaggttatcgaaaagtatccatgcgccgccaggggtactagatccaaatgaaatacaatttaaaattcgaatgtataataataattacagtgttgcccaactaataagtctagtgccctcattgttcataaaaagcatgaccattgaaaatgtatttaaaatttgtattttaagcttatatatttaggtagctatttatttaataaggaaaagcagccggttaataaaacaattttattgagtacgtatgccttaaaatgtcatatctaaccggtaaattgtaacggtttccagttgtaactgttgtttaaagtgttcaatttggagatttagagattataatagaagaactaggatgtgtggacgggctgtgcgcgattggttggtgctattgaccatggagaagtacattggtaaattcctggagcgggggtacgacagcattgaacgctgcaagcttattatcgtaagcgatctgatcatgctgggagtggataatcccgctcataggaagctcctgctcgagggagtccggttcttggtcaacgcacccgagcagttcatctgcaaggagccgtgtgagctgcatgaggagattgaactgaaattagacccggatgttgagttgtttgcttcgctaaagtgcctggaaaatgttgatttcctagaaacacctgttccatattcgctaacatctccacaaaagacgctcacaactcgggactcttgcaaatggaatgtcaaaggtgtggatcagttaccttccgataacatatttaactaaatacaaacaaagcaaaaaataatgcgtgtgataaggatctttatatatttttaagaaccaataaaacgacaattgaaaagctgttttacaacactatcataatcaaccaatataatttcgtaaatatttttcagtttaaataaatacatatgtatctattatattaaagtaaaaaaa

SEQ ID NO: 10097 - DNA, 1504 bp, DROSOPHILA
cagaatttatttctctctccacacttcggtgcaaagtgtatttaagtggccaagcggtcggtgctcgagaacacacgcgtttcacacacctgagagggctgcagttgtctggacggtcgcgaaagtagcagataccaaataaggagaacacttgtcaccatgataccgaccataacgaagaagtaccagaacgtggtgattagcacgggcaacatcatcgccacggaactgggacagcgcaaatcgaacgaggagctgtacgacggcctgaagataacgctccacaccgactcgactgcggagcgcgtggtggttgaaaaggagatcgacgagctgcatgggcgggtgcaaagggccacccaggagttgaccacccgcttgacggagaatggacggaatgagataagtatcggtgccaagatattcctcaatcgccactccacagagtctgtgaatcaggcggtggaggagctgctccacatacttagtgtgacgcacgtggacaatgtggtgttggcctaccacccgaatgcggttgccaccgcaacgccggtggccacaaccaaaccgccctgttccgaggattccaacgtcagcagggctacaaactggagccagcgcaatggaaaggaaggagtggcagagctgaaggaactgtacaaaacactggagcaatatgccctcaagcagcagattacacagctgggaattgccgatctggatgcggcggcgctggaggagctacacaacagcgcacaggttgtgcccacaattgcccaggtcaacctgtctacgtgctgcgtggtgccaccagaactgcaggagttctgcaccgctcacgacatccaactgaacacgcacagcgatcccgagctcctgctgcccgtggagcagttcgacggactggtccctggctacacaatcgactggacactgcgttaccaggtgcatgtccgctgccggggcgttctcaccgccaagggctacatcgtgggcgcgtcgaggtcgagcgtttagttttaagtaactcccacatacagatgctaggctatagttttaatgtttgtaatgtatgctgtgtacagtggtgtacttattgtttgttatacaaaacccaaattgatgattcgaagccgatcgattcactttgctgtaaacgattttaaaatacttattctgaacataaagcgtttcaaaaacgacaattggcaattggctattgtgtgtcactggcttccagctgctgggggtttagcgatttgagccccaaccggtttgaatgcctcggctacaaattaagtgtacgtccagctggtgtaatttatatgctctggtcgcagacgagtactcttggtgatttccttgttgtggcttgttatttgccccaactaatcgctgtctaggcctccgcttctgttggactcaaatctaattaaaggcagacgcgtctcgcccgacgacccatctagatcacgtggctgacccgctcgcctgtcgatacaac

SEQ ID NO: 10098 - protein, 285 aa, DROSOPHILA
MIPTITKKYQNVVISTGNIIATELGQRKSNEELYDGLKITLHTDSTAERVVVEKEIDELHGRVQRATQELTTRLTENGRNEISIGAKIFLNRHSTESVNQAVEELLHILSVTHVDNVVLAYHPNAVATATPVATTKPPCSEDSNVSRATNWSQRNGKEGVAELKELYKTLEQYALKQQITQLGIADLDAAALEELHNSAQVVPTIAQVNLSTCCVVPPELQEFCTAHDIQLNTHSDPELLLPVEQFDGLVPGYTIDWTLRYQVHVRCRGVLTAKGYIVGASRSSV

SEQ ID NO: 10099 - DNA, 15060 bp, DROSOPHILA
gcacgggcggcatcttcgaggcttatgtccctcctgaaggcgacggcaagaagtcgatcatttcaacatcgggtgccaagcagaagttggagttcctggagaagaagtccaagagcctgatggccgtgcgcaagattcgttcctacgacgaaaacttcagctccgatgatttcggcgccgaggcccaggatatttacatccaggcgcacactcacatggctgccaaggacaagtacaagatccgcgagttcgtcagcgaacgctgttatccggagatgatgcacaacgtcaaggacaagaccattcgctggaagtttctacagtcgctggaaccaccacgcgttgtccatgcccgcgtgacggaggtgatcaccaaggaaaaccagttcgctcaagtcaccgtgcgcttccacagccaacagatgttagccatctacgaccgcttcggccgcctgatgcacggcagcgagatcatcaccaaggacgtgctggaatatgtggtgtttgagaagcacatttcgaacgagtatggcaaatggcgactgcacgacaagatcatccccgactggttgccggccaagcagcccgctcccattacctatcgtctcatcgaggatgcagaggagccacccaaggaactgagtgccggggatgccgaggtgaaacaggtggactcagttggcgaacaatccaaggagcaactgccactggcaacaccggtggagagccataccaagccgtccctggccatttgattgtactttttgtgggccgcctggcggctcagaagaatgcgtgttaacattgcctaatgatttttgagtcgccatttggttaaattataatttttaaaactgttattgtttttctttattttatgaattctttgcctctttgaaccgaaaatgggaaaggatgaaatttgaaacttatggggttgtattttctatttatttaatttcatcgctaaattttgtttataatttttcttcttttttccaccctctaagatgaatggaaaatgtagactcaattttcttgtaaaccaccttaggtaggtaagccacctaggaacatatattattcaataatacgtatacttattacttttgatatatttattcaaaatgtagtaaagctaatgcttattgttgctagttattataaatacaggcgatcactcagtagataacatacaaaagctcgtcatggattgtttggacatttagagaatagggaataggatataaagtatcaataaatagtgcacatatatatacaagcaagatcagtaaagccatttcaagtacgtgggcgcacttatatcacacaaagctgctgctgggctcgtcgaggtatgcacaccgcgagcccgcctcctccagagactttcgtcccagatccagtggtattttgctcgcaaacgttccaggtttggaggcttctttgggtgatgttggcacctgtttgctgggggagtacttgttgcaatagttgcccgtcggctgagccacgccccaattggaaggcttgatgggcagcacctttggctttggcggcagcggtggcggcgcttttgcgaattccgtttgatcctgcgtcgcggcaggcaagtcagtctctggctcctgatccaccttcatgggcgacaccggctgttggctacgtgtgatggagagacgtggcgccggctgtggaatttcggtgggcgtggcgggtaccttgctcacgggactcaagctggcgcgcaccttgcgcagctttgatacagctgcgctgagattctccttgtttttcagaaaatcaggcaagtcgaagttgatttcggtgccacgctgatcctccagtcgtgccagctgtgctcgctttaggccctcgagtagttcatctgtaaattggataagtaattaagttagtttggcattctttgggtgaggcacgtcaaggctacccaccttggtgctcggctactcgctccgtcacctgcagcttcacacccgcttttagcttggctataattggcttcttgggatccgcgactgcttgagttgtcgctgcctcctcggattgttggctgctgctagtggacttcttcttgagcttaggtagcttgctagccggaatgttgccgccatcgcgctgctgacgccgcatgcgttcaaagagcgatgatgtctccgagggcgcctcgttggacttcatggagcacagatcgacaggccgcgacttctcgctggccgctgcatcagccttgctggccagcagctcgttgaacaccttgttcgttagctcatccaaatgaccctgcggcagtggcttcataggtttgctttgcttcggcggcatgctactgccgccgcctacctgaaaatccgaattcaccatcacgatgcgcagtcgctggccatcggccatggtaaccggctgattgaggtcgattggcacttgagtatccctcatgatcacctgcacctgctccatcttgtagttgtacttgctgagtattggtcggatcacctcgtgcagttgcttcttgggtttactcttcaccgagatcaccttcggatcgggcaggtccagcttgaaagccacacggcgctcgattaccacctccttaccggccaggatttgcgatggctgctgcacatcgatcgacttggtgctgccctggaacactatgtcatagtagggatacacgaggttcctcttttccagcaaacgttcgaccagttctcccactgtttctccaggtcttgtctgcactatggtggtggctccatcggtgaggatcacccggcacaacgaatacacgctctccgtactggctccttgtccgccagtggctgtgcccgcatcaaacgaggacaaagatgacctagagctgtgcagatcgctcaaggaattctgtccgcagacaagtttgagtgaggcactggtgagcggggcattttgtggtactggtggcgccggcatcagcgcgtgctgcatgtcagccattatctcggtgcggtcgcgggacttactccgcgtctttcggtgccagggaagcagacttttccgtcttctatcctcagcattgctagccgattttttgagctgttggattacaagttcgtcttagtaaggaatggaattatacatgcttcaattactcaccttggagaaggcacctaagtgaaaatttgtcttcagcagctcgtctagatccaatccgctgtaaggcagtggctggttcttctgctccgcctccacgcagcttttgtacaagtccgaacgaatgaaacgctgatagctatcaaacttcatcaggctgaaaatctgcttctgtgccggcgcaaagatgtccggagcggcatcggccagcttctcctccgtaaggctgcgtgcctgcgagtccacattgacgggatcactgctgttgttggccaaatgcttggcaaagatctcgcgagcctgagccactcgatccgcctcagattccagcagacgataacgttcgcaggcggtccagaagtatatgttctccgcggagaactccttcttgagaaactccgagaacgtctgcatgccagcggcatcctgtagcatccgttcaaaggagccggcccaactgctgggacagccgtggtcttgagccgcaccctctgcagcaacggacgcggtaatggcggagggcggtgcaggcgtggtcagtaccttgggcacctgcagcagactgagctggtgctggctgcgcgatgacttcagatccgagtccagcattagcgtcttgatgtacatatcgttgtcggaggcgttcatcgaggcagtgcgtcttacgggcgacgactgtcctagctgctgctgctctttggccaccttgtcggaacggggagtgcggaaggaagactgtccccaggctcggcggaagggcgaggcattggcgggcagagcgcggttctgaaagagtcacaaaaagatgaggaattatagcgaggtgtaatgatagacttaaactgataaactagacttaaactttttattttgtattgcaatctactgatattagaatggatcttttcagaatgtcagctatgtcagctctttgtgccttttagtccatttgtttgtttattagatgaaatgtgggcagtctgtagatagaaaatagtatattcatgcaaccctttagttttcaattaaacttgtagcaaggaagtacaaagaagacatcgattcatggcccattcacaagtacaaattgcgggcatccagaggagactatcattatcatggtcagacgggcacgataaacttttgaactcctcaaatcaactcataaatttgtttgtgtgacgcatcgtgggtctggtgccccttcgaaaactatcttttccaattgtgtatgttaagacattctggagtggttccatgcgagttgcttcgagtcgggttcccctatgctgctgctgctgctgctgctgctgctgatgatgatgatgatgatgatgatggtggtatggtgcccattccatctacttactgcacttggagcgctacgataatcgctgctcaagcagacagaccgggaatatctagtcgccgcatagtggtcattgtatttgtgcatttcccaccgacttttcgtttaacgacagcttttgtgcgccatccccttatggcgagagattaatgaattccactcctaaacccatcattctattcagatctcgagtttcgcagaaaccataactcactcccagctaaactcaaaaaaaaagtatacatgcaacgcaacatttgttttgtccactaacgctgattgttaaagataaaagagaaattttcaacatttccggttggtttcaattttgctctctcacagttcgatcttaaaagggggaaagcaattgttgttcatttttgttcattaatagaaaccaatttgtatcgagatgggcaagctcgtttatataatttgtaaattggttcgacacacgctaccaattgtgcagattgagatggaatggtttatgtgttgtcaagagaaaaactcctatcaatattcatacgtatatttttacatacacgatatgcaataaagtgcaatttcatcatctgaggaaacaattcttgtgacgtcataactcatatatgtatatgtacatatgtacatatatgtatatatacaatgcagtaaagatatggctttatcgctctgctaagaaggcgctttaaagtatatgggtcaaaactcaaaaaacagcacttaaaactacttaagctgcacttgaatttggttttgtttttgtttttttttttcttgaaacggggcctgaaattccagaaaacaagctgacagattcagattcagcgggcaaaagctcagtgaggagcataaatcaacgctgattgccaaacaataggagactactaaaaagggaagggggggggggggggtgggtggttgtgtggaggctttgacgtcgctaagtaggaagtgagcaatttgccaaagaaaacaattaaaataaataaacgacggctaattcacagattgtcgactttgggctgcaaaatgccaaatcgaatggaaacagagacgaggcaaccgaatttagcaacagtgattcgtgcaagaatgggcagcaattagtggtcggacccactaagaaatcccacagcaaatatacaaaatacaccgaaagaaacacgaaaaaacacttgcaatctccattccgttccgttcactgggcaaaaaaaaaaaaaaaaaaaagggagtgcgggccggatcatattgctccgcttcagtggacactgacttggacattttccggtgccgccatggtgggtacgttcacatccacattcccatttacatggccatccctctctctctcgggctgtctccacatattaaactcatcattaaacactgagagaattttgcaatcaatataataactagttacacctctaattcaaacaaaaccattgcttgctttgttataattaatgtgctttgcaagacattagagtggcataataattatataaatgcatgcaattttctcacagtgcacttatagactcggttcaactctccagcttggcttcatctttatatcgctctctcgaaaaacgagtgccaagtcattgagctgagtttgcatttcaacggctgaagacaaacaaagtcccacgagtgaattatccgcaatggctttcggctcgggttaccatacactctcctcgttggtggctggccacaatataatttctctatacatatgcacacccgatcccattcgcgatcgccaactgcaacaacctgtcgccttctggggtggcacttaattagcagggcgtcggtaattggagtctggagagccattggattaaccgcaacggtctgctggacatgatggaaaattgagatccatcgaagagtttctttggggcttaaagccatgccgtagttcgcaatcttggaactacagacacagacacttgagaatatcacgtagtctcgttcggggaacccacacactcgttgtatgtggcaccctagcagatgtttcaagcaaatatcacgcatatcggttcattggaaatacattcgggtaataataaacagggcgggcaaataagttatcacgtatgacgaactgagttttggggctccctttgaaaaaatcaaatatttgacgatgtctagaagttccccgaagtgtgccagaaattctgggaatttatgacaaatcataagtattatttgtacacatacagctgcggtcaaattaatggcccatccagatgtcatcaataaatagcacattttgggattgaatacgcgatatacgaatgtatgcgatatcttttgaaatatcatggaaatatcgtatttattgaaaaaattaatggctaaatgaactaagctttgaacttttatgaatgttctctaaattgccactaaaacaggccttgtttgaactaacttaattggttatttcgtggcctatgtggtggcctttaatctaaaatataaacatatcatttataagtacattgaaaatacttatccaaattagacttaataagagtacaaaaaggtaaagtggaaatatatttatgaaccctattgtattcgagagtgtactccacactccctatagaggcaacaatgaaaacgaatcttatctggcgaaaggcctgcgtttcaaaacaaagcgaaaagagggcggattgggggtggctcatgcggagaaagagggggagaaagaagaagagggatagagatagagacagcgagtctcgttagaattgcaaatgatcaactaaccataggcgttgataaaccagaacgaaccttcggattctctggatttcttaagctattgcggctttgcggctgaatttctttaaaatttttgcggtattccaggtgacaaggtgtgtgtgctggtgtgagtgcgtgggcaatacaatggcagaaagcgaaaacgtgacgcttttgtcaattggctttttctatactttcgcactggaattcacaacgcggcactgcactgcactctttggactttatgtaattgctttatttcacttcgaagtacttgtatctttcggaaaaatggaagccgcgccgagagccgcgaacccgtcgattcaaacgcaaaagtatctgtgaagttgtcgaggtttaactggcagcaatgttaagtttcgagattgcagcaacagaaatgttacgagctgaatgttaaggagagtgcagagagagagactgagtgacagagaaaatattattaattaacattaactacctcgatcgataggaagttatctataattttaaataattgtaaagtaaagtgctaagataaaattgcaaatcgtatattttaaatatcttttcagcgagagagagagagagagagagcgccaaagagagtgatcttttgaacagctgctttaacagtttaggggaggcaacaaaaactggatttcgaaattcgaattcgactgagcgagtgtgagtatgtgtgcatgtgcgctgcttactcattttcaatgggaatgagaatgccttttgttgtttcttttagtttttttggtgcctgtttcgtacgttgctctttgttgttagtattgttattgcttttgcctatttgcctgacaccggctgctggaaattgcttttgttgtttgctttgctgcttatgaatgaatcgcacacgcacatacaaatacaagtttgcacagcttgttgtgggtgtgctcgctctctgtctgttcctctcgcacgccccaagtgacgcacatttttgttgatttttcttaattaaatgtggctttttcagccttttggccaattaattaagttgcttagcgcattttcgtcgcattttacacggcgtatatgtaatgcccatttaagtatgcaatgcaaggggcttaatgaggcaaaaacatttgtagttttgcgaaacacatgccgacgagtaaataaattgctctaaaaatagtcaaagcacgctggcaaataaattaagcgatccgatcccacccccttccaccattccatccttccagtggtgtaaacaaagaaagtcccagacaacatttggaataattaaaatgccaagcaaaggcaactggaatgcgggcggccgctgctttgttgttgtgcatttggttgataaattaagcaatttgcagatatacaaaagtgtagatcaacgaaggaggtgaggagggctctgaaaagaacgcgtggaagtcgaccccccatcagcgtccaatttccagatcatgtgagcactggaaaattattttatttttccttttcgccgcgtgtgcgttttttgtctataatttcacagttatttatgatttgtttagctaaaggccagtgggcaaaaaaatatagggaactataatttcccccattttacgcacttcgcactggtttccatctgcgtttttgtgcgtaaatgagccaattccaggcaatcccatctgttccgttcccaaatccccaattgcaacaacaaacatcgttttacatttgtgaattacagtggagcttctataggaacatttttcaattttacagaaactgatattcatttaaattttcaaagaaactaagttaattttggatagttctggaaagttagttgctgtctttttccattgtcaattgattccaatttcccagttacggtaggtttgcctgcatcgcttttttgaacaattgtgcacattaaattaaatatccggcatgctgcttgtttttcctgcttctttttgtttgcgttaattttatggaagataatgcgggtcatatgcgttctgttcagaaaactccaggcggaagatacatatacaatatgtatttaaaatttaagtacaggaatcgtacggatatgtgaatggaatttttacaatgcccacagacggcgattaacgactacttttgtgcggcccaaagtgtgggcaatgcgatgggaatatttacttaatttctttattgatcaatggaaatggtttatatcggcgtgggccactttcccacttggcaaccgaggatccaagtgatgacccatgagcaccattgaaaagtgaaatgcggcacgcgacgcccatgcaaatgtgataattagaaagtcattatggctggcaatcgttggccatctaataccaatgggtgacatcttcgcttgaggtgatacattgcatacacacatagaaaaagtacttcctaaaagggaaatctaagcagtaaaagtgaatctaatcatttcgaaacacgaacaattcagattattacctgtatattaaaaattatcaaacgaactataatataaaatcgcatctacacatctattgattctacgtctcgaattctcttcctaattccgaaccctgaatttgcgcagaatttaatgctgatcgatttgtggcattacaaacagctaatttatatggaccaataaactattactaaatggcgtaatccaatttggcgtacatctagaatgcaacgcagggtaaacaccacgaagctgacgagttcaaagatcattcggggatcattcttgggctggggtattcgctggaagccaggtgccgccatacggacaaccatcaacggattttacggacacgcattaatggccattgattgacgacgactcgagcgtaaataaacagcttccagtgaaaaaattatgaagagtttttggcgtaaacaaatttggaactaaaatcatatcggaacggaatcgaatcgaatcgaaacgaggcgaatcacattggcgccagctggcgaagtacactcaacaaattttagggggcatgtgtttgaaaatatttaaatcatatttagtttttcgtgaaataaaaatgtattttaattttcattttaaatttgtattctaaaatttttaattatctattcagtcttgacctactacttgcattgccgtcttattattgacgctttagatgatagattttaataatttcgtaaatattgttgagtgtactcccaggcgcgattaatcccacttgggttgtgaatggaatctagaagtgactcactcgcatgacgttggtggtgtcgcgcagcggaggcggcttgctgaagtccatctgctgcactgcatccggatcgctgagggatctgcgcagcgtggtcaccgatgcgcgcttggagtgaaaggagccgcgcaggaaacgagcaaattcgcaggcggcattctttcccacacgacaaactgcccgtggaggcgtgaccttgaagctgggcaggagtggagcgtgcatctcgaaggaagagtccggagagagattgcggctattggagctgcccgactgtgaagtgagattggagctggccgagctgatgccgtcgtcgtgctcctcctcgtcctcggagctggtgggtacttctccgccagatgcagccagtggactacagcccagttgctcctccacccgatccctggtcactctgatcagcactggggaatcggcgcgattatcctccatctctggctcactgagttttcggttgccactccgtcttttggtggccgaactgaagaactgcagcacgcgggaggcactgcggcaactgcgtcgttccgcctggacacgtgccatggccatgggtggtggcatcaggtcctctgcctctgcgcatttcctaggcaatggattcaccaacactttctcctcctgcacggtctccggtgcaattgttatttgcggtgaggcactgcgtctgccactggcactttgataaaactccttggccttgcggcatatgtatggtgagctaatcttggacttgaccttcggtgtgctggcctgtcgctcttcgaagtcctgcacaaaccgggtcaactgttcgcgatccagctccgtgaggcagcgatgcctgacatgtttgggcgtggaaccggccgaggatccaggatgaatccgcttgatctcgaagctgctgtcaaaggtgccggaatcattcagttggctcagcgactggacaaaccgttccaccatgctggcgatggttggttcctgcttgcttgcgatgggtattctggagcaagtgcctcgagtggtatttgtattgttcatgacgcgcacttgcctaaatgggttcaattcaatttgattattacttgcactttaaaagcttgtggcaattaaaaacgcaaagttttctttttgtgggaagggagatggtactcccaaattgtttcgattttagccacgttcacgctgctcgactgttcgcgtacgactgaatttccccggccaactggccagccgccaaaggtaaacttttcacgcaaagtggggaaaagctatgcaaatttcgagaacgtatgtacgtatctctctgggacgcctgcgccctcgagacctcgtagacgacatgcggacttcttcaaatggttgagtaagcacttttttttgttatggactctccacgctgtttactgctttcttcagacgtgcgattcgcatgtggaatacctaaagactgacggaaattgtcactggtcaatgtatgtatctgacgactgtgaatcgagtggatccattggtgggtgcgtcacccatgttggcccataaggagatgccagtgggtttacgcaatcgaagagtgtgcgtttatatagacttcgaaccatataatccaaacaaaagttataaagaacgaaaaatgtttttattatatttatcgctcgaatatatagaacacaacttatgcggcgcccacaaagagcactctttacgtgccttcctctatcaggcatctggcaatgctaacctgactaaagtcaacaacaaatctccttatcaatattggggtatcaaaatagcttcgaaattctcgtgtaaacagttgaaagaaaagtgtgactgcgcaatatgagccaagaacttaatagctctgacccaaatggttaaaaaaatatatgtttatatgtatcagcaaagacacacgagaatcgtgaccactcatgggcactctaatctttagaagttcctgagggaacacttcgattccagtttcaaatggattccagagcaataataaatggtaataaggtgttcttagagcattccagctgtcgtatacaagtgaatttcgattattaatgcaattaatacatattttcatgaatgaataagggttctaatcttgacttgggctctatcgcctgactttgaaagccatcatatgttctttattctatagaaaaataacgcgtgactaactgaattcgaatggatttccagtgacgacaatagatcaaagtgatttcgcgtactgcgtctcattgttctccccacgaaatgtgacatcatttggagctgagcgaggaaatgtttcgtggaaattccgcaggaatcacgggctgtgtaataaatctgcaaagctgtctggggctattccattgaataggtcagaatcggaatattggcccccatctgactatttttctttttttttttttggcatttaagtggaagcagaaggctggctggcggagatctgtttgatttttcactactcgtattcgatttttaagtggaatcatttttggcgtgaaaggcaaatacataaataaggaattcgtgggctgtttttaaactgggcgatgaatttgcgatgaacagtcgagcggcaggcaattaattctgaataaaactttgcgttttttttttttatattgcacactttggtatttgggtaatttaattttccattatattttaggtttcttgaagtgttcggagaaaagtttataaaaacattaacgcacacccactggctattaattgtggaaaaatgtcttgggggaaataccgcgcacaatcataattttgaagtcgctagcgatttgcgcgcgtttcgtaggcggcataatggtttttacgcggtttttagctatgacgtcgattggggatttcatttgtttgattacatagccacatatcaaggcaataaaatggaatgttttcatggcatattagtgtttgcattggaattcgcagagattatgaatcgcagaaagtatttccatttcttttttttttttgctttgtgttttccccccttaagttgtaaattatttagcacattctattttggggtccaaaaacacacagaaaacaggccacaaacaaaagttcaattgactagctgtttttatttatccagccaatatttgatgccagtgcgagattttatttttggccggcgatgaatgatttatcaataggttttcgggtccaaggtaattaacagatatctctttagagtctcatatatttcaaaatgtggtattaagtgattaataaagttggaatttccggttgtgtttttttataagttatcaaatgctgtttacttcgacgtacactttgctattgtgggtgccagttaattggcccagtttacaatgtaattttaaacttattgactctttttaatttgagttttggttttcacttgttaaccaaatgcgttgtgatcgtatgaactgcgctcgttgactgactcagggtttctgaacgatgtgcgacgtttaggtcgctgttaacctggctcaaatgcgaaagcaacaacaacaacatattgcccatggcagcaagcaggtgaaacagcaacaacgcagctgtttgcacgccgccaagggagcgagcgagtgaaagagagcgcatgcgcgcgcgtttttttcaacgcggggcggtttacaagcggtttcgtccgctttccccgttctagctctttgttgttgctgttgttgttgttctcatgtcgatcggtggttagtcacataaacctgagcatagtaactaccaacatcggggtggaaattgagcagcggagtcaggtgttttccacttgcacttggccgaatgcaattttatagcgattttataccctgtaattcgcatattgattggataccttcgccaaagatgtgactatgaaaacaagttatgtgtgcataagttagcaatgcctagctatgctaaaagcatactcttaaaatttgtacgattaaaactaaaatcgtaagcttataattataataattaaaggtttacgacgtcataaaagccgccgtccgcagaaagcgaatattccatatcgagtggaaacatttcagacttatgaccaacaaatttatggctttttaaaacaatatttattgttatgcctggatttttctatatatacatattatgtatatataaaggtactaagttacttacacgcagaaatgcgcttaaaacaatataaaattctaaaaagtttttcttccatataagaataagattattctatctttagagaatagagaataacaactatgagctttcttttataagagatttacaagtaatatcttttaagccagtagagagtatctatcgattgccctgtggcacagaacgttcggttgagttttttcggccaactgctttgggtcaattcaattggcaggttacgtgcctggagcgcaaggtgtttattaatagccgcaa

SEQ ID NO: 10100 - DNA, 4000 bp, DROSOPHILA
caacgagcgcagttcatacgatcacaacgcatttggttaacaagtgaaaaccaaaactcaaattaaaaagagtcaataagtttaaaattacattgtaaactgggccaattaactggcacccacaatagcaaagtgcaagtgcgcgtcatgaacaatacaaataccactcgaggcacttgctccagaatacccatcgcaagcaagcaggaaccaaccatcgccagcatggtggaacggtttgtccagtcgctgagccaactgaatgattccggcacctttgacagcagcttcgagatcaagcggattcatcctggatcctcggccggttccacgcccaaacatgtcaggcatcgctgcctcacggagctggatcgcgaacagttgacccggtttgtgcaggacttcgaagagcgacaggccagcacaccgaaggtcaagtccaagattagctcaccatacatatgccgcaaggccaaggagttttatcaaagtgccagtggcagacgcagtgcctcaccgcaaataacaattgcaccggagaccgtgcaggaggagaaagtgttggtgaatccattgcctaggaaatgcgcagaggcagaggacctgatgccaccacccatggccatggcacgtgtccaggcggaacgacgcagttgccgcagtgcctcccgcgtgctgcagttcttcagttcggccaccaaaagacggagtggcaaccgaaaactcagtgagccagagatggaggataatcgcgccgattccccagtgctgatcagagtgaccagggatcgggtggaggagcaactgggctgtagtccactggctgcatctggcggagaagtacccaccagctccgaggacgaggaggagcacgacgacggcatcagctcggccagctccaatctcacttcacagtcgggcagctccaatagccgcaatctctctccggactcttccttcgagatgcacgctccactcctgcccagcttcaaggtcacgcctccacgggcagtttgtcgtgtgggaaagaatgccgcctgcgaatttgctcgtttcctgcgcggctcctttcactccaagcgcgcatcggtgaccacgctgcgcagatccctcagcgatccggatgcagtgcagcagatggacttcagcaagccgcctccgctgcgcgacaccaccaacgtcatgcgaaaccgcgctctgcccgccaatgcctcgcccttccgccgagcctggggacagtcttccttccgcactccccgttccgacaaggtggccaaagagcagcagcagctaggacagtcgtcgcccgtaagacgcactgcctcgatgaacgcctccgacaacgatatgtacatcaagacgctaatgctggactcggatctgaagtcatcgcgcagccagcaccagctcagtctgctgcaggtgcccaaggtactgaccacgcctgcaccgccctccgccattaccgcgtccgttgctgcagagggtgcggctcaagaccacggctgtcccagcagttgggccggctcctttgaacggatgctacaggatgccgctggcatgcagacgttctcggagtttctcaagaaggagttctccgcggagaacatatacttctggaccgcctgcgaacgttatcgtctgctggaatctgaggcggatcgagtggctcaggctcgcgagatctttgccaagcatttggccaacaacagcagtgatcccgtcaatgtggactcgcaggcacgcagccttacggaggagaagctggccgatgccgctccggacatctttgcgccggcacagaagcagattttcagcctgatgaagtttgatagctatcagcgtttcattcgttcggacttgtacaaaagctgcgtggaggcggagcagaagaaccagccactgccttacagcggattggatctagacgagctgctgaagacaaattttcacttaggtgccttctccaagctcaaaaaatcggctagcaatgctgaggatagaagacggaaaagtctgcttccctggcaccgaaagacgcggagtaagtcccgcgaccgcaccgagataatggctgacatgcagcacgcgctgatgccggcgccaccagtaccacaaaatgccccgctcaccagtgcctcactcaaacttgtctgcggacagaattccttgagcgatctgcacagctctaggtcatctttgtcctcgtttgatgcgggcacagccactggcggacaaggagccagtacggagagcgtgtattcgttgtgccgggtgatcctcaccgatggagccaccaccatagtgcagacaagacctggagaaacagtgggagaactggtcgaacgtttgctggaaaagaggaacctcgtgtatccctactatgacatagtgttccagggcagcaccaagtcgatcgatgtgcagcagccatcgcaaatcctggccggtaaggaggtggtaatcgagcgccgtgtggctttcaagctggacctgcccgatccgaaggtgatctcggtgaagagtaaacccaagaagcaactgcacgaggtgatccgaccaatactcagcaagtacaactacaagatggagcaggtgcaggtgatcatgagggatactcaagtgccaatcgacctcaatcagccggttaccatggccgatggccagcgactgcgcatcgtgatggtgaattcggattttcaggtaggcggcggcagtagcatgccgccgaagcaaagcaaacctatgaagccactgccgcagggtcatttggatgagctaacgaacaaggtgttcaacgagctgctggccagcaaggctgatgcagcggccagcgagaagtcgcggcctgtcgatctgtgctccatgaagtccaacgaggcgccctcggagacatcatcgctctttgaacgcatgcggcgtcagcagcgcgatggcggcaacattccggctagcaagctacctaagctcaagaagaagtccactagcagcagccaacaatccgaggaggcagcgacaactcaagcagtcgcggatcccaagaagccaattatagccaagctaaaagcgggtgtgaagctgcaggtgacggagcgagtagccgagcaccaagatgaactactcgagggcctaaagcgagcacagctggcacgactggaggatcagcgtggcaccgaaatcaacttcgacttgcctgattttctgaaaaacaaggagaatctcagcgcagctgtatcaaagctgcgcaaggtgcgcgccagcttgagtcccgtgagcaaggtacccgccacgcccaccgaaattccacagccggcgccacgtctctccatcacacgtagccaacagccggtgtcgcccatgaaggtggatcaggagccagagactgacttgcctgccgcgacgcaggatcaaacggaattcgcaaaagcgccgccaccgctgccgccaaagccaaaggtgctgcccatcaagccttccaattggggcgtggctcagccgacgggcaactattgcaacaagtactcccccagcaaacaggtgccaacatcacccaaagaagcctccaaacctggaacgtttgcgagcaaaataccactggatctgggacgaaagtctctggaggaggcgggctcgcggtgtgcatacctcgacgagcccagcagcagctttgtgtgatataagtgcgcccacgtacttgaaatggctttactgatcttgcttgtatatatatgtgcactatttattgatactttatatcctattccctattctctaaatgtccaaacaatccatgacgagcttttgtatgttatctactgagtgatcgcctgtatttataataactagcaacaataagcattagctttactacattttgaataaatatatcaaaagtaataagtatacgtattattgaataatatatgttcctaggtggcttacctacctaaggtggtttacaagaaaattgagtctacattttccattcatcttagagggt

SEQ ID NO: 10101 - protein, 1175 aa, DROSOPHILA
MNNTNTTRGTCSRIPIASKQEPTIASMVERFVQSLSQLNDSGTFDSSFEIKRIHPGSSAGSTPKHVRHRCLTELDREQLTRFVQDFEERQASTPKVKSKISSPYICRKAKEFYQSASGRRSASPQITIAPETVQEEKVLVNPLPRKCAEAEDLMPPPMAMARVQAERRSCRSASRVLQFFSSATKRRSGNRKLSEPEMEDNRADSPVLIRVTRDRVEEQLGCSPLAASGGEVPTSSEDEEEHDDGISSASSNLTSQSGSSNSRNLSPDSSFEMHAPLLPSFKVTPPRAVCRVGKNAACEFARFLRGSFHSKRASVTTLRRSLSDPDAVQQMDFSKPPPLRDTTNVMRNRALPANASPFRRAWGQSSFRTPRSDKVAKEQQQLGQSSPVRRTASMNASDNDMYIKTLMLDSDLKSSRSQHQLSLLQVPKVLTTPAPPSAITASVAAEGAAQDHGCPSSWAGSFERMLQDAAGMQTFSEFLKKEFSAENIYFWTACERYRLLESEADRVAQAREIFAKHLANNSSDPVNVDSQARSLTEEKLADAAPDIFAPAQKQIFSLMKFDSYQRFIRSDLYKSCVEAEQKNQPLPYSGLDLDELLKTNFHLGAFSKLKKSASNAEDRRRKSLLPWHRKTRSKSRDRTEIMADMQHALMPAPPVPQNAPLTSASLKLVCGQNSLSDLHSSRSSLSSFDAGTATGGQGASTESVYSLCRVILTDGATTIVQTRPGETVGELVERLLEKRNLVYPYYDIVFQGSTKSIDVQQPSQILAGKEVVIERRVAFKLDLPDPKVISVKSKPKKQLHEVIRPILSKYNYKMEQVQVIMRDTQVPIDLNQPVTMADGQRLRIVMVNSDFQVGGGSSMPPKQSKPMKPLPQGHLDELTNKVFNELLASKADAAASEKSRPVDLCSMKSNEAPSETSSLFERMRRQQRDGGNIPASKLPKLKKKSTSSSQQSEEAATTQAVADPKKPIIAKLKAGVKLQVTERVAEHQDELLEGLKRAQLARLEDQRGTEINFDLPDFLKNKENLSAAVSKLRKVRASLSPVSKVPATPTEIPQPAPRLSITRSQQPVSPMKVDQEPETDLPAATQDQTEFAKAPPPLPPKPKVLPIKPSNWGVAQPTGNYCNKYSPSKQVPTSPKEASKPGTFASKIPLDLGRKSLEEAGSRCAYLDEPSSSFV

SEQ ID NO: 10102 - DNA, 3224 bp, DROSOPHILA
cttccaggtttgaacatgaagcctgagcgcaagtactcgcagacgatcatcaagtcgttccacatctcgggcgtggcactcgacaagggccaggaggccaagttgtacctcgctgccgagaagcaggagtacatcgtggccaccgtgaccaaggccattccacaggttgcgctcgacctgaacttcagcaagggcgatcgcatcatgttctacaccgccggtaagaccttttatgtccactatgttcgcatgtttatccgtttctgacgctttcgttcgtttcacaggcgacgccagcgtttctctgttgggctacttgcacgacattgattccgaagatgatgaggatgacgatcaaatgacgatcgagaatttgctgaactccaaggcgatcaagaatagcaaaaagtctgaagatgatgaggatgagaatgagagcggcgaggaggacgaggaggatactgatgacgatagccagataatcgaggaatacgagtccttcctcgaaaatggtgaggaggaagatgacgacgatgttgatgaggataacgaggagagtggcgaggaggatgaacaggacagcgacgactccgaagctgaagaggaacagccaaaggccaaggttgccaagctctctcctggcgctagcgccaagaaatctggcaaggagcagaacggtgtggccaagaaggaggaggccaagcagcagcaaaagaagaaggagaagccagaggccaagaaggaacaacccaaggccaaggagccagccaagcagcaaccagcttctaaggatccacgtactatcaccggaggcgtgaagattgtggatcaggtcgtcggcaaaggcgaagaagccaagcagggcaaacgcgtatctgtttactacatcggccgcctgcagtcgaacaacaagaccttcgacagcctcctgaagggaaaaccatttaagttcgccctgggcggcggagaggtcatcaagggctgggacgtgggagtcgccggcatgaaggtgggcggcaagcgagtcattacctgccccccgcacatggcgtacggcgcacggggagctccaccgaagatcggaccgaactccactctcgtcttcgaagtggaactgaaagctgtgcattagtgcactatattaacatcatatagacttgtaatcctaagtaagtatccacgtcgtacaacttgataaaaatgttaaataaactctgttttccggctgttcataaatcaacagttttgtaacaatcgcatgtatttggtatggggtctctaaggggttttttcgggtgaacatacatccagcaggggctcagactggagtttccagtgctcgagtacgtaaggcagccgttcgctgggatctgtgctccagtggtgcagacgacacttgagtcgcgcctgttccagcttgtttatggtcacagtgcagtagaagtccttgttctccttcttcaggtcgggtccctcgatgcgctccttgggcagggtaatgcactcctcgcgacaatagaacccagtcttgcgcagcgaggccttgatgtgccagggctcgagcacccatggctcatccttgttcatgaccaccgccagcacaatggtctccagcatgttgaccgtgcgctgggcgtagggggagctgtgtttaacagtcgatttttcagcctctgtcttggcgtacttggccacattctccggcgtattgtacgcggccaaacccggcagcaggagcttattgtagacaaagtgcggcttcattgacaccacgtcgcccttgtcgccaacgccctcgacgaaggtctttagcaccacctcgatgttgggccgctttttgaccagcgtgtcgtccacgagctcgtagatgaagttcttggccctcatccggcggggtttctcgttggttttgtgcagcggcgggtcatatttgcgcttcaggacgaacgtggtctggaagcaaattggtggtgaatggggatcgcttccctaatccaggagagcacttacccgcacttgctgctgcaggctggtggccgatttaagcaaatttaacggcgttacgtagatgttcttcaacatttttaccaccaatatgtctgcgttgccagactactcagccagtttgcagtgttgccagatatgattatttaatctgcgtgagttcagcagtaaaattttcagtgactttgaaaacgattatgaatttagtttttttattgcaactatttctttacattttaataaagcaaaataatttgcccaatttaccttttaattgattaaaaaaaatgtacctttgaaagtattatgactgtcaattttaatttaatagtttcattacaaaataaaagattgactatgccaatatttcggcgaacgcgcccatcgacatgcagtatgcgtacacgctgtgaagcagtttttaaacggaaaccgttagtcgaatttatttacaatatgacattttacaatcaggactcaatagtgttttgtatccaatcaacgtacttgcccaccagcgtgtaaactcctggccatccggccagaccgcacggagtcggtccaaatgacacgacgccggccaggaagtagtaggtgttcaccttgttggtgtccaagccgatgagcggtcccccggagtcaccgcgacaggagtcgacgccttccttgccgccggcacacatctgtgtgtcctcgaggagaatgtcctggctgctgtagacgttctggcactcatccatccggaatccctccacggctgccttcagcttgaggttgctggccgacagctgctccgttttgccccagccggccacgtccatggtgatgccgtcgaaggtggccgaccgcagattgacgtccagaggcaggcaaatgggtcgcacaaagtcggtgtactccacctgctgggccagacgcagcagggctatgtcgttgacctggttcttggaggccggtatatagtcgggatggggtatagtacgctccacgggcacgtccagatgcggtggcgcgcagtccttcatgccgcgcacatctacttcgcaatcgggattagtgttggtgtcccattcgcccaaacgaacaccggacaaccgccagtcggtgggcagtgcctttccgttgacacaatgcgaggctgtgatcacatatcttgtgctgatcaaggatccgccgcaatggtgaccctttttgccctggcctgcatgtaggaattaacc

SEQ ID NO: 10103 - DNA, 1065 bp, DROSOPHILA
tgcaataaaaaaactaaattcataatcgttttcaaagtcaatgttgaagaacatctacgtaacgccgttaaatttgcttaaatcggccaccagcctgcagcagcaagtgcggaccacgttcgtcctgaagcgcaaatatgacccgccgctgcacaaaaccaacgagaaaccccgccggatgagggccaagaacttcatctacgagctcgtggacgacacgctggtcaaaaagcggcccaacatcgaggtggtgctaaagaccttcgtcgagggcgttggcgacaagggcgacgtggtgtcaatgaagccgcactttgtctacaataagctcctgctgccgggtttggccgcgtacaatacgccggagaatgtggccaagtacgccaagacagaggctgaaaaatcgactgttaaacacagctccccctacgcccagcgcacggtcaacatgctggagaccattgtgctggcggtggtcatgaacaaggatgagccatgggtgctcgagccctggcacatcaaggcctcgctgcgcaagactgggttctattgtcgcgaggagtgcattaccctgcccaaggagcgcatcgagggacccgacctgaagaaggagaacaaggacttctactgcactgtgaccataaacaagctggaacaggcgcgactcaagtgtcgtctgcaccactggagcacagatcccagcgaacggctgccttacgtactcgagcactggaaactccagtctgagcccctgctggatgtatgttcacccgaaaaaaccccttagagaccccataccaaatacatgcgattgttacaaaactgttgatttatgaacagccggaaaacagagtttatttaacatttttatcaagttgtacgacgtggatacttacttaggattacaagtctatatgatgttaatatagtgcactaatgcacagctttcagttccacttcgaagacgagagtggagttcggtccgatcttcggtggagctccccgtgcgccgtacgccatgtgcggggggcaggtaatgactcgcttgccgcccaccttcatgcc

SEQ ID NO: 10104 - protein, 248 aa, DROSOPHILA
MLKNIYVTPLNLLKSATSLQQQVRTTFVLKRKYDPPLHKTNEKPRRMRAKNFIYELVDDTLVKKRPNIEVVLKTFVEGVGDKGDVVSMKPHFVYNKLLLPGLAAYNTPENVAKYAKTEAEKSTVKHSSPYAQRTVNMLETIVLAVVMNKDEPWVLEPWHIKASLRKTGFYCREECITLPKERIEGPDLKKENKDFYCTVTINKLEQARLKCRLHHWSTDPSERLPYVLEHWKLQSEPLLDVCSPEKTP

SEQ ID NO: 10105 - DNA, 3509 bp, DROSOPHILA
cttagccactttcgatgcgtcctagttctaagtcaaatgcactgcagcacgaatatagagaaagagaatggagcactcatcatattaaatattatataatatatatatatatatacacattcgcaccaaacacccacaatcacaaccacaaacacatcctcgtagattaaggcccaaatgtttgttatgccacttgttatcgcgacgtttgattaaagctaacaaaactgatatcaaaatgcaaaatgctgctttcttactttcttactttcattcgggggccgtttttattcatcagaatgagatcggaatgagtgagatgaactcatgtgaccggctcgagatctagtttttggcttcgcattgcacttggaaaggctattaaccggatcttcactggctttttttttttaatcactctgccgttcaggttttttactttctgaattcgtttagcatatgaaatttggacttttgcagtcaaaagttcttcgatcctccgaaatgtttgaggctttcgcttctcttttttttgcttcagcagcaaaacatcataaataataatctttaatatatatatatataaatataataacaaaactcacttgcagttagttgcagctggttataaaacaaattgaaatcatgctgaaatagctagtagttagatgagtagatccaaggatagtttttattgctatggtaactaaagtgctataattatgcacttaaagtttgcattttaaaatgtattttgctaaataaaagcacggaagtcagctgcgagctgccacatggcatggccacaactcactatataaatatttatgatccaatgaagcacacacgtttacttgcaaccaatcatcgcgtatcttgattgaatgtcgaatgccaagaatgtatatattcatgaaatatcttcattaatatcaaatcttcattaagtaaatgtccaaacagttgaagttgcgaatgagttgggcaaatattttgatgcctactcgccccacacgatattctcgatccagtcggtatacaaatgtactttggtgtacacactgggcagtccctggacaccgcagaccaatccataggaggtgatgccaatcacttgcttcaggcacgaatatatgggatgctgcacgaagacaggaccgccggagtcgccataacaagtatccgcactggtggaccgcgatcccgcacacaattgggtgcgcacatcgatcttgtgctccagtcgctggctgcactcggccacatcgtatcgatcgagactcaccttgagcagatgcgacgaggcgtgtccactctccgaggtggcgccccatccggcggctgccacctgcagttgctcatttccgccatcgagcggcaggcaggcaggtgccacatactcgctgaaagtcgcctccatttccagctccaccacggcaatgtcgttcttgcgactgcccgtgtcatcatcctcgccgtacgccggatgcaccacatagttgagtacccggaaatcctgcggctgggcatcatccgtggtgctattgtagtccagttcgcccaatctgaccacgtacttggggccatcatagttgggatccagacgctgctccttggtcctgaggtaaatcaacaaattaaatcactatttgagttggatgaacgattgatgtcaaaactggcttgtaccaaattcctatttccacgtaggaaagattttgggaaacaatgtttaaaacatgatgtttttatctgtattgtcttaatatatttagaccattattttctataccattatgcgaattaatttatgccgcaaacgcattagcggtgacgaatggattcagataatcagatgcgaatttatgctgattttttttgaactttttttgaactaaattccaagcgacaaataagaggctgcgctaaataaattaaatttatatgtctaacatatttttaataaattaaattaaaaagtgtagtgatgtaaattaattaaagctagtagctaaataaagaaagttgtttttaagaaaggaatttattgacttttgcttttgttgaatatttattactattcatgtttgtgtcttaattacactgttattttaatcaacttctaagtgattcttctgattactttagcatttcaattaaattccacttactcgctggtttccaggcaatgggcagcggtgagcacgaacttgggatggatgataatggcaccgcagtcccagtcgatttgtgatgagtttttcccacgctgacccagcagcgccatgaagggaaattcccggccagcggccttggcgccgcccacaatgaagggagtggtgcggcaggaagttcttatctcgttgaagcgacggcattctgtttggatgcatatatatgtatatatatatatgtataatatttcacagatgatttgtcgcagaaactgacccttttcgaatctcctgaggccaatatttgcggagaattgctgcgattgaggttgcatattgttgggcagcagacaacaaacaatgtggttggatttatcgcaatatttcacaaaatttctgattagatgcagattgaagaatatagacgggcaatccgtggcactcagttccttgcactctccagttccattatcgcagaattcggataaaatactgcatattactgccaagattaacagaatcccgaatatcacttgcatttcagacgacgactatttcaaaactgaccaccgaaaataaaaacttggaaagttagttgataagcggataagtaataatgagagtttagaaaccagaccataataccattttttattatgggaattattgtataaagctgatagaagcattaagtaaaaagttagcagaatctattaataagatatcgtggtattattattcctatcttttttgacatgttaacaagattttaaaactttttagttagcgaattcacacaccttgtcagtgatgccactcttttgtaccgcaagcagaatggttggaaacatcgataaaatcgaacacatttcttcttgttccaccctaccctaaaattaggcagaccgttcgtggctaattgaataatttgcaaaaaaagcatgcaaaacaaattgatctattcataacaaatataacaatatgatttcataaatgagttataaatagcagaaatttacttgatattgaacctgtaaacaatttttattcacatttataattagtaaataacttttcaatgagtatgttcttagaataagaaatttatataatttaaatgccgccaaaagtcactgcaaatttatagctgatcccgtagctaagtttcacaaactaagcaaacatcgcgaaatattaattcatagtacatattgaagatagaaaagaacatccaagaagcgataaattgatattagtttgacttatatttaataaaactaataaataactttgtaaatgtagaatccgtttttatgttgtgtcggtatgtctaaa

SEQ ID NO: 10106 - DNA, 885 bp, DROSOPHILA
atgcaacctcaatcgcagcaattctccgcaaatattggcctcaggagattcgaaaaggaatgccgtcgcttcaacgagataagaacttcctgccgcaccactcccttcattgtgggcggcgccaaggccgctggccgggaatttcccttcatggcgctgctgggtcagcgtgggaaaaactcatcacaaatcgactgggactgcggtgccattatcatccatcccaagttcgtgctcaccgctgcccattgcctggaaaccagcgagaccaaggagcagcgtctggatcccaactatgatggccccaagtacgtggtcagattgggcgaactggactacaatagcaccacggatgatgcccagccgcaggatttccgggtactcaactatgtggtgcatccggcgtacggcgaggatgatgacacgggcagtcgcaagaacgacattgccgtggtggagctggaaatggaggcgactttcagcgagtatgtggcacctgcctgcctgccgctcgatggcggaaatgagcaactgcaggtggcagccgccggatggggcgccacctcggagagtggacacgcctcgtcgcatctgctcaaggtgagtctcgatcgatacgatgtggccgagtgcagccagcgactggagcacaagatcgatgtgcgcacccaattgtgtgcgggatcgcggtccaccagtgcggatacttgttatggcgactccggcggtcctgtcttcgtgcagcatcccatatattcgtgcctgaagcaagtgattggcatcacctcctatggattggtctgcggtgtccagggactgcccagtgtgtacaccaaagtacatttgtataccgactggatcgagaatatcgtgtggggcgagtag

SEQ ID NO: 10107 - protein, 294 aa, DROSOPHILA
MQPQSQQFSANIGLRRFEKECRRFNEIRTSCRTTPFIVGGAKAAGREFPFMALLGQRGKNSSQIDWDCGAIIIHPKFVLTAAHCLETSETKEQRLDPNYDGPKYVVRLGELDYNSTTDDAQPQDFRVLNYVVHPAYGEDDDTGSRKNDIAVVELEMEATFSEYVAPACLPLDGGNEQLQVAAAGWGATSESGHASSHLLKVSLDRYDVAECSQRLEHKIDVRTQLCAGSRSTSADTCYGDSGGPVFVQHPIYSCLKQVIGITSYGLVCGVQGLPSVYTKVHLYTDWIENIVWGE

SEQ ID NO: 10108 - DNA, 2899 bp, DROSOPHILA
cgaattatgctgccgcggcctcacgcgctattgttttacggattcccataaaaatttaactacaacttcgaacgccatttttattagtggtggcacaaagtctagtgctgagtgaaaaatcgattactctcttatactatcgattttttagtgctaatattcttggaaaacatcgcatattgtcaaatatatatatataatacgtatgtagtcagatactaaatttaaaacagcatgaaaacttgttcagtgatggtaaacagtgatctcgttaccatctacaagctttgatttacaatataattgtatgtttttgttatattgttactatcgaattaaactactattggctatcggttgtaaatcgatgagtttagctgctactcaaaccatccttcttaagcgcaaacaaacaaacacattttggcggagtttttgtttaccttttattttgcgcaaaaagtaacaatgtcaattactctagattttaatggtaagaactttgccaagggtaagaatttagacgtgcactacttgccggccaaaatagacggcgatggggaagcgaatgtaaaaaattacttcaacaactacacacgtgaagcaaccgaattcggcacaggaatcctgacgaacgccttgcgcggatttcctttaatgggagagaagttgaaagtgcccgaaggatactgcggattagttctgcaagaaacagagaagcccatcagcgatacctccgaccgaaagttgcggctaactggagtatttcaagattttacttactggaactacgacaaagtgccgtccaatggcgatccctaccgacaggcccttcctctgccggatgttgctcaagctgtatgtatataccactatatattctcgaagtacacctaataaataccacattttatttatttagctctcgcagcccattagcgaagaggatttagagaaagaaatcgctcgtaataaggaaaacgtcaaggaaagcacgtagttttgttttaatcgcgcttaccgcgttctatttattactccaaaatctaatccaatacatatatatcgtacattttatctggtataaaacgtggtattgatgtttaaataggttatgcttcactcatcagcgtcctcgaatcgctcttcgtcgtcgtccaaactgagattctgcacgccgttgcgcccaagcgtcaatgcatcatcctcctccatagcctcatcctctaagccaccggcatcctgcataggatcgctgtcttccgaatcactgtttgccgaatcaggatgtagggcctggcaagtcgtcatggcactgtacatagtgtctacggtgtgaatgtcctccggcataagccagcactctgtgacctctccaaattgctcgtctacggcatcctcgaaattgtcgtcctcatcgtgctcatcgctgccatttccctcgtccacttccgcttccgaaccaccgccattccgaccattgactgcctgctggggaggatctccgtagacgccgttccactcgactttgtggtccagcatgaagtagatgcactttctcggattcgaagagataccgtgcaggctaacctgcttccactcaatggatataccctccgccaattcagttggctgccaggatagcgtgctaggaacaagaaataacagttactttaaaagattttaataaatagagagcaataccagacaccggcaaagctctaaagcgctcacttttgggcaatgtaaactgtgccttcgcccaccactttgtcgcctagtttcagcttgatattgtttgccgtatacaacagaccatgttccggcggggaaacacgcataataagaaccattttaatacagcttgttaaattaattgtaaaaagcgcgatcaaacaacaaaacttgcaaaaatgcagtgttgagtaccattttttcgtcccccttttgaaagtctggcaagggtggcaataactaggagagacagctggactctggcaacgctctgatgtattttccttctttgaatgtagaatcatcagaacaggtgttctcggaggacaacttctttcttaccactgttgaatttagaaatagatatataaagaatggaacaattttgtcaaaaaaagataaaaacgtagtacgtaattgtgctaccagatcagcgcgtacgattttctcccaaagaggtcttaatttggcgctctagccgcggtcacactggttaggtagcgtctcgttcaattttcaattttagctgttaaaatttgcgataaatgtgataaatgcgaagttatatgctcgcgcatcaaaccttcgacaataatacactcctcaaaacgaacccattacggacagaagtgaaagaagtagccttcgggttaacgaaacgaacttgtcattgtccttccaagttgttgttattttccttatccgttggcagtcgttattattgttgttgttgtcgttgttcgtggatatatacagtgtttactcgatagtcccgacggataaaccacacagattgcatggaagcaacgatggatacggaccatgcgaacctaaatgacttcagggatcgcgatctggccacgcgcatgcgccgctgcaattacgaaaaatacaaatccttggtgcgcatgcacctatcgtttgaattggagctcaatacggatgagtaagatggatcaccttggtatatggctgctcaccacattactaacgattcccttatatatgtagattcgatctcccctgtcacgagattgtctacgaggacaagggcaagctgaagaagtggaaccgcctgtctaaaaaacatcgtttgggacatggagcagctgccacatcctgtgccgccggctccgccagtaaatccgtgggtaatagtcccaca

SEQ ID NO: 10109 - DNA, 813 bp, DROSOPHILA
ttgtttgatcgcgctttttacaattaatttaacaagctgtattaaaatggttcttattatgcgtgtttccccgccggaacatggtctgttgtatacggcaaacaatatcaagctgaaactaggcgacaaagtggtgggcgaaggcacagtttacattgcccaaaacacgctatcctggcagccaactgaattggcggagggtatatccattgagtggaagcaggttagcctgcacggtatctcttcgaatccgagaaagtgcatctacttcatgctggaccacaaagtcgagtggaacggcgtctacggagatcctccccagcaggcagtcaatggtcggaatggcggtggttcggaagcggaagtggacgagggaaatggcagcgatgagcacgatgaggacgacaatttcgaggatgccgtagacgagcaatttggagaggtcacagagtgctggcttatgccggaggacattcacaccgtagacactatgtacagtgccatgacgacttgccaggccctacatcctgattcggcaaacagtgattcggaagacagcgatcctatgcaggatgccggtggcttagaggatgaggctatggaggaggatgatgcattgacgcttgggcgcaacggcgtgcagaatctcagtttggacgacgacgaagagcgattcgaggacgctgatgagtgaagcataacctatttaaacatcaataccacgttttataccagataaaatgtacgatatatatgtattggattagattttggagtaataaatagaacgcggtaagcgcgattaaaacaaaa

SEQ ID NO: 10110 - protein, 215 aa, DROSOPHILA
MVLIMRVSPPEHGLLYTANNIKLKLGDKVVGEGTVYIAQNTLSWQPTELAEGISIEWKQVSLHGISSNPRKCIYFMLDHKVEWNGVYGDPPQQAVNGRNGGGSEAEVDEGNGSDEHDEDDNFEDAVDEQFGEVTECWLMPEDIHTVDTMYSAMTTCQALHPDSANSDSEDSDPMQDAGGLEDEAMEEDDALTLGRNGVQNLSLDDDEERFEDADE

SEQ ID NO: 10111 - DNA, 4849 bp, DROSOPHILA
ggccactgatgaatcacataagctgataagtgctaattttaaaatcttgtccttgcagtcatcaccagcacttaaatacctattggagaaggatgttcaggtgtcgaagcattttgtagtagccgtctccaatctgtcgttcttcaaatccctgcggatccacagcagatttctggagatatcatgcgatggaatcgcctggtttgtctcatggatcgccttcatctggttgctcagctcgaagagcttgtatcaaatgcaagtcaatatgctcttcggcctgatactcgacgtagtgatcgtggccgtgctgaaggcgcttgttcgtcgcaggcgaccggtggccagcaaggatatgctgaccattggacccgataagttcagctttccctcaggtcatgcctcccgggcgttctttgtgctgctgttcttcgccaagctgtatccgcttcacatcatattcctaatgccggtcacagcttgggctgtaagcgtggccatctcacggctcatcctccagcgtcattatattttggatatctgcgccggtgctgccatcggagtgttggaggcactaatcgtgggacttctgtggatcagcgaggaaactgcatttagcattgtgggctttgttaccgaggaaactgtcgacagcatggagtaacgataagttacgattggaacaccgaaagcaatagataatctctagatcattatgataaatgctttaaccaaatacattgttaatgttaaattcatattattgtgtatttcgcataatttttctacccttatttcactgtgaaaagggaaagtgtactttaaatgagactaaagtcgttatacaaccatctttaataaaataaataaagcttttgaagatatttggattattaattataagaaattatagtgtaattcctttgttccgagtcatagcactcctaaatatatcgattcatcgataaggagtcaacaaccccaacgacttcgtcgggggatgaaatgttgtatgccacataaagttttcgcgaaaggataaatacaaaaatattttcggaatcgttggcatgtcaattggactattgaaataacaaaaggcttcatattgttagctagattaagcaatatgaacaaatactcggcatttatagtctgcatttcgctcgtgcttttatttacaaaaaaggatgtggggagccataatgtggactcaagaatatatgggtaggtattttcactgaaagttttcccaagtttccgcaacaataattagcgaaatacttttgtgtggaattaataattaatgaaatcatgagcttaacatgttttatatatttttaaattactaaacatagtgtatactcgaatgcagaaatctttagacgcccttatccttttaatccttaaaaatgcaatatattatttgccctgcagtttccagcaatcatcaggtatttgccatatttacaatggcaccatttgtcgcgatgtcttgagcaatgcccatgttttcgtatcccccaatctcaccatgaacgatttggaggagcgattaaaggcagcttatggagtaatcaaggaatccaagtgagtatgataactatttcaacattccgttgctaatgccaagtgcatattttcagggatatgaacgcaaattgccgcatgtacgctttgcccagcttgtgtttcagttcaatgccaatttgccggactccagagcgcacgaatctcttgtacttcgccaacgtggccacaaatgccaagcaactgaagaacgtcagcattcgacggaagagaaccaagtccaaggacattaagaacataagcatattcaagaagaagtccaccatctacgaggatgtgttcagcacagacatatcgagtaaatacccaccaaccagagagtctgagaacctaaaacgcatttgccgcgaagagtgcgaacttctggagaacgagctgtgccagaaggaatatgccattgccaagcgacatcccgtcatcgggatggtgggtgtggaggattgccaaaagttgccgcagcacaaggactgcctatccttgggcatcaccatcgaggtggataagacggagaattgttactgggaggatggatcgacatatagaggagtggccaacgtctccgcatccggaaagccatgtttgcgatggtcatggctgatgaaggaaatctccgatttccctgaactcatcggtcagaattattgcaggtaattttatttaatttatttcgaaaggaaatcgaaataataatttatatttaaatctcgttagaaatcctggaagcgttgaaaatagtccttggtgttttgtggactcctcacgtgaacgcataatcgaactttgtgatattccaaaatgtgcggacaaaatatggattgccattgtcggaacgactgcagccattattctaatattcataattatatttgcgataatacttttcaaaaggagaacaatcatgcactatggaatgaggaatattcataatgtgagtaaaaatctaaggatatacaacagagtattacaattattcttacagatcaacacacccagcgccgataaaaatatctacggaaattcgcagcttaataacgcacaagatgctggcaggggaaatctgggaaatctatccgatcacgttgctttgaactccaaacttatcgaaagaaatactctgctgaggataaaccattttacgctgcaggatgttgagtttctggaggagctgggcgaaggagcttttggttcgtaattccagtataatcaggttatatagttcttaatatcatttcgattgtaggaaaagtctacaagggacagctcctgcagccgaacaaaaccaccataacagttgccatcaaggcgttgaaggaaaacgcctcggtgaaaacgcagcaggactttaagcgcgaaatcgaactaatctcggatctaaagcatcagaatatagtgtgcatattgggcgtagtgctcaataaggagccctactgcatgctgttcgagtacatggccaatggtgatctgcacgaattcctaatctcaaactcacccaccgaaggcaagtcgctgtcgcagttggaattcctgcaaatagctctacaaatcagcgaaggaatgcagtatctgtcggcccatcattacgtacatcgcgacttggcagctcggaattgcctggtaaacgagggtctggttgtgaagatatccgattttggactatccagagacatttacagctcagattattatcggtaagactttggatatacatatatatatcaagattgcagctacaaagagcaaacatttttgctggtttttattgcagagttcagtcaaagtcgctattgcctgtaaggtggatgccctcggaatcgatattgtatggaaagtttacgaccgagagcgatgtttggtcctttggagtcgttctttgggaaatatacagctatggaatgcaggcaagtatcttaaacttgatttaaatgcgcaatatctaattccaatgctatccctttagccatactacggttttagcaatcaggaagtaatcaatctcatccgttcacggcaactgctctccgctccggaaaactgtcccactgctgtctactcgctaatgatcgagtgctggcatgagcagtcagtaaaacgtccaacattcacagatatttcgaaccgtctcaaaacttggcacgagggccactttaaggccagtaatccagaaatgtaaacataagattttacacatacatatgtattttcaacgaaatggactgtaaaataagtaggtttaagaatttaataaaacgaatgatatcgaaaacccgaagagtgttgagatgttttgggaaagaaccaattgattttcgattaaattaccttttttgtaactttattaagtgagatttgttcgtaataaccatatggtatttaaatgttttgttgtgccaatcggaaaattcttttatccagtagcaatgcccagggcaacgccaccgaaaaatgatgccaaaaatatgtgcagatcgttgacttttggaccctcttcatcgccaatcagtttggtgtaccatttcgccactttcttgccgtttcgggttaggaggctttcagctctgtctaattgattgtcgacatatctttcggtctgcaaattgagttcagcataaatatagtaagcatatagataaacggtttaaatgaattataccttatccttccagttcttctcacgacccagcgaggcttccactttatcggcgagcttatccacgctcttatccaacttagaccaatttatttttataagtccttcttggtgggcgatttcgagcaagattatgctgccgccaactgcaaaggcagcaaatttgcctattttcattgtcgtatatcctgtgaccctgaaaaaattgttatatttttagtaagataagatacacaaattccagcaaattctatggatttccttaaatttgcaactcatcatttggcgcatatacatgtatagtaaattgccgagttatctagcttatcttgtgcaaattatatcagttttatctgattaataactcattttattacactatttagttcttttcctttttagggaggtcctatatttctgtatcccgcaaacaaacaacattcatttatacacgtatttagaagtacatatttgcaatagatggagcggctaagcattcagttgtatattttaattaaaaacgtattctgcagttatctaccagctattaccgaaagtatgcaaaaaatcaatttacttcaaattccaaagacaatcggcattgctaaaaat

SEQ ID NO: 10112 - DNA, 2276 bp, DROSOPHILA
atgaaatgttgtatgccacataaagttttcgcgaaaggataaatacaaaaatattttcggaatcgttggcatgtcaattggactattgaaataacaaaaggcttcatattgttagctagattaagcaatatgaacaaatactcggcatttatagtctgcatttcgctcgtgcttttatttacaaaaaaggatgtggggagccataatgtggactcaagaatatatggtttccagcaatcatcaggtatttgccatatttacaatggcaccatttgtcgcgatgtcttgagcaatgcccatgttttcgtatcccccaatctcaccatgaacgatttggaggagcgattaaaggcagcttatggagtaatcaaggaatccaaggatatgaacgcaaattgccgcatgtacgctttgcccagcttgtgtttcagttcaatgccaatttgccggactccagagcgcacgaatctcttgtacttcgccaacgtggccacaaatgccaagcaactgaagaacgtcagcattcgacggaagagaaccaagtccaaggacattaagaacataagcatattcaagaagaagtccaccatctacgaggatgtgttcagcacagacatatcgagtaaatacccaccaaccagagagtctgagaacctaaaacgcatttgccgcgaagagtgcgaacttctggagaacgagctgtgccagaaggaatatgccattgccaagcgacatcccgtcatcgggatggtgggtgtggaggattgccaaaagttgccgcagcacaaggactgcctatccttgggcatcaccatcgaggtggataagacggagaattgttactgggaggatggatcgacatatagaggagtggccaacgtctccgcatccggaaagccatgtttgcgatggtcatggctgatgaaggaaatctccgatttccctgaactcatcggtcagaattattgcagaaatcctggaagcgttgaaaatagtccttggtgttttgtggactcctcacgtgaacgcataatcgaactttgtgatattccaaaatgtgcggacaaaatatggattgccattgtcggaacgactgcagccattattctaatattcataattatatttgcgataatacttttcaaaaggagaacaatcatgcactatggaatgaggaatattcataatatcaacacacccagcgccgataaaaatatctacggaaattcgcagcttaataacgcacaagatgctggcaggggaaatctgggaaatctatccgatcacgttgctttgaactccaaacttatcgaaagaaatactctgctgaggataaaccattttacgctgcaggatgttgagtttctggaggagctgggcgaaggagcttttggaaaagtctacaagggacagctcctgcagccgaacaaaaccaccataacagttgccatcaaggcgttgaaggaaaacgcctcggtgaaaacgcagcaggactttaagcgcgaaatcgaactaatctcggatctaaagcatcagaatatagtgtgcatattgggcgtagtgctcaataaggagccctactgcatgctgttcgagtacatggccaatggtgatctgcacgaattcctaatctcaaactcacccaccgaaggcaagtcgctgtcgcagttggaattcctgcaaatagctctacaaatcagcgaaggaatgcagtatctgtcggcccatcattacgtacatcgcgacttggcagctcggaattgcctggtaaacgagggtctggttgtgaagatatccgattttggactatccagagacatttacagctcagattattatcgagttcagtcaaagtcgctattgcctgtaaggtggatgccctcggaatcgatattgtatggaaagtttacgaccgagagcgatgtttggtcctttggagtcgttctttgggaaatatacagctatggaatgcagccatactacggttttagcaatcaggaagtaatcaatctcatccgttcacggcaactgctctccgctccggaaaactgtcccactgctgtctactcgctaatgatcgagtgctggcatgagcagtcagtaaaacgtccaacattcacagatatttcgaaccgtctcaaaacttggcacgagggccactttaaggccagtaatccagaaatgtaaacataagattttacacatacatatgtattttcaacgaaatggactgtaaaataagtaggtttaagaatttaataaaacgaatgatatcg

SEQ ID NO: 10113 - protein, 685 aa, DROSOPHILA
MNKYSAFIVCISLVLLFTKKDVGSHNVDSRIYGFQQSSGICHIYNGTICRDVLSNAHVFVSPNLTMNDLEERLKAAYGVIKESKDMNANCRMYALPSLCFSSMPICRTPERTNLLYFANVATNAKQLKNVSIRRKRTKSKDIKNISIFKKKSTIYEDVFSTDISSKYPPTRESENLKRICREECELLENELCQKEYAIAKRHPVIGMVGVEDCQKLPQHKDCLSLGITIEVDKTENCYWEDGSTYRGVANVSASGKPCLRWSWLMKEISDFPELIGQNYCRNPGSVENSPWCFVDSSRERIIELCDIPKCADKIWIAIVGTTAAIILIFIIIFAIILFKRRTIMHYGMRNIHNINTPSADKNIYGNSQLNNAQDAGRGNLGNLSDHVALNSKLIERNTLLRINHFTLQDVEFLEELGEGAFGKVYKGQLLQPNKTTITVAIKALKENASVKTQQDFKREIELISDLKHQNIVCILGVVLNKEPYCMLFEYMANGDLHEFLISNSPTEGKSLSQLEFLQIALQISEGMQYLSAHHYVHRDLAARNCLVNEGLVVKISDFGLSRDIYSSDYYRVQSKSLLPVRWMPSESILYGKFTTESDVWSFGVVLWEIYSYGMQPYYGFSNQEVINLIRSRQLLSAPENCPTAVYSLMIECWHEQSVKRPTFTDISNRLKTWHEGHFKASNPEM

SEQ ID NO: 10114 - DNA, 3287 bp, DROSOPHILA
ttcttgcggcttatgtaccgcagcttgggctcccgcttgtcgaaatcgcagtccttcagcaagtactccgccttggcctcggtgcgggtaatcagcgcgtagcgctcatccttgtcccggcacttgtcgcacaccgagtgtccgaagttgttgaacaaataggagtcggcgaacatgtcgccgcactccaggcactcctcgtactgcactggtatagcaatggcgtcgtccaggatcggcggggcctcctccccggacttattgaggcccgctgggcccacgcccgtgggcataacaggctgttcgagcaggaagcccccgccggagtctatgtacttggtgccctgcaccttgatcacagagcttccctggctgagcgccgcctccggatgggtgccaccctccttgttgctgtcggagattggactaccggttaggtataatcgctcgggagtattggttaatggatagcccacctggccagctccttgaatggatgcgaaaccaacttggcctcccgcaatttctgcgccttggcctggttcctttcgatccgcgccttttgggcattggtcagcttggacttcttctccgccggcggagcagattcgttggtagagacctccgcagacatggcgatttcacaagttttagttttttgtgcgcgcaacttctcagaaattttgtttataaaatgcttctttttgccgatttgtcattccacggaaatttgtttgttcagtgcagccagcttttacgcggagaaaataactgttattggcggaaatgtaaaaatacgtgaaaagagtttttttcttttacatataaataaatcaatgtcacacttctcattcaactgtaaaacaattttttagatttgtaagcactcaatttgaatgcttttagtcttagttattttatttttcgtacggtagatgggcgtttagtattttaaccgcatcacggtcacactggcggatttgtttttattttggtcgccatgcaaagtaaacaccgcaaactgctgctgcgctgcctcctggtgctgcccctcatccttctggtggactattgcggcctgctgacccacctgcacgagctgaacttcgagcggcactttcactacccgctgaacgatgacactggatctgggtccgcatcctctggactggacaagttcgcctacctgcgagtgccctcgttcacggcagaggtgccggttgaccagcctgcgcggctcacgatgctcataaagagcgcggtgggcaattcgcgacgtcgggaggccattcgccggacttggggctacgagggtcgattctcagacgtccatctgcgtcgcgtgttcctgctgggcacggccgaggatagtgagaaagacgtggcttgggagtcccgcgagcatggcgacattctgcaggcggagttcacggacgcctacttcaacaacacgctgaaaaccatgctgggtatgcgctgggctagcgatcagttcaatcgcagcgagttctatcttttcgtggacgacgactactatgtttcggccaagaacgtgctcaagtttctgggcagggggcgtcagagccaccagccggagttgctgttcgccgggcacgtgtttcagacatccccgctccgccacaagttcagcaagtggtacgtttcgttggaggaataccccttcgatcggtggccaccgtacgtgaccgccggcgcgttcattctgtcgcagaaggcactgcgccagctgtatgccgccagcgttcacctgccgctcttccggttcgacgacgtctacctgggcatagtggccttgaaagcgggcatttcccttcagcactgcgacgacttccgcttccatcggccggcgtacaaaggtccggacagctatagttcggtgatagcctcgcacgaattcggcgatcccgaggagatgacgcgggtatggaacgagtgccgatccgccaattacgcgtagcagcaagaacaggcaggactgaagagcgctgcagattgtacatatatacgaacgagacagcacctagacaacagccttataaagtatattaggagcagtggatgatacctcaaccgttcagtgagactttaaaccaagcagctggtgctaatagtgcaagatcgcaagagtaattcaattctaattgtaagcgtaatgataaagcagttgattcaattcgtatatatagagattatgtgcaaatgtcggataacgtatgtgtggtctgatacctttgaatgcaatataaagttgattaacataggaaagcgaataaaaaacttaaaataaatgattggcttgcatttgagcaaagtttaaaattgccgcgcttttgcatggtgtttgtatcagctagatgtggttcgtgtctctgctaaatgaatcgtgtctaattcacagtgaatgtgttggttgatacatggtggttgtatcagctaggcgtggttcgtgtctccactaaatggactgtgccaaattcgcagtgtgaccatatataataataccacccaggcccagtgtgaccgtgcaaccgcccagcaaaaatgacacagccacgcaaacgcgatagtatcgcggccgtataaaaagcggcgctcaccgccgagcgccagtattaaatttgtgacgtcaagagctccgcttcgccaccatcgaaggcccagcttcgccaagtgtacagctatacatagaaacatatatcaggccgaccccgccagcatcccagcttagtagtccgcttcgccaatccaaaaaaaaaactaaatcaaggtgagtttcatttctacttgcagattgaaatttttatttttgtcaattttcgttgatttcgttaagtttgggggatcgccggtaatttcgtttttgccattgtaagatgcggtgggggtaatggggaatcctaactggtttttgttgactgcgcttcttcgttgattgcgaaaatggcagcggatttgttataaatatttattgtgcttgtctagtccgttactttttcatctttctcctcgtttccatttcttttctgctactttgtaacttttttccgcagctgttgaagcgcttttgtcgtcgccccttttgttgactattattttttgttttttttttgtgtggctcaaactttagatttgcgcgtgtgtgtgtgcgagtgccggccggcatttttaacttcttttttttccgccgtctgcttgccgctgtgtgtatgcatgtgcatgtgcatatgtgtgggtacttgggcggggcgcatgtgtgtctctgccca

SEQ ID NO: 10115 - DNA, 1287 bp, DROSOPHILA
atgcaaagtaaacaccgcaaactgctgctgcgctgcctcctggtgctgcccctcatccttctggtggactattgcggcctgctgacccacctgcacgagctgaacttcgagcggcactttcactacccgctgaacgatgacactggatctgggtccgcatcctctggactggacaagttcgcctacctgcgagtgccctcgttcacggcagaggtgccggttgaccagcctgcgcggctcacgatgctcataaagagcgcggtgggcaattcgcgacgtcgggaggccattcgccggacttggggctacgagggtcgattctcagacgtccatctgcgtcgcgtgttcctgctgggcacggccgaggatagtgagaaagacgtggcttgggagtcccgcgagcatggcgacattctgcaggcggagttcacggacgcctacttcaacaacacgctgaaaaccatgctgggtatgcgctgggctagcgatcagttcaatcgcagcgagttctatcttttcgtggacgacgactactatgtttcggccaagaacgtgctcaagtttctgggcagggggcgtcagagccaccagccggagttgctgttcgccgggcacgtgtttcagacatccccgctccgccacaagttcagcaagtggtacgtttcgttggaggaataccccttcgatcggtggccaccgtacgtgaccgccggcgcgttcattctgtcgcagaaggcactgcgccagctgtatgccgccagcgttcacctgccgctcttccggttcgacgacgtctacctgggcatagtggccttgaaagcgggcatttcccttcagcactgcgacgacttccgcttccatcggccggcgtacaaaggtccggacagctatagttcggtgatagcctcgcacgaattcggcgatcccgaggagatgacgcgggtatggaacgagtgccgatccgccaattacgcgtagcagcaagaacaggcaggactgaagagcgctgcagattgtacatatatacgaacgagacagcacctagacaacagccttataaagtatattaggagcagtggatgatacctcaaccgttcagtgagactttaaaccaagcagctggtgctaatagtgcaagatcgcaagagtaattcaattctaattgtaagcgtaatgataaagcagttgattcaattcgtatatatagagattatgtgcaaatgtcggataacgtatgtgtggtctgatacctttgaatgcaatataaagttgattaacataggaaag

SEQ ID NO: 10116 - protein, 325 aa, DROSOPHILA
MQSKHRKLLLRCLLVLPLILLVDYCGLLTHLHELNFERHFHYPLNDDTGSGSASSGLDKFAYLRVPSFTAEVPVDQPARLTMLIKSAVGNSRRREAIRRTWGYEGRFSDVHLRRVFLLGTAEDSEKDVAWESREHGDILQAEFTDAYFNNTLKTMLGMRWASDQFNRSEFYLFVDDDYYVSAKNVLKFLGRGRQSHQPELLFAGHVFQTSPLRHKFSKWYVSLEEYPFDRWPPYVTAGAFILSQKALRQLYAASVHLPLFRFDDVYLGIVALKAGISLQHCDDFRFHRPAYKGPDSYSSVIASHEFGDPEEMTRVWNECRSANYA

SEQ ID NO: 10117 - DNA, 3277 bp, DROSOPHILA
ctttgcgcaagttgcacgcactaacaaccttttggaaaatggccaagccagggcgagcaaaatttttattcattaaaagtaaaataatacccaagaagttggtcaatttgcagggcaaaagagatcgaaaaaaggtagtcaacgatgcgagcgccaagaaggttgcaacttccggcgaaagccacataactagtataatgagcatcccgagtcatagtacggattccgatgagcgtatcgcatccaccgcgccaagtgtctggagtacttcagtacccatacccattccttcctcccaacgaggaatgcccaaacagaatgttcgcagatcggtggtctccataagctcgttaccatcgaaaaagtcaagtagcgcagttaaaaggaaattatcttatatagaagaacagccgtttcatttatataagcttaggaaactcgaagccagcgcggaaactcagcttaaaatagttcattcacatccgcacttaactagttctacggacagcgtggaggaggcgaccaatcagagtgatggcgataaaatggactcggaattgggaaataccacggatcacgaagaccaaatgagtgtatcctccgactcgaacataaggatgcgctttgatatcctccaaaccctcaggaacattcccgattgggatgaacttagtgatatcgggactacagatcacaatctgggcatcgataagaagagtgtggaaatgcagcaggtgccgggctcggaactagaacagttacagattcaactggcccgcaagtcgttgtcctcgtcgatggaaagcctcattcccagcgaatccaattatgaagcaccttcctcgcaaaacgatgacgatgtgcatggtacggagataccatcgccctcaggactagaatctgttgacgaaagcgattggagattgcagggaatgcaattcaaatcgagtcatgtggccacttttaaggacattacatctgagtccaggtcctccacatctagcctcaattccatccctacgactttttccatcggtcaaatggtccaaagctatctggatgggcttattgagaaagttgtggacatattcgttaatacagactatttgcggtcaaaaaatctagacaaaagtaagctaatgaatcgcctgttcaaggaagtcgaggatcaccactgggtgagccacgacaacaatttactgaccaaacgactgacggaacaccacctgcgtcgatttaagtactccctcgtaacgccgagcagcagatcctacatcaacgaatcccaacggagtcggtacttgggtgccctaaacgaattggatcattggcttaacaggacacgacaggctgagcagatgcacctggctgaaaaggaacgactgctgtcggaattggagcggatgcaacgagaggacaacgagaagatcgagaggctggaggagatcttcagaagcacattactgcgggacagccaaccgtctgaacgccttcgctttgtgagtcttcaaaatcggattaaaaattaaacaaaaacacttttattgtttaattaggtaacggaaaccgctcttaaacaaatgagagcaaaacgcgatgcgttgtctgcgacacgactgattttgatcataaggcagcatgacaattcctacattaaaaaggtcgaaattacaaaataaaaataagttggctgactaaaaaaaagggtttacccacagaaagtcgatgagattgaggcgatttctggggaagtcaaattggaaacctatctgtccgcggataacgacgttcagcagatggttaccactctaaacagtgagttaaataaaacgtaacaagtatctatctattttaattttatttacagataaaaacgctgaactggaacgcatgtgtacgctggtgaaaaccaaaatccataccatttcccatctgcgatgtcgacggaagctgctgaatcgcaagttcagggaggccaaagatgagttacgagaaaggcaaaaacggcaaatagcattgcgcgatgaagtatataattgtaatctaacacacaataaacttcttgaccagatcaaagaagtccgtcgtgagggtggcattatgtgctatcccaagttgttggccgattttgatcggaccgagaagtttattgccatcaaacaggcgagtattgtggaactaaagacacaacatgacaatttgctgaagagaatcgaaaagatcgaactaaagattctggaatctaataagagtgaaatcatgtctaagtcggattaagtatgtatgtaagatgcaggggtcttggccaaaaaataaatcaaacaaatcttaaataaatattatatttacgttttaaatttgttaggtaacaaataagcgatgaaataacccagataagtcaaatcagacgtgtcaaaattgaacaataaaaattaaagtttttaatttattggggcatttcaaaattctattgaaaatcatatcaaatcgatggctttcttcctcatccgcttggccctggtggccggtgcggtgtatggaacccaagagctggggatttgggaaagttccgaccacacaaaggtgctcttcgaaggcgccaaacgggaggtgagtccctacgccgaggacctgatgaaccgattctgctgctggcggtgcgacaagtgcaaggaggatgtacaggttaagccctggcaggaatccatggtggatgcttggaacgagacgatcaaaaagacattccacgccttgggcgttcaagttcccttctactacaaacggttctcggaagacttccagcagggcatcgatgacttggtcaacgagaaggaggaaattgataccaatgcaaaaaaaggccccaaaaagataaaataaccaagtcacaccttcaaatattttggtaattaacattaaaaatattcacaaactcgtcgataaattgacagttgccaatgtaataaaagtattataattttaaagatttcgattatttcatagttgcatgcgtggtttctttgtgaccgagggagatcctcctgctgcgtcagccatcgagctataggatctattgatgtacatcctaggagtagaatgacttcttattgcgctaccacgagcatccttgcgaactctatcgggtaaaatcgttggcaaggtaaaattgtcgaaaagattcgccttggtgccaatgggaggagcaagggagtgtgaagccttaagacccgggcttgaagatccagtagtcagcatcgaattggagccagagtttaga

SEQ ID NO: 10118 - DNA, 1001 bp, DROSOPHILA
tagcctcaattccatccctacgactttttccatcggtcaaatggtccaaagctatctggatgggcttattgagaaagttgtggacatattcgttaatacagactatttgcggtcaaaaaatctagacaaaatactccctcgtaacgccgagcagcagatcctacatcaacgaatcccaacggagtcggtacttgggtgccctaaacgaattggatcattggcttaacaggacacgacaggctgagcagatgcacctggctgaaaaggaacgactgctgtcggaattggagcggatgcaacgagaggacaacgagaagatcgagaggctggaggagatcttcagaagcacattactgcgggacagccaaccgtctgaacgccttcgctttgtaacggaaaccgctcttaaacaaatgagagcaaaacgcgatgcgttgtctgcgacacgactgattttgatcataaggcagcatgacaattcctacattaaaaagaaagtcgatgagattgaggcgatttctggggaagtcaaattggaaacctatctgtccgcggataacgacgttcagcagatggttaccactctaaacaataaaaacgctgaactggaacgcatgtgtacgctggtgaaaaccaaaatccataccatttcccatctgcgatgtcgacggaagctgctgaatcgcaagttcagggaggccaaagatgagttacgagaaaggcaaaaacggcaaatagcattgcgcgatgaagtatataattgtaatctaacacacaataaacttcttgaccagatcaaagaagtccgtcgtgagggtggcattatgtgctatcccaagttgttggccgattttgatcggaccgagaagtttattgccatcaaacaggcgagtattgtggaactaaagacacaacatgacaatttgctgaagagaatcgaaaagatcgaactaaagattctggaatctaataagagtgaaatcatgtctaagtcggattaa

SEQ ID NO: 10119 - protein, 250 aa, DROSOPHILA
MHLAEKERLLSELERMQREDNEKIERLEEIFRSTLLRDSQPSERLRFVTETALKQMRAKRDALSATRLILIIRQHDNSYIKKKVDEIEAISGEVKLETYLSADNDVQQMVTTLNNKNAELERMCTLVKTKIHTISHLRCRRKLLNRKFREAKDELRERQKRQIALRDEVYNCNLTHNKLLDQIKEVRREGGIMCYPKLLADFDRTEKFIAIKQASIVELKTQHDNLLKRIEKIELKILESNKSEIMSKSD

SEQ ID NO: 10120 - DNA, 6458 bp, DROSOPHILA
atcaccaagagcagtgcctacggagcctgctacctgggtgcggatagtgcggacttcgatcttccgagaaactatgccgacaacgtcacagtactgtacacgtacaccgatcctcgaaagaaagccaaagccaccaacggctgtaactgttagataaattgtgtttgacaacccattccgcaatacacttcccaattgccaaattcgcaatcaatattccagttagtggtacggataggtagtattatagcttatcaaaaaataaataattttatcctttgacgaaatccgctggaaagtaaagaagtttccctttcaatcttgcatcaaactcacctacatatactttctaaactttttttgttgggtttgttagaaatacgtatgaaaattttattcgataatgttcattgtattaattgtatgtgtctcaattgttggctgtcgtggcttcttttcatgtatgtgggcatacatgtgcggcatcttctttgtaatactttgattgtgtttaaagccaatttgtttttattttcgcagtgctgtcaattcaattctttggctaatttgattctcgaatcgggaagcagaacataaatgtatctgtttgtagcgaaggaatacataggccaaaaacataatatcttagggagcttagaatagagtatttgggataatgtacgagtagctgaatcgaatgccgtagcaagtgaatcaaaattacatctacatgtatatatatataattgcttggataaaacatttaacgtactgtaagattgaatgcgacataccaaaagagattttcaataaaatcgaattcaaatagaaccaagaccgccactttgactaaaaaaactgtcaaagtttcggcagcatagccaagaaaacttggcttttcggcttctacgtcgctgttttcctggggactaattcatctgcgattaagtgtaacctatttgtatgcgattagcttaaatgcatccctttccgggcgacttcaattgtttatgctctgccgcagcttctggggatcctggtagtgcgacgaggacgatatgaccgagggatgctgaggcggtggaaaacaccgcacgtgctccacatttgagccctcgccatcgccgccctttagatacttgttgagaatggagaagatttgtgagtttaatacttggaaccgacgaatccgatccaccattcgcttcaattgctgttaaggaatattcaaattgtactttgggcactttggtagttatgttagaacttacaatgccctttacgtcctcatccttgccatcgacgcgctgtacccgcagaatgtggtagcaaaagtccagagcctcgaagcgacgctgctgtcccagcagtacgatcatgacgcagccagcccagttcagaccttcgccgaagagctcctcgatggtgtactccgttcccctgactggaatgcaataaacgaactgcagagccgaccaaaggcgatggaactccgagcactcatccacgtggataatcccgttggccggtggaggaccacaccacacagggtcgtccaaatagctcttcacgcggttgagaataacttcaaaaatgctgaggccacagcaaagacgctcacgagtcagcaaatctccctctcgtgctatcattgcttgctgttggtaaagattattattataaagttaatcaattaagtttgggggctcacctttgcagtgccaatcttttccacgtttgaaactatctgcagattggcaaactgtgcttcaagacgcttttgcttagcctccggtttttcattctctgaaatgggtagagatgtaagtaagaaaaactacccatgaaagcatccacttgtacatacctttgcaaaaaggtctgggaaagatgttctggaagagggcggcgtgcagtagatcgcacacctcctcctgcgagagcgcctgttcgatcagcaggcaaaagataatgctgttgccaaactcccggaaagactgaaatagctctgtcttcgcgtccggatattgcacgatgtctgtaagatgagcctgatagtagctgagcactccaggcgaaccatattcgcaacggggtagtttgcatgacttgggcatggcaatcatcagcgtcttggtgaactgcagcagcgagccctggatcagtggcttaacaatgtccttcagtataatgtccatgacgactgctatgccctgatagcccagcaggcggcacatggcatggaaatgcggtgaacctacaaagccagtgtactggccatactgtgtggaataggcagcattcagctgcttggaaccccacagatagtaatgggacatttgtggcggcttctcacgctgaatagcctgtgacgacgaaagattcactttggttcgaatgaaactgcaagagataatagtaataataagtattttaaacaatagaaaattggcggcacacccaccgattcgtggctgcattatagcagtaattgaccagaaagtcgtagttcaattccacaaagacgtgcagtgttattctgccgtaaggcgccagtacattgtggttagcctcctttaccatgccgtcaaagttatccagggccaagtacttgcttagcaacttgtggcaaattcgattcgcctctagcaggccttcgagttcctgaaattaagcgaattagagaccgattctagacatctgtaggattccacttaccacaatgccggttatatcgttgccctcgaaacgactgatggccaactcaatgctcttgtgcatgttggcgtttatgcgttgtgtgatcagtttgttcaagtcaatagaacggccttaaacgaatggagaaaccattaaccaaaagatcatgatgcaatgggtgttttgcttacccaaaagttggacatgtcgttgttttaacaaggtctcataacgattattgcggggatacgactggaagttgaaaccgagtacctcgcactccaaacggaatcgcttgtccaagaagatgctgcccgccaattgcttgtaatgggcaaagatctgctcgctcagcttgtagacaaactgatcgaagcacagattgacttcggcctccacttcgtcgtacaggaactgctttcggaagacagtgagtgcgtagtacgccgagtcgttgtacaagtccaggggatacaagacaaatctgtgtgaggcacttagttagttcagatcatttcacctattcgccatttacttactccatcattgagggctccttcgtttgcagaatgtgatcggttaggatccagggcatggacatttcaatcggaaactgaatgcgcttctccatggtgatcagatccttgcactcctcgttgtgctgatgccgcaccaagcacttgttaaccttacgacccatggtcatctccaagtagaactcgcgataccacagctgcgagagatcgcagcacttctgaagcgtgtcgctgaagttgagcaagtagctccagtagaacgatgtcttgtggaacgtgtcgatctgcagcaaacagtttccgtcgatgtccttgcgcaaagtgcgcttgccgccgcttttgtcggcaatcagagactccagcatggtgcgcaccatgtatagctgagtggaggaaggtcccacattgaggcgaggcacctggatgcggaagccgccgtcgggatccttcttgcccttggccactggatcgtcggtgggctcatagcccttttgccagtccgccgatgtctctcgcaccgacatgatgatgctccggataagatccttcttattttttacggcctttcgcagcggttcacgaagcgaaagctgcacgaagtcctgcagctcggaatagatgttacgccggatagcctcgcacaatacggtttcaatgcgcgccattagcacctgcagtccctttatcatggcgatgacctcgatcagcgcgaacttctcttccgaggtgtaattgtagcgggtggcccgctcgtactcctcagcctccacggggcactccttgttctggtgatgatcagtcggatgcaggagcttccaggagtacaactcggtgaccacactggtccactcggacagcaattgaaggccgcgcagagccaggtcggccgtaatccggttctcggcatcagagggattctccttgacggtggtggtcacctcgtttgtgtatcgcgccagctccgaaatgtacttgacgtgatcctcgcgtatctgcggcaaatgcaccattagatccgcctgtgggctgatggcgtttgagctggacagcggccacttgctggaatcgaagtgcttgctgcgctttatgtagttgaagggagcaatctgcatgtcgccgaagaggggcaccacttccaggttcttaaagatgcgatcgatgcgatccagccgtatcttcttcttttgatcaagtttgttgatattgcacgcatcgctgtccataaggaacaggccaaagcccataacttttaccagcatgtgcttctcctcaggggtcaagtacatctttgtctcgaacatatgcacgcaaatgttgaccacatctgagagcagatcctcgtagcccacgatcttctccagcgtgtccttgaccgtgtcgcgaatcttgttctgcgtggccaggaacatggacagattctgcgactcctgcaaggtgtgcgagtccgacatcactttgaggaactgcgcagctcgcctgtaggtggagtaatcgttcttcacgctggacttcatgttcttcagctcgtccagcacggcaaacatgttgataaacttgcctagcgtcaataggtacgcctcggacacgaagtccttgcgcttctcggcgtggcacaagcgcttcacctcgccggagaaggcctcgatggccttgcgttggaagtacatgaagttgagcagcttgttcacctccggggctagcacctcgaccgtcttctcgtagatctccacgcgattcggctgctcattggacttgggctgcggaatggcgcgcgagcagcagcgccaggtgtagagcattactgcgtgtttctgcccctcgtccaggagcacattctgcgggcggagagaaggggttcagagctgtgagtaatgctaatgcgataagccggatacgctaactcaccaagttggcatgggtggtggcctcctcgatgtacttggcgatacccgtgacaaatccattgcgatcctcgaaattcgtatcgaagtttgccttgtagataatcgagcagggctgcgcctcgatgcagggctgctcgtccggcagggatagctcgtccaacacctccacgttggacagcgcgtcggctagcgtaatcttctccgtcatgctgggctgcttatcatgctccagcagcgcgaaatggttaaattctaacaaggcggggccccaatccaatcgacacaaatttttttcgccacaaatacaacacgacttttaccattcgcctgggtgcgtggacacgtggccataattagcacatttttgctggcggttggcgtctacgatgtgcttatgcttatatggctgcgcaccgctaatttcgataagagaaagataatcgataaatacggcgcattggcggcacatcacatcactagcgtctgtggttccgtttcgttttagcgaactcaatttctcctattttatattgcattttccgttaagagtagcctacaattctgcaagatgtcgatgttttggggtaagtcgaactgatctcacttgccccctccgggctggttgtgccaacgagctcttgggtgctccgaccgcgcttttattgccaccacgtgcttgccgctcgatttaccggcagcgtggagcggcgccatttgcacgccgatgtaaagtaaaccatgtttttgaccaactgtgtcctcttccaggtttgaacatgaagcctgagcgcaagtactcgcagacgatcatcaagtcgttccacatctcgggcgtggcactcgacaagggccaggaggccaagttgtacctcgctgccgagaagcaggagtacatcgtggccaccgtgaccaaggccattccacaggttgcgctcgacctgaacttcagcaagggcgatcgcatcatgttctacaccgccggtaagaccttttatgtccactatgttcgcatgtttatccgtttctgacgctttcgttcgtttcacaggcgacgccagcgtttctctgttgggctacttgcacgacattgattccgaagatgatgaggatgacgatcaaatgacgatcgagaatttgctgaactccaaggcgatcaagaatagcaaaaagtctgaagatgatgaggatgagaatgagagcggcgaggaggacgaggaggatactgatgacgatagccagataatcgaggaatacgagtccttcctcgaaaatggtgaggaggaagatgacgacgatgttgatgaggataacgaggaga

SEQ ID NO: 10121 - DNA, 3986 bp, DROSOPHILA
aaaagtcgtgttgtatttgtggcgaaaaaaatttgtgtcgattggattggggccccgccttgttagaatttaaccatttcgcgctgctggagcatgataagcagcccagcatgacggagaagattacgctagccgacgcgctgtccaacgtggaggtgttggacgagctatccctgccggacgagcagccctgcatcgaggcgcagccctgctcgattatctacaaggcaaacttcgatacgaatttcgaggatcgcaatggatttgtcacgggtatcgccaagtacatcgaggaggccaccacccatgccaacttgaatgtgctcctggacgaggggcagaaacacgcagtaatgctctacacctggcgctgctgctcgcgcgccattccgcagcccaagtccaatgagcagccgaatcgcgtggagatctacgagaagacggtcgaggtgctagccccggaggtgaacaagctgctcaacttcatgtacttccaacgcaaggccatcgaggccttctccggcgaggtgaagcgcttgtgccacgccgagaagcgcaaggacttcgtgtccgaggcgtacctattgacgctaggcaagtttatcaacatgtttgccgtgctggacgagctgaagaacatgaagtccagcgtgaagaacgattactccacctacaggcgagctgcgcagttcctcaaagtgatgtcggactcgcacaccttgcaggagtcgcagaatctgtccatgttcctggccacgcagaacaagattcgcgacacggtcaaggacacgctggagaagatcgtgggctacgaggatctgctctcagatgtggtcaacatttgcgtgcatatgttcgagacaaagatgtacttgacccctgaggagaagcacatgctggtaaaagttatgggctttggcctgttccttatggacagcgatgcgtgcaatatcaacaaacttgatcaaaagaagaagatacggctggatcgcatcgatcgcatctttaagaacctggaagtggtgcccctcttcggcgacatgcagattgctcccttcaactacataaagcgcagcaagcacttcgattccagcaagtggccgctgtccagctcaaacgccatcagcccacaggcggatctaatggtgcatttgccgcagatacgcgaggatcacgtcaagtacatttcggagctggcgcgatacacaaacgaggtgaccaccaccgtcaaggagaatccctctgatgccgagaaccggattacggccgacctggctctgcgcggccttcaattgctgtccgagtggaccagtgtggtcaccgagttgtactcctggaagctcctgcatccgactgatcatcaccagaacaaggagtgccccgtggaggctgaggagtacgagcgggccacccgctacaattacacctcggaagagaagttcgcgctgatcgaggtcatcgccatgataaagggactgcaggtgctaatggcgcgcattgaaaccgtattgtgcgaggctatccggcgtaacatctattccgagctgcaggacttcgtgcagctttcgcttcgtgaaccgctgcgaaaggccgtaaaaaataagaaggatcttatccggagcatcatcatgtcggtgcgagagacatcggcggactggcaaaagggctatgagcccaccgacgatccagtggccaagggcaagaaggatcccgacggcggcttccgcatccaggtgcctcgcctcaatgtgggaccttcctccactcagctatacatggtgcgcaccatgctggagtctctgattgccgacaaaagcggcggcaagcgcactttgcgcaaggacatcgacggaaactgtttgctgcagatcgacacgttccacaagacatcgttctactggagctacttgctcaacttcagcgacacgcttcagaagtgctgcgatctctcgcagctgtggtatcgcgagttctacttggagatgaccatgggtcgtaaggttaacaagtgcttggtgcggcatcagcacaacgaggagtgcaaggatctgatcaccatggagaagcgcattcagtttccgattgaaatgtccatgccctggatcctaaccgatcacattctgcaaacgaaggagccctcaatgatggaatttgtcttgtatcccctggacttgtacaacgactcggcgtactacgcactcactgtcttccgaaagcagttcctgtacgacgaagtggaggccgaagtcaatctgtgcttcgatcagtttgtctacaagctgagcgagcagatctttgcccattacaagcaattggcgggcagcatcttcttggacaagcgattccgtttggagtgcgaggtactcggtttcaacttccagtcgtatccccgcaataatcgttatgagaccttgttaaaacaacgacatgtccaacttttgggccgttctattgacttgaacaaactgatcacacaacgcataaacgccaacatgcacaagagcattgagttggccatcagtcgtttcgagggcaacgatataaccggcattgtggaactcgaaggcctgctagaggcgaatcgaatttgccacaagttgctaagcaagtacttggccctggataactttgacggcatggtaaaggaggctaaccacaatgtactggcgccttacggcagaataacactgcacgtctttgtggaattgaactacgactttctggtcaattactgctataatgcagccacgaatcgtttcattcgaaccaaagtgaatctttcgtcgtcacaggctattcagcgtgagaagccgccacaaatgtcccattactatctgtggggttccaagcagctgaatgctgcctattccacacagtatggccagtacactggctttgtaggttcaccgcatttccatgccatgtgccgcctgctgggctatcagggcatagcagtcgtcatggacattatactgaaggacattgttaagccactgatccagggctcgctgctgcagttcaccaagacgctgatgattgccatgcccaagtcatgcaaactaccccgttgcgaatatggttcgcctggagtgctcagctactatcaggctcatcttacagacatcgtgcaatatccggacgcgaagacagagctatttcagtctttccgggagtttggcaacagcattatcttttgcctgctgatcgaacaggcgctctcgcaggaggaggtgtgcgatctactgcacgccgccctcttccagaacatctttcccagacctttttgcaaagagaatgaaaaaccggaggctaagcaaaagcgtcttgaagcacagtttgccaatctgcagatagtttcaaacgtggaaaagattggcactgcaaagcaagcaatgatagcacgagagggagatttgctgactcgtgagcgtctttgctgtggcctcagcatttttgaagttattctcaaccgcgtgaagagctatttggacgaccctgtgtggtgtggtcctccaccggccaacgggattatccacgtggatgagtgctcggagttccatcgcctttggtcggctctgcagttcgtttattgcattccagtcaggggaacggagtacaccatcgaggagctcttcggcgaaggtctgaactgggctggctgcgtcatgatcgtactgctgggacagcagcgtcgcttcgaggctctggacttttgctaccacattctgcgggtacagcgcgtcgatggcaaggatgaggacgtaaagggcattcaattgaagcgaatggtggatcggattcgtcggttccaagtattaaactcacaaatcttctccattctcaacaagtatctaaagggcggcgatggcgagggctcaaatgtggagcacgtgcggtgttttccaccgcctcagcatccctcggtcatatcgtcctcgtcgcactaccaggatccccagaagctgcggcagagcataaacaattga

SEQ ID NO: 10122 - protein, 1291 aa, DROSOPHILA
MTEKITLADALSNVEVLDELSLPDEQPCIEAQPCSIIYKANFDTNFEDRNGFVTGIAKYIEEATTHANLNVLLDEGQKHAVMLYTWRCCSRAIPQPKSNEQPNRVEIYEKTVEVLAPEVNKLLNFMYFQRKAIEAFSGEVKRLCHAEKRKDFVSEAYLLTLGKFINMFAVLDELKNMKSSVKNDYSTYRRAAQFLKVMSDSHTLQESQNLSMFLATQNKIRDTVKDTLEKIVGYEDLLSDVVNICVHMFETKMYLTPEEKHMLVKVMGFGLFLMDSDACNINKLDQKKKIRLDRIDRIFKNLEVVPLFGDMQIAPFNYIKRSKHFDSSKWPLSSSNAISPQADLMVHLPQIREDHVKYISELARYTNEVTTTVKENPSDAENRITADLALRGLQLLSEWTSVVTELYSWKLLHPTDHHQNKECPVEAEEYERATRYNYTSEEKFALIEVIAMIKGLQVLMARIETVLCEAIRRNIYSELQDFVQLSLREPLRKAVKNKKDLIRSIIMSVRETSADWQKGYEPTDDPVAKGKKDPDGGFRIQVPRLNVGPSSTQLYMVRTMLESLIADKSGGKRTLRKDIDGNCLLQIDTFHKTSFYWSYLLNFSDTLQKCCDLSQLWYREFYLEMTMGRKVNKCLVRHQHNEECKDLITMEKRIQFPIEMSMPWILTDHILQTKEPSMMEFVLYPLDLYNDSAYYALTVFRKQFLYDEVEAEVNLCFDQFVYKLSEQIFAHYKQLAGSIFLDKRFRLECEVLGFNFQSYPRNNRYETLLKQRHVQLLGRSIDLNKLITQRINANMHKSIELAISRFEGNDITGIVELEGLLEANRICHKLLSKYLALDNFDGMVKEANHNVLAPYGRITLHVFVELNYDFLVNYCYNAATNRFIRTKVNLSSSQAIQREKPPQMSHYYLWGSKQLNAAYSTQYGQYTGFVGSPHFHAMCRLLGYQGIAVVMDIILKDIVKPLIQGSLLQFTKTLMIAMPKSCKLPRCEYGSPGVLSYYQAHLTDIVQYPDAKTELFQSFREFGNSIIFCLLIEQALSQEEVCDLLHAALFQNIFPRPFCKENEKPEAKQKRLEAQFANLQIVSNVEKIGTAKQAMIAREGDLLTRERLCCGLSIFEVILNRVKSYLDDPVWCGPPPANGIIHVDECSEFHRLWSALQFVYCIPVRGTEYTIEELFGEGLNWAGCVMIVLLGQQRRFEALDFCYHILRVQRVDGKDEDVKGIQLKRMVDRIRRFQVLNSQIFSILNKYLKGGDGEGSNVEHVRCFPPPQHPSVISSSSHYQDPQKLRQSINN

SEQ ID NO: 10123 - DNA, 3223 bp, DROSOPHILA
aacttgcggctgtagccgatcccctgccgcacttaccacaattgccatacacatttgagtataacttttgaagctttttcgttgcttttcgtgcacgagaaaattgaattcacgtccacacgcacacacagacgcaccgcgagactctcaccgacacgaattccacgaatgcaattggctggtgtgtgttgccttttacgacacaactattgctcttattgcaactgtaaattgattgtatctttagcttaagtgttttttattgaataggattgttaaactttggtttttcagcgacattaacgcaaaattcatctgcagcttaacctcaaatttctttgtgtctgtcacgcacacacacacacaaacacagtcagcacggggcggaaccaatggtataagatgaatctatcaatttgacatgaattaatcgggcgaaaataatatctgtagtttccagcacggattgcacaattttttctaccgatttccaagagcaaagtacttgtaatcgaagtaggcgttgcgaacaattcgctcgtttgtgttggtagacacggatggtgattatattcgataatctcgaacactcgatagagccgatagtatcgagtgcaattaagtgttagataaacatcgattgcgggcagaatcgatacttttttgtaataatttaattacctattttgcaattgtcttttaaaaacagttttttttattttaaatgtaagatgtgattttaaaggaagttgtacaatatatatacatatatatttatttataaaccgacataaaatatataatattttcaatatgtcacatactttcttttcttattcatccaataagtcgtcttattttgattcttggtctgtccttccgagaatattccaattaaaattattctctattgaaaagaactaccctactatttacattcgtagtatcgcaacagcaagcggcgatctgaattagtcatcttatctctttccgacagaagtgacgatcaatagcccaacgattttaaacgctttacttcgaagaaccttaaatcgccaatttatccagaggggaatgtccaagcgcaaggccgaggacacacaatccgacaaaatggcaacggccgagaaagtagcacaggtaataagcaacagccatagaaaataaacaaaaatagtttacaaacaataacaactattgtctggacagaacgattacaccattggcctggtggatcccgttaaggattaccaaaagcttatcgaaacacgcgtgcaggtagacgaaatcgtggatgatgatgtcaccaaggagaatttcgatcgaacggctgcagcggcgcgtgacgtcatctggcggctgttattcgacgaggccggtacctcgcaatcgaacacagagaaggccagccaattgctggaggaataccgtggtgacgcctgcttctacgacccgacgccgtacaacgaatggattgtcaagctgagggatgaggttctaaagaaggaactcctcgacttttggcgcgatgtgctggtgaagaagcaactcggtccctgttggtcacgcgacagtgatctctttgacagcgacgacaccccgccattggagttctatgcccatgccggttgtaccgctccatttgcagccagcttaaaggtgcgcgcagcactcgaggagcaggcttcgctggatcaggatgggccagcgacgcctacaactccgggtgaactgagtgccgatgatgccgccgctctgtctggcgaatttgaggccaccctgaccaaggaaaatccgctcgaggaataccgaactctaatgaagcgctttgttctgaccaaaatcatcgttccggacagcgttcaccaggccagcgtgaagaagatagcggcagccgccagggagataatctggaagctgctcttcgatggcacaccctcagcggaggatcaaaacaaggccgccgagctgctgcaggagtacaagggtgatgctggtttctatgggcccgacgactacaacagttggattttcaatctgagggatgaggttctcaccaaagagcttctcgacttttggcgcgacaagatggtgaaaatggaacttggtcccagttgcgcccgcgattccgactattacgacaacgaggatccgctgccattcgagttttacgaaaaggctggttgcaaggctccctttgaaggacctgtaaatgatgattagtagtgcatctttcatgactgaaggattgtttccttatgtactaaaacacctattctggtcgtaatctctgaaggcacacacagtaaagcatttcaatatctgaattatgtttcgaaatgttagaaattgtttaaaaatgaataaaatgataagtattttataactgttctcaaaaatagtggtcctttttattatctcgatcagtaacaaattatttgttctcttcatatttcttcaatagcttaaagcatttaaaattttgtaatatatataaactataatagcatataaattaaggaacatttttcttcatttgatttaaaatttgtatcacgaattttcttgaaatattttatgagtattcttacatctcctgttctaattaagcattatgcatcctaaaacttttaaattgtgtattaaatgattgtttttagatacttttaataaaagttgaccgatgtaggtggaatccacataaatagtttcagcatagtttgtattcatacatagacaattttcgtaatttcctttgaagttcttaaatccaatggttagattattatgcttaaatactaaaataaaatatgaaatactttcttaagttaacttttaaattccgaacacaaaaatgaactttaattaattttgaaactattacatacactgactagagaacatatatccattttctgttcttcttcccatctttggtggttcccatttgggtgctctgtgtccacacaacgtggaacataatacaaaatcaagaactaaataaatataaagtgctttcacaacatttgaacaacgcaacaagaaatgaaccttaaaatgtgcgtccttaaatattacaaaataattctatgagtaaaattgggcagccatcgtttctcattgagatctctgtgagcttatggcaggtggatcgattcgagaattgtatctatagcctgaaatggtcactcggcgtagagcagtcgtgaacgtgatttccgga

SEQ ID NO: 10124 - DNA, 1154 bp, DROSOPHILA
tgacgatcaatagcccaacgattttaaacgctttacttcgaagaaccttaaatcgccaatttatccagaggggaatgtccaagcgcaaggccgaggacacacaatccgacaaaatggcaacggccgagaaagtagcacagaacgattacaccattggcctggtggatcccgttaaggattaccaaaagcttatcgaaacacgcgtgcaggtagacgaaatcgtggatgatgatgtcaccaaggagaatttcgatcgaacggctgcagcggcgcgtgacgtcatctggcggctgttattcgacgaggccggtacctcgcaatcgaacacagagaaggccagccaattgctggaggaataccgtggtgacgcctgcttctacgacccgacgccgtacaacgaatggattgtcaagctgagggatgaggttctaaagaaggaactcctcgacttttggcgcgatgtgctggtgaagaagcaactcggtccctgttggtcacgcgacagtgatctctttgacagcgacgacaccccgccattggagttctatgcccatgccggttgtaccgctccatttgcagccagcttaaaggtgcgcgcagcactcgaggagcaggcttcgctggatcaggatgggccagcgacgcctacaactccgggtgaactgagtgccgatgatgccgccgctctgtctggcgaatttgaggccaccctgaccaaggaaaatccgctcgaggaataccgaactctaatgaagcgctttgttctgaccaaaatcatcgttccggacagcgttcaccaggccagcgtgaagaagatagcggcagccgccagggagataatctggaagctgctcttcgatggcacaccctcagcggaggatcaaaacaaggccgccgagctgctgcaggagtacaagggtgatgctggtttctatgggcccgacgactacaacagttggattttcaatctgagggatgaggttctcaccaaagagcttctcgacttttggcgcgacaagatggtgaaaatggaacttggtcccagttgcgcccgcgattccgactattacgacaacgaggatccgctgccattcgagttttacgaaaaggctggttgcaaggctccctttgaaggacctgtaaatgatgattag

SEQ ID NO: 10125 - protein, 359 aa, DROSOPHILA
MSKRKAEDTQSDKMATAEKVAQNDYTIGLVDPVKDYQKLIETRVQVDEIVDDDVTKENFDRTAAAARDVIWRLLFDEAGTSQSNTEKASQLLEEYRGDACFYDPTPYNEWIVKLRDEVLKKELLDFWRDVLVKKQLGPCWSRDSDLFDSDDTPPLEFYAHAGCTAPFAASLKVRAALEEQASLDQDGPATPTTPGELSADDAAALSGEFEATLTKENPLEEYRTLMKRFVLTKIIVPDSVHQASVKKIAAAAREIIWKLLFDGTPSAEDQNKAAELLQEYKGDAGFYGPDDYNSWIFNLRDEVLTKELLDFWRDKMVKMELGPSCARDSDYYDNEDPLPFEFYEKAGCKAPFEGPVNDD

SEQ ID NO: 10126 - DNA, 3160 bp, DROSOPHILA
gaatgcagtggtgaccggtggagctggaggcattggactgcaggtgtccaagcagctcctggccgctggagcagcggttggttgttttacacataattacgtgaagtaatttctaaagcgagtgcttcctagaaggtggccatcattgatttgcaggataatctggaggagtttgtaaaacttagggccgctcatcccacccaaagcgtaatgatcatcaagatggatgtggcgaacaagaagggtgtggaagccacctatgaggagatagccaagaccttcggtaacatcgatattgtggtcaatgtagccgggatttttaacgacaaggatgtgcagaggactctgttggtaaatctcggtggaatcatcaattccacactgagtgcattgccctacatgggcaaggataatggcggcaagggtggcattgtggttaacatgagctcggtggtgggtctggatccaatgttcatcattcccgtttacggagccaccaaggctggcatcatcaacttcacccggtgcttggcggtaacaagaatttcttacatatcttttgaattaggtttttcatttaagtctctttcttaattagaacgaaaagtactatcaacgctcgggcatcaagtttgtgactgtttgtcctggagctacaatgacggacatgttcaccaactttacggagaagatcatcttcccggaaacgagtgacgagacctataggatcctggataggctaaacaagcagagtgccgctgatgtctctcgatgcattctgaatgtcctggagaaggacaagaacggagctgtctatgtcatcgagggtaagcgcgtttaccctttggaaattaagccccagtggacgggcaaggaacaggccctttaagtgggttaattcgttcacatcctaaacacatgcattttacaaatatgaagttattatggacactagttatttaataaacaaacgatgcacagaaataagttcttgtggtgattagtcatcccgccagctgaccagcacttcgtccgttcgaaatcgctgagtcacataagattcctcaaagggcatcctagtgccagagcggaacatttctgcaccagcatgggcaatcattagtccgttgtctatgcagtaacgttcatcagtggcaaagagtttgcctccgcgttcctcgcacataatacgcatcatctcctggagtcgctcattgcaacccacacctccaactataaggacctgaaaagaagtcggttaactcatagattaatttcggaaaactgttgcaaccaacctcatttgagccgcagtgtgccatggcgcgctctgtgatctccaccaacatggcgaagatggtctcctgcagcgaatagcaaagatcggcttggctgtaattattgacctcttcttcctgtggcttttttctcttattttgcctcttgcccggctctgccaggtcctcgatgtaggataaaatccccgagaagctgacatccatgcccttaaccacatagggcagtttaatataacgattgctcgacttggccagctgctcgatgttgtagcccggactaggatcgttggacagcttaatgatgcgggcgaatcgatccaggcaattgcccactgcaatgtctatagtttcgccaaagatgcgatatcgcttattggagtaggcaataacctgtgtgtttccaccgctcacatagagaactgtaggattctgggcaccggtgatcaggcgacccatctcgatgtgtccaatgcagtgatttacgcccagcagcgggatattccacaagagcgacaaagtgcgagccacaatggcgccaaccagcaaaggaggagccattcctgggccttttgtgtaacaaataacatctagatcagaggatttcaattgggcttcctttagactggattccaccaagcccaggatggcttccctgtgatgtttggccgtttccttgggcaggaaacctgttgaatgattggttatgattaaatctgtactagccggcgggttagaatgtggcaataccttctcctggtggggtaatgtacgttctacgtacgttcgccagtactttaccatctcgaattatgccaatgccaattttattggcactgccttcaatacccaaagcgcaaaccatgtttaaaattctaacaaattaagcaaattgcaatgtaaacaaacattagtgttacccttcgcgccgagtggcagcaatggtcatactgctcaaggagggctgccaacttttccaaactaacagctggttgcaaatatcaaacttttgttgtatagcaaaagtacgcgaaattcattgtaaaatttaaatagatgatcaaataaccgatccgataatggaatcagcgcaggcaacaccgccggctgagatggaaaatccggccagcgtggaaaatggtgattctggccgggattctaaccacatagaggggaaagcaattggagacgtggatatgaaagcggattccattgaacagcagctggaagaaagcgatgtgaaaactgagtctaatggagatcagcttacagaccaggatgagggaaaaatagagcaggatctcaaggcagccgtactggagcaggtgccaatcgaagaggaaggactaagtctgcgattcaaggatctgcaggcccaggaaaaggtgaaggaactgcagcaaaccccttcgcaacccccacagaacgacatcctatcccatgtccactgcttggcccagcttgaggagcagcggcgcaactacgaacagcagttggaacaacttcgtacgtccaatgtccagaaggataatatgatcacgctcattcagcgggagaacgccattctgggcaaggagaagcaggcctgccgcaaggaaatggaaatggccaacaaggagaaggaagccaccgtcattaagttcgccatgaaggagaagctacttatcgacgccaagaaggagaaggaggcggtggagaagcagctggccgaggccaaaaaggaagtaaagaatgtgtccaccagattcctggctgtgagcgaagaaaagtcccgcatgacgtacatcatcgatgaaaaggtgggtgggaatactttgctgcttctataattcaacgaaagattgactatcaaataattgcttaat

SEQ ID NO: 10127 - DNA, 1044 bp, DROSOPHILA
atggtttgcgctttgggtattgaaggcagtgccaataaaattggcattggcataattcgagatggtaaagtactggcgaacgtacgtagaacgtacattaccccaccaggagaaggtttcctgcccaaggaaacggccaaacatcacagggaagccatcctgggcttggtggaatccagtctaaaggaagcccaattgaaatcctctgatctagatgttatttgttacacaaaaggcccaggaatggctcctcctttgctggttggcgccattgtggctcgcactttgtcgctcttgtggaatatcccgctgctgggcgtaaatcactgcattggacacatcgagatgggtcgcctgatcaccggtgcccagaatcctacagttctctatgtgagcggtggaaacacacaggttattgcctactccaataagcgatatcgcatctttggcgaaactatagacattgcagtgggcaattgcctggatcgattcgcccgcatcattaagctgtccaacgatcctagtccgggctacaacatcgagcagctggccaagtcgagcaatcgttatattaaactgccctatgtggttaagggcatggatgtcagcttctcggggattttatcctacatcgaggacctggcagagccgggcaagaggcaaaataagagaaaaaagccacaggaagaagaggtcaataattacagccaagccgatctttgctattcgctgcaggagaccatcttcgccatgttggtggagatcacagagcgcgccatggcacactgcggctcaaatgaggtccttatagttggaggtgtgggttgcaatgagcgactccaggagatgatgcgtattatgtgcgaggaacgcggaggcaaactctttgccactgatgaacgttactgcatagacaacggactaatgattgcccatgctggtgcagaaatgttccgctctggcactaggatgccctttgaggaatcttatgtgactcagcgatttcgaacggacgaagtgctggtcagctggcgggatgactaa

SEQ ID NO: 10128 - protein, 347 aa, DROSOPHILA
MVCALGIEGSANKIGIGIIRDGKVLANVRRTYITPPGEGFLPKETAKHHREAILGLVESSLKEAQLKSSDLDVICYTKGPGMAPPLLVGAIVARTLSLLWNIPLLGVNHCIGHIEMGRLITGAQNPTVLYVSGGNTQVIAYSNKRYRIFGETIDIAVGNCLDRFARIIKLSNDPSPGYNIEQLAKSSNRYIKLPYVVKGMDVSFSGILSYIEDLAEPGKRQNKRKKPQEEEVNNYSQADLCYSLQETIFAMLVEITERAMAHCGSNEVLIVGGVGCNERLQEMMRIMCEERGGKLFATDERYCIDNGLMIAHAGAEMFRSGTRMPFEESYVTQRFRTDEVLVSWRDD

SEQ ID NO: 10129 - DNA, 3157 bp, DROSOPHILA
gtatgtatatacacatatataagctatcttctgtgtatgcgtgtatatacatatgtgatttttatcatgcaaaagcgcctattttcaaaaaagattttaagtttgacttatcggaactaaatttttgcgaataagaatattgaaagcaaattgtttttgggatatcgtcaaatatttacattttatattatatttataagcagacgcgcaaggaatgtggaaaaaggggacgaaaaccaggaagaaagacgtctactgaaaaattggacatgaaagccaaactaggtaagaacaacattaatttccacttataatacttaaacaacggtattatttttaatagtaacaaagtttccaaacactaatacatgttatttcctatggaattttatataacgtgtattttcccttgcagaacgcagcagacaaagtgccagggaatgccgggcgcgcaagaagctgcggtatcagtacctggaggaactggtggcggatcgggagaaggctgtagttgctttgcgtacggaactggagcgcgtcggtatataacttatcatgccacgtccaaccaatttatttattctcatctttattgcagttaattcaatggaataaccagttgagcgaaagcaacactccaaccaacaatgaccagttacttcaggaactcggaatcctcaaacaagaataacctacattcttatttttagcttaagaatattacttttataataaatgtacgacggttactatttatattattacgaaaatactgcagaaatttttgttattttctatattgcattttacagctttttattgtttcatttgtatagtgattaaagccaaattaaagtatttttatgataaataagaactaattaaatatttgttatttaagggtgttaaaccaattggtacactggaacagtgatatatggaacgattattctaagggttcgataacttagtcgtgaaaagcctatcaatggtttctcccatctctccatcggcataaaaatacagaatagtctaaggaactgaataaatgtaaacattatttataaacagccattaatagttattcaattgacaaacttttgtgctgtaagcagcgcttacatatgtgccaaaatattctcacaaccaacagaatctccaacaagatattatggctttaaatggatttttagaattcttccaaaagggcaaggtgtgtttggtcaataacaaaatcatatgcagttgatgtatttttaaactaattttcagacctttaggccaaaaaagccatttgcctccggaaccattaggtattccttacataagcaagcccaggccagtttgcaatccgggattaatctgcggcaagtggtgcgtttgccgcaaggggagaatctcaacgactggctagctgtgcacggtgagaattgtgaattatacaatatatacagtatacccaacgttgtatatttcagttgtggacttcttcaatcgcataaacttgatctacggcaccgtttcggagttttgcaacgaaactacgtgtcccacgatgtctggcggttccagatatgagtacttatgggccgatggagatctgtaagtgcaggaaatgatattgcgaagagcataaactaatgtagctacgatttcagatacaaaaagccaaccgccctttcagcccaaaagtacattgagcatttaatggactggattgagacacaaattaacaacgaagctgtttttccagtgtccacgggtaggaaattatatactttccttttaaagaagccctctcgcatatttcgtatatgagttatttaatgtgtaccatacttcctttcagatgttccatttcccaagaacttcatagcaataagtcgtaaaattttaacccgtctttttcgtgttttcgtccacgtctatattcaccatttcgatcggattgtgagcattggagcggtgcgtatcactaaatagttactttaattaactctataaactgttaaatgttttcaccactttcaggaagctcacgtgaatgcctgctacaaacatttttactactttgtgcaagaatttgacatgatttcggccaaggaattggaacccctacaagaaatgacatctcgaatttgcaaggataaggattgaaagtaattcgtactagattgtgatgtaaatatgtattgtttattacaaaataaataagcgaacacaaagcttggtgtccttttcttaataactaattttataattttagtttttcaaatttattgtttgttggtattattttctcatcaaaatggtgtgttaggggtactcctctgtaaagactggtataataaagttcaatagacttggtcgcaccgatgtaaacagagtttttcgcattaagtaaattaaattgctgatttatttttgttaaagttaagcacttcttagagtattttacaacatggagatggttgaaccggatgcgcacttggtggcactcaaaggtaaactctagttgtaatgcaaattatggacaaagtgtgatgtttttgttgttttcttagttatgcgtttgatgcggcccactttggtgggccttggacctgtggtaacctgcgagcccacggatttggtccagagatttagcagctcccaggagagcgacggaatgtccggtgcctgtgcggagaccttggcggccggccaggtgctactgctgccgcagtccttcggcagcatttacctgggcgaaacattcgccagctacatctgcgtccacaataccaccccgaatccggtggaatgcgtcaccgtcaaggcggatctacagtcgaacacgtcacgcatcaacctatccatgcacgagaacgccaagtcgccggtggtattgccgccgggtggaaccattgacgatgtgatacgatacgaggtgaaggaaatcggaacacacatgtaagtagcacaagatagttgcaaccacaagcttgttcctccatataatctaaagcagtacatagtactgtcttctggaagccccaataatatcattaattgtatatcctgaattcctttcagtctcgtctgcgaagtgaactactcgactcctgcgggctatgctcaatcgctgagaaagtttttcaagttccaagtgctgaag

SEQ ID NO: 10130 - DNA, 834 bp, DROSOPHILA
atctctccatcggcataaaaatacagaatagtctaaggaactgaataaatgtaaacattatttataaacagccattaatagttattcaattgacaaacttttgtgctgtaagcagcgcttacatatgtgccaaaatattctcacaaccaacagaatctccaacaagatattatggctttaaatggatttttagaattcttccaaaagggcaagacctttaggccaaaaaagccatttgcctccggaaccattaggtattccttacataagcaagcccaggccagtttgcaatccgggattaatctgcggcaagtggtgcgtttgccgcaaggggagaatctcaacgactggctagctgtgcacgttgtggacttcttcaatcgcataaacttgatctacggcaccgtttcggagttttgcaacgaaactacgtgtcccacgatgtctggcggttccagatatgagtacttatgggccgatggagatctatacaaaaagccaaccgccctttcagcccaaaagtacattgagcatttaatggactggattgagacacaaattaacaacgaagctgtttttccagtgtccacggatgttccatttcccaagaacttcatagcaataagtcgtaaaattttaacccgtctttttcgtgttttcgtccacgtctatattcaccatttcgatcggattgtgagcattggagcggaagctcacgtgaatgcctgctacaaacatttttactactttgtgcaagaatttgacatgatttcggccaaggaattggaacccctacaagaaatgacatctcgaatttgcaaggataaggattga

SEQ ID NO: 10131 - protein, 220 aa, DROSOPHILA
MALNGFLEFFQKGKTFRPKKPFASGTIRYSLHKQAQASLQSGINLRQVVRLPQGENLNDWLAVHVVDFFNRINLIYGTVSEFCNETTCPTMSGGSRYEYLWADGDLYKKPTALSAQKYIEHLMDWIETQINNEAVFPVSTDVPFPKNFIAISRKILTRLFRVFVHVYIHHFDRIVSIGAEAHVNACYKHFYYFVQEFDMISAKELEPLQEMTSRICKDKD

SEQ ID NO: 10132 - DNA, 3116 bp, DROSOPHILA
tcattcatcaccaactttggaccatccaatctgaaattccaatgaatttctttttgctgatagtaacatctataatgcatatttgttttgcttctgtttcccataatgaaacaatatgatattcatttaattacatgcatttagcgaaatcgatttgatttcgtaatttatgcacccaaagatagatggcgctcaatccatctgtctatgaatggtaatttatgcacaatgggcaaatcaattttcattctgttcaaaatgcgttttgcatttattccgttgtcatcgaacttttgtttgctgtttaggcaaatttctatagatttttatctcgtgtcgacaacaataaaattgtgttaatttatgggaaagtcaacggaatgactatgcccaaaagatagatagatacacttgaatgaaactgggaactcgttttcgctgcccgtctgttcaatcgatttgtgtgttgttgtgttgtcttcattaatttacgtttaatcatttatgcagatttcaatcaatgggcgaatcgttttgaaatacatttccgtttagcatatcattttgttgcagacaatctggttacttaaaattcaatttgtttgcaattaattggttgacaagcggatggagttgtaatccagaatgggctgagatttgtcccctataagtaactacagtatttttaaatatattttacttgccattatcttaaaataaaaactagtagtctggcttaggttttctttcatttttattgcgactatttacaaggcttacatgagctgcatatgaatgatataacgtaggcatgtttatgtggtttttatttcgtatttacaactagctaaaagattagagatactcgtgtttacttgttagttaatacttaaaacgttttctctgtaagtgtgtgttttctatcacgcgaaatggaaagctttcaaaattctattcctgactaaaccgaagaaagtaatacatataatgaaggacactctcagaggcaggtgttgaccgcccggtgttccaggcacttttcgcaggtcacctcgcagcaccacttaaagacgcacttgcagttggtttgctcctccacaatcctgcgggtgtgtcctcgattgcagcacaagcgatcgcatcgatccgatccggaactggtcacattgcactccctgccctgagttccgagtgctcccgtcttggagttgggtgtgcaaaagtcgggcgaatcgtctgcgaagaccaactggtacttgttcgctggcctcgcgtgcggactctccggcatgaagctgttcccgtcgttgcgcaacgtcaccttcctagcactgtcataccggtctcgcagtcgtcctgccacttctcggaacggaggcatcttcagccagcaggtcttcaccgtgcaggagccggaaagcccgtgacacttgcactccagccgcatggcatcgcgaatggcctgaaaagatgccagaattcaggatgcatttgttacttataataattatagaacttatatttaactaagataatttgcaatggtggctagcgttagtggctaatatttttgtattacttaccaatcgacctgcgttattattgtggaacttaaccagcgtgcccagatcgctacgcctttgcctttgcttggcgtcaaggaaaacgcgcgagtgacgaaggccaaagttaacgttgtcactgcatccgccccactcccactgcccctcgggaaacttaatgttgtcccagaacttgcggcgcccccgccttccgccgggcctgcgatttcgcccgcctctatgctccactggagctatatcggtcatggtgctggcgttgttcatgcgactcagccgctgactgggatgttgatcctgcagcggcatttgttgtcgcagcatcgccgcctgttgctgccgctccagtgccgcctctgcggtggccgccgtcaccatctgtggctggccgccgtttctgcgcatatgcgccttgtcgcaggagcactccaccagctggcccatcgtgcaggccttcgtcacggcgtaggtcactcccgcggctgtgatcgcgttcacgaaacccgtctctcgggaatctggaaaataggaattataggatacataatgaccaatttttttttttttaactttcattaacatttttatttaactttacaaagtttttgttatagaaatataatattttcctcaaagaatgccagccgcaagcgtgctcaatcaatcgtcaatcattggcgttgtcagcgcgtgtcgcctgattgattttaatttgccagcctgggcgacaaaatgatttattgctcgttcgactggcgatcaccaatcagcgatcgctgctctatgcaaattacaaatcgcatatcgcaagtggtgttggcagtcacgtttaatgaaagcgaaatcgcaatcgaaatccgaatcgcaattgtaatcgccgggattttaatttgcatacgcttgtaatgcgctcgaagttgaagtgctggttcttttttgcaccgcgacaggtgatatgtcttgagccaccctaaaatggagagttacaagagggcccagttcgcgaatattttattttttttcagtttcgctgacaggttgacagggcgaggctttaatccgaccatcggagaatttcggtggttacgcccgtggaatttatggcacatacccaccgtttggtatgtgttttgtttgcgcattgttgtcattaagtgcggcgatcgaggatcagaagagcggtatccatcccatcccatacagtcctcctcctccttttcctcgtcttttttgccgtgcaataatttattaaaattgacagctgtaaaatcccaaataagaagactttactcgttgagtttttgtaagaaactgattttatttggaaatatcttcggtttaaataggtgacatgagaatcgcatcttaaagtaaatggcctacgcagaggcctaagtaaatagtccccgccttatcgaggtcccacgctcgggcacatctgcctatcttgagcggcgaggaccttatctgtgggtctcccactaagggactatttttaggaggcggggaacgatctcaagtgactgactcatgtag

SEQ ID NO: 10133 - DNA, 1017 bp, DROSOPHILA
atgcgatttgtaatttgcatagagcagcgatcgctgattgattcccgagagacgggtttcgtgaacgcgatcacagccgcgggagtgacctacgccgtgacgaaggcctgcacgatgggccagctggtggagtgctcctgcgacaaggcgcatatgcgcagaaacggcggccagccacagatggtgacggcggccaccgcagaggcggcactggagcggcagcaacaggcggcgatgctgcgacaacaaatgccgctgcaggatcaacatcccagtcagcggctgagtcgcatgaacaacgccagcaccatgaccgatatagctccagtggagcatagaggcgggcgaaatcgcaggcccggcggaaggcgggggcgccgcaagttctgggacaacattaagtttcccgaggggcagtgggagtggggcggatgcagtgacaacgttaactttggccttcgtcactcgcgcgttttccttgacgccaagcaaaggcaaaggcgtagcgatctgggcacgctggttaagttccacaataataacgcaggtcgattggccattcgcgatgccatgcggctggagtgcaagtgtcacgggctttccggctcctgcacggtgaagacctgctggctgaagatgcctccgttccgagaagtggcaggacgactgcgagaccggtatgacagtgctaggaaggtgacgttgcgcaacgacgggaacagcttcatgccggagagtccgcacgcgaggccagcgaacaagtaccagttggtcttcgcagacgattcgcccgacttttgcacacccaactccaagacgggagcactcggaactcagggcagggagtgcaatgtgaccagttccggatcggatcgatgcgatcgcttgtgctgcaatcgaggacacacccgcaggattgtggaggagcaaaccaactgcaagtgcgtctttaagtggtgctgcgaggtgacctgcgaaaagtgcctggaacaccgggcggtcaacacctgcctctga

SEQ ID NO: 10134 - protein, 338 aa, DROSOPHILA
MRFVICIEQRSLIDSRETGFVNAITAAGVTYAVTKACTMGQLVECSCDKAHMRRNGGQPQMVTAATAEAALERQQQAAMLRQQMPLQDQHPSQRLSRMNNASTMTDIAPVEHRGGRNRRPGGRRGRRKFWDNIKFPEGQWEWGGCSDNVNFGLRHSRVFLDAKQRQRRSDLGTLVKFHNNNAGRLAIRDAMRLECKCHGLSGSCTVKTCWLKMPPFREVAGRLRDRYDSARKVTLRNDGNSFMPESPHARPANKYQLVFADDSPDFCTPNSKTGALGTQGRECNVTSSGSDRCDRLCCNRGHTRRIVEEQTNCKCVFKWCCEVTCEKCLEHRAVNTCL

SEQ ID NO: 10135 - DNA, 3187 bp, DROSOPHILA
cgaggacaggctattaaagttattcagggtcctgttggctgggattctctgggtggacttgggagtgccatccaggcgggctccattcatattctgcgacaattcggtgatgggcgacagaacggtggtgctggcaggaatatgccgcttcagcatccattgcagcggagtctcctgcacggctgattttcgccttttggcctggtattccatatcggcatcatggggatcgaaattctcctgaccacacgctccactttcatcatcttcttcctccacatcgagcattagccgcttgctcgccatctgcgcgttaaaaagaaaaaaaacaatgatttttttatcagctggaagctgctaaaatcagctggattttcgcaattgttcttaccctgatctatttgcgatatacgtaactattgggaagttcagattttgggttccagcgtgcgcagtgatttcgattgccaaatccttgacgattttcttgttctgtcgacttgtttgtttcgcttttggcggtcaactttattggcgcctttatcaattccccattctaccgatgcaaacccaccacctgctaactcaccactgcgccgtatttaaacaggacgctctagtttgaatttaaattgcttgtatatttttttgttggtatttgcatggctggttcaactttatttgacaaagagcaatgaaattgaatttaaaaagcgcagccatcttaatgataacgtgttctaccaccataatatgcgatgaaatcaatatattttcaatcaataaatttgtactttaaatagttataagaaaaagatacatagaataatcgttaatgagcgtaataaaataaaaacattccacaattataattatgaatcatatcatttttccagtggaaaatttgacaaaaacatattaacatttattacatctggtcacactgtccgtttgtttatatttttcgtgctgcagttgtgttattgtttttaatacaaatatgccggaatttgagaactttaacgtaaaaaccacaattgactgcaaacaaggtgcagtgcgagctgtgcgctataatggtgaatggttttcagtgcccgatttttaagcattaactcatcttgatccttaatctttagttgatggcacttattgcttgagttgtggatctgacaagaagataaagctgtggaatccggcatcgggattactgcttaagacttatggtggtcatgcggatgaagtcaccgatgcggcggtatagttttttctcacttagtattattcttattattaagtactccactttggcatattgcagggaagctgtgatagtagctatatcgtttccgccagcttggataaaagcattatctactgggacgtgtcaacgggtgagttgtaatcacagcgcaccaattatggctaatgtttctctcgcctatttcaggagcaccagtacggcgcctgcgtagccatgccggaggtgttagatgcgtctgcttcaacgaggactcctcgatagccatttccgggggtcgagataatgccgtaatgtgctgggacattcgaacgcgtcgcctggatcccgttcaggtgatgaaggaggcccgggactgcatcaccacggtggcaaccaacgagaatcgcatctacgccgcctccttggacggatgtgtgaggacctacgatattcgggtgggcgaacttacctgcgacaaaattggtgaacccatcacatatctggcgcagacgcgcgacgagcaatgtctggtggccggctgtcaggatagtgtggttcgtctgctggactgtgagaccggcggattactctccgagtacaggggacatcgcggcgatgactaccacatcgagtgcggaatactgtcaaacgatgcccaaatagtcacgggctccagtgatggagacgcctttgtttacgacctgctcgatgggaaagtactgcagcgcattcgcataagtaagcaagtgaagttgaactttgattattagctatatacatatattaacatgtgggtttcctttgtcatatatccgtcaggtgataatggcggcgtcgtccactccttagccactcatcccaagcgacaggaaatgcttttcgccagacgacgggacatgtatgtcttctcgacagatttgcaaatcgaagaggagcaattataggtactcataatgctgtatagttttaccaaaagctagtgatataaataatatagttataaaatataaagactccttcaggagcccacctcatcaaaatacccgcaaacataaaaaattgattgttttgttgagggaaaaaggaaaaaccatttatttgacataattttttgttttcatagagcatgaatgtatgtagtaatatgtgtttgttttcgtatgatctggcttatatattcttcacgattcttttcctttaactatgaacggcctgcataatgtttccttaatcaaatatttcgaatgcggacgagcggcgagcaggcgagcaggcgtggttgacacaatgtagctgccttgcatgcattggctgtatccttcatcattctcatagtctctctccttgtgggaaaatgcggtacgcctagccgcggggcagcgctgagcgaagaagagtttcttcaattcaaatccgggtctcaacagtggcgtccgagcagggacacttggtgtcctagctggcagctatgagacgtgttgaacaaagtcaagaagaaactgaaattgcacagcgcagacgcagcttggcgaaggcagacagctgcagcattgacctctagctcaaacgtgcgcattcttttgttgaaaggtaaaggaggatggggaggggagaggaggggggaaatgggatcgagggactcctggttaaactctctgaacctgtcgtacttatgttactaaagcatattaaatatgtatgcaaagtatttgtttatggtagtttagtagtaatattatgtaatgttccgttacttatgttcgtatgtacgctgcatgtattatttatatatgttgtggtaggtatgcgtaatttgtatataatttatattaatatatatatatatatatatttatataatagtttatataataaacgatcttgctttttattttgttttcgttttgcatttttttatctcttcctttagaatgttttaatttt

SEQ ID NO: 10136 - DNA, 945 bp, DROSOPHILA
atgccggaatttgagaactttaacgtaaaaaccacaattgactgcaaacaaggtgcagtgcgagctgtgcgctataatgttgatggcacttattgcttgagttgtggatctgacaagaagataaagctgtggaatccggcatcgggattactgcttaagacttatggtggtcatgcggatgaagtcaccgatgcggcgggaagctgtgatagtagctatatcgtttccgccagcttggataaaagcattatctactgggacgtgtcaacgggagcaccagtacggcgcctgcgtagccatgccggaggtgttagatgcgtctgcttcaacgaggactcctcgatagccatttccgggggtcgagataatgccgtaatgtgctgggacattcgaacgcgtcgcctggatcccgttcaggtgatgaaggaggcccgggactgcatcaccacggtggcaaccaacgagaatcgcatctacgccgcctccttggacggatgtgtgaggacctacgatattcgggtgggcgaacttacctgcgacaaaattggtgaacccatcacatatctggcgcagacgcgcgacgagcaatgtctggtggccggctgtcaggatagtgtggttcgtctgctggactgtgagaccggcggattactctccgagtacaggggacatcgcggcgatgactaccacatcgagtgcggaatactgtcaaacgatgcccaaatagtcacgggctccagtgatggagacgcctttgtttacgacctgctcgatgggaaagtactgcagcgcattcgcataagtaagcaagtgaagttgaactttgattattaggtcgtccactccttagccactcatcccaagcgacaggaaatgcttttcgccagacgacgggacatgtatgtcttctcgacagatttgcaaatcgaagaggagcaattatag

SEQ ID NO: 10137 - protein, 277 aa, DROSOPHILA
MPEFENFNVKTTIDCKQGAVRAVRYNVDGTYCLSCGSDKKIKLWNPASGLLLKTYGGHADEVTDAAGSCDSSYIVSASLDKSIIYWDVSTGAPVRRLRSHAGGVRCVCFNEDSSIAISGGRDNAVMCWDIRTRRLDPVQVMKEARDCITTVATNENRIYAASLDGCVRTYDIRVGELTCDKIGEPITYLAQTRDEQCLVAGCQDSVVRLLDCETGGLLSEYRGHRGDDYHIECGILSNDAQIVTGSSDGDAFVYDLLDGKVLQRIRISKQVKLNFDY

SEQ ID NO: 10138 - DNA, 8535 bp, DROSOPHILA
agcggaaagtgaaagcgcatctgtgagtgggggaaaaactaatgatgatcgaagaggcgaaccttgttggtcgttcgagaagaaatgcaaacacgtgtctttaatttccgcactctctgcattttttatttgcacttgcctcgttggcacttaattatgtggccacttaaaaattgcgaatacttgggcataatctaagcgtaaattataaatctaaataaattatgagctaattgcacggctagtctaattggagtagtccagtcgcctcctggccagagccaatcggatgagtcggcgctgctccagttcctgcagttgctgctggacaagcaggcgatgcagtagctccactttggcgtactcgtgggattttcgttgcacccgcttttgctgctcctccacgaaggcgtccatggtttttgagatggcacagggttcgttgagttcctcttgctgctgctccttctgtgtgatgtgattccagcagttggtctggatgaactgcagcagtatatggatcagatggctccagaaagtcagtgaggattggtagaattcagagaggctaatggacatgtcgaatgttcagttaactgttgagaagtgtgaggtttcaagcggagttcaagatttatatagcacaagacgttacctgtgaaactcaagcaggtcactactgaaattccaaggggatacctgtaagattaaataatctacgggttaaataacttcacagggctttaatccttcggctatcctaatcaggtatattttaaggacaataagtcacaaagatgttaggataacccggttacctatgttccttagggatagagaggattttctcgctttacctagatcattttctattaaaaatgtcaaattctcatatctactcaggtattatgtatcacgtaaaaatgcatgccttcggttataatcagtttgttatgattagtttaacacgattttctatctctatcctctaggctccaccatggagcaggcgcgtcctgtgcccgctccccgtcgcctctatccagagctgcgtcccgccaactacgagaatatcgagatcagaaggcccaatagtcccagcaacaatatcaaccacaataacattaagaaactcaacataaacgcggagaatctgcacggcaattgtgcggaaaagaagctgccatcgagtggacaaaacaagttgatcctgcaggagaacaactctgatagtcagcagccgatctatggtccggatgccaatgagaatgtccaggagccggtgtatgcgacaccaaggccagctccacgccaacgattgccaccagcgggcgagccggaggattcctatccggatccggacgatgaggtgcccctgaggattttgcgagcggcgccacagattccccccaagccactcaacatcctgctcgaccagcgatcctcgatctgcagcgaggtatccaccaccagtgtccagacaccaggcaaagctgacgaggatcgggaaggatcgcggtacgcgtccaacgcctcactagactgcagcgagagctcccacagcggcaagttcaagtcgcagtcacccgggtacgtagacgccgtcgattcatccattccgcagtcggatcacccggatccaaacgggcaccatccacaggcagagtcctcctccgcagaacagtcctccggcagccaagatggcgacgatgacaagtaaaccattgaccatcatttctatcctttgtcctgcactttccttagttttccgatgggttaccactttttttactgtgaaatggaagctaacaatacacagtatatatgttaataagtggatttttgggtagtaaatttggttgtagatagcacaaaatgtttaaaaaaaagtttatgcacagagataaataatttcgaaatccttttcacttttaactttattacataagcttcttaaatttgctataaaagaacacagttttatgttttttttttcactgcacttttaagtttttcaacgttgataaatgttttcttagtttgcggttgtggttacaataattttttaaacagcaaaatgttattgcgtttaggtaaacatttgaagccaaaacacacatcgtaaaataatcacatttttgtttcggcattgctatacaaatttgctagaattgctatctggtttattgagcctttttttggcgaccatttcttatcgaaagtttatcacagagttcgcatttttctgtgggtactttgaatttagataaataatttttaacagccacaattcttagtttgttagagctaaaacgatttattagaacttcctttgaaggaaacagctgttttcactaatcatttacatatcattatttggtcacaaatatggcccccagtttgaaagcatccctttctacttatgtacttccctgcggaactccatgtccttctatttcgaggtacgcctccccaagatcacttccgccgccctgtccaaccgtgaatataaatgggcccatcaagggattcgtcactataaatagcccggcgtctgttcaagatcaatgacaagcggaattgtttaaaaatagtagagcggaaagtcttaagatcgtttttcacaccgaaatctgagttttgtgcggtcgacaattgttttcaagatcagtcggtagggaattgtgtataggaaaggtattgtcgggtgccttagtcttaattgtatagaattattaagatatcttatagcatattagtaacttgcaagcattccttattttttaggattgtattggttttggtgtgtgtttcattctctctttatatattgaatttttttaaatttaagtattgaatttataatgggaaatccttcaaggatttcatttggtgttcttcgaaagataagttgtgttttggtttggggtttccttggtgtttttgattcccatattcaatctttgaaatgatctctccccgtgaacacaaagatttttgtggtctaacatttttagcttgttgttttcttggatcttaaccactaacgtaaaagggaatggaatagtctttagcaccaaaatattaaaatatctaatagattgtgttcgttaaactccctagtaacctgcttcgatcgctgggcaccacatctaagctactgggagaagccatcggcgagcggattacgttcaaggccaagggagccaagaagcgactggacaggaacttcaagagctccacggaggccattagcaacatcggagcggatgctggccggagtttgaagcacgccagcaagagattcggttccaatttcagtcttggcaggaataaggacaaggcggatataggcataggcggaaggccaggaggatcgggtgaaatggatctggacaggcggcagacgatgcccagtacggaggtcttcaacacgatccaattctcgagtccattgaaccgaaacggtggtctcccggatctgcgtgaaaacgatgcgaagctgcaaaaggaggattatctgcggccggatccggatcaggaggacgacggctgctatgaggtgcctaaaacgcaaggcaaaccgcccagctacgatgaggcactgcgatcacgaccctcgcccagtgattcgccaatgtctaggaatctcgcccaggaggctgcccaattggtgcagttgcgcaaccagcggcagctgagcagcagctcctcaaatggcgacgagtcgccgcgactgcccatgcctgcctttcctccaccccgcctctcccagcaaccggagcagttccgcatggatgcactgcagccgccggtgcgccagaagcgtcgaaagaactatgaacacatcgaactgcgacgtccgcccgtcgactccgcccagctggaggaactcaatcgggctgcagcggccgcagagcgcgaggaatccctgctgatctccgccaagaatgctgaggcggagaccaagacaccgaaaccagaacgtagcgattcgtgggagttctacggtgaagacgagaacgaggaggaggatagggatgaggaacaggaggggagctcctcgcccgaaccgttgtatgccaatcaggaggccacatacggcaagctctttgaaatggccacagcagggagcagtcgcagcaatgtactgacccccaaccaggtggcggagcagcagcagctggcctgcattaccgaggattcggagttggatgcctgcgaaggagctgtgggcggggttcccctgccgcaggccgtcatagaagagttcgatccactgagcagcaagtgttcgaccctggccaggtccaacaaaagcaatgagttgctgctgctcgagcatttgctggaggaggacacctacggcacggtgaaggcggaacaggacgatgtgagcatgtgcacctccgaagaagagcccacgacgagtgccgccacatcacctaagccccaacagccgcagatagtgcaccaaaatgcccgtctgctgagtgatagcatggagaatatgctggactcggaccaggagcgggcaaagccctatctcagccgaatgccggagtcggcaaataaggccagtggaccagtggacttggccagtgcctcaaggaaccgcaccaattggtttgtgcccgataaggcatcatgttctgatgtaacacccaacacttctaaaactacgccgcccatcgagggcgacagcccacccacatacctagaagccattggaggtagcaaggatgccgccggcaatcaggagaatcgctccaccatcggctcccgcttccgtcaaaccattaatgccatctccaatgtaaaactgaaaatggacgcaatgaaacgaaaggccagcttcaggggagccaatcagcggcagtccgacgtacgcgtggccctgcaaatggtgcccagaccgagcttatcgcctttgctaatccgctacgagggtccgctggtgcgttttccatccggtgtcgtggaggatatactcaaggagatgcagaatcgcaaggccatactcagggaacgccagtttcagacgttcctcgaccaggagatgaagacgcccagggaaatgatacccctggacacgatcaccacgctgcaatgcgtgagcaatagtcgcgtcacggacacggctactcatttctactgcttcgagataaccacgtcacagccgaagaacggaaatggtgcgggggatgccatgtcatccaatcccaatcttctaatgaccagcagctcgtcgggtaatgtgaagcagcagcgtgtctcgcatctgtatggcgtgggcaaggagtcggaacgcggcgtctggatgcaaaagatcctcgagagcttgaccaacagcctgccggtgaagtacacttgtcactactatcgtgctggatggtgttaccttaaggtgagtactttctttagatagatttagctggacaggatgcatatgccattaatctgcagaattctatcacctcggagtggagcggcacctggttggtgctccgcaagagccagcgacgtttgatcttcgtaagcgaggccaacggtaacgtggagaagatggatctgcgcaaagcccgctgcataggtgaggtgatccttgaactaatacacgcaaaattccattaaacccatattttgaaacagtgctaaaggagagtgacgagtccattgacaatctgcacgtggaaagcggtcccatgctgatgatcgactgcccgccgtatgcggtctacatgatcatgagttctgcccgcgagacaaagatctggaggcacatcatccgcgaagtggcccacaacaatggcttctcgctgggcgatcaacagcttacgcggtacgatgtgcctgtcattgtggacaagtgcatcaactttgtgtacatccacggctccatgtcggagggcatttatcgcaagtccggatcggagaactccatgcacaagctgatgagcgccttccgcgcggacgcttttaatgtggagatcacccgaaatgaatacaatgagcacgatgtggccaatgtcctcaagcgcttcatgcgcgatctacccgaacgattgctaggcaagctgacggacagctttgtcttcgtcacggagctggcggtggccagcgaaaagattcccatatatcgggagctacttgcccgtctctcagctatcgagcgcgaaacactacgtcgaatcgtgggtcatctggtcttcattagttcccagcaggccaagaacaagatgagtgtccaaaacctaaccatgatctggggtcccacgctgctggctaagaaggtaaagtcattgaatttccatatgatataagcgaaatttctacaaattaccctactcgtacaaccataaagtataatgatttacaatgaagtatatacaatacatacatatatcaagaagaattagtacctaactgatgctttaaaattgtaggttttttttatattttaaagattagtcttcgtgttaacaaattttatgttttcttttaaattaaaattaaatccacagagcgacgagctaatctactcacaaaaggaggcggatgtgctcagcgatctagtagtgctctacaagaatcttttcccctgcagtgccgatgaaattgtgagttaatttaaaatatacatacatacgaaaatatactcatactccttttagaaacgggagcaggccatgctggcatgtctgcaaaagtattatgcggccgccgaaacgcttaaggatgcggtgaagcagtccggggacataaagatctggatcagcctaaatcccaatcctgaaaacaaaacagaggtgggttttcgttaaatataataatgataaaatatatgttttttttaccaactctttgtggctttcttttgagcaggagaagacgcaagtgaatgccaccatatcgcccacgaagacagcctacgagctgtgccgcgaatactccgccaagatgcagctgcccacccatcagttgaccctgtacgaggttatcctgaacgacagcttagagcgtcctcttcaccatgacaccaaggtgttcgatgtcattctaaattggtcctattggccggaggaggatcgcaagcacaactacctggtggtacgtcccgttgagatgctgcgcgagatccagcgagcggtgaaaaatctggccaccgtaacgcccggcaaggagctgcgattcgccgactccaggacgaaaacctttaaaacgcttcagtgcgagctgcgggatggaaagattgtggtgtccaagaaggacaagaatgacaaaacaaccattgtgcgggagatctttttgcagagcagcacggcgtacctgggctgcgagcgaaaacgcgactttccctggagctgggccatcacctttgtggagcgtactcaggcgcagatcatgaggtgggacatcatcatatttgactgaaatgaaatagtgtaatatcatccttcctaacagatcgcgcgatgcgcccttcattggccacgtcctggcgggcagcgagtggggggaccgcaccatttggtactccagcatctggtactgcttgtacagggacaacatcttgccgccggcggagatcatcatcaagtagaagtgccctctcccagctgccaaacatagatttaaccgccgtcttgtgcatttttctgtagatattctgaatttattcgcaatattagggaatatatacgtttagcaatatttttacgaacaatttcgggaattttccaatatttcaaattagtcaagaaaaaaatattttttttttacactttttctgtaaataatcacgtttgatcaaataccaaattgtacataagcttaagaaaaatcgattgtatatctaagtatatgccctttgtcttcaacatagctcgatatctgacatatctagtgtttatctacatatgtagatagatatgtatactaactattagttaggcacagccacaccgagcagcaaattttaggctaattaaaggtttcgttaaaagcctaatgtaatttttatacgtacatatgtatatgtttctaattggattcgcatttattcaatgtttgcttacatttgaaaccatttaattaataaaattcatttgctaatgaatatttctatataattaaactatcaagttcagtttattgatttgaaattactgaggcaactgtagaactatagaccagttctcactgacaactgaaagttaatgatttttatcccttatctgacccaatttttcgtattttcacaagggtagcaatcgacaagcaatcgcagctttcatattaagatgaaatatataatcattccgacaacttttagacttttggaaagccacccaataaaaacgcaagcacacttgaatatcactaaaatgttgcatttatttctgttgtttcttgtgttgcttctgtttcattatccacttacgatttatgtttttcgagaacattagttttttttgcttgaatttcacatacatagtcgatttatttgtttgttgtacaatacataaaaagaaa

SEQ ID NO: 10139 - DNA, 4533 bp, DROSOPHILA
atggagcaggcgcgtcctgtgcccgctccccgtcgcctctatccagagctgcgtcccgccaactacgagaatatcgagatcagaaggcccaatagtcccagcaacaatatcaaccacaataacattaagaaactcaacataaacgcggagaatctgcacggcaattgtgcggaaaagaagctgccatcgagtggacaaaacaagttgatcctgcaggagaacaactctgatagtcagcagccgatctatggtccggatgccaatgagaatgtccaggagccggtgtatgcgacaccaaggccagctccacgccaacgattgccaccagcgggcgagccggaggattcctatccggatccggacgatgaggtgcccctgaggattttgcgagcggcgccacagattccccccaagccactcaacatcctgctcgaccagcgatcctcgatctgcagcgaggtatccaccaccagtgtccagacaccaggcaaagctgacgaggatcgggaaggatcgcggtacgcgtccaacgcctcactagactgcagcgagagctcccacagcggcaagttcaagtcgcagtcacccggtaacctgcttcgatcgctgggcaccacatctaagctactgggagaagccatcggcgagcggattacgttcaaggccaagggagccaagaagcgactggacaggaacttcaagagctccacggaggccattagcaacatcggagcggatgctggccggagtttgaagcacgccagcaagagattcggttccaatttcagtcttggcaggaataaggacaaggcggatataggcataggcggaaggccaggaggatcgggtgaaatggatctggacaggcggcagacgatgcccagtacggaggtcttcaacacgatccaattctcgagtccattgaaccgaaacggtggtctcccggatctgcgtgaaaacgatgcgaagctgcaaaaggaggattatctgcggccggatccggatcaggaggacgacggctgctatgaggtgcctaaaacgcaaggcaaaccgcccagctacgatgaggcactgcgatcacgaccctcgcccagtgattcgccaatgtctaggaatctcgcccaggaggctgcccaattggtgcagttgcgcaaccagcggcagctgagcagcagctcctcaaatggcgacgagtcgccgcgactgcccatgcctgcctttcctccaccccgcctctcccagcaaccggagcagttccgcatggatgcactgcagccgccggtgcgccagaagcgtcgaaagaactatgaacacatcgaactgcgacgtccgcccgtcgactccgcccagctggaggaactcaatcgggctgcagcggccgcagagcgcgaggaatccctgctgatctccgccaagaatgctgaggcggagaccaagacaccgaaaccagaacgtagcgattcgtgggagttctacggtgaagacgagaacgaggaggaggatagggatgaggaacaggaggggagctcctcgcccgaaccgttgtatgccaatcaggaggccacatacggcaagctctttgaaatggccacagcagggagcagtcgcagcaatgtactgacccccaaccaggtggcggagcagcagcagctggcctgcattaccgaggattcggagttggatgcctgcgaaggagctgtgggcggggttcccctgccgcaggccgtcatagaagagttcgatccactgagcagcaagtgttcgaccctggccaggtccaacaaaagcaatgagttgctgctgctcgagcatttgctggaggaggacacctacggcacggtgaaggcggaacaggacgatgtgagcatgtgcacctccgaagaagagcccacgacgagtgccgccacatcacctaagccccaacagccgcagatagtgcaccaaaatgcccgtctgctgagtgatagcatggagaatatgctggactcggaccaggagcgggcaaagccctatctcagccgaatgccggagtcggcaaataaggccagtggaccagtggacttggccagtgcctcaaggaaccgcaccaattggtttgtgcccgataaggcatcatgttctgatgtaacacccaacacttctaaaactacgccgcccatcgagggcgacagcccacccacatacctagaagccattggaggtagcaaggatgccgccggcaatcaggagaatcgctccaccatcggctcccgcttccgtcaaaccattaatgccatctccaatgtaaaactgaaaatggacgcaatgaaacgaaaggccagcttcaggggagccaatcagcggcagtccgacgtacgcgtggccctgcaaatggtgcccagaccgagcttatcgcctttgctaatccgctacgagggtccgctggtgcgttttccatccggtgtcgtggaggatatactcaaggagatgcagaatcgcaaggccatactcagggaacgccagtttcagacgttcctcgaccaggagatgaagacgcccagggaaatgatacccctggacacgatcaccacgctgcaatgcgtgagcaatagtcgcgtcacggacacggctactcatttctactgcttcgagataaccacgtcacagccgaagaacggaaatggtgcgggggatgccatgtcatccaatcccaatcttctaatgaccagcagctcgtcgggtaatgtgaagcagcagcgtgtctcgcatctgtatggcgtgggcaaggagtcggaacgcggcgtctggatgcaaaagatcctcgagagcttgaccaacagcctgccggtgaagtacacttgtcactactatcgtgctggatggtgttaccttaagaattctatcacctcggagtggagcggcacctggttggtgctccgcaagagccagcgacgtttgatcttcgtaagcgaggccaacggtaacgtggagaagatggatctgcgcaaagcccgctgcatagtgctaaaggagagtgacgagtccattgacaatctgcacgtggaaagcggtcccatgctgatgatcgactgcccgccgtatgcggtctacatgatcatgagttctgcccgcgagacaaagatctggaggcacatcatccgcgaagtggcccacaacaatggcttctcgctgggcgatcaacagcttacgcggtacgatgtgcctgtcattgtggacaagtgcatcaactttgtgtacatccacggctccatgtcggagggcatttatcgcaagtccggatcggagaactccatgcacaagctgatgagcgccttccgcgcggacgcttttaatgtggagatcacccgaaatgaatacaatgagcacgatgtggccaatgtcctcaagcgcttcatgcgcgatctacccgaacgattgctaggcaagctgacggacagctttgtcttcgtcacggagctggcggtggccagcgaaaagattcccatatatcgggagctacttgcccgtctctcagctatcgagcgcgaaacactacgtcgaatcgtgggtcatctggtcttcattagttcccagcaggccaagaacaagatgagtgtccaaaacctaaccatgatctggggtcccacgctgctggctaagaagagcgacgagctaatctactcacaaaaggaggcggatgtgctcagcgatctagtagtgctctacaagaatcttttcccctgcagtgccgatgaaattaaacgggagcaggccatgctggcatgtctgcaaaagtattatgcggccgccgaaacgcttaaggatgcggtgaagcagtccggggacataaagatctggatcagcctaaatcccaatcctgaaaacaaaacagaggagaagacgcaagtgaatgccaccatatcgcccacgaagacagcctacgagctgtgccgcgaatactccgccaagatgcagctgcccacccatcagttgaccctgtacgaggttatcctgaacgacagcttagagcgtcctcttcaccatgacaccaaggtgttcgatgtcattctaaattggtcctattggccggaggaggatcgcaagcacaactacctggtggtacgtcccgttgagatgctgcgcgagatccagcgagcggtgaaaaatctggccaccgtaacgcccggcaaggagctgcgattcgccgactccaggacgaaaacctttaaaacgcttcagtgcgagctgcgggatggaaagattgtggtgtccaagaaggacaagaatgacaaaacaaccattgtgcgggagatctttttgcagagcagcacggcgtacctgggctgcgagcgaaaacgcgactttccctggagctgggccatcacctttgtggagcgtactcaggcgcagatcatgagatcgcgcgatgcgcccttcattggccacgtcctggcgggcagcgagtggggggaccgcaccatttggtactccagcatctggtactgcttgtacagggacaacatcttgccgccggcggagatcatcatcaagtag

SEQ ID NO: 10140 - protein, 1510 aa, DROSOPHILA
MEQARPVPAPRRLYPELRPANYENIEIRRPNSPSNNINHNNIKKLNINAENLHGNCAEKKLPSSGQNKLILQENNSDSQQPIYGPDANENVQEPVYATPRPAPRQRLPPAGEPEDSYPDPDDEVPLRILRAAPQIPPKPLNILLDQRSSICSEVSTTSVQTPGKADEDREGSRYASNASLDCSESSHSGKFKSQSPGNLLRSLGTTSKLLGEAIGERITFKAKGAKKRLDRNFKSSTEAISNIGADAGRSLKHASKRFGSNFSLGRNKDKADIGIGGRPGGSGEMDLDRRQTMPSTEVFNTIQFSSPLNRNGGLPDLRENDAKLQKEDYLRPDPDQEDDGCYEVPKTQGKPPSYDEALRSRPSPSDSPMSRNLAQEAAQLVQLRNQRQLSSSSSNGDESPRLPMPAFPPPRLSQQPEQFRMDALQPPVRQKRRKNYEHIELRRPPVDSAQLEELNRAAAAAEREESLLISAKNAEAETKTPKPERSDSWEFYGEDENEEEDRDEEQEGSSSPEPLYANQEATYGKLFEMATAGSSRSNVLTPNQVAEQQQLACITEDSELDACEGAVGGVPLPQAVIEEFDPLSSKCSTLARSNKSNELLLLEHLLEEDTYGTVKAEQDDVSMCTSEEEPTTSAATSPKPQQPQIVHQNARLLSDSMENMLDSDQERAKPYLSRMPESANKASGPVDLASASRNRTNWFVPDKASCSDVTPNTSKTTPPIEGDSPPTYLEAIGGSKDAAGNQENRSTIGSRFRQTINAISNVKLKMDAMKRKASFRGANQRQSDVRVALQMVPRPSLSPLLIRYEGPLVRFPSGVVEDILKEMQNRKAILRERQFQTFLDQEMKTPREMIPLDTITTLQCVSNSRVTDTATHFYCFEITTSQPKNGNGAGDAMSSNPNLLMTSSSSGNVKQQRVSHLYGVGKESERGVWMQKILESLTNSLPVKYTCHYYRAGWCYLKNSITSEWSGTWLVLRKSQRRLIFVSEANGNVEKMDLRKARCIVLKESDESIDNLHVESGPMLMIDCPPYAVYMIMSSARETKIWRHIIREVAHNNGFSLGDQQLTRYDVPVIVDKCINFVYIHGSMSEGIYRKSGSENSMHKLMSAFRADAFNVEITRNEYNEHDVANVLKRFMRDLPERLLGKLTDSFVFVTELAVASEKIPIYRELLARLSAIERETLRRIVGHLVFISSQQAKNKMSVQNLTMIWGPTLLAKKSDELIYSQKEADVLSDLVVLYKNLFPCSADEIKREQAMLACLQKYYAAAETLKDAVKQSGDIKIWISLNPNPENKTEEKTQVNATISPTKTAYELCREYSAKMQLPTHQLTLYEVILNDSLERPLHHDTKVFDVILNWSYWPEEDRKHNYLVVRPVEMLREIQRAVKNLATVTPGKELRFADSRTKTFKTLQCELRDGKIVVSKKDKNDKTTIVREIFLQSSTAYLGCERKRDFPWSWAITFVERTQAQIMRSRDAPFIGHVLAGSEWGDRTIWYSSIWYCLYRDNILPPAEIIIK

SEQ ID NO: 10141 - DNA, 3405 bp, DROSOPHILA
ttgggcaattaccgggtataaaaatatcaaagagtcgctgagccccgaagtgagtatatggccaaacacaacgcatttgttgttcaaagcgttcggaacgtggacggattgagctccgccgggtaagagttggtcgtcgtaaatgttatagctatgtgccgccgcttctaatcaaaatctaatgagtgtttcgatgtgtgggcgtggtatagtaaatcaaatctgcaacatctgatccaataatattatgggtgaattgcccgatatgtgttaacgtaagcaaaagtgagcgggatgcattataaactagtttggaacacgcacgcttggcgctctcacttttgctaccacgagcggcggtacaggcaagcctcctgagaacggaagcgctacgaagaaattcctacatccttattaaatatgcgccactataaatgaaccctggctgcaccaaaattgcattctttgaacgcatgcacctcttgctgtgttgtctgttttggttctaggtgtagattctttactggtgtgctgatttcacctgtgtcagcggtattttcttacctggctggttgacaaatgttttggggctaatgaaacgcgataaggttgatccgagtgctaacaacccgctgcagtgttaaaattaatcgtgcaattgtttatagctaaatggcacccgtttttttcttgcaggaaccgccttctccacatcaacagccttttgaaccacattcctgttgggattcgctttggcccagcttgctaactcacaatgaaatattttggcggagtcgaagggtatgtacatagaaaggtcaccaatcgatttgtaattcaatagccaaacgcgatgattaatggacgtgattaagcgcagggtgttataccctgatctggcagatatcagctgcgggaagtgcttcaaaatattccccagctttcgttgataagcccaacgatttaatgataacagtcaaaggtacagaatgtgttaagcctaggccttgatgaatttgaccagcttcgtctccggtatccgtttgtttcgcgtgatcagctcctggttgtccatgaatggtcgcagaacggcaggtatctcgatgccatcttccttctgataagattccagcaaggcaatcagcagacgcggaatagccgtcgcagttccgttgatggtgtgggcatggaggatctgtccgtcagcggagcgccggtatctgatgcccagccgccttgcctgataatccgtgcaattgctgcaacttgagatctcgccccacatctgacggcctggcatccaggcttctatgtcgtacttctggtacgccggagcgcccagctcgcaaggtggcatgtccagcagccgaaagttgaggcccagtcgacggaaaagatctacctcaatgttcttaaactcctccagctcggcctccgactgctcctcggtgcagatggcaaacatttccaccttgttgaactggtgtacacgataaatgcctttctcctcctgcagtcccgatgtttcagccctatagcatcgactcacggcggtcactttcagtggcagttggtcctccgacagtagtttattcgcaaagaatccagccagggccatttccgaagtgcccgataggcactcgccggtgtccagtttgtagacctgtgtgcgttcaccctcggtgcgcatgccacaagattcgatcacctccttaggcagtatgtccggcacggagatcagcttaaaaccgtgttcggtgactgcctgaagtgcatattgtatgatggcctgctccaaagttgccagctggccagtaaggtagtagcttttgtggccagtgtagttacccaagtgatccatgcggtagaggttaagagcacgggctaattcagagaactccttgagcctggactgtggcgtcaactgccggtggacatactgcgccagttcccgcggctcctctccgtagtctcgcaggcgcggatgcgtggcattgggcagctgttccagttccgcctgcagctgcctcaacttgtgctggtctcccgcatccaactcctggatgagagagcgtatcagtggcacgttgttcttgtggtggcgcacaaccacgttccgctccagttcgtccagctgggcactggttggaaccggtctgtgtattggggcctccaccgcctttgcgtcatgcgacctttggcggcgcagcagcagcagaggccgccaaagttgagaattcgtcggcaatttcattttaattaacaaacttctttgttgcacgccagcggtcgcgggttggggagcaatttcattcacttttaagcgaaaacattaaatgtttttgagcacaatttgataattatattcagcaaaaacgcacataacaaattgtaaaagccgctaacattctgttaactttcgattatttatcgaactttttcattatttgggctgataacgtaacgctcgctattaagtacgtaacaaaacttgagccctattttgaattgtccccaccgaggtatttttatgaccaaagtaaattgaaagaaaattaaaaatagttaagcggcgataacaaacgtcttttgttgtgcccattttgcatggactatcaaataattgcctcaattgagcgtattaagcaatgcactttcgtcacgtcacgtcttttcagtcggtggttgtctctgtgcattataacggtaatttcaagcttcttttatgggaacgtaactgtcttcatgcttctccaaattcatttctttgcattgttgaatgcagagaaacaattttaaacattatatcacgttatgttgttcaatttctgatatgaatgtgtataggttttaatcttgagttctgcgtaagataaggtaacaatcttcgccaacaaaaatgttgatctatatttctattagttccaagccgatccagtttttttcggtgtacttatggactcggttttattgggatctatgggttgtcgaatagaatttgtgcgtgtgacacgttttccctaaatgaatgtgtcaattgcgtgtttctttaacttcaattagccgccaccagatcggttaatttaatttgattcaatagcggtattgttcgcggtcacggcccctacgaccatacaacacctattgtataaccatgaacagagtccggaaattgaaagcatcttctttgtctcctgcagcggagccacccactccagactggtcatctgcgatgagagcggccaatctgtgggcgccaccagcggcctgggcaccaatcactggggcattggcattccggagtgcgcccgccggatcgctgacatggtggagcgggcgaaggaggaggcgggcattcccaaggagacgcccctcacaagtctgggattgagccttagcggctgc

SEQ ID NO: 10142 - DNA, 1405 bp, DROSOPHILA
ttagcggcttttacaatttgttatgtgcgtttttgctgaatataattatcaaattgtgctcaaaaacatttaatgttttcgcttaaaagtgaatgaaattgctccccaacccgcgaccgctggcgtgcaacaaagaagtttgttaattaaaatgaaattgccgacgaattctcaactttggcggcctctgctgctgctgcgccgccaaaggtcgcatgacgcaaaggcggtggaggccccaatacacagaccggttccaaccagtgcccagctggacgaactggagcggaacgtggttgtgcgccaccacaagaacaacgtgccactgatacgctctctcatccaggagttggatgcgggagaccagcacaagttgaggcagctgcaggcggaactggaacagctgcccaatgccacgcatccgcgcctgcgagactacggagaggagccgcgggaactggcgcagtatgtccaccggcagttgacgccacagtccaggctcaaggagttctctgaattagcccgtgctcttaacctctaccgcatggatcacttgggtaactacactggccacaaaagctactaccttactggccagctggcaactttggagcaggccatcatacaatatgcacttcaggcagtcaccgaacacggttttaagctgatctccgtgccggacatactgcctaaggaggtgatcgaatcttgtggcatgcgcaccgagggtgaacgcacacaggtctacaaactggacaccggcgagtgcctatcgggcacttcggaaatggccctggctggattctttgcgaataaactactgtcggaggaccaactgccactgaaagtgaccgccgtgagtcgatgctatagggctgaaacatcgggactgcaggaggagaaaggcatttatcgtgtacaccagttcaacaaggtggaaatgtttgccatctgcaccgaggagcagtcggaggccgagctggaggagtttaagaacattgaggtagatcttttccgtcgactgggcctcaactttcggctgctggacatgccaccttgcgagctgggcgctccggcgtaccagaagtacgacatagaagcctggatgccaggccgtcagatgtggggcgagatctcaagttgcagcaattgcacggattatcaggcaaggcggctgggcatcagataccggcgctccgctgacggacagatcctccatgcccacaccatcaacggaactgcgacggctattccgcgtctgctgattgccttgctggaatcttatcagaaggaagatggcatcgagatacctgccgttctgcgaccattcatggacaaccaggagctgatcacgcgaaacaaacggataccggagacgaagctggtcaaattcatcaaggcctag

SEQ ID NO: 10143 - protein, 417 aa, DROSOPHILA
MKLPTNSQLWRPLLLLRRQRSHDAKAVEAPIHRPVPTSAQLDELERNVVVRHHKNNVPLIRSLIQELDAGDQHKLRQLQAELEQLPNATHPRLRDYGEEPRELAQYVHRQLTPQSRLKEFSELARALNLYRMDHLGNYTGHKSYYLTGQLATLEQAIIQYALQAVTEHGFKLISVPDILPKEVIESCGMRTEGERTQVYKLDTGECLSGTSEMALAGFFANKLLSEDQLPLKVTAVSRCYRAETSGLQEEKGIYRVHQFNKVEMFAICTEEQSEAELEEFKNIEVDLFRRLGLNFRLLDMPPCELGAPAYQKYDIEAWMPGRQMWGEISSCSNCTDYQARRLGIRYRRSADGQILHAHTINGTATAIPRLLIALLESYQKEDGIEIPAVLRPFMDNQELITRNKRIPETKLVKFIKA

SEQ ID NO: 10144 - DNA, 5757 bp, DROSOPHILA
ctcccgcggactgaagcgcaagccaatggctctgatcaagaagctgcgcaaggccaagaaggaggcaccgccaaatgagaagcccgagattgtcaagacccacctgaggaacatgatcatcgtacccgagatgaccggctccatcattggcgtctacaacggcaaggacttcggacaggtaagagtgaaacagagaaggacaactttttagagcactacatggtgtgtcaatcgctaatccttgttcccgccaaaatgctcctcatgcatcttggttaggttggagctaagaagatgaagattatcatttgaaagtgattgacaaactaggtagagagctctaaaagataacccctctcaatgtccccatctagatcctagatccacacaactaacaccccattttcccccatccacaggtggaggtcaagcccgagatgatcggtcactacctgggcgagttcgccctgacctacaagcccgtcaagcacggtcgtcctggtatcggtgccacccacagctcccgtttcattcctctgaagtgagcgctgctcgtcttttgggctgttgagatgaatgatgcgtgaataaatgaaacgtacttttataagaacacacccccctcgtctgcgttgcgttttccatctaatgcttttccaaaagtaaaggagtggtcgccacttaagaaatgtacgttatctatttattggaacttttaaatcagtggccgctcgtctgtccccctgggaagctatctgcgctgtcgccgggcgatgttgtggctgctggagctggtggtgcgatcgtaggcggtgtccttcatcagcgagggacttctgctggccgccaccgccatctcgctgacatcgaccgatccgtaggcactgtctttaacttgagaagcatatgggagattagcgtagctcgagtgccgggcatcgcgaagctctgaaagtgcggcaaggatgactattagtgacaattagagtcggcggtcttgtcatcgccgaaagaaggagctcttgctgggtgttaggcccgtggatgtttgcaggtgctggttgagctgctgcaggctgtggctctggccgtggttaaaagcgcccaaagcgggataagcggcggtggctatggaggatttgaggatgctgcgactggagccgcgggtgcccactccaattgagttctttgcggcgggattggtgttcacatcgaaggtggttagcaggggattgttgctctgggtgcgctggttcagccgaggatcagcctcacctagacgattcaattcggtctccatggacgtgtacatagtcaggttgctggccagcagatcctgccgcgagcccagtgtcattaggctgtccgcgttgttcagcgtggacgctgtggtgctgtagttggaggcgggactggccgacttggaatacgccatggccacctgacccatctcgctgggtccctgctgcagtgcacccgtgcgtggatcgaagtgcttttgggtggcgtccttcagggtgctgttaatctcctttgcgctctccgccggacttgtgggcttgcgcagcgacgatatatgcccgggtagcggctcgcgcgagaccgacgaggatggggatgccgaattggtctcctcgttctcctcctgcaacaaagttggcggccattaacatgtaaccaatctttatgctaggtaggtatttctgtctagttacttcacctccccaataagaaccccattccttatgccaactctcacctcgtcctcctccgtaatgatggacgactctatccagtctttgatgcggttcttcttctgctgccggtccacattggtctcgataccgcagtcggccagggtgtagagcagcttgttcttctcatccgggctgctgtggaaggagtacatggaggggcacagttcgtccgtctcgtactcggccatctccttctgggcggtcttggccagccatcggtcgtctaggaacttggtaacatcggccaggctcttgggtcgattggagatcctggcaaagaagcgcttgaacatccgctgcgcattcgaggtgagcagcttgaaaagtcgtggagttcgccgcagcggcatcatcataagtccgccctgccaggccagatagcgcacatagcgcggatcatcggaggcagccttctgccagggcaaacagccagttagacacacaaaaatcacaatgccaaactgccaaacatcgtggctgggatcggctctggaaatgtgtaaatatattcgatctcaaatcgaaggatttttgaaaaggattgtaatagttacttgtaactgccctcgggcttaatttctaatacttctggcggactgtagggcaaccactcgttgcgtcgctccacagtggagcctgtgggaaaggactcgccgaaatcgcagagcttgatgcgctggaagtccgagcgatagatgagcacattgtctagctttatgtcccgatgcactatgtctctgtggaatgggaaatatttctagggttatatgatgcctcaagaggagtgcgaattttagaaaaagatcctttcgttcacttaagatacagtacaacttactttgaatgcatgtagtcaatggccgaggccaattgtttcgccacccgcttgctgtaaacttcgcccacacccgaatcggtcacgttcgatgtgagatcccctgcaatttgaagatatttaatatatagatatataaatattgttattataggagttacccacctagtggagcatactcctgggtgaaaacgtagaagcccgctgtctcaaaggccacgtcgtaggtggtcacaatgtgtcgatggactcccaagtggagtccatagtggaattcccggtaaaagtcacgcaatgtcacatatggtttgggtacagctttcaggaccatctccgtctgtgatccccgatgctccaccagtagaatcttcccgaaccatccttcgccaacgatctgtatgatatcaaactcgtccacaagctggatctatatatagatggcatattaaaacagctgcgatatatgcatagatgtattcaatggggatagaaaaacttcatggaaccataatatctttaaattgaaatagagaatattggtgggcacatattttgttaaaacttaaactaaaaataggttatgtagaagttacaccaaagttaatgcctttaaaaagtttgaacctcatgttctggaactcaaagtatatatacttgatttgcaccacttgctgttttcatttagatttagaatgcaacacgtgttcataaacagaattccattattaacgaactaattgactcactaatacatttgccttttatgcgaaaaaatcaaagagagcttcttgcgaagtgcaacgcctcgttaaagacccacctcaactatatctgaacaattaaatgtgcaaatgcactgggcaactatatactacatatatgtatgtatagaatgcgttacctagacctattaaacattactgtattcgagaacgagacgctgaccattgctgtttgtgtttaatgatcagaaatctaatcgttaacatggcattttcccagttgtattgtagacgatttcccggggaagagacaattggcagattgcccatcataccgactgggccaagacgaactcttaatacctttctctatctgcatatttgtttatggcggcgcggtaaaccataaaaaaaataaaaataatgggtcacaagtcgcgcggaaatgaatgagtattacaattcgatttcggattgaatcatatccgatcactcaccttctccaattcgaactctcgtatcttgtgaatgtttccacgtggtttcttagacattttggctgtttatgtggttgcaagtcagttttttatttactggactggttcatagcacttgattcactttcaattctgcgcagctttgtccatgagcgggccaataaaacaattgaaacagtttatgtacgcgaatgtatctagcagattgtatctacatatttacactttgtatacaaggcgggcgttgtaaatatttatagcgacagcagcagaaacagcagcagaaacaccaaaggaaaacatttctatatctgtgcgattcctttattttatacgcgctagtatctgcattaatggatgtatcttttgttgctgttcctgcacgcggctaaagtaaattaagagattaattgatcggctgaattgggatttgtatattcgcttcctggtaaacggacatatgtagatagatatatgcagactgtgcctggtggaaattcaccaaacaaataatccgtggagcgtgtgcgcgtataaatattttgacacgtacacacacggtcggaatttgaggaaaaaagatttcagaaccaggccgtagaattcttctcggcactctcccggcttcgctgattctattctgttttgatgtttgttttctctcttcgctttatgcataatatcaacagctaaattaaaaataatgcccgcttgcctcttatataaaaacctttgcgattgtttcggaattcttatttttcgccagcgtagattcgcaaagaattcgtccagcggtaacgtagacacacgcactttagcgaaaatccttaagtgccctgacttcttctacacgcatatgtaattttgtatgtatttaaacaaacggctgcacttttagacgaaatccgcagattggtcgttcacgcatccgtagtacacgaccgctcgttgccaactgctctcggttctggtatttaaaaaaagatattctgagcaatgcacgcgagcgttttcgaaaagttttcgaaatatgtttgcgagtcagttgtgggaatattgggaaagagtgtgaaccagagcaggggattgcacaagatgaaagccaatatagagtagggctaacagtgcttaaccctctagttgccaagaagatatatatttcgctcaaaaggagaaatggaatcttatttattgttaccttatatttaatgcgctatttaatacaaagaagaatgttgactctgaaataaaataaattatataaaatgtatatttattatatacataaattaaaacaaccttttccaacaattcaaagaaaacagcgggttaacatggcccagcagaaatgtctctcaagttaacagcagcatcctcagttaacagcgcacacgtacagcgaatgctgtcgcacacagagacagtgtgcaccagtacacgcacatcgcgtatacgccacgttgtcgctgtatatataaggcaactctaattggtcacttccgttccggttccgtcgacgtttccttggcgcatgcgacttctggctttcagaattgggatttcagctctagaggttcaacttcaccgctgcgcttgacacacacacaaaacttttccgcacataagtggcgctggtgtgtgtgtgtgtgtgtgttggcgagtgttgggttgtgtgtgagtgtgataagagatgcagccgacgtaacggtaaccacttgtcgcgggctataaaagcagccgctggccagcagccatttgcaaacgctcgcatgtcaccgaaggcgcaacagctccgattttgaaatttccaacacggccctcaagttgaaagttttccaaaaaaatttaaacacctccgcccatgtgaatgtgaagtgaaattcgggtttggcattcggcattggttgtgtggagcttttttctaagttttctggatatttttcaaa

SEQ ID NO: 10145 - DNA, 2132 bp, DROSOPHILA
agcggtcgtgtactacggatgcgtgaacgaccaatctgcggatttcgtctaaaagtgcagccgtttgtttaaatacatacaaaattacatatgcgtgtagaagaagtcagggcacttaaggattttcgctaaagtgcgtgtgtctacgttaccgctggacgaattctttgcgaatctacgctggcgaaaaataagaattccgaaacaatcgcaaaggtttttatataagagtgtaaatatgtagatacaatctgctagatacattcgcgtacataaactgtttcaattgttttattggcccgctcatggacaaagctgcgcagaattgaaagtgaatcaagtgctatgaaccagtccagtaaataaaaaactgacttgcaaccacataaacagccaaaatgtctaagaaaccacgtggaaacattcacaagatacgagagttcgaattggagaagatccagcttgtggacgagtttgatatcatacagatcgttggcgaaggatggttcgggaagattctactggtggagcatcggggatcacagacggagatggtcctgaaagctgtacccaaaccatatgtgacattgcgtgacttttaccgggaattccactatggactccacttgggagtccatcgacacattgtgaccacctacgacgtggcctttgagacagcgggcttctacgttttcacccaggagtatgctccactaggggatctcacatcgaacgtgaccgattcgggtgtgggcgaagtttacagcaagcgggtggcgaaacaattggcctcggccattgactacatgcattcaaaagacatagtgcatcgggacataaagctagacaatgtgctcatctatcgctcggacttccagcgcatcaagctctgcgatttcggcgagtcctttcccacaggctccactgtggagcgacgcaacgagtggttgccctacagtccgccagaagtattagaaattaagcccgagggcagttacaaagccgatcccagccacgatgtttggcagtttggcattgtgatttttgtgtgtctaactggctgtttgccctggcagaaggctgcctccgatgatccgcgctatgtgcgctatctggcctggcagggcggacttatgatgatgccgctgcggcgaactccacgacttttcaagctgctcacctcgaatgcgcagcggatgttcaagcgcttctttgccaggatctccaatcgacccaagagcctggccgatgttaccaagttcctagacgaccgatggctggccaagaccgcccagaaggagatggccgagtacgagacggacgaactgtgcccctccatgtactccttccacagcagcccggatgagaagaacaagctgctctacaccctggccgactgcggtatcgagaccaatgtggaccggcagcagaagaagaaccgcatcaaagactggatagagtcgtccatcattacggaggaggacgaggaggagaacgaggagaccaattcggcatccccatcctcgtcggtctcgcgcgagccgctacccgggcatatatcgtcgctgcgcaagcccacaagtccggcggagagcgcaaaggagattaacagcaccctgaaggacgccacccaaaagcacttcgatccacgcacgggtgcactgcagcagggacccagcgagatgggtcaggtggccatggcgtattccaagtcggccagtcccgcctccaactacagcaccacagcgtccacgctgaacaacgcggacagcctaatgacactgggctcgcggcaggatctgctggccagcaacctgactatgtacacgtccatggagaccgaattgaatcgtctaggtgaggctgatcctcggctgaaccagcgcacccagagcaacaatcccctgctaaccaccttcgatgtgaacaccaatcccgccgcaaagaactcaattggagtgggcacccgcggctccagtcgcagcatcctcaaatcctccatagccaccgccgcttatcccgctttgggcgcttttaaccacggccagagccacagcctgcagcagctcaaccagcacctgcaaacatccacgggcctaacacccagcaagagctccttctttcggcgatga

SEQ ID NO: 10146 - protein, 577 aa, DROSOPHILA
MSKKPRGNIHKIREFELEKIQLVDEFDIIQIVGEGWFGKILLVEHRGSQTEMVLKAVPKPYVTLRDFYREFHYGLHLGVHRHIVTTYDVAFETAGFYVFTQEYAPLGDLTSNVTDSGVGEVYSKRVAKQLASAIDYMHSKDIVHRDIKLDNVLIYRSDFQRIKLCDFGESFPTGSTVERRNEWLPYSPPEVLEIKPEGSYKADPSHDVWQFGIVIFVCLTGCLPWQKAASDDPRYVRYLAWQGGLMMMPLRRTPRLFKLLTSNAQRMFKRFFARISNRPKSLADVTKFLDDRWLAKTAQKEMAEYETDELCPSMYSFHSSPDEKNKLLYTLADCGIETNVDRQQKKNRIKDWIESSIITEEDEEENEETNSASPSSSVSREPLPGHISSLRKPTSPAESAKEINSTLKDATQKHFDPRTGALQQGPSEMGQVAMAYSKSASPASNYSTTASTLNNADSLMTLGSRQDLLASNLTMYTSMETELNRLGEADPRLNQRTQSNNPLLTTFDVNTNPAAKNSIGVGTRGSSRSILKSSIATAAYPALGAFNHGQSHSLQQLNQHLQTSTGLTPSKSSFFRR

SEQ ID NO: 10147 - DNA, 3192 bp, DROSOPHILA
cattgaacagagttccgggcgaacacgtctgaatggtggggctgccatcgaagcagttcacatagcgatgacagtcgtggggatatgcaaccagacccgtaaaatgcggcgggcatgccgaatcccgatggtaaataggctgctgctggtcgcctccgtaactcgagtgtgcgttccctgttgctgataagccaactggttccgactgctcgctgtggtagccactgcctgatcgataagctttagccccgggtcgctgtcaaaagcgcaattatgaaatattattgaacaaccgtaagtaattagaggcaaaatttagctaatagcttgtaattaagttcaattaaaattaaagtcttaagcgcgttttaaattcctaaacaacatttttagtttgactaaaatcttaaaaaattgtaaataatctagaatctagatgatatccttaaaaaacacaatttgaaattattaataaactttctacactaacatccactagcaggatcgccagccaaaggccaaggagccacttggccatcattttacgtttccgctttataagtatttgaatttaaatatttcttaaaatgcaccgatgctgatagcaactacacaattgtttttctcgcgctttaaattcttcgttgtgatcccgttcgaattccaggctcgactgacccacacccagatcgcatttcaattcaattggactcgggatgaatctctatctctgccgccgctgatagatgctctcgtttgtcgccaaaccaattgagtggaccacactatcagggcttgtaatctcaagacctttttgctgtcttatcgccttgttttgtttgcatttcttttggggtttttcactcatttatttacttctatgaatctgagatgttggagcttaagaatgatgatgatgaattacagtggcgcagtcgcatttaaacaaactaaacgtcatacccaaattagactaggtgattatgactaagagactagatcatttggctgccggcttatcagccggcgccctctcggcaagtcttagcctctgctgtatttttagccagagcagatcgtacggctcactgagttccgtttgtgttttgggaattcccacagatcgtcgcacttccggcgagaggatgagcagattttgagcaaggccaaaactgctggaagctacccagtatacacataaagctgaaggcactgtacaggctactggaaccatcacaacactcaatccacggaacacattgttggcgatgttctgcaagcgtgtagaaggacgagttctagacatggcttgcacttcaatgatggccaaattgataagacctaatgctacaggcaggatataagagttatccaccaccgtaaggtttggtatccaaccaaatccgccaatggtcatttcggtggtcacgatttgagcttgaatggacgtgggatccggcagcatgtacactaaattgcgcagagccacggattgaaagatccacaggggaatctgaccccatagcacaatcatggtcttcatgggatggcagttatcccgaactataaggttctgccactgcttcttgatctgtaagataattgacatgacgaagagtgtctcgcaaacatttgaattttaacaaaccgaacgccgataaacaatctgagtctgcttttcgctccacttgaacttgtgcttggccatggctgcctcttttttcagttcctccacaatggccggcatctccagcgctatcttttcaattctggcggtgattttgtgctggtaaatggtcagaggcagggtgaccacgctccgaaaaaggaaagtggacagcacgatggacgcccaccagggcaggccactgtagtcgtggatcttaatgagaacatcctgcatataggccaccggcgtgctgttggacaaggtctgccaatatcccaccaatccaccggcatttgccagttggacactcgcggccgccgcttctgtagacgacagacgatgattgcatgtgtgattcgcaatagttgttccttggtatgtgtatttgtagatgccagcaattgatgaacttctacaggtgcgtaaaagaagcaaagctgacatttttaattaatataaaactaataatcaacgtaaacaactatatagaatcagcagtgcgagttgttatcattgtgaacagctgattgttaccataacacggcttcaatcagtgtggccgtagctaggcattgtagttgcattaacccttaacttacgatgctttttttgctatccgaaattaggaaacattgaaatgcagttattaatttgaaatcatttaatcgttgataagagaacaataacaaaatttatacagtcattttatacgacagcaacacttttatttcctttgcatttttactcactttgaaatttctaaattaataattatctcggcttacttaaaatggctagacctaatttaagtgcataaattgttttttaattgacgtttaatttcatacgtatatgcttaagataaaattgtgcttgtattcatatttgttttcttggtcttggcatatttgcgacctcgtgcgacggtcactctaatttggcattttaaattgtgcagcgtactcggctgcacttgcaacttttcattgtttgaaacgcaattaacatttaaatcgagtaatgaattttagccaacgccaaccagaatggcacagaataccatcggtggcactaaatcacatattcgactatctaaatccccaggatcgtcggtcggcagcgggtgtatgtttttcttggagacatgccttatttcaaaaacggtaagtttgtcactgtgtgggtgtgtccgtatccgtgtgggtgtaggtatttgtgtatgtggctgaaatgtttaatttcagtacttattgggtatatttcctttgttattgccccttacattatatagccgtgggttaatcaagcgcaaaaaaacatctgtgcaagcaagaacgaatcgtagaccccaaaacttgttcgacatttatatgttgtactcttcgcatttggcaagctttcaatgtgtgggggcaagcacctaggtccgtttgtttatattagtgttgaaaaaaggggaaagtccacgataagaggaattcccctgccaataaatgcaattaattaaattaattgatgcgata

SEQ ID NO: 10148 - DNA, 1135 bp, DROSOPHILA
ctgttcacaatgataacaactcgcactgctgattctatatagttgtttacgttgattattagttttatattaattaaaaatgtcagctttgcttcttttacgcacctgtagaagttcatcaattgctggcatctacaaatacacataccaaggaacaactattgcgaatcacacatgcaatcatcgtctgtcgtctacagaagcggcggccgcgagtgtccaactggcaaatgccggtggattggtgggatattggcagaccttgtccaacagcacgccggtggcctatatgcaggatgttctcattaagatccacgactacagtggcctgccctggtgggcgtccatcgtgctgtccactttcctttttcggagcgtggtcaccctgcctctgaccatttaccagcacaaaatcaccgccagaattgaaaagatagcgctggagatgccggccattgtggaggaactgaaaaaagaggcagccatggccaagcacaagttcaagtggagcgaaaagcagactcagattgtttatcggcgttcgatcaagaagcagtggcagaaccttatagttcgggataactgccatcccatgaagaccatgattgtgctatggggtcagattcccctgtggatctttcaatccgtggctctgcgcaatttagtgtacatgctgccggatcccacgtccattcaagctcaaatcgtgaccaccgaaatgaccattggcggatttggttggataccaaaccttacggtggtggataactcttatatcctgcctgtagcattaggtcttatcaatttggccatcattgaagtgcaagccatgtctagaactcgtccttctacacgcttgcagaacatcgccaacaatgtgttccgtggattgagtgttgtgatggttccagtagcctgtacagtgccttcagctttatgtgtatactgggtagcttccagcagttttggccttgctcaaaatctgctcatcctctcgccggaagtgcgacgatctgtgggaattcccaaaacacaaacggaactcagtgagccgtacgatctgctctggctaaaaatacagcagaggctaagacttgccgagagggcgccggctgataagccggcagccaaatga

SEQ ID NO: 10149 - protein, 351 aa, DROSOPHILA
MSALLLLRTCRSSSIAGIYKYTYQGTTIANHTCNHRLSSTEAAAASVQLANAGGLVGYWQTLSNSTPVAYMQDVLIKIHDYSGLPWWASIVLSTFLFRSVVTLPLTIYQHKITARIEKIALEMPAIVEELKKEAAMAKHKFKWSEKQTQIVYRRSIKKQWQNLIVRDNCHPMKTMIVLWGQIPLWIFQSVALRNLVYMLPDPTSIQAQIVTTEMTIGGFGWIPNLTVVDNSYILPVALGLINLAIIEVQAMSRTRPSTRLQNIANNVFRGLSVVMVPVACTVPSALCVYWVASSSFGLAQNLLILSPEVRRSVGIPKTQTELSEPYDLLWLKIQQRLRLAERAPADKPAAK

SEQ ID NO: 10150 - DNA, 12980 bp, DROSOPHILA
tctcccaactgagctatttcggcagttgcaattccggcgccaatagccgatttttacaccagtaaaggtttgagtctaggtgcattcagtgttgtaaaattcaaaatccatctagcaatgacgagtaccaaaacttttgaaatccacgctagcactaatccgatattctgtactatcgccacatctgccgaaatagctcagttgggagagcgttagactgaagatctaaaggtccccggttcaatcccgggtttcggcaagctactttttctttttaaaaatttccaaccattttaactccgaataaaatgaggcttaaaaaaacaacaattatttaaggctcatttattttaaatcccttttggttaatggagcagagtccttgtcaatgtgcgcagaatttctgccttagaatccttagtaatttgatttctagacctcgctaaagctaaagagttaacgatcgatttgtgttgtattttgaaagagttactcctatttgcttaaattcaagggttgaatcctcgtttacaataaaaaagtaatagatctcacatatgcactacattttgagggttggtgggtatcgggaatgggaggatgggtggggttcttaaatagctaccaattgtttcgatttaattaaagtcagataaaatttttactaatatcaccttctaaaaatttgtccaattcgttttcattaaaaactgatgtaaatatgatttaagaacgtacgtgtatataaaagtttgatccttaagagctttgatttggcggtgtggcaataaatgaaattaaaataaaattttaattaaataatttgcatttatttaaaaatgtaaaaaataactaattttatgattgagtaatttttcaagtgttttgtttccctatcttatttttgggtaggcaatcattttgctcgcatagttataaaatatgcgagcgggtaagtcgataagtgtgtcaaaggactatttaaagaataatcaaaaacttagcaatgggtccgattggtttttataaatgtacaaactctaatcaataaacatcaaaaatgtactaaattaaacaaaagcacaaaaatttgcccgtccaatgcctacaattaaaagttgtttttatgcctaattatcaactatgatatatgtataatcttgtataattgtatgtataattggtttcgtaatattttaaactacaatttataacacgcgccacgacgtaaacaaacaaaggccaggttatatatgtatatgtatatgtttgtttgggggtgtgaaaatgtatatactcatatatatatttatatatatatatgtatgcacttggtaactatgtatacgatgagtcagtaaatactcgctaaattaaatttttaactgcaaaatacgcagcacacaagattaaacagtgctacgggagcagttcatcaacaaacaaataaaaatataaacttatcatcttgaccagggtcagtacaattttgatttcaaatcgccttgatatatgtttctttataatgtgcactaaatatatttaaaggtgtctatgtatatgcatatgcgtggatcaggtgagggtcacagtgtctcttctggatcttactccacggcaaatccacaggtctcctcaacggcctgcgtcagcttgtcgcaaagtagctggtacgtctcgtagggcggcaaatcgatccggttaaagcaggtgtgcgccttgggcaggttctgcgtgggcacgtcggcagtcaggtgaatagtaaacagccgtggtcccaccgctcccgtggagccctgtagcgctctgaagccctgcagcggcactcgcgatgatcctgtcacgaattgcagcagacgggctctcatctcagaactataggactcgaccaccttgagaagtgtaaaacattggttaataacgttaaataatctttaaaataatcgctaataagtagccaaacacacctgccagaaccacaacacctgcgtcgtttcgttcgtacagtgcttcagtctcgtattgttccgccagtcgttgacatctatgctagagatgccaccaatgaccaattccaattcgcgctcatcaaacggtcttaggagatggctgggtataagctcacaaaaacctggaagatatgcattgattactactttggttggggcaaagccaaatccaacaacaaacctttctgcagagccaaaaattgttgttcaatgccgcgcataaaacgatagttcacatagagcttgacatactcgcgtttgttctcctccgtcactggaatggaggcaccgccaggcttcagttcatgcaccaccagagcaccaaagctattgttctctacactgaatgtggattcaatgatgccgctgatgttgctttccctaaaatgcaacgataatataaacaattcctagatgtttaaatgtatttcacttacagcatccaggtgaggctgcgatgtaggtccggatccacgccttcaatatcaccaagcgtaatcggcttgttcagcagctgcttgtagaagggtgtagtgaacccaccatccagacagtgaccgtggaacacggcaatccctagtgtgcgacccacgaaatgaaaataggacaagtgatcgggattcacaccggagtctggattaatttgcagcgtgtagtgatcatccctactgtactggaataggccatactgcggattcaacatctctcgggaaagcagatgcaaccactcgcgtgctacgccaccatagtccaggccctcctcgcccttaaatttaaccattagacgctttcgcatgtccttggcccgcattttcattatcagtctatagctctcctcgaaaatctcgttgcgtgacacctccaaacggcagtggccggattgcggctgcatcgtttgcagctccgtgcgcagagcccgcagcttgccaaccaaatcgcggcggtacttgggcaaaaggtcggcgccttcaagcaatccctgtggcagatccggaacaatacgatggggcgggtttgttgtagttgtaagcgtcgttggagttgcgttgctcgccggcgtcgcctgtggtggaactgctgctgcggccgagggggtagcaggagtagccgatggcggagctggtgttccagcatttgcagcggatgttggtggtacggttccacgtcgaatcatttgcaaaatactgccacttagccggggatccgtaaactgtgtggttcggttgttgtggtccacaaagtaaacccttccggaggccgtctttcgctgttcccaaccactcggcaatggtccgatagcgtcaagcgttagatgttgggtgtcgaaatctctgggtatccgaggatcatgccacgtggatacaccagtgggtatgtgataaaagtatacctgcccttgttgcgttgttcgcatttcatagccgggcggcagatccaaaaatggtcgtgctgcctgattggcagctgcaatggctgccgaggcgtacctctgcccagatccacctccacctccgccgccagatgtgcccccatttcttgttccccgtgaagaccgtcgtctggtggaggactcctcaccttgttgccgcgagctccgacgctgagagcgttgaccgggcgttgctgctgtataggatctacttcctcctccgcttccggctggtgtgctgttcgcattcggactgtgcacatttccatttgcagagggtgtcactgaagctggcggcgatatatttggagttggcggactttgactatgcctgggaggagaggttgtggttgaaggtgaagtagtcgttgcggcatcttcttgcgtccatccgttactagcactctggggctgcgccgcctggccacttccatttccgctggtacttccattctgagcatttccatttacatagttctgctgacccgtgggggatgtgggcgtggactctggcggagcatggccattcgtttggtgctttggtgtttttacatgattgtcgttgctatgcaggcgaaccgacgccgatgtcgtactgctggtgggtgttgctggttcgtttgtcggacgctgctccaaagtgcgaccacctgccgaggatgagttcgatgaggatgtttttttgccaggcgttgtcgtggccgaaacgggcgttgtggggctggtgttctccttgcccacgctggacaggatttccgtagagtgtctacgttcatctgaagccgtcacagacaagtcccggctgcgatgaccgttattcatcaggttcgtgcaagttgtagagcgggttggcccagccggagcttgtcgatcaccgctgttgccattgtgcgtgttgtgccgttgctgtggtgaagtggcgtgactggatccaactactcctggctgtcttggtcgatcccactgcgtcgatttggtggcatggttcacatagtaaactcgaccgttgtccgtacgccgctcctcccaaccctctggcaaactatcttccgaggagtcatcttccgacggtccacggacatcaccactgggtcctacaatggccagaggattaccactactaggaccgtccttcgagagcaacgaaatgatgatttgaccacgtacaagctcatcgtcatccggcgacagttttcccagatccaagcgttgaactgaatgattgtttgtgaaaatataagtcaatttgtcgatataggattcacttacacccagctcctttgaggctctgtatgttgaacgccggtatcctcacacagcccaggaatccactgcccttgtgtatctttcgctgattccacacagttatcgtaatggcatccccaatgcccaaaaacaaatcgtaatgtgcattccattttggatccagagaggatttgcttatttccgtcgagtacacctgcccagttccatccacctgcaccttagcaaagggatcgggtagacctgtaacaaaaatataattcgaatgagcaaaaccaatcaaatataaatagttttaaatttgtttgttaataatgttaactctctattgtcatcgatcattacagaatggaaaatgggtctatttgacaccgatgattacagataaagcgttaaatttcaaatgcaaatcattaatccacacgaacgtttcaacaaattgatcatatttaaaggtgcacaaatatcattatttgcaataaaacatgaagtgcttgaactttatcgtgctttcgctactgctgattttgcctcaattttatagccatcgacatccgggctttgcccaacgcttgcagatcaagccaggctgcttgcaggtgcctcagatatacaccgaggctccaactccaacgcccaccattatcttttcctcgttggaagaagtagggatagaggacattaggagagtagaagcagattaaacatctttcagagcaaattccccctgagtgtgagttccctattggattcaccttatcggcttggcactgtgatgccactgcttaattgaggcctatataaacgctgtcacttcatgagagcttatcataagcaaaatcgcaatgccatctagctggattcatttgctgggactgctggccctgtttctttgcacgatcctgtctgctggagatgcctcccccttcgacgagagacgccaccggggatggaatcctcgcccaggatcaatgccgcagattcccaccacaccaccttttaatccatacggataaggtggcatctaattatctaaaagctaactaaaaatatagatcaagtcttaatcgtttacaaatatataaaatgcatttagatggactacaaaaaaatttctaaaaatgtcacatattcaatatagaaagcgtttttctataataagaattcggctgtcaatcaagggggaactttttcctccactttttggttttgagaataaagggcaagaaatgtcaattgaatccgaggaacgtatgagtgaaaatgtttacatcccgaccaccaccaaacgtgaatgcggtcaagtgtcattagtcagagatagaaaaatgggaccacattgctagacatatggaggaatgaacgcaacatgccaatctccgctatcagaactaaaataggaacccccactgtcgcatcgtttttgcttatcgtcttagtcggccaccgataatgcccagaatcttgacaaattaagcgctggacattccgcttgaattaaacaattagaaactacaatatcgagccggggccggtgatttatgcgcactcggactggactagactcaaccagtcccttccaatctgacagccactgactcatagcccggtagatatcacaactaggttttttcgcacacccatatcgttatctcaaggctgacgctattggctacggccataagcggagcaagagcatgtgcaggccttcttccatcagctggtgaggatgccatcaatcctttgttggactcgcccaggtaattcgagaagggcacattgcaacttcttcatcgcctgtcgtcgacgggcagctgttgattgattttatgcaagaaagaacatacgacgggtgggggaaaacatactggtaggtaaacagcagagcaactgtaaagccctctatatggaagttaaaggtgtgtttacgtttcctatgcactttgatttctttgattcgtaacatgccttgaaactagaaaaatatctacgagcattagcgcatgtttgattcaccacaagatatatagtacatatacatattcatttgtcgtttatccaacagtcctattcccataagaacattcccttgaggcacatttttttttttgaatctgccttgtataaaaataaatatttttgtacaaagaaaattgtgatattagattgattgcacaagaatgctgaaaacgcgctgggcggtttagaattaataatagaacttggcgattaaaacaaattttgagcaacaccagaaacgataaagtggaccatgatttggtcgtggattaacaatagctgccattgcattcaagtaaacgccgcccaccagcccagttgcataatcccaatctccgagttcgcgcgaggcacagctcctcactcgcttcacgcctgagctgcctgaaaagtgagaaagaagaattaagaaagccaaaggggggattggcgaccgacagactagccgccgacttttgggccaacacggctatgtgttcaaccccctttggtttaacgctacgtggcacaatttcgtagcccagtcgacaaggcgaggaagttaacgattggctgcactttcactcggacggaagccggtagtcagagtcagcggagcttgaattcagccgcatgccacggctgctgttcgaactacacatgcacataaaaaacgggcggttttgatgcaactggcacgctttattctggacaaggagtcaccgtttgacaagggaaacgttcggcttcgagtgcttcagctttagcttggtcctcggccgcccgcttcttgatcctctcctcgatgaccggtcggaagttccggatgagtccttggggcggccaagcagcaccatcggccagggcacaaatggtatgtccctcgatctgcttcgtcagttcgaacagcatatcgatctctgcaatttgcgcctgtcctgtcacaaatctatgcatgatcatgttcacccagtggagaccctcgcggcaaggagtgcactggccgcagctctcgtgcttatagaaagccgataatcgggcaatggccttgataatgtccgtatccttattcataacaattaaggcacccgttcccatggacgaacgcactgccatcagcccatcgtagtcgtgaatcgcactcgaggcgtgctccttggtaatgcagggagtggaggagccacccggaatgatggccagtagattgtcccagcccccgatcactccgccagcatggcgttcgataagctctctggttggcatggacatctcctcctcgacggtacaagggttgcaaacatgaccagagatattaaacagcttggtgccagagtttcgggtacgtccaaagctggcaaaccaattgccaccacgccggcaaatagtgggagacacggccaccgtttccacattggtcaccgtagacggacagccaaagacgccgatatcagccggaaagggaggcttgttccttggcttacccgccttgccctccagggattcaatcagagaggtttcctcaccgcaaatataggctcctgctccacgttgcacataaagatcgaaatcgaacccagaaccgcaggcattctttcccaggtagccagccttataggcctcaataatggcatactgaagattgcaagcttcgttgtaaaactctccgcgaatgtaaataaaaccagtgttggcacccatagcccgtccagcaatgagacatccctctaccagtttgtgtggatcatggcgcattatctcacgatccttgcaagtaccgggctctccttcatccgcattgaccaccagaaacttgggtcttccatcaggcggtttatgcataaatgaccacttaagtccactgggaaatccggcgccaccgcgtcctcgcagtccagatgtcttaatctcgttgactatccacttgtcacccttggctatgatctccttcgtcttgtaccagtcaccgcgcttcattgctgccttcaatcgccaatcgtgccgtccgtataaattggtaaagattcgatcagcatcagcaagtggtccaaaagtagttttcgtctgcggtggtggagttccgggcggtggcccctttgggggtggtggagcgccgcttttggcaggcggagaaccgcccgtcggcggtgcagaaacatttttaggtggaggagagcctgccggggtggccggcccagatcctttcggtggagttgattccttggcatccacagtcacaatagttcttccttgtagagcagcataattccagcctataaaattatccctcagctcgtcaactttctcatctagtcgagatttctttcttttagccatatctttaagcctttttaacaaattggcctcgagttctctttggtcggctggatctaaaaccttcttggcattttcattaataggaaatttcgttgtgggcggaagtttctcagctggaaattttgggcaatctacttcggatttttttatgctttccctttttttggctctttgctcagaggacagcaaatcgtcgttacaatcggtttgagatccttctctcataatcagcacaggtttggctggccgcaataagagtggaataacgctttcagcgtcacttagttggttcttcttcacattttgtatgctagaagttcggtatatgtttaccagcttgatatttccagttttattaccaggtcgtaaggcattttgaaggctttttacttctgttaaggctctatatgcacgagttagtcctaatgaaatcttgtaagcatcacaagctcggcgttttaacagaaacgatatcatgctttcgtctatattctttatctgattaactgaactctttggcaagtgtgttgaatcaaaggaaaattcaaagcatactacttccacatttttcgaacttgatatgttaaaaaagtttacattactcacaataacgaatatcggaaagtcccattatggattttccctataatgaccgtaagccccgctgggttcaactaaaatcttatcacaaagaatcgataaaatatgaagaaccaactactagtgtacaatgtatatggtagtagagggaaaatagcaaatgaatgcgccatattctgtagtcaaccacggaattcaagcattagcattaataaacaattcatttgaagtgacaccagcggccacagacccattttcggaaacccaaatatccccctattggaatctcacggataaggaacatcgaatgttttttttttttttttagtagcacattgaacaatgcgtggcgcgtgatttaagtgcaaccaagtgtacaaaaatggacaagaagtggaaaaagcgaatagtaaatcacaaatacacagaaagaaaaaatattgcgattgtatttgtggacgagcgagtgagtgagccgcaatgaaagcaaattagtaataatcacttttgttatatctaacaaaatatgggaaaagagctcagatatggcgcaccactcgcactcacccactcgacttgatgggcgcgatggggggagggggcttttccgcaatttgtataaaaatgaaagtagacaagaaaggaagtgctaaatttagcgataccttatatgcatagatgaatgtgaagaagaggaaacagcagcaccacaagcgccgcaaataaaacaaaactttaatttaccacaatgtgtgtttcgattggacggctaaacaggtgcgtaattgatggttttcgaaaagaaaaccaaacgtgaaaacaaagcttgctgggtctggcgaatgccaactgctccaaatttcccgtaactaaccaaaagtgagtcaagaaattagcccaaacatgtgagcaaattacgaaaataagtgattacgccaaaggcatgctgggtaaatagttttaaggaattttttgctgttacatttaatattttataacactaacgattaagaagtacagggtaaaacttttatgcttttgatgaccggaagttctgctttaggaactaatttagaccgtcctatttgacggataggtgataggcactaaggaaattagatgctaagatatatccaattaatattaaaatacttacgaaataaatccttgcgggccaagtttctagcacacaatactgcaagtaaagcgatatattagtgggttttattaacaattgtttttatcagcagacttactcgttattcgaactttgtgtgtaccattgcgacgtgggtaatccaatttattcataattttcgacttttaattgatattgtttgatttgtataaaaataaatggatttactttgtgtattgattatttatatgtcgcgggcatgttgttgtagttgttgttgtcgttaaagcgccgaacggagagcgaagaagaagaagtgcaagtagaaggtggaggagaggaagcaaaggaggtgtaggaggagcaggtgagggcggtgagaggtaatttcattgccgaaggtaactgcagttgttattgttgctgctgctgctgtggcggtagccttgacggttgcaattgttgtagtttttgcgtttgttgctgtgtgtcatggcacacgcacatagatatatttgtatataaataataacaccgatttgctttttttataggctgcaatccaaagataacaaatggaaatgggtattattagtaagttcgttagagataatgtgtgtattttccccccaagtgcaaaaacccaacccaaaagcgagggcgtaggtaggaaatcgttcaggtaggcaaaatattcacgaaaaactcacccgaaattgttttgctggtgttgttgttgttgctgctgcacctcacacgcacatgtctcgctcactctctcacgcacacacacacggacgcagttcacgcatgctgcaggggagagcgggagcggggttcgatctgtctctctccctctgccactctattatttcacaaattgcattaaatgaaataccactgtgtgtttaattaactttaatttagtcgctgctccagtatgggtgccacactatttactcgcactagtatttccttcgctatcgatgtgtgcgcgagtgtgtgtggtactaaaatttgcaataataatcaaaggaggcacacttgtattgttctagttcactaaaaatcggacgaaaactctgcgaacaacgcacgcccacacagttgctcgtccacggaacgcttgatagtgcgcgaattatgctgccgcggcctcacgcgctattgttttacggattcccataaaaatttaactacaacttcgaacgccatttttattagtggtggcacaaagtctagtgctgagtgaaaaatcgattactctcttatactatcgattttttagtgctaatattcttggaaaacatcgcatattgtcaaatatatatatataatacgtatgtagtcagatactaaatttaaaacagcatgaaaacttgttcagtgatggtaaacagtgatctcgttaccatctacaagctttgatttacaatataattgtatgtttttgttatattgttactatcgaattaaactactattggctatcggttgtaaatcgatgagtttagctgctactcaaaccatccttcttaagcgcaaacaaacaaacacattttggcggagtttttgtttaccttttattttgcgcaaaaagtaacaatgtcaattactctagattttaatggtaagaactttgccaagggtaagaatttagacgtgcactacttgccggccaaaatagacggcgatggggaagcgaatgtaaaaaattacttcaacaactacacacgtgaagcaaccgaattcggcacaggaatcctgacgaacgccttgcgcggatttcctttaatgggagagaagttgaaagtgcccgaaggatactgcggattagttctgcaagaaacagagaagcccatcagcgatacctccgaccgaaagttgcggctaactggagtatttcaagattttacttactggaactacgacaaagtgccgtccaatggcgatccctaccgacaggcccttcctctgccggatgttgctcaagctgtatgtatataccactatatattctcgaagtacacctaataaataccacattttatttatttagctctcgcagcccattagcgaagaggatttagagaaagaaatcgctcgtaataaggaaaacgtcaaggaaagcacgtagttttgttttaatcgcgcttaccgcgttctatttattactccaaaatctaatccaatacatatatatcgtaca

SEQ ID NO: 10151 - DNA, 4596 bp, DROSOPHILA
ttcgaagttgtagttaaatttttatgggaatccgtaaaacaatagcgcgtgaggccgcggcagcataattcgcgcactatcaagcgttccgtggacgagcaactgtgtgggcgtgcgttgttcgcagagttttcgtccgatttttagtgaactagaacaatacaagtgtgcctcctttgattattattgcaaattttagtaccacacacactcgcgcacacatcgatagcgaaggaaatactagtgcgagtaaatagtgtggcacccatactggagcagcgactaaattaaagttaattaaacacacagtggtatttcatttaatgcaatttgtgaaataatagagtggcagagggagagagacagatcgaaccccgctcccgctctcccctgcagcatgcgtgaactgcgtccgtgtgtgtgtgcgtgagagagtgagcgagacatgtgcgtgtgaggtgcagcagcaacaacaacaacaccagcaaaacaatttcggcctataaaaaaagcaaatcggtgttattatttatatacaaatatatctatgtgcgtgtgccatgacacacagcaacaaacgcaaaaactacaacaattgcaaccgtcaaggctaccgccacagcagcagcagcaacaataacaactgcagttaccttcggcaatgaaattacctctcaccgccctcacctgctcctcctacacctcctttgcttcctctcctccaccttctacttgcacttcttcttcttcgctctccgttcggcgctttaacgacaacaacaactacaacaacatgcccgcgacatataaataatcaatacacaaagtaaatccatttatttttatacaaatcaaacaatatcaattaaaagtcgaaaattatgaataaattggattacccacgtcgcaatggtacacacaaagttcgaataacgatattgtgtgctagaaacttggcccgcaaggatttatttcgtctacccgatccctttgctaaggtgcaggtggatggaactgggcaggtgtactcgacggaaataagcaaatcctctctggatccaaaatggaatgcacattacgatttgtttttgggcattggggatgccattacgataactgtgtggaatcagcgaaagatacacaagggcagtggattcctgggctgtgtgaggataccggcgttcaacatacagagcctcaaaggagctgggtttcaacgcttggatctgggaaaactgtcgccggatgacgatgagcttgtacgtggtcaaatcatcatttcgttgctctcgaaggacggtcctagtagtggtaatcctctggccattgtaggacccagtggtgatgtccgtggaccgtcggaagatgactcctcggaagatagtttgccagagggttgggaggagcggcgtacggacaacggtcgagtttactatgtgaaccatgccaccaaatcgacgcagtgggatcgaccaagacagccaggagtagttggatccagtcacgccacttcaccacagcaacggcacaacacgcacaatggcaacagcggtgatcgacaagctccggctgggccaacccgctctacaacttgcacgaacctgatgaataacggtcatcgcagccgggacttgtctgtgacggcttcagatgaacgtagacactctacggaaatcctgtccagcgtgggcaaggagaacaccagccccacaacgcccgtttcggccacgacaacgcctggcaaaaaaacatcctcatcgaactcatcctcggcaggtggtcgcactttggagcagcgtccgacaaacgaaccagcaacacccaccagcagtacgacatcggcgtcggttcgcctgcatagcaacgacaatcatgtaaaaacaccaaagcaccaaacgaatggccatgctccgccagagtccacgcccacatcccccacgggtcagcagaactatgtaaatggaaatgctcagaatggaagtaccagcggaaatggaagtggccaggcggcgcagccccagagtgctagtaacggatggacgcaagaagatgccgcaacgactacttcaccttcaaccacaacctctcctcccaggcatagtcaaagtccgccaactccaaatatatcgccgccagcttcagtgacaccctctgcaaatggaaatgtgcacagtccgaatgcgaacagcacaccagccggaagcggaggaggaagtagatcctatacagcagcaacgcccggtcaacgctctcagcgtcggagctcgcggcaacaaggtgaggagtcctccaccagacgacggtcttcacggggaacaagaaatgggggcacatctggcggcggaggtggaggtggatctgggcagaggtacgcctcggcagccattgcagctgccaatcaggcagcacgaccatttttggatctgccgcccggctatgaaatgcgaacaacgcaacaagggcaggtatacttttatcacatacccactggtgtatccacgtggcatgatcctcggatacccagagatttcgacacccaacatctaacgcttgacgctatcggaccattgccgagtggttgggaacagcgaaagacggcctccggaagggtttactttgtggaccacaacaaccgaaccacacagtttacggatccccggctaagtggcagtattttgcaaatgattcgacgtggaaccgtaccaccaacatccgctgcaaatgctggaacaccagctccgccatcggctactcctgctaccccctcggccgcagcagcagttccaccacaggcgacgccggcgagcaacgcaactccaacgacgcttacaactacaacaaacccgccccatcgtattgttccggatctgccacagggattgcttgaaggcgccgaccttttgcccaagtaccgccgcgatttggttggcaagctgcgggctctgcgcacggagctgcaaacgatgcagccgcaatccggccactgccgtttggaggtgtcacgcaacgagattttcgaggagagctatagactgataatgaaaatgcgggccaaggacatgcgaaagcgtctaatggttaaatttaagggcgaggagggcctggactatggtggcgtagcacgcgagtggttgcatctgctttcccgagagatgttgaatccgcagtatggcctattccagtacagtagggatgatcactacacgctgcaaattaatccagactccggtgtgaatcccgatcacttgtcctattttcatttcctgctgaacaagccgattacgcttggtgatattgaaggcgtggatccggacctacatcgcagcctcacctggatgctggaaagcaacatcagcggcatcattgaatccacattcagtgtagagaacaatagctttggtgctctggtggtgcatgaactgaagcctggcggtgcctccattccagtgacggaggagaacaaacgcgagtatgtcaagctctatgtgaactatcgttttatgcgcggcattgaacaacaatttttggctctgcagaaaggtttttgtgagcttatacccagccatctcctaagaccgtttgatgagcgcgaattggaattggtcattggtggcatctctagcatagatgtcaacgactggcggaacaatacgagactgaagcactgtacgaacgaaacgacgcaggtgttgtggttctggcaggtggtcgagtcctatagttctgagatgagagcccgtctgctgcaattcgtgacaggatcatcgcgagtgccgctgcagggcttcagagcgctacagggctccacgggagcggtgggaccacggctgtttactattcacctgactgccgacgtgcccacgcagaacctgcccaaggcgcacacctgctttaaccggatcgatttgccgccctacgagacgtaccagctactttgcgacaagctgacgcaggccgttgaggagacctgtggatttgccgtggagtaagatccagaagagacactgtgaccctcacctgatccacgcatatgcatatacatagacacctttaaatatatttagtgcacattataaagaaacatatatcaaggcgatttgaaatcaaaattgtactgaccctggtcaagatgataagtttatatttttatttgtttgttgatgaactgctcccgtagcactgtttaatcttgtgtgctgcgtattttgcagttaaaaatttaatttagcgagtatttactgactcatcgtatacatagttaccaagtgcatacatatatatatataaatatatatatgagtatatacattttcacacccccaaacaaacatatacatatacatatataacctggcctttgtttgtttacgtcgtggcgcgtgttataaattgtagtttaaaatattacgaaaccaattatacatacaattatacaagattatacatatatcatagttgataattaggcataaaaacaacttttaattgtaggcattggacgggcaaatttttgtgcttttgtttaatttagtacatttttgatgtttattgattagagtttgtacatttataaaaaccaatcggacccattgctaa

SEQ ID NO: 10152 - protein, 1035 aa, DROSOPHILA
MNKLDYPRRNGTHKVRITILCARNLARKDLFRLPDPFAKVQVDGTGQVYSTEISKSSLDPKWNAHYDLFLGIGDAITITVWNQRKIHKGSGFLGCVRIPAFNIQSLKGAGFQRLDLGKLSPDDDELVRGQIIISLLSKDGPSSGNPLAIVGPSGDVRGPSEDDSSEDSLPEGWEERRTDNGRVYYVNHATKSTQWDRPRQPGVVGSSHATSPQQRHNTHNGNSGDRQAPAGPTRSTTCTNLMNNGHRSRDLSVTASDERRHSTEILSSVGKENTSPTTPVSATTTPGKKTSSSNSSSAGGRTLEQRPTNEPATPTSSTTSASVRLHSNDNHVKTPKHQTNGHAPPESTPTSPTGQQNYVNGNAQNGSTSGNGSGQAAQPQSASNGWTQEDAATTTSPSTTTSPPRHSQSPPTPNISPPASVTPSANGNVHSPNANSTPAGSGGGSRSYTAATPGQRSQRRSSRQQGEESSTRRRSSRGTRNGGTSGGGGGGGSGQRYASAAIAAANQAARPFLDLPPGYEMRTTQQGQVYFYHIPTGVSTWHDPRIPRDFDTQHLTLDAIGPLPSGWEQRKTASGRVYFVDHNNRTTQFTDPRLSGSILQMIRRGTVPPTSAANAGTPAPPSATPATPSAAAAVPPQATPASNATPTTLTTTTNPPHRIVPDLPQGLLEGADLLPKYRRDLVGKLRALRTELQTMQPQSGHCRLEVSRNEIFEESYRLIMKMRAKDMRKRLMVKFKGEEGLDYGGVAREWLHLLSREMLNPQYGLFQYSRDDHYTLQINPDSGVNPDHLSYFHFLLNKPITLGDIEGVDPDLHRSLTWMLESNISGIIESTFSVENNSFGALVVHELKPGGASIPVTEENKREYVKLYVNYRFMRGIEQQFLALQKGFCELIPSHLLRPFDERELELVIGGISSIDVNDWRNNTRLKHCTNETTQVLWFWQVVESYSSEMRARLLQFVTGSSRVPLQGFRALQGSTGAVGPRLFTIHLTADVPTQNLPKAHTCFNRIDLPPYETYQLLCDKLTQAVEETCGFAVE

SEQ ID NO: 10153 - DNA, 4163 bp, DROSOPHILA
agcttatgggtctttaattcttgctgatattgcaacaagtggtctagctctgcatgtagctttagagctttcgaccaaaccggtggcgtttgctgaccgtatattagccaccttacgtgggctatacgtttattcagcttagttttcaaaccgccacggtgtttgcccatactcaatagaactctactcactcagatttttccttggtttttgcagttccatttaattagtccagtcttcttccagtccagtgttcctttgttcctttgttttcaccagctttggtcaattcgtccagcgttggacgactgtcacggtcgccatgtaatgatgaactccaattaagaacacaagtccgttttaagttgaaggcagccgtcgggctgacatatatttattcaatttcttcttttgattttagagtaggcagaaatggttctgtcagctcaacgtctacagagtctctccgattttacagttttttatatatttggacttaggctaatccgcgtagctgcgctgccgggtacgccagcagcggagcggcgttcttatgtatatcttatatatctaggcttatcgggagagcgagatatgtatgtacgtatgtaatatgtatttggtcggcgtgtgaatgctgaccatgcacttatactttttgccttcgagtgggcaatgcacttatactttgtggccttcgagtgggtgatcatgttacatccgccctggcctaactgcgtgcataaacataaacataaacatagcaacaaagtgctgccataagttaatatgctattttatttaattgttcttaatattgcataggcacatactacacaactctcaatgaaggtctgctgattccagcacctgacatacttggtgcaatcgaagggatgcagatagagtccctgtgcttgtggaggacaagaaagcgtcgaacgatccaccataaactcagctgtaaacgaaaaagtggtctgaaatcaagtccaagtcatcaagattccttgagatgcttactggaaagttcagcactgatataggagtaatccaagtaatcatgtgcagagagaaggctacgaggcacacattgacgctgggagaggctgtaaagctgtccagtgggacagcatatgatctctaatgctccatattggcacctgacatagtggccagcatggaatggataagggtaattcttctggacattgggtggacacgatctaagtgaagacagctggctttgaacatttccccgtaagtcttgagaagtataagtggtctgaacttggacttcctgccagaactgcacccgatcagatatgtgcacttgatgacttggaagacaacttctttgggatacactgaatgccatctgggggccacaacttaggatggacattctgccaccagacgagcactgaacgtactttttagcatcgtagggatacaagaagatgccgttgatgttaccaggacaggcattaaggataagtgctagtaaaatattatcataaattctagtgtacagtgatgataaagtaacttacaatactcatagctgatttcggagataattaatgtgacatagtcggtaaaggctaattgtgcttttaactgacagtagcgcctcgatatgctaaacacataattaggttggcagttttgcacagccgatttaccatccttacaactaaggaattttgtttgatcaaagggatgaacaaattggccaacggctcccactggacacaagagatagttgacctgaatctcagccgacgtgaaggaggaagctgttacaattcaaagggatcaggattagagtctatcaactaagcaggcaagcaaagcgtgtacagcgtaatatgagaaaataacccgaaatgaaaaagcagatgaatcaagcgaggccaagcagtagggataagaaatgaaatgacacttacaggaggtccgaggggagtcagaatacacacataccgaagaggagccatcgaagatgtggccccgtggacactgttccacctgaggcttaaccccaattccgcacctcaaatacttgtgcacgtcgtgcggatgtggacgaagcccacgtgtaccgggtggacagcccaagtcatcaaaaggcaacgcagggtagcctaaccgagtgttagtcaagatttttgtatttaaatcactcatacgtaccggtgccggaggtatcatctcgtactgctccagttcccgatccgcatttggccaaatccttgtgcacacataccagtgatgctggactaaaagcagttcctggtgcgcagtccataataaaagcttgaccattggcgcagttaagaaacttgctgcaatccgaaggatgcggttgcaatccattcactcccggttgacacttgggttcactatctaattgcctaagtcttcccagtcgagtagatgcagattccgctgaagggcaaaccacattgctgggatgatcgcacacctgggtcctgtcattgaacagagttccgggcgaacacgtctgaatggtggggctgccatcgaagcagttcacatagcgatgacagtcgtggggatatgcaaccagacccgtaaaatgcggcgggcatgccgaatcccgatggtaaataggctgctgctggtcgcctccgtaactcgagtgtgcgttccctgttgctgataagccaactggttccgactgctcgctgtggtagccactgcctgatcgataagctttagccccgggtcgctgtcaaaagcgcaattatgaaatattattgaacaaccgtaagtaattagaggcaaaatttagctaatagcttgtaattaagttcaattaaaattaaagtcttaagcgcgttttaaattcctaaacaacatttttagtttgactaaaatcttaaaaaattgtaaataatctagaatctagatgatatccttaaaaaacacaatttgaaattattaataaactttctacactaacatccactagcaggatcgccagccaaaggccaaggagccacttggccatcattttacgtttccgctttataagtatttgaatttaaatatttcttaaaatgcaccgatgctgatagcaactacacaattgtttttctcgcgctttaaattcttcgttgtgatcccgttcgaattccaggctcgactgacccacacccagatcgcatttcaattcaattggactcgggatgaatctctatctctgccgccgctgatagatgctctcgtttgtcgccaaaccaattgagtggaccacactatcagggcttgtaatctcaagacctttttgctgtcttatcgccttgttttgtttgcatttcttttggggtttttcactcatttatttacttctatgaatctgagatgttggagcttaagaatgatgatgatgaattacagtggcgcagtcgcatttaaacaaactaaacgtcatacccaaattagactaggtgattatgactaagagactagatcatttggctgccggcttatcagccggcgccctctcggcaagtcttagcctctgctgtatttttagccagagcagatcgtacggctcactgagttccgtttgtgttttgggaattcccacagatcgtcgcacttccggcgagaggatgagcagattttgagcaaggccaaaactgctggaagctacccagtatacacataaagctgaaggcactgtacaggctactggaaccatcacaacactcaatccacggaacacattgttggcgatgttctgcaagcgtgtagaaggacgagttctagacatggcttgcacttcaatgatggccaaattgataagacctaatgctacaggcaggatataagagttatccaccaccgtaaggtttggtatccaaccaaatccgccaatggtcatttcggtggtcacgatttgagcttgaatggacgtgggatccggcagcatgtacactaaattgcgcagagccacggattgaaagatccacaggggaatctgaccccatagcacaatcatggtcttcatgggatggcagttatcccgaactataaggttctgccactgcttcttgatctgtaagataattgacatgacgaagagtgtctcgcaaacatttgaattttaacaaaccgaacgccgataaaca

SEQ ID NO: 10154 - DNA, 1674 bp, DROSOPHILA
gaattcgaacgggatcacaacgaagaatttaaagcgcgagaaaaacaattgtgtagttgctatcagcatcggtgcattttaagaaatatttaaattcaaatacttataaagcggaaacgtaaaatgatggccaagtggctccttggcctttggctggcgatcctgctagtggatcgacccggggctaaagcttatcgatcaggcagtggctaccacagcgagcagtcggaaccagttggcttatcagcaacagggaacgcacactcgagttacggaggcgaccagcagcagcctatttaccatcgggattcggcatgcccgccgcattttacgggtctggttgcatatccccacgactgtcatcgctatgtgaactgcttcgatggcagccccaccattcagacgtgttcgcccggaactctgttcaatgacaggacccaggtgtgcgatcatcccagcaatgtggtttgcccttcagcggaatctgcatctactcgactgggaagacttaggcaattagatagtgaacccaagtgtcaaccgggagtgaatggattgcaaccgcatccttcggattgcagcaagtttcttaactgcgccaatggtcaagcttttattatggactgcgcaccaggaactgcttttagtccagcatcactggtatgtgtgcacaaggatttggccaaatgcggatcgggaactggagcagtacgagatgatacctccggcaccggctaccctgcgttgccttttgatgacttgggctgtccacccggtacacgtgggcttcgtccacatccgcacgacgtgcacaagtatttgaggtgcggaattggggttaagcctcaggtggaacagtgtccacggggccacatcttcgatggctcctcttcggtatgtgtgtattctgactcccctcggacctcctcttcctccttcacgtcggctgagattcaggtcaactatctcttgtgtccagtgggagccgttggccaatttgttcatccctttgatcaaacaaaattccttagttgtaaggatggtaaatcggctgtgcaaaactgccaacctaattatgtgtttagcatatcgaggcgctactgtcagttaaaagcacaattagcctttaccgactatgtcacattaattatctccgaaatcagctatgagtattcacttatccttaatgcctgtcctggtaacatcaacggcatcttcttgtatccctacgatgctaaaaagtacgttcagtgctcgtctggtggcagaatgtccatcctaagttgtggcccccagatggcattcagtgtatcccaaagaagttgtcttccaagtcatcaagtgcacatatctgatcgggtgcagttctggcaggaagtccaagttcagaccacttatacttctcaagacttacggggaaatgttcaaagccagctgtcttcacttagatcgtgtccacccaatgtccagaagaattacccttatccattccatgctggccactatgtcaggtgccaatatggagcattagagatcatatgctgtcccactggacagctttacagcctctcccagcgtcaatgtgtgcctcgtagccttctctctgcacatgattacttggattactcctatatcagtgctgaactttccagtaagcatctcaaggaatcttga

SEQ ID NO: 10155 - protein, 516 aa, DROSOPHILA
MMAKWLLGLWLAILLVDRPGAKAYRSGSGYHSEQSEPVGLSATGNAHSSYGGDQQQPIYHRDSACPPHFTGLVAYPHDCHRYVNCFDGSPTIQTCSPGTLFNDRTQVCDHPSNVVCPSAESASTRLGRLRQLDSEPKCQPGVNGLQPHPSDCSKFLNCANGQAFIMDCAPGTAFSPASLVCVHKDLAKCGSGTGAVRDDTSGTGYPALPFDDLGCPPGTRGLRPHPHDVHKYLRCGIGVKPQVEQCPRGHIFDGSSSVCVYSDSPRTSSSSFTSAEIQVNYLLCPVGAVGQFVHPFDQTKFLSCKDGKSAVQNCQPNYVFSISRRYCQLKAQLAFTDYVTLIISEISYEYSLILNACPGNINGIFLYPYDAKKYVQCSSGGRMSILSCGPQMAFSVSQRSCLPSHQVHISDRVQFWQEVQVQTTYTSQDLRGNVQSQLSSLRSCPPNVQKNYPYPFHAGHYVRCQYGALEIICCPTGQLYSLSQRQCVPRSLLSAHDYLDYSYISAELSSKHLKES

SEQ ID NO: 10156 - DNA, 3430 bp, DROSOPHILA
ccagcaggagagttggctgcttgaagtacttctcccgcagtcgctcgatggcggccccgaatccggggtctgccccctggaggagctgctccttttgccggtcgtagaactcgtagaaccgatcgaaagccacgcgatagaggacatcaaagatgccctttcctgagctggacacgaagggcatgtccaccactccggcgcgcaaacgagcatgaacgttcggctggaggattttcgtggcgtagcccagagcatggaacggacccactagtcctaccatggcctccagctgatcccgtcgaagggttagccttggccccaattggtagccatcgcccttgagatgctttagggccagcaccgattccctaccattccctaaacctgcagaaaagtaaacattcgatgtagtcatggataaagtctttgtgggatgcgcaccttcaacgtggccaaacctggcgaagtagcaacagggaacccagttctttaccacttcgctttccaggtgactcgtccgaagcacattctcataggcgggcaggatctcggcgtaggcgaagatctcgttggaaaactggatgtacgagttgctgctctcccggaactcttccgttcccttcatgaatttgaccaggacgacctccgtccgcttgcgctcggcgatgaccacgtccagcgtaacggtgtacaaggcggacatgaagccgtccagtccattggagcactcaacgctgtgcgattccagcgaagcactcggaccaaagttcttgaagatgtcgtacaccaggtggcgctctatatagtctaactgctgctgttgcgtcgacatcgtgacctccacgcaggaatcaattgctatctgaatgggtaatcttaactgacaatatacgcaagtaggtgtatatttgtccgggcaaccaatcaaagtggtatcgatagccacgcgcaggattttggtatattcccggtttcagcgaagtggtcacacagaatcgcgattgaaacgtgcaccgccggcgtattgcgcgtaaacataagacatttcacggggaattttctggactttgctaactcaatgggtcccagccacattcctccgctgacctacaaggtcgtggccgagtgctccgtctccaaagcccgggcgggactgatgaccctaaggtgagcgtctgcaataagataggccttgaaaactgtgactaagccgcattaccaactctcctaaacaggcacagcgaggtaaacaccccggtctttatgcccgtgggcactcagggaaccttgaagggcatcgtgccggaccagctcatcgagctgaactgccagattctgctggggaacacctatcacctgggcctgaggcccggaatcgagacactgaagaaagccggtggtctgcacaagtttatgggctggcccagggccattctaacagattccggtggctttcagatggtttccctgctgcagctggccgagatcgatgagcacggtgtgaacttccggtcgccctttgacaacagccagtgcatgctgacgccggagcactccatcgaaatccagaacgccattggtggggatattatgatgcagctggatgatgtggtcaagaccacaacaactggcccccgggtggaggaggccatggagcggactattcgctgggtggatcgctgcatagaggcccatgcccgcgacgatgaccagtcgctgttccccatcgtccagggaggattggatgtgccgctgcgtcagcgttgcgtttccgctctcatggagcgccaggttcgaggcttcgccgtgggcgggctaagtggtggcgagagcaagcacgacttctggcgtatggtggacgtgtgcactggctatctgcccaaggacaagccgcgctacctgatgggcgtgggttttgcggcggatctggtggtctgcgtggccctgggcatcgatatgttcgactgtgtcttccccacccggacagctcgatttggttgcgccctggtggacagtgggcagctgaacctgaagcagcccaagtacaaactggacatggagcccattgacaaggactgcgactgcagcacgtgtaggcgttacacacgctcgtacctgcaccacatcgccaccaacgagagtgtctccagctccctgttgagcatacacaacgtggcctaccagctcaggctgatgaggagcatgcgggaggccattcagcgcgatgagttcccccagttcgtcgcggactttatggcgagacacttcaaggcggaacctgttccggcttggatacgagaagctctgtctgccgtaaacatccagctgcctgcggatccggagaggattgatgagcaggaccagaagccaaagaccgaaaagagacgggaaacagaggacgtggcggaggagcaggtggcctccagctaacatcatcacatagcaacctttgtgttttgataacccaaagttccgactaagaggcatttcttaattgacacatacgttcatgtattttacatgtcaaatgtcatgtaagttattttcataagaataaatacttaattagacatagaataaaaaaggaaaaataaattacatcataaaattcaatcatactgtgtggatacaatttattttgcttattttatttttttgcttaaagttaaggttagtaggttagtctatcataccccatagcagggtagcagaatactggttttcatctctgctctgcccacgtttgttccgctcttgcgtaaagctctcgactcgttgttacctatgggaaaaagctccatgtagccatagtatgacgcatagtgcaaatcggtggcgatcgtggatctcgcgtggaacgaccgaccaatttgtgatattctacttgattttcgcctttgccacggcctcttttcgtccgttcttagagtaggtgtgcggtatgaatggagatgattgggaaacctctccacttggctcggagctctcttcagtgcttggcgcatatctgttttggactgaactctctgggggacaagagatacccgcgactcgagatctctgagagcgggagcgcgagatcggggcagtgaagtggtgctggtgctggtggcggtggtggtggtggtggtggtgctgctgctgctgctgctggttcggtggatcgttcagtgagtccccaagcgttgtcgcgtccactttatcgctgtttctgtcgcggattcgaaccactgactaacggtagtgctgcacgcatctggcggtaaattggcagcgagaagcccgcgctaataatacattctgaaagccgtcgaaaggattgcgagtccatatcaagcatacgcccgatcagccgccaatcgattgtaaggagccacccgaatttattgcttttccactgacaattaatcacggacttgctgtgcgtgtg

SEQ ID NO: 10157 - DNA, 1362 bp, DROSOPHILA
attgaaacgtgcaccgccggcgtattgcgcgtaaacataagacatttcacggggaattttctggactttgctaactcaatgggtcccagccacattcctccgctgacctacaaggtcgtggccgagtgctccgtctccaaagcccgggcgggactgatgaccctaaggcacagcgaggtaaacaccccggtctttatgcccgtgggcactcagggaaccttgaagggcatcgtgccggaccagctcatcgagctgaactgccagattctgctggggaacacctatcacctgggcctgaggcccggaatcgagacactgaagaaagccggtggtctgcacaagtttatgggctggcccagggccattctaacagattccggtggctttcagatggtttccctgctgcagctggccgagatcgatgagcacggtgtgaacttccggtcgccctttgacaacagccagtgcatgctgacgccggagcactccatcgaaatccagaacgccattggtggggatattatgatgcagctggatgatgtggtcaagaccacaacaactggcccccgggtggaggaggccatggagcggactattcgctgggtggatcgctgcatagaggcccatgcccgcgacgatgaccagtcgctgttccccatcgtccagggaggattggatgtgccgctgcgtcagcgttgcgtttccgctctcatggagcgccaggttcgaggcttcgccgtgggcgggctaagtggtggcgagagcaagcacgacttctggcgtatggtggacgtgtgcactggctatctgcccaaggacaagccgcgctacctgatgggcgtgggttttgcggcggatctggtggtctgcgtggccctgggcatcgatatgttcgactgtgtcttccccacccggacagctcgatttggttgcgccctggtggacagtgggcagctgaacctgaagcagcccaagtacaaactggacatggagcccattgacaaggactgcgactgcagcacgtgtaggcgttacacacgctcgtacctgcaccacatcgccaccaacgagagtgtctccagctccctgttgagcatacacaacgtggcctaccagctcaggctgatgaggagcatgcgggaggccattcagcgcgatgagttcccccagttcgtcgcggactttatggcgagacacttcaaggcggaacctgttccggcttggatacgagaagctctgtctgccgtaaacatccagctgcctgcggatccggagaggattgatgagcaggaccagaagccaaagaccgaaaagagacgggaaacagaggacgtggcggaggagcaggtggcctccagctaa

SEQ ID NO: 10158 - protein, 427 aa, DROSOPHILA
MGPSHIPPLTYKVVAECSVSKARAGLMTLRHSEVNTPVFMPVGTQGTLKGIVPDQLIELNCQILLGNTYHLGLRPGIETLKKAGGLHKFMGWPRAILTDSGGFQMVSLLQLAEIDEHGVNFRSPFDNSQCMLTPEHSIEIQNAIGGDIMMQLDDVVKTTTTGPRVEEAMERTIRWVDRCIEAHARDDDQSLFPIVQGGLDVPLRQRCVSALMERQVRGFAVGGLSGGESKHDFWRMVDVCTGYLPKDKPRYLMGVGFAADLVVCVALGIDMFDCVFPTRTARFGCALVDSGQLNLKQPKYKLDMEPIDKDCDCSTCRRYTRSYLHHIATNESVSSSLLSIHNVAYQLRLMRSMREAIQRDEFPQFVADFMARHFKAEPVPAWIREALSAVNIQLPADPERIDEQDQKPKTEKRRETEDVAEEQVASS

SEQ ID NO: 10159 - DNA, 12122 bp, DROSOPHILA
ccagttcgtcgcggactttatggcgagacacttcaaggcggaacctgttccggcttggatacgagaagctctgtctgccgtaaacatccagctgcctgcggatccggagaggattgatgagcaggaccagaagccaaagaccgaaaagagacgggaaacagaggacgtggcggaggagcaggtggcctccagctaacatcatcacatagcaacctttgtgttttgataacccaaagttccgactaagaggcatttcttaattgacacatacgttcatgtattttacatgtcaaatgtcatgtaagttattttcataagaataaatacttaattagacatagaataaaaaaggaaaaataaattacatcataaaattcaatcatactgtgtggatacaatttattttgcttattttatttttttgcttaaagttaaggttagtaggttagtctatcataccccatagcagggtagcagaatactggttttcatctctgctctgcccacgtttgttccgctcttgcgtaaagctctcgactcgttgttacctatgggaaaaagctccatgtagccatagtatgacgcatagtgcaaatcggtggcgatcgtggatctcgcgtggaacgaccgaccaatttgtgatattctacttgattttcgcctttgccacggcctcttttcgtccgttcttagagtaggtgtgcggtatgaatggagatgattgggaaacctctccacttggctcggagctctcttcagtgcttggcgcatatctgttttggactgaactctctgggggacaagagatacccgcgactcgagatctctgagagcgggagcgcgagatcggggcagtgaagtggtgctggtgctggtggcggtggtggtggtggtggtggtgctgctgctgctgctgctggttcggtggatcgttcagtgagtccccaagcgttgtcgcgtccactttatcgctgtttctgtcgcggattcgaaccactgactaacggtagtgctgcacgcatctggcggtaaattggcagcgagaagcccgcgctaataatacattctgaaagccgtcgaaaggattgcgagtccatatcaagcatacgcccgatcagccgccaatcgattgtaaggagccacccgaatttattgcttttccactgacaattaatcacggacttgctgtgcgtgtgtgtgcgtttgtgtgagtgctggagtggctagtgtgtgtgtgtgtgtgtgattttgtctcgtttcgtttgccaaatgtggtaaaagcgaataaaataaaatgaaaaaacatttcgaagtcgacaaacaatcgtgctttttatggcgctgtcgcctttgcttgtggccaggattccgattggagcattcgcggggagcggaaagaaccgaaaaaacccttatataaagtatacgccaagtatacctgccaagtccaaaagcgatattatttatatttttgtatttgccatcgtttttggctttggcctgtgtgtttttgaatttcatggtttcatttctttaaataagttttatttttagcacttttagttatttttgtgtatatgttttttttttgttctcaccaatttcgctgctgctgagttcagtttgcctgattattttccgaaatcttcatgccgattctttggaatattcatatggggcttccattctaaattctacagtgtgctcacaatgtgtgaagtgatttgtgtttttgaaattcggtttagttaaaggtgcccctagggtggaccacaaatcggggaatatatgtatgtggagagatcagagggaatcactttcaaaacacaaaatgtagtacttagtgtgtatagagttcagccaaacgaaccttccaaaataatcccataaataaactactcaaatgagtatttctgctttttttgatgtccactaactattgcctcatttttcaaacactcaaattcgctggccacaaaatcataaataaaaagtaaacacacaatggagccgattatgattgaaggcacttggcgaaaaagactgctggcctccaaacttaaagtcccagccaaatacaaataccaaggcaagtggccaataccaagtggcaacaaattaccagcgaagagtgtaaaaataaaaggaaaactctgatgattgccgctaatcataatcacaccagaatctctctgttcgaaccgctggctttttgtttttgcccagtatttataaattatgacacattcgcgagtggaagagaaaagatatgcggaggagagtacttttcgcatttcttcgcgctgccactcttcgaacagctgctgcgtgggcggaagactggcgggggcgtggtcgcagaattgttttgacggtcttcgagccgcagaacacatgcaaagttcgtcgtttttcgaaaagaaaaaacgagagtgagagctggcgccaattaagcaagtaattatggcgaaagacacaaggaaataaactttcgcggctttgtttgtggaaattgattaatttcaatctctcagtcgtcagctaaaaaaagctcgtcttaattatatgaattaatgaaccctgtttataagagcggaaattaaaatacagctcatcactcacttgggaagattcactcacttggcaagctaactgaaatccaaaaaagtgtattaaattgtaaattaaataaattcaatgttccataagccgaatactctgcaaataattctactaaaagcctgagtaaacatcattgcaacttattttaatcagagtgcccaacaaatcaacaaccatttttgcactaggaacgcatattccaaacagctgaaacaagtttttcaatcttttggtgaggcagcaatttgaatttaaaaatctttgctaatagttattctatgcaaaatggttgtttgcataaataaacggaaacggaatgcttgcctgcatgttttgccgcccagaaatcaatgctctttgcaaattagcacgaattccggcgaaaacagaggttcatctgcaagataaaccgcgccggaaaaacagaatcacctccaatcccatggaaatggctgagtgctgattcacttgtccaaacgacgagtagcatttctccaaaatcgaaaatgtttggctgcggattgtgtgggcgacttgctccgcgtccaaaggtaaactcgcttagtcattggacctatttttgcagcggatttgcgacttggaaacacccaccccagaaattggtagttaccttagaccttgggcggatttttggacatctaatgctgcttggcctaaacgatttgccttcggtcacggccgaatgttcgattcttgtcgcaaccatttttattctgagtgtgggtgaacaaacttcacggtgtttgatcggtttctggttggtttcgaatggttttaggccaaaaacattgccattcagccaatcgccatcagttgacaatgaatggcttttgttggtgactttgaaaaatacaaataaagggaaaaaacatgattcgcattcgtatctttgagagcgagagtaaaaggctggacttgaatgagattcatgggatcaagatttttgacaaccttgaatgctcagatttgtggaatgtagcaaaagataaatgaacggaaagttacaaattattatgaaaaaaaaagctggcaagtacttttttgaaatatacaaacatatatatatctatcagatacaaattggtaatgaagttttgcttaagtaagagatgtaacgaaagagctcttctaatccaaaaaactggtgtatatagttcaagtaaacttttgcctatttatcaatcaattagctctggttcgaatgtttaaagtggcgatcgggtttgtttatccgaggagacaaatgttgactgtggcattagtgagtgattttatctgagaaacctcaggccccaggcaataaataagagatccgaatggccacacataaatcactccaccaatttgaaattcgttcattattaaattcggattcttttaattccaatttccatttccatttctcaattttggcatgtgggcattagttgaggcaccgaacgggattgggaattaaagttgccgagtcgcgcactaataaatcaagttcaattcaattagtgcaatccggggacacaaacagttttcatttcctccagccccagttggcctctcataacctacgacaatttataatgctggcagaagtggaaagaaatgcaaatgcagatttgcaaaatgcaataaaccgggtgcggcatgcaacgaaatgacaatgaaacgttgcaaatgcaattcactaataacgcagcgtccaataaattgttaaacaaatgttgttcggcaatcaataaatgagctgccgccagtgtctggtgaataatacatgcggaagtgggtggctccgcccacccgaaacatgttgtaactgccataaaaagcggctttttatggccgaagtaatttccaatcggcatgaatttattttgcaccttaagcccgcaattttgcacgaaacaatggctataattcaataaagaatcataaagagaattattgaaacgcgtgcgaaaatctccgccgttaaaaaatacataattcaattatcggagtatgcaaaacatacatataaaacgcatagcataaacgcgccttgcgtaacatctctcgcatatctcattttatttatttgctaaaaagacagaaaaactttctttcaataaacgaaaatgttggcagtgtgtcgggggaaaattcagaaaaaaatatcaaaaatatctgcgaccttgtcccctgctcgctcaatatggcacacatttggaagcgatccggaatgtatctcacgatccgcgatccgccggcaattttgtgcacaatgactgcaatgactgactaatttctggacgggaatggaatggattggtttggaatggcgctgatcgcatcaatcgcccgctgtcaatatcgccaatagcaaatcttgcgtgcttcgttcccctccccatgaaaatctcaactcaaggcgcacatttggcgtcaaaattgtcaacgctatgtatctcgaaatgatattccaagatgaaatcagttaagtccaaggctggagagcgtttcgagtacggattgccggccgagtgttgacatcttgaatgctaatgaattttcgggacgcgatcttgaacttgagtgatgacaggccttctcagtgcaattaagatctcggcgatcatcatgtttatcatggatcatagaatgccgagatgttatgatagctgttgatcataaaaacaaaagagataaactactcgtaaatatatgtattatatacagacaatttatagtcgatgttttttatttccatcctccttaaaatcttattcccgcccagttataactataaatgcggcatgattgttgtggttgtgtacagattctgtcagattcccaagatgattaacttttcgcgatgaaaggtccagtgatcttcagtagattgatttattaggaaaccgcagtttcgtagatcgaagcaggaacagttttatgttacagctgtctccacgcccctgatagacttgtcaactgatcaagccatacgaatagttcgacgggctgttccaaccccagtgatctcgggatgtcataaatgtcatcgtcaattccaattcaaatggctcatgctaaactcaattggacaccccagatcttcagatctctcggagatgttatcgtcaatgcaaattggctcgcgagcaattctcatcgctgtaaacaagcgaaaatattaataatattaagtaaatggctgagttaaattatattatatattaaagtatccatcaataaagagtgtgtgtatttggtaagggtggtgagaagtgcgcatagaagagcttcaatgttccggaaagtgaataaatacttctagctggccggtctaaaattagtgaaaggcgtgggcggttcaacattgaaatttagtgacgcgtcttatgatccgaatggaactacctatacacagctaaatgtatatatacacaatttctcgactttttgcagatcttttgcgatagtagagcagtgaaacagccagagagaacgacaagatgcatgtgccattataaggataaagggaaggatagcaactaagcaggtcctcgttatatatggaaacccaaaactgatattattgtaggtaactagatacgctgagagaagcgatcccttctaataccatacccactccaattggcagatactagactacagtgaacttgagagtcaactctttacccacatacttagaacccactcgcccccgcccccagaagtaacctgcaatgggtaaggactactacaaaatcctgggtctgcccaaaactgccaccgacgatgagatcaaaaaggcctacaggaaactggccctgcgttatcatccggacaaaaacaaagccgccaacgccgaggacaagttcaaggaggtcgccgaggcgtacgaggttctttcggacaagagcaagcgggaggtgtacgacaaatacggcgaggatggtctcaagagcggaggtatgccaacacaccattaagtaccattcccatagctaaccttgaaatgctgacttgcaggcacacgaaacggcggtccgtcgagcaactcgtttacatatcagttccacggcgatccgcgggccaccttcgcccagttctttggcaacagcaatccgttcgcctcgttcttcgacatgggcgacaacctgttcgacaagaaggtcttcgatctggacacggaacccgatttcttctcctcgccctttggcggcattgggtcgcgacatggtctgggaagtggcttcaggttggtccatccccgcgcaggttgtactccctggaattccttgctcatctctcgcaggccctctttcagatcacactccttcaatgtgcacacgccgttcaagaaggagcagaagcaggatccgcccgtcgaacacgatctctatgtgacgctggaggagatctaccacggctgtgttaagaaaatgaaaatctcccggcgcatcgttcaggcggacggcagttcccgcaaggaggagaagttcctggcgatatccatcaagcccggctggaagtccggcaccaaggtcaccttccagaaggagggcgaccaggcgcccggaaaaattcccgccgacattgtgttcatcatccgggacaagccgcacgccatgttcaagcgcgagggcagcgatctgcgctacacggcgagactgacgctcaagcaggtgagtcctgatcctgatcctgatgtatccaatagcttgggatactatagactatagtattagcccttgctgattaagcacctcttaaccaacgcactgtggtcatgttcctcccaagattggtgcctcaattccacttcatcttaagagcccagttctcagagctgggttctcacagcttggcgtccaattagaggcgcagccagtgcctaaatcgaattgtaatgaaatcgggcagacgagatggttatggccagatttaccatatatatacgcgccgagcggcaaagcagccgccaaattggtcgacatggtcaagtttcaattaacggagacggagaatgggttttggccagcaggctgctccgtagattggctcccactgaggtgttagatttttacacggtcgccgaagcgcaaaacttcgcacagcattttttgtgggcagcagcccacttgggggttaaaaatatatggtcagattgaaaattttaaaaaggctcaaaactggccgagactggcgaacaagctgaaatgacacgccgctgagttggcagtcatgttaaaattgttaattgcattaagtagattaaatagttgagttggctgcctcgcagatttttaacattttattgcttgttagtgcgacaaatttagtaaatactttcgggctgctcgctcgctgccagccatttttggcatagttggccaaataatttcccactggctctgctttgaatttatgaattgcattttggctctggttttgagctaaaagtgtcatgttgctccctctatatagcaatatttgacacggttatttggcgccgagtggacaatgcgaatggttttaattgaaatatatttcggcctaaaagcgcatacatacatatgtatgtatgtatgaataataaaaatatctagatttacttgccaatctggttgatagaggccaataaatctgcgctccaagattccgctcgccccaatcgagcagccaaaaggcaattggagctccatatatgaccatccacataattgcgaacagcgttttccattttttttctgtcatattctgtgcggcagtaaatttaatgcgactcataaattacatcatcgtttacgataatatcgaagtcaatgagtttcgaattaatttcttgctgtacgtttttggtcttgtattgttttcattctgatgatatatagacttagcacgtatccgttttgaattttaaattctcgccagtatgtacgtatgtactttcgaaatttcgaaatcaaatttaacaatgcttttgttttcaagtgcctgcgtcagagttccgcaaatgcagcgaactaaaaccgatggacgattcaaggacttcaaggatgtgcgagtgtaaccagcaccatcctggtgctgtgtgtagttgatggccagacgttgttgttttcgatgtctgcccactggcattgtcattcgactgttggcccaaatgatttggagtcctttattttttatcctttttttttttggtaaaaaattggaagttctatagaaaaccatttgctagtcgagaacttcgtttgcattttgatgacagttgtcagctgctgggcaaaaaaagaggcggaataataatgccttatgacatgcgattgaatgctgttgatttgttttcacccccgcctgaaaatcggaaaagtcccacctaaaccttcacttctttcggcgagagtgattgtctagaacagtttggaaaaaaatggccaaaagcgaccataaactgcaagatatatgggggaatttatgttcgctgttctccgtttagctgagcctgacattcagatttatcatctagtaatgactctatacactcagagaaaaaaggggctaattcagcttgaaatgaatattattaccactgaaaattatgatgataatgaatttgcacacttgttattccaaactcatatcgaaaatgcatactattcactagccagcattatcaactgattttttctcagttcagctgagaacgggtttctatatccttatactaaactaccgatccagatacggatttatcgatggaagggcatttgtatgccctttattttcggatagcgccgctctggttttttatgttcagcttccgtaaaaggtagcaaagtatttaagctttttgtttttttggcggcaacaacattttcaacatttccattaaaaaatattgatgctggtcgtcgtcatcatggggacaggttgttgttgttgctgttttctgggtctgtcgtcatcagtttatgctgtcatcgcttcaaaatcgccagtcggcgatacaaatgtacgcacatctatatttaaatattcacaaggtgtgcactttggttttgtcgcaattttattgatgtccatagcgatttcttgttgaattcaaaactcatttttattttattgggttaggctcgggcagaacaacaactattgacaactatttaacacgtgtcgggcaagttctttggttacaaatcacttgtgacaagttatggaacggcacaaaatattatatcatccgttgttgggcatcgaaggggattgttccgattgcgggcttagatcaaaaacatttttttttcactttgtgttatctataaatcactgttgaggcggggattgacattccatttacgggttgttgtttatgggctatgtcgaaaagtttgaaacataaaggcgtatccagttcaaaatgtagctattcggacccgaaaggattaccatggatcatctgtcttcttgggggttccttatggatgacttcatcccaagacttgctaacgaggtgggaaagagcttaaagtgaaaagatttctttctgtttaataagcattgactaagtttgccatctgaattgataagataagccaccgtgctcaagtagcagaataccaattaaagcggaaaatatcgaagtattaaattaaaccatgttcatcacagaatttcctcggggaaaaggttcaatcaatagcagagtttcatcccagttcggatgggaattaattgagtaagccacataaatgtctgggccaaaagcagaacctgattgatgcccatcttttagtgggccaattaaacaagtcgtatgtcaaacggacgagccgcagtatcgatggaaaagcctggccgaaaataggagaaagtggacggaaaaggacatggcagcgtgtcaacaagatgtttaaacacgaattaggcaacatagaaaaggatttacaaatgttgtgttcgatacgagaccaaacaagcaattcgattcgattggtaaaagctcgaaggagctacaaaaagtcctccggtggccggggcacctaaacaggattacccggagaagattgatagattccactcggcggcggcagccatgtgtcgtgtttgctcatttcgggcttggttggaagagagtgcggaaaggagtgggggtatttgtcgaccttattgattgataagccaggaaccaaaataaatattatggagagtaaatacagaaggttgagttgtgcttgtgtaaaattggtgtgcatctcttttccacttacaggctttgtgcggcgttgtcttccaagttcctaccatgtccggcgacaagttgcgcatcagcaccatgcaggagatcatcaagccgaacacggtgaagcgcatccagggatacgggctgccattccccaaggatacgacgcgcaagggcgacctcctggtggccttcgacattcagttcccggagaagctgaccgccgcccagaaggaggtgctcaaggacatgttatgaggagggatcactggcctgatcactgaccgacgactccgatgcacccgcagtccttcggtgaatccagggacttagtcatccattcaaacgcactaaaaccaaaccgatcccattcattttgtaacaacccatcgagatcttgctcccattttgcttgtttttgtgttcagtgaaacatttgcgcattttttacaggaactccctcttaacaatcggttgtgctcatctgcgccgcgaacatgttgcataatatgtatgttgaccatagttattatatcattaaatcttaatttatttgtctaaattaaagctaaatttaataaaatgacacacacacgcgtacacgtgaaagaaaaaacaagcgaaatgccagagagtgttctttttgttttaaatgtttacttgtagttatatttcaaagatactctgcctgctgcatttctgtggagtcatgtttctgcaattgtaaagttttcccgctccacgggaaaagtgaaagtgaaatttgctccttggtaatcgcaatgcgtttggctaattagctgccgtttccactcggtcgcccccccagaaaacactcccatgtcaaacggaatgctgctcgttaagtcattaaaattgcatgaagtcaaaactttatggtctgcaaagtttgcgtcaaagccaacgaacaactaacccaaaaaaagaaggaaaatttcggaaagccgaaaaaatgaaacgggataaaagaatgctagaaagttggcagaagaagcaacttcaaagctgccaaatggtaattcgtttagcaagaaagccggcgacagacgggacttagacatcctcatcgccacgaacgcatttcatttgcagacaataaacagcagcagcagcagcagcagcagcaacaacaactcgagggcagagtaaataaattaaattttgaacaactctttgcatacaaaatagcgctggggagggacatcccagcttggccaaaaaaagattcgaaagcttg

SEQ ID NO: 10160 - DNA, 1356 bp, DROSOPHILA
ctaacggtagtgctgcacgcatctggcggtaaattggcagcgagaagcccgcgctaataatacattctgaaagccgtcgaaaggattgcgagtccatatcaagcatacgcccgatcagccgccaatcgattatcttttgcgatagtagagcagtgaaacagccagagagaacgacaagatgcatgtgccattataaggataaagggaaggatagcaactaagcaggtcctcgttatatatggaaacccaaaactgatattattatactagactacagtgaacttgagagtcaactctttacccacatacttagaacccactcgcccccgcccccagaagtaacctgcaatgggtaaggactactacaaaatcctgggtctgcccaaaactgccaccgacgatgagatcaaaaaggcctacaggaaactggccctgcgttatcatccggacaaaaacaaagccgccaacgccgaggacaagttcaaggaggtcgccgaggcgtacgaggttctttcggacaagagcaagcgggaggtgtacgacaaatacggcgaggatggtctcaagagcggaggcacacgaaacggcggtccgtcgagcaactcgtttacatatcagttccacggcgatccgcgggccaccttcgcccagttctttggcaacagcaatccgttcgcctcgttcttcgacatgggcgacaacctgttcgacaagaaggtcttcgatctggacacggaacccgatttcttctcctcgccctttggcggcattgggtcgcgacatggtctgggaagtggcttcagatcacactccttcaatgtgcacacgccgttcaagaaggagcagaagcaggatccgcccgtcgaacacgatctctatgtgacgctggaggagatctaccacggctgtgttaagaaaatgaaaatctcccggcgcatcgttcaggcggacggcagttcccgcaaggaggagaagttcctggcgatatccatcaagcccggctggaagtccggcaccaaggtcaccttccagaaggagggcgaccaggcgcccggaaaaattcccgccgacattgtgttcatcatccgggacaagccgcacgccatgttcaagcgcgagggcagcgatctgcgctacacggcgagactgacgctcaagcagatgtccggcgacaagttgcgcatcagcaccatgcaggagatcatcaagccgaacacggtgaagcgcatccagggatacgggctgccattccccaaggatacgacgcgcaagggcgacctcctggtggccttcgacattcagttcccggagaagctgaccgccgcccagaaggaggtgctcaaggacatgttatga

SEQ ID NO: 10161 - protein, 335 aa, DROSOPHILA
MGKDYYKILGLPKTATDDEIKKAYRKLALRYHPDKNKAANAEDKFKEVAEAYEVLSDKSKREVYDKYGEDGLKSGGTRNGGPSSNSFTYQFHGDPRATFAQFFGNSNPFASFFDMGDNLFDKKVFDLDTEPDFFSSPFGGIGSRHGLGSGFRSHSFNVHTPFKKEQKQDPPVEHDLYVTLEEIYHGCVKKMKISRRIVQADGSSRKEEKFLAISIKPGWKSGTKVTFQKEGDQAPGKIPADIVFIIRDKPHAMFKREGSDLRYTARLTLKQMSGDKLRISTMQEIIKPNTVKRIQGYGLPFPKDTTRKGDLLVAFDIQFPEKLTAAQKEVLKDML
